United States Patent Application Publication US 2005/0244851 A1 - sequence listing, part 108

SEQ ID NO: 4211359 - DNA, 25 bp, Homo sapien
ggatgcttgcagtaaatttttctag

SEQ ID NO: 4211360 - DNA, 25 bp, Homo sapien
ctggatgcttgcagtaaatttttct

SEQ ID NO: 4211361 - DNA, 25 bp, Homo sapien
tgtagcaagtacattagcttcaagt

SEQ ID NO: 4211362 - DNA, 25 bp, Homo sapien
gggctgtagcaagtacattagcttc

SEQ ID NO: 4211363 - DNA, 25 bp, Homo sapien
agcaagtacattagcttcaagttcc

SEQ ID NO: 4211364 - DNA, 25 bp, Homo sapien
gctgtagcaagtacattagcttcaa

SEQ ID NO: 4211365 - DNA, 25 bp, Homo sapien
tatgcttgcacaaatgggtcctcca

SEQ ID NO: 4211366 - DNA, 25 bp, Homo sapien
gacctaaaacaaagcctggccagta

SEQ ID NO: 4211367 - DNA, 25 bp, Homo sapien
ggcttctcaattgaccatcaggtac

SEQ ID NO: 4211368 - DNA, 25 bp, Homo sapien
tatagagctcctaacaaagtcaagg

SEQ ID NO: 4211369 - DNA, 25 bp, Homo sapien
tagggcacttccttgactactgagt

SEQ ID NO: 4211370 - DNA, 25 bp, Homo sapien
tcctgtgacaacgaagagtaaaagt

SEQ ID NO: 4211371 - DNA, 25 bp, Homo sapien
aaagttaaacacactagctcggctg

SEQ ID NO: 4211372 - DNA, 25 bp, Homo sapien
gatgaattagcgttccttcctgtga

SEQ ID NO: 4211373 - DNA, 25 bp, Homo sapien
caagtttgtcttgttgggccttgag

SEQ ID NO: 4211374 - DNA, 25 bp, Homo sapien
tattgtgtaagcgtttaacctcagc

SEQ ID NO: 4211375 - DNA, 25 bp, Homo sapien
tagtaatagcagaagcacattcatc

SEQ ID NO: 4211376 - DNA, 25 bp, Homo sapien
agtcttgattgctacttgggcttta

SEQ ID NO: 4211377 - DNA, 25 bp, Homo sapien
agttagggtaacatgcatactctac

SEQ ID NO: 4211378 - DNA, 25 bp, Homo sapien
tatggcatacctgtttaccagcctt

SEQ ID NO: 4211379 - DNA, 25 bp, Homo sapien
ttatggaacattacatagtaacccc

SEQ ID NO: 4211380 - DNA, 25 bp, Homo sapien
tataggttttccgtcatggaagtcc

SEQ ID NO: 4211381 - DNA, 25 bp, Homo sapien
tcagctctgctgttaggtcatccac

SEQ ID NO: 4211382 - DNA, 25 bp, Homo sapien
gctgctttgtcctcaagacttttca

SEQ ID NO: 4211383 - DNA, 25 bp, Homo sapien
ttctttacgacctctgctgctttgt

SEQ ID NO: 4211384 - DNA, 25 bp, Homo sapien
tatttctttctctgtacgcaagaca

SEQ ID NO: 4211385 - DNA, 25 bp, Homo sapien
tctatttgttcaagtttcaacttaa

SEQ ID NO: 4211386 - DNA, 25 bp, Homo sapien
gtttcaacttaatactaagtgcatc

SEQ ID NO: 4211387 - DNA, 25 bp, Homo sapien
agcagattgcgatgttctttctgga

SEQ ID NO: 4211388 - DNA, 25 bp, Homo sapien
ttatgttcagcaatgtgaccatcta

SEQ ID NO: 4211389 - DNA, 25 bp, Homo sapien
gacaccgggcttccaaaagtgcaat

SEQ ID NO: 4211390 - DNA, 25 bp, Homo sapien
gcgatggcaccgaggtttggtttca

SEQ ID NO: 4211391 - DNA, 25 bp, Homo sapien
ttctttttatactctgcgatggcac

SEQ ID NO: 4211392 - DNA, 25 bp, Homo sapien
tctgggcttagaaccgaaatctctt

SEQ ID NO: 4211393 - DNA, 25 bp, Homo sapien
gtgaaaagattatgatagggaaaat

SEQ ID NO: 4211394 - DNA, 25 bp, Homo sapien
ctgtgaaaagattatgatagggaaa

SEQ ID NO: 4211395 - DNA, 25 bp, Homo sapien
tgtgaaaagattatgatagggaaaa

SEQ ID NO: 4211396 - DNA, 25 bp, Homo sapien
agagaaaggatccaagctgtctaca

SEQ ID NO: 4211397 - DNA, 25 bp, Homo sapien
cattaagcctttgtttccgaagatc

SEQ ID NO: 4211398 - DNA, 25 bp, Homo sapien
tctacaagctcgagttcggcgtccc

SEQ ID NO: 4211399 - DNA, 25 bp, Homo sapien
gcctttgtttccgaagatcttcata

SEQ ID NO: 4211400 - DNA, 25 bp, Homo sapien
gagtgggcttgtagtggtgaagagc

SEQ ID NO: 4211401 - DNA, 25 bp, Homo sapien
cttgtagtggtgaagagcaaatact

SEQ ID NO: 4211402 - DNA, 25 bp, Homo sapien
tctcatccatgaagtaaaggggagt

SEQ ID NO: 4211403 - DNA, 25 bp, Homo sapien
agagcaaatactaaagccaatgaac

SEQ ID NO: 4211404 - DNA, 25 bp, Homo sapien
acattaagtaataacaggtaaatca

SEQ ID NO: 4211405 - DNA, 25 bp, Homo sapien
cattaagtaataacaggtaaatcac

SEQ ID NO: 4211406 - DNA, 25 bp, Homo sapien
gaagagaaattattatgaactgtgc

SEQ ID NO: 4211407 - DNA, 25 bp, Homo sapien
gtctatccgaaatctcaaacatatt

SEQ ID NO: 4211408 - DNA, 25 bp, Homo sapien
acaaagtcccttagatgcaatttct

SEQ ID NO: 4211409 - DNA, 25 bp, Homo sapien
tgtaaattccaataagtctatccga

SEQ ID NO: 4211410 - DNA, 25 bp, Homo sapien
cagtaatacactgaatcaacttgaa

SEQ ID NO: 4211411 - DNA, 25 bp, Homo sapien
tatacaactcataatcctttacaaa

SEQ ID NO: 4211412 - DNA, 25 bp, Homo sapien
tctagtttagggagtatgtatttta

SEQ ID NO: 4211413 - DNA, 25 bp, Homo sapien
aaaatcagtaatacactgaatcaac

SEQ ID NO: 4211414 - DNA, 25 bp, Homo sapien
tcaactggcaagctaagtggaatgc

SEQ ID NO: 4211415 - DNA, 25 bp, Homo sapien
caaaggcccacgaaggtatgctgag

SEQ ID NO: 4211416 - DNA, 25 bp, Homo sapien
tccagtgttggtaaatcaaaggccc

SEQ ID NO: 4211417 - DNA, 25 bp, Homo sapien
gctgagccttgatagcacaaccttg

SEQ ID NO: 4211418 - DNA, 25 bp, Homo sapien
gaaccagtgtaaatcagaggccatc

SEQ ID NO: 4211419 - DNA, 25 bp, Homo sapien
tttcaacttacgagatagcctaggc

SEQ ID NO: 4211420 - DNA, 25 bp, Homo sapien
cagtgggactacatcctggtaaacc

SEQ ID NO: 4211421 - DNA, 25 bp, Homo sapien
ccagaaatttaacagctagggcaga

SEQ ID NO: 4211422 - DNA, 25 bp, Homo sapien
gattagactatgctcctggccctac

SEQ ID NO: 4211423 - DNA, 25 bp, Homo sapien
tcttggatcaccgaagagccttacc

SEQ ID NO: 4211424 - DNA, 25 bp, Homo sapien
catatagctgtgagaaaacccatgc

SEQ ID NO: 4211425 - DNA, 25 bp, Homo sapien
gcatgtgttacgacttttggcccac

SEQ ID NO: 4211426 - DNA, 25 bp, Homo sapien
tagttgtctggtcatgactcactgc

SEQ ID NO: 4211427 - DNA, 25 bp, Homo sapien
tgtttgagatagatttaagagccct

SEQ ID NO: 4211428 - DNA, 25 bp, Homo sapien
gatggcatcatgtggactttattca

SEQ ID NO: 4211429 - DNA, 25 bp, Homo sapien
tgctcgtcagtcaaatcagttcttg

SEQ ID NO: 4211430 - DNA, 25 bp, Homo sapien
gagacctttacgaattccactcaag

SEQ ID NO: 4211431 - DNA, 25 bp, Homo sapien
tattactgaaattgctccaactggc

SEQ ID NO: 4211432 - DNA, 25 bp, Homo sapien
tcaagtgccctaattgcagaagtat

SEQ ID NO: 4211433 - DNA, 25 bp, Homo sapien
gaagatcctcgtgtactgccatgct

SEQ ID NO: 4211434 - DNA, 25 bp, Homo sapien
tggcagaaggtgaaaggcacgtctc

SEQ ID NO: 4211435 - DNA, 25 bp, Homo sapien
cagaaggtgaaaggcacgtctcaca

SEQ ID NO: 4211436 - DNA, 25 bp, Homo sapien
atgtagtgtattagtctgttttcat

SEQ ID NO: 4211437 - DNA, 25 bp, Homo sapien
gtagtgtattagtctgttttcatgc

SEQ ID NO: 4211438 - DNA, 25 bp, Homo sapien
cattatgctggcgaacattcttgct

SEQ ID NO: 4211439 - DNA, 25 bp, Homo sapien
agtgactcttccctaggctttcaca

SEQ ID NO: 4211440 - DNA, 25 bp, Homo sapien
ggctttcacagttgtcctggacttc

SEQ ID NO: 4211441 - DNA, 25 bp, Homo sapien
tggacttcatttcgccattatgctg

SEQ ID NO: 4211442 - DNA, 25 bp, Homo sapien
cttttctgaaaacacgatgaagcat

SEQ ID NO: 4211443 - DNA, 25 bp, Homo sapien
gcagctccagcaactgtgttggtgt

SEQ ID NO: 4211444 - DNA, 25 bp, Homo sapien
tcgtggcgctgtgtttccgtgctgt

SEQ ID NO: 4211445 - DNA, 25 bp, Homo sapien
taaggacctttacggatgcggagaa

SEQ ID NO: 4211446 - DNA, 25 bp, Homo sapien
tgtggagttgcctggtccgcttcct

SEQ ID NO: 4211447 - DNA, 25 bp, Homo sapien
agcatccgcctggagctcgtggcgc

SEQ ID NO: 4211448 - DNA, 25 bp, Homo sapien
ttcgaacgagcccagcaatagttcc

SEQ ID NO: 4211449 - DNA, 25 bp, Homo sapien
cgagcccagcaatagttcccattgg

SEQ ID NO: 4211450 - DNA, 25 bp, Homo sapien
ttcccattggccgatgccttgcagt

SEQ ID NO: 4211451 - DNA, 25 bp, Homo sapien
caatagttcccattggccgatgcct

SEQ ID NO: 4211452 - DNA, 25 bp, Homo sapien
ctgcctcgggccgcgccgtccaccg

SEQ ID NO: 4211453 - DNA, 25 bp, Homo sapien
tgcctcgggccgcgccgtccaccgt

SEQ ID NO: 4211454 - DNA, 25 bp, Homo sapien
cccgtgtggcgccaagtaaaagata

SEQ ID NO: 4211455 - DNA, 25 bp, Homo sapien
ctgcgaggccaagcttccgagaggc

SEQ ID NO: 4211456 - DNA, 25 bp, Homo sapien
ccgaagctccccacaggatagagag

SEQ ID NO: 4211457 - DNA, 25 bp, Homo sapien
ctgtgaggcaacgatggaagacact

SEQ ID NO: 4211458 - DNA, 25 bp, Homo sapien
tccctgagaatgtgtggcgacttcc

SEQ ID NO: 4211459 - DNA, 25 bp, Homo sapien
gacagatgtgggtgttccctgagaa

SEQ ID NO: 4211460 - DNA, 25 bp, Homo sapien
caggcgacagatgtgggtgttccct

SEQ ID NO: 4211461 - DNA, 25 bp, Homo sapien
ctgagaatgtgtggcgacttcccgg

SEQ ID NO: 4211462 - DNA, 25 bp, Homo sapien
tgagtacaaagagcgctccaaagcc

SEQ ID NO: 4211463 - DNA, 25 bp, Homo sapien
tctccggaatgcgtaaacaaaagca

SEQ ID NO: 4211464 - DNA, 25 bp, Homo sapien
tgagtttcccactcgctcttggagt

SEQ ID NO: 4211465 - DNA, 25 bp, Homo sapien
ccagtgctccggtgggtcaggtctc

SEQ ID NO: 4211466 - DNA, 25 bp, Homo sapien
ttggaatgctaaccccatttggagc

SEQ ID NO: 4211467 - DNA, 25 bp, Homo sapien
taggaggaccaaaccataccagaga

SEQ ID NO: 4211468 - DNA, 25 bp, Homo sapien
aagcctaggacctggatgtactgca

SEQ ID NO: 4211469 - DNA, 25 bp, Homo sapien
gaagtgttgagttggacagccctca

SEQ ID NO: 4211470 - DNA, 25 bp, Homo sapien
tagaggaggccggcgatcgacacca

SEQ ID NO: 4211471 - DNA, 25 bp, Homo sapien
aggaagtaggcgagaaacacgttct

SEQ ID NO: 4211472 - DNA, 25 bp, Homo sapien
cagcgcgtagaggaggccggcgatc

SEQ ID NO: 4211473 - DNA, 25 bp, Homo sapien
aagtaggcgagaaacacgttcttca

SEQ ID NO: 4211474 - DNA, 25 bp, Homo sapien
tggccgtcggagttccgcttgcagc

SEQ ID NO: 4211475 - DNA, 25 bp, Homo sapien
tcagatccttctgccgtagctgctc

SEQ ID NO: 4211476 - DNA, 25 bp, Homo sapien
gttccgcttgcagctgggaaatcct

SEQ ID NO: 4211477 - DNA, 25 bp, Homo sapien
tcctcagatccttctgccgtagctg

SEQ ID NO: 4211478 - DNA, 25 bp, Homo sapien
caggctcagtgtctgggacagccgt

SEQ ID NO: 4211479 - DNA, 25 bp, Homo sapien
ggctcagtgtctgggacagccgtac

SEQ ID NO: 4211480 - DNA, 25 bp, Homo sapien
aggctcagtgtctgggacagccgta

SEQ ID NO: 4211481 - DNA, 25 bp, Homo sapien
agcagccctgagaccagcggggtgg

SEQ ID NO: 4211482 - DNA, 25 bp, Homo sapien
tttgggcgtgaggaccaccaggtgt

SEQ ID NO: 4211483 - DNA, 25 bp, Homo sapien
cctcccgaagccgctgggctttggg

SEQ ID NO: 4211484 - DNA, 25 bp, Homo sapien
tgggctttgggcgtgaggaccacca

SEQ ID NO: 4211485 - DNA, 25 bp, Homo sapien
gactccttgggtccctggtggtgat

SEQ ID NO: 4211486 - DNA, 25 bp, Homo sapien
agcactccctctgccccggagccag

SEQ ID NO: 4211487 - DNA, 25 bp, Homo sapien
gccccggagccagtccagggccttg

SEQ ID NO: 4211488 - DNA, 25 bp, Homo sapien
ggtgatgggtccttcttcccaccca

SEQ ID NO: 4211489 - DNA, 25 bp, Homo sapien
cagctgtaggtgttgccactgtcag

SEQ ID NO: 4211490 - DNA, 25 bp, Homo sapien
agtgcagttggcagcccgtggctcc

SEQ ID NO: 4211491 - DNA, 25 bp, Homo sapien
ctccaggtccttgggatccacaagg

SEQ ID NO: 4211492 - DNA, 25 bp, Homo sapien
ctcccatgctgtgtggaagcccact

SEQ ID NO: 4211493 - DNA, 25 bp, Homo sapien
acactgagacaccacgggtccagcg

SEQ ID NO: 4211494 - DNA, 25 bp, Homo sapien
ctcaattgctgggtctgagccctgg

SEQ ID NO: 4211495 - DNA, 25 bp, Homo sapien
tccttctgcttcatcttgggcttcg

SEQ ID NO: 4211496 - DNA, 25 bp, Homo sapien
gagccctggccctgccgctgcagct

SEQ ID NO: 4211497 - DNA, 25 bp, Homo sapien
gctccttctgcttcatcttgggctt

SEQ ID NO: 4211498 - DNA, 25 bp, Homo sapien
ggcttcaagcggtcaggacttggaa

SEQ ID NO: 4211499 - DNA, 25 bp, Homo sapien
ctataattacggtgccagctgctgc

SEQ ID NO: 4211500 - DNA, 25 bp, Homo sapien
cactcccactataattacggtgcca

SEQ ID NO: 4211501 - DNA, 25 bp, Homo sapien
tcacagattcactcccactataatt

SEQ ID NO: 4211502 - DNA, 25 bp, Homo sapien
gattcactcccactataattacggt

SEQ ID NO: 4211503 - DNA, 25 bp, Homo sapien
ttagacttgtgttatgggcttcctc

SEQ ID NO: 4211504 - DNA, 25 bp, Homo sapien
tccactctgattaacccatccacat

SEQ ID NO: 4211505 - DNA, 25 bp, Homo sapien
acttgtgttatgggcttcctccact

SEQ ID NO: 4211506 - DNA, 25 bp, Homo sapien
actctgattaacccatccacatgct

SEQ ID NO: 4211507 - DNA, 25 bp, Homo sapien
gcttttaggccacgctctctcagtg

SEQ ID NO: 4211508 - DNA, 25 bp, Homo sapien
tggctcctgtgcttttaggccacgc

SEQ ID NO: 4211509 - DNA, 25 bp, Homo sapien
ttactgttcaccgttgtagcccagt

SEQ ID NO: 4211510 - DNA, 25 bp, Homo sapien
accgttgtagcccagttgtcctcag

SEQ ID NO: 4211511 - DNA, 25 bp, Homo sapien
tccctgttttctttttgcaattctc

SEQ ID NO: 4211512 - DNA, 25 bp, Homo sapien
ctatccctgttttctttttgcaatt

SEQ ID NO: 4211513 - DNA, 25 bp, Homo sapien
cctgttttctttttgcaattctcag

SEQ ID NO: 4211514 - DNA, 25 bp, Homo sapien
tatccctgttttctttttgcaattc

SEQ ID NO: 4211515 - DNA, 25 bp, Homo sapien
tcactgataaaactcgcacttctgc

SEQ ID NO: 4211516 - DNA, 25 bp, Homo sapien
tattccgccacacatctagtaagcc

SEQ ID NO: 4211517 - DNA, 25 bp, Homo sapien
ttttacttgccgatgtgctgccttc

SEQ ID NO: 4211518 - DNA, 25 bp, Homo sapien
cttcataaatgggtatattccgcca

SEQ ID NO: 4211519 - DNA, 25 bp, Homo sapien
tagagtgcaggctaggctgtcttgg

SEQ ID NO: 4211520 - DNA, 25 bp, Homo sapien
gcagcagaaaactagcttgtaaaat

SEQ ID NO: 4211521 - DNA, 25 bp, Homo sapien
gtaaaatttatccaagtagagtgca

SEQ ID NO: 4211522 - DNA, 25 bp, Homo sapien
cagcagaaaactagcttgtaaaatt

SEQ ID NO: 4211523 - DNA, 25 bp, Homo sapien
ataagaaacataccagattagccac

SEQ ID NO: 4211524 - DNA, 25 bp, Homo sapien
ctataagaaacataccagattagcc

SEQ ID NO: 4211525 - DNA, 25 bp, Homo sapien
tataagaaacataccagattagcca

SEQ ID NO: 4211526 - DNA, 25 bp, Homo sapien
gaactctttataaggtggctcattg

SEQ ID NO: 4211527 - DNA, 25 bp, Homo sapien
cagttttgaggttatgcacactaaa

SEQ ID NO: 4211528 - DNA, 25 bp, Homo sapien
tcattgtaggaaatcctgtgccttc

SEQ ID NO: 4211529 - DNA, 25 bp, Homo sapien
aaagaactctttataaggtggctca

SEQ ID NO: 4211530 - DNA, 25 bp, Homo sapien
ccatgaacaatctattttgagccac

SEQ ID NO: 4211531 - DNA, 25 bp, Homo sapien
tgcataaaagttatgcaagtggttt

SEQ ID NO: 4211532 - DNA, 25 bp, Homo sapien
tattttgagccactttagggagaaa

SEQ ID NO: 4211533 - DNA, 25 bp, Homo sapien
gtaggcagccatgaacaatctattt

SEQ ID NO: 4211534 - DNA, 25 bp, Homo sapien
gaacgcatgcaagcttgattcacct

SEQ ID NO: 4211535 - DNA, 25 bp, Homo sapien
tctttgcatgaggtaaatctacagc

SEQ ID NO: 4211536 - DNA, 25 bp, Homo sapien
cattggtttactctgcagcctgtgt

SEQ ID NO: 4211537 - DNA, 25 bp, Homo sapien
caaagactggtttagcagcagacat

SEQ ID NO: 4211538 - DNA, 25 bp, Homo sapien
tgttccagaggcaattcaaggcgga

SEQ ID NO: 4211539 - DNA, 25 bp, Homo sapien
aagttaggtacaatgcagcactgag

SEQ ID NO: 4211540 - DNA, 25 bp, Homo sapien
tcaagcttggctcatgggatctgct

SEQ ID NO: 4211541 - DNA, 25 bp, Homo sapien
gctgctgcattaaatcgggaaagaa

SEQ ID NO: 4211542 - DNA, 25 bp, Homo sapien
tctcatgctcatattagcatttggg

SEQ ID NO: 4211543 - DNA, 25 bp, Homo sapien
tatcgcaattacagcatgaggctgg

SEQ ID NO: 4211544 - DNA, 25 bp, Homo sapien
taaattgtccaaaatcaaatagcaa

SEQ ID NO: 4211545 - DNA, 25 bp, Homo sapien
tgtatgccatatcatctctcatgct

SEQ ID NO: 4211546 - DNA, 25 bp, Homo sapien
tacatataaagtctaaagggttata

SEQ ID NO: 4211547 - DNA, 25 bp, Homo sapien
tctaaagggttatacaaagctgtca

SEQ ID NO: 4211548 - DNA, 25 bp, Homo sapien
aagtctaaagggttatacaaagctg

SEQ ID NO: 4211549 - DNA, 25 bp, Homo sapien
catataaagtctaaagggttataca

SEQ ID NO: 4211550 - DNA, 25 bp, Homo sapien
gcctctgctagcgcgccgggaagtt

SEQ ID NO: 4211551 - DNA, 25 bp, Homo sapien
ggaagtttatgtcgggcctgctccg

SEQ ID NO: 4211552 - DNA, 25 bp, Homo sapien
ctagcgcgccgggaagtttatgtcg

SEQ ID NO: 4211553 - DNA, 25 bp, Homo sapien
ccgggaagtttatgtcgggcctgct

SEQ ID NO: 4211554 - DNA, 25 bp, Homo sapien
ttgtctttgccggagctgcagtcgc

SEQ ID NO: 4211555 - DNA, 25 bp, Homo sapien
agcctggttagccaatgggcgagcc

SEQ ID NO: 4211556 - DNA, 25 bp, Homo sapien
gcagcacattccgtcgccttgccgc

SEQ ID NO: 4211557 - DNA, 25 bp, Homo sapien
tctcagccggcagcacattccgtcg

SEQ ID NO: 4211558 - DNA, 25 bp, Homo sapien
cttcctggacgagtggagcaaaaca

SEQ ID NO: 4211559 - DNA, 25 bp, Homo sapien
gagcgcaaggaatgcccaggaagac

SEQ ID NO: 4211560 - DNA, 25 bp, Homo sapien
tccccttaagtctacttctctattg

SEQ ID NO: 4211561 - DNA, 25 bp, Homo sapien
ctgcaaagcgaacggagagcgcaag

SEQ ID NO: 4211562 - DNA, 25 bp, Homo sapien
cgtccgaccgggagacagcgaagct

SEQ ID NO: 4211563 - DNA, 25 bp, Homo sapien
aacgcagctgcgagcgtccgaccgg

SEQ ID NO: 4211564 - DNA, 25 bp, Homo sapien
ccgggagacagcgaagctcagatct

SEQ ID NO: 4211565 - DNA, 25 bp, Homo sapien
agcccgggaacgcagctgcgagcgt

SEQ ID NO: 4211566 - DNA, 25 bp, Homo sapien
ctttcctgtcgctttccgctgagcc

SEQ ID NO: 4211567 - DNA, 25 bp, Homo sapien
tcctgtcgctttccgctgagcctcc

SEQ ID NO: 4211568 - DNA, 25 bp, Homo sapien
tttcctgtcgctttccgctgagcct

SEQ ID NO: 4211569 - DNA, 25 bp, Homo sapien
ttcctgtcgctttccgctgagcctc

SEQ ID NO: 4211570 - DNA, 25 bp, Homo sapien
gaagtgctattgtcccaggatcacc

SEQ ID NO: 4211571 - DNA, 25 bp, Homo sapien
tactagaaaggaccgagagtcaacg

SEQ ID NO: 4211572 - DNA, 25 bp, Homo sapien
gattccttgcttccgacccgagttg

SEQ ID NO: 4211573 - DNA, 25 bp, Homo sapien
caaagtgatccctaaagtactccgg

SEQ ID NO: 4211574 - DNA, 25 bp, Homo sapien
ctcgggttgttgtttaatcatcaga

SEQ ID NO: 4211575 - DNA, 25 bp, Homo sapien
aactcttttttaggagtcttctgca

SEQ ID NO: 4211576 - DNA, 25 bp, Homo sapien
tcagctggtaactaattacaactct

SEQ ID NO: 4211577 - DNA, 25 bp, Homo sapien
aatcatcagagacactcagttgtag

SEQ ID NO: 4211578 - DNA, 25 bp, Homo sapien
atggttcttgacttcagagagctta

SEQ ID NO: 4211579 - DNA, 25 bp, Homo sapien
gccaagtactattaggtgctgagta

SEQ ID NO: 4211580 - DNA, 25 bp, Homo sapien
agctgcttcttgatctcaatccaca

SEQ ID NO: 4211581 - DNA, 25 bp, Homo sapien
tagtccctgagtacttatgtgccaa

SEQ ID NO: 4211582 - DNA, 25 bp, Homo sapien
gcactgggcccactagtgtaggggt

SEQ ID NO: 4211583 - DNA, 25 bp, Homo sapien
gtggtgatgcctcgcatactgctgg

SEQ ID NO: 4211584 - DNA, 25 bp, Homo sapien
ggtgatgcctcgcatactgctggcc

SEQ ID NO: 4211585 - DNA, 25 bp, Homo sapien
tggtgatgcctcgcatactgctggc

SEQ ID NO: 4211586 - DNA, 25 bp, Homo sapien
ggtggtgatgcctcgcatactgctg

SEQ ID NO: 4211587 - DNA, 25 bp, Homo sapien
ggctccacttggtctccagcacctt

SEQ ID NO: 4211588 - DNA, 25 bp, Homo sapien
tgctgctccaggaaccatacctggt

SEQ ID NO: 4211589 - DNA, 25 bp, Homo sapien
ccatgttgctcccagccatcttgtg

SEQ ID NO: 4211590 - DNA, 25 bp, Homo sapien
ccagccatcttgtgctgctgcagaa

SEQ ID NO: 4211591 - DNA, 25 bp, Homo sapien
tggctccagcagccgcctaaggttg

SEQ ID NO: 4211592 - DNA, 25 bp, Homo sapien
cctggctccagcagccgcctaaggt

SEQ ID NO: 4211593 - DNA, 25 bp, Homo sapien
ctcctggctccagcagccgcctaag

SEQ ID NO: 4211594 - DNA, 25 bp, Homo sapien
ttctcctggctccagcagccgccta

SEQ ID NO: 4211595 - DNA, 25 bp, Homo sapien
ccacttcatacagtcggcccttcca

SEQ ID NO: 4211596 - DNA, 25 bp, Homo sapien
tctccacttcatacagtcggccctt

SEQ ID NO: 4211597 - DNA, 25 bp, Homo sapien
ctccacttcatacagtcggcccttc

SEQ ID NO: 4211598 - DNA, 25 bp, Homo sapien
tccacttcatacagtcggcccttcc

SEQ ID NO: 4211599 - DNA, 25 bp, Homo sapien
cttgtactgcctctttacctcagtg

SEQ ID NO: 4211600 - DNA, 25 bp, Homo sapien
tactgcctctttacctcagtgatga

SEQ ID NO: 4211601 - DNA, 25 bp, Homo sapien
tccttgtactgcctctttacctcag

SEQ ID NO: 4211602 - DNA, 25 bp, Homo sapien
tgtactgcctctttacctcagtgat

SEQ ID NO: 4211603 - DNA, 25 bp, Homo sapien
tctgtaggtggcgacctccatttcc

SEQ ID NO: 4211604 - DNA, 25 bp, Homo sapien
gtggcgacctccatttccaggccag

SEQ ID NO: 4211605 - DNA, 25 bp, Homo sapien
taggtggcgacctccatttccaggc

SEQ ID NO: 4211606 - DNA, 25 bp, Homo sapien
ctttctgtaggtggcgacctccatt

SEQ ID NO: 4211607 - DNA, 25 bp, Homo sapien
gaggtcacgagttgtgaggcccaca

SEQ ID NO: 4211608 - DNA, 25 bp, Homo sapien
tcacgagttgtgaggcccacatagg

SEQ ID NO: 4211609 - DNA, 25 bp, Homo sapien
cacgagttgtgaggcccacataggc

SEQ ID NO: 4211610 - DNA, 25 bp, Homo sapien
ggtcacgagttgtgaggcccacata

SEQ ID NO: 4211611 - DNA, 25 bp, Homo sapien
gcttcccatcgcgggtctcgatctt

SEQ ID NO: 4211612 - DNA, 25 bp, Homo sapien
accagcttcccatcgcgggtctcga

SEQ ID NO: 4211613 - DNA, 25 bp, Homo sapien
ttgggcaggaagtcagaggactcag

SEQ ID NO: 4211614 - DNA, 25 bp, Homo sapien
tgggcaggaagtcagaggactcaga

SEQ ID NO: 4211615 - DNA, 25 bp, Homo sapien
gcagccacgggaggggcagactagg

SEQ ID NO: 4211616 - DNA, 25 bp, Homo sapien
tccctcctggagtctgtggcagcca

SEQ ID NO: 4211617 - DNA, 25 bp, Homo sapien
ggtctcctgttgtctgtgcttcccc

SEQ ID NO: 4211618 - DNA, 25 bp, Homo sapien
cagactaggaggagctgccacagtt

SEQ ID NO: 4211619 - DNA, 25 bp, Homo sapien
aaaaaccacaattgttttctagctg

SEQ ID NO: 4211620 - DNA, 25 bp, Homo sapien
ttttttttgtggtggagctagctga

SEQ ID NO: 4211621 - DNA, 25 bp, Homo sapien
cagacagtaaactcccccacgggtg

SEQ ID NO: 4211622 - DNA, 25 bp, Homo sapien
ttttgtggtggagctagctgaggtt

SEQ ID NO: 4211623 - DNA, 25 bp, Homo sapien
caaatagcctattgcaaaacaggtc

SEQ ID NO: 4211624 - DNA, 25 bp, Homo sapien
gaaatgagagcttgctccctggcta

SEQ ID NO: 4211625 - DNA, 25 bp, Homo sapien
taagccccaatgtgatggcgttaag

SEQ ID NO: 4211626 - DNA, 25 bp, Homo sapien
gatcagtgcccgtataacagaaatg

SEQ ID NO: 4211627 - DNA, 25 bp, Homo sapien
ctttccacaatacatagcagattgg

SEQ ID NO: 4211628 - DNA, 25 bp, Homo sapien
cacaatacatagcagattgggaata

SEQ ID NO: 4211629 - DNA, 25 bp, Homo sapien
tttccacaatacatagcagattggg

SEQ ID NO: 4211630 - DNA, 25 bp, Homo sapien
tccacaatacatagcagattgggaa

SEQ ID NO: 4211631 - DNA, 25 bp, Homo sapien
tcaatctttgatttactggctgaat

SEQ ID NO: 4211632 - DNA, 25 bp, Homo sapien
tgatttactggctgaatacttcctc

SEQ ID NO: 4211633 - DNA, 25 bp, Homo sapien
tcttttcaatctttgatttactggc

SEQ ID NO: 4211634 - DNA, 25 bp, Homo sapien
ctttgatttactggctgaatacttc

SEQ ID NO: 4211635 - DNA, 25 bp, Homo sapien
gcaaagtgtaaccacctgagtacct

SEQ ID NO: 4211636 - DNA, 25 bp, Homo sapien
caaagtgtaaccacctgagtacctt

SEQ ID NO: 4211637 - DNA, 25 bp, Homo sapien
atagctatgcattttgcaaagtgta

SEQ ID NO: 4211638 - DNA, 25 bp, Homo sapien
taatagctatgcattttgcaaagtg

SEQ ID NO: 4211639 - DNA, 25 bp, Homo sapien
ccattcagtgtttctgctaacagca

SEQ ID NO: 4211640 - DNA, 25 bp, Homo sapien
accattcagtgtttctgctaacagc

SEQ ID NO: 4211641 - DNA, 25 bp, Homo sapien
taccgaatagagtttaagaatagca

SEQ ID NO: 4211642 - DNA, 25 bp, Homo sapien
caaagataagctgcatcagggactg

SEQ ID NO: 4211643 - DNA, 25 bp, Homo sapien
actgcacaaccaccttggtggagtc

SEQ ID NO: 4211644 - DNA, 25 bp, Homo sapien
ttcaggaaatgctaccgaatagagt

SEQ ID NO: 4211645 - DNA, 25 bp, Homo sapien
gcacagtctccattagaaggagcca

SEQ ID NO: 4211646 - DNA, 25 bp, Homo sapien
actactctgtatgaaactgtgatgg

SEQ ID NO: 4211647 - DNA, 25 bp, Homo sapien
gagcctcttgacaacattaggtgag

SEQ ID NO: 4211648 - DNA, 25 bp, Homo sapien
caataaaaaggttagtggttgtcag

SEQ ID NO: 4211649 - DNA, 25 bp, Homo sapien
gacttaactgtatacaacattctgg

SEQ ID NO: 4211650 - DNA, 25 bp, Homo sapien
gcagcagaggtatagggcagactac

SEQ ID NO: 4211651 - DNA, 25 bp, Homo sapien
acacattttggatgcaggcagacag

SEQ ID NO: 4211652 - DNA, 25 bp, Homo sapien
cactgcctgtatgggctgaaagtct

SEQ ID NO: 4211653 - DNA, 25 bp, Homo sapien
taggaggagcatgctggcattatcc

SEQ ID NO: 4211654 - DNA, 25 bp, Homo sapien
tttgactgcactactgcttaagctc

SEQ ID NO: 4211655 - DNA, 25 bp, Homo sapien
gaatttagggactttgactgcacta

SEQ ID NO: 4211656 - DNA, 25 bp, Homo sapien
tactgcttaagctctttctcacctc

SEQ ID NO: 4211657 - DNA, 25 bp, Homo sapien
aaggtgaatttagggactttgactg

SEQ ID NO: 4211658 - DNA, 25 bp, Homo sapien
tagaggaacctgaaggttcagacac

SEQ ID NO: 4211659 - DNA, 25 bp, Homo sapien
tttcaggtgctagaaatctagagga

SEQ ID NO: 4211660 - DNA, 25 bp, Homo sapien
cctgaaggttcagacacgcagagga

SEQ ID NO: 4211661 - DNA, 25 bp, Homo sapien
tttctttcaggtgctagaaatctag

SEQ ID NO: 4211662 - DNA, 25 bp, Homo sapien
tctttcttcgaatggccagagacaa

SEQ ID NO: 4211663 - DNA, 25 bp, Homo sapien
caagaacctagatgtgtttatgttg

SEQ ID NO: 4211664 - DNA, 25 bp, Homo sapien
caaattcttcatgctgtattctaag

SEQ ID NO: 4211665 - DNA, 25 bp, Homo sapien
cttcatgctgtattctaagaacaag

SEQ ID NO: 4211666 - DNA, 25 bp, Homo sapien
caaaagaagaacttgggcttgtttg

SEQ ID NO: 4211667 - DNA, 25 bp, Homo sapien
tgcggatttttagaacccagcgaac

SEQ ID NO: 4211668 - DNA, 25 bp, Homo sapien
tttgcggatttttagaacccagcga

SEQ ID NO: 4211669 - DNA, 25 bp, Homo sapien
ttgcggatttttagaacccagcgaa

SEQ ID NO: 4211670 - DNA, 25 bp, Homo sapien
ttataaaggagagtagacttcccag

SEQ ID NO: 4211671 - DNA, 25 bp, Homo sapien
ggatggtggtaatatccttagcaag

SEQ ID NO: 4211672 - DNA, 25 bp, Homo sapien
catcccagactgtgagtgaaagatt

SEQ ID NO: 4211673 - DNA, 25 bp, Homo sapien
aactcgatcatttccacattgaaac

SEQ ID NO: 4211674 - DNA, 25 bp, Homo sapien
gaaacctattgtagggatggtggta

SEQ ID NO: 4211675 - DNA, 25 bp, Homo sapien
gcccatcggtgttctcacagtaaca

SEQ ID NO: 4211676 - DNA, 25 bp, Homo sapien
caggcatgtcttgtttgttggctaa

SEQ ID NO: 4211677 - DNA, 25 bp, Homo sapien
gtactgtccacaacatacaccagcc

SEQ ID NO: 4211678 - DNA, 25 bp, Homo sapien
tgagactcttccagtcgctgtttgt

SEQ ID NO: 4211679 - DNA, 25 bp, Homo sapien
ctgtgagggcacagcagggttgcac

SEQ ID NO: 4211680 - DNA, 25 bp, Homo sapien
tgagggcacagcagggttgcacata

SEQ ID NO: 4211681 - DNA, 25 bp, Homo sapien
tgtgagggcacagcagggttgcaca

SEQ ID NO: 4211682 - DNA, 25 bp, Homo sapien
gagggcacagcagggttgcacatac

SEQ ID NO: 4211683 - DNA, 25 bp, Homo sapien
ttctgcttgaagaacgccaaagtgt

SEQ ID NO: 4211684 - DNA, 25 bp, Homo sapien
ctgcttgaagaacgccaaagtgtct

SEQ ID NO: 4211685 - DNA, 25 bp, Homo sapien
tgaagaacgccaaagtgtctcctct

SEQ ID NO: 4211686 - DNA, 25 bp, Homo sapien
cttgaagaacgccaaagtgtctcct

SEQ ID NO: 4211687 - DNA, 25 bp, Homo sapien
gtagagacttggatttttcgcagcc

SEQ ID NO: 4211688 - DNA, 25 bp, Homo sapien
tgtagagacttggatttttcgcagc

SEQ ID NO: 4211689 - DNA, 25 bp, Homo sapien
cccagctgttacataggagcacggt

SEQ ID NO: 4211690 - DNA, 25 bp, Homo sapien
tatttggtcccaagtgtcactacta

SEQ ID NO: 4211691 - DNA, 25 bp, Homo sapien
ggagcacggtggaaattcaatacct

SEQ ID NO: 4211692 - DNA, 25 bp, Homo sapien
tgatcattgccacagtttgctaaag

SEQ ID NO: 4211693 - DNA, 25 bp, Homo sapien
aggaagttcccagcaatagatttca

SEQ ID NO: 4211694 - DNA, 25 bp, Homo sapien
gcagtgctcagatctttgctgaaca

SEQ ID NO: 4211695 - DNA, 25 bp, Homo sapien
agtgctcagatctttgctgaacaaa

SEQ ID NO: 4211696 - DNA, 25 bp, Homo sapien
aggcagtgctcagatctttgctgaa

SEQ ID NO: 4211697 - DNA, 25 bp, Homo sapien
cagtgctcagatctttgctgaacaa

SEQ ID NO: 4211698 - DNA, 25 bp, Homo sapien
tgtgtgggccaggagtagggtctaa

SEQ ID NO: 4211699 - DNA, 25 bp, Homo sapien
cgtcagtgcgctgtgtgggccagga

SEQ ID NO: 4211700 - DNA, 25 bp, Homo sapien
gacgtcagtgcgctgtgtgggccag

SEQ ID NO: 4211701 - DNA, 25 bp, Homo sapien
tgggccaggagtagggtctaatcat

SEQ ID NO: 4211702 - DNA, 25 bp, Homo sapien
tgacgtcagcatcagcatgcatcag

SEQ ID NO: 4211703 - DNA, 25 bp, Homo sapien
ggtgacgtcagcatcagcatgcatc

SEQ ID NO: 4211704 - DNA, 25 bp, Homo sapien
gggtgacgtcagcatcagcatgcat

SEQ ID NO: 4211705 - DNA, 25 bp, Homo sapien
gtgacgtcagcatcagcatgcatca

SEQ ID NO: 4211706 - DNA, 25 bp, Homo sapien
tttagcccatcgtgattattacaaa

SEQ ID NO: 4211707 - DNA, 25 bp, Homo sapien
aatgtttagcccatcgtgattatta

SEQ ID NO: 4211708 - DNA, 25 bp, Homo sapien
tgtttagcccatcgtgattattaca

SEQ ID NO: 4211709 - DNA, 25 bp, Homo sapien
tagcccatcgtgattattacaaaat

SEQ ID NO: 4211710 - DNA, 25 bp, Homo sapien
cccaagaggagatgtaatccgatca

SEQ ID NO: 4211711 - DNA, 25 bp, Homo sapien
ggcccaactgcccaagaggagatgt

SEQ ID NO: 4211712 - DNA, 25 bp, Homo sapien
tcatagttataacttccttgggcag

SEQ ID NO: 4211713 - DNA, 25 bp, Homo sapien
taatccgatcatagttataacttcc

SEQ ID NO: 4211714 - DNA, 25 bp, Homo sapien
gtggctttccggcatgacaatagtt

SEQ ID NO: 4211715 - DNA, 25 bp, Homo sapien
catgaatagccaggctctttccatt

SEQ ID NO: 4211716 - DNA, 25 bp, Homo sapien
tcatgaatagccaggctctttccat

SEQ ID NO: 4211717 - DNA, 25 bp, Homo sapien
ttgctcagctggcactgatggcacc

SEQ ID NO: 4211718 - DNA, 25 bp, Homo sapien
cagctggcactgatggcacccaggt

SEQ ID NO: 4211719 - DNA, 25 bp, Homo sapien
ctcagctggcactgatggcacccag

SEQ ID NO: 4211720 - DNA, 25 bp, Homo sapien
agctggcactgatggcacccaggta

SEQ ID NO: 4211721 - DNA, 25 bp, Homo sapien
gttgaccacaccttgtgaattccag

SEQ ID NO: 4211722 - DNA, 25 bp, Homo sapien
aatctgttgaccacaccttgtgaat

SEQ ID NO: 4211723 - DNA, 25 bp, Homo sapien
cttgtgaattccaggccaactgcaa

SEQ ID NO: 4211724 - DNA, 25 bp, Homo sapien
cacaccttgtgaattccaggccaac

SEQ ID NO: 4211725 - DNA, 25 bp, Homo sapien
tatgatcagaagagatcaggtgtgt

SEQ ID NO: 4211726 - DNA, 25 bp, Homo sapien
gcttagtcctatgatcagaagagat

SEQ ID NO: 4211727 - DNA, 25 bp, Homo sapien
cactcctgcttagtcctatgatcag

SEQ ID NO: 4211728 - DNA, 25 bp, Homo sapien
tcctatgatcagaagagatcaggtg

SEQ ID NO: 4211729 - DNA, 25 bp, Homo sapien
tgtccactaggtctaggtaaccctg

SEQ ID NO: 4211730 - DNA, 25 bp, Homo sapien
ggccaatcctttctcagattccaca

SEQ ID NO: 4211731 - DNA, 25 bp, Homo sapien
tccaaagggtaagaagttatgagct

SEQ ID NO: 4211732 - DNA, 25 bp, Homo sapien
taaccctgggccaatcctttctcag

SEQ ID NO: 4211733 - DNA, 25 bp, Homo sapien
ggaaatagttgctcagtagcccact

SEQ ID NO: 4211734 - DNA, 25 bp, Homo sapien
taaccacctgacctctaggaagagg

SEQ ID NO: 4211735 - DNA, 25 bp, Homo sapien
aactgtaccactgaccacgaagctg

SEQ ID NO: 4211736 - DNA, 25 bp, Homo sapien
ggtagaaatcctctcaccatggttg

SEQ ID NO: 4211737 - DNA, 25 bp, Homo sapien
tgttcaatctattttccccagccat

SEQ ID NO: 4211738 - DNA, 25 bp, Homo sapien
ttgtagccataacccaaattcacca

SEQ ID NO: 4211739 - DNA, 25 bp, Homo sapien
cattgcttgcaaagtcgctgttcaa

SEQ ID NO: 4211740 - DNA, 25 bp, Homo sapien
accagggcattgcttgcaaagtcgc

SEQ ID NO: 4211741 - DNA, 25 bp, Homo sapien
ctgagcccaagtagcctatgatggc

SEQ ID NO: 4211742 - DNA, 25 bp, Homo sapien
tgagcccaagtagcctatgatggct

SEQ ID NO: 4211743 - DNA, 25 bp, Homo sapien
gcccaagtagcctatgatggcttct

SEQ ID NO: 4211744 - DNA, 25 bp, Homo sapien
caagtagcctatgatggcttcttac

SEQ ID NO: 4211745 - DNA, 25 bp, Homo sapien
aattaacccatgtcagccttgcaag

SEQ ID NO: 4211746 - DNA, 25 bp, Homo sapien
agtatgatgttgttttaggatgtcc

SEQ ID NO: 4211747 - DNA, 25 bp, Homo sapien
tggagtttgataaccaataaatctg

SEQ ID NO: 4211748 - DNA, 25 bp, Homo sapien
cagagttgtagctcttaggtttaaa

SEQ ID NO: 4211749 - DNA, 25 bp, Homo sapien
cttagaatacggaaacaagtgagct

SEQ ID NO: 4211750 - DNA, 25 bp, Homo sapien
cacttctgccttggtgtgatcccca

SEQ ID NO: 4211751 - DNA, 25 bp, Homo sapien
aagaggctacttgatcccagccaag

SEQ ID NO: 4211752 - DNA, 25 bp, Homo sapien
gcagaaagaggctacttgatcccag

SEQ ID NO: 4211753 - DNA, 25 bp, Homo sapien
tgggaaagcacgagaaaagaacaat

SEQ ID NO: 4211754 - DNA, 25 bp, Homo sapien
gtgggaaagcacgagaaaagaacaa

SEQ ID NO: 4211755 - DNA, 25 bp, Homo sapien
cttgaaagtgggaaagcacgagaaa

SEQ ID NO: 4211756 - DNA, 25 bp, Homo sapien
gaaagtgggaaagcacgagaaaaga

SEQ ID NO: 4211757 - DNA, 25 bp, Homo sapien
gaagctcgcaagtggtggtctccca

SEQ ID NO: 4211758 - DNA, 25 bp, Homo sapien
gataactcgaaatgtgggcaggcag

SEQ ID NO: 4211759 - DNA, 25 bp, Homo sapien
tctggatgagcggagagtagccacc

SEQ ID NO: 4211760 - DNA, 25 bp, Homo sapien
tgcaggagccgacgaagataactcg

SEQ ID NO: 4211761 - DNA, 25 bp, Homo sapien
cacgggaaggcacgaagcttccgat

SEQ ID NO: 4211762 - DNA, 25 bp, Homo sapien
cacgaagcttccgatgggggccccg

SEQ ID NO: 4211763 - DNA, 25 bp, Homo sapien
tccacgggaaggcacgaagcttccg

SEQ ID NO: 4211764 - DNA, 25 bp, Homo sapien
ctttccacgggaaggcacgaagctt

SEQ ID NO: 4211765 - DNA, 25 bp, Homo sapien
aagtgcactctgacgataacctcgg

SEQ ID NO: 4211766 - DNA, 25 bp, Homo sapien
taaggcaagcgagaagggacgcact

SEQ ID NO: 4211767 - DNA, 25 bp, Homo sapien
tctcggcgttcagcaatagaggcct

SEQ ID NO: 4211768 - DNA, 25 bp, Homo sapien
cttgcaaagcggtagggagacgatc

SEQ ID NO: 4211769 - DNA, 25 bp, Homo sapien
actccggagagcgatcagcaggtga

SEQ ID NO: 4211770 - DNA, 25 bp, Homo sapien
aatcaagttaaagttgcgctgggcg

SEQ ID NO: 4211771 - DNA, 25 bp, Homo sapien
tatcatttattatcgctagagcctc

SEQ ID NO: 4211772 - DNA, 25 bp, Homo sapien
ccccggttgggcaagaagaatcaag

SEQ ID NO: 4211773 - DNA, 25 bp, Homo sapien
tgcgacccagcagagacagcaaagt

SEQ ID NO: 4211774 - DNA, 25 bp, Homo sapien
gacccagcagagacagcaaagtcat

SEQ ID NO: 4211775 - DNA, 25 bp, Homo sapien
gatgcgacccagcagagacagcaaa

SEQ ID NO: 4211776 - DNA, 25 bp, Homo sapien
gcgacccagcagagacagcaaagtc

SEQ ID NO: 4211777 - DNA, 25 bp, Homo sapien
cgggtctcagcaagaagtagcgcat

SEQ ID NO: 4211778 - DNA, 25 bp, Homo sapien
tctcgggtctcagcaagaagtagcg

SEQ ID NO: 4211779 - DNA, 25 bp, Homo sapien
agcaggaaaagcgtctcgggtctca

SEQ ID NO: 4211780 - DNA, 25 bp, Homo sapien
aaagcgtctcgggtctcagcaagaa

SEQ ID NO: 4211781 - DNA, 25 bp, Homo sapien
aacttcgaagcggtcctccatgtgg

SEQ ID NO: 4211782 - DNA, 25 bp, Homo sapien
tggccagatccgtgagaacttcgaa

SEQ ID NO: 4211783 - DNA, 25 bp, Homo sapien
tggatggagtacaccgccacgttgt

SEQ ID NO: 4211784 - DNA, 25 bp, Homo sapien
cgtgcccgtcgaagatcccgaagat

SEQ ID NO: 4211785 - DNA, 25 bp, Homo sapien
ggtcccgctctgagatcctagtgaa

SEQ ID NO: 4211786 - DNA, 25 bp, Homo sapien
tggaaagaagcgcagagctgcccct

SEQ ID NO: 4211787 - DNA, 25 bp, Homo sapien
aattggcccgattgcacttgtaaag

SEQ ID NO: 4211788 - DNA, 25 bp, Homo sapien
aaaacaagcggccagcgaggcgctc

SEQ ID NO: 4211789 - DNA, 25 bp, Homo sapien
ccctaagcccgccagggcgcaaggg

SEQ ID NO: 4211790 - DNA, 25 bp, Homo sapien
cctaagcccgccagggcgcaagggt

SEQ ID NO: 4211791 - DNA, 25 bp, Homo sapien
cgccagggcgcaagggtgaggtcaa

SEQ ID NO: 4211792 - DNA, 25 bp, Homo sapien
gggcgcaagggtgaggtcaaagcac

SEQ ID NO: 4211793 - DNA, 25 bp, Homo sapien
gatgaaccacaaacaaaggaatcta

SEQ ID NO: 4211794 - DNA, 25 bp, Homo sapien
tctagaagcaggacgacgtctgcac

SEQ ID NO: 4211795 - DNA, 25 bp, Homo sapien
caaaggaatctagaagcaggacgac

SEQ ID NO: 4211796 - DNA, 25 bp, Homo sapien
ccagatgaaccacaaacaaaggaat

SEQ ID NO: 4211797 - DNA, 25 bp, Homo sapien
caggttcctacattcccatacaaaa

SEQ ID NO: 4211798 - DNA, 25 bp, Homo sapien
caaggtcagcagtcaggttcctaca

SEQ ID NO: 4211799 - DNA, 25 bp, Homo sapien
cgcagcaaggtcagcagtcaggttc

SEQ ID NO: 4211800 - DNA, 25 bp, Homo sapien
gttcagaagacgcagcaaggtcagc

SEQ ID NO: 4211801 - DNA, 25 bp, Homo sapien
atgttggcttaattgaactgaattt

SEQ ID NO: 4211802 - DNA, 25 bp, Homo sapien
aatgttggcttaattgaactgaatt

SEQ ID NO: 4211803 - DNA, 25 bp, Homo sapien
tggcatcactggaagtgctctccac

SEQ ID NO: 4211804 - DNA, 25 bp, Homo sapien
gtggcatcactggaagtgctctcca

SEQ ID NO: 4211805 - DNA, 25 bp, Homo sapien
catctgaagaaaggtcccatccaac

SEQ ID NO: 4211806 - DNA, 25 bp, Homo sapien
accatgaaacctcagttccaagccg

SEQ ID NO: 4211807 - DNA, 25 bp, Homo sapien
ccaagccggattgtaggtttctagc

SEQ ID NO: 4211808 - DNA, 25 bp, Homo sapien
tttctagccacttgttcagctggca

SEQ ID NO: 4211809 - DNA, 25 bp, Homo sapien
cctcagttccaagccggattgtagg

SEQ ID NO: 4211810 - DNA, 25 bp, Homo sapien
gcttactgtgtaccaacaattgtga

SEQ ID NO: 4211811 - DNA, 25 bp, Homo sapien
ccactgtgccaagatgttacttcga

SEQ ID NO: 4211812 - DNA, 25 bp, Homo sapien
taaacagaaaagtgtagcacagact

SEQ ID NO: 4211813 - DNA, 25 bp, Homo sapien
ggctacattcgaattctgagctcag

SEQ ID NO: 4211814 - DNA, 25 bp, Homo sapien
ctgggcagagctttgagtctggctc

SEQ ID NO: 4211815 - DNA, 25 bp, Homo sapien
ggcagagctttgagtctggctcttt

SEQ ID NO: 4211816 - DNA, 25 bp, Homo sapien
agagctttgagtctggctctttggg

SEQ ID NO: 4211817 - DNA, 25 bp, Homo sapien
tgggcagagctttgagtctggctct

SEQ ID NO: 4211818 - DNA, 25 bp, Homo sapien
tcataacctttcttttgtgttcgat

SEQ ID NO: 4211819 - DNA, 25 bp, Homo sapien
gtgttcgatactgctcttgaagatc

SEQ ID NO: 4211820 - DNA, 25 bp, Homo sapien
tctcaagctgtagtttggtctgtgc

SEQ ID NO: 4211821 - DNA, 25 bp, Homo sapien
gaagatcttcaaacttctcaacaaa

SEQ ID NO: 4211822 - DNA, 25 bp, Homo sapien
acagcatagcatttacatctactgg

SEQ ID NO: 4211823 - DNA, 25 bp, Homo sapien
ttgcaacaaggacaagcattcctcc

SEQ ID NO: 4211824 - DNA, 25 bp, Homo sapien
attcctcccgcagacacaaaggctg

SEQ ID NO: 4211825 - DNA, 25 bp, Homo sapien
caaaggctggccttcctgacaagat

SEQ ID NO: 4211826 - DNA, 25 bp, Homo sapien
catgtcataacagagcagagggcat

SEQ ID NO: 4211827 - DNA, 25 bp, Homo sapien
ccactcctagagatgggaaattgct

SEQ ID NO: 4211828 - DNA, 25 bp, Homo sapien
caagtagtgtgtaggtctgtcttcc

SEQ ID NO: 4211829 - DNA, 25 bp, Homo sapien
ttatctcccaaaggactcacttcca

SEQ ID NO: 4211830 - DNA, 25 bp, Homo sapien
ctgagtgtgtcagctgaccaaagag

SEQ ID NO: 4211831 - DNA, 25 bp, Homo sapien
aactgagtgtgtcagctgaccaaag

SEQ ID NO: 4211832 - DNA, 25 bp, Homo sapien
aaaactgagtgtgtcagctgaccaa

SEQ ID NO: 4211833 - DNA, 25 bp, Homo sapien
agctgaccaaagagattcgaaattt

SEQ ID NO: 4211834 - DNA, 25 bp, Homo sapien
ttaatagcggcaagtaggtttctct

SEQ ID NO: 4211835 - DNA, 25 bp, Homo sapien
tctgcctaaaatatgactgtgctgc

SEQ ID NO: 4211836 - DNA, 25 bp, Homo sapien
caagtaggtttctctgcttgactct

SEQ ID NO: 4211837 - DNA, 25 bp, Homo sapien
ctaaaatatgactgtgctgcaccct

SEQ ID NO: 4211838 - DNA, 25 bp, Homo sapien
aaaaagcaggcatgttctggtctag

SEQ ID NO: 4211839 - DNA, 25 bp, Homo sapien
tctggtctagccctctctgctaatg

SEQ ID NO: 4211840 - DNA, 25 bp, Homo sapien
tagccctctctgctaatggcaccag

SEQ ID NO: 4211841 - DNA, 25 bp, Homo sapien
gcatgttctggtctagccctctctg

SEQ ID NO: 4211842 - DNA, 25 bp, Homo sapien
caatctttcaaggtgaggatcctaa

SEQ ID NO: 4211843 - DNA, 25 bp, Homo sapien
tgcaaagaggcaacaaaaccacatg

SEQ ID NO: 4211844 - DNA, 25 bp, Homo sapien
tcaccttcagtgagaaacctttcca

SEQ ID NO: 4211845 - DNA, 25 bp, Homo sapien
gtttgcaaacctaataaaagccatg

SEQ ID NO: 4211846 - DNA, 25 bp, Homo sapien
ccttcccatttcctggcttgcctct

SEQ ID NO: 4211847 - DNA, 25 bp, Homo sapien
ccatttcctggcttgcctctctctt

SEQ ID NO: 4211848 - DNA, 25 bp, Homo sapien
ttcccatttcctggcttgcctctct

SEQ ID NO: 4211849 - DNA, 25 bp, Homo sapien
cccatttcctggcttgcctctctct

SEQ ID NO: 4211850 - DNA, 25 bp, Homo sapien
tgaggagagataatagccagcatct

SEQ ID NO: 4211851 - DNA, 25 bp, Homo sapien
tgtcctgatcgtcctgggtgctcag

SEQ ID NO: 4211852 - DNA, 25 bp, Homo sapien
gaagctgaattacacttgatggttc

SEQ ID NO: 4211853 - DNA, 25 bp, Homo sapien
cattcgccctgaagattgaagctga

SEQ ID NO: 4211854 - DNA, 25 bp, Homo sapien
atttgtagtaggctgaatggtggcc

SEQ ID NO: 4211855 - DNA, 25 bp, Homo sapien
gagtgaacattctaaatctatggag

SEQ ID NO: 4211856 - DNA, 25 bp, Homo sapien
tagggaaagtccagtataggcaaag

SEQ ID NO: 4211857 - DNA, 25 bp, Homo sapien
tgctctatctagatctacatgggat

SEQ ID NO: 4211858 - DNA, 25 bp, Homo sapien
ttgtggcacccagatacgtatatcc

SEQ ID NO: 4211859 - DNA, 25 bp, Homo sapien
cacccagctaagagtctaaggacag

SEQ ID NO: 4211860 - DNA, 25 bp, Homo sapien
aggactaggaaaacaccacccagct

SEQ ID NO: 4211861 - DNA, 25 bp, Homo sapien
gatataccaactggctctggctcct

SEQ ID NO: 4211862 - DNA, 25 bp, Homo sapien
taacaatactggtacttcctatcca

SEQ ID NO: 4211863 - DNA, 25 bp, Homo sapien
tttaacaatactggtacttcctatc

SEQ ID NO: 4211864 - DNA, 25 bp, Homo sapien
caatactggtacttcctatccatga

SEQ ID NO: 4211865 - DNA, 25 bp, Homo sapien
acaatactggtacttcctatccatg

SEQ ID NO: 4211866 - DNA, 25 bp, Homo sapien
ctgccaaaacacagaaatgaccgag

SEQ ID NO: 4211867 - DNA, 25 bp, Homo sapien
gccaaaacacagaaatgaccgagaa

SEQ ID NO: 4211868 - DNA, 25 bp, Homo sapien
caaaacacagaaatgaccgagaagt

SEQ ID NO: 4211869 - DNA, 25 bp, Homo sapien
tgccaaaacacagaaatgaccgaga

SEQ ID NO: 4211870 - DNA, 25 bp, Homo sapien
ggcctgggaaaggttctagataatc

SEQ ID NO: 4211871 - DNA, 25 bp, Homo sapien
tccagaaatcagatatttcctgtcc

SEQ ID NO: 4211872 - DNA, 25 bp, Homo sapien
agatggcctgggaaaggttctagat

SEQ ID NO: 4211873 - DNA, 25 bp, Homo sapien
cctgggaaaggttctagataatcca

SEQ ID NO: 4211874 - DNA, 25 bp, Homo sapien
aaggacctaagtcatctcctactgg

SEQ ID NO: 4211875 - DNA, 25 bp, Homo sapien
ctaaactggttgcttactgcaggac

SEQ ID NO: 4211876 - DNA, 25 bp, Homo sapien
ggaattacacccaatctgcctagcc

SEQ ID NO: 4211877 - DNA, 25 bp, Homo sapien
ctcaaactcctggtggataaagaaa

SEQ ID NO: 4211878 - DNA, 25 bp, Homo sapien
catttaggtggtacagggaacagga

SEQ ID NO: 4211879 - DNA, 25 bp, Homo sapien
gaggtgtcactcaaaaaggctgcag

SEQ ID NO: 4211880 - DNA, 25 bp, Homo sapien
tttgaagctactgacccttgaatgg

SEQ ID NO: 4211881 - DNA, 25 bp, Homo sapien
tgttgatgcagatgttgtggctttc

SEQ ID NO: 4211882 - DNA, 25 bp, Homo sapien
cagaactgacggcaagttatcgact

SEQ ID NO: 4211883 - DNA, 25 bp, Homo sapien
gtcctcaagaagccccaacatgtgc

SEQ ID NO: 4211884 - DNA, 25 bp, Homo sapien
gcaagttatcgacttggtgaggcaa

SEQ ID NO: 4211885 - DNA, 25 bp, Homo sapien
tcacctggtcccctagaagggccag

SEQ ID NO: 4211886 - DNA, 25 bp, Homo sapien
tggacatctacattagaccagtgct

SEQ ID NO: 4211887 - DNA, 25 bp, Homo sapien
gagctgatcccttaccttaccatta

SEQ ID NO: 4211888 - DNA, 25 bp, Homo sapien
ttctattctgaacccaggcaactcc

SEQ ID NO: 4211889 - DNA, 25 bp, Homo sapien
gagagggctcgcttactttcatggc

SEQ ID NO: 4211890 - DNA, 25 bp, Homo sapien
ttgaggccaacccactagacctata

SEQ ID NO: 4211891 - DNA, 25 bp, Homo sapien
gacctatagcttccatggaaggctc

SEQ ID NO: 4211892 - DNA, 25 bp, Homo sapien
cagaacctatggcagtgctagacag

SEQ ID NO: 4211893 - DNA, 25 bp, Homo sapien
ttgctaagaaggtctgctctgcaga

SEQ ID NO: 4211894 - DNA, 25 bp, Homo sapien
ttcccagagaaaattccatcggtgg

SEQ ID NO: 4211895 - DNA, 25 bp, Homo sapien
catcggtgggtgactcctgtgagtg

SEQ ID NO: 4211896 - DNA, 25 bp, Homo sapien
aaggattcgcgtgcaagtgtgcatg

SEQ ID NO: 4211897 - DNA, 25 bp, Homo sapien
tcctgtgagtgagaaggattcgcgt

SEQ ID NO: 4211898 - DNA, 25 bp, Homo sapien
ttttgcacagttcattctgttccat

SEQ ID NO: 4211899 - DNA, 25 bp, Homo sapien
tgtttttgcacagttcattctgttc

SEQ ID NO: 4211900 - DNA, 25 bp, Homo sapien
gctgtttttgcacagttcattctgt

SEQ ID NO: 4211901 - DNA, 25 bp, Homo sapien
tttttgcacagttcattctgttcca

SEQ ID NO: 4211902 - DNA, 25 bp, Homo sapien
aagtctttagaagtgggtaaggcat

SEQ ID NO: 4211903 - DNA, 25 bp, Homo sapien
catggcaggagatgaaaggcacttc

SEQ ID NO: 4211904 - DNA, 25 bp, Homo sapien
cagaatcatggcaggagatgaaagg

SEQ ID NO: 4211905 - DNA, 25 bp, Homo sapien
gaatcatggcaggagatgaaaggca

SEQ ID NO: 4211906 - DNA, 25 bp, Homo sapien
ctcagaatcatggcaggagatgaaa

SEQ ID NO: 4211907 - DNA, 25 bp, Homo sapien
gcatggtaagaacactgacctgacc

SEQ ID NO: 4211908 - DNA, 25 bp, Homo sapien
ttcctcttgaccatcccaggcatgg

SEQ ID NO: 4211909 - DNA, 25 bp, Homo sapien
ctgccgaggactgcaagtgggactt

SEQ ID NO: 4211910 - DNA, 25 bp, Homo sapien
ccctcctgccgaggactgcaagtgg

SEQ ID NO: 4211911 - DNA, 25 bp, Homo sapien
cttgtgtacttctaatgcaagggag

SEQ ID NO: 4211912 - DNA, 25 bp, Homo sapien
acagcttgtgggcaatcaggcaaat

SEQ ID NO: 4211913 - DNA, 25 bp, Homo sapien
tgtgtacttctaatgcaagggagca

SEQ ID NO: 4211914 - DNA, 25 bp, Homo sapien
atcaggcaaatctcagcaagctgcg

SEQ ID NO: 4211915 - DNA, 25 bp, Homo sapien
aggcagggcataaaaggtgctgaat

SEQ ID NO: 4211916 - DNA, 25 bp, Homo sapien
ggcagggcataaaaggtgctgaatg

SEQ ID NO: 4211917 - DNA, 25 bp, Homo sapien
gcagggcataaaaggtgctgaatgt

SEQ ID NO: 4211918 - DNA, 25 bp, Homo sapien
aaggcagggcataaaaggtgctgaa

SEQ ID NO: 4211919 - DNA, 25 bp, Homo sapien
ttaagggcctctgggagtcgagatt

SEQ ID NO: 4211920 - DNA, 25 bp, Homo sapien
caaggatggtctggtaagataatac

SEQ ID NO: 4211921 - DNA, 25 bp, Homo sapien
tctcggtcaattgacaaaatctgct

SEQ ID NO: 4211922 - DNA, 25 bp, Homo sapien
tcgtagtcctgaagatgctgtttaa

SEQ ID NO: 4211923 - DNA, 25 bp, Homo sapien
tcatcataggatacagtcaattttt

SEQ ID NO: 4211924 - DNA, 25 bp, Homo sapien
ctgcttcatcataggatacagtcaa

SEQ ID NO: 4211925 - DNA, 25 bp, Homo sapien
ataggatacagtcaatttttctagc

SEQ ID NO: 4211926 - DNA, 25 bp, Homo sapien
aggatacagtcaatttttctagcat

SEQ ID NO: 4211927 - DNA, 25 bp, Homo sapien
tctctgatgtggtagtgtctgagtt

SEQ ID NO: 4211928 - DNA, 25 bp, Homo sapien
aagtctctgatgtggtagtgtctga

SEQ ID NO: 4211929 - DNA, 25 bp, Homo sapien
agtctctgatgtggtagtgtctgag

SEQ ID NO: 4211930 - DNA, 25 bp, Homo sapien
ctctgatgtggtagtgtctgagttg

SEQ ID NO: 4211931 - DNA, 25 bp, Homo sapien
tcaaatggtaagaaagtatcgagca

SEQ ID NO: 4211932 - DNA, 25 bp, Homo sapien
agaaagtatcgagcatgcatagatt

SEQ ID NO: 4211933 - DNA, 25 bp, Homo sapien
aatggtaagaaagtatcgagcatgc

SEQ ID NO: 4211934 - DNA, 25 bp, Homo sapien
ggtaagaaagtatcgagcatgcata

SEQ ID NO: 4211935 - DNA, 25 bp, Homo sapien
agccatgtgcaagcctacctctgag

SEQ ID NO: 4211936 - DNA, 25 bp, Homo sapien
tacctctgaggatctgttgctgctc

SEQ ID NO: 4211937 - DNA, 25 bp, Homo sapien
ctatttgcccctaaaagccatgtgc

SEQ ID NO: 4211938 - DNA, 25 bp, Homo sapien
ttgctgctcaacaacagtgcaggag

SEQ ID NO: 4211939 - DNA, 25 bp, Homo sapien
gcacagagagttggcatccctaacc

SEQ ID NO: 4211940 - DNA, 25 bp, Homo sapien
tctctagcttagtcttaagaataca

SEQ ID NO: 4211941 - DNA, 25 bp, Homo sapien
ctaattttagactgcacagagagtt

SEQ ID NO: 4211942 - DNA, 25 bp, Homo sapien
tggtttaagggatagacaaggtcca

SEQ ID NO: 4211943 - DNA, 25 bp, Homo sapien
cattgcaggtgtactcagcttttcc

SEQ ID NO: 4211944 - DNA, 25 bp, Homo sapien
aaaaatatgcagctcttcactcctg

SEQ ID NO: 4211945 - DNA, 25 bp, Homo sapien
tgtttccagacttccgctcccatgg

SEQ ID NO: 4211946 - DNA, 25 bp, Homo sapien
gctcccatggcttagggttcttgag

SEQ ID NO: 4211947 - DNA, 25 bp, Homo sapien
tctgggaaagctgtatgtgactgcc

SEQ ID NO: 4211948 - DNA, 25 bp, Homo sapien
ggctcccaactctgatacccaaagg

SEQ ID NO: 4211949 - DNA, 25 bp, Homo sapien
tctggttcactttctacgcgtaagt

SEQ ID NO: 4211950 - DNA, 25 bp, Homo sapien
aaggaacacaagaaacagccagctg

SEQ ID NO: 4211951 - DNA, 25 bp, Homo sapien
tcagggaatcataaagcaaaagctg

SEQ ID NO: 4211952 - DNA, 25 bp, Homo sapien
catcagggaatcataaagcaaaagc

SEQ ID NO: 4211953 - DNA, 25 bp, Homo sapien
ctacatcagggaatcataaagcaaa

SEQ ID NO: 4211954 - DNA, 25 bp, Homo sapien
tacatcagggaatcataaagcaaaa

SEQ ID NO: 4211955 - DNA, 25 bp, Homo sapien
tgaggaacccagactaagacaatgt

SEQ ID NO: 4211956 - DNA, 25 bp, Homo sapien
taagcagcatttgtcctcagatgag

SEQ ID NO: 4211957 - DNA, 25 bp, Homo sapien
aatggtctgggatgctattcacaag

SEQ ID NO: 4211958 - DNA, 25 bp, Homo sapien
tgtctgtggaactaccattggccaa

SEQ ID NO: 4211959 - DNA, 25 bp, Homo sapien
gctcctttgcacagcattatcaatt

SEQ ID NO: 4211960 - DNA, 25 bp, Homo sapien
tttatctgtttagagtaactgtcca

SEQ ID NO: 4211961 - DNA, 25 bp, Homo sapien
tttttagagaggatactttagctcc

SEQ ID NO: 4211962 - DNA, 25 bp, Homo sapien
tcatccctggagaatatttatctgt

SEQ ID NO: 4211963 - DNA, 25 bp, Homo sapien
agcctctgggctctgcaatcactgc

SEQ ID NO: 4211964 - DNA, 25 bp, Homo sapien
ctgggctctgcaatcactgccattt

SEQ ID NO: 4211965 - DNA, 25 bp, Homo sapien
caatatgggagcctctgggctctgc

SEQ ID NO: 4211966 - DNA, 25 bp, Homo sapien
ggagcctctgggctctgcaatcact

SEQ ID NO: 4211967 - DNA, 25 bp, Homo sapien
cactgctacactacttgtacatgat

SEQ ID NO: 4211968 - DNA, 25 bp, Homo sapien
tgtggcccactgctacactacttgt

SEQ ID NO: 4211969 - DNA, 25 bp, Homo sapien
catgatattccatccaaactggaca

SEQ ID NO: 4211970 - DNA, 25 bp, Homo sapien
ttgtacatgatattccatccaaact

SEQ ID NO: 4211971 - DNA, 25 bp, Homo sapien
ctggtgaggaacagagtccacctcc

SEQ ID NO: 4211972 - DNA, 25 bp, Homo sapien
tggtgaggaacagagtccacctccc

SEQ ID NO: 4211973 - DNA, 25 bp, Homo sapien
ttctggtttcccctatcaccatcca

SEQ ID NO: 4211974 - DNA, 25 bp, Homo sapien
tttctgccaacaatgttatccttct

SEQ ID NO: 4211975 - DNA, 25 bp, Homo sapien
cacatttctgccaacaatgttatcc

SEQ ID NO: 4211976 - DNA, 25 bp, Homo sapien
ctggtttcccctatcaccatccaca

SEQ ID NO: 4211977 - DNA, 25 bp, Homo sapien
taataaccgccacattaagcgttgt

SEQ ID NO: 4211978 - DNA, 25 bp, Homo sapien
taagcgttgtatgcatactgtctct

SEQ ID NO: 4211979 - DNA, 25 bp, Homo sapien
attagaattaagctgtaggtcctgt

SEQ ID NO: 4211980 - DNA, 25 bp, Homo sapien
tctggtgagtcaaaggtaagtactt

SEQ ID NO: 4211981 - DNA, 25 bp, Homo sapien
ttcctgaaagaaagcactcagtata

SEQ ID NO: 4211982 - DNA, 25 bp, Homo sapien
ttcaatgatctggtgttctgtttcc

SEQ ID NO: 4211983 - DNA, 25 bp, Homo sapien
gcactcagtatagcttttaatgtgg

SEQ ID NO: 4211984 - DNA, 25 bp, Homo sapien
ttaggaagtaaactgaatcttagga

SEQ ID NO: 4211985 - DNA, 25 bp, Homo sapien
cagctggtcctgagctttgctttta

SEQ ID NO: 4211986 - DNA, 25 bp, Homo sapien
ttacagctggtcctgagctttgctt

SEQ ID NO: 4211987 - DNA, 25 bp, Homo sapien
ctggtcctgagctttgcttttatca

SEQ ID NO: 4211988 - DNA, 25 bp, Homo sapien
tacagctggtcctgagctttgcttt

SEQ ID NO: 4211989 - DNA, 25 bp, Homo sapien
tgggaaatggatgtccacagtggaa

SEQ ID NO: 4211990 - DNA, 25 bp, Homo sapien
aaagctccaacatattcctgggata

SEQ ID NO: 4211991 - DNA, 25 bp, Homo sapien
tccggctaattttgcccagctaatt

SEQ ID NO: 4211992 - DNA, 25 bp, Homo sapien
cacagtggaatttgaaaagctccaa

SEQ ID NO: 4211993 - DNA, 25 bp, Homo sapien
tgctcttccacgaaactatgagaac

SEQ ID NO: 4211994 - DNA, 25 bp, Homo sapien
ttagcagcctaaccatcatgaaaag

SEQ ID NO: 4211995 - DNA, 25 bp, Homo sapien
tctgtggcaaccttgaaaactagca

SEQ ID NO: 4211996 - DNA, 25 bp, Homo sapien
aactagcagccttgtattcacagtg

SEQ ID NO: 4211997 - DNA, 25 bp, Homo sapien
cactgtacctggcatgaaggatctt

SEQ ID NO: 4211998 - DNA, 25 bp, Homo sapien
gctcaatgaagccacgaactcctta

SEQ ID NO: 4211999 - DNA, 25 bp, Homo sapien
agaagtggattcttactatgttttc

SEQ ID NO: 4212000 - DNA, 25 bp, Homo sapien
gaactccttaactcaaaggatcatc

SEQ ID NO: 4212001 - DNA, 25 bp, Homo sapien
aattttagagggcacgtacactggc

SEQ ID NO: 4212002 - DNA, 25 bp, Homo sapien
gagtacaatctcactaattacaatt

SEQ ID NO: 4212003 - DNA, 25 bp, Homo sapien
tcaagattactgctattacaccaag

SEQ ID NO: 4212004 - DNA, 25 bp, Homo sapien
tctgtcagcatcctgataagctttt

SEQ ID NO: 4212005 - DNA, 25 bp, Homo sapien
cagtcctctggagcctgtgacagca

SEQ ID NO: 4212006 - DNA, 25 bp, Homo sapien
agtcctctggagcctgtgacagcag

SEQ ID NO: 4212007 - DNA, 25 bp, Homo sapien
gtagatgtgtcacatttttttctga

SEQ ID NO: 4212008 - DNA, 25 bp, Homo sapien
ggattctcttggctctacgggctct

SEQ ID NO: 4212009 - DNA, 25 bp, Homo sapien
tttcatgatattgatcttcctatcc

SEQ ID NO: 4212010 - DNA, 25 bp, Homo sapien
ttaggattctcttggctctacgggc

SEQ ID NO: 4212011 - DNA, 25 bp, Homo sapien
gacttgctggtatactgtttcccct

SEQ ID NO: 4212012 - DNA, 25 bp, Homo sapien
tgaactaaccatgacccttcttgag

SEQ ID NO: 4212013 - DNA, 25 bp, Homo sapien
tatgtatagctcattaactggagac

SEQ ID NO: 4212014 - DNA, 25 bp, Homo sapien
ctggagacaatcaccaaatgttgaa

SEQ ID NO: 4212015 - DNA, 25 bp, Homo sapien
atagtgagaccacgtttctacacat

SEQ ID NO: 4212016 - DNA, 25 bp, Homo sapien
ctgaggtcagagaattggttgagtc

SEQ ID NO: 4212017 - DNA, 25 bp, Homo sapien
tgagaccacgtttctacacataaat

SEQ ID NO: 4212018 - DNA, 25 bp, Homo sapien
cagagaattggttgagtccagaagt

SEQ ID NO: 4212019 - DNA, 25 bp, Homo sapien
caaaatctctcagcaacatcttacc

SEQ ID NO: 4212020 - DNA, 25 bp, Homo sapien
aatctctcagcaacatcttaccatg

SEQ ID NO: 4212021 - DNA, 25 bp, Homo sapien
tctcagcaacatcttaccatgttgc

SEQ ID NO: 4212022 - DNA, 25 bp, Homo sapien
atgcgtgaagttgatcctgtcattg

SEQ ID NO: 4212023 - DNA, 25 bp, Homo sapien
cacgcctggccctcattgatttttt

SEQ ID NO: 4212024 - DNA, 25 bp, Homo sapien
cgcctggccctcattgattttttga

SEQ ID NO: 4212025 - DNA, 25 bp, Homo sapien
caccacgcctggccctcattgattt

SEQ ID NO: 4212026 - DNA, 25 bp, Homo sapien
atagagaaacggtttcactgtgtta

SEQ ID NO: 4212027 - DNA, 25 bp, Homo sapien
tgagtgggccttccaaccacaggtc

SEQ ID NO: 4212028 - DNA, 25 bp, Homo sapien
agaaaactgctgagaaccgctggcc

SEQ ID NO: 4212029 - DNA, 25 bp, Homo sapien
aggtcatggaaactctgggtcgccc

SEQ ID NO: 4212030 - DNA, 25 bp, Homo sapien
gcttcagtgccccaatgagtgggcc

SEQ ID NO: 4212031 - DNA, 25 bp, Homo sapien
atctaggctagggagcagtgttgtg

SEQ ID NO: 4212032 - DNA, 25 bp, Homo sapien
tgtcatctaggctagggagcagtgt

SEQ ID NO: 4212033 - DNA, 25 bp, Homo sapien
ctaggctagggagcagtgttgtgat

SEQ ID NO: 4212034 - DNA, 25 bp, Homo sapien
tcatctaggctagggagcagtgttg

SEQ ID NO: 4212035 - DNA, 25 bp, Homo sapien
gctgagtttctgtgaagtcccagtt

SEQ ID NO: 4212036 - DNA, 25 bp, Homo sapien
ctgcttggtgctgagtttctgtgaa

SEQ ID NO: 4212037 - DNA, 25 bp, Homo sapien
tgggggtgtgcggtgggctcctcat

SEQ ID NO: 4212038 - DNA, 25 bp, Homo sapien
tggtgctgagtttctgtgaagtccc

SEQ ID NO: 4212039 - DNA, 25 bp, Homo sapien
cagtgaggtctttatctgatagcag

SEQ ID NO: 4212040 - DNA, 25 bp, Homo sapien
tttccttcaactggtaaggcttgtg

SEQ ID NO: 4212041 - DNA, 25 bp, Homo sapien
taaggcttgtgatcatgagacaaag

SEQ ID NO: 4212042 - DNA, 25 bp, Homo sapien
agcgttcccatctttgtcacacagg

SEQ ID NO: 4212043 - DNA, 25 bp, Homo sapien
ggtgacccaagacgtccacatagga

SEQ ID NO: 4212044 - DNA, 25 bp, Homo sapien
tccatgtattgtaaaaggtgaccca

SEQ ID NO: 4212045 - DNA, 25 bp, Homo sapien
ggcatagagatgaacaaaaccaagt

SEQ ID NO: 4212046 - DNA, 25 bp, Homo sapien
acagtgtgacatggaaagcttccaa

SEQ ID NO: 4212047 - DNA, 25 bp, Homo sapien
caaagtgaggttcatccaagcgctc

SEQ ID NO: 4212048 - DNA, 25 bp, Homo sapien
caagcgctccttgatgaatcgaact

SEQ ID NO: 4212049 - DNA, 25 bp, Homo sapien
gactgtaaaactatgctcttggccc

SEQ ID NO: 4212050 - DNA, 25 bp, Homo sapien
tgatgccaagatcatgaactcaggc

SEQ ID NO: 4212051 - DNA, 25 bp, Homo sapien
gaaggacaaagcattctcaggacag

SEQ ID NO: 4212052 - DNA, 25 bp, Homo sapien
caaacagcttacttgccagggaaca

SEQ ID NO: 4212053 - DNA, 25 bp, Homo sapien
taggataaatgcacaaaggctggtc

SEQ ID NO: 4212054 - DNA, 25 bp, Homo sapien
tcttaactacattggccaagggcac

SEQ ID NO: 4212055 - DNA, 25 bp, Homo sapien
ccacggggcggtttgtatttgcctg

SEQ ID NO: 4212056 - DNA, 25 bp, Homo sapien
ttgcaaccaaatgttgaagactgct

SEQ ID NO: 4212057 - DNA, 25 bp, Homo sapien
ggcctgcaggccacggggcggtttg

SEQ ID NO: 4212058 - DNA, 25 bp, Homo sapien
gagatttgcaaccaaatgttgaaga

SEQ ID NO: 4212059 - DNA, 25 bp, Homo sapien
tattcagtgtctccccataggcaaa

SEQ ID NO: 4212060 - DNA, 25 bp, Homo sapien
gactattggcaattcgaactcgagc

SEQ ID NO: 4212061 - DNA, 25 bp, Homo sapien
cactgcattaatggagacctgggcc

SEQ ID NO: 4212062 - DNA, 25 bp, Homo sapien
aattctgcagggcacgtaaccactg

SEQ ID NO: 4212063 - DNA, 25 bp, Homo sapien
gatctggcaacaacttagagaacaa

SEQ ID NO: 4212064 - DNA, 25 bp, Homo sapien
aagaagccaatacctcagtccacag

SEQ ID NO: 4212065 - DNA, 25 bp, Homo sapien
gacacagttgcaagagagatctggc

SEQ ID NO: 4212066 - DNA, 25 bp, Homo sapien
gactcaatttcctagaatccaacag

SEQ ID NO: 4212067 - DNA, 25 bp, Homo sapien
gaaaggctcatgcttctaagttgca

SEQ ID NO: 4212068 - DNA, 25 bp, Homo sapien
caaatgctggtgtgacatgctaagg

SEQ ID NO: 4212069 - DNA, 25 bp, Homo sapien
gagtcatcgtgaatgaaaacacagc

SEQ ID NO: 4212070 - DNA, 25 bp, Homo sapien
gctatcaatgacttaatccagaggc

SEQ ID NO: 4212071 - DNA, 25 bp, Homo sapien
ttctgctatcaatatgaggctgctg

SEQ ID NO: 4212072 - DNA, 25 bp, Homo sapien
agagctttaagtaggattgttctgc

SEQ ID NO: 4212073 - DNA, 25 bp, Homo sapien
gtgacctgacattgcgccacggcat

SEQ ID NO: 4212074 - DNA, 25 bp, Homo sapien
tgctgttggtcatattaagtcatac

SEQ ID NO: 4212075 - DNA, 25 bp, Homo sapien
gcaaaaaagcaatggaaagatcttg

SEQ ID NO: 4212076 - DNA, 25 bp, Homo sapien
gggctcttgctcattattcatataa

SEQ ID NO: 4212077 - DNA, 25 bp, Homo sapien
catatttagctatggcagggctctt

SEQ ID NO: 4212078 - DNA, 25 bp, Homo sapien
tttgagacatatttagctatggcag

SEQ ID NO: 4212079 - DNA, 25 bp, Homo sapien
gaagcttcatggtatcaactgcccc

SEQ ID NO: 4212080 - DNA, 25 bp, Homo sapien
tcctgaagtggcagcgagtaacccg

SEQ ID NO: 4212081 - DNA, 25 bp, Homo sapien
tcttaaatgtgattctgcccgtgcc

SEQ ID NO: 4212082 - DNA, 25 bp, Homo sapien
tctgcttgtgctcaatgtcctcgga

SEQ ID NO: 4212083 - DNA, 25 bp, Homo sapien
taatcatatgagcaacctgacccat

SEQ ID NO: 4212084 - DNA, 25 bp, Homo sapien
tggttctagcttttctccacagagc

SEQ ID NO: 4212085 - DNA, 25 bp, Homo sapien
cacagagcaggatttagacgttttc

SEQ ID NO: 4212086 - DNA, 25 bp, Homo sapien
tccttcactaagagcgtaagtacag

SEQ ID NO: 4212087 - DNA, 25 bp, Homo sapien
gaatgctgagacattatcaaataga

SEQ ID NO: 4212088 - DNA, 25 bp, Homo sapien
gaactgcagttgtgtaagtgctata

SEQ ID NO: 4212089 - DNA, 25 bp, Homo sapien
tgtatgtgagcagagtttacattgg

SEQ ID NO: 4212090 - DNA, 25 bp, Homo sapien
tcaattctgtgacctgaactgcagt

SEQ ID NO: 4212091 - DNA, 25 bp, Homo sapien
gacacgccatgcatcttgagtgacc

SEQ ID NO: 4212092 - DNA, 25 bp, Homo sapien
taatatctctgacaccccaataggg

SEQ ID NO: 4212093 - DNA, 25 bp, Homo sapien
gagtaatgaggtttcgccaagcctt

SEQ ID NO: 4212094 - DNA, 25 bp, Homo sapien
tgatggcgcctgagtgctcaccatg

SEQ ID NO: 4212095 - DNA, 25 bp, Homo sapien
aattcctatctgctgggagcacgga

SEQ ID NO: 4212096 - DNA, 25 bp, Homo sapien
gagtctgaattcctatctgctggga

SEQ ID NO: 4212097 - DNA, 25 bp, Homo sapien
tctgaattcctatctgctgggagca

SEQ ID NO: 4212098 - DNA, 25 bp, Homo sapien
cctatctgctgggagcacggaaagg

SEQ ID NO: 4212099 - DNA, 25 bp, Homo sapien
gaagtgaagagataaacccaatttc

SEQ ID NO: 4212100 - DNA, 25 bp, Homo sapien
gccgaagtgaagagataaacccaat

SEQ ID NO: 4212101 - DNA, 25 bp, Homo sapien
tcctgagggtcagcgccaatgatga

SEQ ID NO: 4212102 - DNA, 25 bp, Homo sapien
gggccgaagtgaagagataaaccca

SEQ ID NO: 4212103 - DNA, 25 bp, Homo sapien
gacaactctgcaacagaccccaatt

SEQ ID NO: 4212104 - DNA, 25 bp, Homo sapien
ccttcagacaatgccagacaactct

SEQ ID NO: 4212105 - DNA, 25 bp, Homo sapien
gggagccttcagacaatgccagaca

SEQ ID NO: 4212106 - DNA, 25 bp, Homo sapien
ggagagggagccttcagacaatgcc

SEQ ID NO: 4212107 - DNA, 25 bp, Homo sapien
tatttctcttgcaggaagtaactgc

SEQ ID NO: 4212108 - DNA, 25 bp, Homo sapien
gcaggaatgtattgttccacagaat

SEQ ID NO: 4212109 - DNA, 25 bp, Homo sapien
actgcaagtgatgttgcagcatgca

SEQ ID NO: 4212110 - DNA, 25 bp, Homo sapien
aactgagtgcagtcgtactgtaagc

SEQ ID NO: 4212111 - DNA, 25 bp, Homo sapien
gatgtcactgagatccctcaaatgg

SEQ ID NO: 4212112 - DNA, 25 bp, Homo sapien
gaacgcgtgaactggatgtacttct

SEQ ID NO: 4212113 - DNA, 25 bp, Homo sapien
ttctttgtgatgtggtacctcagcc

SEQ ID NO: 4212114 - DNA, 25 bp, Homo sapien
cactacaatgtgatagaacgcgtga

SEQ ID NO: 4212115 - DNA, 25 bp, Homo sapien
cattatgtaacttgtttatactcaa

SEQ ID NO: 4212116 - DNA, 25 bp, Homo sapien
catttagctatcatataggattcca

SEQ ID NO: 4212117 - DNA, 25 bp, Homo sapien
tatactcaacgttttatttctgaga

SEQ ID NO: 4212118 - DNA, 25 bp, Homo sapien
gatgttctgtatacaaatccaattc

SEQ ID NO: 4212119 - DNA, 25 bp, Homo sapien
tttaaaaactcagatgtcttatacc

SEQ ID NO: 4212120 - DNA, 25 bp, Homo sapien
gaagaaatgttaactgcagcagctc

SEQ ID NO: 4212121 - DNA, 25 bp, Homo sapien
ccccgagtgtaaaggtgtgtctgct

SEQ ID NO: 4212122 - DNA, 25 bp, Homo sapien
cgctggctgctctatcacgtggtgc

SEQ ID NO: 4212123 - DNA, 25 bp, Homo sapien
ttcttagctccctggacccggttga

SEQ ID NO: 4212124 - DNA, 25 bp, Homo sapien
ctgcggcgaacgctttcccggagcg

SEQ ID NO: 4212125 - DNA, 25 bp, Homo sapien
tccagccaccgtcaaatccgggtag

SEQ ID NO: 4212126 - DNA, 25 bp, Homo sapien
cctaacaggcctgcggcgaacgctt

SEQ ID NO: 4212127 - DNA, 25 bp, Homo sapien
gcgtttgcagcggtgccgaggaaga

SEQ ID NO: 4212128 - DNA, 25 bp, Homo sapien
ccgctggttgtccaccttgccttgc

SEQ ID NO: 4212129 - DNA, 25 bp, Homo sapien
cgcaccgtgggtctcgggtctcggt

SEQ ID NO: 4212130 - DNA, 25 bp, Homo sapien
cgcctccggtgagcgcgggagaagg

SEQ ID NO: 4212131 - DNA, 25 bp, Homo sapien
gtctcggtgacgagcagctgcccgc

SEQ ID NO: 4212132 - DNA, 25 bp, Homo sapien
ctagagcggagcgtggcccaggttg

SEQ ID NO: 4212133 - DNA, 25 bp, Homo sapien
taaaggcatacataacacggccgtg

SEQ ID NO: 4212134 - DNA, 25 bp, Homo sapien
ttttggccagcatcaactaaaggca

SEQ ID NO: 4212135 - DNA, 25 bp, Homo sapien
tgctcggaatgcaaggtgaccgcga

SEQ ID NO: 4212136 - DNA, 25 bp, Homo sapien
gcgcgccatgcgagctcacagggct

SEQ ID NO: 4212137 - DNA, 25 bp, Homo sapien
tgtgaagtaagcaaataacctgact

SEQ ID NO: 4212138 - DNA, 25 bp, Homo sapien
taaacctcagtaaggctattcagct

SEQ ID NO: 4212139 - DNA, 25 bp, Homo sapien
gaaggtttccatcttattggtcaga

SEQ ID NO: 4212140 - DNA, 25 bp, Homo sapien
ggcatatggcttcctaactcttgat

SEQ ID NO: 4212141 - DNA, 25 bp, Homo sapien
tggtggccacttactcacatgtagc

SEQ ID NO: 4212142 - DNA, 25 bp, Homo sapien
atgaaagggattcctatacatctgc

SEQ ID NO: 4212143 - DNA, 25 bp, Homo sapien
taaggtcttacatgctggactgaaa

SEQ ID NO: 4212144 - DNA, 25 bp, Homo sapien
tctgcattgttcaacatggtggcca

SEQ ID NO: 4212145 - DNA, 25 bp, Homo sapien
tttacatgttgcagaattccagttt

SEQ ID NO: 4212146 - DNA, 25 bp, Homo sapien
tgcttgcatggtttccgaggaaaaa

SEQ ID NO: 4212147 - DNA, 25 bp, Homo sapien
ctctatagataaggtgggttttatt

SEQ ID NO: 4212148 - DNA, 25 bp, Homo sapien
tacattatgcttaggtgtgggtgtt

SEQ ID NO: 4212149 - DNA, 25 bp, Homo sapien
ccagacttacaataaatctcactta

SEQ ID NO: 4212150 - DNA, 25 bp, Homo sapien
tgatgtgacagattatattcactgc

SEQ ID NO: 4212151 - DNA, 25 bp, Homo sapien
cattaatggatgcaggattttgtcg

SEQ ID NO: 4212152 - DNA, 25 bp, Homo sapien
caagttgaggaagttgcactatttc

SEQ ID NO: 4212153 - DNA, 25 bp, Homo sapien
tgttcagcttgtcacaaatttagcc

SEQ ID NO: 4212154 - DNA, 25 bp, Homo sapien
tgagtgtcactatggattcatgggt

SEQ ID NO: 4212155 - DNA, 25 bp, Homo sapien
gatcttgcctgaattattccaatgg

SEQ ID NO: 4212156 - DNA, 25 bp, Homo sapien
taagtttagcatctacaggtgatct

SEQ ID NO: 4212157 - DNA, 25 bp, Homo sapien
tccccaagcacgggcaggcccattt

SEQ ID NO: 4212158 - DNA, 25 bp, Homo sapien
tcagggggaggcagtgttttgccct

SEQ ID NO: 4212159 - DNA, 25 bp, Homo sapien
tagccagggtgcatagctaactcca

SEQ ID NO: 4212160 - DNA, 25 bp, Homo sapien
tctagggcctaacaaacaggcagag

SEQ ID NO: 4212161 - DNA, 25 bp, Homo sapien
tacaggtaaggtctaactatttcca

SEQ ID NO: 4212162 - DNA, 25 bp, Homo sapien
ccaaagcaggtaagtcgcacaacta

SEQ ID NO: 4212163 - DNA, 25 bp, Homo sapien
atgaggaggggtgagtcagaggagc

SEQ ID NO: 4212164 - DNA, 25 bp, Homo sapien
tgccagtgccaaggttaatttaagg

SEQ ID NO: 4212165 - DNA, 25 bp, Homo sapien
tggagaaaagaattgatgaggaggg

SEQ ID NO: 4212166 - DNA, 25 bp, Homo sapien
gagcaagccccttatggaaaaggtc

SEQ ID NO: 4212167 - DNA, 25 bp, Homo sapien
caaaaaccttggtgtagatatctgg

SEQ ID NO: 4212168 - DNA, 25 bp, Homo sapien
ttgagcatttagcttcctggtcctc

SEQ ID NO: 4212169 - DNA, 25 bp, Homo sapien
tactgtgccagatgagtggattcca

SEQ ID NO: 4212170 - DNA, 25 bp, Homo sapien
gcttgcaagtcatcaaggaggtcag

SEQ ID NO: 4212171 - DNA, 25 bp, Homo sapien
ccactccaagatattctacccttat

SEQ ID NO: 4212172 - DNA, 25 bp, Homo sapien
gccagcggtgtaattcagtccgcat

SEQ ID NO: 4212173 - DNA, 25 bp, Homo sapien
aagccagcggtgtaattcagtccgc

SEQ ID NO: 4212174 - DNA, 25 bp, Homo sapien
ccagaagtcccacagtatgctgcct

SEQ ID NO: 4212175 - DNA, 25 bp, Homo sapien
agaagtcccacagtatgctgcctgc

SEQ ID NO: 4212176 - DNA, 25 bp, Homo sapien
aatgtggtatttgtcctatgctcgg

SEQ ID NO: 4212177 - DNA, 25 bp, Homo sapien
ctaagtgtagcttactttgtacctg

SEQ ID NO: 4212178 - DNA, 25 bp, Homo sapien
cctgttgaccaaccgtttatctcta

SEQ ID NO: 4212179 - DNA, 25 bp, Homo sapien
taatggaatccagctaattgtcata

SEQ ID NO: 4212180 - DNA, 25 bp, Homo sapien
tgttaaaaagcctgacgtcactgtg

SEQ ID NO: 4212181 - DNA, 25 bp, Homo sapien
gactgaattgagtagagttgccgca

SEQ ID NO: 4212182 - DNA, 25 bp, Homo sapien
ttctcaacttttcgcatggactctg

SEQ ID NO: 4212183 - DNA, 25 bp, Homo sapien
tagcgttccaagatttcacaacaag

SEQ ID NO: 4212184 - DNA, 25 bp, Homo sapien
cttcctgagtagatgaaactgcaag

SEQ ID NO: 4212185 - DNA, 25 bp, Homo sapien
ttcctgagtagatgaaactgcaagc

SEQ ID NO: 4212186 - DNA, 25 bp, Homo sapien
tgcgtgtgccatgatgggttgctgc

SEQ ID NO: 4212187 - DNA, 25 bp, Homo sapien
tatgcgtgtgccatgatgggttgct

SEQ ID NO: 4212188 - DNA, 25 bp, Homo sapien
taggtatgcgtgtgccatgatgggt

SEQ ID NO: 4212189 - DNA, 25 bp, Homo sapien
aggtatgcgtgtgccatgatgggtt

SEQ ID NO: 4212190 - DNA, 25 bp, Homo sapien
ttgaagcaaagctaggaagacttga

SEQ ID NO: 4212191 - DNA, 25 bp, Homo sapien
aaagacaatgaaatgctggccgggc

SEQ ID NO: 4212192 - DNA, 25 bp, Homo sapien
catgaggaagtatcagacaaactca

SEQ ID NO: 4212193 - DNA, 25 bp, Homo sapien
aaactcaaaataaggaacattctag

SEQ ID NO: 4212194 - DNA, 25 bp, Homo sapien
catactctgaaactaatcatgagga

SEQ ID NO: 4212195 - DNA, 25 bp, Homo sapien
gaagtgcgttcttatgcactgcagg

SEQ ID NO: 4212196 - DNA, 25 bp, Homo sapien
gacaccattccctagtaaagagcct

SEQ ID NO: 4212197 - DNA, 25 bp, Homo sapien
tattaggacttagaactcagatgtt

SEQ ID NO: 4212198 - DNA, 25 bp, Homo sapien
gaatctccaaaactatactgtgacc

SEQ ID NO: 4212199 - DNA, 25 bp, Homo sapien
agctagcaaaatcattgtcccaaat

SEQ ID NO: 4212200 - DNA, 25 bp, Homo sapien
tataccctaagcattacagcaatgg

SEQ ID NO: 4212201 - DNA, 25 bp, Homo sapien
aaaggatggacagatttgactcaat

SEQ ID NO: 4212202 - DNA, 25 bp, Homo sapien
ctgtaagctctgataaaagtaggca

SEQ ID NO: 4212203 - DNA, 25 bp, Homo sapien
tattaaccataagccccagaggaca

SEQ ID NO: 4212204 - DNA, 25 bp, Homo sapien
tatgtgtcgtttttaggagcacacc

SEQ ID NO: 4212205 - DNA, 25 bp, Homo sapien
taaacatatcttataggctcctgtg

SEQ ID NO: 4212206 - DNA, 25 bp, Homo sapien
gccacataggtctttagtcaggtaa

SEQ ID NO: 4212207 - DNA, 25 bp, Homo sapien
tccgccacagagaagatctcgcgag

SEQ ID NO: 4212208 - DNA, 25 bp, Homo sapien
ccgccacagagaagatctcgcgagc

SEQ ID NO: 4212209 - DNA, 25 bp, Homo sapien
gcaacaaaatagaccccggctgtcc

SEQ ID NO: 4212210 - DNA, 25 bp, Homo sapien
ccagaccagccctggatttgctgaa

SEQ ID NO: 4212211 - DNA, 25 bp, Homo sapien
gccctggatttgctgaaaacccgca

SEQ ID NO: 4212212 - DNA, 25 bp, Homo sapien
gctgaaaacccgcaacaaaatagac

SEQ ID NO: 4212213 - DNA, 25 bp, Homo sapien
gcgaggtcagctcgggattgtggac

SEQ ID NO: 4212214 - DNA, 25 bp, Homo sapien
gctcgggattgtggacgcccgggcc

SEQ ID NO: 4212215 - DNA, 25 bp, Homo sapien
gccacaggagtctccggacggcgtc

SEQ ID NO: 4212216 - DNA, 25 bp, Homo sapien
ccctggacgaccaagggcgaggtca

SEQ ID NO: 4212217 - DNA, 25 bp, Homo sapien
agagaatgttgggatttaaatcact

SEQ ID NO: 4212218 - DNA, 25 bp, Homo sapien
cagaacttcgaaaaagcaggaaaga

SEQ ID NO: 4212219 - DNA, 25 bp, Homo sapien
gcttcccagctgcaagaccctcggg

SEQ ID NO: 4212220 - DNA, 25 bp, Homo sapien
gatgaggaccatgggatttcctgag

SEQ ID NO: 4212221 - DNA, 25 bp, Homo sapien
gctgcggtcggtggattctgccata

SEQ ID NO: 4212222 - DNA, 25 bp, Homo sapien
tgcggtcggtggattctgccatata

SEQ ID NO: 4212223 - DNA, 25 bp, Homo sapien
cagggctgcggtcggtggattctgc

SEQ ID NO: 4212224 - DNA, 25 bp, Homo sapien
tcggtggattctgccatatactcca

SEQ ID NO: 4212225 - DNA, 25 bp, Homo sapien
caggatttggacttatcggaacacc

SEQ ID NO: 4212226 - DNA, 25 bp, Homo sapien
gcaggatttggacttatcggaacac

SEQ ID NO: 4212227 - DNA, 25 bp, Homo sapien
ttggacttatcggaacaccacactc

SEQ ID NO: 4212228 - DNA, 25 bp, Homo sapien
gatttggacttatcggaacaccaca

SEQ ID NO: 4212229 - DNA, 25 bp, Homo sapien
acattgtttgcagaacgaaatcgag

SEQ ID NO: 4212230 - DNA, 25 bp, Homo sapien
gaaatcgagacttgtttcggaatac

SEQ ID NO: 4212231 - DNA, 25 bp, Homo sapien
gaacgaaatcgagacttgtttcgga

SEQ ID NO: 4212232 - DNA, 25 bp, Homo sapien
tttgcagaacgaaatcgagacttgt

SEQ ID NO: 4212233 - DNA, 25 bp, Homo sapien
ctcctgcctctcgagtagctaggat

SEQ ID NO: 4212234 - DNA, 25 bp, Homo sapien
ctaggattacatgcgtgccccacca

SEQ ID NO: 4212235 - DNA, 25 bp, Homo sapien
gagtctcgctccatcccccaggatg

SEQ ID NO: 4212236 - DNA, 25 bp, Homo sapien
gtagctaggattacatgcgtgcccc

SEQ ID NO: 4212237 - DNA, 25 bp, Homo sapien
ctaaagcacactgtatccaagttcc

SEQ ID NO: 4212238 - DNA, 25 bp, Homo sapien
aagcaagaagttccctggattctaa

SEQ ID NO: 4212239 - DNA, 25 bp, Homo sapien
ttttttcaagcacaaagcaagaagt

SEQ ID NO: 4212240 - DNA, 25 bp, Homo sapien
tatccaagttcctggtggttgaaaa

SEQ ID NO: 4212241 - DNA, 25 bp, Homo sapien
caaagcctgcatctacaagccgtac

SEQ ID NO: 4212242 - DNA, 25 bp, Homo sapien
gtctcttagaatgaggctcagtcca

SEQ ID NO: 4212243 - DNA, 25 bp, Homo sapien
cagtccaaacaaagcctgcatctac

SEQ ID NO: 4212244 - DNA, 25 bp, Homo sapien
ctgaatagtcagtttaactttaagt

SEQ ID NO: 4212245 - DNA, 25 bp, Homo sapien
tagcttctactctatggcaatctcc

SEQ ID NO: 4212246 - DNA, 25 bp, Homo sapien
cttagcttctactctatggcaatct

SEQ ID NO: 4212247 - DNA, 25 bp, Homo sapien
cttctactctatggcaatctccaca

SEQ ID NO: 4212248 - DNA, 25 bp, Homo sapien
gcttctactctatggcaatctccac

SEQ ID NO: 4212249 - DNA, 25 bp, Homo sapien
agaattaactgttccagatagtaga

SEQ ID NO: 4212250 - DNA, 25 bp, Homo sapien
gaattaactgttccagatagtagaa

SEQ ID NO: 4212251 - DNA, 25 bp, Homo sapien
attaactgttccagatagtagaaag

SEQ ID NO: 4212252 - DNA, 25 bp, Homo sapien
cagaattaactgttccagatagtag

SEQ ID NO: 4212253 - DNA, 25 bp, Homo sapien
aatataagattacttaggtatgttg

SEQ ID NO: 4212254 - DNA, 25 bp, Homo sapien
agattacttaggtatgttgaaataa

SEQ ID NO: 4212255 - DNA, 25 bp, Homo sapien
gacagtactaatccagatattatca

SEQ ID NO: 4212256 - DNA, 25 bp, Homo sapien
acagtactaatccagatattatcag

SEQ ID NO: 4212257 - DNA, 25 bp, Homo sapien
taattaaatgctaggtagaaagaag

SEQ ID NO: 4212258 - DNA, 25 bp, Homo sapien
cctcaagaaatatcatacttaggta

SEQ ID NO: 4212259 - DNA, 25 bp, Homo sapien
tcaatgtcactcacttaactgagag

SEQ ID NO: 4212260 - DNA, 25 bp, Homo sapien
caagattggacagaagtatgtatgc

SEQ ID NO: 4212261 - DNA, 25 bp, Homo sapien
agaaattcgaccatcttctgagcat

SEQ ID NO: 4212262 - DNA, 25 bp, Homo sapien
gagcatgttgttttgaggaataata

SEQ ID NO: 4212263 - DNA, 25 bp, Homo sapien
tacagggaactgtacactgaagaaa

SEQ ID NO: 4212264 - DNA, 25 bp, Homo sapien
tgtacactgaagaaattcgaccatc

SEQ ID NO: 4212265 - DNA, 25 bp, Homo sapien
gtgttactatggatatcttgagaga

SEQ ID NO: 4212266 - DNA, 25 bp, Homo sapien
gttactatggatatcttgagagatc

SEQ ID NO: 4212267 - DNA, 25 bp, Homo sapien
atgtgttactatggatatcttgaga

SEQ ID NO: 4212268 - DNA, 25 bp, Homo sapien
tgtgttactatggatatcttgagag

SEQ ID NO: 4212269 - DNA, 25 bp, Homo sapien
gaatggcactggttactcgaataca

SEQ ID NO: 4212270 - DNA, 25 bp, Homo sapien
tggttactcgaatacacacacaaat

SEQ ID NO: 4212271 - DNA, 25 bp, Homo sapien
ttcccaggctttgtgccagttttgg

SEQ ID NO: 4212272 - DNA, 25 bp, Homo sapien
tgaggtgaatggcactggttactcg

SEQ ID NO: 4212273 - DNA, 25 bp, Homo sapien
tccagaaagtgctcccatcaatatc

SEQ ID NO: 4212274 - DNA, 25 bp, Homo sapien
tgactccagaaagtgctcccatcaa

SEQ ID NO: 4212275 - DNA, 25 bp, Homo sapien
tattgaaagggtgactccagaaagt

SEQ ID NO: 4212276 - DNA, 25 bp, Homo sapien
gggatgacataaactattgaaaggg

SEQ ID NO: 4212277 - DNA, 25 bp, Homo sapien
acctgcagcacgttttatatcttgg

SEQ ID NO: 4212278 - DNA, 25 bp, Homo sapien
agcacctgcagcacgttttatatct

SEQ ID NO: 4212279 - DNA, 25 bp, Homo sapien
gcacctgcagcacgttttatatctt

SEQ ID NO: 4212280 - DNA, 25 bp, Homo sapien
ctgcagcacgttttatatcttggac

SEQ ID NO: 4212281 - DNA, 25 bp, Homo sapien
tcttgcttgacacaagggttcagaa

SEQ ID NO: 4212282 - DNA, 25 bp, Homo sapien
atcagggtccagacaaaacagccta

SEQ ID NO: 4212283 - DNA, 25 bp, Homo sapien
gcctagaaatcctggtagtaaacca

SEQ ID NO: 4212284 - DNA, 25 bp, Homo sapien
tagtaaaccactagagaggccaaat

SEQ ID NO: 4212285 - DNA, 25 bp, Homo sapien
gatgtcttctgtacccagacttccc

SEQ ID NO: 4212286 - DNA, 25 bp, Homo sapien
cagatgtcttctgtacccagacttc

SEQ ID NO: 4212287 - DNA, 25 bp, Homo sapien
agatgtcttctgtacccagacttcc

SEQ ID NO: 4212288 - DNA, 25 bp, Homo sapien
catctggaactctatctgagttcat

SEQ ID NO: 4212289 - DNA, 25 bp, Homo sapien
tctggaactctatctgagttcattt

SEQ ID NO: 4212290 - DNA, 25 bp, Homo sapien
acatctggaactctatctgagttca

SEQ ID NO: 4212291 - DNA, 25 bp, Homo sapien
cacatctggaactctatctgagttc

SEQ ID NO: 4212292 - DNA, 25 bp, Homo sapien
tgctattataccttatctgcagttt

SEQ ID NO: 4212293 - DNA, 25 bp, Homo sapien
ttgctattataccttatctgcagtt

SEQ ID NO: 4212294 - DNA, 25 bp, Homo sapien
tttgctattataccttatctgcagt

SEQ ID NO: 4212295 - DNA, 25 bp, Homo sapien
gacagggtctttcacactaatttca

SEQ ID NO: 4212296 - DNA, 25 bp, Homo sapien
caatgtatgtgaaacgaagtgagcc

SEQ ID NO: 4212297 - DNA, 25 bp, Homo sapien
ttagacttacactccaaccacgctg

SEQ ID NO: 4212298 - DNA, 25 bp, Homo sapien
tgatctcctcttatgaccttgttag

SEQ ID NO: 4212299 - DNA, 25 bp, Homo sapien
cagtttctacgacgctgacgtttgg

SEQ ID NO: 4212300 - DNA, 25 bp, Homo sapien
ctgacgtttggtccggtcatagctc

SEQ ID NO: 4212301 - DNA, 25 bp, Homo sapien
atttccagtttctacgacgctgacg

SEQ ID NO: 4212302 - DNA, 25 bp, Homo sapien
tctacgacgctgacgtttggtccgg

SEQ ID NO: 4212303 - DNA, 25 bp, Homo sapien
cattttttcgaattgcctcatcttc

SEQ ID NO: 4212304 - DNA, 25 bp, Homo sapien
tgttgacattttttcgaattgcctc

SEQ ID NO: 4212305 - DNA, 25 bp, Homo sapien
gacattttttcgaattgcctcatct

SEQ ID NO: 4212306 - DNA, 25 bp, Homo sapien
aaatgttgacattttttcgaattgc

SEQ ID NO: 4212307 - DNA, 25 bp, Homo sapien
catcatcggtgtcactttccacagg

SEQ ID NO: 4212308 - DNA, 25 bp, Homo sapien
cttcatcatcggtgtcactttccac

SEQ ID NO: 4212309 - DNA, 25 bp, Homo sapien
tagagacacttaaggtaactctgtc

SEQ ID NO: 4212310 - DNA, 25 bp, Homo sapien
gtatggaaacagtctacaacatctc

SEQ ID NO: 4212311 - DNA, 25 bp, Homo sapien
tctgtccaacttcttaagcccatgt

SEQ ID NO: 4212312 - DNA, 25 bp, Homo sapien
ctggaggcaaagatagtagagacac

SEQ ID NO: 4212313 - DNA, 25 bp, Homo sapien
tatgtgaaaatactacagtgcctca

SEQ ID NO: 4212314 - DNA, 25 bp, Homo sapien
catccagagtactatactatgtgaa

SEQ ID NO: 4212315 - DNA, 25 bp, Homo sapien
gaagatttagtgaacgttcaaggaa

SEQ ID NO: 4212316 - DNA, 25 bp, Homo sapien
tgcctcatataaaaaagcacagtga

SEQ ID NO: 4212317 - DNA, 25 bp, Homo sapien
cagctactgccctaaactggcaaaa

SEQ ID NO: 4212318 - DNA, 25 bp, Homo sapien
ataaaaaagattgacttgcctcctg

SEQ ID NO: 4212319 - DNA, 25 bp, Homo sapien
ataacgagtctctatttgctataaa

SEQ ID NO: 4212320 - DNA, 25 bp, Homo sapien
cagaaacttatagagagaaaattcc

SEQ ID NO: 4212321 - DNA, 25 bp, Homo sapien
gcattcctcattcaaatctgattaa

SEQ ID NO: 4212322 - DNA, 25 bp, Homo sapien
gaatacttcaaaacgtaagccacag

SEQ ID NO: 4212323 - DNA, 25 bp, Homo sapien
tctgatcttgcttatagaaattgga

SEQ ID NO: 4212324 - DNA, 25 bp, Homo sapien
caatctctttatttagtggcacaca

SEQ ID NO: 4212325 - DNA, 25 bp, Homo sapien
taggacaagccattcctaccaggcc

SEQ ID NO: 4212326 - DNA, 25 bp, Homo sapien
tcttgacacggaagatgtaaacaca

SEQ ID NO: 4212327 - DNA, 25 bp, Homo sapien
tgtaaacacagaccaccaatgagaa

SEQ ID NO: 4212328 - DNA, 25 bp, Homo sapien
caggccaccaccaaagacaggatat

SEQ ID NO: 4212329 - DNA, 25 bp, Homo sapien
tgaggtcactctacaaaacaactgg

SEQ ID NO: 4212330 - DNA, 25 bp, Homo sapien
tattgcaaagggctagatcccactg

SEQ ID NO: 4212331 - DNA, 25 bp, Homo sapien
gggaacatctggactaatcaacagc

SEQ ID NO: 4212332 - DNA, 25 bp, Homo sapien
cacgcttcctgatactatgcattga

SEQ ID NO: 4212333 - DNA, 25 bp, Homo sapien
gagctcaccactatataatcatctg

SEQ ID NO: 4212334 - DNA, 25 bp, Homo sapien
ctgtatatacagtatgagctcacca

SEQ ID NO: 4212335 - DNA, 25 bp, Homo sapien
tcaccactatataatcatctgtaag

SEQ ID NO: 4212336 - DNA, 25 bp, Homo sapien
tacagtatgagctcaccactatata

SEQ ID NO: 4212337 - DNA, 25 bp, Homo sapien
ccagtaaaacctgtaatgtgtagaa

SEQ ID NO: 4212338 - DNA, 25 bp, Homo sapien
taactaacccactcaagacaacact

SEQ ID NO: 4212339 - DNA, 25 bp, Homo sapien
agctactttaaaagaatcgataggg

SEQ ID NO: 4212340 - DNA, 25 bp, Homo sapien
gccaccttccagagtactattaaaa

SEQ ID NO: 4212341 - DNA, 25 bp, Homo sapien
aaggttccggagacatgtgtcccat

SEQ ID NO: 4212342 - DNA, 25 bp, Homo sapien
tggatggaaagcctgatacttggct

SEQ ID NO: 4212343 - DNA, 25 bp, Homo sapien
tcaatgcaccaaccatacagaaaag

SEQ ID NO: 4212344 - DNA, 25 bp, Homo sapien
agtattggtcacaagtgaacagctg

SEQ ID NO: 4212345 - DNA, 25 bp, Homo sapien
gtctttttgagatattgtcacttta

SEQ ID NO: 4212346 - DNA, 25 bp, Homo sapien
tcagtagagtattaaagttccccac

SEQ ID NO: 4212347 - DNA, 25 bp, Homo sapien
ttcctattggactagactcttatca

SEQ ID NO: 4212348 - DNA, 25 bp, Homo sapien
ggattgcccatttgcgctctttcag

SEQ ID NO: 4212349 - DNA, 25 bp, Homo sapien
tacaactagtggtgtctgttcacga

SEQ ID NO: 4212350 - DNA, 25 bp, Homo sapien
catcacaagtgaacagctagaaggt

SEQ ID NO: 4212351 - DNA, 25 bp, Homo sapien
tgttccacggatgaaaagcctgata

SEQ ID NO: 4212352 - DNA, 25 bp, Homo sapien
gaaggctaacagagtatccatcaca

SEQ ID NO: 4212353 - DNA, 25 bp, Homo sapien
gccatctgtataatctctaggatat

SEQ ID NO: 4212354 - DNA, 25 bp, Homo sapien
tataatctctaggatataggctggg

SEQ ID NO: 4212355 - DNA, 25 bp, Homo sapien
gatacttatgcctatatgggaagaa

SEQ ID NO: 4212356 - DNA, 25 bp, Homo sapien
aaaaagtccatgaccagtaaggaag

SEQ ID NO: 4212357 - DNA, 25 bp, Homo sapien
tgtcctatgagttagctaccagtgt

SEQ ID NO: 4212358 - DNA, 25 bp, Homo sapien
tacagagctaagtgataaagccagc

SEQ ID NO: 4212359 - DNA, 25 bp, Homo sapien
tagtgtttactatggttctgggcct

SEQ ID NO: 4212360 - DNA, 25 bp, Homo sapien
ttttgcaagaaagggtacagagcta

SEQ ID NO: 4212361 - DNA, 25 bp, Homo sapien
tgcctctcccatggaaaggacaggt

SEQ ID NO: 4212362 - DNA, 25 bp, Homo sapien
catggaggatggttctcttttaaca

SEQ ID NO: 4212363 - DNA, 25 bp, Homo sapien
ggacaggtcttgtctcatggaggat

SEQ ID NO: 4212364 - DNA, 25 bp, Homo sapien
tggaggacacttgtcaatgactgcc

SEQ ID NO: 4212365 - DNA, 25 bp, Homo sapien
taatctcaaggcaattaatacttac

SEQ ID NO: 4212366 - DNA, 25 bp, Homo sapien
aaatgggcagtgaatacaacaaaat

SEQ ID NO: 4212367 - DNA, 25 bp, Homo sapien
gataatataaacacgaagtaaagaa

SEQ ID NO: 4212368 - DNA, 25 bp, Homo sapien
tgattccagttttaagtggttatat

SEQ ID NO: 4212369 - DNA, 25 bp, Homo sapien
tgtgctgcaattttctgttgactca

SEQ ID NO: 4212370 - DNA, 25 bp, Homo sapien
gtgctgcaattttctgttgactcat

SEQ ID NO: 4212371 - DNA, 25 bp, Homo sapien
ctgtgctgcaattttctgttgactc

SEQ ID NO: 4212372 - DNA, 25 bp, Homo sapien
tctcctctgaggatccttttgtctt

SEQ ID NO: 4212373 - DNA, 25 bp, Homo sapien
caggtttataatctccttctcctct

SEQ ID NO: 4212374 - DNA, 25 bp, Homo sapien
ccttctcctctgaggatccttttgt

SEQ ID NO: 4212375 - DNA, 25 bp, Homo sapien
tcctctgaggatccttttgtctttc

SEQ ID NO: 4212376 - DNA, 25 bp, Homo sapien
gatggtgaaatgactgcttctttgt

SEQ ID NO: 4212377 - DNA, 25 bp, Homo sapien
ttgatggtgaaatgactgcttcttt

SEQ ID NO: 4212378 - DNA, 25 bp, Homo sapien
tggtgaaatgactgcttctttgttc

SEQ ID NO: 4212379 - DNA, 25 bp, Homo sapien
ggtgaaatgactgcttctttgttca

SEQ ID NO: 4212380 - DNA, 25 bp, Homo sapien
cacctttgccgtgtcatcctctttg

SEQ ID NO: 4212381 - DNA, 25 bp, Homo sapien
tgccgtgtcatcctctttggaacca

SEQ ID NO: 4212382 - DNA, 25 bp, Homo sapien
tttgccgtgtcatcctctttggaac

SEQ ID NO: 4212383 - DNA, 25 bp, Homo sapien
ctttgccgtgtcatcctctttggaa

SEQ ID NO: 4212384 - DNA, 25 bp, Homo sapien
gagtaatgtcattacctactgtgtg

SEQ ID NO: 4212385 - DNA, 25 bp, Homo sapien
ttggccaaaccaatcacaaacctaa

SEQ ID NO: 4212386 - DNA, 25 bp, Homo sapien
agcctgtgtgtttaagagtaatgtc

SEQ ID NO: 4212387 - DNA, 25 bp, Homo sapien
gtcattacctactgtgtgagcaatg

SEQ ID NO: 4212388 - DNA, 25 bp, Homo sapien
tgtattgggccaccggaagacaagc

SEQ ID NO: 4212389 - DNA, 25 bp, Homo sapien
gcaggaactcaacagctccagttaa

SEQ ID NO: 4212390 - DNA, 25 bp, Homo sapien
tccaaggtgagctagagagaaagat

SEQ ID NO: 4212391 - DNA, 25 bp, Homo sapien
gaatgccaaagactacgttttgcag

SEQ ID NO: 4212392 - DNA, 25 bp, Homo sapien
tgtatccactgttggtgctatacat

SEQ ID NO: 4212393 - DNA, 25 bp, Homo sapien
ctgacttctggtattcactctgctg

SEQ ID NO: 4212394 - DNA, 25 bp, Homo sapien
aacttggactccaaatcttcacctc

SEQ ID NO: 4212395 - DNA, 25 bp, Homo sapien
cctctggtctgacttctggtattca

SEQ ID NO: 4212396 - DNA, 25 bp, Homo sapien
tcaacatgaggaattggttgccaaa

SEQ ID NO: 4212397 - DNA, 25 bp, Homo sapien
actgcgaacgagctgcagaaaacca

SEQ ID NO: 4212398 - DNA, 25 bp, Homo sapien
tgtagaagtcgttgggctgcattcc

SEQ ID NO: 4212399 - DNA, 25 bp, Homo sapien
ttcctccgaggaccagtctgatcgc

SEQ ID NO: 4212400 - DNA, 25 bp, Homo sapien
ctggagaactgcgaacgagctgcag

SEQ ID NO: 4212401 - DNA, 25 bp, Homo sapien
gaggtgacagcgacgcctcagccgc

SEQ ID NO: 4212402 - DNA, 25 bp, Homo sapien
cagcagccggaggtgacagcgacgc

SEQ ID NO: 4212403 - DNA, 25 bp, Homo sapien
agccggaggtgacagcgacgcctca

SEQ ID NO: 4212404 - DNA, 25 bp, Homo sapien
ccggaggtgacagcgacgcctcagc

SEQ ID NO: 4212405 - DNA, 25 bp, Homo sapien
tgctgcgcttacacccgggcttctt

SEQ ID NO: 4212406 - DNA, 25 bp, Homo sapien
gtttcagacgcagtcctgctgcgct

SEQ ID NO: 4212407 - DNA, 25 bp, Homo sapien
caaataaatggggtgggatgcttgc

SEQ ID NO: 4212408 - DNA, 25 bp, Homo sapien
cacttagcagcctgatgccgagttt

SEQ ID NO: 4212409 - DNA, 25 bp, Homo sapien
ggagatacagaaccgggagccttca

SEQ ID NO: 4212410 - DNA, 25 bp, Homo sapien
gaagatattcgagcgcggagcgtaa

SEQ ID NO: 4212411 - DNA, 25 bp, Homo sapien
gcgtttcacacgttcagaggcacca

SEQ ID NO: 4212412 - DNA, 25 bp, Homo sapien
tcaaaagaggctttcgctcccggac

SEQ ID NO: 4212413 - DNA, 25 bp, Homo sapien
gattatagcccaccttactccagtg

SEQ ID NO: 4212414 - DNA, 25 bp, Homo sapien
cagaaggctggatgcacaaaaggtt

SEQ ID NO: 4212415 - DNA, 25 bp, Homo sapien
acttcactgacaagacgggaactga

SEQ ID NO: 4212416 - DNA, 25 bp, Homo sapien
aagccagagatccagtgttagcagg

SEQ ID NO: 4212417 - DNA, 25 bp, Homo sapien
gtccagctgcctaattctgaatata

SEQ ID NO: 4212418 - DNA, 25 bp, Homo sapien
gagtccagctgcctaattctgaata

SEQ ID NO: 4212419 - DNA, 25 bp, Homo sapien
tccagctgcctaattctgaatatat

SEQ ID NO: 4212420 - DNA, 25 bp, Homo sapien
actgagtccagctgcctaattctga

SEQ ID NO: 4212421 - DNA, 25 bp, Homo sapien
gaagacactgcgactccggagacag

SEQ ID NO: 4212422 - DNA, 25 bp, Homo sapien
tccggcggccgaagacactgcgact

SEQ ID NO: 4212423 - DNA, 25 bp, Homo sapien
cttccggcggccgaagacactgcga

SEQ ID NO: 4212424 - DNA, 25 bp, Homo sapien
gccgaagacactgcgactccggaga

SEQ ID NO: 4212425 - DNA, 25 bp, Homo sapien
aaaagaagaagatccgcacgtcacc

SEQ ID NO: 4212426 - DNA, 25 bp, Homo sapien
tgcagggtcttgagtatcttctacc

SEQ ID NO: 4212427 - DNA, 25 bp, Homo sapien
caatgttccaagtcagggttgcagg

SEQ ID NO: 4212428 - DNA, 25 bp, Homo sapien
cacaggaagaattctcaccctagaa

SEQ ID NO: 4212429 - DNA, 25 bp, Homo sapien
ccggcgtagataacatcttcaagcc

SEQ ID NO: 4212430 - DNA, 25 bp, Homo sapien
cacacattcccccttactcttcttc

SEQ ID NO: 4212431 - DNA, 25 bp, Homo sapien
tccacacattcccccttactcttct

SEQ ID NO: 4212432 - DNA, 25 bp, Homo sapien
cttccacacattcccccttactctt

SEQ ID NO: 4212433 - DNA, 25 bp, Homo sapien
tacttccacacattcccccttactc

SEQ ID NO: 4212434 - DNA, 25 bp, Homo sapien
gctcagagcaggcagacgtttccag

SEQ ID NO: 4212435 - DNA, 25 bp, Homo sapien
tcagagcaggcagacgtttccagct

SEQ ID NO: 4212436 - DNA, 25 bp, Homo sapien
agcaggcagacgtttccagctctcc

SEQ ID NO: 4212437 - DNA, 25 bp, Homo sapien
agagcaggcagacgtttccagctct

SEQ ID NO: 4212438 - DNA, 25 bp, Homo sapien
tgttataagcagaaacagcttctcc

SEQ ID NO: 4212439 - DNA, 25 bp, Homo sapien
tctgttataagcagaaacagcttct

SEQ ID NO: 4212440 - DNA, 25 bp, Homo sapien
ctgttataagcagaaacagcttctc

SEQ ID NO: 4212441 - DNA, 25 bp, Homo sapien
cctggcagtttaagtcatgggtgac

SEQ ID NO: 4212442 - DNA, 25 bp, Homo sapien
cagccaagtccagtgttcagtggca

SEQ ID NO: 4212443 - DNA, 25 bp, Homo sapien
aaacctgatgattgttccccagcac

SEQ ID NO: 4212444 - DNA, 25 bp, Homo sapien
tcaatcaggactactctaagaggcc

SEQ ID NO: 4212445 - DNA, 25 bp, Homo sapien
cagtttcaactcactatgggtcggc

SEQ ID NO: 4212446 - DNA, 25 bp, Homo sapien
tgttttccaagaagttgttggacag

SEQ ID NO: 4212447 - DNA, 25 bp, Homo sapien
gtttcaactcactatgggtcggctg

SEQ ID NO: 4212448 - DNA, 25 bp, Homo sapien
tcaactcactatgggtcggctgtgg

SEQ ID NO: 4212449 - DNA, 25 bp, Homo sapien
taccattacacagtagtctgtttta

SEQ ID NO: 4212450 - DNA, 25 bp, Homo sapien
tctcatttaccattacacagtagtc

SEQ ID NO: 4212451 - DNA, 25 bp, Homo sapien
cttatggatctttccttgtcagcaa

SEQ ID NO: 4212452 - DNA, 25 bp, Homo sapien
ttatggatctttccttgtcagcaat

SEQ ID NO: 4212453 - DNA, 25 bp, Homo sapien
gaggctttttgcctctatggatgcc

SEQ ID NO: 4212454 - DNA, 25 bp, Homo sapien
aaaacagtccagctgcaaatgtgga

SEQ ID NO: 4212455 - DNA, 25 bp, Homo sapien
tctctcagatggaaagggattggct

SEQ ID NO: 4212456 - DNA, 25 bp, Homo sapien
cctctcatcctgccttaaatcaaag

SEQ ID NO: 4212457 - DNA, 25 bp, Homo sapien
cgctatgcagccgtgaagataaatt

SEQ ID NO: 4212458 - DNA, 25 bp, Homo sapien
gcattgcaccttcaacgctatgcag

SEQ ID NO: 4212459 - DNA, 25 bp, Homo sapien
tctagtaaactcagacagggagtca

SEQ ID NO: 4212460 - DNA, 25 bp, Homo sapien
cctttttaaggtgcctagcattgca

SEQ ID NO: 4212461 - DNA, 25 bp, Homo sapien
ctttgctattgtgttcataccagca

SEQ ID NO: 4212462 - DNA, 25 bp, Homo sapien
ttgtgttcataccagcaatagccaa

SEQ ID NO: 4212463 - DNA, 25 bp, Homo sapien
tgtgttcataccagcaatagccaaa

SEQ ID NO: 4212464 - DNA, 25 bp, Homo sapien
tttgctattgtgttcataccagcaa

SEQ ID NO: 4212465 - DNA, 25 bp, Homo sapien
gacagaatccaaggccgagggtttg

SEQ ID NO: 4212466 - DNA, 25 bp, Homo sapien
cactggatggctttagaccctttgg

SEQ ID NO: 4212467 - DNA, 25 bp, Homo sapien
ctttctgcccgggtacaggtgaaca

SEQ ID NO: 4212468 - DNA, 25 bp, Homo sapien
gaaatcagctgggtcaagagtgaag

SEQ ID NO: 4212469 - DNA, 25 bp, Homo sapien
tacctgaatagataaattgagacca

SEQ ID NO: 4212470 - DNA, 25 bp, Homo sapien
agtacttgtcactgtattcatggca

SEQ ID NO: 4212471 - DNA, 25 bp, Homo sapien
tgcaatttcgtactacctgaataga

SEQ ID NO: 4212472 - DNA, 25 bp, Homo sapien
aaccacacagagtcctaagggcaat

SEQ ID NO: 4212473 - DNA, 25 bp, Homo sapien
ttctctcctttgtagcctctagggc

SEQ ID NO: 4212474 - DNA, 25 bp, Homo sapien
ctttctctcctttgtagcctctagg

SEQ ID NO: 4212475 - DNA, 25 bp, Homo sapien
cctttgtagcctctagggccttggg

SEQ ID NO: 4212476 - DNA, 25 bp, Homo sapien
ttggggcccaacaactcctggtggc

SEQ ID NO: 4212477 - DNA, 25 bp, Homo sapien
gaaccagggatttcctggggcagaa

SEQ ID NO: 4212478 - DNA, 25 bp, Homo sapien
tgtgctcccggttttcctgggtatc

SEQ ID NO: 4212479 - DNA, 25 bp, Homo sapien
cttggtccccacgttctcctttgag

SEQ ID NO: 4212480 - DNA, 25 bp, Homo sapien
tggcgccaggccctccgtgcaggcc

SEQ ID NO: 4212481 - DNA, 25 bp, Homo sapien
tggtacaattcccacatgtgtctcc

SEQ ID NO: 4212482 - DNA, 25 bp, Homo sapien
tcactcctcccaaaccaatgtttcc

SEQ ID NO: 4212483 - DNA, 25 bp, Homo sapien
tacaattcccacatgtgtctccctt

SEQ ID NO: 4212484 - DNA, 25 bp, Homo sapien
cacagcagcccttatcccccatctc

SEQ ID NO: 4212485 - DNA, 25 bp, Homo sapien
agaatctccacagcagcccttatcc

SEQ ID NO: 4212486 - DNA, 25 bp, Homo sapien
tcccctctccccagaatctccacag

SEQ ID NO: 4212487 - DNA, 25 bp, Homo sapien
cccagaatctccacagcagccctta

SEQ ID NO: 4212488 - DNA, 25 bp, Homo sapien
tttgacaaaccagcgctgaaagccg

SEQ ID NO: 4212489 - DNA, 25 bp, Homo sapien
ttggagcctttaaagccccgagagc

SEQ ID NO: 4212490 - DNA, 25 bp, Homo sapien
aatgtcacccttcggcccagtaggt

SEQ ID NO: 4212491 - DNA, 25 bp, Homo sapien
tctgggccaccagactgattcgagc

SEQ ID NO: 4212492 - DNA, 25 bp, Homo sapien
tatggtgaaattccagaagtttcct

SEQ ID NO: 4212493 - DNA, 25 bp, Homo sapien
tggtgaaattccagaagtttcctct

SEQ ID NO: 4212494 - DNA, 25 bp, Homo sapien
ttatggtgaaattccagaagtttcc

SEQ ID NO: 4212495 - DNA, 25 bp, Homo sapien
tgaaattccagaagtttcctctggg

SEQ ID NO: 4212496 - DNA, 25 bp, Homo sapien
aatgttctatcatgaagaaaaggca

SEQ ID NO: 4212497 - DNA, 25 bp, Homo sapien
tgcattgcaaatgaactcccaaatc

SEQ ID NO: 4212498 - DNA, 25 bp, Homo sapien
taatgatgtcaaagaatttatccta

SEQ ID NO: 4212499 - DNA, 25 bp, Homo sapien
ttttacccaatacacaagtccatat

SEQ ID NO: 4212500 - DNA, 25 bp, Homo sapien
gacaagcagttacttagtccaacca

SEQ ID NO: 4212501 - DNA, 25 bp, Homo sapien
aaagacatagtcagagcatctcaga

SEQ ID NO: 4212502 - DNA, 25 bp, Homo sapien
agtcaccgccatctaatgcctgtag

SEQ ID NO: 4212503 - DNA, 25 bp, Homo sapien
tctcagaaaccttggctaaaatgtc

SEQ ID NO: 4212504 - DNA, 25 bp, Homo sapien
caaaagttatcaagcctaatgaaca

SEQ ID NO: 4212505 - DNA, 25 bp, Homo sapien
gtttccgaaatgtagctacacaaaa

SEQ ID NO: 4212506 - DNA, 25 bp, Homo sapien
ttcataacgactgtttataggtttc

SEQ ID NO: 4212507 - DNA, 25 bp, Homo sapien
tgaacataatagtcattccactcat

SEQ ID NO: 4212508 - DNA, 25 bp, Homo sapien
cacacatgggcagtttactctgggc

SEQ ID NO: 4212509 - DNA, 25 bp, Homo sapien
gagctgttagcactgctgagtcaga

SEQ ID NO: 4212510 - DNA, 25 bp, Homo sapien
cactgtcactcgcaaaatagtagag

SEQ ID NO: 4212511 - DNA, 25 bp, Homo sapien
tatctgtgggtaaaactgtctgcga

SEQ ID NO: 4212512 - DNA, 25 bp, Homo sapien
tcttcccgaggagctaaagtagggc

SEQ ID NO: 4212513 - DNA, 25 bp, Homo sapien
gcagcagcccagtaggaatagtgta

SEQ ID NO: 4212514 - DNA, 25 bp, Homo sapien
agtcatttgtctggatgcatccgca

SEQ ID NO: 4212515 - DNA, 25 bp, Homo sapien
tgtaaattcccctccattgcaagtg

SEQ ID NO: 4212516 - DNA, 25 bp, Homo sapien
ctgttgaaaatgtcataagggctcc

SEQ ID NO: 4212517 - DNA, 25 bp, Homo sapien
gttgaaaatgtcataagggctccca

SEQ ID NO: 4212518 - DNA, 25 bp, Homo sapien
cataagggctcccatggctttgagc

SEQ ID NO: 4212519 - DNA, 25 bp, Homo sapien
taagggctcccatggctttgagcat

SEQ ID NO: 4212520 - DNA, 25 bp, Homo sapien
cactctgctggttctaaagccacaa

SEQ ID NO: 4212521 - DNA, 25 bp, Homo sapien
ctgattggaaccacagcatgacacc

SEQ ID NO: 4212522 - DNA, 25 bp, Homo sapien
ggaaccacagcatgacacctgggct

SEQ ID NO: 4212523 - DNA, 25 bp, Homo sapien
tgctggttctaaagccacaaatgct

SEQ ID NO: 4212524 - DNA, 25 bp, Homo sapien
cagaggtcttgctgatggtgtgtgc

SEQ ID NO: 4212525 - DNA, 25 bp, Homo sapien
agagcaatgtgcttgggaactggca

SEQ ID NO: 4212526 - DNA, 25 bp, Homo sapien
agcacgctgcagaggtcttgctgat

SEQ ID NO: 4212527 - DNA, 25 bp, Homo sapien
acgctgcagaggtcttgctgatggt

SEQ ID NO: 4212528 - DNA, 25 bp, Homo sapien
cactgatttgtatttgcgatgcctt

SEQ ID NO: 4212529 - DNA, 25 bp, Homo sapien
atcttgtagcgctgcctggagagca

SEQ ID NO: 4212530 - DNA, 25 bp, Homo sapien
cagcagtctcagtgattctttcgaa

SEQ ID NO: 4212531 - DNA, 25 bp, Homo sapien
ggagagcatgtataggaattttggc

SEQ ID NO: 4212532 - DNA, 25 bp, Homo sapien
tgtagtcatttgtctttgtctcctt

SEQ ID NO: 4212533 - DNA, 25 bp, Homo sapien
gttgtagtcatttgtctttgtctcc

SEQ ID NO: 4212534 - DNA, 25 bp, Homo sapien
tgtctttgtctccttgtattcagcc

SEQ ID NO: 4212535 - DNA, 25 bp, Homo sapien
tctttgtctccttgtattcagccat

SEQ ID NO: 4212536 - DNA, 25 bp, Homo sapien
catgagagtcacttgtcttagccat

SEQ ID NO: 4212537 - DNA, 25 bp, Homo sapien
cttctacatgagagtcacttgtctt

SEQ ID NO: 4212538 - DNA, 25 bp, Homo sapien
tacatgagagtcacttgtcttagcc

SEQ ID NO: 4212539 - DNA, 25 bp, Homo sapien
tctacatgagagtcacttgtcttag

SEQ ID NO: 4212540 - DNA, 25 bp, Homo sapien
tgaggccagttctcatctaggtgtg

SEQ ID NO: 4212541 - DNA, 25 bp, Homo sapien
actacagataaaatccaccagcttc

SEQ ID NO: 4212542 - DNA, 25 bp, Homo sapien
gcttcaggcgcattttatgaggcca

SEQ ID NO: 4212543 - DNA, 25 bp, Homo sapien
acagagtgaatctttgaacatcatc

SEQ ID NO: 4212544 - DNA, 25 bp, Homo sapien
cacacgaattgtggtaggagtcaca

SEQ ID NO: 4212545 - DNA, 25 bp, Homo sapien
aagagttggaactgtctgaggagca

SEQ ID NO: 4212546 - DNA, 25 bp, Homo sapien
taagtgatcatagccaatggagagc

SEQ ID NO: 4212547 - DNA, 25 bp, Homo sapien
gattgaaaagaggagcaaggactga

SEQ ID NO: 4212548 - DNA, 25 bp, Homo sapien
ttaatgtagaatgataactcccttg

SEQ ID NO: 4212549 - DNA, 25 bp, Homo sapien
tttttcattacgatgaaggtgttta

SEQ ID NO: 4212550 - DNA, 25 bp, Homo sapien
aatgataactcccttgagtctcaga

SEQ ID NO: 4212551 - DNA, 25 bp, Homo sapien
atgaaggtgtttagaggtttttgat

SEQ ID NO: 4212552 - DNA, 25 bp, Homo sapien
tttgatccagaatagatccagccat

SEQ ID NO: 4212553 - DNA, 25 bp, Homo sapien
ttttgatccagaatagatccagcca

SEQ ID NO: 4212554 - DNA, 25 bp, Homo sapien
tctgattttgatccagaatagatcc

SEQ ID NO: 4212555 - DNA, 25 bp, Homo sapien
gattttgatccagaatagatccagc

SEQ ID NO: 4212556 - DNA, 25 bp, Homo sapien
taaggttccggatgtgatcacaact

SEQ ID NO: 4212557 - DNA, 25 bp, Homo sapien
taaaccccacaatagttgctcagga

SEQ ID NO: 4212558 - DNA, 25 bp, Homo sapien
gcagcagaggaatcttaaggttccg

SEQ ID NO: 4212559 - DNA, 25 bp, Homo sapien
gatcacaactagagcagaactccgg

SEQ ID NO: 4212560 - DNA, 25 bp, Homo sapien
gataactctgagaactggacattca

SEQ ID NO: 4212561 - DNA, 25 bp, Homo sapien
caatatacggagctcacactatgct

SEQ ID NO: 4212562 - DNA, 25 bp, Homo sapien
gacattcaggctccaaggttcctca

SEQ ID NO: 4212563 - DNA, 25 bp, Homo sapien
catgcactactgacactgaatggca

SEQ ID NO: 4212564 - DNA, 25 bp, Homo sapien
tatattgcaaatacggaaaacccca

SEQ ID NO: 4212565 - DNA, 25 bp, Homo sapien
caaggatcactgtttagttaggaag

SEQ ID NO: 4212566 - DNA, 25 bp, Homo sapien
gaaaggcatctggtatagcggttaa

SEQ ID NO: 4212567 - DNA, 25 bp, Homo sapien
gaagcgatcatcttaagtagaaagg

SEQ ID NO: 4212568 - DNA, 25 bp, Homo sapien
ccatttcagggtaatgcagtaagag

SEQ ID NO: 4212569 - DNA, 25 bp, Homo sapien
ccacggggatgacacagccacaggg

SEQ ID NO: 4212570 - DNA, 25 bp, Homo sapien
tatgattacttataaccaacaccat

SEQ ID NO: 4212571 - DNA, 25 bp, Homo sapien
taagagattaatggaccacggggat

SEQ ID NO: 4212572 - DNA, 25 bp, Homo sapien
tcattctgctgttaaagaactctga

SEQ ID NO: 4212573 - DNA, 25 bp, Homo sapien
ttcattctgctgttaaagaactctg

SEQ ID NO: 4212574 - DNA, 25 bp, Homo sapien
tttggttatatacctacccagcagt

SEQ ID NO: 4212575 - DNA, 25 bp, Homo sapien
tccactgtatataagtaaacatctg

SEQ ID NO: 4212576 - DNA, 25 bp, Homo sapien
actgtatataagtaaacatctgttg

SEQ ID NO: 4212577 - DNA, 25 bp, Homo sapien
ttttggttatatacctacccagcag

SEQ ID NO: 4212578 - DNA, 25 bp, Homo sapien
caatttttgcactcaccttgtagaa

SEQ ID NO: 4212579 - DNA, 25 bp, Homo sapien
gatgttgcaagctatctccacagcc

SEQ ID NO: 4212580 - DNA, 25 bp, Homo sapien
cccaagtagttgtaagaagatcagg

SEQ ID NO: 4212581 - DNA, 25 bp, Homo sapien
aacttctcgaaccaccactgcagtt

SEQ ID NO: 4212582 - DNA, 25 bp, Homo sapien
tgtccactggagcttttgaatcacc

SEQ ID NO: 4212583 - DNA, 25 bp, Homo sapien
gagccaatctgtgttagcttgcaac

SEQ ID NO: 4212584 - DNA, 25 bp, Homo sapien
tacatgaggacttgtgggttcacct

SEQ ID NO: 4212585 - DNA, 25 bp, Homo sapien
ctttggagcaggcatcgacatctgc

SEQ ID NO: 4212586 - DNA, 25 bp, Homo sapien
ttaataatctactgcctggtaagtc

SEQ ID NO: 4212587 - DNA, 25 bp, Homo sapien
tactgtgtttcctgaccctgaacca

SEQ ID NO: 4212588 - DNA, 25 bp, Homo sapien
cagcttcctatactgtgtttcctga

SEQ ID NO: 4212589 - DNA, 25 bp, Homo sapien
taataatctactgcctggtaagtcc

SEQ ID NO: 4212590 - DNA, 25 bp, Homo sapien
aagacacctctattgccttcagaag

SEQ ID NO: 4212591 - DNA, 25 bp, Homo sapien
gagaattctactcccctcagggttg

SEQ ID NO: 4212592 - DNA, 25 bp, Homo sapien
tcagggttggcttctctttgttcta

SEQ ID NO: 4212593 - DNA, 25 bp, Homo sapien
gaagaagaacaacctcttacattga

SEQ ID NO: 4212594 - DNA, 25 bp, Homo sapien
cagtctacaccagtgttttgtaaac

SEQ ID NO: 4212595 - DNA, 25 bp, Homo sapien
tcatccagtacaggttacagctgtg

SEQ ID NO: 4212596 - DNA, 25 bp, Homo sapien
ggttggagtggtatggacagaattt

SEQ ID NO: 4212597 - DNA, 25 bp, Homo sapien
gttgtctggttggagtggtatggac

SEQ ID NO: 4212598 - DNA, 25 bp, Homo sapien
gagtggtatggacagaattttgctt

SEQ ID NO: 4212599 - DNA, 25 bp, Homo sapien
ctcttctcaaactctcattgtcaat

SEQ ID NO: 4212600 - DNA, 25 bp, Homo sapien
caaactctcattgtcaatggtggta

SEQ ID NO: 4212601 - DNA, 25 bp, Homo sapien
actctcattgtcaatggtggtagca

SEQ ID NO: 4212602 - DNA, 25 bp, Homo sapien
tctcaaactctcattgtcaatggtg

SEQ ID NO: 4212603 - DNA, 25 bp, Homo sapien
atcagtgtaactgatcccattcctg

SEQ ID NO: 4212604 - DNA, 25 bp, Homo sapien
tcagtgtaactgatcccattcctgg

SEQ ID NO: 4212605 - DNA, 25 bp, Homo sapien
cctggagtgctcttttctgagaagc

SEQ ID NO: 4212606 - DNA, 25 bp, Homo sapien
gatcagtgtaactgatcccattcct

SEQ ID NO: 4212607 - DNA, 25 bp, Homo sapien
ctgatcctttcagtgcagcattaga

SEQ ID NO: 4212608 - DNA, 25 bp, Homo sapien
gaaacagggcatagtatcctctttt

SEQ ID NO: 4212609 - DNA, 25 bp, Homo sapien
gcattagaaacagggcatagtatcc

SEQ ID NO: 4212610 - DNA, 25 bp, Homo sapien
ctttcagtgcagcattagaaacagg

SEQ ID NO: 4212611 - DNA, 25 bp, Homo sapien
ctgaagtgacaacgctgtgcggcaa

SEQ ID NO: 4212612 - DNA, 25 bp, Homo sapien
aacgctgtgcggcaatcccagcctt

SEQ ID NO: 4212613 - DNA, 25 bp, Homo sapien
gtgacaacgctgtgcggcaatccca

SEQ ID NO: 4212614 - DNA, 25 bp, Homo sapien
aagtgacaacgctgtgcggcaatcc

SEQ ID NO: 4212615 - DNA, 25 bp, Homo sapien
tgtcttccacggcagctgatctgtg

SEQ ID NO: 4212616 - DNA, 25 bp, Homo sapien
tgaaaagccatgatactccactgag

SEQ ID NO: 4212617 - DNA, 25 bp, Homo sapien
gctcatcagcagtctgtctcctgtc

SEQ ID NO: 4212618 - DNA, 25 bp, Homo sapien
aaagcccgtttgcacttcactgtca

SEQ ID NO: 4212619 - DNA, 25 bp, Homo sapien
gagtccacagcatgcaagatagtaa

SEQ ID NO: 4212620 - DNA, 25 bp, Homo sapien
agctgcataagggaaaggcattgca

SEQ ID NO: 4212621 - DNA, 25 bp, Homo sapien
gaaaggcattgcaataacttcagag

SEQ ID NO: 4212622 - DNA, 25 bp, Homo sapien
cagcatgcaagatagtaactatggg

SEQ ID NO: 4212623 - DNA, 25 bp, Homo sapien
tattttctcggaatgttggcaggag

SEQ ID NO: 4212624 - DNA, 25 bp, Homo sapien
ttttctcggaatgttggcaggagaa

SEQ ID NO: 4212625 - DNA, 25 bp, Homo sapien
ttattttctcggaatgttggcagga

SEQ ID NO: 4212626 - DNA, 25 bp, Homo sapien
ttctcggaatgttggcaggagaaag

SEQ ID NO: 4212627 - DNA, 25 bp, Homo sapien
cactatggtgtacttgtaagaaaaa

SEQ ID NO: 4212628 - DNA, 25 bp, Homo sapien
tcacacaggagctaggaagtcaacc

SEQ ID NO: 4212629 - DNA, 25 bp, Homo sapien
caagcaaacaacaaccacatctgaa

SEQ ID NO: 4212630 - DNA, 25 bp, Homo sapien
aagacccttcactatggtgtacttg

SEQ ID NO: 4212631 - DNA, 25 bp, Homo sapien
gaaagaatcatcagggcaactggga

SEQ ID NO: 4212632 - DNA, 25 bp, Homo sapien
gcattcttgtaaagccccagtagcc

SEQ ID NO: 4212633 - DNA, 25 bp, Homo sapien
gagaaactacccacttgttcaggca

SEQ ID NO: 4212634 - DNA, 25 bp, Homo sapien
caactgggacagtattctggactca

SEQ ID NO: 4212635 - DNA, 25 bp, Homo sapien
cagatcctatgggtgactagcctca

SEQ ID NO: 4212636 - DNA, 25 bp, Homo sapien
gctgaggaactaacccatctgggca

SEQ ID NO: 4212637 - DNA, 25 bp, Homo sapien
ttctcctgggagacatgtgctactc

SEQ ID NO: 4212638 - DNA, 25 bp, Homo sapien
tgctatctcctctgagccaacaagg

SEQ ID NO: 4212639 - DNA, 25 bp, Homo sapien
atttgtgatactgcctgagacacag

SEQ ID NO: 4212640 - DNA, 25 bp, Homo sapien
tgagttcatcttcagctgctatcaa

SEQ ID NO: 4212641 - DNA, 25 bp, Homo sapien
gctgctatcaaccatggaaatttgc

SEQ ID NO: 4212642 - DNA, 25 bp, Homo sapien
tgagacacagaagccctaatactgc

SEQ ID NO: 4212643 - DNA, 25 bp, Homo sapien
caatccaaatgcttgaattaagttc

SEQ ID NO: 4212644 - DNA, 25 bp, Homo sapien
tgagcctcaatccaaatgcttgaat

SEQ ID NO: 4212645 - DNA, 25 bp, Homo sapien
atggccctgagcctcaatccaaatg

SEQ ID NO: 4212646 - DNA, 25 bp, Homo sapien
tccaaatgcttgaattaagttcttc

SEQ ID NO: 4212647 - DNA, 25 bp, Homo sapien
actggctccggagtttaggtcctca

SEQ ID NO: 4212648 - DNA, 25 bp, Homo sapien
tggctccggagtttaggtcctcaag

SEQ ID NO: 4212649 - DNA, 25 bp, Homo sapien
ggctccggagtttaggtcctcaaga

SEQ ID NO: 4212650 - DNA, 25 bp, Homo sapien
gctccggagtttaggtcctcaagac

SEQ ID NO: 4212651 - DNA, 25 bp, Homo sapien
tgatttttctgagatcagtgctgcc

SEQ ID NO: 4212652 - DNA, 25 bp, Homo sapien
gttagggggatgtgtaacagcaggt

SEQ ID NO: 4212653 - DNA, 25 bp, Homo sapien
caggttagggggatgtgtaacagca

SEQ ID NO: 4212654 - DNA, 25 bp, Homo sapien
agggggatgtgtaacagcaggtggc

SEQ ID NO: 4212655 - DNA, 25 bp, Homo sapien
tcaggttagggggatgtgtaacagc

SEQ ID NO: 4212656 - DNA, 25 bp, Homo sapien
aaattccttaggatgaccacctgaa

SEQ ID NO: 4212657 - DNA, 25 bp, Homo sapien
gcaaattccttaggatgaccacctg

SEQ ID NO: 4212658 - DNA, 25 bp, Homo sapien
ttgcaaattccttaggatgaccacc

SEQ ID NO: 4212659 - DNA, 25 bp, Homo sapien
ccttgcaaattccttaggatgacca

SEQ ID NO: 4212660 - DNA, 25 bp, Homo sapien
ttatacacactgcatagtgtttgta

SEQ ID NO: 4212661 - DNA, 25 bp, Homo sapien
gtcacctcgtataagtcagtctcat

SEQ ID NO: 4212662 - DNA, 25 bp, Homo sapien
gttggtcactatgatgtcttctggc

SEQ ID NO: 4212663 - DNA, 25 bp, Homo sapien
caaaatgatggtatggagttggtca

SEQ ID NO: 4212664 - DNA, 25 bp, Homo sapien
tcttcagctttggtaaaaaaattca

SEQ ID NO: 4212665 - DNA, 25 bp, Homo sapien
taccagacttaacactgtaggacca

SEQ ID NO: 4212666 - DNA, 25 bp, Homo sapien
tcacaaccacctgtttgatagcaat

SEQ ID NO: 4212667 - DNA, 25 bp, Homo sapien
gaaaatagtaagtgaattcacaacc

SEQ ID NO: 4212668 - DNA, 25 bp, Homo sapien
tgtaggaccacaatctagtttctga

SEQ ID NO: 4212669 - DNA, 25 bp, Homo sapien
gccaagatggcctatatgctccacg

SEQ ID NO: 4212670 - DNA, 25 bp, Homo sapien
ttcccagctggttgaagatccttgc

SEQ ID NO: 4212671 - DNA, 25 bp, Homo sapien
cagactgcacagtgatggatagcca

SEQ ID NO: 4212672 - DNA, 25 bp, Homo sapien
tctgcgtgagggctacatgttccca

SEQ ID NO: 4212673 - DNA, 25 bp, Homo sapien
gatacttcacgttataaagcaaaaa

SEQ ID NO: 4212674 - DNA, 25 bp, Homo sapien
cttgtataagcgttcattatgtagg

SEQ ID NO: 4212675 - DNA, 25 bp, Homo sapien
caatgtatatgttcggagatacgga

SEQ ID NO: 4212676 - DNA, 25 bp, Homo sapien
ctcttggaggtaggcgaacatggca

SEQ ID NO: 4212677 - DNA, 25 bp, Homo sapien
gtacagctgtagaattctgtatttg

SEQ ID NO: 4212678 - DNA, 25 bp, Homo sapien
gttgtacagctgtagaattctgtat

SEQ ID NO: 4212679 - DNA, 25 bp, Homo sapien
ttgcatcccaggcctttcagctcag

SEQ ID NO: 4212680 - DNA, 25 bp, Homo sapien
caggttgtacagctgtagaattctg

SEQ ID NO: 4212681 - DNA, 25 bp, Homo sapien
gaaggactagcaacagaccaaagac

SEQ ID NO: 4212682 - DNA, 25 bp, Homo sapien
tcatcaccgggaaggtgaccagatg

SEQ ID NO: 4212683 - DNA, 25 bp, Homo sapien
ctagatggtagtgaccgctgcctcc

SEQ ID NO: 4212684 - DNA, 25 bp, Homo sapien
agacagagctcatcaccgggaaggt

SEQ ID NO: 4212685 - DNA, 25 bp, Homo sapien
ttttgcatattagcgttctcagctg

SEQ ID NO: 4212686 - DNA, 25 bp, Homo sapien
catattagcgttctcagctgattca

SEQ ID NO: 4212687 - DNA, 25 bp, Homo sapien
ttgtttttgcatattagcgttctca

SEQ ID NO: 4212688 - DNA, 25 bp, Homo sapien
tattagcgttctcagctgattcagc

SEQ ID NO: 4212689 - DNA, 25 bp, Homo sapien
cactgtatcaggccacttgtaagtt

SEQ ID NO: 4212690 - DNA, 25 bp, Homo sapien
actgtatcaggccacttgtaagttg

SEQ ID NO: 4212691 - DNA, 25 bp, Homo sapien
tgtatttcccactcagtccttcttt

SEQ ID NO: 4212692 - DNA, 25 bp, Homo sapien
actgtcctgtatttcccactcagtc

SEQ ID NO: 4212693 - DNA, 25 bp, Homo sapien
ttagttagggcctcttactgtcctg

SEQ ID NO: 4212694 - DNA, 25 bp, Homo sapien
agttagggcctcttactgtcctgta

SEQ ID NO: 4212695 - DNA, 25 bp, Homo sapien
gaaactaggcgtattggatgatcac

SEQ ID NO: 4212696 - DNA, 25 bp, Homo sapien
gaacgtttagcatgagattccttca

SEQ ID NO: 4212697 - DNA, 25 bp, Homo sapien
cagcaatatgttgggcaatgccatt

SEQ ID NO: 4212698 - DNA, 25 bp, Homo sapien
gtgacatgtgtgtgcgttcatcaaa

SEQ ID NO: 4212699 - DNA, 25 bp, Homo sapien
catggtcctgtagaactggtcttca

SEQ ID NO: 4212700 - DNA, 25 bp, Homo sapien
gatactcccagtcaatttcgctcag

SEQ ID NO: 4212701 - DNA, 25 bp, Homo sapien
tcactgaagcaataacagccaatgg

SEQ ID NO: 4212702 - DNA, 25 bp, Homo sapien
cactgtgcagcatgtagtttcctgt

SEQ ID NO: 4212703 - DNA, 25 bp, Homo sapien
cctttggcccatgcaagtttgtgag

SEQ ID NO: 4212704 - DNA, 25 bp, Homo sapien
ggcccatgcaagtttgtgagtattt

SEQ ID NO: 4212705 - DNA, 25 bp, Homo sapien
cttgctcacctttggcccatgcaag

SEQ ID NO: 4212706 - DNA, 25 bp, Homo sapien
tcacctttggcccatgcaagtttgt

SEQ ID NO: 4212707 - DNA, 25 bp, Homo sapien
tgaattttcccggagccttccagat

SEQ ID NO: 4212708 - DNA, 25 bp, Homo sapien
tggaatatgaattttcccggagcct

SEQ ID NO: 4212709 - DNA, 25 bp, Homo sapien
aattttcccggagccttccagatga

SEQ ID NO: 4212710 - DNA, 25 bp, Homo sapien
tctttactaagaatccccctccatc

SEQ ID NO: 4212711 - DNA, 25 bp, Homo sapien
cttcaggaaagagatcatgtactaa

SEQ ID NO: 4212712 - DNA, 25 bp, Homo sapien
ttcaggaaagagatcatgtactaac

SEQ ID NO: 4212713 - DNA, 25 bp, Homo sapien
cctctccaacttcatgaatcagaac

SEQ ID NO: 4212714 - DNA, 25 bp, Homo sapien
taagaaataatcagagctagaggta

SEQ ID NO: 4212715 - DNA, 25 bp, Homo sapien
ttttttcattcggtttctgccagta

SEQ ID NO: 4212716 - DNA, 25 bp, Homo sapien
gtaatgaacttcactatttaagaaa

SEQ ID NO: 4212717 - DNA, 25 bp, Homo sapien
tctttatgtcccgtgtgctaggcat

SEQ ID NO: 4212718 - DNA, 25 bp, Homo sapien
gtagtccttccatggatatttgttc

SEQ ID NO: 4212719 - DNA, 25 bp, Homo sapien
atgtagtccttccatggatatttgt

SEQ ID NO: 4212720 - DNA, 25 bp, Homo sapien
ttctttatgtcccgtgtgctaggca

SEQ ID NO: 4212721 - DNA, 25 bp, Homo sapien
agtcacttcgaagttcccagaacat

SEQ ID NO: 4212722 - DNA, 25 bp, Homo sapien
cagtcacttcgaagttcccagaaca

SEQ ID NO: 4212723 - DNA, 25 bp, Homo sapien
ccagtcacttcgaagttcccagaac

SEQ ID NO: 4212724 - DNA, 25 bp, Homo sapien
tccagtcacttcgaagttcccagaa

SEQ ID NO: 4212725 - DNA, 25 bp, Homo sapien
gtttagtcctgccaccatgggttga

SEQ ID NO: 4212726 - DNA, 25 bp, Homo sapien
tcacgggttgttcgcagtttagtcc

SEQ ID NO: 4212727 - DNA, 25 bp, Homo sapien
gcagataagacaaacacctcatggt

SEQ ID NO: 4212728 - DNA, 25 bp, Homo sapien
tggtcataacctagagcctcttgtc

SEQ ID NO: 4212729 - DNA, 25 bp, Homo sapien
tgctttttaactctgccagcagaag

SEQ ID NO: 4212730 - DNA, 25 bp, Homo sapien
gggatgttgtacagagacatacagc

SEQ ID NO: 4212731 - DNA, 25 bp, Homo sapien
tcaacgggctttgcagtagagtttg

SEQ ID NO: 4212732 - DNA, 25 bp, Homo sapien
gctttcaaatggctatgcttatgta

SEQ ID NO: 4212733 - DNA, 25 bp, Homo sapien
cagtgaatccaaaaccggctgttcc

SEQ ID NO: 4212734 - DNA, 25 bp, Homo sapien
cggctgttcctggcacttggctgat

SEQ ID NO: 4212735 - DNA, 25 bp, Homo sapien
ggtctgtagttcagataatgcagtt

SEQ ID NO: 4212736 - DNA, 25 bp, Homo sapien
gtgtgtttttccaagggtctgggca

SEQ ID NO: 4212737 - DNA, 25 bp, Homo sapien
caggtccctgccatcaatgcgaagg

SEQ ID NO: 4212738 - DNA, 25 bp, Homo sapien
cagtcacaaccccttacgctggaga

SEQ ID NO: 4212739 - DNA, 25 bp, Homo sapien
catcaatgcgaaggcagcagtcaca

SEQ ID NO: 4212740 - DNA, 25 bp, Homo sapien
tggagaattgagtgtccccactccc

SEQ ID NO: 4212741 - DNA, 25 bp, Homo sapien
taagtacccctttagccctgctatc

SEQ ID NO: 4212742 - DNA, 25 bp, Homo sapien
ctcacataaccctttgccaagtgtt

SEQ ID NO: 4212743 - DNA, 25 bp, Homo sapien
caagaagcctgcaaagttcttctca

SEQ ID NO: 4212744 - DNA, 25 bp, Homo sapien
accaccctcacataaccctttgcca

SEQ ID NO: 4212745 - DNA, 25 bp, Homo sapien
catctgatggcacggcttgtcttgg

SEQ ID NO: 4212746 - DNA, 25 bp, Homo sapien
gaacggcatctgatggcacggcttg

SEQ ID NO: 4212747 - DNA, 25 bp, Homo sapien
ggcatctgatggcacggcttgtctt

SEQ ID NO: 4212748 - DNA, 25 bp, Homo sapien
gatggcacggcttgtcttggctcca

SEQ ID NO: 4212749 - DNA, 25 bp, Homo sapien
caatcaattggcatatactcattca

SEQ ID NO: 4212750 - DNA, 25 bp, Homo sapien
aataatccaatcaattggcatatac

SEQ ID NO: 4212751 - DNA, 25 bp, Homo sapien
tgctaggattctttctattatactt

SEQ ID NO: 4212752 - DNA, 25 bp, Homo sapien
ggtatttgttatgggtatgttcagg

SEQ ID NO: 4212753 - DNA, 25 bp, Homo sapien
ggatatataccaaggagtgatattg

SEQ ID NO: 4212754 - DNA, 25 bp, Homo sapien
tcaatgtgacgacttccagttccat

SEQ ID NO: 4212755 - DNA, 25 bp, Homo sapien
tttattcaatgtgacgacttccagt

SEQ ID NO: 4212756 - DNA, 25 bp, Homo sapien
ttgatggatcctgtaatagctctat

SEQ ID NO: 4212757 - DNA, 25 bp, Homo sapien
taaactgtgttctgccaaacttcaa

SEQ ID NO: 4212758 - DNA, 25 bp, Homo sapien
tgttttcatctgcatatgagaaagg

SEQ ID NO: 4212759 - DNA, 25 bp, Homo sapien
aaactgtgttctgccaaacttcaag

SEQ ID NO: 4212760 - DNA, 25 bp, Homo sapien
gagaaaggtgatgtaatggttttaa

SEQ ID NO: 4212761 - DNA, 25 bp, Homo sapien
gttctattcagcgagtaacctgaga

SEQ ID NO: 4212762 - DNA, 25 bp, Homo sapien
tattgtcacaataaggctggaacat

SEQ ID NO: 4212763 - DNA, 25 bp, Homo sapien
attattgtcacaataaggctggaac

SEQ ID NO: 4212764 - DNA, 25 bp, Homo sapien
tattcagcgagtaacctgagaattc

SEQ ID NO: 4212765 - DNA, 25 bp, Homo sapien
ggccttgcccactttgcttcatgtg

SEQ ID NO: 4212766 - DNA, 25 bp, Homo sapien
ttaggccttgcccactttgcttcat

SEQ ID NO: 4212767 - DNA, 25 bp, Homo sapien
gccttgcccactttgcttcatgtgt

SEQ ID NO: 4212768 - DNA, 25 bp, Homo sapien
taggccttgcccactttgcttcatg

SEQ ID NO: 4212769 - DNA, 25 bp, Homo sapien
tttcacacaatctgtctctccaaat

SEQ ID NO: 4212770 - DNA, 25 bp, Homo sapien
acacatttttcacacaatctgtctc

SEQ ID NO: 4212771 - DNA, 25 bp, Homo sapien
ctgtctctccaaatactgaggcaag

SEQ ID NO: 4212772 - DNA, 25 bp, Homo sapien
ctgaggcaagaagttcaaatcccat

SEQ ID NO: 4212773 - DNA, 25 bp, Homo sapien
cattcgtgtagctgcacatgtggct

SEQ ID NO: 4212774 - DNA, 25 bp, Homo sapien
gggtagacgctgcatggctgcttct

SEQ ID NO: 4212775 - DNA, 25 bp, Homo sapien
cttaggctagtgctcagacctgtgg

SEQ ID NO: 4212776 - DNA, 25 bp, Homo sapien
gatttcaggaggagccacacttagg

SEQ ID NO: 4212777 - DNA, 25 bp, Homo sapien
tagaaaggtctgctaggtagctaga

SEQ ID NO: 4212778 - DNA, 25 bp, Homo sapien
ctactggttagaaaggtctgctagg

SEQ ID NO: 4212779 - DNA, 25 bp, Homo sapien
gtagctagatgtgccgctagtaaaa

SEQ ID NO: 4212780 - DNA, 25 bp, Homo sapien
taggtagctagatgtgccgctagta

SEQ ID NO: 4212781 - DNA, 25 bp, Homo sapien
tgatcaccagacttgatagccacac

SEQ ID NO: 4212782 - DNA, 25 bp, Homo sapien
tcaccagacttgatagccacacttg

SEQ ID NO: 4212783 - DNA, 25 bp, Homo sapien
agacttgatagccacacttgggcca

SEQ ID NO: 4212784 - DNA, 25 bp, Homo sapien
acttgatagccacacttgggccaca

SEQ ID NO: 4212785 - DNA, 25 bp, Homo sapien
caatccgttagagtataacagggac

SEQ ID NO: 4212786 - DNA, 25 bp, Homo sapien
caaggatgtcggtacttcctacata

SEQ ID NO: 4212787 - DNA, 25 bp, Homo sapien
tcctctggatagtcccaggagacat

SEQ ID NO: 4212788 - DNA, 25 bp, Homo sapien
tgttaagagacacgaagcaggacat

SEQ ID NO: 4212789 - DNA, 25 bp, Homo sapien
tgctatatcagctttgggaactcct

SEQ ID NO: 4212790 - DNA, 25 bp, Homo sapien
tatatcagctttgggaactccttgt

SEQ ID NO: 4212791 - DNA, 25 bp, Homo sapien
cagctttgggaactccttgtccatt

SEQ ID NO: 4212792 - DNA, 25 bp, Homo sapien
taaatgccagattcctaaaggtttc

SEQ ID NO: 4212793 - DNA, 25 bp, Homo sapien
ttgaatctacaatggagggcaaagg

SEQ ID NO: 4212794 - DNA, 25 bp, Homo sapien
tgtcttgtgaccacagtaatctcaa

SEQ ID NO: 4212795 - DNA, 25 bp, Homo sapien
cagtaatctcaagtacagaacagga

SEQ ID NO: 4212796 - DNA, 25 bp, Homo sapien
ctattcttgtcttgtgaccacagta

SEQ ID NO: 4212797 - DNA, 25 bp, Homo sapien
cccattccgaggcagaaccctagaa

SEQ ID NO: 4212798 - DNA, 25 bp, Homo sapien
tgggaatactagaaacacatgtgtc

SEQ ID NO: 4212799 - DNA, 25 bp, Homo sapien
ccagaatttagtctcacatctttaa

SEQ ID NO: 4212800 - DNA, 25 bp, Homo sapien
gatgagaatcttggtggcaaacaaa

SEQ ID NO: 4212801 - DNA, 25 bp, Homo sapien
tccttgacaagcataccttcctggt

SEQ ID NO: 4212802 - DNA, 25 bp, Homo sapien
tgtatattttgcatcaatgtcttca

SEQ ID NO: 4212803 - DNA, 25 bp, Homo sapien
gacatgtagatttcaaggaagtagt

SEQ ID NO: 4212804 - DNA, 25 bp, Homo sapien
gcataccttcctggtgacatgtaga

SEQ ID NO: 4212805 - DNA, 25 bp, Homo sapien
tctgcttctcaccttattcaatata

SEQ ID NO: 4212806 - DNA, 25 bp, Homo sapien
gccaagctgtttctcgtgatttact

SEQ ID NO: 4212807 - DNA, 25 bp, Homo sapien
actgcccaatcgtctcggaagctcc

SEQ ID NO: 4212808 - DNA, 25 bp, Homo sapien
tacggaatgatgctttcatctgtgg

SEQ ID NO: 4212809 - DNA, 25 bp, Homo sapien
ctgccttacggaatgatgctttcat

SEQ ID NO: 4212810 - DNA, 25 bp, Homo sapien
ctgtgggtgagcaattggagtttcc

SEQ ID NO: 4212811 - DNA, 25 bp, Homo sapien
gctttcatctgtgggtgagcaattg

SEQ ID NO: 4212812 - DNA, 25 bp, Homo sapien
ctgatttccttttccataaaatatt

SEQ ID NO: 4212813 - DNA, 25 bp, Homo sapien
tactgatttccttttccataaaata

SEQ ID NO: 4212814 - DNA, 25 bp, Homo sapien
actgatttccttttccataaaatat

SEQ ID NO: 4212815 - DNA, 25 bp, Homo sapien
gccaccacactgatatgcagctgcc

SEQ ID NO: 4212816 - DNA, 25 bp, Homo sapien
ctcctaggttcactcattttgccac

SEQ ID NO: 4212817 - DNA, 25 bp, Homo sapien
cacactgatatgcagctgccaccat

SEQ ID NO: 4212818 - DNA, 25 bp, Homo sapien
gttcactcattttgccaccacactg

SEQ ID NO: 4212819 - DNA, 25 bp, Homo sapien
catattgtccttctagtgactggga

SEQ ID NO: 4212820 - DNA, 25 bp, Homo sapien
gagaagcagtagcttgcttgtttac

SEQ ID NO: 4212821 - DNA, 25 bp, Homo sapien
tgtttacaatgccataaggcaattt

SEQ ID NO: 4212822 - DNA, 25 bp, Homo sapien
aatgccataaggcaattttgaaggc

SEQ ID NO: 4212823 - DNA, 25 bp, Homo sapien
agtgcacaagcaacacatccaaagg

SEQ ID NO: 4212824 - DNA, 25 bp, Homo sapien
acacatccaaaggacgatttgcaga

SEQ ID NO: 4212825 - DNA, 25 bp, Homo sapien
catccaaaggacgatttgcagacat

SEQ ID NO: 4212826 - DNA, 25 bp, Homo sapien
gtcataaagtgcacaagcaacacat

SEQ ID NO: 4212827 - DNA, 25 bp, Homo sapien
gagacgataatgatgctcctgacag

SEQ ID NO: 4212828 - DNA, 25 bp, Homo sapien
aggtgttaataatgaggaccagcag

SEQ ID NO: 4212829 - DNA, 25 bp, Homo sapien
cactgagatactgcccgctgtatga

SEQ ID NO: 4212830 - DNA, 25 bp, Homo sapien
aaagggcatcactgaaggtgttaat

SEQ ID NO: 4212831 - DNA, 25 bp, Homo sapien
acttttatcactgataacaaataca

SEQ ID NO: 4212832 - DNA, 25 bp, Homo sapien
ccctcgatgtctatgagttctgcat

SEQ ID NO: 4212833 - DNA, 25 bp, Homo sapien
gccctcgatgtctatgagttctgca

SEQ ID NO: 4212834 - DNA, 25 bp, Homo sapien
tgtttggttgaaagctcaactttta

SEQ ID NO: 4212835 - DNA, 25 bp, Homo sapien
tgagaacctggtgtattctttgagg

SEQ ID NO: 4212836 - DNA, 25 bp, Homo sapien
gagaacctggtgtattctttgaggt

SEQ ID NO: 4212837 - DNA, 25 bp, Homo sapien
agaacctggtgtattctttgaggta

SEQ ID NO: 4212838 - DNA, 25 bp, Homo sapien
tggctggctctgtaacatcccatgc

SEQ ID NO: 4212839 - DNA, 25 bp, Homo sapien
gtggctggctctgtaacatcccatg

SEQ ID NO: 4212840 - DNA, 25 bp, Homo sapien
tgtggctggctctgtaacatcccat

SEQ ID NO: 4212841 - DNA, 25 bp, Homo sapien
ccaatcagccatctccttggtagat

SEQ ID NO: 4212842 - DNA, 25 bp, Homo sapien
catgaatggactgatactactcttg

SEQ ID NO: 4212843 - DNA, 25 bp, Homo sapien
ttggtagattcccaaaatgtgatgc

SEQ ID NO: 4212844 - DNA, 25 bp, Homo sapien
catggaatcctaagctgcaattgca

SEQ ID NO: 4212845 - DNA, 25 bp, Homo sapien
ccttagtcgtgatttctatggccat

SEQ ID NO: 4212846 - DNA, 25 bp, Homo sapien
accaccattgatctggaccacataa

SEQ ID NO: 4212847 - DNA, 25 bp, Homo sapien
gatttctatggccatatgcttttca

SEQ ID NO: 4212848 - DNA, 25 bp, Homo sapien
tttacccagagccttagtcgtgatt

SEQ ID NO: 4212849 - DNA, 25 bp, Homo sapien
gatgtatctattaaggctggccgct

SEQ ID NO: 4212850 - DNA, 25 bp, Homo sapien
cactctagtggaactgtggatcaca

SEQ ID NO: 4212851 - DNA, 25 bp, Homo sapien
ggccgcttcaaccagatctttatag

SEQ ID NO: 4212852 - DNA, 25 bp, Homo sapien
aaagtaagatctgcttttggcaagg

SEQ ID NO: 4212853 - DNA, 25 bp, Homo sapien
gtggagattacgaggattatgagaa

SEQ ID NO: 4212854 - DNA, 25 bp, Homo sapien
tatcagatgggtagtagacttaaac

SEQ ID NO: 4212855 - DNA, 25 bp, Homo sapien
cacgtggtcactcccttgatacgtg

SEQ ID NO: 4212856 - DNA, 25 bp, Homo sapien
catatcagatgggtagtagacttaa

SEQ ID NO: 4212857 - DNA, 25 bp, Homo sapien
gcaattccattagatgaaagagatc

SEQ ID NO: 4212858 - DNA, 25 bp, Homo sapien
agagatctacacattcagaagcaca

SEQ ID NO: 4212859 - DNA, 25 bp, Homo sapien
tttaggtgtggtgcaattccattag

SEQ ID NO: 4212860 - DNA, 25 bp, Homo sapien
aaagagatctacacattcagaagca

SEQ ID NO: 4212861 - DNA, 25 bp, Homo sapien
cctaaacagaagttgtctggttaat

SEQ ID NO: 4212862 - DNA, 25 bp, Homo sapien
tttcctcctaaacagaagttgtctg

SEQ ID NO: 4212863 - DNA, 25 bp, Homo sapien
tcattcattgcccttgattttcctc

SEQ ID NO: 4212864 - DNA, 25 bp, Homo sapien
acagaagttgtctggttaatatatc

SEQ ID NO: 4212865 - DNA, 25 bp, Homo sapien
agttcacagtagattctgcatatga

SEQ ID NO: 4212866 - DNA, 25 bp, Homo sapien
cattggtccctaaggacttcttcct

SEQ ID NO: 4212867 - DNA, 25 bp, Homo sapien
cagtaaacgtttgtatgcatgtgtc

SEQ ID NO: 4212868 - DNA, 25 bp, Homo sapien
gttcaagtcccgtgtatgagtgaga

SEQ ID NO: 4212869 - DNA, 25 bp, Homo sapien
cttctttctcttcacatttgtattc

SEQ ID NO: 4212870 - DNA, 25 bp, Homo sapien
tcacatttgtattctctccttcttc

SEQ ID NO: 4212871 - DNA, 25 bp, Homo sapien
ctttctcttcacatttgtattctct

SEQ ID NO: 4212872 - DNA, 25 bp, Homo sapien
cacatttgtattctctccttcttcc

SEQ ID NO: 4212873 - DNA, 25 bp, Homo sapien
atctctgtccaatcctgagcaggga

SEQ ID NO: 4212874 - DNA, 25 bp, Homo sapien
tgtccaatcctgagcagggactatc

SEQ ID NO: 4212875 - DNA, 25 bp, Homo sapien
cctgagcagggactatcactttgtt

SEQ ID NO: 4212876 - DNA, 25 bp, Homo sapien
atcactttgttgagtcctgctgtaa

SEQ ID NO: 4212877 - DNA, 25 bp, Homo sapien
tgggagtgtcacgtagtacagagac

SEQ ID NO: 4212878 - DNA, 25 bp, Homo sapien
tgtttcctgttgataggtggcgctg

SEQ ID NO: 4212879 - DNA, 25 bp, Homo sapien
ttccagattggaggatgcatccaat

SEQ ID NO: 4212880 - DNA, 25 bp, Homo sapien
tcctgttgataggtggcgctgtcct

SEQ ID NO: 4212881 - DNA, 25 bp, Homo sapien
gctgagtggttaaactgccctaaaa

SEQ ID NO: 4212882 - DNA, 25 bp, Homo sapien
aaaagcagttttagactcatagcaa

SEQ ID NO: 4212883 - DNA, 25 bp, Homo sapien
gcatagacactcatcccatttgtga

SEQ ID NO: 4212884 - DNA, 25 bp, Homo sapien
cagttgcaaccatacaatatttgac

SEQ ID NO: 4212885 - DNA, 25 bp, Homo sapien
gattatggtccctcctgtagatcat

SEQ ID NO: 4212886 - DNA, 25 bp, Homo sapien
tcattagtcacctgattatggtccc

SEQ ID NO: 4212887 - DNA, 25 bp, Homo sapien
gatttcattagtcacctgattatgg

SEQ ID NO: 4212888 - DNA, 25 bp, Homo sapien
cacctgattatggtccctcctgtag

SEQ ID NO: 4212889 - DNA, 25 bp, Homo sapien
gatccttgcccacacttgaagctgg

SEQ ID NO: 4212890 - DNA, 25 bp, Homo sapien
tgattccgatccttgcccacacttg

SEQ ID NO: 4212891 - DNA, 25 bp, Homo sapien
aacttgcttttgattccgatccttg

SEQ ID NO: 4212892 - DNA, 25 bp, Homo sapien
cacacttgaagctggtatctgaaaa

SEQ ID NO: 4212893 - DNA, 25 bp, Homo sapien
aaaggatgccatagaagtcatcacc

SEQ ID NO: 4212894 - DNA, 25 bp, Homo sapien
ttaaaggatgccatagaagtcatca

SEQ ID NO: 4212895 - DNA, 25 bp, Homo sapien
gacatcaatctagaccttcttttcc

SEQ ID NO: 4212896 - DNA, 25 bp, Homo sapien
atcaccagtagacatcaatctagac

SEQ ID NO: 4212897 - DNA, 25 bp, Homo sapien
ttttgtgacatctctagagtctcct

SEQ ID NO: 4212898 - DNA, 25 bp, Homo sapien
cttgtacttatatccttttttgtga

SEQ ID NO: 4212899 - DNA, 25 bp, Homo sapien
gaaaactcactcttgtacttatatc

SEQ ID NO: 4212900 - DNA, 25 bp, Homo sapien
tttgtgacatctctagagtctcctt

SEQ ID NO: 4212901 - DNA, 25 bp, Homo sapien
tgactcagtgttgcaaataattaaa

SEQ ID NO: 4212902 - DNA, 25 bp, Homo sapien
ctttctagagcttgaaaagtttcag

SEQ ID NO: 4212903 - DNA, 25 bp, Homo sapien
atatatctttctagagcttgaaaag

SEQ ID NO: 4212904 - DNA, 25 bp, Homo sapien
gcatatatatctttctagagcttga

SEQ ID NO: 4212905 - DNA, 25 bp, Homo sapien
tagagccgtggcctgaactgtacct

SEQ ID NO: 4212906 - DNA, 25 bp, Homo sapien
tatcttagtccctgggcctgtaatg

SEQ ID NO: 4212907 - DNA, 25 bp, Homo sapien
ctgggccagccccaaaatactagtt

SEQ ID NO: 4212908 - DNA, 25 bp, Homo sapien
gcctgtaatgagagcagctgccatg

SEQ ID NO: 4212909 - DNA, 25 bp, Homo sapien
tatttctaatacacctgaatacaga

SEQ ID NO: 4212910 - DNA, 25 bp, Homo sapien
gaaaaccatagcatctatgagagga

SEQ ID NO: 4212911 - DNA, 25 bp, Homo sapien
aaaataacaagtagtcattaggcac

SEQ ID NO: 4212912 - DNA, 25 bp, Homo sapien
tctttgagtctaaagagcattgacg

SEQ ID NO: 4212913 - DNA, 25 bp, Homo sapien
cttctgctcttatttgaggtcgcct

SEQ ID NO: 4212914 - DNA, 25 bp, Homo sapien
acaaaagattgagatttggtaattc

SEQ ID NO: 4212915 - DNA, 25 bp, Homo sapien
tgaggtcgccttagagaatcctctt

SEQ ID NO: 4212916 - DNA, 25 bp, Homo sapien
ctttgttgtgagaattgtttgcaaa

SEQ ID NO: 4212917 - DNA, 25 bp, Homo sapien
tagaggatgtcagcataaatgtact

SEQ ID NO: 4212918 - DNA, 25 bp, Homo sapien
catgaatgatggtgccctcaaggag

SEQ ID NO: 4212919 - DNA, 25 bp, Homo sapien
taaaactcatgatcatgaatgatgg

SEQ ID NO: 4212920 - DNA, 25 bp, Homo sapien
tactgaaaagtagacttagaggatg

SEQ ID NO: 4212921 - DNA, 25 bp, Homo sapien
gccagaatttcatattgctgtaaca

SEQ ID NO: 4212922 - DNA, 25 bp, Homo sapien
tagataagtagaaagagagcaagcc

SEQ ID NO: 4212923 - DNA, 25 bp, Homo sapien
tagaaagagagcaagccagaatttc

SEQ ID NO: 4212924 - DNA, 25 bp, Homo sapien
agcaatatttctatagataagtaga

SEQ ID NO: 4212925 - DNA, 25 bp, Homo sapien
ggagacctcacgagttctagaactg

SEQ ID NO: 4212926 - DNA, 25 bp, Homo sapien
gaagagctctaaaggagttctagac

SEQ ID NO: 4212927 - DNA, 25 bp, Homo sapien
tctagaactgacctttggatcctta

SEQ ID NO: 4212928 - DNA, 25 bp, Homo sapien
gacacgttgacttatggaacaggat

SEQ ID NO: 4212929 - DNA, 25 bp, Homo sapien
tacaagtttattagctttgtgctgg

SEQ ID NO: 4212930 - DNA, 25 bp, Homo sapien
aagtcttcctagctatgttccaacg

SEQ ID NO: 4212931 - DNA, 25 bp, Homo sapien
tgattgggtcgttctttgatggtcc

SEQ ID NO: 4212932 - DNA, 25 bp, Homo sapien
tccaacgttatttgtattgaaagct

SEQ ID NO: 4212933 - DNA, 25 bp, Homo sapien
tctcctcctgctgattagactctgc

SEQ ID NO: 4212934 - DNA, 25 bp, Homo sapien
cctgctgattagactctgcattatg

SEQ ID NO: 4212935 - DNA, 25 bp, Homo sapien
tcctcctgctgattagactctgcat

SEQ ID NO: 4212936 - DNA, 25 bp, Homo sapien
aatctcctcctgctgattagactct

SEQ ID NO: 4212937 - DNA, 25 bp, Homo sapien
gtcccactgtattacaacctgggcg

SEQ ID NO: 4212938 - DNA, 25 bp, Homo sapien
ggtcccactgtattacaacctgggc

SEQ ID NO: 4212939 - DNA, 25 bp, Homo sapien
catttaaaggtggtatcaacagcag

SEQ ID NO: 4212940 - DNA, 25 bp, Homo sapien
tttaaaggtggtatcaacagcagcc

SEQ ID NO: 4212941 - DNA, 25 bp, Homo sapien
taaaggtggtatcaacagcagcccc

SEQ ID NO: 4212942 - DNA, 25 bp, Homo sapien
gcatttaaaggtggtatcaacagca

SEQ ID NO: 4212943 - DNA, 25 bp, Homo sapien
cactgtgcagccaggtaaattgcca

SEQ ID NO: 4212944 - DNA, 25 bp, Homo sapien
tgtgcagccaggtaaattgccagct

SEQ ID NO: 4212945 - DNA, 25 bp, Homo sapien
gccaggtaaattgccagctgaagag

SEQ ID NO: 4212946 - DNA, 25 bp, Homo sapien
tgcagccaggtaaattgccagctga

SEQ ID NO: 4212947 - DNA, 25 bp, Homo sapien
cagcccccaaaattatcattatgat

SEQ ID NO: 4212948 - DNA, 25 bp, Homo sapien
gagttggattatgagttatataggc

SEQ ID NO: 4212949 - DNA, 25 bp, Homo sapien
ggtttcctgaacttttaatcgatga

SEQ ID NO: 4212950 - DNA, 25 bp, Homo sapien
gaacttttaatcgatgagttggatt

SEQ ID NO: 4212951 - DNA, 25 bp, Homo sapien
ttctggtggcagagtccttctatga

SEQ ID NO: 4212952 - DNA, 25 bp, Homo sapien
tggcccctcttttgtatacacatct

SEQ ID NO: 4212953 - DNA, 25 bp, Homo sapien
cccaggacttgtgccattaaaagat

SEQ ID NO: 4212954 - DNA, 25 bp, Homo sapien
tgagttactgctgtggtcaagttac

SEQ ID NO: 4212955 - DNA, 25 bp, Homo sapien
tagccttggaatcagaccttttccc

SEQ ID NO: 4212956 - DNA, 25 bp, Homo sapien
taactgccataggttgaagggaaaa

SEQ ID NO: 4212957 - DNA, 25 bp, Homo sapien
gatagtgagttcacagacgctggaa

SEQ ID NO: 4212958 - DNA, 25 bp, Homo sapien
tagcaaataattatacgtatcaacc

SEQ ID NO: 4212959 - DNA, 25 bp, Homo sapien
tcatcttgtagcaaatctaacctgg

SEQ ID NO: 4212960 - DNA, 25 bp, Homo sapien
tctagaaaattagtcccagtcctgg

SEQ ID NO: 4212961 - DNA, 25 bp, Homo sapien
taaggtagattgtgtaatgtgctca

SEQ ID NO: 4212962 - DNA, 25 bp, Homo sapien
ctttcccactcgactaatttctagg

SEQ ID NO: 4212963 - DNA, 25 bp, Homo sapien
cattgctttagagcatgcaagcccc

SEQ ID NO: 4212964 - DNA, 25 bp, Homo sapien
catgtcagggatctttgcagaatca

SEQ ID NO: 4212965 - DNA, 25 bp, Homo sapien
aaaagggaaccagctacagctcagg

SEQ ID NO: 4212966 - DNA, 25 bp, Homo sapien
aaatgggcataagtaacgcggagac

SEQ ID NO: 4212967 - DNA, 25 bp, Homo sapien
taccaagtggcaaagctagccaggc

SEQ ID NO: 4212968 - DNA, 25 bp, Homo sapien
tctagattaccagggagatactttt

SEQ ID NO: 4212969 - DNA, 25 bp, Homo sapien
tcactgtctgggtacctgtacttct

SEQ ID NO: 4212970 - DNA, 25 bp, Homo sapien
gaagagttaggcatatagttgtcac

SEQ ID NO: 4212971 - DNA, 25 bp, Homo sapien
gctctgaaatttagatgcattgtca

SEQ ID NO: 4212972 - DNA, 25 bp, Homo sapien
tgttgaggtctccagtgaatattgt

SEQ ID NO: 4212973 - DNA, 25 bp, Homo sapien
tcctcaagaatgttccctgtgctga

SEQ ID NO: 4212974 - DNA, 25 bp, Homo sapien
tccattattgagataggcgcttata

SEQ ID NO: 4212975 - DNA, 25 bp, Homo sapien
ttgtgagagaaacacgaaggttagt

SEQ ID NO: 4212976 - DNA, 25 bp, Homo sapien
aagagtctaaaaacttcaagcttca

SEQ ID NO: 4212977 - DNA, 25 bp, Homo sapien
tcaagcttcaatgggactgtgattt

SEQ ID NO: 4212978 - DNA, 25 bp, Homo sapien
cacgaaggttagttaattcagcttc

SEQ ID NO: 4212979 - DNA, 25 bp, Homo sapien
ggatcaacagcttgtagacaaaagg

SEQ ID NO: 4212980 - DNA, 25 bp, Homo sapien
tttctctaggatcaacagcttgtag

SEQ ID NO: 4212981 - DNA, 25 bp, Homo sapien
ctaggatcaacagcttgtagacaaa

SEQ ID NO: 4212982 - DNA, 25 bp, Homo sapien
tcatttctctaggatcaacagcttg

SEQ ID NO: 4212983 - DNA, 25 bp, Homo sapien
gaaatgcagaactgattcaaccatt

SEQ ID NO: 4212984 - DNA, 25 bp, Homo sapien
ggttaatctgctccctaatcttttc

SEQ ID NO: 4212985 - DNA, 25 bp, Homo sapien
gagatactggatcttggaaatgcag

SEQ ID NO: 4212986 - DNA, 25 bp, Homo sapien
ctaggtcttgttgaccgaggttaat

SEQ ID NO: 4212987 - DNA, 25 bp, Homo sapien
tggccagggccttagaactgatgac

SEQ ID NO: 4212988 - DNA, 25 bp, Homo sapien
agtactttaacaactggaactgtgt

SEQ ID NO: 4212989 - DNA, 25 bp, Homo sapien
atgacccagtactttaacaactgga

SEQ ID NO: 4212990 - DNA, 25 bp, Homo sapien
cctgcaatacaatctccaagccttg

SEQ ID NO: 4212991 - DNA, 25 bp, Homo sapien
tttaacaataaagtgagtggctggc

SEQ ID NO: 4212992 - DNA, 25 bp, Homo sapien
ttagatatacagctctcgacatggg

SEQ ID NO: 4212993 - DNA, 25 bp, Homo sapien
tagagcaagttgtatctccaaaggg

SEQ ID NO: 4212994 - DNA, 25 bp, Homo sapien
gatggtggtgagagacacaactagc

SEQ ID NO: 4212995 - DNA, 25 bp, Homo sapien
cttcaccttcgcagttattaagaat

SEQ ID NO: 4212996 - DNA, 25 bp, Homo sapien
gaatagagctactttcacagcaaga

SEQ ID NO: 4212997 - DNA, 25 bp, Homo sapien
ctacactatactatctggaatagag

SEQ ID NO: 4212998 - DNA, 25 bp, Homo sapien
tggaatagagctactttcacagcaa

SEQ ID NO: 4212999 - DNA, 25 bp, Homo sapien
gggtgagaaaggctctgttgttctt

SEQ ID NO: 4213000 - DNA, 25 bp, Homo sapien
actgttctctttcaacttcatggca

SEQ ID NO: 4213001 - DNA, 25 bp, Homo sapien
gcaattgttgtgtgtttattgtcct

SEQ ID NO: 4213002 - DNA, 25 bp, Homo sapien
tgctgtagttgtggtttatagacat

SEQ ID NO: 4213003 - DNA, 25 bp, Homo sapien
tttgttacacctttattgacaggag

SEQ ID NO: 4213004 - DNA, 25 bp, Homo sapien
tgacaggagggtgaatatctattct

SEQ ID NO: 4213005 - DNA, 25 bp, Homo sapien
tgaggaagatccactttagaataat

SEQ ID NO: 4213006 - DNA, 25 bp, Homo sapien
gaatatctattctaactaaaaccac

SEQ ID NO: 4213007 - DNA, 25 bp, Homo sapien
tagctgggctccatgatcaggcaaa

SEQ ID NO: 4213008 - DNA, 25 bp, Homo sapien
tccatctgggattactgctcaagtg

SEQ ID NO: 4213009 - DNA, 25 bp, Homo sapien
gaagtctgtgctccgcaattgggtg

SEQ ID NO: 4213010 - DNA, 25 bp, Homo sapien
tcaggcaaagctggaggctgttctc

SEQ ID NO: 4213011 - DNA, 25 bp, Homo sapien
tggctgagctccatattcgggaaaa

SEQ ID NO: 4213012 - DNA, 25 bp, Homo sapien
tgtgtataaataggcagggctctct

SEQ ID NO: 4213013 - DNA, 25 bp, Homo sapien
gactcaacagttgggtaggccacaa

SEQ ID NO: 4213014 - DNA, 25 bp, Homo sapien
ttctggttgatcaggacagcaccct

SEQ ID NO: 4213015 - DNA, 25 bp, Homo sapien
ctgcttctggtcttctaatgtcatt

SEQ ID NO: 4213016 - DNA, 25 bp, Homo sapien
gtctgcttctggtcttctaatgtca

SEQ ID NO: 4213017 - DNA, 25 bp, Homo sapien
cttctggtcttctaatgtcattcat

SEQ ID NO: 4213018 - DNA, 25 bp, Homo sapien
ctgtctgcttctggtcttctaatgt

SEQ ID NO: 4213019 - DNA, 25 bp, Homo sapien
tttcggtagttcaaagctattgtct

SEQ ID NO: 4213020 - DNA, 25 bp, Homo sapien
tggctctgaattcctgtccagctat

SEQ ID NO: 4213021 - DNA, 25 bp, Homo sapien
tcagataccagccatttcggtagtt

SEQ ID NO: 4213022 - DNA, 25 bp, Homo sapien
gactgatgtgatctgtatggctctg

SEQ ID NO: 4213023 - DNA, 25 bp, Homo sapien
aaactctcgcttttgttgacacact

SEQ ID NO: 4213024 - DNA, 25 bp, Homo sapien
ctgctcatttggattattacaataa

SEQ ID NO: 4213025 - DNA, 25 bp, Homo sapien
acaataaaactctcgcttttgttga

SEQ ID NO: 4213026 - DNA, 25 bp, Homo sapien
taaaactctcgcttttgttgacaca

SEQ ID NO: 4213027 - DNA, 25 bp, Homo sapien
gaaagtttgaatttccactactatc

SEQ ID NO: 4213028 - DNA, 25 bp, Homo sapien
aaagtttgaatttccactactatca

SEQ ID NO: 4213029 - DNA, 25 bp, Homo sapien
tagattttattattttctcttgcca

SEQ ID NO: 4213030 - DNA, 25 bp, Homo sapien
aagtagattttattattttctcttg

SEQ ID NO: 4213031 - DNA, 25 bp, Homo sapien
gtagattttattattttctcttgcc

SEQ ID NO: 4213032 - DNA, 25 bp, Homo sapien
agattttattattttctcttgccat

SEQ ID NO: 4213033 - DNA, 25 bp, Homo sapien
tggagcagaatgccaactctccact

SEQ ID NO: 4213034 - DNA, 25 bp, Homo sapien
ctctagttggatttcggattgtata

SEQ ID NO: 4213035 - DNA, 25 bp, Homo sapien
gataacaatagtaatgtctacttat

SEQ ID NO: 4213036 - DNA, 25 bp, Homo sapien
tgtctacttattgtctctagttgga

SEQ ID NO: 4213037 - DNA, 25 bp, Homo sapien
aaatccccagtattctctggaatga

SEQ ID NO: 4213038 - DNA, 25 bp, Homo sapien
aaaatccccagtattctctggaatg

SEQ ID NO: 4213039 - DNA, 25 bp, Homo sapien
aaaaatccccagtattctctggaat

SEQ ID NO: 4213040 - DNA, 25 bp, Homo sapien
acacagagacaatggttgaacaaga

SEQ ID NO: 4213041 - DNA, 25 bp, Homo sapien
gagacaatggttgaacaagagtgtc

SEQ ID NO: 4213042 - DNA, 25 bp, Homo sapien
gacaatggttgaacaagagtgtcca

SEQ ID NO: 4213043 - DNA, 25 bp, Homo sapien
cagagacaatggttgaacaagagtg

SEQ ID NO: 4213044 - DNA, 25 bp, Homo sapien
cgtagttgctccatactaaagaggt

SEQ ID NO: 4213045 - DNA, 25 bp, Homo sapien
cattgctgttcgtagttgctccata

SEQ ID NO: 4213046 - DNA, 25 bp, Homo sapien
gaggttagcaaaagacagtctccac

SEQ ID NO: 4213047 - DNA, 25 bp, Homo sapien
taagaagtaattcttgcttcattgc

SEQ ID NO: 4213048 - DNA, 25 bp, Homo sapien
ggtctaaatagctggcaggtacaag

SEQ ID NO: 4213049 - DNA, 25 bp, Homo sapien
gctggcaggtacaagttgtggaagg

SEQ ID NO: 4213050 - DNA, 25 bp, Homo sapien
gtctaaatagctggcaggtacaagt

SEQ ID NO: 4213051 - DNA, 25 bp, Homo sapien
tttcgtcacttcctctatgagtctt

SEQ ID NO: 4213052 - DNA, 25 bp, Homo sapien
ttttcgtcacttcctctatgagtct

SEQ ID NO: 4213053 - DNA, 25 bp, Homo sapien
tttttcgtcacttcctctatgagtc

SEQ ID NO: 4213054 - DNA, 25 bp, Homo sapien
ttcgtcacttcctctatgagtcttc

SEQ ID NO: 4213055 - DNA, 25 bp, Homo sapien
tcttgcctctcgcatgcagaacttc

SEQ ID NO: 4213056 - DNA, 25 bp, Homo sapien
ttgcctctcgcatgcagaacttctg

SEQ ID NO: 4213057 - DNA, 25 bp, Homo sapien
gcctctcgcatgcagaacttctgtt

SEQ ID NO: 4213058 - DNA, 25 bp, Homo sapien
tctcgcatgcagaacttctgtttct

SEQ ID NO: 4213059 - DNA, 25 bp, Homo sapien
tggaaatatgtttcccctgtttcca

SEQ ID NO: 4213060 - DNA, 25 bp, Homo sapien
acactagtattgactacttctccat

SEQ ID NO: 4213061 - DNA, 25 bp, Homo sapien
cttgaatatttctgcatcctatgac

SEQ ID NO: 4213062 - DNA, 25 bp, Homo sapien
tcatgaattcatcaacactagtatt

SEQ ID NO: 4213063 - DNA, 25 bp, Homo sapien
tgaatatttctgcatcctatgacat

SEQ ID NO: 4213064 - DNA, 25 bp, Homo sapien
caagtctcctcttgattcaatgttt

SEQ ID NO: 4213065 - DNA, 25 bp, Homo sapien
tcaagtctcctcttgattcaatgtt

SEQ ID NO: 4213066 - DNA, 25 bp, Homo sapien
aagtctcctcttgattcaatgtttt

SEQ ID NO: 4213067 - DNA, 25 bp, Homo sapien
tcctccgtttcctaccattagtcta

SEQ ID NO: 4213068 - DNA, 25 bp, Homo sapien
cgtttcctaccattagtctaaagcg

SEQ ID NO: 4213069 - DNA, 25 bp, Homo sapien
ttcctaccattagtctaaagcggga

SEQ ID NO: 4213070 - DNA, 25 bp, Homo sapien
tcctaccattagtctaaagcgggaa

SEQ ID NO: 4213071 - DNA, 25 bp, Homo sapien
gtgatagatataagtatagtcatcc

SEQ ID NO: 4213072 - DNA, 25 bp, Homo sapien
ttgcattggccaaagattttactgg

SEQ ID NO: 4213073 - DNA, 25 bp, Homo sapien
ataagtatagtcatccattgcattg

SEQ ID NO: 4213074 - DNA, 25 bp, Homo sapien
ttctccaacaatgataaaagcccag

SEQ ID NO: 4213075 - DNA, 25 bp, Homo sapien
ccaccagaattgtgttggtgagatg

SEQ ID NO: 4213076 - DNA, 25 bp, Homo sapien
gctaggaagattggcggttttcctc

SEQ ID NO: 4213077 - DNA, 25 bp, Homo sapien
caggaagtccaccagaattgtgttg

SEQ ID NO: 4213078 - DNA, 25 bp, Homo sapien
gggctcagaagatacaccattcagg

SEQ ID NO: 4213079 - DNA, 25 bp, Homo sapien
catggacaaggccattgaggaaact

SEQ ID NO: 4213080 - DNA, 25 bp, Homo sapien
caaggccattgaggaaacttctaaa

SEQ ID NO: 4213081 - DNA, 25 bp, Homo sapien
gttctccagccaaggcatggacaag

SEQ ID NO: 4213082 - DNA, 25 bp, Homo sapien
cagtgatgaaatgtgttctccagcc

SEQ ID NO: 4213083 - DNA, 25 bp, Homo sapien
tgttattaattacatttccataata

SEQ ID NO: 4213084 - DNA, 25 bp, Homo sapien
tgtgttattaattacatttccataa

SEQ ID NO: 4213085 - DNA, 25 bp, Homo sapien
attaattacatttccataataagag

SEQ ID NO: 4213086 - DNA, 25 bp, Homo sapien
ctatggctcattaattgtgttatta

SEQ ID NO: 4213087 - DNA, 25 bp, Homo sapien
tttagtatatcgtataaaatccttc

SEQ ID NO: 4213088 - DNA, 25 bp, Homo sapien
ttagtatatcgtataaaatccttca

SEQ ID NO: 4213089 - DNA, 25 bp, Homo sapien
tagtatatcgtataaaatccttcaa

SEQ ID NO: 4213090 - DNA, 25 bp, Homo sapien
agtatatcgtataaaatccttcaag

SEQ ID NO: 4213091 - DNA, 25 bp, Homo sapien
cagatgtagggcttcagtctttggc

SEQ ID NO: 4213092 - DNA, 25 bp, Homo sapien
gcctccagacgatttctaattagtg

SEQ ID NO: 4213093 - DNA, 25 bp, Homo sapien
aggaagtacttccagccgaaggctc

SEQ ID NO: 4213094 - DNA, 25 bp, Homo sapien
caatctgctcttgtgcctccagacg

SEQ ID NO: 4213095 - DNA, 25 bp, Homo sapien
cgaaggctcaatctgctcttgtgcc

SEQ ID NO: 4213096 - DNA, 25 bp, Homo sapien
acttacagggtgaagactaaacgca

SEQ ID NO: 4213097 - DNA, 25 bp, Homo sapien
tcagtggcaattacacctgcaatag

SEQ ID NO: 4213098 - DNA, 25 bp, Homo sapien
aacgcaagtaactcagtcatttcag

SEQ ID NO: 4213099 - DNA, 25 bp, Homo sapien
gaagtaatgttctagtcgaccatca

SEQ ID NO: 4213100 - DNA, 25 bp, Homo sapien
gccaacaacttgtagaatctcaggg

SEQ ID NO: 4213101 - DNA, 25 bp, Homo sapien
aaattatcctggtgtcgtcgcacac

SEQ ID NO: 4213102 - DNA, 25 bp, Homo sapien
tgtgggcattagcaatactctgtca

SEQ ID NO: 4213103 - DNA, 25 bp, Homo sapien
tccccaagatatgtagtagtgcaca

SEQ ID NO: 4213104 - DNA, 25 bp, Homo sapien
taggcggtctgttagagatagctca

SEQ ID NO: 4213105 - DNA, 25 bp, Homo sapien
cacaactgggtgaatgctactgata

SEQ ID NO: 4213106 - DNA, 25 bp, Homo sapien
taatcagcgcatgaagaggctaggc

SEQ ID NO: 4213107 - DNA, 25 bp, Homo sapien
cagcagataaagaattgtgtcccac

SEQ ID NO: 4213108 - DNA, 25 bp, Homo sapien
ctgaaaagacagtcaaatttctcca

SEQ ID NO: 4213109 - DNA, 25 bp, Homo sapien
aaaagacagtcaaatttctccagtg

SEQ ID NO: 4213110 - DNA, 25 bp, Homo sapien
ttctgaaaagacagtcaaatttctc

SEQ ID NO: 4213111 - DNA, 25 bp, Homo sapien
ctctgaattctttctgaaaagacag

SEQ ID NO: 4213112 - DNA, 25 bp, Homo sapien
aagatatgtctgccctgagtttcat

SEQ ID NO: 4213113 - DNA, 25 bp, Homo sapien
caaaagatatgtctgccctgagttt

SEQ ID NO: 4213114 - DNA, 25 bp, Homo sapien
ccaaaagatatgtctgccctgagtt

SEQ ID NO: 4213115 - DNA, 25 bp, Homo sapien
aaagatatgtctgccctgagtttca

SEQ ID NO: 4213116 - DNA, 25 bp, Homo sapien
tcttatgtattgtcaaatcagcaaa

SEQ ID NO: 4213117 - DNA, 25 bp, Homo sapien
tcacttagccttgatagctttggtt

SEQ ID NO: 4213118 - DNA, 25 bp, Homo sapien
ggtgtgataaccagacatgccctca

SEQ ID NO: 4213119 - DNA, 25 bp, Homo sapien
caagctctgagattcgggtgtgata

SEQ ID NO: 4213120 - DNA, 25 bp, Homo sapien
tccacatgagtgctcgtagaccctc

SEQ ID NO: 4213121 - DNA, 25 bp, Homo sapien
ttaatttgtggagtcttacagggat

SEQ ID NO: 4213122 - DNA, 25 bp, Homo sapien
aatttgtggagtcttacagggattc

SEQ ID NO: 4213123 - DNA, 25 bp, Homo sapien
gtagaccctcccacatggatgtaaa

SEQ ID NO: 4213124 - DNA, 25 bp, Homo sapien
aacagcagggtgtactgactgcact

SEQ ID NO: 4213125 - DNA, 25 bp, Homo sapien
tggtgcagaatttttatagatctca

SEQ ID NO: 4213126 - DNA, 25 bp, Homo sapien
atacaaaggaacatctgctattctg

SEQ ID NO: 4213127 - DNA, 25 bp, Homo sapien
tattctgggcacttgccaacagcag

SEQ ID NO: 4213128 - DNA, 25 bp, Homo sapien
tccaaacttatcacgggtctaaatg

SEQ ID NO: 4213129 - DNA, 25 bp, Homo sapien
gagagcattcttgtgacttcagtgt

SEQ ID NO: 4213130 - DNA, 25 bp, Homo sapien
gataaccctatctaacactgtaaac

SEQ ID NO: 4213131 - DNA, 25 bp, Homo sapien
aatgattgtgttagttagataaccc

SEQ ID NO: 4213132 - DNA, 25 bp, Homo sapien
taaaccaacgagcttgactgcccag

SEQ ID NO: 4213133 - DNA, 25 bp, Homo sapien
gcccagctctagacctaatttcaca

SEQ ID NO: 4213134 - DNA, 25 bp, Homo sapien
tgcatgtcccatgtaaaccaacgag

SEQ ID NO: 4213135 - DNA, 25 bp, Homo sapien
tagacctaatttcacatccaaaccc

SEQ ID NO: 4213136 - DNA, 25 bp, Homo sapien
taagaagagcctattccatgtctct

SEQ ID NO: 4213137 - DNA, 25 bp, Homo sapien
aaatcttgggtaaacactgagcctc

SEQ ID NO: 4213138 - DNA, 25 bp, Homo sapien
ccttcctttatctgactctgggtca

SEQ ID NO: 4213139 - DNA, 25 bp, Homo sapien
tgagcctcaacctagtatcttgtac

SEQ ID NO: 4213140 - DNA, 25 bp, Homo sapien
taagtgattataagaaggctgcagg

SEQ ID NO: 4213141 - DNA, 25 bp, Homo sapien
gactaaatactgtcaagacatcgat

SEQ ID NO: 4213142 - DNA, 25 bp, Homo sapien
tcttgtctatatatcggcaatgaac

SEQ ID NO: 4213143 - DNA, 25 bp, Homo sapien
agacatcgattcttcctggcataat

SEQ ID NO: 4213144 - DNA, 25 bp, Homo sapien
tgctcacttgccagatcaaatccta

SEQ ID NO: 4213145 - DNA, 25 bp, Homo sapien
ctgctcacttgccagatcaaatcct

SEQ ID NO: 4213146 - DNA, 25 bp, Homo sapien
ttgatcgatttctatagactcagct

SEQ ID NO: 4213147 - DNA, 25 bp, Homo sapien
tgatcgatttctatagactcagctg

SEQ ID NO: 4213148 - DNA, 25 bp, Homo sapien
tcaggacctctgacgaagtgctcgc

SEQ ID NO: 4213149 - DNA, 25 bp, Homo sapien
aaacacctgtgtacatttgtatggc

SEQ ID NO: 4213150 - DNA, 25 bp, Homo sapien
ggctctggaaactgtgaaagccttg

SEQ ID NO: 4213151 - DNA, 25 bp, Homo sapien
cgcctaaactgtatgtcaccaaata

SEQ ID NO: 4213152 - DNA, 25 bp, Homo sapien
atgttctttttccacgattgtatga

SEQ ID NO: 4213153 - DNA, 25 bp, Homo sapien
cacgattgtatgatggttgcaggtc

SEQ ID NO: 4213154 - DNA, 25 bp, Homo sapien
ttttccacgattgtatgatggttgc

SEQ ID NO: 4213155 - DNA, 25 bp, Homo sapien
gagcaattgtttgacagatttattt

SEQ ID NO: 4213156 - DNA, 25 bp, Homo sapien
aattgcacatgtcatgggtacttag

SEQ ID NO: 4213157 - DNA, 25 bp, Homo sapien
catgtcatgggtacttagtggattt

SEQ ID NO: 4213158 - DNA, 25 bp, Homo sapien
caagagtatccccatgggctaggag

SEQ ID NO: 4213159 - DNA, 25 bp, Homo sapien
tatccccatgggctaggagcaccca

SEQ ID NO: 4213160 - DNA, 25 bp, Homo sapien
cccttgtctccaacgttcttgcaaa

SEQ ID NO: 4213161 - DNA, 25 bp, Homo sapien
gagcaggtaagtcatgtcattttct

SEQ ID NO: 4213162 - DNA, 25 bp, Homo sapien
ggatgagcaggtaagtcatgtcatt

SEQ ID NO: 4213163 - DNA, 25 bp, Homo sapien
tcttcagggtatcacacatattttc

SEQ ID NO: 4213164 - DNA, 25 bp, Homo sapien
tggtatgcaatgttactctccagag

SEQ ID NO: 4213165 - DNA, 25 bp, Homo sapien
ggagtacttttgtgggagctcaaat

SEQ ID NO: 4213166 - DNA, 25 bp, Homo sapien
tattcatgcctaggttctcagaaat

SEQ ID NO: 4213167 - DNA, 25 bp, Homo sapien
tagtatgccctatcagtgagaatat

SEQ ID NO: 4213168 - DNA, 25 bp, Homo sapien
gagtctgggacctaccgcttctctg

SEQ ID NO: 4213169 - DNA, 25 bp, Homo sapien
cactctcaggtgttgctttatggta

SEQ ID NO: 4213170 - DNA, 25 bp, Homo sapien
caaattgactagcataggctgccat

SEQ ID NO: 4213171 - DNA, 25 bp, Homo sapien
gacagatccctcattagtggtttag

SEQ ID NO: 4213172 - DNA, 25 bp, Homo sapien
taattaagtttagcatgccagcatc

SEQ ID NO: 4213173 - DNA, 25 bp, Homo sapien
gttagcaacatcagagcaatcagtc

SEQ ID NO: 4213174 - DNA, 25 bp, Homo sapien
ggagaccaatcctaatacaagaaga

SEQ ID NO: 4213175 - DNA, 25 bp, Homo sapien
gtaattttctcaaggttgcatgaca

SEQ ID NO: 4213176 - DNA, 25 bp, Homo sapien
tgatatggagcaataggattggcag

SEQ ID NO: 4213177 - DNA, 25 bp, Homo sapien
tggcagttgtgattggaaaagtaaa

SEQ ID NO: 4213178 - DNA, 25 bp, Homo sapien
tgtaaatttagcttgatatggagca

SEQ ID NO: 4213179 - DNA, 25 bp, Homo sapien
cttgattacagacagaaggagattc

SEQ ID NO: 4213180 - DNA, 25 bp, Homo sapien
ttttccaggcttcacgtttatacat

SEQ ID NO: 4213181 - DNA, 25 bp, Homo sapien
gttttccaggcttcacgtttataca

SEQ ID NO: 4213182 - DNA, 25 bp, Homo sapien
tcagatggtatcttgtggcttgact

SEQ ID NO: 4213183 - DNA, 25 bp, Homo sapien
taggataaacgtgaagctgaatttg

SEQ ID NO: 4213184 - DNA, 25 bp, Homo sapien
gacctggacattgctttaggataaa

SEQ ID NO: 4213185 - DNA, 25 bp, Homo sapien
gtggcttgacttcttgacctggaca

SEQ ID NO: 4213186 - DNA, 25 bp, Homo sapien
gttggagctattagaacttttcacg

SEQ ID NO: 4213187 - DNA, 25 bp, Homo sapien
aatgttggagctattagaacttttc

SEQ ID NO: 4213188 - DNA, 25 bp, Homo sapien
gctattagaacttttcacgtaacca

SEQ ID NO: 4213189 - DNA, 25 bp, Homo sapien
ggagctattagaacttttcacgtaa

SEQ ID NO: 4213190 - DNA, 25 bp, Homo sapien
gagctcctagcatggttacattcca

SEQ ID NO: 4213191 - DNA, 25 bp, Homo sapien
catgttataacactagccctggtct

SEQ ID NO: 4213192 - DNA, 25 bp, Homo sapien
tttcagagccctacacaatttgcca

SEQ ID NO: 4213193 - DNA, 25 bp, Homo sapien
cactttggtatgttctgaagacccc

SEQ ID NO: 4213194 - DNA, 25 bp, Homo sapien
cagattgtggagctaatggattgaa

SEQ ID NO: 4213195 - DNA, 25 bp, Homo sapien
agaaggctcactgccactcaaaaaa

SEQ ID NO: 4213196 - DNA, 25 bp, Homo sapien
ctattagtggatttactagctctcc

SEQ ID NO: 4213197 - DNA, 25 bp, Homo sapien
tatttagcaagtagcaagcagcact

SEQ ID NO: 4213198 - DNA, 25 bp, Homo sapien
tctccaacactcaaaacagaggcca

SEQ ID NO: 4213199 - DNA, 25 bp, Homo sapien
gcatcttcacgctgtcttaatggaa

SEQ ID NO: 4213200 - DNA, 25 bp, Homo sapien
cttcacgctgtcttaatggaaatcc

SEQ ID NO: 4213201 - DNA, 25 bp, Homo sapien
ttctccaacactcaaaacagaggcc

SEQ ID NO: 4213202 - DNA, 25 bp, Homo sapien
ccagtttcatactttgcgtgtggga

SEQ ID NO: 4213203 - DNA, 25 bp, Homo sapien
tttttgacaattttgcccagtttca

SEQ ID NO: 4213204 - DNA, 25 bp, Homo sapien
tgtattgattgaagctgtagttttg

SEQ ID NO: 4213205 - DNA, 25 bp, Homo sapien
catctgactgataatgtaatgagtt

SEQ ID NO: 4213206 - DNA, 25 bp, Homo sapien
tctgactgataatgtaatgagtttt

SEQ ID NO: 4213207 - DNA, 25 bp, Homo sapien
tcatccagtcatctgactgataatg

SEQ ID NO: 4213208 - DNA, 25 bp, Homo sapien
atccagtcatctgactgataatgta

SEQ ID NO: 4213209 - DNA, 25 bp, Homo sapien
cttttgcttgtgtcctcaaggttta

SEQ ID NO: 4213210 - DNA, 25 bp, Homo sapien
aaagcttgctgcctattgagtattc

SEQ ID NO: 4213211 - DNA, 25 bp, Homo sapien
tgcttgtgtcctcaaggtttagaat

SEQ ID NO: 4213212 - DNA, 25 bp, Homo sapien
gcttgctgcctattgagtattccat

SEQ ID NO: 4213213 - DNA, 25 bp, Homo sapien
tagggcctgtggagcatttaaagaa

SEQ ID NO: 4213214 - DNA, 25 bp, Homo sapien
ccaagaactggaagttgtagggcct

SEQ ID NO: 4213215 - DNA, 25 bp, Homo sapien
caagggagtccatctgagctctgaa

SEQ ID NO: 4213216 - DNA, 25 bp, Homo sapien
ccatcaggttttggacccttgacaa

SEQ ID NO: 4213217 - DNA, 25 bp, Homo sapien
ttggactacctgctgatgctcatgc

SEQ ID NO: 4213218 - DNA, 25 bp, Homo sapien
gaattggactacctgctgatgctca

SEQ ID NO: 4213219 - DNA, 25 bp, Homo sapien
gtgaattggactacctgctgatgct

SEQ ID NO: 4213220 - DNA, 25 bp, Homo sapien
ggactacctgctgatgctcatgcat

SEQ ID NO: 4213221 - DNA, 25 bp, Homo sapien
cgagccttttgtcttagttcttcct

SEQ ID NO: 4213222 - DNA, 25 bp, Homo sapien
tcctcctcaaccaggtgattccgag

SEQ ID NO: 4213223 - DNA, 25 bp, Homo sapien
gttcttccttgtcaaccaatgtgca

SEQ ID NO: 4213224 - DNA, 25 bp, Homo sapien
tgctccagtgtaaaatgaattctcc

SEQ ID NO: 4213225 - DNA, 25 bp, Homo sapien
gaattctgtgcactactggagcaag

SEQ ID NO: 4213226 - DNA, 25 bp, Homo sapien
actactggagcaagcacgatggcat

SEQ ID NO: 4213227 - DNA, 25 bp, Homo sapien
gttttctctaaggtatcattgatga

SEQ ID NO: 4213228 - DNA, 25 bp, Homo sapien
caagcacgatggcattcacaggaca

SEQ ID NO: 4213229 - DNA, 25 bp, Homo sapien
ctaagtgatcatgtagaaaattttc

SEQ ID NO: 4213230 - DNA, 25 bp, Homo sapien
tactcctcctaagtgatcatgtaga

SEQ ID NO: 4213231 - DNA, 25 bp, Homo sapien
cttttactcctcctaagtgatcatg

SEQ ID NO: 4213232 - DNA, 25 bp, Homo sapien
tttcatctgaataactggcaatcat

SEQ ID NO: 4213233 - DNA, 25 bp, Homo sapien
gaaatatccaactgagatccgctta

SEQ ID NO: 4213234 - DNA, 25 bp, Homo sapien
ttgacatagcaataccactcctgag

SEQ ID NO: 4213235 - DNA, 25 bp, Homo sapien
aagagggcatgaagtcactgggaaa

SEQ ID NO: 4213236 - DNA, 25 bp, Homo sapien
taagatgttaatcaacaggatgaca

SEQ ID NO: 4213237 - DNA, 25 bp, Homo sapien
catacaaaaccattctgctcatctt

SEQ ID NO: 4213238 - DNA, 25 bp, Homo sapien
agcagtttccatacaaaaccattct

SEQ ID NO: 4213239 - DNA, 25 bp, Homo sapien
ttcataataagcgaagagaaattca

SEQ ID NO: 4213240 - DNA, 25 bp, Homo sapien
cataataagcgaagagaaattcaaa

SEQ ID NO: 4213241 - DNA, 25 bp, Homo sapien
ttgttgtcttagattttatcctcat

SEQ ID NO: 4213242 - DNA, 25 bp, Homo sapien
atttgttgtcttagattttatcctc

SEQ ID NO: 4213243 - DNA, 25 bp, Homo sapien
tttgttgtcttagattttatcctca

SEQ ID NO: 4213244 - DNA, 25 bp, Homo sapien
tgatgtaacgaaccaaaatactcat

SEQ ID NO: 4213245 - DNA, 25 bp, Homo sapien
tttgcaatcagttcggacaactctc

SEQ ID NO: 4213246 - DNA, 25 bp, Homo sapien
cagttcggacaactctctgtaacca

SEQ ID NO: 4213247 - DNA, 25 bp, Homo sapien
caactctctgtaaccataatcaaaa

SEQ ID NO: 4213248 - DNA, 25 bp, Homo sapien
tcggacaactctctgtaaccataat

SEQ ID NO: 4213249 - DNA, 25 bp, Homo sapien
tttcagaatatgcagtttgtttatt

SEQ ID NO: 4213250 - DNA, 25 bp, Homo sapien
caagcaaatactttatctttcagaa

SEQ ID NO: 4213251 - DNA, 25 bp, Homo sapien
agaatatgcagtttgtttattccca

SEQ ID NO: 4213252 - DNA, 25 bp, Homo sapien
ttatctttcagaatatgcagtttgt

SEQ ID NO: 4213253 - DNA, 25 bp, Homo sapien
acatgcacagatccgtccttatatc

SEQ ID NO: 4213254 - DNA, 25 bp, Homo sapien
tgcaacatgcacagatccgtcctta

SEQ ID NO: 4213255 - DNA, 25 bp, Homo sapien
atgcacagatccgtccttatatcca

SEQ ID NO: 4213256 - DNA, 25 bp, Homo sapien
caacatgcacagatccgtccttata

SEQ ID NO: 4213257 - DNA, 25 bp, Homo sapien
gcagctgccgctttatatgctatcc

SEQ ID NO: 4213258 - DNA, 25 bp, Homo sapien
gccaggtgacaaatgatctgagtgc

SEQ ID NO: 4213259 - DNA, 25 bp, Homo sapien
tgttagcccttcgttcagagacaca

SEQ ID NO: 4213260 - DNA, 25 bp, Homo sapien
catcgttaatgagcctgagtccagg

SEQ ID NO: 4213261 - DNA, 25 bp, Homo sapien
tttagcaaatatctactctggcctg

SEQ ID NO: 4213262 - DNA, 25 bp, Homo sapien
tgtaaccatattgggcttccatggg

SEQ ID NO: 4213263 - DNA, 25 bp, Homo sapien
aagataaaggttctctctgactgca

SEQ ID NO: 4213264 - DNA, 25 bp, Homo sapien
tttagattctaacatgccccacacc

SEQ ID NO: 4213265 - DNA, 25 bp, Homo sapien
atttcaagtgccttgaatgtgtttc

SEQ ID NO: 4213266 - DNA, 25 bp, Homo sapien
gaatgtgtttcatatttcaaattac

SEQ ID NO: 4213267 - DNA, 25 bp, Homo sapien
gcttttaatttcaagtgccttgaat

SEQ ID NO: 4213268 - DNA, 25 bp, Homo sapien
tttaatttcaagtgccttgaatgtg

SEQ ID NO: 4213269 - DNA, 25 bp, Homo sapien
gccatttctgttcagtcgacttagc

SEQ ID NO: 4213270 - DNA, 25 bp, Homo sapien
tctactttggcaaaaccttgctgtc

SEQ ID NO: 4213271 - DNA, 25 bp, Homo sapien
ttcataatcaacacactttaaagga

SEQ ID NO: 4213272 - DNA, 25 bp, Homo sapien
ttggcaaaaccttgctgtctgccat

SEQ ID NO: 4213273 - DNA, 25 bp, Homo sapien
agtctccactatgtttattattcag

SEQ ID NO: 4213274 - DNA, 25 bp, Homo sapien
taacaggcccagaaaattagttggc

SEQ ID NO: 4213275 - DNA, 25 bp, Homo sapien
ttctgtagcagaaggtacaccagga

SEQ ID NO: 4213276 - DNA, 25 bp, Homo sapien
gttggcacaactcgaaatatttctg

SEQ ID NO: 4213277 - DNA, 25 bp, Homo sapien
catctgatccatatactctcacagg

SEQ ID NO: 4213278 - DNA, 25 bp, Homo sapien
gtttctttaaagactggcaatgatg

SEQ ID NO: 4213279 - DNA, 25 bp, Homo sapien
tgatccatatactctcacagggtcc

SEQ ID NO: 4213280 - DNA, 25 bp, Homo sapien
gcacagaaatggtctaggccaatgt

SEQ ID NO: 4213281 - DNA, 25 bp, Homo sapien
ctctgtgaatcttggttgcaggtag

SEQ ID NO: 4213282 - DNA, 25 bp, Homo sapien
aacttctcaatctctttaatggctg

SEQ ID NO: 4213283 - DNA, 25 bp, Homo sapien
tctatattggaacattgctgctctg

SEQ ID NO: 4213284 - DNA, 25 bp, Homo sapien
tatttgtcttatagttgttaccctg

SEQ ID NO: 4213285 - DNA, 25 bp, Homo sapien
cattctgtaactactaaaccatgtc

SEQ ID NO: 4213286 - DNA, 25 bp, Homo sapien
tctgtaactactaaaccatgtctcc

SEQ ID NO: 4213287 - DNA, 25 bp, Homo sapien
tgtaactactaaaccatgtctccag

SEQ ID NO: 4213288 - DNA, 25 bp, Homo sapien
tccaggaatcgtaacctattttcat

SEQ ID NO: 4213289 - DNA, 25 bp, Homo sapien
gctgcatagctgtggccataattct

SEQ ID NO: 4213290 - DNA, 25 bp, Homo sapien
caaaggctgctgcatagctgtggcc

SEQ ID NO: 4213291 - DNA, 25 bp, Homo sapien
tgctgcatagctgtggccataattc

SEQ ID NO: 4213292 - DNA, 25 bp, Homo sapien
tttcaaaggctgctgcatagctgtg

SEQ ID NO: 4213293 - DNA, 25 bp, Homo sapien
tagttccctttttatgtcctcttga

SEQ ID NO: 4213294 - DNA, 25 bp, Homo sapien
tatgtcctcttgaattttaggacca

SEQ ID NO: 4213295 - DNA, 25 bp, Homo sapien
cctcttgaattttaggaccagtcat

SEQ ID NO: 4213296 - DNA, 25 bp, Homo sapien
ctgtcatttagttccctttttatgt

SEQ ID NO: 4213297 - DNA, 25 bp, Homo sapien
aaatattgttagtatataggtttct

SEQ ID NO: 4213298 - DNA, 25 bp, Homo sapien
tgaaaaatattgttagtatataggt

SEQ ID NO: 4213299 - DNA, 25 bp, Homo sapien
tattgttagtatataggtttctgat

SEQ ID NO: 4213300 - DNA, 25 bp, Homo sapien
gccctgtttctcttaatctctataa

SEQ ID NO: 4213301 - DNA, 25 bp, Homo sapien
catctgtaataccatccaagtaaac

SEQ ID NO: 4213302 - DNA, 25 bp, Homo sapien
aatgaataactacatgggggtatcc

SEQ ID NO: 4213303 - DNA, 25 bp, Homo sapien
tagcatatgtccagcgtgcctagat

SEQ ID NO: 4213304 - DNA, 25 bp, Homo sapien
gctttaactcaaatatgatgctgaa

SEQ ID NO: 4213305 - DNA, 25 bp, Homo sapien
gctgttgccatacaaaaatgctact

SEQ ID NO: 4213306 - DNA, 25 bp, Homo sapien
catttttattacagggatctttcac

SEQ ID NO: 4213307 - DNA, 25 bp, Homo sapien
tcgggtaatgtgattcttccagctg

SEQ ID NO: 4213308 - DNA, 25 bp, Homo sapien
tatattctgtgtcgtttgtggttcc

SEQ ID NO: 4213309 - DNA, 25 bp, Homo sapien
ccaaaacaatgtccatgtattttga

SEQ ID NO: 4213310 - DNA, 25 bp, Homo sapien
tgtattttgaaagtttgccagaaca

SEQ ID NO: 4213311 - DNA, 25 bp, Homo sapien
aacaatgtccatgtattttgaaagt

SEQ ID NO: 4213312 - DNA, 25 bp, Homo sapien
tattttgaaagtttgccagaacata

SEQ ID NO: 4213313 - DNA, 25 bp, Homo sapien
agagcaacctctgctggcaaacaga

SEQ ID NO: 4213314 - DNA, 25 bp, Homo sapien
ctaagagcaacctctgctggcaaac

SEQ ID NO: 4213315 - DNA, 25 bp, Homo sapien
cctctgctggcaaacagaggttgag

SEQ ID NO: 4213316 - DNA, 25 bp, Homo sapien
gagcaacctctgctggcaaacagag

SEQ ID NO: 4213317 - DNA, 25 bp, Homo sapien
tcaggacacaggtaatgtcaaccca

SEQ ID NO: 4213318 - DNA, 25 bp, Homo sapien
tacttcatgtgtcagaaggaactcc

SEQ ID NO: 4213319 - DNA, 25 bp, Homo sapien
tactgccacgaggaccgaagaggca

SEQ ID NO: 4213320 - DNA, 25 bp, Homo sapien
tgtcaacccagttccctagtcagat

SEQ ID NO: 4213321 - DNA, 25 bp, Homo sapien
tcagttgtctacttgcacagtatat

SEQ ID NO: 4213322 - DNA, 25 bp, Homo sapien
gcacagtatatatatcatggtcctg

SEQ ID NO: 4213323 - DNA, 25 bp, Homo sapien
agttgtctacttgcacagtatatat

SEQ ID NO: 4213324 - DNA, 25 bp, Homo sapien
catcagttgtctacttgcacagtat

SEQ ID NO: 4213325 - DNA, 25 bp, Homo sapien
caatttactgggtgagtttcaggat

SEQ ID NO: 4213326 - DNA, 25 bp, Homo sapien
tcaatttactgggtgagtttcagga

SEQ ID NO: 4213327 - DNA, 25 bp, Homo sapien
gtgtgggagttttggactcatccat

SEQ ID NO: 4213328 - DNA, 25 bp, Homo sapien
aatagtaggttcaattgtgtctgta

SEQ ID NO: 4213329 - DNA, 25 bp, Homo sapien
gagtgtgggagttttggactcatcc

SEQ ID NO: 4213330 - DNA, 25 bp, Homo sapien
ataaatagtaggttcaattgtgtct

SEQ ID NO: 4213331 - DNA, 25 bp, Homo sapien
gatctttcatctcaagtggttgcat

SEQ ID NO: 4213332 - DNA, 25 bp, Homo sapien
tctcaggtgcttagaggtaggaact

SEQ ID NO: 4213333 - DNA, 25 bp, Homo sapien
catgccagactgtatttgggagaca

SEQ ID NO: 4213334 - DNA, 25 bp, Homo sapien
ggagacacttcatcaggtctaaaag

SEQ ID NO: 4213335 - DNA, 25 bp, Homo sapien
aggtctaaaagagttagtacctgtg

SEQ ID NO: 4213336 - DNA, 25 bp, Homo sapien
tacacatatgttttctgaagtctat

SEQ ID NO: 4213337 - DNA, 25 bp, Homo sapien
tatttttcttctcagtggccttaaa

SEQ ID NO: 4213338 - DNA, 25 bp, Homo sapien
cacatatgttttctgaagtctattt

SEQ ID NO: 4213339 - DNA, 25 bp, Homo sapien
catacacatatgttttctgaagtct

SEQ ID NO: 4213340 - DNA, 25 bp, Homo sapien
ctttaatacattctttattctccat

SEQ ID NO: 4213341 - DNA, 25 bp, Homo sapien
aatatccacaaaggaactacaacag

SEQ ID NO: 4213342 - DNA, 25 bp, Homo sapien
acaatatccacaaaggaactacaac

SEQ ID NO: 4213343 - DNA, 25 bp, Homo sapien
gaacaatatccacaaaggaactaca

SEQ ID NO: 4213344 - DNA, 25 bp, Homo sapien
tgaacaatatccacaaaggaactac

SEQ ID NO: 4213345 - DNA, 25 bp, Homo sapien
atatgtgctctatcttggttttagg

SEQ ID NO: 4213346 - DNA, 25 bp, Homo sapien
tgtgctctatcttggttttaggaaa

SEQ ID NO: 4213347 - DNA, 25 bp, Homo sapien
tatgtgctctatcttggttttagga

SEQ ID NO: 4213348 - DNA, 25 bp, Homo sapien
atgtgctctatcttggttttaggaa

SEQ ID NO: 4213349 - DNA, 25 bp, Homo sapien
ttcagtcctgaaaacaaccgcaggg

SEQ ID NO: 4213350 - DNA, 25 bp, Homo sapien
caaagatacatcgtggagctgttgt

SEQ ID NO: 4213351 - DNA, 25 bp, Homo sapien
gtcctgaaaacaaccgcagggcatc

SEQ ID NO: 4213352 - DNA, 25 bp, Homo sapien
atgcaaagatacatcgtggagctgt

SEQ ID NO: 4213353 - DNA, 25 bp, Homo sapien
tcatatgaaagtactaattatttca

SEQ ID NO: 4213354 - DNA, 25 bp, Homo sapien
ggcagatacatgcaatttctctaaa

SEQ ID NO: 4213355 - DNA, 25 bp, Homo sapien
gattaacaataagttagaaatttgc

SEQ ID NO: 4213356 - DNA, 25 bp, Homo sapien
aatttgctttatggaacagattagg

SEQ ID NO: 4213357 - DNA, 25 bp, Homo sapien
cacaactgagggatgctaacagcca

SEQ ID NO: 4213358 - DNA, 25 bp, Homo sapien
tgtagcacacacgtaattcacactg

SEQ ID NO: 4213359 - DNA, 25 bp, Homo sapien
tgaaactagcttatcccaaggctct

SEQ ID NO: 4213360 - DNA, 25 bp, Homo sapien
gactgtcttttgaggtaaggccaga

SEQ ID NO: 4213361 - DNA, 25 bp, Homo sapien
gcagagcggtcacaaatagaggaag

SEQ ID NO: 4213362 - DNA, 25 bp, Homo sapien
ctgcagagcggtcacaaatagagga

SEQ ID NO: 4213363 - DNA, 25 bp, Homo sapien
tgcagagcggtcacaaatagaggaa

SEQ ID NO: 4213364 - DNA, 25 bp, Homo sapien
cagagcggtcacaaatagaggaaga

SEQ ID NO: 4213365 - DNA, 25 bp, Homo sapien
taggtgtcctgtggcttccccagtc

SEQ ID NO: 4213366 - DNA, 25 bp, Homo sapien
taactttctaatttgccatactcat

SEQ ID NO: 4213367 - DNA, 25 bp, Homo sapien
ccctgccagcattcattgtctctcc

SEQ ID NO: 4213368 - DNA, 25 bp, Homo sapien
ccaccatgattctaggtgtcctgtg

SEQ ID NO: 4213369 - DNA, 25 bp, Homo sapien
gagaaacagcagtagactcatgatc

SEQ ID NO: 4213370 - DNA, 25 bp, Homo sapien
gcttacatgaatttgcaactgaaca

SEQ ID NO: 4213371 - DNA, 25 bp, Homo sapien
gccaaactggttctgtagcttacat

SEQ ID NO: 4213372 - DNA, 25 bp, Homo sapien
acatgaatttgcaactgaacaagtc

SEQ ID NO: 4213373 - DNA, 25 bp, Homo sapien
caactggatagggtaacaaagcgga

SEQ ID NO: 4213374 - DNA, 25 bp, Homo sapien
caaagcggagaacatgtcagttaag

SEQ ID NO: 4213375 - DNA, 25 bp, Homo sapien
tacacaacagtgtccagctgattgt

SEQ ID NO: 4213376 - DNA, 25 bp, Homo sapien
ggatgttggcttctaacctcaggtt

SEQ ID NO: 4213377 - DNA, 25 bp, Homo sapien
aaagcagtactgtattgcgggatct

SEQ ID NO: 4213378 - DNA, 25 bp, Homo sapien
ctaaagcagtactgtattgcgggat

SEQ ID NO: 4213379 - DNA, 25 bp, Homo sapien
aagcagtactgtattgcgggatctg

SEQ ID NO: 4213380 - DNA, 25 bp, Homo sapien
taaagcagtactgtattgcgggatc

SEQ ID NO: 4213381 - DNA, 25 bp, Homo sapien
ccgctatacatgcaatgaaggagcc

SEQ ID NO: 4213382 - DNA, 25 bp, Homo sapien
gggcactgacaccccgctatacatg

SEQ ID NO: 4213383 - DNA, 25 bp, Homo sapien
caccccgctatacatgcaatgaagg

SEQ ID NO: 4213384 - DNA, 25 bp, Homo sapien
actgacaccccgctatacatgcaat

SEQ ID NO: 4213385 - DNA, 25 bp, Homo sapien
ttgtgtccacaaaagttctttgctt

SEQ ID NO: 4213386 - DNA, 25 bp, Homo sapien
ctatttcccgtggtgccagctgctt

SEQ ID NO: 4213387 - DNA, 25 bp, Homo sapien
gctttgaaaagatgcatccagctgc

SEQ ID NO: 4213388 - DNA, 25 bp, Homo sapien
ctttgaaaagatgcatccagctgct

SEQ ID NO: 4213389 - DNA, 25 bp, Homo sapien
gaggttccgggtggacatgttctta

SEQ ID NO: 4213390 - DNA, 25 bp, Homo sapien
taaatggagagcacttattaaagca

SEQ ID NO: 4213391 - DNA, 25 bp, Homo sapien
cattcaacctagtagcagaaggtca

SEQ ID NO: 4213392 - DNA, 25 bp, Homo sapien
gaaggtcatgtgtttcaaatcagca

SEQ ID NO: 4213393 - DNA, 25 bp, Homo sapien
cctgattgatgacacaatgggcaac

SEQ ID NO: 4213394 - DNA, 25 bp, Homo sapien
gaatttgtaaactcatcctgattga

SEQ ID NO: 4213395 - DNA, 25 bp, Homo sapien
aatgggcaacacctagcaggcttgg

SEQ ID NO: 4213396 - DNA, 25 bp, Homo sapien
cacactgataaagggtaaatgctct

SEQ ID NO: 4213397 - DNA, 25 bp, Homo sapien
ccactttgtaatggcatgtttagga

SEQ ID NO: 4213398 - DNA, 25 bp, Homo sapien
gctcttccgtgtacaagttttggtc

SEQ ID NO: 4213399 - DNA, 25 bp, Homo sapien
cattaggcttgcttaaacataaaag

SEQ ID NO: 4213400 - DNA, 25 bp, Homo sapien
ggagaacctctctattgctcttccg

SEQ ID NO: 4213401 - DNA, 25 bp, Homo sapien
atgaactgtcatgccactattgctg

SEQ ID NO: 4213402 - DNA, 25 bp, Homo sapien
tcccagtgttggatgccgcttaagt

SEQ ID NO: 4213403 - DNA, 25 bp, Homo sapien
gcttaagtttcagatgagccacaca

SEQ ID NO: 4213404 - DNA, 25 bp, Homo sapien
agatgagccacacactctctattct

SEQ ID NO: 4213405 - DNA, 25 bp, Homo sapien
tcccaatttctaccgctgacactgg

SEQ ID NO: 4213406 - DNA, 25 bp, Homo sapien
taccgctgacactggcactgtcaca

SEQ ID NO: 4213407 - DNA, 25 bp, Homo sapien
tttctaccgctgacactggcactgt

SEQ ID NO: 4213408 - DNA, 25 bp, Homo sapien
gctgacactggcactgtcacatctt

SEQ ID NO: 4213409 - DNA, 25 bp, Homo sapien
catatcacagtcagtttctgtaacc

SEQ ID NO: 4213410 - DNA, 25 bp, Homo sapien
cagtcataggcatatcacagtcagt

SEQ ID NO: 4213411 - DNA, 25 bp, Homo sapien
taggcatatcacagtcagtttctgt

SEQ ID NO: 4213412 - DNA, 25 bp, Homo sapien
cataggcatatcacagtcagtttct

SEQ ID NO: 4213413 - DNA, 25 bp, Homo sapien
gaactttaggaggctaatgcaggca

SEQ ID NO: 4213414 - DNA, 25 bp, Homo sapien
cttcagctcagagaatggctttgac

SEQ ID NO: 4213415 - DNA, 25 bp, Homo sapien
tggtgtctatattctttcctgcaca

SEQ ID NO: 4213416 - DNA, 25 bp, Homo sapien
tggctttgacccaggcatggtagct

SEQ ID NO: 4213417 - DNA, 25 bp, Homo sapien
gggggtaaggtgtcactctgcagca

SEQ ID NO: 4213418 - DNA, 25 bp, Homo sapien
caggccacggcatgggggctacgat

SEQ ID NO: 4213419 - DNA, 25 bp, Homo sapien
tggaggatgcatgagcagggagcag

SEQ ID NO: 4213420 - DNA, 25 bp, Homo sapien
gctacgatgccctgaagaggggtca

SEQ ID NO: 4213421 - DNA, 25 bp, Homo sapien
ttccttgctggaagtactggagcaa

SEQ ID NO: 4213422 - DNA, 25 bp, Homo sapien
aaacgtgtacaatttccttgctgga

SEQ ID NO: 4213423 - DNA, 25 bp, Homo sapien
gctggaagtactggagcaaatatga

SEQ ID NO: 4213424 - DNA, 25 bp, Homo sapien
ctcaaacgtgtacaatttccttgct

SEQ ID NO: 4213425 - DNA, 25 bp, Homo sapien
cctgtgaccaggcagaagggtaagt

SEQ ID NO: 4213426 - DNA, 25 bp, Homo sapien
ctgtgaccaggcagaagggtaagtt

SEQ ID NO: 4213427 - DNA, 25 bp, Homo sapien
aaagtaattggtcaaaattgcactc

SEQ ID NO: 4213428 - DNA, 25 bp, Homo sapien
tatgcttcatagctattcttgaagt

SEQ ID NO: 4213429 - DNA, 25 bp, Homo sapien
tcatatgcttcatagctattcttga

SEQ ID NO: 4213430 - DNA, 25 bp, Homo sapien
gcttcatagctattcttgaagttct

SEQ ID NO: 4213431 - DNA, 25 bp, Homo sapien
tgtaagaaaatgaaggaagccggag

SEQ ID NO: 4213432 - DNA, 25 bp, Homo sapien
agaaaatgaaggaagccggagagat

SEQ ID NO: 4213433 - DNA, 25 bp, Homo sapien
ttgtaagaaaatgaaggaagccgga

SEQ ID NO: 4213434 - DNA, 25 bp, Homo sapien
taagaaaatgaaggaagccggagag

SEQ ID NO: 4213435 - DNA, 25 bp, Homo sapien
attctcaggtgtgggcattgattct

SEQ ID NO: 4213436 - DNA, 25 bp, Homo sapien
acaattctcaggtgtgggcattgat

SEQ ID NO: 4213437 - DNA, 25 bp, Homo sapien
tcttcaggagaatctatctcaagca

SEQ ID NO: 4213438 - DNA, 25 bp, Homo sapien
ttcaggagaatctatctcaagcaca

SEQ ID NO: 4213439 - DNA, 25 bp, Homo sapien
cagtttgggtgccaagacattattt

SEQ ID NO: 4213440 - DNA, 25 bp, Homo sapien
gtttgggtgccaagacattatttca

SEQ ID NO: 4213441 - DNA, 25 bp, Homo sapien
ttgggtgccaagacattatttcaac

SEQ ID NO: 4213442 - DNA, 25 bp, Homo sapien
tgggtgccaagacattatttcaaca

SEQ ID NO: 4213443 - DNA, 25 bp, Homo sapien
atcttgtacatctgggagctgcaga

SEQ ID NO: 4213444 - DNA, 25 bp, Homo sapien
caccctgttttggatcgccctctgt

SEQ ID NO: 4213445 - DNA, 25 bp, Homo sapien
tccaaccagtcccaggtacctcagt

SEQ ID NO: 4213446 - DNA, 25 bp, Homo sapien
cctgttttggatcgccctctgtggg

SEQ ID NO: 4213447 - DNA, 25 bp, Homo sapien
ctctgaagctctgaacataaataga

SEQ ID NO: 4213448 - DNA, 25 bp, Homo sapien
aatagatatagtgctggcgggatcc

SEQ ID NO: 4213449 - DNA, 25 bp, Homo sapien
ttaaaagggttggagagattcagct

SEQ ID NO: 4213450 - DNA, 25 bp, Homo sapien
caagcatgattatcctctttagagg

SEQ ID NO: 4213451 - DNA, 25 bp, Homo sapien
gaatccctatggttagactatgcat

SEQ ID NO: 4213452 - DNA, 25 bp, Homo sapien
tattccacagcgtgattctacctct

SEQ ID NO: 4213453 - DNA, 25 bp, Homo sapien
cctctttagacataggaatccctat

SEQ ID NO: 4213454 - DNA, 25 bp, Homo sapien
cggagctgggatacaacccatattc

SEQ ID NO: 4213455 - DNA, 25 bp, Homo sapien
ttctttggaaattctcagatttctc

SEQ ID NO: 4213456 - DNA, 25 bp, Homo sapien
aattctcagatttctctcatactgt

SEQ ID NO: 4213457 - DNA, 25 bp, Homo sapien
gaaattctcagatttctctcatact

SEQ ID NO: 4213458 - DNA, 25 bp, Homo sapien
ttctcagatttctctcatactgttc

SEQ ID NO: 4213459 - DNA, 25 bp, Homo sapien
ttccactcacaccccctatcttctt

SEQ ID NO: 4213460 - DNA, 25 bp, Homo sapien
cactcacaccccctatcttcttcta

SEQ ID NO: 4213461 - DNA, 25 bp, Homo sapien
tcacaccccctatcttcttctaaga

SEQ ID NO: 4213462 - DNA, 25 bp, Homo sapien
ctcacaccccctatcttcttctaag

SEQ ID NO: 4213463 - DNA, 25 bp, Homo sapien
tgctcctgtttatttgagtgttttc

SEQ ID NO: 4213464 - DNA, 25 bp, Homo sapien
gttttcataagcaattagccatact

SEQ ID NO: 4213465 - DNA, 25 bp, Homo sapien
cataagcaattagccatacttttcc

SEQ ID NO: 4213466 - DNA, 25 bp, Homo sapien
gctcctgtttatttgagtgttttca

SEQ ID NO: 4213467 - DNA, 25 bp, Homo sapien
gacaattgtcagctcaaggcgggca

SEQ ID NO: 4213468 - DNA, 25 bp, Homo sapien
cacacatgttaaggagggtactcca

SEQ ID NO: 4213469 - DNA, 25 bp, Homo sapien
gagttgatcatgtctttccagtctg

SEQ ID NO: 4213470 - DNA, 25 bp, Homo sapien
gtttgaccaaatagttgtgcatccc

SEQ ID NO: 4213471 - DNA, 25 bp, Homo sapien
gtggctacattggtataaacaggta

SEQ ID NO: 4213472 - DNA, 25 bp, Homo sapien
aacgtggtcgttgggatcaccgtca

SEQ ID NO: 4213473 - DNA, 25 bp, Homo sapien
taggtaagtcaatgtgtcagaggtc

SEQ ID NO: 4213474 - DNA, 25 bp, Homo sapien
tttcagcctcgaatgaacgtggtcg

SEQ ID NO: 4213475 - DNA, 25 bp, Homo sapien
ggtaagtggctgaaacaatgactta

SEQ ID NO: 4213476 - DNA, 25 bp, Homo sapien
ataaactgctttcaaggtaagtggc

SEQ ID NO: 4213477 - DNA, 25 bp, Homo sapien
tgacttaatgttgtttcccattaaa

SEQ ID NO: 4213478 - DNA, 25 bp, Homo sapien
gatggtggttcatgactattcccag

SEQ ID NO: 4213479 - DNA, 25 bp, Homo sapien
tccgaccgtggatggtgattttctc

SEQ ID NO: 4213480 - DNA, 25 bp, Homo sapien
gccattcattgttcaccagagccat

SEQ ID NO: 4213481 - DNA, 25 bp, Homo sapien
gaagcatttgttgtcccctatggga

SEQ ID NO: 4213482 - DNA, 25 bp, Homo sapien
gctccttgggcggtaacatctcttt

SEQ ID NO: 4213483 - DNA, 25 bp, Homo sapien
tttggtggcacggtaacagcctttc

SEQ ID NO: 4213484 - DNA, 25 bp, Homo sapien
ccatggatcagagatgtggaaccca

SEQ ID NO: 4213485 - DNA, 25 bp, Homo sapien
tggaattccctatgcacagccacct

SEQ ID NO: 4213486 - DNA, 25 bp, Homo sapien
ggtagacttcgattcaaaaagccac

SEQ ID NO: 4213487 - DNA, 25 bp, Homo sapien
tgtaacaatttgagcagggagagaa

SEQ ID NO: 4213488 - DNA, 25 bp, Homo sapien
gacgttctcgacttacctggagctg

SEQ ID NO: 4213489 - DNA, 25 bp, Homo sapien
tccagacagcgcagtatgcagaggc

SEQ ID NO: 4213490 - DNA, 25 bp, Homo sapien
gagagccgaggtgattgaaatacag

SEQ ID NO: 4213491 - DNA, 25 bp, Homo sapien
tctaatttaggttatgtcaatatct

SEQ ID NO: 4213492 - DNA, 25 bp, Homo sapien
tttgttgtttcaagacacattgaac

SEQ ID NO: 4213493 - DNA, 25 bp, Homo sapien
catttgtgaatgcttgtcatgcaac

SEQ ID NO: 4213494 - DNA, 25 bp, Homo sapien
agagacggggtgaactcattctttc

SEQ ID NO: 4213495 - DNA, 25 bp, Homo sapien
agaatgcttttaaatgctgtttcca

SEQ ID NO: 4213496 - DNA, 25 bp, Homo sapien
gaatgcttttaaatgctgtttccat

SEQ ID NO: 4213497 - DNA, 25 bp, Homo sapien
caagaatgcttttaaatgctgtttc

SEQ ID NO: 4213498 - DNA, 25 bp, Homo sapien
cccaagaatgcttttaaatgctgtt

SEQ ID NO: 4213499 - DNA, 25 bp, Homo sapien
ttcccacccctcacaaagagtctct

SEQ ID NO: 4213500 - DNA, 25 bp, Homo sapien
ccctcacaaagagtctctcccccaa

SEQ ID NO: 4213501 - DNA, 25 bp, Homo sapien
tgcttcccacccctcacaaagagtc

SEQ ID NO: 4213502 - DNA, 25 bp, Homo sapien
cccctcacaaagagtctctccccca

SEQ ID NO: 4213503 - DNA, 25 bp, Homo sapien
tatttcctgtcttcttagatgcttc

SEQ ID NO: 4213504 - DNA, 25 bp, Homo sapien
aagcatgggccttcactataccact

SEQ ID NO: 4213505 - DNA, 25 bp, Homo sapien
taagcatgggccttcactataccac

SEQ ID NO: 4213506 - DNA, 25 bp, Homo sapien
tgtcttcttagatgcttcatgtctc

SEQ ID NO: 4213507 - DNA, 25 bp, Homo sapien
ccaaatgtccaacaatgatagactg

SEQ ID NO: 4213508 - DNA, 25 bp, Homo sapien
gattaagaaaatgtggcacatatac

SEQ ID NO: 4213509 - DNA, 25 bp, Homo sapien
ctatgcagccaaaaaaaaaggatga

SEQ ID NO: 4213510 - DNA, 25 bp, Homo sapien
gcaatagcaaagacttagaaccaag

SEQ ID NO: 4213511 - DNA, 25 bp, Homo sapien
aagtatctggaactgcaggcacccg

SEQ ID NO: 4213512 - DNA, 25 bp, Homo sapien
accatgttggctagtgagaggtgac

SEQ ID NO: 4213513 - DNA, 25 bp, Homo sapien
ccactttctgggctagccaaggccg

SEQ ID NO: 4213514 - DNA, 25 bp, Homo sapien
cactttggcggaacttgaggagtcc

SEQ ID NO: 4213515 - DNA, 25 bp, Homo sapien
aaattcattgaagtattaataatac

SEQ ID NO: 4213516 - DNA, 25 bp, Homo sapien
attaaaatctgaactgccagtgcac

SEQ ID NO: 4213517 - DNA, 25 bp, Homo sapien
gactaagaaggagaacactgttacg

SEQ ID NO: 4213518 - DNA, 25 bp, Homo sapien
cactgttacggttcttcaatctgac

SEQ ID NO: 4213519 - DNA, 25 bp, Homo sapien
tatttgaaatcagactcgggtgtta

SEQ ID NO: 4213520 - DNA, 25 bp, Homo sapien
tatttgacaatatgtgctacaacag

SEQ ID NO: 4213521 - DNA, 25 bp, Homo sapien
gacttgacaggttgaagaaacagca

SEQ ID NO: 4213522 - DNA, 25 bp, Homo sapien
gaaacagcattgagcttgcatcaca

SEQ ID NO: 4213523 - DNA, 25 bp, Homo sapien
taaggtcaacataggtaaaacatgt

SEQ ID NO: 4213524 - DNA, 25 bp, Homo sapien
ttcatcatcattaccaattaggatt

SEQ ID NO: 4213525 - DNA, 25 bp, Homo sapien
ttagaagattctcttaatgtgtttc

SEQ ID NO: 4213526 - DNA, 25 bp, Homo sapien
tgtttcatcatcattaccaattagg

SEQ ID NO: 4213527 - DNA, 25 bp, Homo sapien
gaagattctcttaatgtgtttctct

SEQ ID NO: 4213528 - DNA, 25 bp, Homo sapien
ctatgcccggccccttgttcttttg

SEQ ID NO: 4213529 - DNA, 25 bp, Homo sapien
ctcaggcaatccacttgcattgggc

SEQ ID NO: 4213530 - DNA, 25 bp, Homo sapien
caggcaatccacttgcattgggctc

SEQ ID NO: 4213531 - DNA, 25 bp, Homo sapien
ggcaatccacttgcattgggctccc

SEQ ID NO: 4213532 - DNA, 25 bp, Homo sapien
ttctcccaggctccaacagcagcat

SEQ ID NO: 4213533 - DNA, 25 bp, Homo sapien
ccaggctccaacagcagcatcagtg

SEQ ID NO: 4213534 - DNA, 25 bp, Homo sapien
tctcccaggctccaacagcagcatc

SEQ ID NO: 4213535 - DNA, 25 bp, Homo sapien
tcccaggctccaacagcagcatcag

SEQ ID NO: 4213536 - DNA, 25 bp, Homo sapien
tctaggtagtttgctcaggttccag

SEQ ID NO: 4213537 - DNA, 25 bp, Homo sapien
cttgggtgacgtatcatggcattgc

SEQ ID NO: 4213538 - DNA, 25 bp, Homo sapien
cctgggcagctgtcaaaacatgggt

SEQ ID NO: 4213539 - DNA, 25 bp, Homo sapien
cattcttcgggctagagttgtggca

SEQ ID NO: 4213540 - DNA, 25 bp, Homo sapien
ctgttgtcgaagctttgaagtgtac

SEQ ID NO: 4213541 - DNA, 25 bp, Homo sapien
ttttttacgatatcaatctatttgg

SEQ ID NO: 4213542 - DNA, 25 bp, Homo sapien
cttgcatttcactgaactgtagtcc

SEQ ID NO: 4213543 - DNA, 25 bp, Homo sapien
gaactgtagtccataactttgaatt

SEQ ID NO: 4213544 - DNA, 25 bp, Homo sapien
gttgtagagcagatcagattctgtc

SEQ ID NO: 4213545 - DNA, 25 bp, Homo sapien
tttcccttaattgttcttactgtca

SEQ ID NO: 4213546 - DNA, 25 bp, Homo sapien
caaaataacagggttgtagagcaga

SEQ ID NO: 4213547 - DNA, 25 bp, Homo sapien
ctctggtgtccatatttgtgagaac

SEQ ID NO: 4213548 - DNA, 25 bp, Homo sapien
tttattcaaggaaacctgatctagg

SEQ ID NO: 4213549 - DNA, 25 bp, Homo sapien
tatctatattgaatccccggtttaa

SEQ ID NO: 4213550 - DNA, 25 bp, Homo sapien
cagagtgtgttttaatgcttgatcc

SEQ ID NO: 4213551 - DNA, 25 bp, Homo sapien
tgcttgatcctccacagtttaatta

SEQ ID NO: 4213552 - DNA, 25 bp, Homo sapien
cgatgcttcctatgggcttgtggtg

SEQ ID NO: 4213553 - DNA, 25 bp, Homo sapien
tgggtcttaagggaacatcagcgat

SEQ ID NO: 4213554 - DNA, 25 bp, Homo sapien
gtggtgaccacagaaggaggatcat

SEQ ID NO: 4213555 - DNA, 25 bp, Homo sapien
gaacatcagcgatgcttcctatggg

SEQ ID NO: 4213556 - DNA, 25 bp, Homo sapien
tgtagccattccttcaagcctatca

SEQ ID NO: 4213557 - DNA, 25 bp, Homo sapien
gaatctaatgatgccatgtgtagtg

SEQ ID NO: 4213558 - DNA, 25 bp, Homo sapien
ttccccagctgcagtaaagttgtag

SEQ ID NO: 4213559 - DNA, 25 bp, Homo sapien
tacattaaaaagaacagtgcttcaa

SEQ ID NO: 4213560 - DNA, 25 bp, Homo sapien
cacctaaattgcacttgcatttgca

SEQ ID NO: 4213561 - DNA, 25 bp, Homo sapien
attttcccacctaaattgcacttgc

SEQ ID NO: 4213562 - DNA, 25 bp, Homo sapien
gctcaaagaagcttcctgctacagc

SEQ ID NO: 4213563 - DNA, 25 bp, Homo sapien
tcctgctacagcctcttgaagtgtt

SEQ ID NO: 4213564 - DNA, 25 bp, Homo sapien
gggaatttccctgtagattctccca

SEQ ID NO: 4213565 - DNA, 25 bp, Homo sapien
agccatgtgtaaacaaagacaatgc

SEQ ID NO: 4213566 - DNA, 25 bp, Homo sapien
gacaatgcagcgttgtccagggaat

SEQ ID NO: 4213567 - DNA, 25 bp, Homo sapien
tctcccattgagttaaaagatcaga

SEQ ID NO: 4213568 - DNA, 25 bp, Homo sapien
ttacaggtggtttgagacgagatct

SEQ ID NO: 4213569 - DNA, 25 bp, Homo sapien
gacaggaatgcaggtccacaaagaa

SEQ ID NO: 4213570 - DNA, 25 bp, Homo sapien
tcttgggaaaagtcgtctattcaga

SEQ ID NO: 4213571 - DNA, 25 bp, Homo sapien
gaagtttctgatggcacatccaaaa

SEQ ID NO: 4213572 - DNA, 25 bp, Homo sapien
tgatctctacttaaccttactgtaa

SEQ ID NO: 4213573 - DNA, 25 bp, Homo sapien
ctgatctctacttaaccttactgta

SEQ ID NO: 4213574 - DNA, 25 bp, Homo sapien
gatctctacttaaccttactgtaaa

SEQ ID NO: 4213575 - DNA, 25 bp, Homo sapien
gcatacagatcactcctccaaactc

SEQ ID NO: 4213576 - DNA, 25 bp, Homo sapien
cagcatacagatcactcctccaaac

SEQ ID NO: 4213577 - DNA, 25 bp, Homo sapien
tctctcgaaaattccagcatacaga

SEQ ID NO: 4213578 - DNA, 25 bp, Homo sapien
agcatacagatcactcctccaaact

SEQ ID NO: 4213579 - DNA, 25 bp, Homo sapien
tcatactgaactccatgtaacctgg

SEQ ID NO: 4213580 - DNA, 25 bp, Homo sapien
tgtaacctggaaatagttcgctcag

SEQ ID NO: 4213581 - DNA, 25 bp, Homo sapien
tcagggctaagttagggtcaacaaa

SEQ ID NO: 4213582 - DNA, 25 bp, Homo sapien
aggaagttttactctgggacattca

SEQ ID NO: 4213583 - DNA, 25 bp, Homo sapien
tccgagagtggcaaagcagaacttc

SEQ ID NO: 4213584 - DNA, 25 bp, Homo sapien
tcacaatacttgatgggaccatatg

SEQ ID NO: 4213585 - DNA, 25 bp, Homo sapien
cagaagagtcagaacggtccaggtg

SEQ ID NO: 4213586 - DNA, 25 bp, Homo sapien
gacattcaagcaaacaggcgcagaa

SEQ ID NO: 4213587 - DNA, 25 bp, Homo sapien
tcctaggagtgcaagagctatgtac

SEQ ID NO: 4213588 - DNA, 25 bp, Homo sapien
gactggctagtacaataatcaaaag

SEQ ID NO: 4213589 - DNA, 25 bp, Homo sapien
tatgagaggttcacatttccaggac

SEQ ID NO: 4213590 - DNA, 25 bp, Homo sapien
tatttgggccagtaaaacactgctt

SEQ ID NO: 4213591 - DNA, 25 bp, Homo sapien
ctttctgcttctcggattgagcagg

SEQ ID NO: 4213592 - DNA, 25 bp, Homo sapien
gcttctcggattgagcagggaattc

SEQ ID NO: 4213593 - DNA, 25 bp, Homo sapien
tctgcttctcggattgagcagggaa

SEQ ID NO: 4213594 - DNA, 25 bp, Homo sapien
cactttctgcttctcggattgagca

SEQ ID NO: 4213595 - DNA, 25 bp, Homo sapien
aacgaagtgatagtttcagcatgtc

SEQ ID NO: 4213596 - DNA, 25 bp, Homo sapien
tcaactcattggcttctgaagaata

SEQ ID NO: 4213597 - DNA, 25 bp, Homo sapien
cagcatgtcataatcataactcaac

SEQ ID NO: 4213598 - DNA, 25 bp, Homo sapien
tgctggtaaacctagtactccacca

SEQ ID NO: 4213599 - DNA, 25 bp, Homo sapien
cagtctttcgtttcaagatcttcaa

SEQ ID NO: 4213600 - DNA, 25 bp, Homo sapien
ttagatagtacagtctttcgtttca

SEQ ID NO: 4213601 - DNA, 25 bp, Homo sapien
ctgttcctcttgtagggtctttatt

SEQ ID NO: 4213602 - DNA, 25 bp, Homo sapien
cttcaagtttggtaagtttaatcat

SEQ ID NO: 4213603 - DNA, 25 bp, Homo sapien
tcactgaagggattgctgtaacacc

SEQ ID NO: 4213604 - DNA, 25 bp, Homo sapien
attgctgtaacaccttctgatttca

SEQ ID NO: 4213605 - DNA, 25 bp, Homo sapien
gggattgctgtaacaccttctgatt

SEQ ID NO: 4213606 - DNA, 25 bp, Homo sapien
gaagggattgctgtaacaccttctg

SEQ ID NO: 4213607 - DNA, 25 bp, Homo sapien
ttagctcattgcaattaacagtttg

SEQ ID NO: 4213608 - DNA, 25 bp, Homo sapien
tactttagctcattgcaattaacag

SEQ ID NO: 4213609 - DNA, 25 bp, Homo sapien
tataaaataggtatactttagctca

SEQ ID NO: 4213610 - DNA, 25 bp, Homo sapien
taggtatactttagctcattgcaat

SEQ ID NO: 4213611 - DNA, 25 bp, Homo sapien
tcttttactcttgtcccactccagt

SEQ ID NO: 4213612 - DNA, 25 bp, Homo sapien
ttttactcttgtcccactccagtgg

SEQ ID NO: 4213613 - DNA, 25 bp, Homo sapien
ttgttccgtgaagctacttctttca

SEQ ID NO: 4213614 - DNA, 25 bp, Homo sapien
ccactccagtggttgttccgtgaag

SEQ ID NO: 4213615 - DNA, 25 bp, Homo sapien
aggcaaagcagattgctgcatgccc

SEQ ID NO: 4213616 - DNA, 25 bp, Homo sapien
tggaagaagcatgaccatagtaatg

SEQ ID NO: 4213617 - DNA, 25 bp, Homo sapien
tagtaatgtttcttgtaatggcaca

SEQ ID NO: 4213618 - DNA, 25 bp, Homo sapien
gaagcatgaccatagtaatgtttct

SEQ ID NO: 4213619 - DNA, 25 bp, Homo sapien
gaccatagtaatgtttcttgtaatg

SEQ ID NO: 4213620 - DNA, 25 bp, Homo sapien
tctgtaagtgccaaatcactagcct

SEQ ID NO: 4213621 - DNA, 25 bp, Homo sapien
tcactagcctgtacctccaagatct

SEQ ID NO: 4213622 - DNA, 25 bp, Homo sapien
ctgtacctccaagatcttgacaaag

SEQ ID NO: 4213623 - DNA, 25 bp, Homo sapien
agatcctcttccaaacagagatttt

SEQ ID NO: 4213624 - DNA, 25 bp, Homo sapien
gaaaaagttccctgagtctctggct

SEQ ID NO: 4213625 - DNA, 25 bp, Homo sapien
caataattatgtactctgatgaaga

SEQ ID NO: 4213626 - DNA, 25 bp, Homo sapien
ctttaagttcaataattatgtactc

SEQ ID NO: 4213627 - DNA, 25 bp, Homo sapien
tacataaaagtgaagccctgttcca

SEQ ID NO: 4213628 - DNA, 25 bp, Homo sapien
ttaaaggaactcaccatcataacta

SEQ ID NO: 4213629 - DNA, 25 bp, Homo sapien
taaaggaactcaccatcataactat

SEQ ID NO: 4213630 - DNA, 25 bp, Homo sapien
tcaaaactagccacaaccatatata

SEQ ID NO: 4213631 - DNA, 25 bp, Homo sapien
catttgaaaagatgtatgctcctga

SEQ ID NO: 4213632 - DNA, 25 bp, Homo sapien
aagtctgattttactggccagttac

SEQ ID NO: 4213633 - DNA, 25 bp, Homo sapien
ctgacaacatgagcgaagtctgatt

SEQ ID NO: 4213634 - DNA, 25 bp, Homo sapien
tactatttttaggatccccttgcat

SEQ ID NO: 4213635 - DNA, 25 bp, Homo sapien
tgtaagctttgcctcagcagctgag

SEQ ID NO: 4213636 - DNA, 25 bp, Homo sapien
gaaaacacttctggcatcctaatgt

SEQ ID NO: 4213637 - DNA, 25 bp, Homo sapien
gcatgcgttcaggtcattatggcag

SEQ ID NO: 4213638 - DNA, 25 bp, Homo sapien
tcctgtgctgatgggctcttctgtt

SEQ ID NO: 4213639 - DNA, 25 bp, Homo sapien
ctgtcttatgctttactagtttctg

SEQ ID NO: 4213640 - DNA, 25 bp, Homo sapien
tctgtcttatgctttactagtttct

SEQ ID NO: 4213641 - DNA, 25 bp, Homo sapien
ccatcgtgagggaaatcaggttgaa

SEQ ID NO: 4213642 - DNA, 25 bp, Homo sapien
gcagagggaactttgatgggccatc

SEQ ID NO: 4213643 - DNA, 25 bp, Homo sapien
cctgttaggacggagaaatagtgct

SEQ ID NO: 4213644 - DNA, 25 bp, Homo sapien
aaacctcagactcaaggcggtaggg

SEQ ID NO: 4213645 - DNA, 25 bp, Homo sapien
ctttcacgccttcaggatctactgc

SEQ ID NO: 4213646 - DNA, 25 bp, Homo sapien
gccttcaggatctactgcaacactg

SEQ ID NO: 4213647 - DNA, 25 bp, Homo sapien
actgaggtcatattctctttgggct

SEQ ID NO: 4213648 - DNA, 25 bp, Homo sapien
gctcccagacaatgtctaagctcag

SEQ ID NO: 4213649 - DNA, 25 bp, Homo sapien
tgaacaggcaaatgcagtcaccctc

SEQ ID NO: 4213650 - DNA, 25 bp, Homo sapien
gcctggatagccaaaacgatcttaa

SEQ ID NO: 4213651 - DNA, 25 bp, Homo sapien
tcttggcaagcttcagaggaggagc

SEQ ID NO: 4213652 - DNA, 25 bp, Homo sapien
cataggaggatccagatgttttcac

SEQ ID NO: 4213653 - DNA, 25 bp, Homo sapien
gtctcttcatctgaaccattacctt

SEQ ID NO: 4213654 - DNA, 25 bp, Homo sapien
ctgtctcttcatctgaaccattacc

SEQ ID NO: 4213655 - DNA, 25 bp, Homo sapien
tcatctgaaccattaccttctttct

SEQ ID NO: 4213656 - DNA, 25 bp, Homo sapien
cttcatctgaaccattaccttcttt

SEQ ID NO: 4213657 - DNA, 25 bp, Homo sapien
aagaagggcacatttaggcagagac

SEQ ID NO: 4213658 - DNA, 25 bp, Homo sapien
cattgtgcatatctccagtatacca

SEQ ID NO: 4213659 - DNA, 25 bp, Homo sapien
atcctgccttctatggtaggcagcg

SEQ ID NO: 4213660 - DNA, 25 bp, Homo sapien
ccttctatggtaggcagcgtgtaca

SEQ ID NO: 4213661 - DNA, 25 bp, Homo sapien
attcttttgcggcattgtgcatatc

SEQ ID NO: 4213662 - DNA, 25 bp, Homo sapien
cagtttggtttgaagccgatcctag

SEQ ID NO: 4213663 - DNA, 25 bp, Homo sapien
tatagatgagatttctgcaccagtt

SEQ ID NO: 4213664 - DNA, 25 bp, Homo sapien
cctagacctttgcacaggaatccca

SEQ ID NO: 4213665 - DNA, 25 bp, Homo sapien
tcccattgtctcataaggagttaaa

SEQ ID NO: 4213666 - DNA, 25 bp, Homo sapien
ttttctttacctgatccctttgaca

SEQ ID NO: 4213667 - DNA, 25 bp, Homo sapien
tttctttacctgatccctttgacat

SEQ ID NO: 4213668 - DNA, 25 bp, Homo sapien
ctttacctgatccctttgacatcat

SEQ ID NO: 4213669 - DNA, 25 bp, Homo sapien
tctttacctgatccctttgacatca

SEQ ID NO: 4213670 - DNA, 25 bp, Homo sapien
gcattgccaaactctaagaccacgg

SEQ ID NO: 4213671 - DNA, 25 bp, Homo sapien
atgccagtctgcgagcccacttgtg

SEQ ID NO: 4213672 - DNA, 25 bp, Homo sapien
gccacctaacatgggagcattgcca

SEQ ID NO: 4213673 - DNA, 25 bp, Homo sapien
cctttgacgagatgcagagaaagta

SEQ ID NO: 4213674 - DNA, 25 bp, Homo sapien
ggtcatcatggacaatctccacggt

SEQ ID NO: 4213675 - DNA, 25 bp, Homo sapien
ctaggagggcaaatcccagcaggtc

SEQ ID NO: 4213676 - DNA, 25 bp, Homo sapien
tggacaatctccacggtgaccccag

SEQ ID NO: 4213677 - DNA, 25 bp, Homo sapien
gcaaatcccagcaggtcatcatgga

SEQ ID NO: 4213678 - DNA, 25 bp, Homo sapien
ggagctgtttccagcctgcaccttg

SEQ ID NO: 4213679 - DNA, 25 bp, Homo sapien
cttgtattccaggactgaggggcac

SEQ ID NO: 4213680 - DNA, 25 bp, Homo sapien
accttgtattccaggactgaggggc

SEQ ID NO: 4213681 - DNA, 25 bp, Homo sapien
ttccagcctgcaccttgtattccag

SEQ ID NO: 4213682 - DNA, 25 bp, Homo sapien
taaactttgtatgttgttcaagaac

SEQ ID NO: 4213683 - DNA, 25 bp, Homo sapien
actttgtatgttgttcaagaacaga

SEQ ID NO: 4213684 - DNA, 25 bp, Homo sapien
tcaagaacagagtatatcctggtta

SEQ ID NO: 4213685 - DNA, 25 bp, Homo sapien
cagagtatatcctggttaggatgtg

SEQ ID NO: 4213686 - DNA, 25 bp, Homo sapien
tgagaaaaatactgtgtttgttaac

SEQ ID NO: 4213687 - DNA, 25 bp, Homo sapien
tgttaactttttctagccatcccca

SEQ ID NO: 4213688 - DNA, 25 bp, Homo sapien
tcatttgagaaaaatactgtgtttg

SEQ ID NO: 4213689 - DNA, 25 bp, Homo sapien
tgtgtttgttaactttttctagcca

SEQ ID NO: 4213690 - DNA, 25 bp, Homo sapien
cttccagccaatcaatgagggctcc

SEQ ID NO: 4213691 - DNA, 25 bp, Homo sapien
gcacattcactgaatagaagttgta

SEQ ID NO: 4213692 - DNA, 25 bp, Homo sapien
tatcatgtcaagttgcttcagagac

SEQ ID NO: 4213693 - DNA, 25 bp, Homo sapien
atcatgtcaagttgcttcagagaca

SEQ ID NO: 4213694 - DNA, 25 bp, Homo sapien
tcatgtcaagttgcttcagagacac

SEQ ID NO: 4213695 - DNA, 25 bp, Homo sapien
ctatcatgtcaagttgcttcagaga

SEQ ID NO: 4213696 - DNA, 25 bp, Homo sapien
cccagaagtaagacaaccacagaaa

SEQ ID NO: 4213697 - DNA, 25 bp, Homo sapien
cagaaagggtgaggctaaacctttg

SEQ ID NO: 4213698 - DNA, 25 bp, Homo sapien
aacagctgaaattgtctgtgtagac

SEQ ID NO: 4213699 - DNA, 25 bp, Homo sapien
gaggctaaacctttgaggataaaca

SEQ ID NO: 4213700 - DNA, 25 bp, Homo sapien
gcacctctaccacagttttttcttg

SEQ ID NO: 4213701 - DNA, 25 bp, Homo sapien
tcattcggcacctctaccacagttt

SEQ ID NO: 4213702 - DNA, 25 bp, Homo sapien
ccttcaccgcacaacagtggagaac

SEQ ID NO: 4213703 - DNA, 25 bp, Homo sapien
tggagaacttcttccaccacacact

SEQ ID NO: 4213704 - DNA, 25 bp, Homo sapien
cctgtgtttgtcgtcctcatctgcg

SEQ ID NO: 4213705 - DNA, 25 bp, Homo sapien
tgtgtttgtcgtcctcatctgcgaa

SEQ ID NO: 4213706 - DNA, 25 bp, Homo sapien
gctccccctgtgtttgtcgtcctca

SEQ ID NO: 4213707 - DNA, 25 bp, Homo sapien
gtgtttgtcgtcctcatctgcgaaa

SEQ ID NO: 4213708 - DNA, 25 bp, Homo sapien
taaggatatgtcaatctgtgagcac

SEQ ID NO: 4213709 - DNA, 25 bp, Homo sapien
cattcttgttatcatcctctgaggg

SEQ ID NO: 4213710 - DNA, 25 bp, Homo sapien
tcctctgtgactcaaaacccagggc

SEQ ID NO: 4213711 - DNA, 25 bp, Homo sapien
tccagaatcggaaacagctttgtgc

SEQ ID NO: 4213712 - DNA, 25 bp, Homo sapien
ctgtaaacaataatttcaagtagta

SEQ ID NO: 4213713 - DNA, 25 bp, Homo sapien
tgtaaacaataatttcaagtagtat

SEQ ID NO: 4213714 - DNA, 25 bp, Homo sapien
tgagggtttccggatgtcagagtcc

SEQ ID NO: 4213715 - DNA, 25 bp, Homo sapien
ctgtatgtttgagggtttccggatg

SEQ ID NO: 4213716 - DNA, 25 bp, Homo sapien
agggtttccggatgtcagagtccaa

SEQ ID NO: 4213717 - DNA, 25 bp, Homo sapien
tgtttgagggtttccggatgtcaga

SEQ ID NO: 4213718 - DNA, 25 bp, Homo sapien
aagtagaaatcacatacaaaagtac

SEQ ID NO: 4213719 - DNA, 25 bp, Homo sapien
cagattactctgatatgttggcaaa

SEQ ID NO: 4213720 - DNA, 25 bp, Homo sapien
caaaagtacagattactctgatatg

SEQ ID NO: 4213721 - DNA, 25 bp, Homo sapien
tactctgatatgttggcaaaatagc

SEQ ID NO: 4213722 - DNA, 25 bp, Homo sapien
gggatgcaaaacttcccatgtactt

SEQ ID NO: 4213723 - DNA, 25 bp, Homo sapien
ttccttctgagtcctgtgagtctct

SEQ ID NO: 4213724 - DNA, 25 bp, Homo sapien
cttacttcttccctgctcaaatttt

SEQ ID NO: 4213725 - DNA, 25 bp, Homo sapien
cttcttccctgctcaaattttcttt

SEQ ID NO: 4213726 - DNA, 25 bp, Homo sapien
tccttctgagtcctgtgagtctctt

SEQ ID NO: 4213727 - DNA, 25 bp, Homo sapien
agaaacttgtctaaggttgcagact

SEQ ID NO: 4213728 - DNA, 25 bp, Homo sapien
gggtgaagcctcgtttcatccacac

SEQ ID NO: 4213729 - DNA, 25 bp, Homo sapien
gagaaacttgtctaaggttgcagac

SEQ ID NO: 4213730 - DNA, 25 bp, Homo sapien
tatatcatctaatttgaactccaca

SEQ ID NO: 4213731 - DNA, 25 bp, Homo sapien
tcatctaatttgaactccacaatac

SEQ ID NO: 4213732 - DNA, 25 bp, Homo sapien
tcattgtatatcatctaatttgaac

SEQ ID NO: 4213733 - DNA, 25 bp, Homo sapien
tatcatctaatttgaactccacaat

SEQ ID NO: 4213734 - DNA, 25 bp, Homo sapien
gagatcaaaacgtagattcatgcca

SEQ ID NO: 4213735 - DNA, 25 bp, Homo sapien
tgctttggtccacagcttgcgttct

SEQ ID NO: 4213736 - DNA, 25 bp, Homo sapien
tcttcccactgcattagctgccagt

SEQ ID NO: 4213737 - DNA, 25 bp, Homo sapien
ttctgaggtctctggcacacgtctt

SEQ ID NO: 4213738 - DNA, 25 bp, Homo sapien
tcgatgggcggtcgggcagagatgc

SEQ ID NO: 4213739 - DNA, 25 bp, Homo sapien
ttgtagcgagcagagattacaccac

SEQ ID NO: 4213740 - DNA, 25 bp, Homo sapien
tagcgagcagagattacaccacagc

SEQ ID NO: 4213741 - DNA, 25 bp, Homo sapien
gaggttgtagcgagcagagattaca

SEQ ID NO: 4213742 - DNA, 25 bp, Homo sapien
cgtattctttagcttgttgaacttc

SEQ ID NO: 4213743 - DNA, 25 bp, Homo sapien
tcatcactataaactccaaactgag

SEQ ID NO: 4213744 - DNA, 25 bp, Homo sapien
tccgtattctttagcttgttgaact

SEQ ID NO: 4213745 - DNA, 25 bp, Homo sapien
cctttccgtattctttagcttgttg

SEQ ID NO: 4213746 - DNA, 25 bp, Homo sapien
cacagtgaaatgttcagttaacttt

SEQ ID NO: 4213747 - DNA, 25 bp, Homo sapien
ctgacaacacagtgaaatgttcagt

SEQ ID NO: 4213748 - DNA, 25 bp, Homo sapien
cagtgaaatgttcagttaactttaa

SEQ ID NO: 4213749 - DNA, 25 bp, Homo sapien
caacacagtgaaatgttcagttaac

SEQ ID NO: 4213750 - DNA, 25 bp, Homo sapien
tcgaatatgttgcacactggaaact

SEQ ID NO: 4213751 - DNA, 25 bp, Homo sapien
tgttttccagcagtctgtcgaatat

SEQ ID NO: 4213752 - DNA, 25 bp, Homo sapien
tctgtcgaatatgttgcacactgga

SEQ ID NO: 4213753 - DNA, 25 bp, Homo sapien
tgaaaggggtatctgttttccagca

SEQ ID NO: 4213754 - DNA, 25 bp, Homo sapien
gcagctgtcatgtaggccatgccaa

SEQ ID NO: 4213755 - DNA, 25 bp, Homo sapien
tgcaagttggttccacttgtcaccc

SEQ ID NO: 4213756 - DNA, 25 bp, Homo sapien
tcttatcaagctctccccagatgct

SEQ ID NO: 4213757 - DNA, 25 bp, Homo sapien
tggtgtcatgccagtttgatgcaag

SEQ ID NO: 4213758 - DNA, 25 bp, Homo sapien
aactgtataagatgtaatttaaggg

SEQ ID NO: 4213759 - DNA, 25 bp, Homo sapien
gaaactgtataagatgtaatttaag

SEQ ID NO: 4213760 - DNA, 25 bp, Homo sapien
tatgaaactgtataagatgtaattt

SEQ ID NO: 4213761 - DNA, 25 bp, Homo sapien
ctgtataagatgtaatttaagggaa

SEQ ID NO: 4213762 - DNA, 25 bp, Homo sapien
tgttacaactgacacagacagcagc

SEQ ID NO: 4213763 - DNA, 25 bp, Homo sapien
tgttgaactctttgctttgaatgcc

SEQ ID NO: 4213764 - DNA, 25 bp, Homo sapien
gagatctggttctgcttcatccatt

SEQ ID NO: 4213765 - DNA, 25 bp, Homo sapien
ctcagtgtgttgttacaactgacac

SEQ ID NO: 4213766 - DNA, 25 bp, Homo sapien
cattgatttaaatgtagtacagtaa

SEQ ID NO: 4213767 - DNA, 25 bp, Homo sapien
ctatacgaaaataccaagttgattg

SEQ ID NO: 4213768 - DNA, 25 bp, Homo sapien
tgtagtacagtaaagaagtgtgaac

SEQ ID NO: 4213769 - DNA, 25 bp, Homo sapien
aataccaagttgattgtttgcataa

SEQ ID NO: 4213770 - DNA, 25 bp, Homo sapien
cgtggacagcgatgtcgaggaacac

SEQ ID NO: 4213771 - DNA, 25 bp, Homo sapien
cagctcgaaggggataccacccaag

SEQ ID NO: 4213772 - DNA, 25 bp, Homo sapien
ggctcaccgtggacagcgatgtcga

SEQ ID NO: 4213773 - DNA, 25 bp, Homo sapien
gaaggggataccacccaagggctca

SEQ ID NO: 4213774 - DNA, 25 bp, Homo sapien
gctgacacataaccccgggaataat

SEQ ID NO: 4213775 - DNA, 25 bp, Homo sapien
accacgctgacacataaccccggga

SEQ ID NO: 4213776 - DNA, 25 bp, Homo sapien
gtcaccacgctgacacataaccccg

SEQ ID NO: 4213777 - DNA, 25 bp, Homo sapien
cacgctgacacataaccccgggaat

SEQ ID NO: 4213778 - DNA, 25 bp, Homo sapien
ttatattgcacctattttaagccac

SEQ ID NO: 4213779 - DNA, 25 bp, Homo sapien
gcacctgccttatattgcacctatt

SEQ ID NO: 4213780 - DNA, 25 bp, Homo sapien
gccttatattgcacctattttaagc

SEQ ID NO: 4213781 - DNA, 25 bp, Homo sapien
ttgcacctattttaagccaccattt

SEQ ID NO: 4213782 - DNA, 25 bp, Homo sapien
tcattctctgttggacagtcagaca

SEQ ID NO: 4213783 - DNA, 25 bp, Homo sapien
gccatgtcagcttcccaactacagg

SEQ ID NO: 4213784 - DNA, 25 bp, Homo sapien
cctgaagaagctttccaattgtcca

SEQ ID NO: 4213785 - DNA, 25 bp, Homo sapien
cattataatcaggcattgggcttgg

SEQ ID NO: 4213786 - DNA, 25 bp, Homo sapien
acttctgggtatataacatcaaatc

SEQ ID NO: 4213787 - DNA, 25 bp, Homo sapien
tgatccatagagtgaataagaactt

SEQ ID NO: 4213788 - DNA, 25 bp, Homo sapien
tcagtgatccatagagtgaataaga

SEQ ID NO: 4213789 - DNA, 25 bp, Homo sapien
catcaaatcgagtgcctttctcttt

SEQ ID NO: 4213790 - DNA, 25 bp, Homo sapien
tggaggaagtcgtggcttcctcatc

SEQ ID NO: 4213791 - DNA, 25 bp, Homo sapien
tgaccctttagaatcagtgaaccag

SEQ ID NO: 4213792 - DNA, 25 bp, Homo sapien
gcataaatgccaaatgcactgcttc

SEQ ID NO: 4213793 - DNA, 25 bp, Homo sapien
tgctgagttcagctgttctgggtaa

SEQ ID NO: 4213794 - DNA, 25 bp, Homo sapien
cattgcaatggtacctcataactgc

SEQ ID NO: 4213795 - DNA, 25 bp, Homo sapien
gacggcatgcccattataaacttcc

SEQ ID NO: 4213796 - DNA, 25 bp, Homo sapien
tcataactgctatgacggcatgccc

SEQ ID NO: 4213797 - DNA, 25 bp, Homo sapien
ctgctcattgcaatggtacctcata

SEQ ID NO: 4213798 - DNA, 25 bp, Homo sapien
cttggataatagaggcagcactgga

SEQ ID NO: 4213799 - DNA, 25 bp, Homo sapien
tatagccacaagatctatggcttgg

SEQ ID NO: 4213800 - DNA, 25 bp, Homo sapien
cagcactggatttcagtctgaatca

SEQ ID NO: 4213801 - DNA, 25 bp, Homo sapien
tgggtatatagccacaagatctatg

SEQ ID NO: 4213802 - DNA, 25 bp, Homo sapien
atgaacttcttcaccttctcaaatt

SEQ ID NO: 4213803 - DNA, 25 bp, Homo sapien
caaacaatgatgaacttcttcacct

SEQ ID NO: 4213804 - DNA, 25 bp, Homo sapien
tcaaacaatgatgaacttcttcacc

SEQ ID NO: 4213805 - DNA, 25 bp, Homo sapien
atgatgaacttcttcaccttctcaa

SEQ ID NO: 4213806 - DNA, 25 bp, Homo sapien
gcagttgctacagccatagatatag

SEQ ID NO: 4213807 - DNA, 25 bp, Homo sapien
tagaggcagtcattgttctcagatt

SEQ ID NO: 4213808 - DNA, 25 bp, Homo sapien
aattgaaaactaggcctgaattgac

SEQ ID NO: 4213809 - DNA, 25 bp, Homo sapien
ccatagatatagaggcagtcattgt

SEQ ID NO: 4213810 - DNA, 25 bp, Homo sapien
ttcacttcgatgtctaacatctcaa

SEQ ID NO: 4213811 - DNA, 25 bp, Homo sapien
cacttcgatgtctaacatctcaaat

SEQ ID NO: 4213812 - DNA, 25 bp, Homo sapien
ttcgatgtctaacatctcaaattca

SEQ ID NO: 4213813 - DNA, 25 bp, Homo sapien
ccattcacttcgatgtctaacatct

SEQ ID NO: 4213814 - DNA, 25 bp, Homo sapien
gattttcttgatgctctttcagagt

SEQ ID NO: 4213815 - DNA, 25 bp, Homo sapien
aaactctggcttatactccagcgcc

SEQ ID NO: 4213816 - DNA, 25 bp, Homo sapien
gtgaaactctggcttatactccagc

SEQ ID NO: 4213817 - DNA, 25 bp, Homo sapien
tccagcgcccatctcagtcaatctt

SEQ ID NO: 4213818 - DNA, 25 bp, Homo sapien
ccttcttacacgagatccaagagcc

SEQ ID NO: 4213819 - DNA, 25 bp, Homo sapien
cctgaattccttcttacacgagatc

SEQ ID NO: 4213820 - DNA, 25 bp, Homo sapien
taatgtagcccacgatctccactgt

SEQ ID NO: 4213821 - DNA, 25 bp, Homo sapien
catttccacccagtaaagtcctggg

SEQ ID NO: 4213822 - DNA, 25 bp, Homo sapien
tccactgttgccaatagctcagatg

SEQ ID NO: 4213823 - DNA, 25 bp, Homo sapien
ttgaccattcttctgctcgtcctgc

SEQ ID NO: 4213824 - DNA, 25 bp, Homo sapien
ttgcaaacagtattgtacctatttt

SEQ ID NO: 4213825 - DNA, 25 bp, Homo sapien
actggaaaaggcatagaggtatgga

SEQ ID NO: 4213826 - DNA, 25 bp, Homo sapien
ctggaaaaggcatagaggtatggac

SEQ ID NO: 4213827 - DNA, 25 bp, Homo sapien
taactaggtcacattccagagacag

SEQ ID NO: 4213828 - DNA, 25 bp, Homo sapien
gatgttgagggcaagcaatttgctt

SEQ ID NO: 4213829 - DNA, 25 bp, Homo sapien
catgtgcatgttctggcttacagca

SEQ ID NO: 4213830 - DNA, 25 bp, Homo sapien
caaaagttgaattgcaagcatgtgc

SEQ ID NO: 4213831 - DNA, 25 bp, Homo sapien
tattctgcatctaccattgtactaa

SEQ ID NO: 4213832 - DNA, 25 bp, Homo sapien
ccaagtcattagagcgatgaaagtg

SEQ ID NO: 4213833 - DNA, 25 bp, Homo sapien
agcgatgaaagtggcagacatgact

SEQ ID NO: 4213834 - DNA, 25 bp, Homo sapien
aagacacagtgttggccttccaagt

SEQ ID NO: 4213835 - DNA, 25 bp, Homo sapien
tagaaagcgttctgaaaactgcggt

SEQ ID NO: 4213836 - DNA, 25 bp, Homo sapien
gaatgataacctgcaactacctatt

SEQ ID NO: 4213837 - DNA, 25 bp, Homo sapien
taatgggaacttgctgtgtgcagtc

SEQ ID NO: 4213838 - DNA, 25 bp, Homo sapien
actgcggtagatgccttataatggg

SEQ ID NO: 4213839 - DNA, 25 bp, Homo sapien
tcctcaggaatgtcccttgaggtgg

SEQ ID NO: 4213840 - DNA, 25 bp, Homo sapien
atgtcccttgaggtgggaaagttgt

SEQ ID NO: 4213841 - DNA, 25 bp, Homo sapien
aatgtcccttgaggtgggaaagttg

SEQ ID NO: 4213842 - DNA, 25 bp, Homo sapien
ggctcccctggagcagagttactgc

SEQ ID NO: 4213843 - DNA, 25 bp, Homo sapien
gagcagagttactgcgcagaccaca

SEQ ID NO: 4213844 - DNA, 25 bp, Homo sapien
cctggagcagagttactgcgcagac

SEQ ID NO: 4213845 - DNA, 25 bp, Homo sapien
agttactgcgcagaccacagccctt

SEQ ID NO: 4213846 - DNA, 25 bp, Homo sapien
ccccaaaagtcaggacttcagatgt

SEQ ID NO: 4213847 - DNA, 25 bp, Homo sapien
gatgaagcccatggacgacttttca

SEQ ID NO: 4213848 - DNA, 25 bp, Homo sapien
gacttttcatctcgtttaataacca

SEQ ID NO: 4213849 - DNA, 25 bp, Homo sapien
cagaggatagcttgttctttcccca

SEQ ID NO: 4213850 - DNA, 25 bp, Homo sapien
tatgtctactgttcagtgtccccat

SEQ ID NO: 4213851 - DNA, 25 bp, Homo sapien
tttatgtctactgttcagtgtcccc

SEQ ID NO: 4213852 - DNA, 25 bp, Homo sapien
ttcctttatgtctactgttcagtgt

SEQ ID NO: 4213853 - DNA, 25 bp, Homo sapien
tgttctttcctttatgtctactgtt

SEQ ID NO: 4213854 - DNA, 25 bp, Homo sapien
aaaaaagcgtcttaatatgacatcc

SEQ ID NO: 4213855 - DNA, 25 bp, Homo sapien
tacaaccagcaatacaaatagtgtg

SEQ ID NO: 4213856 - DNA, 25 bp, Homo sapien
gacgctatcatttccagtacaacca

SEQ ID NO: 4213857 - DNA, 25 bp, Homo sapien
tgcatctttagacgctatcatttcc

SEQ ID NO: 4213858 - DNA, 25 bp, Homo sapien
gagcctccaatatgtagcactgcag

SEQ ID NO: 4213859 - DNA, 25 bp, Homo sapien
gcactgcaggcccataaatgtcgtt

SEQ ID NO: 4213860 - DNA, 25 bp, Homo sapien
taagcgtgaattgttgagcctccaa

SEQ ID NO: 4213861 - DNA, 25 bp, Homo sapien
taaagcaatacttcggatgccagag

SEQ ID NO: 4213862 - DNA, 25 bp, Homo sapien
aaatcctgattctctaggcaccgac

SEQ ID NO: 4213863 - DNA, 25 bp, Homo sapien
taggcaccgacatctctgtggaggc

SEQ ID NO: 4213864 - DNA, 25 bp, Homo sapien
gcattaccagagacattatgttcct

SEQ ID NO: 4213865 - DNA, 25 bp, Homo sapien
gatgtgactattatgaaatcctgat

SEQ ID NO: 4213866 - DNA, 25 bp, Homo sapien
gaactaagggcactgctacttttga

SEQ ID NO: 4213867 - DNA, 25 bp, Homo sapien
gcaaagatgtctactgctgttcatg

SEQ ID NO: 4213868 - DNA, 25 bp, Homo sapien
caaccaagaaaagcttgttacagag

SEQ ID NO: 4213869 - DNA, 25 bp, Homo sapien
catcagcttagccagacttgtgaac

SEQ ID NO: 4213870 - DNA, 25 bp, Homo sapien
caacttgatgtaggagtgcacttcc

SEQ ID NO: 4213871 - DNA, 25 bp, Homo sapien
tgagtacacttgcaacaacttgatg

SEQ ID NO: 4213872 - DNA, 25 bp, Homo sapien
tcttcacggctttcaatcagaggca

SEQ ID NO: 4213873 - DNA, 25 bp, Homo sapien
tgctgtagacaaatagaggcccttg

SEQ ID NO: 4213874 - DNA, 25 bp, Homo sapien
gggtgtcattttccgagccccaata

SEQ ID NO: 4213875 - DNA, 25 bp, Homo sapien
gcatccagcacagtgcgtaacactt

SEQ ID NO: 4213876 - DNA, 25 bp, Homo sapien
gcatattatctagccaagcatccag

SEQ ID NO: 4213877 - DNA, 25 bp, Homo sapien
ggttctgaggcttcgttctggagca

SEQ ID NO: 4213878 - DNA, 25 bp, Homo sapien
taaaagcctaatcaggcaaaacagg

SEQ ID NO: 4213879 - DNA, 25 bp, Homo sapien
ctctccctggtccacaggaaaatga

SEQ ID NO: 4213880 - DNA, 25 bp, Homo sapien
gttgagaacttgttattgagctgtc

SEQ ID NO: 4213881 - DNA, 25 bp, Homo sapien
caagcataagaatagtgcaaagaac

SEQ ID NO: 4213882 - DNA, 25 bp, Homo sapien
taaattatcagtccctcctgaaggg

SEQ ID NO: 4213883 - DNA, 25 bp, Homo sapien
caataaatgtgttcgtaagtgccaa

SEQ ID NO: 4213884 - DNA, 25 bp, Homo sapien
taagagatgtacttctcagtggcag

SEQ ID NO: 4213885 - DNA, 25 bp, Homo sapien
tacttcagaccttcaaaactgtggc

SEQ ID NO: 4213886 - DNA, 25 bp, Homo sapien
gtagataaccacatctccctacatt

SEQ ID NO: 4213887 - DNA, 25 bp, Homo sapien
tagtagataaccacatctccctaca

SEQ ID NO: 4213888 - DNA, 25 bp, Homo sapien
tttttagtagataaccacatctccc

SEQ ID NO: 4213889 - DNA, 25 bp, Homo sapien
tttagtagataaccacatctcccta

SEQ ID NO: 4213890 - DNA, 25 bp, Homo sapien
tcaacatttgagtgccctgtggcag

SEQ ID NO: 4213891 - DNA, 25 bp, Homo sapien
taaaatcggtatttatgcagtactg

SEQ ID NO: 4213892 - DNA, 25 bp, Homo sapien
caggaggaacagtagatgcagtaaa

SEQ ID NO: 4213893 - DNA, 25 bp, Homo sapien
gagatcaattgggagctaaaggtaa

SEQ ID NO: 4213894 - DNA, 25 bp, Homo sapien
tctgtatgaagatggtaatttcaat

SEQ ID NO: 4213895 - DNA, 25 bp, Homo sapien
taaatgtgtcttaagtgtattatat

SEQ ID NO: 4213896 - DNA, 25 bp, Homo sapien
tttttgtctgtatgaagatggtaat

SEQ ID NO: 4213897 - DNA, 25 bp, Homo sapien
caagctcacccttacatttttggtt

SEQ ID NO: 4213898 - DNA, 25 bp, Homo sapien
ataagcctctgcacgactccggctg

SEQ ID NO: 4213899 - DNA, 25 bp, Homo sapien
acgactccggctgggcaggattccg

SEQ ID NO: 4213900 - DNA, 25 bp, Homo sapien
gacaacgcctggttcctcttgggtc

SEQ ID NO: 4213901 - DNA, 25 bp, Homo sapien
ccggcgtcgccggagtgaattgatc

SEQ ID NO: 4213902 - DNA, 25 bp, Homo sapien
tgctttcgtctctcccgggaaacta

SEQ ID NO: 4213903 - DNA, 25 bp, Homo sapien
ctgcaacccctgacgggatgctgga

SEQ ID NO: 4213904 - DNA, 25 bp, Homo sapien
tcccgggaaactacagtccagactg

SEQ ID NO: 4213905 - DNA, 25 bp, Homo sapien
ttgtgctcggcggactgtgctccgc

SEQ ID NO: 4213906 - DNA, 25 bp, Homo sapien
tttgctttagcacacctgaggaata

SEQ ID NO: 4213907 - DNA, 25 bp, Homo sapien
gcatctcttccaaccagttactggg

SEQ ID NO: 4213908 - DNA, 25 bp, Homo sapien
caaggtaatatatccagagagacac

SEQ ID NO: 4213909 - DNA, 25 bp, Homo sapien
tcttcatagggtcccaaggcctctg

SEQ ID NO: 4213910 - DNA, 25 bp, Homo sapien
taattatcaggctcatcaggttctt

SEQ ID NO: 4213911 - DNA, 25 bp, Homo sapien
aaattgaagggcatcaaggccacat

SEQ ID NO: 4213912 - DNA, 25 bp, Homo sapien
gcttcttggcatgccagtgttccag

SEQ ID NO: 4213913 - DNA, 25 bp, Homo sapien
acaaacagcctgacttgtgcacact

SEQ ID NO: 4213914 - DNA, 25 bp, Homo sapien
aagagaagagtccaaggaaagccat

SEQ ID NO: 4213915 - DNA, 25 bp, Homo sapien
actttgcagaaccagcaaagagaag

SEQ ID NO: 4213916 - DNA, 25 bp, Homo sapien
cagaaccagcaaagagaagagtcca

SEQ ID NO: 4213917 - DNA, 25 bp, Homo sapien
cagcaaagagaagagtccaaggaaa

SEQ ID NO: 4213918 - DNA, 25 bp, Homo sapien
caatggcttcctcagggaaagtggc

SEQ ID NO: 4213919 - DNA, 25 bp, Homo sapien
agttccatcattcccattgcaagag

SEQ ID NO: 4213920 - DNA, 25 bp, Homo sapien
ccagtggctctaagacgattataca

SEQ ID NO: 4213921 - DNA, 25 bp, Homo sapien
tctgggtagatccttgggccccaag

SEQ ID NO: 4213922 - DNA, 25 bp, Homo sapien
agcagttaccatgtttgaaaactcc

SEQ ID NO: 4213923 - DNA, 25 bp, Homo sapien
cattttgcacaaacaaggaattggc

SEQ ID NO: 4213924 - DNA, 25 bp, Homo sapien
atcacatattggctctctttagcag

SEQ ID NO: 4213925 - DNA, 25 bp, Homo sapien
tggccacggctacattttgactgaa

SEQ ID NO: 4213926 - DNA, 25 bp, Homo sapien
ttcaggcctaaactgcgacttccag

SEQ ID NO: 4213927 - DNA, 25 bp, Homo sapien
gctgatacatcattggaatttggac

SEQ ID NO: 4213928 - DNA, 25 bp, Homo sapien
ccagttccccttgaaatagacagca

SEQ ID NO: 4213929 - DNA, 25 bp, Homo sapien
tagacagcattaatgagggccagat

SEQ ID NO: 4213930 - DNA, 25 bp, Homo sapien
gaacttcctgtctggacagcaccag

SEQ ID NO: 4213931 - DNA, 25 bp, Homo sapien
catatggtatttctaggacttggta

SEQ ID NO: 4213932 - DNA, 25 bp, Homo sapien
gataccaccagcttcattggagcca

SEQ ID NO: 4213933 - DNA, 25 bp, Homo sapien
tgtgctttgactaatggctccagag

SEQ ID NO: 4213934 - DNA, 25 bp, Homo sapien
cttttcttgaatagattcttatatt

SEQ ID NO: 4213935 - DNA, 25 bp, Homo sapien
cttgaatagattcttatattttgga

SEQ ID NO: 4213936 - DNA, 25 bp, Homo sapien
aaaatacaatttcaattcagcatat

SEQ ID NO: 4213937 - DNA, 25 bp, Homo sapien
aaaaatacaatttcaattcagcata

SEQ ID NO: 4213938 - DNA, 25 bp, Homo sapien
cagagaggcctgtcaaatttgcatc

SEQ ID NO: 4213939 - DNA, 25 bp, Homo sapien
ttgcatctttgatgaaaatttcagt

SEQ ID NO: 4213940 - DNA, 25 bp, Homo sapien
agagaggcctgtcaaatttgcatct

SEQ ID NO: 4213941 - DNA, 25 bp, Homo sapien
tactagacaccccaatgtgccaggt

SEQ ID NO: 4213942 - DNA, 25 bp, Homo sapien
gacaccccaatgtgccaggtatact

SEQ ID NO: 4213943 - DNA, 25 bp, Homo sapien
cccaatgtgccaggtatactttgaa

SEQ ID NO: 4213944 - DNA, 25 bp, Homo sapien
attactagacaccccaatgtgccag

SEQ ID NO: 4213945 - DNA, 25 bp, Homo sapien
tagggctgtaagctctctgaacgag

SEQ ID NO: 4213946 - DNA, 25 bp, Homo sapien
cagagccctagaagcttggatataa

SEQ ID NO: 4213947 - DNA, 25 bp, Homo sapien
ggccagtatggtaagacagatttct

SEQ ID NO: 4213948 - DNA, 25 bp, Homo sapien
caacacgttcaatcctaaatctggg

SEQ ID NO: 4213949 - DNA, 25 bp, Homo sapien
ctgaaaatgtgactagattgctgct

SEQ ID NO: 4213950 - DNA, 25 bp, Homo sapien
acttgaattagaagtgaaccctgaa

SEQ ID NO: 4213951 - DNA, 25 bp, Homo sapien
tctccagtataggatttctcagcct

SEQ ID NO: 4213952 - DNA, 25 bp, Homo sapien
gactcctctgtcttttgacctaata

SEQ ID NO: 4213953 - DNA, 25 bp, Homo sapien
tcttcagtacccactacatatgcgg

SEQ ID NO: 4213954 - DNA, 25 bp, Homo sapien
ggcaccaaaggctctaagtatctga

SEQ ID NO: 4213955 - DNA, 25 bp, Homo sapien
gatagccatcatgcaagtgtaggcc

SEQ ID NO: 4213956 - DNA, 25 bp, Homo sapien
catatgcggtattgtgcagggcacc

SEQ ID NO: 4213957 - DNA, 25 bp, Homo sapien
acctctaggaaggacttgtgaattg

SEQ ID NO: 4213958 - DNA, 25 bp, Homo sapien
taacctctaggaaggacttgtgaat

SEQ ID NO: 4213959 - DNA, 25 bp, Homo sapien
cttcattaacctctaggaaggactt

SEQ ID NO: 4213960 - DNA, 25 bp, Homo sapien
cattaacctctaggaaggacttgtg

SEQ ID NO: 4213961 - DNA, 25 bp, Homo sapien
aataacttgaggatacagcacagcc

SEQ ID NO: 4213962 - DNA, 25 bp, Homo sapien
cagcacagccatcctactaattgca

SEQ ID NO: 4213963 - DNA, 25 bp, Homo sapien
gccatcctactaattgcaatcattc

SEQ ID NO: 4213964 - DNA, 25 bp, Homo sapien
gaaaaatggatggtcgacaataact

SEQ ID NO: 4213965 - DNA, 25 bp, Homo sapien
tgataattcagttggtcaatctctg

SEQ ID NO: 4213966 - DNA, 25 bp, Homo sapien
taaactatctgataattcagttggt

SEQ ID NO: 4213967 - DNA, 25 bp, Homo sapien
tatctgataattcagttggtcaatc

SEQ ID NO: 4213968 - DNA, 25 bp, Homo sapien
gaggttctttgtgacctattaaata

SEQ ID NO: 4213969 - DNA, 25 bp, Homo sapien
gaaatcatgtccacttgtgttcatt

SEQ ID NO: 4213970 - DNA, 25 bp, Homo sapien
taaagttcttcgaaatcatgtccac

SEQ ID NO: 4213971 - DNA, 25 bp, Homo sapien
gtttcaggatgcatgactcgtccca

SEQ ID NO: 4213972 - DNA, 25 bp, Homo sapien
gactcgtcccatgaatagaattgta

SEQ ID NO: 4213973 - DNA, 25 bp, Homo sapien
cacaatgacataacaggaccattag

SEQ ID NO: 4213974 - DNA, 25 bp, Homo sapien
gcttaatactgataacattccttga

SEQ ID NO: 4213975 - DNA, 25 bp, Homo sapien
aaatcctaaatatataccagttgca

SEQ ID NO: 4213976 - DNA, 25 bp, Homo sapien
caaacataatgtgcttagttactgt

SEQ ID NO: 4213977 - DNA, 25 bp, Homo sapien
caaaggctggtgcaagagtctaatc

SEQ ID NO: 4213978 - DNA, 25 bp, Homo sapien
taaaaagggagaacagatgaatggt

SEQ ID NO: 4213979 - DNA, 25 bp, Homo sapien
cattttaaaacgcattgaacagtgc

SEQ ID NO: 4213980 - DNA, 25 bp, Homo sapien
caatttcattaggaacttagtgtca

SEQ ID NO: 4213981 - DNA, 25 bp, Homo sapien
tgtgttcacattctgtccaccacca

SEQ ID NO: 4213982 - DNA, 25 bp, Homo sapien
gtgttcacattctgtccaccaccat

SEQ ID NO: 4213983 - DNA, 25 bp, Homo sapien
tctgtgttcacattctgtccaccac

SEQ ID NO: 4213984 - DNA, 25 bp, Homo sapien
gtctgtgttcacattctgtccacca

SEQ ID NO: 4213985 - DNA, 25 bp, Homo sapien
tgtgttcagttaccaggccattgaa

SEQ ID NO: 4213986 - DNA, 25 bp, Homo sapien
tctgcaaagcgctgtactgaattgc

SEQ ID NO: 4213987 - DNA, 25 bp, Homo sapien
cattgaagtagacccatcgatctgc

SEQ ID NO: 4213988 - DNA, 25 bp, Homo sapien
aataaatctgagacagagcggatgg

SEQ ID NO: 4213989 - DNA, 25 bp, Homo sapien
tttctgtcgtcttgatacaatctat

SEQ ID NO: 4213990 - DNA, 25 bp, Homo sapien
caatctataaggatatgattattct

SEQ ID NO: 4213991 - DNA, 25 bp, Homo sapien
tctataaggatatgattattctgca

SEQ ID NO: 4213992 - DNA, 25 bp, Homo sapien
catacaatttctgtcgtcttgatac

SEQ ID NO: 4213993 - DNA, 25 bp, Homo sapien
cctggagcctggaatctgattgtaa

SEQ ID NO: 4213994 - DNA, 25 bp, Homo sapien
acttcttcgttctcaaggttctttg

SEQ ID NO: 4213995 - DNA, 25 bp, Homo sapien
gagcctggaatctgattgtaacttc

SEQ ID NO: 4213996 - DNA, 25 bp, Homo sapien
gattgtaacttcttcgttctcaagg

SEQ ID NO: 4213997 - DNA, 25 bp, Homo sapien
tggaaaagtggagagtcttttaaca

SEQ ID NO: 4213998 - DNA, 25 bp, Homo sapien
atacaggactgagaattgctgtgga

SEQ ID NO: 4213999 - DNA, 25 bp, Homo sapien
tgtatacaggactgagaattgctgt

SEQ ID NO: 4214000 - DNA, 25 bp, Homo sapien
aagtggagagtcttttaacatttca

SEQ ID NO: 4214001 - DNA, 25 bp, Homo sapien
ccagatcacggcctggtttgtcctt

SEQ ID NO: 4214002 - DNA, 25 bp, Homo sapien
catccccacaagagggtcaccttct

SEQ ID NO: 4214003 - DNA, 25 bp, Homo sapien
aggagccagcccagtcccactttac

SEQ ID NO: 4214004 - DNA, 25 bp, Homo sapien
gtcccactttactggccagatcacg

SEQ ID NO: 4214005 - DNA, 25 bp, Homo sapien
cctggtgaagttcctcaaccacttc

SEQ ID NO: 4214006 - DNA, 25 bp, Homo sapien
atcctggtgaagttcctcaaccact

SEQ ID NO: 4214007 - DNA, 25 bp, Homo sapien
atttggacacatgcaggctactgaa

SEQ ID NO: 4214008 - DNA, 25 bp, Homo sapien
tgatttggacacatgcaggctactg

SEQ ID NO: 4214009 - DNA, 25 bp, Homo sapien
tcagcatcactgaaatttatatatc

SEQ ID NO: 4214010 - DNA, 25 bp, Homo sapien
cttcagcatcactgaaatttatata

SEQ ID NO: 4214011 - DNA, 25 bp, Homo sapien
tttttcctagcaaatctctcttcag

SEQ ID NO: 4214012 - DNA, 25 bp, Homo sapien
tcctagcaaatctctcttcagaagt

SEQ ID NO: 4214013 - DNA, 25 bp, Homo sapien
tccacttcgcatctgaattgacaag

SEQ ID NO: 4214014 - DNA, 25 bp, Homo sapien
taaaggacgtttgttccacttcgca

SEQ ID NO: 4214015 - DNA, 25 bp, Homo sapien
tctgaattgacaaggaatggactct

SEQ ID NO: 4214016 - DNA, 25 bp, Homo sapien
ttgacaaggaatggactcttcagct

SEQ ID NO: 4214017 - DNA, 25 bp, Homo sapien
ccatgacccttatgacggatgggga

SEQ ID NO: 4214018 - DNA, 25 bp, Homo sapien
tgacccttatgacggatggggaaag

SEQ ID NO: 4214019 - DNA, 25 bp, Homo sapien
atgacggatggggaaagacatcaca

SEQ ID NO: 4214020 - DNA, 25 bp, Homo sapien
cttatgacggatggggaaagacatc

SEQ ID NO: 4214021 - DNA, 25 bp, Homo sapien
ggcttctctgtcacgtaaaagcatg

SEQ ID NO: 4214022 - DNA, 25 bp, Homo sapien
gtcatgcttttttctcgttagccta

SEQ ID NO: 4214023 - DNA, 25 bp, Homo sapien
gcataaagatggatagttttccctg

SEQ ID NO: 4214024 - DNA, 25 bp, Homo sapien
cctggttctttgagccttctttcag

SEQ ID NO: 4214025 - DNA, 25 bp, Homo sapien
gcatacgcacatctgattgtgtcac

SEQ ID NO: 4214026 - DNA, 25 bp, Homo sapien
gtcactcatctagttgtgagctgca

SEQ ID NO: 4214027 - DNA, 25 bp, Homo sapien
tgattgtgtcactcatctagttgtg

SEQ ID NO: 4214028 - DNA, 25 bp, Homo sapien
ttgcatacgcacatctgattgtgtc

SEQ ID NO: 4214029 - DNA, 25 bp, Homo sapien
gatcttagttcaatgtctccaggct

SEQ ID NO: 4214030 - DNA, 25 bp, Homo sapien
tagttcaatgtctccaggctttttt

SEQ ID NO: 4214031 - DNA, 25 bp, Homo sapien
tcttagttcaatgtctccaggcttt

SEQ ID NO: 4214032 - DNA, 25 bp, Homo sapien
tgatcttagttcaatgtctccaggc

SEQ ID NO: 4214033 - DNA, 25 bp, Homo sapien
ctcagcaattcctcacctagattgt

SEQ ID NO: 4214034 - DNA, 25 bp, Homo sapien
cagcaattcctcacctagattgtta

SEQ ID NO: 4214035 - DNA, 25 bp, Homo sapien
aattcctcacctagattgttaacat

SEQ ID NO: 4214036 - DNA, 25 bp, Homo sapien
tcctcacctagattgttaacattat

SEQ ID NO: 4214037 - DNA, 25 bp, Homo sapien
tactgagaagtggagattcttccat

SEQ ID NO: 4214038 - DNA, 25 bp, Homo sapien
tagatgccaatcacatggatgtaaa

SEQ ID NO: 4214039 - DNA, 25 bp, Homo sapien
aaacaaattactgagaagtggagat

SEQ ID NO: 4214040 - DNA, 25 bp, Homo sapien
aaatttaaatacaaggatattagca

SEQ ID NO: 4214041 - DNA, 25 bp, Homo sapien
catatagttacgatatttcttcatg

SEQ ID NO: 4214042 - DNA, 25 bp, Homo sapien
tatagttacgatatttcttcatgta

SEQ ID NO: 4214043 - DNA, 25 bp, Homo sapien
tcttccacatatagttacgatattt

SEQ ID NO: 4214044 - DNA, 25 bp, Homo sapien
ccacatatagttacgatatttcttc

SEQ ID NO: 4214045 - DNA, 25 bp, Homo sapien
agcagaggggataaatgtccatagc

SEQ ID NO: 4214046 - DNA, 25 bp, Homo sapien
atccctggaaggttcgctgtcttcg

SEQ ID NO: 4214047 - DNA, 25 bp, Homo sapien
ttttgaattgtttgcactggcttgg

SEQ ID NO: 4214048 - DNA, 25 bp, Homo sapien
cgctgtcttcgggttccattatttt

SEQ ID NO: 4214049 - DNA, 25 bp, Homo sapien
agagctgtccactaagaatctgcag

SEQ ID NO: 4214050 - DNA, 25 bp, Homo sapien
atgagagctgtccactaagaatctg

SEQ ID NO: 4214051 - DNA, 25 bp, Homo sapien
catgtcttgcaggtgcaaaaagtcc

SEQ ID NO: 4214052 - DNA, 25 bp, Homo sapien
ggtgcaaaaagtcctcttgccttca

SEQ ID NO: 4214053 - DNA, 25 bp, Homo sapien
gtggcagttgagtttgcttctctct

SEQ ID NO: 4214054 - DNA, 25 bp, Homo sapien
caatgatcacagaaactgcattgca

SEQ ID NO: 4214055 - DNA, 25 bp, Homo sapien
gcattgcatttgtaaccaggtatta

SEQ ID NO: 4214056 - DNA, 25 bp, Homo sapien
agacggtggcagttgagtttgcttc

SEQ ID NO: 4214057 - DNA, 25 bp, Homo sapien
tactatctgtttgattaaaatgtca

SEQ ID NO: 4214058 - DNA, 25 bp, Homo sapien
tgtcaagttggtgattatgtaactt

SEQ ID NO: 4214059 - DNA, 25 bp, Homo sapien
tatgtaactttgtaaggcgagtgaa

SEQ ID NO: 4214060 - DNA, 25 bp, Homo sapien
tcatacattgtctgcagcaacggtt

SEQ ID NO: 4214061 - DNA, 25 bp, Homo sapien
aatctcttgactacttgtgttttga

SEQ ID NO: 4214062 - DNA, 25 bp, Homo sapien
tggatcagagtagtatgatgaatta

SEQ ID NO: 4214063 - DNA, 25 bp, Homo sapien
ttgactacttgtgttttgacctgag

SEQ ID NO: 4214064 - DNA, 25 bp, Homo sapien
tgatgaattagatggacaaatctct

SEQ ID NO: 4214065 - DNA, 25 bp, Homo sapien
cagaatccaaacgtgggtggaatgt

SEQ ID NO: 4214066 - DNA, 25 bp, Homo sapien
tccagaatccaaacgtgggtggaat

SEQ ID NO: 4214067 - DNA, 25 bp, Homo sapien
attccagaatccaaacgtgggtgga

SEQ ID NO: 4214068 - DNA, 25 bp, Homo sapien
gaatccaaacgtgggtggaatgttc

SEQ ID NO: 4214069 - DNA, 25 bp, Homo sapien
cttgaacgtcatgtctaccttgtgc

SEQ ID NO: 4214070 - DNA, 25 bp, Homo sapien
gggcaacgcagttgacttccttgaa

SEQ ID NO: 4214071 - DNA, 25 bp, Homo sapien
cttgggcaacgcagttgacttcctt

SEQ ID NO: 4214072 - DNA, 25 bp, Homo sapien
ccaagtgaggtacttacaagaatct

SEQ ID NO: 4214073 - DNA, 25 bp, Homo sapien
ggatgtacacgaaaaaggcacacat

SEQ ID NO: 4214074 - DNA, 25 bp, Homo sapien
cagaggatgtacacgaaaaaggcac

SEQ ID NO: 4214075 - DNA, 25 bp, Homo sapien
tattcagaggatgtacacgaaaaag

SEQ ID NO: 4214076 - DNA, 25 bp, Homo sapien
aaaattctattcagaggatgtacac

SEQ ID NO: 4214077 - DNA, 25 bp, Homo sapien
tgactgaattaagggatacccagac

SEQ ID NO: 4214078 - DNA, 25 bp, Homo sapien
cagacaacaggtgaaacattactcc

SEQ ID NO: 4214079 - DNA, 25 bp, Homo sapien
gaattggctcacataatgatagagg

SEQ ID NO: 4214080 - DNA, 25 bp, Homo sapien
tgtcccaccatatgctatctgcaag

SEQ ID NO: 4214081 - DNA, 25 bp, Homo sapien
gaaactcccactagatatcacaact

SEQ ID NO: 4214082 - DNA, 25 bp, Homo sapien
ggaagcatgatttgacccacatagt

SEQ ID NO: 4214083 - DNA, 25 bp, Homo sapien
ggtatcttcacttgctattggccag

SEQ ID NO: 4214084 - DNA, 25 bp, Homo sapien
tattggccagttgtttgaaactccc

SEQ ID NO: 4214085 - DNA, 25 bp, Homo sapien
tgaaaagttgctcttcttcagagat

SEQ ID NO: 4214086 - DNA, 25 bp, Homo sapien
gaaaagttgctcttcttcagagatt

SEQ ID NO: 4214087 - DNA, 25 bp, Homo sapien
ctgaaaagttgctcttcttcagaga

SEQ ID NO: 4214088 - DNA, 25 bp, Homo sapien
aaaagttgctcttcttcagagattc

SEQ ID NO: 4214089 - DNA, 25 bp, Homo sapien
aagaactcttttccttgggagcaag

SEQ ID NO: 4214090 - DNA, 25 bp, Homo sapien
gtcttcccagttttcttgtagccat

SEQ ID NO: 4214091 - DNA, 25 bp, Homo sapien
cagtcttcccagttttcttgtagcc

SEQ ID NO: 4214092 - DNA, 25 bp, Homo sapien
tgcagtcttcccagttttcttgtag

SEQ ID NO: 4214093 - DNA, 25 bp, Homo sapien
cttgcagtcttcccagttttcttgt

SEQ ID NO: 4214094 - DNA, 25 bp, Homo sapien
aatacattgctaccactctcagtgg

SEQ ID NO: 4214095 - DNA, 25 bp, Homo sapien
ctgcattcctaaaagtcaacttaat

SEQ ID NO: 4214096 - DNA, 25 bp, Homo sapien
cactctcagtggtcgcattgctctt

SEQ ID NO: 4214097 - DNA, 25 bp, Homo sapien
taatatcaggcaactttggtgtaaa

SEQ ID NO: 4214098 - DNA, 25 bp, Homo sapien
tcaactcgaattagtcttctaagaa

SEQ ID NO: 4214099 - DNA, 25 bp, Homo sapien
caactcgaattagtcttctaagaat

SEQ ID NO: 4214100 - DNA, 25 bp, Homo sapien
tcttatggcacttaagtccaccagt

SEQ ID NO: 4214101 - DNA, 25 bp, Homo sapien
cttggcaatcttatggcacttaagt

SEQ ID NO: 4214102 - DNA, 25 bp, Homo sapien
ttaagtccaccagtgaattatccac

SEQ ID NO: 4214103 - DNA, 25 bp, Homo sapien
ggcacttaagtccaccagtgaatta

SEQ ID NO: 4214104 - DNA, 25 bp, Homo sapien
aaagtctttccccataggtgttcag

SEQ ID NO: 4214105 - DNA, 25 bp, Homo sapien
gccaggtgcagtatgtacagccaat

SEQ ID NO: 4214106 - DNA, 25 bp, Homo sapien
gtcatctttaagacctgaccacagg

SEQ ID NO: 4214107 - DNA, 25 bp, Homo sapien
tcttttggccttgccgtatgtgcca

SEQ ID NO: 4214108 - DNA, 25 bp, Homo sapien
aagctcactccacctacgcattctg

SEQ ID NO: 4214109 - DNA, 25 bp, Homo sapien
ctgcctgctgaagcaaatagcagct

SEQ ID NO: 4214110 - DNA, 25 bp, Homo sapien
tcattgccaccaaagctcactccac

SEQ ID NO: 4214111 - DNA, 25 bp, Homo sapien
tgtaaaaggggttctctagcaatcc

SEQ ID NO: 4214112 - DNA, 25 bp, Homo sapien
gagtgcaccgtaaactggagaatcc

SEQ ID NO: 4214113 - DNA, 25 bp, Homo sapien
caatgtggttttcggccaaggataa

SEQ ID NO: 4214114 - DNA, 25 bp, Homo sapien
ataagggattccagtggagtgcacc

SEQ ID NO: 4214115 - DNA, 25 bp, Homo sapien
gaactcacaagggttcctcttgaga

SEQ ID NO: 4214116 - DNA, 25 bp, Homo sapien
tttgaattgtgctgtcttcttattg

SEQ ID NO: 4214117 - DNA, 25 bp, Homo sapien
ttgaattgtgctgtcttcttattgg

SEQ ID NO: 4214118 - DNA, 25 bp, Homo sapien
ttacattattagctctgtcattaag

SEQ ID NO: 4214119 - DNA, 25 bp, Homo sapien
gggatttacattattagctctgtca

SEQ ID NO: 4214120 - DNA, 25 bp, Homo sapien
gactgcattaggatacaaggcatat

SEQ ID NO: 4214121 - DNA, 25 bp, Homo sapien
ctatacagactgcattaggatacaa

SEQ ID NO: 4214122 - DNA, 25 bp, Homo sapien
gcattaggatacaaggcatattttt

SEQ ID NO: 4214123 - DNA, 25 bp, Homo sapien
tcatgcatgtcctgtgtttattagc

SEQ ID NO: 4214124 - DNA, 25 bp, Homo sapien
cttgatttagaaaagcaaaaagata

SEQ ID NO: 4214125 - DNA, 25 bp, Homo sapien
gcaaaaagatataaaataaactgca

SEQ ID NO: 4214126 - DNA, 25 bp, Homo sapien
ttgatttagaaaagcaaaaagatat

SEQ ID NO: 4214127 - DNA, 25 bp, Homo sapien
aaaagatataaaataaactgcaata

SEQ ID NO: 4214128 - DNA, 25 bp, Homo sapien
tcatagctaagcaacccagcacttg

SEQ ID NO: 4214129 - DNA, 25 bp, Homo sapien
cccagcacttgttatccttgtataa

SEQ ID NO: 4214130 - DNA, 25 bp, Homo sapien
taaaacccatgattttcttgtcagt

SEQ ID NO: 4214131 - DNA, 25 bp, Homo sapien
gcctagccttcctcatagctaagca

SEQ ID NO: 4214132 - DNA, 25 bp, Homo sapien
tgaattctccaacgctgtacatctt

SEQ ID NO: 4214133 - DNA, 25 bp, Homo sapien
taaatagaatgtggtccgatgtcag

SEQ ID NO: 4214134 - DNA, 25 bp, Homo sapien
tccacaaatatagtttgattgttga

SEQ ID NO: 4214135 - DNA, 25 bp, Homo sapien
cagttgagttaaatagaatgtggtc

SEQ ID NO: 4214136 - DNA, 25 bp, Homo sapien
gcacctggtagacatgggacattca

SEQ ID NO: 4214137 - DNA, 25 bp, Homo sapien
cctttactggatattgtagagctga

SEQ ID NO: 4214138 - DNA, 25 bp, Homo sapien
tctgtctcagaaaattgagtcccct

SEQ ID NO: 4214139 - DNA, 25 bp, Homo sapien
tatgagatactaagttgcacatgct

SEQ ID NO: 4214140 - DNA, 25 bp, Homo sapien
tacttattgagaataaccctgaggt

SEQ ID NO: 4214141 - DNA, 25 bp, Homo sapien
taaggtgaatctgcccttgaagaaa

SEQ ID NO: 4214142 - DNA, 25 bp, Homo sapien
gtatacatccaaagttcactcacct

SEQ ID NO: 4214143 - DNA, 25 bp, Homo sapien
cagactcttacgttacccatttaca

SEQ ID NO: 4214144 - DNA, 25 bp, Homo sapien
gagtctttgctactccaaaagccac

SEQ ID NO: 4214145 - DNA, 25 bp, Homo sapien
cctatagaacaaaagctgtatctgc

SEQ ID NO: 4214146 - DNA, 25 bp, Homo sapien
caaagtctggtaaattgtgctggga

SEQ ID NO: 4214147 - DNA, 25 bp, Homo sapien
gtatctgctagctctgaaagacatg

SEQ ID NO: 4214148 - DNA, 25 bp, Homo sapien
cttggttctcttcttaggatctcac

SEQ ID NO: 4214149 - DNA, 25 bp, Homo sapien
tgtcagctgggctgcgttctcatct

SEQ ID NO: 4214150 - DNA, 25 bp, Homo sapien
cacaatgcaaaaatcaagatgtcag

SEQ ID NO: 4214151 - DNA, 25 bp, Homo sapien
gccatttaatagctcatagttctgt

SEQ ID NO: 4214152 - DNA, 25 bp, Homo sapien
ctaatctcaattagatgggatgcaa

SEQ ID NO: 4214153 - DNA, 25 bp, Homo sapien
taatctcaattagatgggatgcaaa

SEQ ID NO: 4214154 - DNA, 25 bp, Homo sapien
aatctcaattagatgggatgcaaat

SEQ ID NO: 4214155 - DNA, 25 bp, Homo sapien
cctaatctcaattagatgggatgca

SEQ ID NO: 4214156 - DNA, 25 bp, Homo sapien
tccatccttgccgacataagttttt

SEQ ID NO: 4214157 - DNA, 25 bp, Homo sapien
ctttaactttctgtgcttggtctgt

SEQ ID NO: 4214158 - DNA, 25 bp, Homo sapien
ccttgccgacataagtttttctctt

SEQ ID NO: 4214159 - DNA, 25 bp, Homo sapien
agttatttccatccttgccgacata

SEQ ID NO: 4214160 - DNA, 25 bp, Homo sapien
aacagcatagcttaaattctacatt

SEQ ID NO: 4214161 - DNA, 25 bp, Homo sapien
taacagcatagcttaaattctacat

SEQ ID NO: 4214162 - DNA, 25 bp, Homo sapien
ctaacagcatagcttaaattctaca

SEQ ID NO: 4214163 - DNA, 25 bp, Homo sapien
cttgtcctttatatttagcatcctt

SEQ ID NO: 4214164 - DNA, 25 bp, Homo sapien
tagcatccttggctgaggtccctag

SEQ ID NO: 4214165 - DNA, 25 bp, Homo sapien
ccttggctgaggtccctagatacat

SEQ ID NO: 4214166 - DNA, 25 bp, Homo sapien
ttgtcctttatatttagcatccttg

SEQ ID NO: 4214167 - DNA, 25 bp, Homo sapien
tgtagagctctacttggaaacgtgc

SEQ ID NO: 4214168 - DNA, 25 bp, Homo sapien
ggaccaggccacatgtagagctcta

SEQ ID NO: 4214169 - DNA, 25 bp, Homo sapien
gctctacttggaaacgtgcctggaa

SEQ ID NO: 4214170 - DNA, 25 bp, Homo sapien
tggaaacgtgcctggaaaatggctt

SEQ ID NO: 4214171 - DNA, 25 bp, Homo sapien
ggggtagaacaaggaccctgtgctc

SEQ ID NO: 4214172 - DNA, 25 bp, Homo sapien
gaccctgtgctctcttgtttcacca

SEQ ID NO: 4214173 - DNA, 25 bp, Homo sapien
ggaccctgtgctctcttgtttcacc

SEQ ID NO: 4214174 - DNA, 25 bp, Homo sapien
gaacaaggaccctgtgctctcttgt

SEQ ID NO: 4214175 - DNA, 25 bp, Homo sapien
gtagtctctgagtaacacttccaag

SEQ ID NO: 4214176 - DNA, 25 bp, Homo sapien
cttggaatatcgttaacagcgtagt

SEQ ID NO: 4214177 - DNA, 25 bp, Homo sapien
tgagccttgctttcattgctatggg

SEQ ID NO: 4214178 - DNA, 25 bp, Homo sapien
cacggaatgcttgtatgtttggcag

SEQ ID NO: 4214179 - DNA, 25 bp, Homo sapien
gacaaaaccataccacggacagcag

SEQ ID NO: 4214180 - DNA, 25 bp, Homo sapien
tggatatctactgccacagacaaaa

SEQ ID NO: 4214181 - DNA, 25 bp, Homo sapien
tctccaaagagactgttgccgctgt

SEQ ID NO: 4214182 - DNA, 25 bp, Homo sapien
tcaggacaaccacacttccttggat

SEQ ID NO: 4214183 - DNA, 25 bp, Homo sapien
gaataggatatgtgctcatccactg

SEQ ID NO: 4214184 - DNA, 25 bp, Homo sapien
tgcccctcgtttgtagcaggtcctg

SEQ ID NO: 4214185 - DNA, 25 bp, Homo sapien
taacacgttccttgggtcttgtgac

SEQ ID NO: 4214186 - DNA, 25 bp, Homo sapien
tgtaaccacaggagtaggccaaaac

SEQ ID NO: 4214187 - DNA, 25 bp, Homo sapien
tcagtgtctggttccctataagtaa

SEQ ID NO: 4214188 - DNA, 25 bp, Homo sapien
gaaacttcccttggagtagagacat

SEQ ID NO: 4214189 - DNA, 25 bp, Homo sapien
gaagacataccaaactgcaaatagg

SEQ ID NO: 4214190 - DNA, 25 bp, Homo sapien
cagttgagtgattgtgtatgtacgc

SEQ ID NO: 4214191 - DNA, 25 bp, Homo sapien
tcaagatcatttgtaacttcaatgg

SEQ ID NO: 4214192 - DNA, 25 bp, Homo sapien
ccttcaagatcatttgtaacttcaa

SEQ ID NO: 4214193 - DNA, 25 bp, Homo sapien
cttcaagatcatttgtaacttcaat

SEQ ID NO: 4214194 - DNA, 25 bp, Homo sapien
ttcaagatcatttgtaacttcaatg

SEQ ID NO: 4214195 - DNA, 25 bp, Homo sapien
gtgctatgttattatctgcacacat

SEQ ID NO: 4214196 - DNA, 25 bp, Homo sapien
tattgtgctatgttattatctgcac

SEQ ID NO: 4214197 - DNA, 25 bp, Homo sapien
gtattgtgctatgttattatctgca

SEQ ID NO: 4214198 - DNA, 25 bp, Homo sapien
ttgtgctatgttattatctgcacac

SEQ ID NO: 4214199 - DNA, 25 bp, Homo sapien
gcaaaagggattggtcctttatcca

SEQ ID NO: 4214200 - DNA, 25 bp, Homo sapien
tatccaaatttccatagccctttgt

SEQ ID NO: 4214201 - DNA, 25 bp, Homo sapien
caaatttccatagccctttgtactt

SEQ ID NO: 4214202 - DNA, 25 bp, Homo sapien
gattggtcctttatccaaatttcca

SEQ ID NO: 4214203 - DNA, 25 bp, Homo sapien
ccaaaatagggttttatgagatgac

SEQ ID NO: 4214204 - DNA, 25 bp, Homo sapien
taaaaagcatcaaggtcctgtctta

SEQ ID NO: 4214205 - DNA, 25 bp, Homo sapien
tctttgggagatatgacagaactaa

SEQ ID NO: 4214206 - DNA, 25 bp, Homo sapien
tcctgtcttaatgagttttctccag

SEQ ID NO: 4214207 - DNA, 25 bp, Homo sapien
ttattgaactattatataccctata

SEQ ID NO: 4214208 - DNA, 25 bp, Homo sapien
tattgaactattatataccctatat

SEQ ID NO: 4214209 - DNA, 25 bp, Homo sapien
atatgcagctacattatgcctatat

SEQ ID NO: 4214210 - DNA, 25 bp, Homo sapien
tttatatgcagctacattatgccta

SEQ ID NO: 4214211 - DNA, 25 bp, Homo sapien
tctgcaataagtatgcttgcaatca

SEQ ID NO: 4214212 - DNA, 25 bp, Homo sapien
tgcttgcaatcacagatacttcatg

SEQ ID NO: 4214213 - DNA, 25 bp, Homo sapien
taagtatgcttgcaatcacagatac

SEQ ID NO: 4214214 - DNA, 25 bp, Homo sapien
cacctttgtctgcaataagtatgct

SEQ ID NO: 4214215 - DNA, 25 bp, Homo sapien
tgttgtctggaaggccacaaacctc

SEQ ID NO: 4214216 - DNA, 25 bp, Homo sapien
ccccaaatataaggaggaacagcca

SEQ ID NO: 4214217 - DNA, 25 bp, Homo sapien
agctcaggccgtaggctgtgcctct

SEQ ID NO: 4214218 - DNA, 25 bp, Homo sapien
acctctggagtctgtttcgtgaaaa

SEQ ID NO: 4214219 - DNA, 25 bp, Homo sapien
tgctccgccgggagcaactgaaacc

SEQ ID NO: 4214220 - DNA, 25 bp, Homo sapien
gagcaactgaaaccgagtgagccca

SEQ ID NO: 4214221 - DNA, 25 bp, Homo sapien
gctcggtggccgctgagctgcatgc

SEQ ID NO: 4214222 - DNA, 25 bp, Homo sapien
aactgaaaccgagtgagcccagtgg

SEQ ID NO: 4214223 - DNA, 25 bp, Homo sapien
atctcggcgaggctgatccgccctg

SEQ ID NO: 4214224 - DNA, 25 bp, Homo sapien
cagccggagctgtagggcgcttcct

SEQ ID NO: 4214225 - DNA, 25 bp, Homo sapien
cacagtcgcgaggacatctcggcga

SEQ ID NO: 4214226 - DNA, 25 bp, Homo sapien
cgaacccggcgcagaagttgggctt

SEQ ID NO: 4214227 - DNA, 25 bp, Homo sapien
ctcaggtggttcgatgatgattccg

SEQ ID NO: 4214228 - DNA, 25 bp, Homo sapien
ccaggagcagaaatcgaaaagcaga

SEQ ID NO: 4214229 - DNA, 25 bp, Homo sapien
gttttctctctcaggtggttcgatg

SEQ ID NO: 4214230 - DNA, 25 bp, Homo sapien
tattcataaccgcccaggagcagaa

SEQ ID NO: 4214231 - DNA, 25 bp, Homo sapien
tggactcaacagccctaaacttatc

SEQ ID NO: 4214232 - DNA, 25 bp, Homo sapien
tcttttactgtagcctcatacagat

SEQ ID NO: 4214233 - DNA, 25 bp, Homo sapien
cctcatacagattattctccccagt

SEQ ID NO: 4214234 - DNA, 25 bp, Homo sapien
cagccctaaacttatcttttactgt

SEQ ID NO: 4214235 - DNA, 25 bp, Homo sapien
tgtgaaataggtgacttttgtgctg

SEQ ID NO: 4214236 - DNA, 25 bp, Homo sapien
ctatctgagggacctggaagtattt

SEQ ID NO: 4214237 - DNA, 25 bp, Homo sapien
aaataggtgacttttgtgctgggcc

SEQ ID NO: 4214238 - DNA, 25 bp, Homo sapien
cctggaagtatttgtgaaataggtg

SEQ ID NO: 4214239 - DNA, 25 bp, Homo sapien
tagcttcacaataatgagcactgtg

SEQ ID NO: 4214240 - DNA, 25 bp, Homo sapien
tcagtcccctatacaaaatggtgca

SEQ ID NO: 4214241 - DNA, 25 bp, Homo sapien
ggagagcaataaccattgcagaggg

SEQ ID NO: 4214242 - DNA, 25 bp, Homo sapien
ggaactggttccatgactcccatgg

SEQ ID NO: 4214243 - DNA, 25 bp, Homo sapien
ccttcctcaaatgtaagctctctgc

SEQ ID NO: 4214244 - DNA, 25 bp, Homo sapien
tccttcctcaaatgtaagctctctg

SEQ ID NO: 4214245 - DNA, 25 bp, Homo sapien
gtagtctcaatcaaaaaggaataac

SEQ ID NO: 4214246 - DNA, 25 bp, Homo sapien
cagtagtctcaatcaaaaaggaata

SEQ ID NO: 4214247 - DNA, 25 bp, Homo sapien
tcagtagtctcaatcaaaaaggaat

SEQ ID NO: 4214248 - DNA, 25 bp, Homo sapien
agtagtctcaatcaaaaaggaataa

SEQ ID NO: 4214249 - DNA, 25 bp, Homo sapien
taccatgtacgcttttccgtgccca

SEQ ID NO: 4214250 - DNA, 25 bp, Homo sapien
ggcttacctagaacaagcagttatt

SEQ ID NO: 4214251 - DNA, 25 bp, Homo sapien
tctctgtggatattgcaagcacctt

SEQ ID NO: 4214252 - DNA, 25 bp, Homo sapien
caagcagcccttaccagatctgtta

SEQ ID NO: 4214253 - DNA, 25 bp, Homo sapien
gaagcatctgcaaagtaattcctag

SEQ ID NO: 4214254 - DNA, 25 bp, Homo sapien
gaaccagcattaataggcttgaccc

SEQ ID NO: 4214255 - DNA, 25 bp, Homo sapien
tctgatctccgaatacaagggtgac

SEQ ID NO: 4214256 - DNA, 25 bp, Homo sapien
catgagaaatcggaccccaagttgg

SEQ ID NO: 4214257 - DNA, 25 bp, Homo sapien
actgcgacatccctcatctggcaaa

SEQ ID NO: 4214258 - DNA, 25 bp, Homo sapien
cagggaaatttcacgtctgcagtca

SEQ ID NO: 4214259 - DNA, 25 bp, Homo sapien
gtgatcactacgatactcctaaaga

SEQ ID NO: 4214260 - DNA, 25 bp, Homo sapien
gtcttcaagtgtccctcagtgatca

SEQ ID NO: 4214261 - DNA, 25 bp, Homo sapien
tgggtgtgcaagtccaaccacagtc

SEQ ID NO: 4214262 - DNA, 25 bp, Homo sapien
caacttgagccagtacagccttgtt

SEQ ID NO: 4214263 - DNA, 25 bp, Homo sapien
gaatgcccaaacacatgggtgtgca

SEQ ID NO: 4214264 - DNA, 25 bp, Homo sapien
gcttgacaatgtgtgtgaatgccca

SEQ ID NO: 4214265 - DNA, 25 bp, Homo sapien
gtaggcatcccagttcatcatccca

SEQ ID NO: 4214266 - DNA, 25 bp, Homo sapien
tacacctgtccatagatggtgtagt

SEQ ID NO: 4214267 - DNA, 25 bp, Homo sapien
cagcaccagtagacaggctgctgct

SEQ ID NO: 4214268 - DNA, 25 bp, Homo sapien
tccatgttgtacacctgtccataga

SEQ ID NO: 4214269 - DNA, 25 bp, Homo sapien
gggtccatgaaatccctctgaacac

SEQ ID NO: 4214270 - DNA, 25 bp, Homo sapien
gaacactggcactactggccttcac

SEQ ID NO: 4214271 - DNA, 25 bp, Homo sapien
cagtggggtccatgaaatccctctg

SEQ ID NO: 4214272 - DNA, 25 bp, Homo sapien
tcttccattgaaacaagttcccact

SEQ ID NO: 4214273 - DNA, 25 bp, Homo sapien
ggtcaccatggaaaacctgagtctt

SEQ ID NO: 4214274 - DNA, 25 bp, Homo sapien
ttagaagaatagctctgaggtcacc

SEQ ID NO: 4214275 - DNA, 25 bp, Homo sapien
tgagtcttaaccttatgccaagggc

SEQ ID NO: 4214276 - DNA, 25 bp, Homo sapien
caagataagggaaccagtgttgcac

SEQ ID NO: 4214277 - DNA, 25 bp, Homo sapien
ctgaaataagagctaggttataggc

SEQ ID NO: 4214278 - DNA, 25 bp, Homo sapien
cagaccgaggattatgtactcatat

SEQ ID NO: 4214279 - DNA, 25 bp, Homo sapien
gattatgtactcatatatcagaact

SEQ ID NO: 4214280 - DNA, 25 bp, Homo sapien
tataggcagtaccaccagactataa

SEQ ID NO: 4214281 - DNA, 25 bp, Homo sapien
ttatctgaaagtgataggactgtac

SEQ ID NO: 4214282 - DNA, 25 bp, Homo sapien
tattgcatataataggctttttcat

SEQ ID NO: 4214283 - DNA, 25 bp, Homo sapien
gttatctgaaagtgataggactgta

SEQ ID NO: 4214284 - DNA, 25 bp, Homo sapien
attgcatataataggctttttcata

SEQ ID NO: 4214285 - DNA, 25 bp, Homo sapien
taatgtgacacatccctggatttgg

SEQ ID NO: 4214286 - DNA, 25 bp, Homo sapien
ttggatgaagatgcagtgattcctc

SEQ ID NO: 4214287 - DNA, 25 bp, Homo sapien
tatctcagttattagcatggccctt

SEQ ID NO: 4214288 - DNA, 25 bp, Homo sapien
tacccaataataagagcaatccatg

SEQ ID NO: 4214289 - DNA, 25 bp, Homo sapien
gcacacagcctggtatataaatatt

SEQ ID NO: 4214290 - DNA, 25 bp, Homo sapien
tggtctctgaagtacctagcacaca

SEQ ID NO: 4214291 - DNA, 25 bp, Homo sapien
tacgacatagatgaactctctccat

SEQ ID NO: 4214292 - DNA, 25 bp, Homo sapien
tgtgggctatatcataatcactggt

SEQ ID NO: 4214293 - DNA, 25 bp, Homo sapien
tgcaccaaagacattaagggagaat

SEQ ID NO: 4214294 - DNA, 25 bp, Homo sapien
ttgcaccaaagacattaagggagaa

SEQ ID NO: 4214295 - DNA, 25 bp, Homo sapien
gcaccaaagacattaagggagaatt

SEQ ID NO: 4214296 - DNA, 25 bp, Homo sapien
gaaggccacgaggaaattattcttg

SEQ ID NO: 4214297 - DNA, 25 bp, Homo sapien
ctggatctttcagacaaaagccaaa

SEQ ID NO: 4214298 - DNA, 25 bp, Homo sapien
tgaaggccacgaggaaattattctt

SEQ ID NO: 4214299 - DNA, 25 bp, Homo sapien
ctagggccaactcatatggagaatg

SEQ ID NO: 4214300 - DNA, 25 bp, Homo sapien
gaattaccgccaccatctcagtttc

SEQ ID NO: 4214301 - DNA, 25 bp, Homo sapien
tctctgaatccctagggccaactca

SEQ ID NO: 4214302 - DNA, 25 bp, Homo sapien
tttcacagggccctagaattaccgc

SEQ ID NO: 4214303 - DNA, 25 bp, Homo sapien
ggcctttaggccaaatcttgctcca

SEQ ID NO: 4214304 - DNA, 25 bp, Homo sapien
cttccattcagttcagagcaagtag

SEQ ID NO: 4214305 - DNA, 25 bp, Homo sapien
aaatggtgggttactacagagtcac

SEQ ID NO: 4214306 - DNA, 25 bp, Homo sapien
caataagaacccttaaggttggatg

SEQ ID NO: 4214307 - DNA, 25 bp, Homo sapien
ttgtaacatttcacccacattgggc

SEQ ID NO: 4214308 - DNA, 25 bp, Homo sapien
tttgtaacagacaccactgggaaac

SEQ ID NO: 4214309 - DNA, 25 bp, Homo sapien
cacagacttaagagaaccagatttc

SEQ ID NO: 4214310 - DNA, 25 bp, Homo sapien
cattgggctcctctgcaataatgaa

SEQ ID NO: 4214311 - DNA, 25 bp, Homo sapien
caagtacatctgaactgtcatgagc

SEQ ID NO: 4214312 - DNA, 25 bp, Homo sapien
tgtcatgagcaataagacctttggg

SEQ ID NO: 4214313 - DNA, 25 bp, Homo sapien
ttctgccaggcataacaagtacctc

SEQ ID NO: 4214314 - DNA, 25 bp, Homo sapien
aatgtcaccagtttccaaatttgac

SEQ ID NO: 4214315 - DNA, 25 bp, Homo sapien
tattctatgcaacctcagagagtgg

SEQ ID NO: 4214316 - DNA, 25 bp, Homo sapien
gaaggatcaccatatcatgagccag

SEQ ID NO: 4214317 - DNA, 25 bp, Homo sapien
tgaaatcccctggaagggaactcaa

SEQ ID NO: 4214318 - DNA, 25 bp, Homo sapien
tactatgatggcctttcagactcaa

SEQ ID NO: 4214319 - DNA, 25 bp, Homo sapien
atgttatgattccctataaaatatt

SEQ ID NO: 4214320 - DNA, 25 bp, Homo sapien
atgattccctataaaatattcccaa

SEQ ID NO: 4214321 - DNA, 25 bp, Homo sapien
ttagatgttatgattccctataaaa

SEQ ID NO: 4214322 - DNA, 25 bp, Homo sapien
ccctgaaattgttttagatgttatg

SEQ ID NO: 4214323 - DNA, 25 bp, Homo sapien
agtactctgtcgtggaaactctaga

SEQ ID NO: 4214324 - DNA, 25 bp, Homo sapien
tgtaacctgggacaatcataggcaa

SEQ ID NO: 4214325 - DNA, 25 bp, Homo sapien
tactaagtttcgtggcctgatgcct

SEQ ID NO: 4214326 - DNA, 25 bp, Homo sapien
tgtcttctcaaatcagggagtctga

SEQ ID NO: 4214327 - DNA, 25 bp, Homo sapien
caaagtctgattatgttgtatatcc

SEQ ID NO: 4214328 - DNA, 25 bp, Homo sapien
tcttctggttgcttagagtggaagc

SEQ ID NO: 4214329 - DNA, 25 bp, Homo sapien
catttgtatttagttcaaactactt

SEQ ID NO: 4214330 - DNA, 25 bp, Homo sapien
gctgaggtcactaattagagatctt

SEQ ID NO: 4214331 - DNA, 25 bp, Homo sapien
tatataagtacactgctattcaggt

SEQ ID NO: 4214332 - DNA, 25 bp, Homo sapien
tctttgttggacattttgaactaca

SEQ ID NO: 4214333 - DNA, 25 bp, Homo sapien
tttagtagaatttaccagcgaagcc

SEQ ID NO: 4214334 - DNA, 25 bp, Homo sapien
taccagcgaagccttataggtctgg

SEQ ID NO: 4214335 - DNA, 25 bp, Homo sapien
taagggttgctcacaagatgtcatt

SEQ ID NO: 4214336 - DNA, 25 bp, Homo sapien
cacagcatgaatgtggtgagcacgg

SEQ ID NO: 4214337 - DNA, 25 bp, Homo sapien
ttgcatggcagttcaacacagcatg

SEQ ID NO: 4214338 - DNA, 25 bp, Homo sapien
tgagcacggttaggaaggaaacttg

SEQ ID NO: 4214339 - DNA, 25 bp, Homo sapien
ctgtgtggcagctcgcctattacat

SEQ ID NO: 4214340 - DNA, 25 bp, Homo sapien
gcagctcgcctattacattctccaa

SEQ ID NO: 4214341 - DNA, 25 bp, Homo sapien
gctcgcctattacattctccaaatg

SEQ ID NO: 4214342 - DNA, 25 bp, Homo sapien
gtggcagctcgcctattacattctc

SEQ ID NO: 4214343 - DNA, 25 bp, Homo sapien
ccccctggtggctcttgttcatcat

SEQ ID NO: 4214344 - DNA, 25 bp, Homo sapien
ctcaacttagattctatatttcttt

SEQ ID NO: 4214345 - DNA, 25 bp, Homo sapien
tttctttctagccccctggtggctc

SEQ ID NO: 4214346 - DNA, 25 bp, Homo sapien
caacttagattctatatttcttttc

SEQ ID NO: 4214347 - DNA, 25 bp, Homo sapien
ccaagaaaacccgagagaagtcaat

SEQ ID NO: 4214348 - DNA, 25 bp, Homo sapien
tctgtagcccaagaaaacccgagag

SEQ ID NO: 4214349 - DNA, 25 bp, Homo sapien
catgattctgtagcccaagaaaacc

SEQ ID NO: 4214350 - DNA, 25 bp, Homo sapien
gaaaacccgagagaagtcaatgtaa

SEQ ID NO: 4214351 - DNA, 25 bp, Homo sapien
tagctgacaagccatcatctgaaag

SEQ ID NO: 4214352 - DNA, 25 bp, Homo sapien
gagctttgccttatgaaggctctcc

SEQ ID NO: 4214353 - DNA, 25 bp, Homo sapien
catttggctcatgttggcacaggag

SEQ ID NO: 4214354 - DNA, 25 bp, Homo sapien
gcctctccgggtcaaaagactggga

SEQ ID NO: 4214355 - DNA, 25 bp, Homo sapien
cagcagtagttcctcttttgattta

SEQ ID NO: 4214356 - DNA, 25 bp, Homo sapien
tccagcagtagttcctcttttgatt

SEQ ID NO: 4214357 - DNA, 25 bp, Homo sapien
cagtagttcctcttttgatttagac

SEQ ID NO: 4214358 - DNA, 25 bp, Homo sapien
gcagtagttcctcttttgatttaga

SEQ ID NO: 4214359 - DNA, 25 bp, Homo sapien
taagaactgaattgctgacagccat

SEQ ID NO: 4214360 - DNA, 25 bp, Homo sapien
tggtggtaagaactgaattgctgac

SEQ ID NO: 4214361 - DNA, 25 bp, Homo sapien
gtaagaactgaattgctgacagcca

SEQ ID NO: 4214362 - DNA, 25 bp, Homo sapien
tgattggtggtaagaactgaattgc

SEQ ID NO: 4214363 - DNA, 25 bp, Homo sapien
gcctggcctgcactagtgttttcaa

SEQ ID NO: 4214364 - DNA, 25 bp, Homo sapien
tagatttacttagaccagtggtaga

SEQ ID NO: 4214365 - DNA, 25 bp, Homo sapien
aaataaattgatctgcatgtacccc

SEQ ID NO: 4214366 - DNA, 25 bp, Homo sapien
gcatgtaccccattcttagatttac

SEQ ID NO: 4214367 - DNA, 25 bp, Homo sapien
gacaagttttaagcccaatcctagc

SEQ ID NO: 4214368 - DNA, 25 bp, Homo sapien
ctgaattaggtatctggaaggtccc

SEQ ID NO: 4214369 - DNA, 25 bp, Homo sapien
tggagctgaacgtttgggcccttga

SEQ ID NO: 4214370 - DNA, 25 bp, Homo sapien
aaatggattccagcagattgccaga

SEQ ID NO: 4214371 - DNA, 25 bp, Homo sapien
agtggtcaggagttcttggccgcaa

SEQ ID NO: 4214372 - DNA, 25 bp, Homo sapien
acagttcctttatggctgccagatc

SEQ ID NO: 4214373 - DNA, 25 bp, Homo sapien
gttcttggccgcaacagttccttta

SEQ ID NO: 4214374 - DNA, 25 bp, Homo sapien
tcccatgatctaactattatggtgc

SEQ ID NO: 4214375 - DNA, 25 bp, Homo sapien
taacacatggatcgggagggctatc

SEQ ID NO: 4214376 - DNA, 25 bp, Homo sapien
tattcagtggacagtaggataacac

SEQ ID NO: 4214377 - DNA, 25 bp, Homo sapien
agtttacttttagatgtgatgaatc

SEQ ID NO: 4214378 - DNA, 25 bp, Homo sapien
gtgatgaatctgtggagctattcag

SEQ ID NO: 4214379 - DNA, 25 bp, Homo sapien
gaatggcagtgccaatacccaagat

SEQ ID NO: 4214380 - DNA, 25 bp, Homo sapien
caagataagaattaccagaggaaga

SEQ ID NO: 4214381 - DNA, 25 bp, Homo sapien
taagaattaccagaggaagaataaa

SEQ ID NO: 4214382 - DNA, 25 bp, Homo sapien
gcagtgccaatacccaagataagaa

SEQ ID NO: 4214383 - DNA, 25 bp, Homo sapien
aaagccaaatggtagtgttaacctg

SEQ ID NO: 4214384 - DNA, 25 bp, Homo sapien
acagtaaccctgaatgaaaattggc

SEQ ID NO: 4214385 - DNA, 25 bp, Homo sapien
aaatattgaaccacagaactcgctg

SEQ ID NO: 4214386 - DNA, 25 bp, Homo sapien
cgatgtatatgtgtgagtgacccag

SEQ ID NO: 4214387 - DNA, 25 bp, Homo sapien
cacttctaattttgttcctagccac

SEQ ID NO: 4214388 - DNA, 25 bp, Homo sapien
ccatcaataagagaggacaggccag

SEQ ID NO: 4214389 - DNA, 25 bp, Homo sapien
cagggaatagtgaacatatgaggct

SEQ ID NO: 4214390 - DNA, 25 bp, Homo sapien
ggctcttaaatagtaccagattata

SEQ ID NO: 4214391 - DNA, 25 bp, Homo sapien
gacaagctcctattccttctctctg

SEQ ID NO: 4214392 - DNA, 25 bp, Homo sapien
cctcagataaaggagatctcagata

SEQ ID NO: 4214393 - DNA, 25 bp, Homo sapien
tggacaggacaagctcctattcctt

SEQ ID NO: 4214394 - DNA, 25 bp, Homo sapien
cagataaaggagatctcagatatta

SEQ ID NO: 4214395 - DNA, 25 bp, Homo sapien
tctgtgtacctaggtactgtttcaa

SEQ ID NO: 4214396 - DNA, 25 bp, Homo sapien
tgtacctaggtactgtttcaacatt

SEQ ID NO: 4214397 - DNA, 25 bp, Homo sapien
gtgtacctaggtactgtttcaacat

SEQ ID NO: 4214398 - DNA, 25 bp, Homo sapien
tgtgtacctaggtactgtttcaaca

SEQ ID NO: 4214399 - DNA, 25 bp, Homo sapien
ctgattgctacagctcttactcctt

SEQ ID NO: 4214400 - DNA, 25 bp, Homo sapien
tgggtactcccagcaaacttaggct

SEQ ID NO: 4214401 - DNA, 25 bp, Homo sapien
tctgaaatccatggtaaacgttacc

SEQ ID NO: 4214402 - DNA, 25 bp, Homo sapien
tgcctttcctctaatacagaattgg

SEQ ID NO: 4214403 - DNA, 25 bp, Homo sapien
cagaattggttaagcataatctacc

SEQ ID NO: 4214404 - DNA, 25 bp, Homo sapien
ctcagttgccagttggaatgcttgt

SEQ ID NO: 4214405 - DNA, 25 bp, Homo sapien
cttaggccacttaaatagacaacct

SEQ ID NO: 4214406 - DNA, 25 bp, Homo sapien
gacaacctaaaaatggtctagccag

SEQ ID NO: 4214407 - DNA, 25 bp, Homo sapien
gttgaatgccaatgctcaaagaggg

SEQ ID NO: 4214408 - DNA, 25 bp, Homo sapien
aatattagcgtccaacactgttagc

SEQ ID NO: 4214409 - DNA, 25 bp, Homo sapien
tgctttcaaagggtgactttcacga

SEQ ID NO: 4214410 - DNA, 25 bp, Homo sapien
tggcaagcattctgtaatattagcg

SEQ ID NO: 4214411 - DNA, 25 bp, Homo sapien
gactttcacgatagggtggcaagca

SEQ ID NO: 4214412 - DNA, 25 bp, Homo sapien
tccacaggaatgagaagacggaaaa

SEQ ID NO: 4214413 - DNA, 25 bp, Homo sapien
ccacaggaatgagaagacggaaaag

SEQ ID NO: 4214414 - DNA, 25 bp, Homo sapien
cagatgagcctgaggatagcgtgga

SEQ ID NO: 4214415 - DNA, 25 bp, Homo sapien
tgagcctgaggatagcgtggaaagg

SEQ ID NO: 4214416 - DNA, 25 bp, Homo sapien
atgagcctgaggatagcgtggaaag

SEQ ID NO: 4214417 - DNA, 25 bp, Homo sapien
gatgagcctgaggatagcgtggaaa

SEQ ID NO: 4214418 - DNA, 25 bp, Homo sapien
tatcctctggtaacaagtgaaagta

SEQ ID NO: 4214419 - DNA, 25 bp, Homo sapien
gagtcatagatctggtagtcacgca

SEQ ID NO: 4214420 - DNA, 25 bp, Homo sapien
tggtagtcacgcatttgccatgagg

SEQ ID NO: 4214421 - DNA, 25 bp, Homo sapien
tattgtccccacagatgagtcatag

SEQ ID NO: 4214422 - DNA, 25 bp, Homo sapien
gggtcattcttaggtgagtggtaaa

SEQ ID NO: 4214423 - DNA, 25 bp, Homo sapien
ctaattgtcttaattctaggaatgc

SEQ ID NO: 4214424 - DNA, 25 bp, Homo sapien
gattcttcatttacatcgtctccaa

SEQ ID NO: 4214425 - DNA, 25 bp, Homo sapien
tgagtggtaaatcatactagataaa

SEQ ID NO: 4214426 - DNA, 25 bp, Homo sapien
cccttgcatcaacacttaaacttgg

SEQ ID NO: 4214427 - DNA, 25 bp, Homo sapien
catcaacacttaaacttggtgttgc

SEQ ID NO: 4214428 - DNA, 25 bp, Homo sapien
catcaacccttgcatcaacacttaa

SEQ ID NO: 4214429 - DNA, 25 bp, Homo sapien
caacacttaaacttggtgttgccat

SEQ ID NO: 4214430 - DNA, 25 bp, Homo sapien
cacgcttgatttcatgggccaggag

SEQ ID NO: 4214431 - DNA, 25 bp, Homo sapien
gtatgggtcgccttcccgttctgca

SEQ ID NO: 4214432 - DNA, 25 bp, Homo sapien
caggagagcacatctggcagatcta

SEQ ID NO: 4214433 - DNA, 25 bp, Homo sapien
tctctggaagtcctgcataaacata

SEQ ID NO: 4214434 - DNA, 25 bp, Homo sapien
tccaatgaggttactgagggctcac

SEQ ID NO: 4214435 - DNA, 25 bp, Homo sapien
catcctaagtggtgagtggcaagct

SEQ ID NO: 4214436 - DNA, 25 bp, Homo sapien
taaatcagaccattccacagtggac

SEQ ID NO: 4214437 - DNA, 25 bp, Homo sapien
gaacaccgactatgatcaattggac

SEQ ID NO: 4214438 - DNA, 25 bp, Homo sapien
ctttctgaagtacctaagtatttgt

SEQ ID NO: 4214439 - DNA, 25 bp, Homo sapien
ttctgaagtacctaagtatttgtgg

SEQ ID NO: 4214440 - DNA, 25 bp, Homo sapien
tgaagtacctaagtatttgtgggct

SEQ ID NO: 4214441 - DNA, 25 bp, Homo sapien
ctgaagtacctaagtatttgtgggc

SEQ ID NO: 4214442 - DNA, 25 bp, Homo sapien
gagacaaatgcaaatcccaaccaat

SEQ ID NO: 4214443 - DNA, 25 bp, Homo sapien
caagcttcagtcaatcacaggtggc

SEQ ID NO: 4214444 - DNA, 25 bp, Homo sapien
tcagctcactacacagcagtatgct

SEQ ID NO: 4214445 - DNA, 25 bp, Homo sapien
caggccacggccaagtgagacaaat

SEQ ID NO: 4214446 - DNA, 25 bp, Homo sapien
tcatgtttccagttgttagaatgct

SEQ ID NO: 4214447 - DNA, 25 bp, Homo sapien
ggtgtagctcacatatgggacataa

SEQ ID NO: 4214448 - DNA, 25 bp, Homo sapien
gagacttttgattgcatggttcttc

SEQ ID NO: 4214449 - DNA, 25 bp, Homo sapien
gacataaatagtcagtggtgttata

SEQ ID NO: 4214450 - DNA, 25 bp, Homo sapien
tgctcttggtgttttgcaagggcaa

SEQ ID NO: 4214451 - DNA, 25 bp, Homo sapien
gatgtgctcttggtgttttgcaagg

SEQ ID NO: 4214452 - DNA, 25 bp, Homo sapien
ctcttggtgttttgcaagggcaatt

SEQ ID NO: 4214453 - DNA, 25 bp, Homo sapien
ctaaaacttacagatgtgctcttgg

SEQ ID NO: 4214454 - DNA, 25 bp, Homo sapien
ttttctgaggtcacgcaaccagcac

SEQ ID NO: 4214455 - DNA, 25 bp, Homo sapien
ctcacaattaagaggctacagagac

SEQ ID NO: 4214456 - DNA, 25 bp, Homo sapien
gctcaggtcctcactattaatacca

SEQ ID NO: 4214457 - DNA, 25 bp, Homo sapien
caaccagcacgtggtagaagcaggt

SEQ ID NO: 4214458 - DNA, 25 bp, Homo sapien
ggcacctactctgaatttgtggatt

SEQ ID NO: 4214459 - DNA, 25 bp, Homo sapien
cagctctggcacctactctgaattt

SEQ ID NO: 4214460 - DNA, 25 bp, Homo sapien
agtagcagacaaccttgaagacact

SEQ ID NO: 4214461 - DNA, 25 bp, Homo sapien
tctggcacctactctgaatttgtgg

SEQ ID NO: 4214462 - DNA, 25 bp, Homo sapien
gctctcacccgctgtccaggacttc

SEQ ID NO: 4214463 - DNA, 25 bp, Homo sapien
tgctctcacccgctgtccaggactt

SEQ ID NO: 4214464 - DNA, 25 bp, Homo sapien
ctgctctcacccgctgtccaggact

SEQ ID NO: 4214465 - DNA, 25 bp, Homo sapien
ctctcacccgctgtccaggacttcc

SEQ ID NO: 4214466 - DNA, 25 bp, Homo sapien
gaaaatgcttgtaccagtctacgcc

SEQ ID NO: 4214467 - DNA, 25 bp, Homo sapien
ttcaactgatacttctggcagaaaa

SEQ ID NO: 4214468 - DNA, 25 bp, Homo sapien
acatttggctggtgctccggtgacg

SEQ ID NO: 4214469 - DNA, 25 bp, Homo sapien
ctacgcctaacaataaagaacccag

SEQ ID NO: 4214470 - DNA, 25 bp, Homo sapien
cacgatccattgtctggtgcccaaa

SEQ ID NO: 4214471 - DNA, 25 bp, Homo sapien
aaagccaactaattactgctgatgg

SEQ ID NO: 4214472 - DNA, 25 bp, Homo sapien
ctatggatcacgatccattgtctgg

SEQ ID NO: 4214473 - DNA, 25 bp, Homo sapien
tctggtgcccaaaagctaaaagcca

SEQ ID NO: 4214474 - DNA, 25 bp, Homo sapien
ttttcttcctactagcagccacttt

SEQ ID NO: 4214475 - DNA, 25 bp, Homo sapien
tttcttcctactagcagccactttc

SEQ ID NO: 4214476 - DNA, 25 bp, Homo sapien
cttttcttcctactagcagccactt

SEQ ID NO: 4214477 - DNA, 25 bp, Homo sapien
ctagacatacaaaaagaaacttcgg

SEQ ID NO: 4214478 - DNA, 25 bp, Homo sapien
agacatacaaaaagaaacttcggtg

SEQ ID NO: 4214479 - DNA, 25 bp, Homo sapien
gcaagtgaatagtcaaacagaatta

SEQ ID NO: 4214480 - DNA, 25 bp, Homo sapien
ctgcaagtgaatagtcaaacagaat

SEQ ID NO: 4214481 - DNA, 25 bp, Homo sapien
gtcaaacagaattagcctcttgtaa

SEQ ID NO: 4214482 - DNA, 25 bp, Homo sapien
atagtcaaacagaattagcctcttg

SEQ ID NO: 4214483 - DNA, 25 bp, Homo sapien
gcttctggccagcttgacatttgca

SEQ ID NO: 4214484 - DNA, 25 bp, Homo sapien
ggccagcttgacatttgcagtaata

SEQ ID NO: 4214485 - DNA, 25 bp, Homo sapien
taactgccaactgtattacagcatc

SEQ ID NO: 4214486 - DNA, 25 bp, Homo sapien
cagcatcgatcttgacagccaccat

SEQ ID NO: 4214487 - DNA, 25 bp, Homo sapien
tcttcccttatcagtaagcagacag

SEQ ID NO: 4214488 - DNA, 25 bp, Homo sapien
ccttatcagtaagcagacagtcctg

SEQ ID NO: 4214489 - DNA, 25 bp, Homo sapien
tatcagtaagcagacagtcctgtta

SEQ ID NO: 4214490 - DNA, 25 bp, Homo sapien
ctctcttcccttatcagtaagcaga

SEQ ID NO: 4214491 - DNA, 25 bp, Homo sapien
gattgaatcagtactgggatcacca

SEQ ID NO: 4214492 - DNA, 25 bp, Homo sapien
tcagtactgggatcaccattgccaa

SEQ ID NO: 4214493 - DNA, 25 bp, Homo sapien
tgaatcagtactgggatcaccattg

SEQ ID NO: 4214494 - DNA, 25 bp, Homo sapien
gagattgaatcagtactgggatcac

SEQ ID NO: 4214495 - DNA, 25 bp, Homo sapien
atcaatctgcgtgtgaatcagaaaa

SEQ ID NO: 4214496 - DNA, 25 bp, Homo sapien
tcaatctgcgtgtgaatcagaaaac

SEQ ID NO: 4214497 - DNA, 25 bp, Homo sapien
tatcttgtaagaatcaatctgcgtg

SEQ ID NO: 4214498 - DNA, 25 bp, Homo sapien
ctatatcttgtaagaatcaatctgc

SEQ ID NO: 4214499 - DNA, 25 bp, Homo sapien
ttaagtgacaatttcagcatgatta

SEQ ID NO: 4214500 - DNA, 25 bp, Homo sapien
gtgacaatttcagcatgattagaat

SEQ ID NO: 4214501 - DNA, 25 bp, Homo sapien
taagtgacaatttcagcatgattag

SEQ ID NO: 4214502 - DNA, 25 bp, Homo sapien
aagtgacaatttcagcatgattaga

SEQ ID NO: 4214503 - DNA, 25 bp, Homo sapien
tcacacagccatttgccctgattgg

SEQ ID NO: 4214504 - DNA, 25 bp, Homo sapien
cacagccatttgccctgattggctg

SEQ ID NO: 4214505 - DNA, 25 bp, Homo sapien
cttcacacagccatttgccctgatt

SEQ ID NO: 4214506 - DNA, 25 bp, Homo sapien
cacacagccatttgccctgattggc

SEQ ID NO: 4214507 - DNA, 25 bp, Homo sapien
ttctttttggaaatgtactgttgca

SEQ ID NO: 4214508 - DNA, 25 bp, Homo sapien
tagatgccatcgcttttctttttgg

SEQ ID NO: 4214509 - DNA, 25 bp, Homo sapien
tctttttggaaatgtactgttgcat

SEQ ID NO: 4214510 - DNA, 25 bp, Homo sapien
atggtatagatgccatcgcttttct

SEQ ID NO: 4214511 - DNA, 25 bp, Homo sapien
ccagcagaagcttctcccaggtctt

SEQ ID NO: 4214512 - DNA, 25 bp, Homo sapien
tgccagcagaagcttctcccaggtc

SEQ ID NO: 4214513 - DNA, 25 bp, Homo sapien
aatggcacgagctgccagcagaagc

SEQ ID NO: 4214514 - DNA, 25 bp, Homo sapien
ggcacgagctgccagcagaagcttc

SEQ ID NO: 4214515 - DNA, 25 bp, Homo sapien
tccagaaatagagccatcagcaaca

SEQ ID NO: 4214516 - DNA, 25 bp, Homo sapien
ggatttggatagtaaaggttccaga

SEQ ID NO: 4214517 - DNA, 25 bp, Homo sapien
gatagtaaaggttccagaaatagag

SEQ ID NO: 4214518 - DNA, 25 bp, Homo sapien
taaaggttccagaaatagagccatc

SEQ ID NO: 4214519 - DNA, 25 bp, Homo sapien
gagttcccttgttgttgcttggatg

SEQ ID NO: 4214520 - DNA, 25 bp, Homo sapien
actcaatgagttcccttgttgttgc

SEQ ID NO: 4214521 - DNA, 25 bp, Homo sapien
ccactcaatgagttcccttgttgtt

SEQ ID NO: 4214522 - DNA, 25 bp, Homo sapien
aatgagttcccttgttgttgcttgg

SEQ ID NO: 4214523 - DNA, 25 bp, Homo sapien
ttccatggtaggctgtgttatggtc

SEQ ID NO: 4214524 - DNA, 25 bp, Homo sapien
gctgtgttatggtcttcaataggga

SEQ ID NO: 4214525 - DNA, 25 bp, Homo sapien
ttatggtcttcaatagggaactgct

SEQ ID NO: 4214526 - DNA, 25 bp, Homo sapien
ggtaggctgtgttatggtcttcaat

SEQ ID NO: 4214527 - DNA, 25 bp, Homo sapien
aggaagcaaaagctgtctggattca

SEQ ID NO: 4214528 - DNA, 25 bp, Homo sapien
taacgctgaatttgtatagggatgg

SEQ ID NO: 4214529 - DNA, 25 bp, Homo sapien
tgaaatttgcacttgatgctcaaga

SEQ ID NO: 4214530 - DNA, 25 bp, Homo sapien
tctggattcaggctgataacgctga

SEQ ID NO: 4214531 - DNA, 25 bp, Homo sapien
ccagtggtcccccactcagtctctg

SEQ ID NO: 4214532 - DNA, 25 bp, Homo sapien
cctccaactgcaaaagccagtggtc

SEQ ID NO: 4214533 - DNA, 25 bp, Homo sapien
ggtcccccactcagtctctgctcca

SEQ ID NO: 4214534 - DNA, 25 bp, Homo sapien
ctcctccaactgcaaaagccagtgg

SEQ ID NO: 4214535 - DNA, 25 bp, Homo sapien
tttttccttgtcttccattttgctc

SEQ ID NO: 4214536 - DNA, 25 bp, Homo sapien
tatttttccttgtcttccattttgc

SEQ ID NO: 4214537 - DNA, 25 bp, Homo sapien
tttccttgtcttccattttgctcac

SEQ ID NO: 4214538 - DNA, 25 bp, Homo sapien
ctggttatttttccttgtcttccat

SEQ ID NO: 4214539 - DNA, 25 bp, Homo sapien
tctggtatcttgaaagtcagatcta

SEQ ID NO: 4214540 - DNA, 25 bp, Homo sapien
tgctggtaactctgtggattttatt

SEQ ID NO: 4214541 - DNA, 25 bp, Homo sapien
tcttgaaagtcagatctaattgaat

SEQ ID NO: 4214542 - DNA, 25 bp, Homo sapien
aatctctggtatcttgaaagtcaga

SEQ ID NO: 4214543 - DNA, 25 bp, Homo sapien
cattcacagtggaaggtgcccagag

SEQ ID NO: 4214544 - DNA, 25 bp, Homo sapien
tatgcaggtgcgttcatcagcatgc

SEQ ID NO: 4214545 - DNA, 25 bp, Homo sapien
tctctatcccgtatcacattcacag

SEQ ID NO: 4214546 - DNA, 25 bp, Homo sapien
cagagtgttaatacagcgctgctgg

SEQ ID NO: 4214547 - DNA, 25 bp, Homo sapien
taaacatgcgtgtattaatgtcccc

SEQ ID NO: 4214548 - DNA, 25 bp, Homo sapien
tactagctggagactttacagattg

SEQ ID NO: 4214549 - DNA, 25 bp, Homo sapien
catgtatcaataatcctgctgctct

SEQ ID NO: 4214550 - DNA, 25 bp, Homo sapien
gatattgagctccttgaagcctagg

SEQ ID NO: 4214551 - DNA, 25 bp, Homo sapien
gaattaatacagaaacagagaacta

SEQ ID NO: 4214552 - DNA, 25 bp, Homo sapien
tactatgcagccatgtacaagaaca

SEQ ID NO: 4214553 - DNA, 25 bp, Homo sapien
ctaaaagtaggactatcattcgacc

SEQ ID NO: 4214554 - DNA, 25 bp, Homo sapien
tatgttcactcgaatgttcattgca

SEQ ID NO: 4214555 - DNA, 25 bp, Homo sapien
gggagaacaccaatagcaaagcaaa

SEQ ID NO: 4214556 - DNA, 25 bp, Homo sapien
cagtcccgagaccacatagatgaga

SEQ ID NO: 4214557 - DNA, 25 bp, Homo sapien
tgcttaagctcacatgccaacttga

SEQ ID NO: 4214558 - DNA, 25 bp, Homo sapien
gaattttattgtgccacagtcccga

SEQ ID NO: 4214559 - DNA, 25 bp, Homo sapien
gtaactatcgaacacttggcaaaac

SEQ ID NO: 4214560 - DNA, 25 bp, Homo sapien
tactggtttatgatttggtgttcag

SEQ ID NO: 4214561 - DNA, 25 bp, Homo sapien
gattcgattacgtccacttggtctc

SEQ ID NO: 4214562 - DNA, 25 bp, Homo sapien
gagaatggatgcagaagtaactatc

SEQ ID NO: 4214563 - DNA, 25 bp, Homo sapien
tctagaaattctaagcggcctgact

SEQ ID NO: 4214564 - DNA, 25 bp, Homo sapien
tgctatgcccaagtttgccacaagt

SEQ ID NO: 4214565 - DNA, 25 bp, Homo sapien
tcccagaggctgtgatcattgcacc

SEQ ID NO: 4214566 - DNA, 25 bp, Homo sapien
caacgctagaggaagtgctatgccc

SEQ ID NO: 4214567 - DNA, 25 bp, Homo sapien
tggcgtcaccatttacatttttgta

SEQ ID NO: 4214568 - DNA, 25 bp, Homo sapien
aaaagatagctttgctcaatacagt

SEQ ID NO: 4214569 - DNA, 25 bp, Homo sapien
tagtttttgttcgtctgggaaagca

SEQ ID NO: 4214570 - DNA, 25 bp, Homo sapien
aatgttctggtagtgataaattccc

SEQ ID NO: 4214571 - DNA, 25 bp, Homo sapien
tcataagttttggtgaattgggtct

SEQ ID NO: 4214572 - DNA, 25 bp, Homo sapien
tgtagcaaaattgcgaggaaggtac

SEQ ID NO: 4214573 - DNA, 25 bp, Homo sapien
tacattgatgcattatggtcaccca

SEQ ID NO: 4214574 - DNA, 25 bp, Homo sapien
caacattacccaacagtatggtacg

SEQ ID NO: 4214575 - DNA, 25 bp, Homo sapien
gaaagcaattaagcagcaatagtgt

SEQ ID NO: 4214576 - DNA, 25 bp, Homo sapien
cagctggtaccctgcatgacaggca

SEQ ID NO: 4214577 - DNA, 25 bp, Homo sapien
cactctgacatatgtgaacacatcc

SEQ ID NO: 4214578 - DNA, 25 bp, Homo sapien
tgacaggcacacctggccgtgccat

SEQ ID NO: 4214579 - DNA, 25 bp, Homo sapien
tatcttcaggcagctggtaccctgc

SEQ ID NO: 4214580 - DNA, 25 bp, Homo sapien
gccagtttggcaggcacaagtgaaa

SEQ ID NO: 4214581 - DNA, 25 bp, Homo sapien
ccagtttggcaggcacaagtgaaag

SEQ ID NO: 4214582 - DNA, 25 bp, Homo sapien
aagccagtttggcaggcacaagtga

SEQ ID NO: 4214583 - DNA, 25 bp, Homo sapien
tggccacagtaagaaagaccttcag

SEQ ID NO: 4214584 - DNA, 25 bp, Homo sapien
ctgggctgtgactgttgccaattac

SEQ ID NO: 4214585 - DNA, 25 bp, Homo sapien
gaatgccaattgtcctgagcacaca

SEQ ID NO: 4214586 - DNA, 25 bp, Homo sapien
caatttggctggtacatgctactaa

SEQ ID NO: 4214587 - DNA, 25 bp, Homo sapien
taactagggtcatgttgatgcacta

SEQ ID NO: 4214588 - DNA, 25 bp, Homo sapien
tgagcctcagcagatgaatgccaat

SEQ ID NO: 4214589 - DNA, 25 bp, Homo sapien
ttattagcataacagacaaacctga

SEQ ID NO: 4214590 - DNA, 25 bp, Homo sapien
acctgaatatatgtcagtaacggac

SEQ ID NO: 4214591 - DNA, 25 bp, Homo sapien
gaatatatgtcagtaacggacacat

SEQ ID NO: 4214592 - DNA, 25 bp, Homo sapien
aaaatgagcaaaagaggattattag

SEQ ID NO: 4214593 - DNA, 25 bp, Homo sapien
tggttacaggaacaacggggagcac

SEQ ID NO: 4214594 - DNA, 25 bp, Homo sapien
catcagaatcaagctggtgtccatg

SEQ ID NO: 4214595 - DNA, 25 bp, Homo sapien
atttcatgttcacggtgatgggaac

SEQ ID NO: 4214596 - DNA, 25 bp, Homo sapien
acaaacactattgttcttttcacag

SEQ ID NO: 4214597 - DNA, 25 bp, Homo sapien
acagcaggcttctccattctcacat

SEQ ID NO: 4214598 - DNA, 25 bp, Homo sapien
cagcaggcttctccattctcacatt

SEQ ID NO: 4214599 - DNA, 25 bp, Homo sapien
atcacattcacaaccattggaagtg

SEQ ID NO: 4214600 - DNA, 25 bp, Homo sapien
aagtgatctgaaagccttcctgaca

SEQ ID NO: 4214601 - DNA, 25 bp, Homo sapien
catttccaattctgtagccttcttc

SEQ ID NO: 4214602 - DNA, 25 bp, Homo sapien
tcatttccaattctgtagccttctt

SEQ ID NO: 4214603 - DNA, 25 bp, Homo sapien
gtcatttccaattctgtagccttct

SEQ ID NO: 4214604 - DNA, 25 bp, Homo sapien
tcttcttcctctagctcatcatcat

SEQ ID NO: 4214605 - DNA, 25 bp, Homo sapien
tcttcctctagctcatcatcatcta

SEQ ID NO: 4214606 - DNA, 25 bp, Homo sapien
tcctctagctcatcatcatctaaag

SEQ ID NO: 4214607 - DNA, 25 bp, Homo sapien
ttcttcctctagctcatcatcatct

SEQ ID NO: 4214608 - DNA, 25 bp, Homo sapien
aagctgttgaggtgggctcttgaat

SEQ ID NO: 4214609 - DNA, 25 bp, Homo sapien
cagaaaagtagcaacataatgaagc

SEQ ID NO: 4214610 - DNA, 25 bp, Homo sapien
tagcaacataatgaagctgttgagg

SEQ ID NO: 4214611 - DNA, 25 bp, Homo sapien
tcttgaatagaagacctggaaacct

SEQ ID NO: 4214612 - DNA, 25 bp, Homo sapien
attgtgcaaagcagtcagttctcta

SEQ ID NO: 4214613 - DNA, 25 bp, Homo sapien
ttgtgcaaagcagtcagttctctat

SEQ ID NO: 4214614 - DNA, 25 bp, Homo sapien
aattgtgcaaagcagtcagttctct

SEQ ID NO: 4214615 - DNA, 25 bp, Homo sapien
atgtgataccatcttagttcgtcca

SEQ ID NO: 4214616 - DNA, 25 bp, Homo sapien
cttagttcgtccataattgactacg

SEQ ID NO: 4214617 - DNA, 25 bp, Homo sapien
gataccatcttagttcgtccataat

SEQ ID NO: 4214618 - DNA, 25 bp, Homo sapien
cgtccataattgactacgtaaccaa

SEQ ID NO: 4214619 - DNA, 25 bp, Homo sapien
caattgtgtccaaagatgtgatcta

SEQ ID NO: 4214620 - DNA, 25 bp, Homo sapien
tgcaattgtgtccaaagatgtgatc

SEQ ID NO: 4214621 - DNA, 25 bp, Homo sapien
aattgtgtccaaagatgtgatctaa

SEQ ID NO: 4214622 - DNA, 25 bp, Homo sapien
gcaattgtgtccaaagatgtgatct

SEQ ID NO: 4214623 - DNA, 25 bp, Homo sapien
cattcatgcagtccttgcagctcaa

SEQ ID NO: 4214624 - DNA, 25 bp, Homo sapien
attcatgcagtccttgcagctcaag

SEQ ID NO: 4214625 - DNA, 25 bp, Homo sapien
tccattcatgcagtccttgcagctc

SEQ ID NO: 4214626 - DNA, 25 bp, Homo sapien
cctccattcatgcagtccttgcagc

SEQ ID NO: 4214627 - DNA, 25 bp, Homo sapien
ttacaaagaatgacacggcaacctg

SEQ ID NO: 4214628 - DNA, 25 bp, Homo sapien
ttcattacaaagaatgacacggcaa

SEQ ID NO: 4214629 - DNA, 25 bp, Homo sapien
cattacaaagaatgacacggcaacc

SEQ ID NO: 4214630 - DNA, 25 bp, Homo sapien
acaaagaatgacacggcaacctgct

SEQ ID NO: 4214631 - DNA, 25 bp, Homo sapien
aggagtagtttggagcacttaccca

SEQ ID NO: 4214632 - DNA, 25 bp, Homo sapien
tcattgggaatagcttgtcagggcc

SEQ ID NO: 4214633 - DNA, 25 bp, Homo sapien
gtagcaaacagtcaagcaagtccat

SEQ ID NO: 4214634 - DNA, 25 bp, Homo sapien
cagctgtgttcctcccatatgtaga

SEQ ID NO: 4214635 - DNA, 25 bp, Homo sapien
gcacccctggccaatagggatttta

SEQ ID NO: 4214636 - DNA, 25 bp, Homo sapien
tagccaatgaataactggtctctgc

SEQ ID NO: 4214637 - DNA, 25 bp, Homo sapien
cccaaaccatagctggatgatgtaa

SEQ ID NO: 4214638 - DNA, 25 bp, Homo sapien
tctactcaacgggaaaactgacttc

SEQ ID NO: 4214639 - DNA, 25 bp, Homo sapien
catgtaggaattgtggcctcttcac

SEQ ID NO: 4214640 - DNA, 25 bp, Homo sapien
agctccccaattctatcaactgtga

SEQ ID NO: 4214641 - DNA, 25 bp, Homo sapien
tgtgctttattaacccatgtaggaa

SEQ ID NO: 4214642 - DNA, 25 bp, Homo sapien
agcagggaccttactgcatctcaga

SEQ ID NO: 4214643 - DNA, 25 bp, Homo sapien
tgtggcaatggccattgttggcaca

SEQ ID NO: 4214644 - DNA, 25 bp, Homo sapien
caatggccattgttggcacagttac

SEQ ID NO: 4214645 - DNA, 25 bp, Homo sapien
ggcgccatacatcctgtggcaatgg

SEQ ID NO: 4214646 - DNA, 25 bp, Homo sapien
cctggctcacacatatgggcgccat

SEQ ID NO: 4214647 - DNA, 25 bp, Homo sapien
ttggatcctttcgtacacccaccag

SEQ ID NO: 4214648 - DNA, 25 bp, Homo sapien
caattgccagggatagtacagagct

SEQ ID NO: 4214649 - DNA, 25 bp, Homo sapien
gttatgatgccaccatgtagggcca

SEQ ID NO: 4214650 - DNA, 25 bp, Homo sapien
gctgttgcctgccttaatgtaggcc

SEQ ID NO: 4214651 - DNA, 25 bp, Homo sapien
gcattccagggtattctcctccaca

SEQ ID NO: 4214652 - DNA, 25 bp, Homo sapien
gcaggtgcaactaccatttttggca

SEQ ID NO: 4214653 - DNA, 25 bp, Homo sapien
actaccatttttggcactgcattcc

SEQ ID NO: 4214654 - DNA, 25 bp, Homo sapien
gttgccttggtaaccagatttgcag

SEQ ID NO: 4214655 - DNA, 25 bp, Homo sapien
gagcaatatctgtatatcaggactg

SEQ ID NO: 4214656 - DNA, 25 bp, Homo sapien
tcccatgaatgcacaagccagagat

SEQ ID NO: 4214657 - DNA, 25 bp, Homo sapien
tgtaggtacctaggaaagagcatcc

SEQ ID NO: 4214658 - DNA, 25 bp, Homo sapien
tagtgccttgggttgattagttcag

SEQ ID NO: 4214659 - DNA, 25 bp, Homo sapien
ccagagattatggtgacctctctat

SEQ ID NO: 4214660 - DNA, 25 bp, Homo sapien
cacagtgggaatctcagaagcattt

SEQ ID NO: 4214661 - DNA, 25 bp, Homo sapien
taatatgttttccagagattatggt

SEQ ID NO: 4214662 - DNA, 25 bp, Homo sapien
tggacaaagttatctgattgaaaaa

SEQ ID NO: 4214663 - DNA, 25 bp, Homo sapien
tttcacagggtgcagaggagaacca

SEQ ID NO: 4214664 - DNA, 25 bp, Homo sapien
gtgtaatcaggagtgcagtcacaat

SEQ ID NO: 4214665 - DNA, 25 bp, Homo sapien
atcaggagtgcagtcacaatttcca

SEQ ID NO: 4214666 - DNA, 25 bp, Homo sapien
acagggtgcagaggagaaccagccc

SEQ ID NO: 4214667 - DNA, 25 bp, Homo sapien
tggttatttcgtctaggtttatgac

SEQ ID NO: 4214668 - DNA, 25 bp, Homo sapien
ttggttatttcgtctaggtttatga

SEQ ID NO: 4214669 - DNA, 25 bp, Homo sapien
tatttcgtctaggtttatgacttac

SEQ ID NO: 4214670 - DNA, 25 bp, Homo sapien
ttatttcgtctaggtttatgactta

SEQ ID NO: 4214671 - DNA, 25 bp, Homo sapien
tctgtgagcaccataacgggatatt

SEQ ID NO: 4214672 - DNA, 25 bp, Homo sapien
cattttttgtgaggtacgcgtgaag

SEQ ID NO: 4214673 - DNA, 25 bp, Homo sapien
tactaaaattggactggactaggag

SEQ ID NO: 4214674 - DNA, 25 bp, Homo sapien
tcttatcaagggtgtgagagtgcct

SEQ ID NO: 4214675 - DNA, 25 bp, Homo sapien
tgagagccagattggtaagggaaat

SEQ ID NO: 4214676 - DNA, 25 bp, Homo sapien
ttgctgatacttcatcgggctggac

SEQ ID NO: 4214677 - DNA, 25 bp, Homo sapien
ccagattggtaagggaaatgcatct

SEQ ID NO: 4214678 - DNA, 25 bp, Homo sapien
catcgggctggaccgcctgctgaga

SEQ ID NO: 4214679 - DNA, 25 bp, Homo sapien
ctgaatttgcacaatagctttttga

SEQ ID NO: 4214680 - DNA, 25 bp, Homo sapien
ggctttatatcagctgcaccatgac

SEQ ID NO: 4214681 - DNA, 25 bp, Homo sapien
tagggtatacgtaagcatggtcaaa

SEQ ID NO: 4214682 - DNA, 25 bp, Homo sapien
tggagtacagaccaataaagctgtg

SEQ ID NO: 4214683 - DNA, 25 bp, Homo sapien
tgatctaattgagacactggaaggt

SEQ ID NO: 4214684 - DNA, 25 bp, Homo sapien
tttcaacaatgttttcggctatgtt

SEQ ID NO: 4214685 - DNA, 25 bp, Homo sapien
taaattgagtatgggctattaatag

SEQ ID NO: 4214686 - DNA, 25 bp, Homo sapien
gctatgttagcaacgatttttgcaa

SEQ ID NO: 4214687 - DNA, 25 bp, Homo sapien
tatgggctattaatagcatttgaca

SEQ ID NO: 4214688 - DNA, 25 bp, Homo sapien
tcccacacaggaacatgggtccagt

SEQ ID NO: 4214689 - DNA, 25 bp, Homo sapien
gcacctgccctacctaaagaagtaa

SEQ ID NO: 4214690 - DNA, 25 bp, Homo sapien
gtaagtaggtgaagtctcagcaggc

SEQ ID NO: 4214691 - DNA, 25 bp, Homo sapien
tcagcaggcaaaacacgagggagtg

SEQ ID NO: 4214692 - DNA, 25 bp, Homo sapien
atccttctcaggaattttatatctg

SEQ ID NO: 4214693 - DNA, 25 bp, Homo sapien
gcaggtgagagagtgattatctttt

SEQ ID NO: 4214694 - DNA, 25 bp, Homo sapien
catccttctcaggaattttatatct

SEQ ID NO: 4214695 - DNA, 25 bp, Homo sapien
cagcaggtgagagagtgattatctt

SEQ ID NO: 4214696 - DNA, 25 bp, Homo sapien
caatagctatggatgtcaacagaag

SEQ ID NO: 4214697 - DNA, 25 bp, Homo sapien
gatatagtgcttttggtcacccaag

SEQ ID NO: 4214698 - DNA, 25 bp, Homo sapien
tcatagtcacaagaacaagcaacag

SEQ ID NO: 4214699 - DNA, 25 bp, Homo sapien
gaattcttagatgaacagagtgcgg

SEQ ID NO: 4214700 - DNA, 25 bp, Homo sapien
gcacgttgtgcctccgaactctgtt

SEQ ID NO: 4214701 - DNA, 25 bp, Homo sapien
caacgaatagcacgttgtgcctccg

SEQ ID NO: 4214702 - DNA, 25 bp, Homo sapien
gccccaggtacaacgaatagcacgt

SEQ ID NO: 4214703 - DNA, 25 bp, Homo sapien
gtgattccgccccaggtacaacgaa

SEQ ID NO: 4214704 - DNA, 25 bp, Homo sapien
cactgatttgcctactttggagaac

SEQ ID NO: 4214705 - DNA, 25 bp, Homo sapien
tagagaaggctgacacaaggtagac

SEQ ID NO: 4214706 - DNA, 25 bp, Homo sapien
tacaatgcagtatcctttgacccag

SEQ ID NO: 4214707 - DNA, 25 bp, Homo sapien
tgaaaagacgcaaaagctcactagc

SEQ ID NO: 4214708 - DNA, 25 bp, Homo sapien
gaatccacttgggtcttgaactatg

SEQ ID NO: 4214709 - DNA, 25 bp, Homo sapien
cctcagtgccatctagttaaagaca

SEQ ID NO: 4214710 - DNA, 25 bp, Homo sapien
acatgtcacttacaccgggttttga

SEQ ID NO: 4214711 - DNA, 25 bp, Homo sapien
tatgtggcgtattctcaactcaggt

SEQ ID NO: 4214712 - DNA, 25 bp, Homo sapien
gccatggcagaagtttgaatgtcac

SEQ ID NO: 4214713 - DNA, 25 bp, Homo sapien
catgttcagcggattcagtttcaga

SEQ ID NO: 4214714 - DNA, 25 bp, Homo sapien
gaaatttggttagaacagcttagca

SEQ ID NO: 4214715 - DNA, 25 bp, Homo sapien
gctaccttggaaatgtaccgtctct

SEQ ID NO: 4214716 - DNA, 25 bp, Homo sapien
gacagctgtcacctccaaactgaat

SEQ ID NO: 4214717 - DNA, 25 bp, Homo sapien
aaaacagtcgttgcttatgccaatc

SEQ ID NO: 4214718 - DNA, 25 bp, Homo sapien
ttaaaaaacagtcgttgcttatgcc

SEQ ID NO: 4214719 - DNA, 25 bp, Homo sapien
gccaatctctacactacgatctatg

SEQ ID NO: 4214720 - DNA, 25 bp, Homo sapien
cctaatagttgcatttcgtgggaaa

SEQ ID NO: 4214721 - DNA, 25 bp, Homo sapien
tgggaaaggtctgagcacaccagct

SEQ ID NO: 4214722 - DNA, 25 bp, Homo sapien
tgtgcaacacgatggtacctaatag

SEQ ID NO: 4214723 - DNA, 25 bp, Homo sapien
gcttgctgtgagagtatatttgcta

SEQ ID NO: 4214724 - DNA, 25 bp, Homo sapien
atatctttgtacaatccgaacttac

SEQ ID NO: 4214725 - DNA, 25 bp, Homo sapien
tggagaacttcagcaatgcactttt

SEQ ID NO: 4214726 - DNA, 25 bp, Homo sapien
aagtctcaacgtctaaatttatagg

SEQ ID NO: 4214727 - DNA, 25 bp, Homo sapien
caatgccattgaatgtagttctttc

SEQ ID NO: 4214728 - DNA, 25 bp, Homo sapien
cagctagggaatttaacatgcagag

SEQ ID NO: 4214729 - DNA, 25 bp, Homo sapien
ggaatactaatgtctgaccaccgta

SEQ ID NO: 4214730 - DNA, 25 bp, Homo sapien
ggagaaagttatcacagacctagaa

SEQ ID NO: 4214731 - DNA, 25 bp, Homo sapien
ggaagccaggtcagtttgcccagtg

SEQ ID NO: 4214732 - DNA, 25 bp, Homo sapien
tccatggtatgaggtagaggctgtc

SEQ ID NO: 4214733 - DNA, 25 bp, Homo sapien
tagagcgacagtcacacacttgatg

SEQ ID NO: 4214734 - DNA, 25 bp, Homo sapien
taagacattactgcacagctggagc

SEQ ID NO: 4214735 - DNA, 25 bp, Homo sapien
tgaggagcccctcagatagagcgac

SEQ ID NO: 4214736 - DNA, 25 bp, Homo sapien
tctaactctgagtcaaaaatgctta

SEQ ID NO: 4214737 - DNA, 25 bp, Homo sapien
cattgttaacttgaccttagtctct

SEQ ID NO: 4214738 - DNA, 25 bp, Homo sapien
caaaaatgcttaaagacctgggcat

SEQ ID NO: 4214739 - DNA, 25 bp, Homo sapien
aacttgaccttagtctctaactctg

SEQ ID NO: 4214740 - DNA, 25 bp, Homo sapien
ctcatctctgaggaccatattgcct

SEQ ID NO: 4214741 - DNA, 25 bp, Homo sapien
tcatctctgaggaccatattgcctt

SEQ ID NO: 4214742 - DNA, 25 bp, Homo sapien
catctctgaggaccatattgccttc

SEQ ID NO: 4214743 - DNA, 25 bp, Homo sapien
atctctgaggaccatattgccttct

SEQ ID NO: 4214744 - DNA, 25 bp, Homo sapien
gggcaccccactatctagataacag

SEQ ID NO: 4214745 - DNA, 25 bp, Homo sapien
tcagtgtcctatggctgctgcagta

SEQ ID NO: 4214746 - DNA, 25 bp, Homo sapien
gattcttgggataaggtcaggagcc

SEQ ID NO: 4214747 - DNA, 25 bp, Homo sapien
cattgggcctactcaaataatctag

SEQ ID NO: 4214748 - DNA, 25 bp, Homo sapien
tggcgcttagcatcaggagtacatg

SEQ ID NO: 4214749 - DNA, 25 bp, Homo sapien
cttggcgcttagcatcaggagtaca

SEQ ID NO: 4214750 - DNA, 25 bp, Homo sapien
gcttagcatcaggagtacatgaaag

SEQ ID NO: 4214751 - DNA, 25 bp, Homo sapien
ggagtacatgaaagaattaacgtta

SEQ ID NO: 4214752 - DNA, 25 bp, Homo sapien
cagtcctttctatatgtgcctggtg

SEQ ID NO: 4214753 - DNA, 25 bp, Homo sapien
ggttacagtcctttctatatgtgcc

SEQ ID NO: 4214754 - DNA, 25 bp, Homo sapien
ctttctatatgtgcctggtggacaa

SEQ ID NO: 4214755 - DNA, 25 bp, Homo sapien
ctggttacagtcctttctatatgtg

SEQ ID NO: 4214756 - DNA, 25 bp, Homo sapien
tctgctataggaatgactagggagg

SEQ ID NO: 4214757 - DNA, 25 bp, Homo sapien
cagaccctggaattaacttactttg

SEQ ID NO: 4214758 - DNA, 25 bp, Homo sapien
tattacacaataaggagccaactgg

SEQ ID NO: 4214759 - DNA, 25 bp, Homo sapien
ttaattgttcctaagcagaccctgg

SEQ ID NO: 4214760 - DNA, 25 bp, Homo sapien
taagccagctacaccttttatggat

SEQ ID NO: 4214761 - DNA, 25 bp, Homo sapien
gccagctacaccttttatggatatt

SEQ ID NO: 4214762 - DNA, 25 bp, Homo sapien
gctgagagaaaattttgattctcca

SEQ ID NO: 4214763 - DNA, 25 bp, Homo sapien
ttttaagccagctacaccttttatg

SEQ ID NO: 4214764 - DNA, 25 bp, Homo sapien
caatatggactatacgtgcctttcg

SEQ ID NO: 4214765 - DNA, 25 bp, Homo sapien
tggactatacgtgcctttcgggtat

SEQ ID NO: 4214766 - DNA, 25 bp, Homo sapien
catcttttggcaatatggactatac

SEQ ID NO: 4214767 - DNA, 25 bp, Homo sapien
cttttggcaatatggactatacgtg

SEQ ID NO: 4214768 - DNA, 25 bp, Homo sapien
ctgagccacaggaacgccattgaac

SEQ ID NO: 4214769 - DNA, 25 bp, Homo sapien
tgagccacaggaacgccattgaaca

SEQ ID NO: 4214770 - DNA, 25 bp, Homo sapien
ggaacgccattgaacacagttctgc

SEQ ID NO: 4214771 - DNA, 25 bp, Homo sapien
ccacaggaacgccattgaacacagt

SEQ ID NO: 4214772 - DNA, 25 bp, Homo sapien
gttcccattcggccaggtggacact

SEQ ID NO: 4214773 - DNA, 25 bp, Homo sapien
ccattcggccaggtggacactgaca

SEQ ID NO: 4214774 - DNA, 25 bp, Homo sapien
ctggttcccattcggccaggtggac

SEQ ID NO: 4214775 - DNA, 25 bp, Homo sapien
tcccattcggccaggtggacactga

SEQ ID NO: 4214776 - DNA, 25 bp, Homo sapien
gttggcaccaaatctgctttcgcag

SEQ ID NO: 4214777 - DNA, 25 bp, Homo sapien
ccggctcgggagcatgtactttcat

SEQ ID NO: 4214778 - DNA, 25 bp, Homo sapien
catataattatcttcgttggcacca

SEQ ID NO: 4214779 - DNA, 25 bp, Homo sapien
tagtgcttggacagagaaggtgacc

SEQ ID NO: 4214780 - DNA, 25 bp, Homo sapien
tcatgtgctccatagcaaaactttt

SEQ ID NO: 4214781 - DNA, 25 bp, Homo sapien
cttcatgtgctccatagcaaaactt

SEQ ID NO: 4214782 - DNA, 25 bp, Homo sapien
ttcatgtgctccatagcaaaacttt

SEQ ID NO: 4214783 - DNA, 25 bp, Homo sapien
caaacttgaatgaggaaataagacc

SEQ ID NO: 4214784 - DNA, 25 bp, Homo sapien
gagccactgtaactattatttcccg

SEQ ID NO: 4214785 - DNA, 25 bp, Homo sapien
ttccatgaacccctgtatctctgca

SEQ ID NO: 4214786 - DNA, 25 bp, Homo sapien
taaggctactatatttccagcaact

SEQ ID NO: 4214787 - DNA, 25 bp, Homo sapien
gattagaggtgcatcctatggctcc

SEQ ID NO: 4214788 - DNA, 25 bp, Homo sapien
tcaagttccctacatggtcaccaag

SEQ ID NO: 4214789 - DNA, 25 bp, Homo sapien
ggcaggatgggaattcagctcatca

SEQ ID NO: 4214790 - DNA, 25 bp, Homo sapien
tcaccaggtagaagttcaagttccc

SEQ ID NO: 4214791 - DNA, 25 bp, Homo sapien
caggttgggtaatttccatcattcc

SEQ ID NO: 4214792 - DNA, 25 bp, Homo sapien
tgctgttgaactcatccattgagct

SEQ ID NO: 4214793 - DNA, 25 bp, Homo sapien
ccatgacttttgatgagaacgctgc

SEQ ID NO: 4214794 - DNA, 25 bp, Homo sapien
ctcttctgggactcagatgacataa

SEQ ID NO: 4214795 - DNA, 25 bp, Homo sapien
tcaagtctcgctcagacttaagcag

SEQ ID NO: 4214796 - DNA, 25 bp, Homo sapien
caagtctcgctcagacttaagcagc

SEQ ID NO: 4214797 - DNA, 25 bp, Homo sapien
taggggcgcaatgttagctcacggc

SEQ ID NO: 4214798 - DNA, 25 bp, Homo sapien
tgtaggggcgcaatgttagctcacg

SEQ ID NO: 4214799 - DNA, 25 bp, Homo sapien
cagtattctcaaaagtagatccttt

SEQ ID NO: 4214800 - DNA, 25 bp, Homo sapien
atgacagtattctcaaaagtagatc

SEQ ID NO: 4214801 - DNA, 25 bp, Homo sapien
tatatctttatctccactcatggcc

SEQ ID NO: 4214802 - DNA, 25 bp, Homo sapien
tatctttatctccactcatggccat

SEQ ID NO: 4214803 - DNA, 25 bp, Homo sapien
ctttatatctttatctccactcatg

SEQ ID NO: 4214804 - DNA, 25 bp, Homo sapien
ttatatctttatctccactcatggc

SEQ ID NO: 4214805 - DNA, 25 bp, Homo sapien
ccatctctgtcatttactcccagga

SEQ ID NO: 4214806 - DNA, 25 bp, Homo sapien
tatgcatcatattcttttgccctct

SEQ ID NO: 4214807 - DNA, 25 bp, Homo sapien
caccatctctgtcatttactcccag

SEQ ID NO: 4214808 - DNA, 25 bp, Homo sapien
catatatgcatcatattcttttgcc

SEQ ID NO: 4214809 - DNA, 25 bp, Homo sapien
tctggctccagttctcccacggggg

SEQ ID NO: 4214810 - DNA, 25 bp, Homo sapien
ccttcacagtcacaaagttgatggc

SEQ ID NO: 4214811 - DNA, 25 bp, Homo sapien
ggtggcagaaggtttctccttcaca

SEQ ID NO: 4214812 - DNA, 25 bp, Homo sapien
cagtcacaaagttgatggcaatcat

SEQ ID NO: 4214813 - DNA, 25 bp, Homo sapien
agtcctgacgtgctttgggtcctac

SEQ ID NO: 4214814 - DNA, 25 bp, Homo sapien
ggagtcctgacgtgctttgggtcct

SEQ ID NO: 4214815 - DNA, 25 bp, Homo sapien
atctctgtataacgatgggtcaggg

SEQ ID NO: 4214816 - DNA, 25 bp, Homo sapien
ctacagatctctgtataacgatggg

SEQ ID NO: 4214817 - DNA, 25 bp, Homo sapien
tgtgtaggccatgactttatttaga

SEQ ID NO: 4214818 - DNA, 25 bp, Homo sapien
cttgtaggacatctgtgtaggccat

SEQ ID NO: 4214819 - DNA, 25 bp, Homo sapien
ttagcaatgaagcttcaagccttct

SEQ ID NO: 4214820 - DNA, 25 bp, Homo sapien
aataacccttcttttagcaatgaag

SEQ ID NO: 4214821 - DNA, 25 bp, Homo sapien
cttcagtagagctttagtggttgca

SEQ ID NO: 4214822 - DNA, 25 bp, Homo sapien
tgaacgcccaatacaggagactaac

SEQ ID NO: 4214823 - DNA, 25 bp, Homo sapien
tagtggttgcatcgtgaaggacaca

SEQ ID NO: 4214824 - DNA, 25 bp, Homo sapien
aaggacacagggaaagttggatagt

SEQ ID NO: 4214825 - DNA, 25 bp, Homo sapien
tcaccaattgaaaagctgttagtat

SEQ ID NO: 4214826 - DNA, 25 bp, Homo sapien
tatttggatattgaggatcatctga

SEQ ID NO: 4214827 - DNA, 25 bp, Homo sapien
cacaggttgggtccactgtcttaaa

SEQ ID NO: 4214828 - DNA, 25 bp, Homo sapien
cagctcccattgagagggctgcagt

SEQ ID NO: 4214829 - DNA, 25 bp, Homo sapien
tccattgcttaattgaatacgacca

SEQ ID NO: 4214830 - DNA, 25 bp, Homo sapien
gtctggcaaagtgaatgtccaatta

SEQ ID NO: 4214831 - DNA, 25 bp, Homo sapien
tagtcctcagactatgcaacttggg

SEQ ID NO: 4214832 - DNA, 25 bp, Homo sapien
gatgccatgtttacctttcaaccaa

SEQ ID NO: 4214833 - DNA, 25 bp, Homo sapien
tctggaatgaggcaaacctgagttc

SEQ ID NO: 4214834 - DNA, 25 bp, Homo sapien
taggagccatatgatccaagcaagt

SEQ ID NO: 4214835 - DNA, 25 bp, Homo sapien
tgcatgcatgctgtagtcaagaacg

SEQ ID NO: 4214836 - DNA, 25 bp, Homo sapien
acctgagttctgctccacttaggag

SEQ ID NO: 4214837 - DNA, 25 bp, Homo sapien
caatggggcaaattgcccttgagaa

SEQ ID NO: 4214838 - DNA, 25 bp, Homo sapien
tcaatggggcaaattgcccttgaga

SEQ ID NO: 4214839 - DNA, 25 bp, Homo sapien
ttcctgtattgccagaaggtcctga

SEQ ID NO: 4214840 - DNA, 25 bp, Homo sapien
cttcttcctgtattgccagaaggtc

SEQ ID NO: 4214841 - DNA, 25 bp, Homo sapien
tcctgtattgccagaaggtcctgac

SEQ ID NO: 4214842 - DNA, 25 bp, Homo sapien
tcttcctgtattgccagaaggtcct

SEQ ID NO: 4214843 - DNA, 25 bp, Homo sapien
ggaggttggttaacaatatcagagc

SEQ ID NO: 4214844 - DNA, 25 bp, Homo sapien
tagaactgtcaagtagaggattgtc

SEQ ID NO: 4214845 - DNA, 25 bp, Homo sapien
gagtaatgaaacatgaaagctacct

SEQ ID NO: 4214846 - DNA, 25 bp, Homo sapien
ggttctataacgacagcacttgtct

SEQ ID NO: 4214847 - DNA, 25 bp, Homo sapien
taatgtactttaaaccacagcccca

SEQ ID NO: 4214848 - DNA, 25 bp, Homo sapien
cataataatgtactttaaaccacag

SEQ ID NO: 4214849 - DNA, 25 bp, Homo sapien
taataatgtactttaaaccacagcc

SEQ ID NO: 4214850 - DNA, 25 bp, Homo sapien
ttccataataatgtactttaaacca

SEQ ID NO: 4214851 - DNA, 25 bp, Homo sapien
taaagacacagaaaattgttggaac

SEQ ID NO: 4214852 - DNA, 25 bp, Homo sapien
ctttgcagatacttagggtgaagag

SEQ ID NO: 4214853 - DNA, 25 bp, Homo sapien
ttgttggaaccataacattggaaac

SEQ ID NO: 4214854 - DNA, 25 bp, Homo sapien
agcggttatttcagggtgggattat

SEQ ID NO: 4214855 - DNA, 25 bp, Homo sapien
cctggatgcacagtactcgggtaag

SEQ ID NO: 4214856 - DNA, 25 bp, Homo sapien
tttatctaaggccagccatgtgcaa

SEQ ID NO: 4214857 - DNA, 25 bp, Homo sapien
caaagcactatgcatggtcctgagg

SEQ ID NO: 4214858 - DNA, 25 bp, Homo sapien
tagcatggctgttttagtgcagaga

SEQ ID NO: 4214859 - DNA, 25 bp, Homo sapien
atcacaatatttactatgggaacac

SEQ ID NO: 4214860 - DNA, 25 bp, Homo sapien
cccaatcacaatatttactatggga

SEQ ID NO: 4214861 - DNA, 25 bp, Homo sapien
ttcatattcttgcttatgacccaat

SEQ ID NO: 4214862 - DNA, 25 bp, Homo sapien
tgacccaatactgcccttggtttat

SEQ ID NO: 4214863 - DNA, 25 bp, Homo sapien
gtaaaaattactgctttgtcaggcc

SEQ ID NO: 4214864 - DNA, 25 bp, Homo sapien
cagatttcaaaggatcagactagct

SEQ ID NO: 4214865 - DNA, 25 bp, Homo sapien
ttgtcaggccttttacacagatttc

SEQ ID NO: 4214866 - DNA, 25 bp, Homo sapien
cagaatacatttaccctggatcttc

SEQ ID NO: 4214867 - DNA, 25 bp, Homo sapien
cgcacagttgccaaactctatggtt

SEQ ID NO: 4214868 - DNA, 25 bp, Homo sapien
cgtagccaaggactcctttctgaaa

SEQ ID NO: 4214869 - DNA, 25 bp, Homo sapien
cttcctttgcccagatgagttagtc

SEQ ID NO: 4214870 - DNA, 25 bp, Homo sapien
tgctctcttgtggaccatctgctgc

SEQ ID NO: 4214871 - DNA, 25 bp, Homo sapien
cacttgggaagtgaagtcgtagcca

SEQ ID NO: 4214872 - DNA, 25 bp, Homo sapien
ccaatcagtggtactccattcatta

SEQ ID NO: 4214873 - DNA, 25 bp, Homo sapien
tagggccgaacgtttccaatcagtg

SEQ ID NO: 4214874 - DNA, 25 bp, Homo sapien
ttcattatatgcttgagtggttcca

SEQ ID NO: 4214875 - DNA, 25 bp, Homo sapien
ggaaaacaacttgcggaaatatcat

SEQ ID NO: 4214876 - DNA, 25 bp, Homo sapien
taagctacagttccaaaaagtcagc

SEQ ID NO: 4214877 - DNA, 25 bp, Homo sapien
cagtgaacctaagctacagttccaa

SEQ ID NO: 4214878 - DNA, 25 bp, Homo sapien
taggatcatgtagctctccaagaaa

SEQ ID NO: 4214879 - DNA, 25 bp, Homo sapien
gaattcagtgaacctaagctacagt

SEQ ID NO: 4214880 - DNA, 25 bp, Homo sapien
ctgccaagcatttgaaagtgccagt

SEQ ID NO: 4214881 - DNA, 25 bp, Homo sapien
ccacagtttttcagcagttattggc

SEQ ID NO: 4214882 - DNA, 25 bp, Homo sapien
agtttttcagcagttattggccatg

SEQ ID NO: 4214883 - DNA, 25 bp, Homo sapien
agcatttgaaagtgccagtctccac

SEQ ID NO: 4214884 - DNA, 25 bp, Homo sapien
tgggaatcatagaccctccaacagc

SEQ ID NO: 4214885 - DNA, 25 bp, Homo sapien
tccaacagctagagtggactcaaca

SEQ ID NO: 4214886 - DNA, 25 bp, Homo sapien
gagtggactcaacaaaaattggctt

SEQ ID NO: 4214887 - DNA, 25 bp, Homo sapien
acagttgggaatcatagaccctcca

SEQ ID NO: 4214888 - DNA, 25 bp, Homo sapien
gggaatgtaggtctacaaccttgcc

SEQ ID NO: 4214889 - DNA, 25 bp, Homo sapien
ctagagcagtgctacaagtcagaac

SEQ ID NO: 4214890 - DNA, 25 bp, Homo sapien
caagacgagggccaattgtttcata

SEQ ID NO: 4214891 - DNA, 25 bp, Homo sapien
ttgtttcataaattggcaggcctag

SEQ ID NO: 4214892 - DNA, 25 bp, Homo sapien
tctgactgatatccagatttgtctg

SEQ ID NO: 4214893 - DNA, 25 bp, Homo sapien
gaccatctgactgatatccagattt

SEQ ID NO: 4214894 - DNA, 25 bp, Homo sapien
ttcttgaccatctgactgatatcca

SEQ ID NO: 4214895 - DNA, 25 bp, Homo sapien
gactgatatccagatttgtctgtat

SEQ ID NO: 4214896 - DNA, 25 bp, Homo sapien
caattgtagccagagcatttactcc

SEQ ID NO: 4214897 - DNA, 25 bp, Homo sapien
taacatctgaaaaccatgctgttgg

SEQ ID NO: 4214898 - DNA, 25 bp, Homo sapien
taacagaggtgttttggaatgaccc

SEQ ID NO: 4214899 - DNA, 25 bp, Homo sapien
ataattgcccctgagaagctgaaca

SEQ ID NO: 4214900 - DNA, 25 bp, Homo sapien
ttttgtgataatttgatcctggttt

SEQ ID NO: 4214901 - DNA, 25 bp, Homo sapien
tttgtgataatttgatcctggtttt

SEQ ID NO: 4214902 - DNA, 25 bp, Homo sapien
aaatgactacaattatcaggtttgg

SEQ ID NO: 4214903 - DNA, 25 bp, Homo sapien
aatgactacaattatcaggtttgga

SEQ ID NO: 4214904 - DNA, 25 bp, Homo sapien
atgactacaattatcaggtttggag

SEQ ID NO: 4214905 - DNA, 25 bp, Homo sapien
tgccacaatctccttaaactttggg

SEQ ID NO: 4214906 - DNA, 25 bp, Homo sapien
ttgccacaatctccttaaactttgg

SEQ ID NO: 4214907 - DNA, 25 bp, Homo sapien
cttgccacaatctccttaaactttg

SEQ ID NO: 4214908 - DNA, 25 bp, Homo sapien
gaacatccagtccttgcttgtagat

SEQ ID NO: 4214909 - DNA, 25 bp, Homo sapien
tcaaccaatggtgccaggggttttg

SEQ ID NO: 4214910 - DNA, 25 bp, Homo sapien
gggttttgggagatccatgacatag

SEQ ID NO: 4214911 - DNA, 25 bp, Homo sapien
gatccatgacatagaacatccagtc

SEQ ID NO: 4214912 - DNA, 25 bp, Homo sapien
ttagcaagtcaaatactttggaccg

SEQ ID NO: 4214913 - DNA, 25 bp, Homo sapien
tataacatagtgagtcttgtgactt

SEQ ID NO: 4214914 - DNA, 25 bp, Homo sapien
taacatagtgagtcttgtgactttt

SEQ ID NO: 4214915 - DNA, 25 bp, Homo sapien
tattgtataacatagtgagtcttgt

SEQ ID NO: 4214916 - DNA, 25 bp, Homo sapien
tgtataacatagtgagtcttgtgac

SEQ ID NO: 4214917 - DNA, 25 bp, Homo sapien
gagaatatcacatgaagcaaatctg

SEQ ID NO: 4214918 - DNA, 25 bp, Homo sapien
cagaaactacatgtgcttactaata

SEQ ID NO: 4214919 - DNA, 25 bp, Homo sapien
catacagaagtcaagcaagacagat

SEQ ID NO: 4214920 - DNA, 25 bp, Homo sapien
taaaggatccatcttaattagtagg

SEQ ID NO: 4214921 - DNA, 25 bp, Homo sapien
tattcttaaaatatgcagtctattg

SEQ ID NO: 4214922 - DNA, 25 bp, Homo sapien
taaacacgggcttttggatcagcat

SEQ ID NO: 4214923 - DNA, 25 bp, Homo sapien
tatgcagtctattgaccacacaaat

SEQ ID NO: 4214924 - DNA, 25 bp, Homo sapien
ccacacaaataaacacgggcttttg

SEQ ID NO: 4214925 - DNA, 25 bp, Homo sapien
cagtgcttgggagaggtactcagac

SEQ ID NO: 4214926 - DNA, 25 bp, Homo sapien
agacgagtgaaagaccaccaagtgg

SEQ ID NO: 4214927 - DNA, 25 bp, Homo sapien
gaggtactcagacgagtgaaagacc

SEQ ID NO: 4214928 - DNA, 25 bp, Homo sapien
ttattgcagtgcttgggagaggtac

SEQ ID NO: 4214929 - DNA, 25 bp, Homo sapien
caccattttaggctcgagatagaag

SEQ ID NO: 4214930 - DNA, 25 bp, Homo sapien
tatgtaaagatctgcagacaccctg

SEQ ID NO: 4214931 - DNA, 25 bp, Homo sapien
gtagagacctcattgttggaaagaa

SEQ ID NO: 4214932 - DNA, 25 bp, Homo sapien
gcagacgacattcatgtagagacct

SEQ ID NO: 4214933 - DNA, 25 bp, Homo sapien
tattttatgctggttgtctgcaagc

SEQ ID NO: 4214934 - DNA, 25 bp, Homo sapien
cactactttatgacgtctgaggcac

SEQ ID NO: 4214935 - DNA, 25 bp, Homo sapien
tccgaatttcaaggaccaaggtgac

SEQ ID NO: 4214936 - DNA, 25 bp, Homo sapien
cccgacctgtgtatgagagtgccaa

SEQ ID NO: 4214937 - DNA, 25 bp, Homo sapien
tgataacagggagtacttgttcccc

SEQ ID NO: 4214938 - DNA, 25 bp, Homo sapien
tcacctgacatgattgggaacagtt

SEQ ID NO: 4214939 - DNA, 25 bp, Homo sapien
gacttctggaagatcaatcaatgcg

SEQ ID NO: 4214940 - DNA, 25 bp, Homo sapien
gcattgatatgaatgaacactccat

SEQ ID NO: 4214941 - DNA, 25 bp, Homo sapien
tatcaaggttgaccagagtgggacc

SEQ ID NO: 4214942 - DNA, 25 bp, Homo sapien
tgggaccaagtccaacagtagcatg

SEQ ID NO: 4214943 - DNA, 25 bp, Homo sapien
gaatccagtgctatccagtccataa

SEQ ID NO: 4214944 - DNA, 25 bp, Homo sapien
gactatttacaagactgctgagcag

SEQ ID NO: 4214945 - DNA, 25 bp, Homo sapien
aaagtaagccctcttcagaatctgg

SEQ ID NO: 4214946 - DNA, 25 bp, Homo sapien
agtgacctggaaacaacctcgggct

SEQ ID NO: 4214947 - DNA, 25 bp, Homo sapien
tcgggctctgatctggaaagtgaca

SEQ ID NO: 4214948 - DNA, 25 bp, Homo sapien
gatgatgtcagtacaccaagtggca

SEQ ID NO: 4214949 - DNA, 25 bp, Homo sapien
tgaaagagtgttagaattttacgcc

SEQ ID NO: 4214950 - DNA, 25 bp, Homo sapien
ttaatgtagttagtcaaaatcctcc

SEQ ID NO: 4214951 - DNA, 25 bp, Homo sapien
tatttaaagggtgaaaatagcacac

SEQ ID NO: 4214952 - DNA, 25 bp, Homo sapien
gcttgctagtaactcactgaaagag

SEQ ID NO: 4214953 - DNA, 25 bp, Homo sapien
gattcgctggctgttatgatcagca

SEQ ID NO: 4214954 - DNA, 25 bp, Homo sapien
ggctcaagtacattagattcgctgg

SEQ ID NO: 4214955 - DNA, 25 bp, Homo sapien
aaccagatgttggaagctggctcaa

SEQ ID NO: 4214956 - DNA, 25 bp, Homo sapien
gaagttctgcatagatgccagtcaa

SEQ ID NO: 4214957 - DNA, 25 bp, Homo sapien
tgttcctcctgcgaaacggtgcggt

SEQ ID NO: 4214958 - DNA, 25 bp, Homo sapien
tggcactggccacgcgactttggag

SEQ ID NO: 4214959 - DNA, 25 bp, Homo sapien
caaggtgcggttgccaaaatctgaa

SEQ ID NO: 4214960 - DNA, 25 bp, Homo sapien
gctaagccgggcgatttccttgttc

SEQ ID NO: 4214961 - DNA, 25 bp, Homo sapien
tctgggcgatgtgaaagtttgtcac

SEQ ID NO: 4214962 - DNA, 25 bp, Homo sapien
gaaaggattttcgtgcaggagcgtt

SEQ ID NO: 4214963 - DNA, 25 bp, Homo sapien
tcacttcggacagtttcctgccggg

SEQ ID NO: 4214964 - DNA, 25 bp, Homo sapien
tctctaaatgttgctcgggatcgtt

SEQ ID NO: 4214965 - DNA, 25 bp, Homo sapien
ctagagacggacaaagttgtcagag

SEQ ID NO: 4214966 - DNA, 25 bp, Homo sapien
tttggaaatcgagacgcgaggcttt

SEQ ID NO: 4214967 - DNA, 25 bp, Homo sapien
tggaaatcgagacgcgaggctttta

SEQ ID NO: 4214968 - DNA, 25 bp, Homo sapien
catttggaaatcgagacgcgaggct

SEQ ID NO: 4214969 - DNA, 25 bp, Homo sapien
cggacaataaatccgaaacgcgtgg

SEQ ID NO: 4214970 - DNA, 25 bp, Homo sapien
tcacccagacgaaagaagacttcat

SEQ ID NO: 4214971 - DNA, 25 bp, Homo sapien
ccgaaacgcgtggtcctggagagca

SEQ ID NO: 4214972 - DNA, 25 bp, Homo sapien
taaaaatacactgttggcggacaat

SEQ ID NO: 4214973 - DNA, 25 bp, Homo sapien
ctcctgcttgttttcccccattgga

SEQ ID NO: 4214974 - DNA, 25 bp, Homo sapien
tcctcctcctgcttgttttccccca

SEQ ID NO: 4214975 - DNA, 25 bp, Homo sapien
tcctcctgcttgttttcccccattg

SEQ ID NO: 4214976 - DNA, 25 bp, Homo sapien
tcctgcttgttttcccccattggaa

SEQ ID NO: 4214977 - DNA, 25 bp, Homo sapien
tggagttgcgaaaggggacgatccc

SEQ ID NO: 4214978 - DNA, 25 bp, Homo sapien
gacgatcccgtgagggtccaggacc

SEQ ID NO: 4214979 - DNA, 25 bp, Homo sapien
aaggcgctgcggaggatctgaaagg

SEQ ID NO: 4214980 - DNA, 25 bp, Homo sapien
aagggggatagagctcccctcgcct

SEQ ID NO: 4214981 - DNA, 25 bp, Homo sapien
gcccatagggtctccattagcagaa

SEQ ID NO: 4214982 - DNA, 25 bp, Homo sapien
ctgggacgaccatgaagtttaaggc

SEQ ID NO: 4214983 - DNA, 25 bp, Homo sapien
cctattaaaagtggacagtgcagtc

SEQ ID NO: 4214984 - DNA, 25 bp, Homo sapien
tgatgtgctggaatgtaccatgccc

SEQ ID NO: 4214985 - DNA, 25 bp, Homo sapien
gatttatgaagtgcagggcacagca

SEQ ID NO: 4214986 - DNA, 25 bp, Homo sapien
agccgaataggagagtaaacatgcc

SEQ ID NO: 4214987 - DNA, 25 bp, Homo sapien
tgtctgagctgttaggtgccctgac

SEQ ID NO: 4214988 - DNA, 25 bp, Homo sapien
agcgtgctggactactcctcggaga

SEQ ID NO: 4214989 - DNA, 25 bp, Homo sapien
ttagagatactaaaagagaggctga

SEQ ID NO: 4214990 - DNA, 25 bp, Homo sapien
gctatggtctagcaggaaactgtgg

SEQ ID NO: 4214991 - DNA, 25 bp, Homo sapien
tagaagcagactccctcaagggtgt

SEQ ID NO: 4214992 - DNA, 25 bp, Homo sapien
tcaagggtgtaacatcagaaggcta

SEQ ID NO: 4214993 - DNA, 25 bp, Homo sapien
agctgtctgaggcttgtcaagcaga

SEQ ID NO: 4214994 - DNA, 25 bp, Homo sapien
gctgcctcttgacagagcgaggatt

SEQ ID NO: 4214995 - DNA, 25 bp, Homo sapien
caattgctctggcttacagtggtgg

SEQ ID NO: 4214996 - DNA, 25 bp, Homo sapien
acagtggtgggaaattggtctatcc

SEQ ID NO: 4214997 - DNA, 25 bp, Homo sapien
ccttctcccagtagcggttccttgg

SEQ ID NO: 4214998 - DNA, 25 bp, Homo sapien
tttgatagctcaaccaaatttcagc

SEQ ID NO: 4214999 - DNA, 25 bp, Homo sapien
ggctgtggcatgaactggcctttga

SEQ ID NO: 4215000 - DNA, 25 bp, Homo sapien
taagccatataattccaaggccaag

SEQ ID NO: 4215001 - DNA, 25 bp, Homo sapien
tacagtacggtgtggcctataaatc

SEQ ID NO: 4215002 - DNA, 25 bp, Homo sapien
ttctgacccatcctagagttgacgt

SEQ ID NO: 4215003 - DNA, 25 bp, Homo sapien
tcccggtgttatgtcaaaggaaagc

SEQ ID NO: 4215004 - DNA, 25 bp, Homo sapien
taattaccgctgatacccttggtcc

SEQ ID NO: 4215005 - DNA, 25 bp, Homo sapien
tccaggaaacattgagaactattct

SEQ ID NO: 4215006 - DNA, 25 bp, Homo sapien
tgtgtatccagatgggatattctga

SEQ ID NO: 4215007 - DNA, 25 bp, Homo sapien
tattcttaacctggaacgcctatcc

SEQ ID NO: 4215008 - DNA, 25 bp, Homo sapien
gatattctgagatagtcacttcttc

SEQ ID NO: 4215009 - DNA, 25 bp, Homo sapien
gatgtcacactgacccctgtcagca

SEQ ID NO: 4215010 - DNA, 25 bp, Homo sapien
gggctgaatgaaagatgatgtcaca

SEQ ID NO: 4215011 - DNA, 25 bp, Homo sapien
tttatatctgcgtttcagacatctg

SEQ ID NO: 4215012 - DNA, 25 bp, Homo sapien
gaaaatttatatctgcgtttcagac

SEQ ID NO: 4215013 - DNA, 25 bp, Homo sapien
gagttggagataaatgaccagaaga

SEQ ID NO: 4215014 - DNA, 25 bp, Homo sapien
caaaattagtgtttacacttaatct

SEQ ID NO: 4215015 - DNA, 25 bp, Homo sapien
cacaaaattagtgtttacacttaat

SEQ ID NO: 4215016 - DNA, 25 bp, Homo sapien
ccagattgccacaatttgggtgaaa

SEQ ID NO: 4215017 - DNA, 25 bp, Homo sapien
gggtgaaatagcctgaagaattatc

SEQ ID NO: 4215018 - DNA, 25 bp, Homo sapien
gacatttctgataccgcatgaccca

SEQ ID NO: 4215019 - DNA, 25 bp, Homo sapien
ccaagaagtagttcatccccagatg

SEQ ID NO: 4215020 - DNA, 25 bp, Homo sapien
tcagccttttcaggtctgtttctat

SEQ ID NO: 4215021 - DNA, 25 bp, Homo sapien
ttcagccttttcaggtctgtttcta

SEQ ID NO: 4215022 - DNA, 25 bp, Homo sapien
ccttttcaggtctgtttctattctt

SEQ ID NO: 4215023 - DNA, 25 bp, Homo sapien
tcaggtctgtttctattctttccat

SEQ ID NO: 4215024 - DNA, 25 bp, Homo sapien
ggtggctgaaataatccaggtccac

SEQ ID NO: 4215025 - DNA, 25 bp, Homo sapien
gctgtttgtgcttactgtttaagcc

SEQ ID NO: 4215026 - DNA, 25 bp, Homo sapien
gcttactgtttaagcctttctcaca

SEQ ID NO: 4215027 - DNA, 25 bp, Homo sapien
acacggagagggcattacaatttca

SEQ ID NO: 4215028 - DNA, 25 bp, Homo sapien
tgaatcacaaatttacgttctcccc

SEQ ID NO: 4215029 - DNA, 25 bp, Homo sapien
gatgaggttcggagcagtcttccag

SEQ ID NO: 4215030 - DNA, 25 bp, Homo sapien
gataagtcctgactagagcagcccg

SEQ ID NO: 4215031 - DNA, 25 bp, Homo sapien
ttatcagcggagagtggagttgcca

SEQ ID NO: 4215032 - DNA, 25 bp, Homo sapien
aatagcaggcaggagcgttatcagc

SEQ ID NO: 4215033 - DNA, 25 bp, Homo sapien
tgagaaagctattagaacactggaa

SEQ ID NO: 4215034 - DNA, 25 bp, Homo sapien
gagctgcccagcacaaaagtcaata

SEQ ID NO: 4215035 - DNA, 25 bp, Homo sapien
taattgaaatgcctaagagctgccc

SEQ ID NO: 4215036 - DNA, 25 bp, Homo sapien
taaatggttatgcaagaatagcctg

SEQ ID NO: 4215037 - DNA, 25 bp, Homo sapien
tgtacataattaaatccttcaggca

SEQ ID NO: 4215038 - DNA, 25 bp, Homo sapien
aattaaggtgaactggccactgcta

SEQ ID NO: 4215039 - DNA, 25 bp, Homo sapien
gacagaatgcatgggtcattaattt

SEQ ID NO: 4215040 - DNA, 25 bp, Homo sapien
agtgtgttttcgtgaggcctggtaa

SEQ ID NO: 4215041 - DNA, 25 bp, Homo sapien
tgctactaagagtcaattgacagaa

SEQ ID NO: 4215042 - DNA, 25 bp, Homo sapien
tttgtggctttctccataagcaatt

SEQ ID NO: 4215043 - DNA, 25 bp, Homo sapien
gctttctccataagcaattgcttgg

SEQ ID NO: 4215044 - DNA, 25 bp, Homo sapien
gttctcgagttcagctcccacctat

SEQ ID NO: 4215045 - DNA, 25 bp, Homo sapien
tctcgagttcagctcccacctatga

SEQ ID NO: 4215046 - DNA, 25 bp, Homo sapien
ttcacagcgaaagttggttgaaaac

SEQ ID NO: 4215047 - DNA, 25 bp, Homo sapien
tgaatgtagttaacagcatcatcat

SEQ ID NO: 4215048 - DNA, 25 bp, Homo sapien
aaaagtacattcacagcgaaagttg

SEQ ID NO: 4215049 - DNA, 25 bp, Homo sapien
tgttgaatgtagttaacagcatcat

SEQ ID NO: 4215050 - DNA, 25 bp, Homo sapien
tcagacttagagtggtttattgatt

SEQ ID NO: 4215051 - DNA, 25 bp, Homo sapien
gctggctgctgatgaataaatatat

SEQ ID NO: 4215052 - DNA, 25 bp, Homo sapien
ctgaggtagcagtgacatgctggct

SEQ ID NO: 4215053 - DNA, 25 bp, Homo sapien
ttttatatcaccactgaggtagcag

SEQ ID NO: 4215054 - DNA, 25 bp, Homo sapien
tgttttatatcaccactgaggtagc

SEQ ID NO: 4215055 - DNA, 25 bp, Homo sapien
cttggccacttgagttaaaccttag

SEQ ID NO: 4215056 - DNA, 25 bp, Homo sapien
gttaaaccttagtggtggaatgtca

SEQ ID NO: 4215057 - DNA, 25 bp, Homo sapien
cacttgagttaaaccttagtggtgg

SEQ ID NO: 4215058 - DNA, 25 bp, Homo sapien
tgtttgattaatacttccttttgat

SEQ ID NO: 4215059 - DNA, 25 bp, Homo sapien
gctgtcagtgtacaaacagcacata

SEQ ID NO: 4215060 - DNA, 25 bp, Homo sapien
cagtgtacaaacagcacatagagta

SEQ ID NO: 4215061 - DNA, 25 bp, Homo sapien
ttatttggcgaataaccatgctgct

SEQ ID NO: 4215062 - DNA, 25 bp, Homo sapien
tgtacaaacagcacatagagtataa

SEQ ID NO: 4215063 - DNA, 25 bp, Homo sapien
tgtccagttaattcctaatcaccct

SEQ ID NO: 4215064 - DNA, 25 bp, Homo sapien
taatagttatctgagctccaagcag

SEQ ID NO: 4215065 - DNA, 25 bp, Homo sapien
aattctactgtggaactcagtcaca

SEQ ID NO: 4215066 - DNA, 25 bp, Homo sapien
cacagaatcggatgttggaagagat

SEQ ID NO: 4215067 - DNA, 25 bp, Homo sapien
tggagtttcgccttgttggccagga

SEQ ID NO: 4215068 - DNA, 25 bp, Homo sapien
caaagtgttgggcttacagacgtga

SEQ ID NO: 4215069 - DNA, 25 bp, Homo sapien
gtgttgggcttacagacgtgagcca

SEQ ID NO: 4215070 - DNA, 25 bp, Homo sapien
aagtgttgggcttacagacgtgagc

SEQ ID NO: 4215071 - DNA, 25 bp, Homo sapien
cattgtaatctctttagaacggagg

SEQ ID NO: 4215072 - DNA, 25 bp, Homo sapien
aggacacaatctttgcaagttgtga

SEQ ID NO: 4215073 - DNA, 25 bp, Homo sapien
gaaagggtccaattgccactgagga

SEQ ID NO: 4215074 - DNA, 25 bp, Homo sapien
tccctctgttaaaagacactttatg

SEQ ID NO: 4215075 - DNA, 25 bp, Homo sapien
tctcctcttctgattgtttcctttc

SEQ ID NO: 4215076 - DNA, 25 bp, Homo sapien
ttctctcctcttctgattgtttcct

SEQ ID NO: 4215077 - DNA, 25 bp, Homo sapien
tttcctttctttgcccattttcata

SEQ ID NO: 4215078 - DNA, 25 bp, Homo sapien
ttacagaacatccatcttctctcct

SEQ ID NO: 4215079 - DNA, 25 bp, Homo sapien
taagagattaacagtgagcatgaat

SEQ ID NO: 4215080 - DNA, 25 bp, Homo sapien
agaatagcttagcatgatcctgatt

SEQ ID NO: 4215081 - DNA, 25 bp, Homo sapien
attaacagtgagcatgaatgagggc

SEQ ID NO: 4215082 - DNA, 25 bp, Homo sapien
cttagcatgatcctgattttccttg

SEQ ID NO: 4215083 - DNA, 25 bp, Homo sapien
gattcagactctacagaaaatctat

SEQ ID NO: 4215084 - DNA, 25 bp, Homo sapien
aatctattacagcttttcacatcta

SEQ ID NO: 4215085 - DNA, 25 bp, Homo sapien
tttgaggattcatagattcagactc

SEQ ID NO: 4215086 - DNA, 25 bp, Homo sapien
gaaatttgaggattcatagattcag

SEQ ID NO: 4215087 - DNA, 25 bp, Homo sapien
gagactgtccatgcctttgttcctg

SEQ ID NO: 4215088 - DNA, 25 bp, Homo sapien
gccacattggtaaccgcagtatcta

SEQ ID NO: 4215089 - DNA, 25 bp, Homo sapien
gactcttgtgtctctctttgtgaga

SEQ ID NO: 4215090 - DNA, 25 bp, Homo sapien
tatacacgaagcactgtgactcttg

SEQ ID NO: 4215091 - DNA, 25 bp, Homo sapien
ggagcgataaagatgcaggaccatc

SEQ ID NO: 4215092 - DNA, 25 bp, Homo sapien
tggtactttgtcacttgggatgcag

SEQ ID NO: 4215093 - DNA, 25 bp, Homo sapien
tcaattttgagtgggtgaacaggtg

SEQ ID NO: 4215094 - DNA, 25 bp, Homo sapien
caggtgatgaatgggcaactgcttt

SEQ ID NO: 4215095 - DNA, 25 bp, Homo sapien
aatttcattatcttggggccattct

SEQ ID NO: 4215096 - DNA, 25 bp, Homo sapien
tttgctggccagttcatagcctcct

SEQ ID NO: 4215097 - DNA, 25 bp, Homo sapien
gattttgctggccagttcatagcct

SEQ ID NO: 4215098 - DNA, 25 bp, Homo sapien
ttatcttggggccattctcatagaa

SEQ ID NO: 4215099 - DNA, 25 bp, Homo sapien
atttacgctgtttatccagttctcc

SEQ ID NO: 4215100 - DNA, 25 bp, Homo sapien
tccagttctcctgcatgcctatctt

SEQ ID NO: 4215101 - DNA, 25 bp, Homo sapien
tttacgctgtttatccagttctcct

SEQ ID NO: 4215102 - DNA, 25 bp, Homo sapien
tatccagttctcctgcatgcctatc

SEQ ID NO: 4215103 - DNA, 25 bp, Homo sapien
tccagggtgctctggccagtcctcg

SEQ ID NO: 4215104 - DNA, 25 bp, Homo sapien
ttggtgccatgccactggaggttcc

SEQ ID NO: 4215105 - DNA, 25 bp, Homo sapien
gccagtcctcgtttgaatacatcac

SEQ ID NO: 4215106 - DNA, 25 bp, Homo sapien
cagattggtgccatgccactggagg

SEQ ID NO: 4215107 - DNA, 25 bp, Homo sapien
caaggcttggccacagtctataccc

SEQ ID NO: 4215108 - DNA, 25 bp, Homo sapien
ccaatttaaagtcattacctctcca

SEQ ID NO: 4215109 - DNA, 25 bp, Homo sapien
tctgtgtctgccgtacctctgcaaa

SEQ ID NO: 4215110 - DNA, 25 bp, Homo sapien
ttcacaatcctcttgattatctgcc

SEQ ID NO: 4215111 - DNA, 25 bp, Homo sapien
catacttgtgcgctgggtgactggg

SEQ ID NO: 4215112 - DNA, 25 bp, Homo sapien
ctgcgtggcgctctctggtctgcag

SEQ ID NO: 4215113 - DNA, 25 bp, Homo sapien
cagagccttctctgcgtggcgctct

SEQ ID NO: 4215114 - DNA, 25 bp, Homo sapien
tcatacttgtgcgctgggtgactgg

SEQ ID NO: 4215115 - DNA, 25 bp, Homo sapien
gaatgatcaagttttgtaaccgact

SEQ ID NO: 4215116 - DNA, 25 bp, Homo sapien
ccagcaagtgcctatgttattaaca

SEQ ID NO: 4215117 - DNA, 25 bp, Homo sapien
ggagttgatgccattataatcttgt

SEQ ID NO: 4215118 - DNA, 25 bp, Homo sapien
gaaatagccagttgtagtctgtttt

SEQ ID NO: 4215119 - DNA, 25 bp, Homo sapien
ctgtggccatctctatggccagcca

SEQ ID NO: 4215120 - DNA, 25 bp, Homo sapien
ccttcaccatttctgtgcatattca

SEQ ID NO: 4215121 - DNA, 25 bp, Homo sapien
agccagtaccccatccatatccctt

SEQ ID NO: 4215122 - DNA, 25 bp, Homo sapien
tgcatattcacgtgacttccaaatg

SEQ ID NO: 4215123 - DNA, 25 bp, Homo sapien
cacatctggtaaaggctttcaggta

SEQ ID NO: 4215124 - DNA, 25 bp, Homo sapien
ctcataagatttgggagtaagggca

SEQ ID NO: 4215125 - DNA, 25 bp, Homo sapien
agatcaaaatgatacttcaggaact

SEQ ID NO: 4215126 - DNA, 25 bp, Homo sapien
gaactgagagtcctcataagatttg

SEQ ID NO: 4215127 - DNA, 25 bp, Homo sapien
catttcagcttcatttcttgccttc

SEQ ID NO: 4215128 - DNA, 25 bp, Homo sapien
ctcttttatgcctatattccagcta

SEQ ID NO: 4215129 - DNA, 25 bp, Homo sapien
cttctcttttatgcctatattccag

SEQ ID NO: 4215130 - DNA, 25 bp, Homo sapien
gccttctcttttatgcctatattcc

SEQ ID NO: 4215131 - DNA, 25 bp, Homo sapien
taaagaataggcaagtagatcattt

SEQ ID NO: 4215132 - DNA, 25 bp, Homo sapien
gaactaaagaataggcaagtagatc

SEQ ID NO: 4215133 - DNA, 25 bp, Homo sapien
caatattaagtacccagacctcagt

SEQ ID NO: 4215134 - DNA, 25 bp, Homo sapien
aacaatattaagtacccagacctca

SEQ ID NO: 4215135 - DNA, 25 bp, Homo sapien
gagcccagttttaggacagcaaggc

SEQ ID NO: 4215136 - DNA, 25 bp, Homo sapien
taataggccatttgtcagcctgcac

SEQ ID NO: 4215137 - DNA, 25 bp, Homo sapien
tgactgtcattgtggctaggagccc

SEQ ID NO: 4215138 - DNA, 25 bp, Homo sapien
tattttatctgcgaaggctgtggcg

SEQ ID NO: 4215139 - DNA, 25 bp, Homo sapien
gccacaagcatgctttttagttctg

SEQ ID NO: 4215140 - DNA, 25 bp, Homo sapien
ccattgtgggatcctatctcattaa

SEQ ID NO: 4215141 - DNA, 25 bp, Homo sapien
tggccattgtgggatcctatctcat

SEQ ID NO: 4215142 - DNA, 25 bp, Homo sapien
tatggccattgtgggatcctatctc

SEQ ID NO: 4215143 - DNA, 25 bp, Homo sapien
gtcaaaccaataagagcaacattca

SEQ ID NO: 4215144 - DNA, 25 bp, Homo sapien
aaacagcagccacgtcaaaccaata

SEQ ID NO: 4215145 - DNA, 25 bp, Homo sapien
taagaactacattcacaaacagcag

SEQ ID NO: 4215146 - DNA, 25 bp, Homo sapien
aaacacataagaactacattcacaa

SEQ ID NO: 4215147 - DNA, 25 bp, Homo sapien
gaaccttcattagtcaagggcacat

SEQ ID NO: 4215148 - DNA, 25 bp, Homo sapien
gcagaaacttcgcagattaaggagg

SEQ ID NO: 4215149 - DNA, 25 bp, Homo sapien
ctctcaagggttctttggccggtga

SEQ ID NO: 4215150 - DNA, 25 bp, Homo sapien
tctgacatccgttgtgctgttgctc

SEQ ID NO: 4215151 - DNA, 25 bp, Homo sapien
aaggtgtgtaccaaggcttctttga

SEQ ID NO: 4215152 - DNA, 25 bp, Homo sapien
ttggagcaccccagttaagggtcaa

SEQ ID NO: 4215153 - DNA, 25 bp, Homo sapien
catcacaggcaatgttggagcaccc

SEQ ID NO: 4215154 - DNA, 25 bp, Homo sapien
ggtgtgtaccaaggcttctttgaga

SEQ ID NO: 4215155 - DNA, 25 bp, Homo sapien
gatagaaatgcagccaagcacagcg

SEQ ID NO: 4215156 - DNA, 25 bp, Homo sapien
gcagccaagcacagcgcagagcctt

SEQ ID NO: 4215157 - DNA, 25 bp, Homo sapien
tagaaatgcagccaagcacagcgca

SEQ ID NO: 4215158 - DNA, 25 bp, Homo sapien
aaatgcagccaagcacagcgcagag

SEQ ID NO: 4215159 - DNA, 25 bp, Homo sapien
gaatggaccaaaaatcaatagcccc

SEQ ID NO: 4215160 - DNA, 25 bp, Homo sapien
accagtactccagtgaaccagtctt

SEQ ID NO: 4215161 - DNA, 25 bp, Homo sapien
tagcccccaaaccaccagtactcca

SEQ ID NO: 4215162 - DNA, 25 bp, Homo sapien
agaatggaccaaaaatcaatagccc

SEQ ID NO: 4215163 - DNA, 25 bp, Homo sapien
cagtaagttgttttcacgatatctt

SEQ ID NO: 4215164 - DNA, 25 bp, Homo sapien
ttcttgcaggattggtagacctgtt

SEQ ID NO: 4215165 - DNA, 25 bp, Homo sapien
aagttgttttcacgatatcttgaaa

SEQ ID NO: 4215166 - DNA, 25 bp, Homo sapien
tttcttgcaggattggtagacctgt

SEQ ID NO: 4215167 - DNA, 25 bp, Homo sapien
gaaagcttaccactgaacatataaa

SEQ ID NO: 4215168 - DNA, 25 bp, Homo sapien
aagcttaccactgaacatataaaac

SEQ ID NO: 4215169 - DNA, 25 bp, Homo sapien
aacctcagtgtcagcgaacaatgaa

SEQ ID NO: 4215170 - DNA, 25 bp, Homo sapien
agcttaccactgaacatataaaaca

SEQ ID NO: 4215171 - DNA, 25 bp, Homo sapien
tgtggacacagagtttatgaatgca

SEQ ID NO: 4215172 - DNA, 25 bp, Homo sapien
gagtcaaaacataacgggtacattc

SEQ ID NO: 4215173 - DNA, 25 bp, Homo sapien
tctggaaaaatgcatgtatctctgt

SEQ ID NO: 4215174 - DNA, 25 bp, Homo sapien
ggcgttgctggagagttgaaaggag

SEQ ID NO: 4215175 - DNA, 25 bp, Homo sapien
gaagagctcctcaataagctagaat

SEQ ID NO: 4215176 - DNA, 25 bp, Homo sapien
gagctcctcaataagctagaattgt

SEQ ID NO: 4215177 - DNA, 25 bp, Homo sapien
ctcctcaataagctagaattgttcc

SEQ ID NO: 4215178 - DNA, 25 bp, Homo sapien
ttgaagagctcctcaataagctaga

SEQ ID NO: 4215179 - DNA, 25 bp, Homo sapien
caagcattgagacagatgaggccaa

SEQ ID NO: 4215180 - DNA, 25 bp, Homo sapien
ttgatgtgcccctgccgctgaatgt

SEQ ID NO: 4215181 - DNA, 25 bp, Homo sapien
gactaacgacacctctatcagaaga

SEQ ID NO: 4215182 - DNA, 25 bp, Homo sapien
tgcagagagcatgagtaccaaggga

SEQ ID NO: 4215183 - DNA, 25 bp, Homo sapien
cttttcttctgcctaacctgtcttt

SEQ ID NO: 4215184 - DNA, 25 bp, Homo sapien
ttatccatagcagcaggtaaaattt

SEQ ID NO: 4215185 - DNA, 25 bp, Homo sapien
taacctgtctttgccggttttctca

SEQ ID NO: 4215186 - DNA, 25 bp, Homo sapien
cacagtccgttgtctcatctctctt

SEQ ID NO: 4215187 - DNA, 25 bp, Homo sapien
tgtctatccgacaggcatcctgctg

SEQ ID NO: 4215188 - DNA, 25 bp, Homo sapien
atttgttcaccgttgacctccctga

SEQ ID NO: 4215189 - DNA, 25 bp, Homo sapien
ttgactgcagtggtaggactatcct

SEQ ID NO: 4215190 - DNA, 25 bp, Homo sapien
ggactatcctgtgcttgcgctttgt

SEQ ID NO: 4215191 - DNA, 25 bp, Homo sapien
tctctaattgcagaggcatgtgaag

SEQ ID NO: 4215192 - DNA, 25 bp, Homo sapien
ttcaaagccttgcatggtctggccc

SEQ ID NO: 4215193 - DNA, 25 bp, Homo sapien
catgtgaaggccgtaatctttagaa

SEQ ID NO: 4215194 - DNA, 25 bp, Homo sapien
gacacattggctgatatctgcttgg

SEQ ID NO: 4215195 - DNA, 25 bp, Homo sapien
gacatccgaggtgcctttctccaaa

SEQ ID NO: 4215196 - DNA, 25 bp, Homo sapien
cgcgtagttgctaacagcaaagaga

SEQ ID NO: 4215197 - DNA, 25 bp, Homo sapien
agcaaagagagttacgaattacgtt

SEQ ID NO: 4215198 - DNA, 25 bp, Homo sapien
gaataatctacgtgactggttgcgc

SEQ ID NO: 4215199 - DNA, 25 bp, Homo sapien
cctgggtggatctactttggtcagc

SEQ ID NO: 4215200 - DNA, 25 bp, Homo sapien
tgtagtccatactcatgagacctgg

SEQ ID NO: 4215201 - DNA, 25 bp, Homo sapien
tggtcagcaatcgtctctggagtga

SEQ ID NO: 4215202 - DNA, 25 bp, Homo sapien
ccttttggttaggacatttgccctg

SEQ ID NO: 4215203 - DNA, 25 bp, Homo sapien
cttgtgactgtttctagtgctcatg

SEQ ID NO: 4215204 - DNA, 25 bp, Homo sapien
gactgtttctagtgctcatgtcttt

SEQ ID NO: 4215205 - DNA, 25 bp, Homo sapien
caacatctctaagtttggacttttc

SEQ ID NO: 4215206 - DNA, 25 bp, Homo sapien
tggaccttttgaagtcttactgcaa

SEQ ID NO: 4215207 - DNA, 25 bp, Homo sapien
tgattaaaccagtggtctccaccat

SEQ ID NO: 4215208 - DNA, 25 bp, Homo sapien
tgttgattaaaccagtggtctccac

SEQ ID NO: 4215209 - DNA, 25 bp, Homo sapien
gttgattaaaccagtggtctccacc

SEQ ID NO: 4215210 - DNA, 25 bp, Homo sapien
ttgttgattaaaccagtggtctcca

SEQ ID NO: 4215211 - DNA, 25 bp, Homo sapien
caccaagttctagtcttagacaggg

SEQ ID NO: 4215212 - DNA, 25 bp, Homo sapien
tggagcctgctcctgacaaatgggc

SEQ ID NO: 4215213 - DNA, 25 bp, Homo sapien
cagggaaccttttctactgagcttt

SEQ ID NO: 4215214 - DNA, 25 bp, Homo sapien
gaagccctgaggcacattaatagca

SEQ ID NO: 4215215 - DNA, 25 bp, Homo sapien
tacccaagtgtttgtgtggctcctg

SEQ ID NO: 4215216 - DNA, 25 bp, Homo sapien
cactgattcttcttgaggatcctct

SEQ ID NO: 4215217 - DNA, 25 bp, Homo sapien
actgcttgaaaggactaggcttctc

SEQ ID NO: 4215218 - DNA, 25 bp, Homo sapien
gttttcatggcgaatatcttctgga

SEQ ID NO: 4215219 - DNA, 25 bp, Homo sapien
tttgtattgggcttgtggtggtaaa

SEQ ID NO: 4215220 - DNA, 25 bp, Homo sapien
ctttgtattgggcttgtggtggtaa

SEQ ID NO: 4215221 - DNA, 25 bp, Homo sapien
ttctttgtattgggcttgtggtggt

SEQ ID NO: 4215222 - DNA, 25 bp, Homo sapien
cagcttctttgtattgggcttgtgg

SEQ ID NO: 4215223 - DNA, 25 bp, Homo sapien
gagagttgtttctgcgttcaccagc

SEQ ID NO: 4215224 - DNA, 25 bp, Homo sapien
ggagagttgtttctgcgttcaccag

SEQ ID NO: 4215225 - DNA, 25 bp, Homo sapien
agagttgtttctgcgttcaccagca

SEQ ID NO: 4215226 - DNA, 25 bp, Homo sapien
agttgtttctgcgttcaccagcacc

SEQ ID NO: 4215227 - DNA, 25 bp, Homo sapien
gagagctaagggtgggctttccaac

SEQ ID NO: 4215228 - DNA, 25 bp, Homo sapien
tccaactgaggaagggttacaacaa

SEQ ID NO: 4215229 - DNA, 25 bp, Homo sapien
gagcacattcgagccatgcgcagag

SEQ ID NO: 4215230 - DNA, 25 bp, Homo sapien
tagtgaatcagcttcagtcagggct

SEQ ID NO: 4215231 - DNA, 25 bp, Homo sapien
ctggccaggacaatgcagcagagcc

SEQ ID NO: 4215232 - DNA, 25 bp, Homo sapien
cagtgccaaggcctcgctcagtgag

SEQ ID NO: 4215233 - DNA, 25 bp, Homo sapien
gatgctgggctgataagaggtgtgc

SEQ ID NO: 4215234 - DNA, 25 bp, Homo sapien
ctcagtgaggtaggacggcttgaaa

SEQ ID NO: 4215235 - DNA, 25 bp, Homo sapien
ctttcgggcagttctgtgagtcttt

SEQ ID NO: 4215236 - DNA, 25 bp, Homo sapien
ttctgtgagtctttgcaggctactg

SEQ ID NO: 4215237 - DNA, 25 bp, Homo sapien
cagttctgtgagtctttgcaggcta

SEQ ID NO: 4215238 - DNA, 25 bp, Homo sapien
ggcagttctgtgagtctttgcaggc

SEQ ID NO: 4215239 - DNA, 25 bp, Homo sapien
gctctgctggtaactttcaaccact

SEQ ID NO: 4215240 - DNA, 25 bp, Homo sapien
ttcaaccactgttttcacttcttca

SEQ ID NO: 4215241 - DNA, 25 bp, Homo sapien
tgctggtaactttcaaccactgttt

SEQ ID NO: 4215242 - DNA, 25 bp, Homo sapien
tggtaactttcaaccactgttttca

SEQ ID NO: 4215243 - DNA, 25 bp, Homo sapien
tgttacttcactagaagctctcata

SEQ ID NO: 4215244 - DNA, 25 bp, Homo sapien
ctcttgagttccttgtggcgtagcc

SEQ ID NO: 4215245 - DNA, 25 bp, Homo sapien
gttctgttacttcactagaagctct

SEQ ID NO: 4215246 - DNA, 25 bp, Homo sapien
tccttgtggcgtagcctggttctgt

SEQ ID NO: 4215247 - DNA, 25 bp, Homo sapien
ttttagtatatgaaccacagcagca

SEQ ID NO: 4215248 - DNA, 25 bp, Homo sapien
tgcagcccagattcagcctgactag

SEQ ID NO: 4215249 - DNA, 25 bp, Homo sapien
tgttcctggtccagggaggactgca

SEQ ID NO: 4215250 - DNA, 25 bp, Homo sapien
ctccttggtgccctgttatttttag

SEQ ID NO: 4215251 - DNA, 25 bp, Homo sapien
tcagagggtcgtattcaaaacatca

SEQ ID NO: 4215252 - DNA, 25 bp, Homo sapien
tccactggtgggagccccgagtcag

SEQ ID NO: 4215253 - DNA, 25 bp, Homo sapien
accatccactggtgggagccccgag

SEQ ID NO: 4215254 - DNA, 25 bp, Homo sapien
cgtattcaaaacatcactaccacca

SEQ ID NO: 4215255 - DNA, 25 bp, Homo sapien
ccccagactgttgaagatggctttt

SEQ ID NO: 4215256 - DNA, 25 bp, Homo sapien
cccagactgttgaagatggcttttc

SEQ ID NO: 4215257 - DNA, 25 bp, Homo sapien
gccccccagactgttgaagatggct

SEQ ID NO: 4215258 - DNA, 25 bp, Homo sapien
agcagccccccagactgttgaagat

SEQ ID NO: 4215259 - DNA, 25 bp, Homo sapien
agaggaatgtgtgaatcgctatgcc

SEQ ID NO: 4215260 - DNA, 25 bp, Homo sapien
tgatgtccgcgtagtgtcctgtcca

SEQ ID NO: 4215261 - DNA, 25 bp, Homo sapien
ttcacaccggaactattataatcaa

SEQ ID NO: 4215262 - DNA, 25 bp, Homo sapien
tcctcgaatgaagcatgacttgcaa

SEQ ID NO: 4215263 - DNA, 25 bp, Homo sapien
tcattttctttcattttgttctaaa

SEQ ID NO: 4215264 - DNA, 25 bp, Homo sapien
cagtcttcggagtgcctggtctttt

SEQ ID NO: 4215265 - DNA, 25 bp, Homo sapien
cggagtgcctggtctttttcagtcc

SEQ ID NO: 4215266 - DNA, 25 bp, Homo sapien
aatgtatttctacccccgcagggca

SEQ ID NO: 4215267 - DNA, 25 bp, Homo sapien
tctgccagtcttcggagtgcctggt

SEQ ID NO: 4215268 - DNA, 25 bp, Homo sapien
tacatgtgtcatttggctcagccct

SEQ ID NO: 4215269 - DNA, 25 bp, Homo sapien
gaaaacgagcaacccagatttggtg

SEQ ID NO: 4215270 - DNA, 25 bp, Homo sapien
aaagccttctaagtccagtgtggag

SEQ ID NO: 4215271 - DNA, 25 bp, Homo sapien
tcagtaaggagacacctgcatccgt

SEQ ID NO: 4215272 - DNA, 25 bp, Homo sapien
cttccttacgctggctgaataaaaa

SEQ ID NO: 4215273 - DNA, 25 bp, Homo sapien
gaggaaggccatgtttaattgtaag

SEQ ID NO: 4215274 - DNA, 25 bp, Homo sapien
actgttccaaggcttctctgggact

SEQ ID NO: 4215275 - DNA, 25 bp, Homo sapien
aattgtaaggtatgcataaccttcc

SEQ ID NO: 4215276 - DNA, 25 bp, Homo sapien
gcagatcagctagttgggatttcac

SEQ ID NO: 4215277 - DNA, 25 bp, Homo sapien
tgcttggctgagagggatacttcaa

SEQ ID NO: 4215278 - DNA, 25 bp, Homo sapien
catttgggcccagctaggaagaatt

SEQ ID NO: 4215279 - DNA, 25 bp, Homo sapien
taattgggctcctacgaaaatcctc

SEQ ID NO: 4215280 - DNA, 25 bp, Homo sapien
aggaaggctctaggaaggaacttgt

SEQ ID NO: 4215281 - DNA, 25 bp, Homo sapien
tgcttcctgacgcagctggtcaaat

SEQ ID NO: 4215282 - DNA, 25 bp, Homo sapien
ccacaggaggaaggctctaggaagg

SEQ ID NO: 4215283 - DNA, 25 bp, Homo sapien
aaggctctaggaaggaacttgtaca

SEQ ID NO: 4215284 - DNA, 25 bp, Homo sapien
gactctcgactctccaatcattcca

SEQ ID NO: 4215285 - DNA, 25 bp, Homo sapien
ttggtgcatccgactctcgactctc

SEQ ID NO: 4215286 - DNA, 25 bp, Homo sapien
tttctctctcggcttggtgcatccg

SEQ ID NO: 4215287 - DNA, 25 bp, Homo sapien
tcggcttggtgcatccgactctcga

SEQ ID NO: 4215288 - DNA, 25 bp, Homo sapien
cagtaaaagtgaaggtctccgtgca

SEQ ID NO: 4215289 - DNA, 25 bp, Homo sapien
aacatgtgggcactggatcggatca

SEQ ID NO: 4215290 - DNA, 25 bp, Homo sapien
caatgacaaaggttgcatagggtgc

SEQ ID NO: 4215291 - DNA, 25 bp, Homo sapien
catagggtgcaagtggtagcagtaa

SEQ ID NO: 4215292 - DNA, 25 bp, Homo sapien
tctgcaaactagggatgctcatagg

SEQ ID NO: 4215293 - DNA, 25 bp, Homo sapien
ctgcccgaattggctgtgagggtgg

SEQ ID NO: 4215294 - DNA, 25 bp, Homo sapien
cactctgatcagctgcccgaattgg

SEQ ID NO: 4215295 - DNA, 25 bp, Homo sapien
gctgcccgaattggctgtgagggtg

SEQ ID NO: 4215296 - DNA, 25 bp, Homo sapien
ttacaccagactcttaataactgcc

SEQ ID NO: 4215297 - DNA, 25 bp, Homo sapien
caccagactcttaataactgccgtg

SEQ ID NO: 4215298 - DNA, 25 bp, Homo sapien
agactcttaataactgccgtgtgcc

SEQ ID NO: 4215299 - DNA, 25 bp, Homo sapien
ccagactcttaataactgccgtgtg

SEQ ID NO: 4215300 - DNA, 25 bp, Homo sapien
cagttccattaggactgcttcatcc

SEQ ID NO: 4215301 - DNA, 25 bp, Homo sapien
atgctcagagccataaggcagttcc

SEQ ID NO: 4215302 - DNA, 25 bp, Homo sapien
taaatgcctttaagcaaatgctcag

SEQ ID NO: 4215303 - DNA, 25 bp, Homo sapien
gagccataaggcagttccattagga

SEQ ID NO: 4215304 - DNA, 25 bp, Homo sapien
gcagagtaaggcctgctcaggaacc

SEQ ID NO: 4215305 - DNA, 25 bp, Homo sapien
gaacccagcgggaagtcttgtgtct

SEQ ID NO: 4215306 - DNA, 25 bp, Homo sapien
aagcagagtaaggcctgctcaggaa

SEQ ID NO: 4215307 - DNA, 25 bp, Homo sapien
caggaacccagcgggaagtcttgtg

SEQ ID NO: 4215308 - DNA, 25 bp, Homo sapien
tatgatcatgtgaatagcgagaagt

SEQ ID NO: 4215309 - DNA, 25 bp, Homo sapien
tccatatcagtttcaggtatgatca

SEQ ID NO: 4215310 - DNA, 25 bp, Homo sapien
ggcagcagatggcttttcgctgctg

SEQ ID NO: 4215311 - DNA, 25 bp, Homo sapien
taatagctgtgcttgtatcttggca

SEQ ID NO: 4215312 - DNA, 25 bp, Homo sapien
gggcacagtagatgctaatgacttt

SEQ ID NO: 4215313 - DNA, 25 bp, Homo sapien
tagatgctaatgactttgtaacggc

SEQ ID NO: 4215314 - DNA, 25 bp, Homo sapien
taatgactttgtaacggcagcaggg

SEQ ID NO: 4215315 - DNA, 25 bp, Homo sapien
ccccaggggcacagtagatgctaat

SEQ ID NO: 4215316 - DNA, 25 bp, Homo sapien
gactgctggggataaacctggagaa

SEQ ID NO: 4215317 - DNA, 25 bp, Homo sapien
ctggagaatgtgttcatgagggtca

SEQ ID NO: 4215318 - DNA, 25 bp, Homo sapien
gtgttcatgagggtcacacaaaggg

SEQ ID NO: 4215319 - DNA, 25 bp, Homo sapien
acatgcagaactgggatgaagtcca

SEQ ID NO: 4215320 - DNA, 25 bp, Homo sapien
cttccccagtcaccatctgcaccat

SEQ ID NO: 4215321 - DNA, 25 bp, Homo sapien
ggcggcacctcagcaggctcggctt

SEQ ID NO: 4215322 - DNA, 25 bp, Homo sapien
ggcgcctttccagtgctttgtgcag

SEQ ID NO: 4215323 - DNA, 25 bp, Homo sapien
gtagccccgcgagatgctgtcatcc

SEQ ID NO: 4215324 - DNA, 25 bp, Homo sapien
tttgtgcagtcctcacccaagcact

SEQ ID NO: 4215325 - DNA, 25 bp, Homo sapien
tcgagttgaaggggactcagggaca

SEQ ID NO: 4215326 - DNA, 25 bp, Homo sapien
cttcgagttgaaggggactcaggga

SEQ ID NO: 4215327 - DNA, 25 bp, Homo sapien
tacttcgagttgaaggggactcagg

SEQ ID NO: 4215328 - DNA, 25 bp, Homo sapien
ctacttcgagttgaaggggactcag

SEQ ID NO: 4215329 - DNA, 25 bp, Homo sapien
tttcccacacggtgtgatgctccgc

SEQ ID NO: 4215330 - DNA, 25 bp, Homo sapien
gacaggactgcgtttgtccaaatgc

SEQ ID NO: 4215331 - DNA, 25 bp, Homo sapien
gatgctccgccaggactgtagacga

SEQ ID NO: 4215332 - DNA, 25 bp, Homo sapien
gcaaaagtgttggatgactcgcctg

SEQ ID NO: 4215333 - DNA, 25 bp, Homo sapien
gcacagcatgagatccaaaggcagg

SEQ ID NO: 4215334 - DNA, 25 bp, Homo sapien
tgggcacagcatgagatccaaaggc

SEQ ID NO: 4215335 - DNA, 25 bp, Homo sapien
caagtaggtgcaatatcccttttct

SEQ ID NO: 4215336 - DNA, 25 bp, Homo sapien
ggcagggcaaggaaactggccacaa

SEQ ID NO: 4215337 - DNA, 25 bp, Homo sapien
tcaaagtgataaatcgctccaaact

SEQ ID NO: 4215338 - DNA, 25 bp, Homo sapien
caaactttttttggcggcgctgaga

SEQ ID NO: 4215339 - DNA, 25 bp, Homo sapien
catgtgcgaaggtgtccaaactgac

SEQ ID NO: 4215340 - DNA, 25 bp, Homo sapien
gcgcgcatgtgcgaaggtgtccaaa

SEQ ID NO: 4215341 - DNA, 25 bp, Homo sapien
ggaatcaagggtgatcattactact

SEQ ID NO: 4215342 - DNA, 25 bp, Homo sapien
atcaagggtgatcattactacttgg

SEQ ID NO: 4215343 - DNA, 25 bp, Homo sapien
gaatcaagggtgatcattactactt

SEQ ID NO: 4215344 - DNA, 25 bp, Homo sapien
aatcaagggtgatcattactacttg

SEQ ID NO: 4215345 - DNA, 25 bp, Homo sapien
ggtaggcacctctccatctaaactg

SEQ ID NO: 4215346 - DNA, 25 bp, Homo sapien
tcacctttatgcacaggacagcggg

SEQ ID NO: 4215347 - DNA, 25 bp, Homo sapien
gggatggtccctagagagtctctta

SEQ ID NO: 4215348 - DNA, 25 bp, Homo sapien
gagtctcttacaccgatcagaagca

SEQ ID NO: 4215349 - DNA, 25 bp, Homo sapien
ttggcggttgggcaccaaggcaagg

SEQ ID NO: 4215350 - DNA, 25 bp, Homo sapien
tgggcaccaaggcaaggtgctcagc

SEQ ID NO: 4215351 - DNA, 25 bp, Homo sapien
aaggtgctcagccacccctggggtg

SEQ ID NO: 4215352 - DNA, 25 bp, Homo sapien
cggttgggcaccaaggcaaggtgct

SEQ ID NO: 4215353 - DNA, 25 bp, Homo sapien
tctcttgggccagcgacagctcaga

SEQ ID NO: 4215354 - DNA, 25 bp, Homo sapien
gggtagctagggcagctccgccaac

SEQ ID NO: 4215355 - DNA, 25 bp, Homo sapien
cagctcagacatcccgtcagagggt

SEQ ID NO: 4215356 - DNA, 25 bp, Homo sapien
gccaacttgttggaggcctcttttc

SEQ ID NO: 4215357 - DNA, 25 bp, Homo sapien
cctgtgcagggcgaagtagtcctat

SEQ ID NO: 4215358 - DNA, 25 bp, Homo sapien
tgattgattacctccctgaaaggtc

SEQ ID NO: 4215359 - DNA, 25 bp, Homo sapien
tttcacttttactccggcacgacag

SEQ ID NO: 4215360 - DNA, 25 bp, Homo sapien
cacgcgggctcgcagtaatttcctt

SEQ ID NO: 4215361 - DNA, 25 bp, Homo sapien
gctgagccggctggtcccgagcgcg

SEQ ID NO: 4215362 - DNA, 25 bp, Homo sapien
gaggtagagaaggtaactgggcaga

SEQ ID NO: 4215363 - DNA, 25 bp, Homo sapien
aactgggcagaaatcgcccggccgc

SEQ ID NO: 4215364 - DNA, 25 bp, Homo sapien
caccagctgcgcgtactcgctgagc

SEQ ID NO: 4215365 - DNA, 25 bp, Homo sapien
tctgggaccgaaaacgcaatttaca

SEQ ID NO: 4215366 - DNA, 25 bp, Homo sapien
agaaatctgggaccgaaaacgcaat

SEQ ID NO: 4215367 - DNA, 25 bp, Homo sapien
tatacacatcagaagttggatggga

SEQ ID NO: 4215368 - DNA, 25 bp, Homo sapien
aggattgtaaaaccgaatgatttgc

SEQ ID NO: 4215369 - DNA, 25 bp, Homo sapien
aaacaaagtggagaatataaggcat

SEQ ID NO: 4215370 - DNA, 25 bp, Homo sapien
gccacgtttctatcagatgacgatg

SEQ ID NO: 4215371 - DNA, 25 bp, Homo sapien
gacgatgtgattgtgattggatcag

SEQ ID NO: 4215372 - DNA, 25 bp, Homo sapien
gtgtgaacaagagactagaggtttg

SEQ ID NO: 4215373 - DNA, 25 bp, Homo sapien
attggatcagatgaaagtgtttggc

SEQ ID NO: 4215374 - DNA, 25 bp, Homo sapien
tgttcgtcatggaaaagactatttt

SEQ ID NO: 4215375 - DNA, 25 bp, Homo sapien
tggtagtgttcgtcatggaaaagac

SEQ ID NO: 4215376 - DNA, 25 bp, Homo sapien
cagagatatttgcttgtagtcacta

SEQ ID NO: 4215377 - DNA, 25 bp, Homo sapien
tagtcactacagcttattccgttgc

SEQ ID NO: 4215378 - DNA, 25 bp, Homo sapien
gggggaatacttgtcactcttgtgt

SEQ ID NO: 4215379 - DNA, 25 bp, Homo sapien
tgtgggggaatacttgtcactcttg

SEQ ID NO: 4215380 - DNA, 25 bp, Homo sapien
gtgctctgaagccactcatgaagct

SEQ ID NO: 4215381 - DNA, 25 bp, Homo sapien
aggtgctctgaagccactcatgaag

SEQ ID NO: 4215382 - DNA, 25 bp, Homo sapien
ggtgctctgaagccactcatgaagc

SEQ ID NO: 4215383 - DNA, 25 bp, Homo sapien
ctgcccatccttgactggttctgtt

SEQ ID NO: 4215384 - DNA, 25 bp, Homo sapien
tgtttgtgtagtcatcagcttgttt

SEQ ID NO: 4215385 - DNA, 25 bp, Homo sapien
catccttgactggttctgtttgtgt

SEQ ID NO: 4215386 - DNA, 25 bp, Homo sapien
ggttctgtttgtgtagtcatcagct

SEQ ID NO: 4215387 - DNA, 25 bp, Homo sapien
tgttgcaccaactggaaagaagccc

SEQ ID NO: 4215388 - DNA, 25 bp, Homo sapien
aaagcaaacacaggccccagatctc

SEQ ID NO: 4215389 - DNA, 25 bp, Homo sapien
tctcctgttgcaccaactggaaaga

SEQ ID NO: 4215390 - DNA, 25 bp, Homo sapien
ccagatctcctgttgcaccaactgg

SEQ ID NO: 4215391 - DNA, 25 bp, Homo sapien
cagtctgtattcatgtttgcgtcca

SEQ ID NO: 4215392 - DNA, 25 bp, Homo sapien
aatgttccccatcgctgtgagcaga

SEQ ID NO: 4215393 - DNA, 25 bp, Homo sapien
aagaatcgagtggacatggagtgcc

SEQ ID NO: 4215394 - DNA, 25 bp, Homo sapien
gagtgccggcatgagagcttttgcc

SEQ ID NO: 4215395 - DNA, 25 bp, Homo sapien
gggcactcagcctccggagaaccgc

SEQ ID NO: 4215396 - DNA, 25 bp, Homo sapien
cgtaaagggcactcagcctccggag

SEQ ID NO: 4215397 - DNA, 25 bp, Homo sapien
gtaaagggcactcagcctccggaga

SEQ ID NO: 4215398 - DNA, 25 bp, Homo sapien
cactcagcctccggagaaccgccat

SEQ ID NO: 4215399 - DNA, 25 bp, Homo sapien
tgggataggtcggtcctgaagaaat

SEQ ID NO: 4215400 - DNA, 25 bp, Homo sapien
ttctgggataggtcggtcctgaaga

SEQ ID NO: 4215401 - DNA, 25 bp, Homo sapien
tctgggataggtcggtcctgaagaa

SEQ ID NO: 4215402 - DNA, 25 bp, Homo sapien
cattctgggataggtcggtcctgaa

SEQ ID NO: 4215403 - DNA, 25 bp, Homo sapien
agagacgcagccttggagccaggat

SEQ ID NO: 4215404 - DNA, 25 bp, Homo sapien
agccaggatggtggctcggtgacaa

SEQ ID NO: 4215405 - DNA, 25 bp, Homo sapien
caagtgtaagtgctgcactccacac

SEQ ID NO: 4215406 - DNA, 25 bp, Homo sapien
agtggagagacgcagccttggagcc

SEQ ID NO: 4215407 - DNA, 25 bp, Homo sapien
gggttgcagccagggaatagtccat

SEQ ID NO: 4215408 - DNA, 25 bp, Homo sapien
aacttgtctaaggccccagtgacca

SEQ ID NO: 4215409 - DNA, 25 bp, Homo sapien
gggaatagtccatcgcagagcaagg

SEQ ID NO: 4215410 - DNA, 25 bp, Homo sapien
tgtctaaggccccagtgaccaggaa

SEQ ID NO: 4215411 - DNA, 25 bp, Homo sapien
gcgaggcatccccatgaacatagta

SEQ ID NO: 4215412 - DNA, 25 bp, Homo sapien
gaggcatccccatgaacatagtaac

SEQ ID NO: 4215413 - DNA, 25 bp, Homo sapien
ctgcgaggcatccccatgaacatag

SEQ ID NO: 4215414 - DNA, 25 bp, Homo sapien
cgaggcatccccatgaacatagtaa

SEQ ID NO: 4215415 - DNA, 25 bp, Homo sapien
gccaaaagccctgccttggtagctt

SEQ ID NO: 4215416 - DNA, 25 bp, Homo sapien
aaagctgaaagtgccaaaagccctg

SEQ ID NO: 4215417 - DNA, 25 bp, Homo sapien
gtgccaaaagccctgccttggtagc

SEQ ID NO: 4215418 - DNA, 25 bp, Homo sapien
ttaaagctgaaagtgccaaaagccc

SEQ ID NO: 4215419 - DNA, 25 bp, Homo sapien
tttgcagatgcccacatcgtgatag

SEQ ID NO: 4215420 - DNA, 25 bp, Homo sapien
ccacatcgtgatagttgaaatagca

SEQ ID NO: 4215421 - DNA, 25 bp, Homo sapien
gatagttgaaatagcaaagcccagt

SEQ ID NO: 4215422 - DNA, 25 bp, Homo sapien
ttgaaatagcaaagcccagtaaagg

SEQ ID NO: 4215423 - DNA, 25 bp, Homo sapien
ctgcatgtgtcttcttcctggacat

SEQ ID NO: 4215424 - DNA, 25 bp, Homo sapien
ttctgcatgtgtcttcttcctggac

SEQ ID NO: 4215425 - DNA, 25 bp, Homo sapien
tctgcatgtgtcttcttcctggaca

SEQ ID NO: 4215426 - DNA, 25 bp, Homo sapien
aacttttgggatagcttgtactctg

SEQ ID NO: 4215427 - DNA, 25 bp, Homo sapien
gacttagaccattggattctacctt

SEQ ID NO: 4215428 - DNA, 25 bp, Homo sapien
agtctcctccgctgtgcaattagcc

SEQ ID NO: 4215429 - DNA, 25 bp, Homo sapien
tagcccactctttatatcttctgcc

SEQ ID NO: 4215430 - DNA, 25 bp, Homo sapien
tagcttttccgtagctgttagagag

SEQ ID NO: 4215431 - DNA, 25 bp, Homo sapien
caaccctgggcgctaggccctctgt

SEQ ID NO: 4215432 - DNA, 25 bp, Homo sapien
accctgggcgctaggccctctgtgt

SEQ ID NO: 4215433 - DNA, 25 bp, Homo sapien
ctgtgtccttcttttagcttttccg

SEQ ID NO: 4215434 - DNA, 25 bp, Homo sapien
ctgaagatttacattgatagttgaa

SEQ ID NO: 4215435 - DNA, 25 bp, Homo sapien
tgaagatttacattgatagttgaat

SEQ ID NO: 4215436 - DNA, 25 bp, Homo sapien
aagatttacattgatagttgaattt

SEQ ID NO: 4215437 - DNA, 25 bp, Homo sapien
tctgaagatttacattgatagttga

SEQ ID NO: 4215438 - DNA, 25 bp, Homo sapien
ctggtgttaactctgaccttttttg

SEQ ID NO: 4215439 - DNA, 25 bp, Homo sapien
cagacagattcatgtgattgatgta

SEQ ID NO: 4215440 - DNA, 25 bp, Homo sapien
tacagacagattcatgtgattgatg

SEQ ID NO: 4215441 - DNA, 25 bp, Homo sapien
gacagattcatgtgattgatgtata

SEQ ID NO: 4215442 - DNA, 25 bp, Homo sapien
attacagacagattcatgtgattga

SEQ ID NO: 4215443 - DNA, 25 bp, Homo sapien
attagaagatctaaatgaacattgg

SEQ ID NO: 4215444 - DNA, 25 bp, Homo sapien
aattagaagatctaaatgaacattg

SEQ ID NO: 4215445 - DNA, 25 bp, Homo sapien
ttagaagatctaaatgaacattgga

SEQ ID NO: 4215446 - DNA, 25 bp, Homo sapien
tgcttctcccaaggtagatctcgac

SEQ ID NO: 4215447 - DNA, 25 bp, Homo sapien
tgcgtgggttctcccgtcttccgct

SEQ ID NO: 4215448 - DNA, 25 bp, Homo sapien
ccaaagtcggccaaaatgaatgggc

SEQ ID NO: 4215449 - DNA, 25 bp, Homo sapien
caaattggcaggagacgtgaaggca

SEQ ID NO: 4215450 - DNA, 25 bp, Homo sapien
catccgtcacccctcgccggcaatg

SEQ ID NO: 4215451 - DNA, 25 bp, Homo sapien
tggtggggggaacgccgatcgtgcg

SEQ ID NO: 4215452 - DNA, 25 bp, Homo sapien
tccgtcacccctcgccggcaatggg

SEQ ID NO: 4215453 - DNA, 25 bp, Homo sapien
gaacgccgatcgtgcgcatccgtca

SEQ ID NO: 4215454 - DNA, 25 bp, Homo sapien
acaaaaaatgtcagctgctggcccg

SEQ ID NO: 4215455 - DNA, 25 bp, Homo sapien
gccaccgcgaagagttgggctctgt

SEQ ID NO: 4215456 - DNA, 25 bp, Homo sapien
ctttcaggccgcaggaagaggaacg

SEQ ID NO: 4215457 - DNA, 25 bp, Homo sapien
cgaggttcaggcctttcaggccgca

SEQ ID NO: 4215458 - DNA, 25 bp, Homo sapien
ggcgtaggcgccgtgcttttgctcc

SEQ ID NO: 4215459 - DNA, 25 bp, Homo sapien
tttcagcgggcggaaaagcctcggc

SEQ ID NO: 4215460 - DNA, 25 bp, Homo sapien
ctttataagccgactcgcccggcag

SEQ ID NO: 4215461 - DNA, 25 bp, Homo sapien
tgtctaaccctaactgagaagggcg

SEQ ID NO: 4215462 - DNA, 25 bp, Homo sapien
cagctaccggtggtgatcgacaacg

SEQ ID NO: 4215463 - DNA, 25 bp, Homo sapien
gtaacatgaggagcacggtgcgtcc

SEQ ID NO: 4215464 - DNA, 25 bp, Homo sapien
ttcctgcgagaagcaatagcgggcg

SEQ ID NO: 4215465 - DNA, 25 bp, Homo sapien
caacggctcgggaatgatcaaggcg

SEQ ID NO: 4215466 - DNA, 25 bp, Homo sapien
tgcagaatcagacaccaagatgcgt

SEQ ID NO: 4215467 - DNA, 25 bp, Homo sapien
gcctatgcccaattgaacagagctg

SEQ ID NO: 4215468 - DNA, 25 bp, Homo sapien
tattcagccgcgaaaaagccatcct

SEQ ID NO: 4215469 - DNA, 25 bp, Homo sapien
cgggtaccgcagtagaaaccaggca

SEQ ID NO: 4215470 - DNA, 25 bp, Homo sapien
ctttcgcgtgttaggcgaacgtgat

SEQ ID NO: 4215471 - DNA, 25 bp, Homo sapien
cgcgtgttaggcgaacgtgataacc

SEQ ID NO: 4215472 - DNA, 25 bp, Homo sapien
acctttcgcgtgttaggcgaacgtg

SEQ ID NO: 4215473 - DNA, 25 bp, Homo sapien
cgtgttaggcgaacgtgataaccac

SEQ ID NO: 4215474 - DNA, 25 bp, Homo sapien
ccgcttacgtacctgaaaactcttg

SEQ ID NO: 4215475 - DNA, 25 bp, Homo sapien
ttttttgtgccccagccaactgtag

SEQ ID NO: 4215476 - DNA, 25 bp, Homo sapien
ttagctgagacttggcacccctttc

SEQ ID NO: 4215477 - DNA, 25 bp, Homo sapien
tgtgtactcggatctctgccatagg

SEQ ID NO: 4215478 - DNA, 25 bp, Homo sapien
tcatggatacgagagctgagggctc

SEQ ID NO: 4215479 - DNA, 25 bp, Homo sapien
gagggctcgctagctcgcagcgctc

SEQ ID NO: 4215480 - DNA, 25 bp, Homo sapien
agctgagggctcgctagctcgcagc

SEQ ID NO: 4215481 - DNA, 25 bp, Homo sapien
caggcgtcatggatacgagagctga

SEQ ID NO: 4215482 - DNA, 25 bp, Homo sapien
ccggccagggcggtacaggatgtac

SEQ ID NO: 4215483 - DNA, 25 bp, Homo sapien
tacaggatgtaccacagagacccac

SEQ ID NO: 4215484 - DNA, 25 bp, Homo sapien
tctgtcttcccgtggcagtgcggga

SEQ ID NO: 4215485 - DNA, 25 bp, Homo sapien
gtccggctctgtcttcccgtggcag

SEQ ID NO: 4215486 - DNA, 25 bp, Homo sapien
tcccttccttccacggtggcgtcac

SEQ ID NO: 4215487 - DNA, 25 bp, Homo sapien
ctcccttccttccacggtggcgtca

SEQ ID NO: 4215488 - DNA, 25 bp, Homo sapien
cgagccacgctccgcccctcccttc

SEQ ID NO: 4215489 - DNA, 25 bp, Homo sapien
agccacgctccgcccctcccttcct

SEQ ID NO: 4215490 - DNA, 25 bp, Homo sapien
tgtctccgccatcttgggaggacgt

SEQ ID NO: 4215491 - DNA, 25 bp, Homo sapien
tctgtctccgccatcttgggaggac

SEQ ID NO: 4215492 - DNA, 25 bp, Homo sapien
ctccgccatcttgggaggacgtcac

SEQ ID NO: 4215493 - DNA, 25 bp, Homo sapien
tctccgccatcttgggaggacgtca

SEQ ID NO: 4215494 - DNA, 25 bp, Homo sapien
atagcaacccaaggggggaacacag

SEQ ID NO: 4215495 - DNA, 25 bp, Homo sapien
gatagcaacccaaggggggaacaca

SEQ ID NO: 4215496 - DNA, 25 bp, Homo sapien
cacatcaataagtgacggtgaatgg

SEQ ID NO: 4215497 - DNA, 25 bp, Homo sapien
aagtgacggtgaatggcaacacttc

SEQ ID NO: 4215498 - DNA, 25 bp, Homo sapien
aacacaatcctttggacacatcaat

SEQ ID NO: 4215499 - DNA, 25 bp, Homo sapien
aatcctttggacacatcaataagtg

SEQ ID NO: 4215500 - DNA, 25 bp, Homo sapien
gaatgaagggatgagtgcctttcta

SEQ ID NO: 4215501 - DNA, 25 bp, Homo sapien
tatcagaatggaattttacccttga

SEQ ID NO: 4215502 - DNA, 25 bp, Homo sapien
tttgatatcagaatggaattttacc

SEQ ID NO: 4215503 - DNA, 25 bp, Homo sapien
tgatatcagaatggaattttaccct

SEQ ID NO: 4215504 - DNA, 25 bp, Homo sapien
gatatcagaatggaattttaccctt

SEQ ID NO: 4215505 - DNA, 25 bp, Homo sapien
ttaaactggaattccccaatcacta

SEQ ID NO: 4215506 - DNA, 25 bp, Homo sapien
gaattccccaatcactatggtacag

SEQ ID NO: 4215507 - DNA, 25 bp, Homo sapien
cagtctctctaaaaggtgctcacag

SEQ ID NO: 4215508 - DNA, 25 bp, Homo sapien
tgcttcccgctgtttgttcagtctc

SEQ ID NO: 4215509 - DNA, 25 bp, Homo sapien
ctgtcaagatttaaagttcctgtgt

SEQ ID NO: 4215510 - DNA, 25 bp, Homo sapien
ttcacctgactctgatcaagaaaga

SEQ ID NO: 4215511 - DNA, 25 bp, Homo sapien
tcctgtgtatataaactccaacagt

SEQ ID NO: 4215512 - DNA, 25 bp, Homo sapien
tctgtagatcgcaccaaaatactca

SEQ ID NO: 4215513 - DNA, 25 bp, Homo sapien
tacttttgctgtgaagactactgac

SEQ ID NO: 4215514 - DNA, 25 bp, Homo sapien
aaatctacttttgctgtgaagacta

SEQ ID NO: 4215515 - DNA, 25 bp, Homo sapien
tgctgtgaagactactgactagctt

SEQ ID NO: 4215516 - DNA, 25 bp, Homo sapien
tgaagactactgactagcttttata

SEQ ID NO: 4215517 - DNA, 25 bp, Homo sapien
tgagatagtcagcagcctgatgaat

SEQ ID NO: 4215518 - DNA, 25 bp, Homo sapien
gaagaaggattagcaataaaagcaa

SEQ ID NO: 4215519 - DNA, 25 bp, Homo sapien
cactttgagatagtcagcagcctga

SEQ ID NO: 4215520 - DNA, 25 bp, Homo sapien
ttttgcatttagtgaccacctcttc

SEQ ID NO: 4215521 - DNA, 25 bp, Homo sapien
tataatctcgcagagtaagaagaca

SEQ ID NO: 4215522 - DNA, 25 bp, Homo sapien
tctctcgattattataatctcgcag

SEQ ID NO: 4215523 - DNA, 25 bp, Homo sapien
gtctgttgattcaattcaatgtttc

SEQ ID NO: 4215524 - DNA, 25 bp, Homo sapien
ttctgatttctctcgattattataa

SEQ ID NO: 4215525 - DNA, 25 bp, Homo sapien
ggatattgcactgttttattctgcc

SEQ ID NO: 4215526 - DNA, 25 bp, Homo sapien
ttgagatgactttttcgctaacgcg

SEQ ID NO: 4215527 - DNA, 25 bp, Homo sapien
ctaacgcgccttgtttaggatttgc

SEQ ID NO: 4215528 - DNA, 25 bp, Homo sapien
gtcactgggatattgcactgtttta

SEQ ID NO: 4215529 - DNA, 25 bp, Homo sapien
taaggactcttgacgctggctatat

SEQ ID NO: 4215530 - DNA, 25 bp, Homo sapien
gagttctccgcctcataaggactct

SEQ ID NO: 4215531 - DNA, 25 bp, Homo sapien
ccacataagtggcagacgtaaggtt

SEQ ID NO: 4215532 - DNA, 25 bp, Homo sapien
tgtgcaacttgttctactacaggtg

SEQ ID NO: 4215533 - DNA, 25 bp, Homo sapien
aatcttgagattgctagaagttgca

SEQ ID NO: 4215534 - DNA, 25 bp, Homo sapien
ggaagactagctgacatttctgagc

SEQ ID NO: 4215535 - DNA, 25 bp, Homo sapien
gaagttgcaaactgtaagttgcata

SEQ ID NO: 4215536 - DNA, 25 bp, Homo sapien
gatgcatgcgactatggaagactag

SEQ ID NO: 4215537 - DNA, 25 bp, Homo sapien
tctgtccacacctatcacagacata

SEQ ID NO: 4215538 - DNA, 25 bp, Homo sapien
gtgctggcttgagcaaatctctgtc

SEQ ID NO: 4215539 - DNA, 25 bp, Homo sapien
tacggacatgataggtcagtgtgct

SEQ ID NO: 4215540 - DNA, 25 bp, Homo sapien
atctctgtccacacctatcacagac

SEQ ID NO: 4215541 - DNA, 25 bp, Homo sapien
tgttttcgagaatgagtgataagag

SEQ ID NO: 4215542 - DNA, 25 bp, Homo sapien
ctgtatgttttcgagaatgagtgat

SEQ ID NO: 4215543 - DNA, 25 bp, Homo sapien
aactagagacagcaaatgccttccc

SEQ ID NO: 4215544 - DNA, 25 bp, Homo sapien
cacaggtatcacatacataaggctt

SEQ ID NO: 4215545 - DNA, 25 bp, Homo sapien
gtgtttgttgagctctcctgaggaa

SEQ ID NO: 4215546 - DNA, 25 bp, Homo sapien
ttgttgagctctcctgaggaaataa

SEQ ID NO: 4215547 - DNA, 25 bp, Homo sapien
tgggaccgaaagtgtttgttgagct

SEQ ID NO: 4215548 - DNA, 25 bp, Homo sapien
ctgtatgggaccgaaagtgtttgtt

SEQ ID NO: 4215549 - DNA, 25 bp, Homo sapien
ttggtatatctgtgcaatttaatcc

SEQ ID NO: 4215550 - DNA, 25 bp, Homo sapien
taaaaactattgattatctggcata

SEQ ID NO: 4215551 - DNA, 25 bp, Homo sapien
gtatatctgtgcaatttaatccaaa

SEQ ID NO: 4215552 - DNA, 25 bp, Homo sapien
tttaattcatactccaaacaactaa

SEQ ID NO: 4215553 - DNA, 25 bp, Homo sapien
tagtgagtgtcagttatatgccaga

SEQ ID NO: 4215554 - DNA, 25 bp, Homo sapien
agtactcacattattctaggtagga

SEQ ID NO: 4215555 - DNA, 25 bp, Homo sapien
cactggctaagagatacagctggga

SEQ ID NO: 4215556 - DNA, 25 bp, Homo sapien
tatggtgtaaactaaagcgcgtcag

SEQ ID NO: 4215557 - DNA, 25 bp, Homo sapien
tttaaaagctgctagctaagacaaa

SEQ ID NO: 4215558 - DNA, 25 bp, Homo sapien
aatttccacataattcgcagataaa

SEQ ID NO: 4215559 - DNA, 25 bp, Homo sapien
aattcgcagataaatggtctttctc

SEQ ID NO: 4215560 - DNA, 25 bp, Homo sapien
ttccacataattcgcagataaatgg

SEQ ID NO: 4215561 - DNA, 25 bp, Homo sapien
cacataattcgcagataaatggtct

SEQ ID NO: 4215562 - DNA, 25 bp, Homo sapien
ttaaactgcttaaatgtaaatctca

SEQ ID NO: 4215563 - DNA, 25 bp, Homo sapien
agtttttgaaatagacatctaattt

SEQ ID NO: 4215564 - DNA, 25 bp, Homo sapien
ttaaggaatagcactaatatgagca

SEQ ID NO: 4215565 - DNA, 25 bp, Homo sapien
gaatagcactaatatgagcaccaaa

SEQ ID NO: 4215566 - DNA, 25 bp, Homo sapien
ggtatgccttgaatcctcaaccaga

SEQ ID NO: 4215567 - DNA, 25 bp, Homo sapien
ctgggcctcaaggttaagttcaagc

SEQ ID NO: 4215568 - DNA, 25 bp, Homo sapien
tactcaagggagcaatcagcacact

SEQ ID NO: 4215569 - DNA, 25 bp, Homo sapien
cagggtgagctgttatatcggctta

SEQ ID NO: 4215570 - DNA, 25 bp, Homo sapien
ctggagtctagagttttatctgcac

SEQ ID NO: 4215571 - DNA, 25 bp, Homo sapien
gacaggcagaagcatgtgatggtcc

SEQ ID NO: 4215572 - DNA, 25 bp, Homo sapien
caacaatgtatctgatgtaggagac

SEQ ID NO: 4215573 - DNA, 25 bp, Homo sapien
gagactgagtatccgtgacaggcag

SEQ ID NO: 4215574 - DNA, 25 bp, Homo sapien
gtgatggtcctcagtcccaagtgga

SEQ ID NO: 4215575 - DNA, 25 bp, Homo sapien
atgatatcttagcaattccatattc

SEQ ID NO: 4215576 - DNA, 25 bp, Homo sapien
gatgtttgctaccaatgatatctta

SEQ ID NO: 4215577 - DNA, 25 bp, Homo sapien
atgaatatatgcaccttaccagaga

SEQ ID NO: 4215578 - DNA, 25 bp, Homo sapien
caccttaccagagatgtttgctacc

SEQ ID NO: 4215579 - DNA, 25 bp, Homo sapien
ctctgtggagtatagacataaagcc

SEQ ID NO: 4215580 - DNA, 25 bp, Homo sapien
gcacaattcttattcagcgcctaaa

SEQ ID NO: 4215581 - DNA, 25 bp, Homo sapien
tgcataacaggagtaagagaggctt

SEQ ID NO: 4215582 - DNA, 25 bp, Homo sapien
cactcttgggctgatactatcgtgg

SEQ ID NO: 4215583 - DNA, 25 bp, Homo sapien
tgcttcccaaaggtagaacatcagg

SEQ ID NO: 4215584 - DNA, 25 bp, Homo sapien
agatagtagttcatggttgggcgca

SEQ ID NO: 4215585 - DNA, 25 bp, Homo sapien
tcaaataagtcagtcccatgtccca

SEQ ID NO: 4215586 - DNA, 25 bp, Homo sapien
gaaggctaatctatgcaaaggcaga

SEQ ID NO: 4215587 - DNA, 25 bp, Homo sapien
catctttgcagctttatgcattctg

SEQ ID NO: 4215588 - DNA, 25 bp, Homo sapien
aacccataagtcaaggagtctctgt

SEQ ID NO: 4215589 - DNA, 25 bp, Homo sapien
cagcatttgaaacactggccagata

SEQ ID NO: 4215590 - DNA, 25 bp, Homo sapien
tatgtggatgttcacatccatggtg

SEQ ID NO: 4215591 - DNA, 25 bp, Homo sapien
gagactaaaattctaaccctggaga

SEQ ID NO: 4215592 - DNA, 25 bp, Homo sapien
gaagtctccaatggccttaaaaagc

SEQ ID NO: 4215593 - DNA, 25 bp, Homo sapien
cagacaatacagatgtggagccatt

SEQ ID NO: 4215594 - DNA, 25 bp, Homo sapien
gttccagtaggtcaacagccatgaa

SEQ ID NO: 4215595 - DNA, 25 bp, Homo sapien
gaatgggagagatagagtacaagct

SEQ ID NO: 4215596 - DNA, 25 bp, Homo sapien
tagtcagcaacaacatagagggaga

SEQ ID NO: 4215597 - DNA, 25 bp, Homo sapien
ggtttcaggttgtcagtagtcagca

SEQ ID NO: 4215598 - DNA, 25 bp, Homo sapien
gacacagttctaattcctctaaggt

SEQ ID NO: 4215599 - DNA, 25 bp, Homo sapien
tacagtccatgtaggccgcatgttg

SEQ ID NO: 4215600 - DNA, 25 bp, Homo sapien
tgtatctgaacagtagcctgcgcta

SEQ ID NO: 4215601 - DNA, 25 bp, Homo sapien
cacttttaggaagagtctacagtcc

SEQ ID NO: 4215602 - DNA, 25 bp, Homo sapien
aaatcactgtcttgttgcactacac

SEQ ID NO: 4215603 - DNA, 25 bp, Homo sapien
gccctagctcagcagcggagcccct

SEQ ID NO: 4215604 - DNA, 25 bp, Homo sapien
agccctagctcagcagcggagcccc

SEQ ID NO: 4215605 - DNA, 25 bp, Homo sapien
cagccctagctcagcagcggagccc

SEQ ID NO: 4215606 - DNA, 25 bp, Homo sapien
ccctagctcagcagcggagcccctc

SEQ ID NO: 4215607 - DNA, 25 bp, Homo sapien
gcatgcccagaacgcaccaagcatt

SEQ ID NO: 4215608 - DNA, 25 bp, Homo sapien
tttgggagcacaaaaccctttatgc

SEQ ID NO: 4215609 - DNA, 25 bp, Homo sapien
aaagcccaacgcctttatcatgtgc

SEQ ID NO: 4215610 - DNA, 25 bp, Homo sapien
gcaggccggtgcacactttgtagga

SEQ ID NO: 4215611 - DNA, 25 bp, Homo sapien
ctatcattgacgtgctgtggatcat

SEQ ID NO: 4215612 - DNA, 25 bp, Homo sapien
gaattttaggtgaatgttctactga

SEQ ID NO: 4215613 - DNA, 25 bp, Homo sapien
tcattgacgtgctgtggatcatttc

SEQ ID NO: 4215614 - DNA, 25 bp, Homo sapien
tgacgtgctgtggatcatttctctg

SEQ ID NO: 4215615 - DNA, 25 bp, Homo sapien
ttctttaaacgctgaatctcctggg

SEQ ID NO: 4215616 - DNA, 25 bp, Homo sapien
catttcaggtggtttccggtcagtc

SEQ ID NO: 4215617 - DNA, 25 bp, Homo sapien
gataaatcgagcaccgacagttggc

SEQ ID NO: 4215618 - DNA, 25 bp, Homo sapien
tctccaaaggaatggcagtcaagct

SEQ ID NO: 4215619 - DNA, 25 bp, Homo sapien
gtagagcaggtgcagcgaggtccac

SEQ ID NO: 4215620 - DNA, 25 bp, Homo sapien
ggtagagcaggtgcagcgaggtcca

SEQ ID NO: 4215621 - DNA, 25 bp, Homo sapien
tcagtgcacagatctgcagcgggca

SEQ ID NO: 4215622 - DNA, 25 bp, Homo sapien
tctggcttaggtccaggaagcgcaa

SEQ ID NO: 4215623 - DNA, 25 bp, Homo sapien
tattgtcatccagtcccaggacttc

SEQ ID NO: 4215624 - DNA, 25 bp, Homo sapien
taggtccaggaagcgcaagttgacc

SEQ ID NO: 4215625 - DNA, 25 bp, Homo sapien
gaaggaccctggatgagagcatagt

SEQ ID NO: 4215626 - DNA, 25 bp, Homo sapien
aggaccctggatgagagcatagtga

SEQ ID NO: 4215627 - DNA, 25 bp, Homo sapien
gaccctggatgagagcatagtgaca

SEQ ID NO: 4215628 - DNA, 25 bp, Homo sapien
caggaaggaccctggatgagagcat

SEQ ID NO: 4215629 - DNA, 25 bp, Homo sapien
agttttgaaagtgagcccaattctg

SEQ ID NO: 4215630 - DNA, 25 bp, Homo sapien
tgaaagtgagcccaattctgaaggt

SEQ ID NO: 4215631 - DNA, 25 bp, Homo sapien
aaagtgagcccaattctgaaggtaa

SEQ ID NO: 4215632 - DNA, 25 bp, Homo sapien
ttttgaaagtgagcccaattctgaa

SEQ ID NO: 4215633 - DNA, 25 bp, Homo sapien
actcatttcctgttagtccaagtat

SEQ ID NO: 4215634 - DNA, 25 bp, Homo sapien
aggaaaggaactcatttcctgttag

SEQ ID NO: 4215635 - DNA, 25 bp, Homo sapien
ggaactcatttcctgttagtccaag

SEQ ID NO: 4215636 - DNA, 25 bp, Homo sapien
aaggaactcatttcctgttagtcca

SEQ ID NO: 4215637 - DNA, 25 bp, Homo sapien
taatttctctaaagacgctaaagaa

SEQ ID NO: 4215638 - DNA, 25 bp, Homo sapien
cctaatgtgttctggcacataggta

SEQ ID NO: 4215639 - DNA, 25 bp, Homo sapien
cataggtaagtttgaatccctggtc

SEQ ID NO: 4215640 - DNA, 25 bp, Homo sapien
gtcttgcccaatgtataatttctct

SEQ ID NO: 4215641 - DNA, 25 bp, Homo sapien
gaacttctaggttaggcattgaccc

SEQ ID NO: 4215642 - DNA, 25 bp, Homo sapien
aatggcatctggaagttgcttaagc

SEQ ID NO: 4215643 - DNA, 25 bp, Homo sapien
aattgtgccggcaatcaagaacttc

SEQ ID NO: 4215644 - DNA, 25 bp, Homo sapien
cattgaccccaaggatacgggcagg

SEQ ID NO: 4215645 - DNA, 25 bp, Homo sapien
ctgaaaagattttttcgtaatggtg

SEQ ID NO: 4215646 - DNA, 25 bp, Homo sapien
aatattaacttgtcacctaatcctg

SEQ ID NO: 4215647 - DNA, 25 bp, Homo sapien
ttcgtaatggtggttcaatcttaga

SEQ ID NO: 4215648 - DNA, 25 bp, Homo sapien
tgtccacataggtgagggatccaat

SEQ ID NO: 4215649 - DNA, 25 bp, Homo sapien
tccatgggattgtccatcagtgtca

SEQ ID NO: 4215650 - DNA, 25 bp, Homo sapien
tcctccagccgtaattctttcaaag

SEQ ID NO: 4215651 - DNA, 25 bp, Homo sapien
gaaccttaagattcactagggaatc

SEQ ID NO: 4215652 - DNA, 25 bp, Homo sapien
caaattctctggaagatgggtgagc

SEQ ID NO: 4215653 - DNA, 25 bp, Homo sapien
tcctgtttctgttttccttgaggta

SEQ ID NO: 4215654 - DNA, 25 bp, Homo sapien
ctgtttctgttttccttgaggtatt

SEQ ID NO: 4215655 - DNA, 25 bp, Homo sapien
cattatattcctgtttctgttttcc

SEQ ID NO: 4215656 - DNA, 25 bp, Homo sapien
tattcctgtttctgttttccttgag

SEQ ID NO: 4215657 - DNA, 25 bp, Homo sapien
ttttcagaagcaggacaagggtgta

SEQ ID NO: 4215658 - DNA, 25 bp, Homo sapien
gctccgtaggataatctgtactgtg

SEQ ID NO: 4215659 - DNA, 25 bp, Homo sapien
tgtactgtgtttaccattagactcc

SEQ ID NO: 4215660 - DNA, 25 bp, Homo sapien
cattagactccctctaaagcaactg

SEQ ID NO: 4215661 - DNA, 25 bp, Homo sapien
gttctagacttttgggcaacagcag

SEQ ID NO: 4215662 - DNA, 25 bp, Homo sapien
tctgatacatggtcttgaagacgtg

SEQ ID NO: 4215663 - DNA, 25 bp, Homo sapien
taaacccaaattcagcatcggctgg

SEQ ID NO: 4215664 - DNA, 25 bp, Homo sapien
tctttctcaattggctaggcattca

SEQ ID NO: 4215665 - DNA, 25 bp, Homo sapien
ctttcttatcttttggagaggtctt

SEQ ID NO: 4215666 - DNA, 25 bp, Homo sapien
tcttatcttttggagaggtctttcc

SEQ ID NO: 4215667 - DNA, 25 bp, Homo sapien
tgtaccattgttccacgccaccatg

SEQ ID NO: 4215668 - DNA, 25 bp, Homo sapien
tctgtaccattgttccacgccacca

SEQ ID NO: 4215669 - DNA, 25 bp, Homo sapien
gtcttcttaatctatcaaggtccat

SEQ ID NO: 4215670 - DNA, 25 bp, Homo sapien
tttgtcttcttaatctatcaaggtc

SEQ ID NO: 4215671 - DNA, 25 bp, Homo sapien
tctatcaaggtccattaccccaatt

SEQ ID NO: 4215672 - DNA, 25 bp, Homo sapien
tcttaatctatcaaggtccattacc

SEQ ID NO: 4215673 - DNA, 25 bp, Homo sapien
gcatgtattaaacgcccagtaaatg

SEQ ID NO: 4215674 - DNA, 25 bp, Homo sapien
cagatgacgtgatgtcactgagtaa

SEQ ID NO: 4215675 - DNA, 25 bp, Homo sapien
tgagtgccccaatgtagtacttggc

SEQ ID NO: 4215676 - DNA, 25 bp, Homo sapien
ccagtaaatgttagtgaatctcagt

SEQ ID NO: 4215677 - DNA, 25 bp, Homo sapien
gaggtcgctgaaggcaaactcctct

SEQ ID NO: 4215678 - DNA, 25 bp, Homo sapien
gcttctggatcctgggttacatcat

SEQ ID NO: 4215679 - DNA, 25 bp, Homo sapien
cagctttgcaaatggccagtccctt

SEQ ID NO: 4215680 - DNA, 25 bp, Homo sapien
gatgtgcttgccaaagtcatgctta

SEQ ID NO: 4215681 - DNA, 25 bp, Homo sapien
ctcagtgttcagtgctcagcagaga

SEQ ID NO: 4215682 - DNA, 25 bp, Homo sapien
tgtaggcaggcaggtcataccctca

SEQ ID NO: 4215683 - DNA, 25 bp, Homo sapien
tctgcagctggttgttccctcatct

SEQ ID NO: 4215684 - DNA, 25 bp, Homo sapien
gaggactgggtagactccaaactgc

SEQ ID NO: 4215685 - DNA, 25 bp, Homo sapien
ccctatgaaatactatatgcacaaa

SEQ ID NO: 4215686 - DNA, 25 bp, Homo sapien
attcagtggacacttaaagacaact

SEQ ID NO: 4215687 - DNA, 25 bp, Homo sapien
ccaaccctatgaaatactatatgca

SEQ ID NO: 4215688 - DNA, 25 bp, Homo sapien
cttaaagacaactactatgtgccca

SEQ ID NO: 4215689 - DNA, 25 bp, Homo sapien
ccccttaaattgtgggccaggcgca

SEQ ID NO: 4215690 - DNA, 25 bp, Homo sapien
gagattatgccccttaaattgtggg

SEQ ID NO: 4215691 - DNA, 25 bp, Homo sapien
cacaatgagattatgccccttaaat

SEQ ID NO: 4215692 - DNA, 25 bp, Homo sapien
ttatgccccttaaattgtgggccag

SEQ ID NO: 4215693 - DNA, 25 bp, Homo sapien
tctgatatcctctacagataggcta

SEQ ID NO: 4215694 - DNA, 25 bp, Homo sapien
ctctggctgcgggttgaaaggtaca

SEQ ID NO: 4215695 - DNA, 25 bp, Homo sapien
tattgcagatggaagaaccatacaa

SEQ ID NO: 4215696 - DNA, 25 bp, Homo sapien
catgacagaaactttgccctctgat

SEQ ID NO: 4215697 - DNA, 25 bp, Homo sapien
tgtgggcaactggtgctcaaccctg

SEQ ID NO: 4215698 - DNA, 25 bp, Homo sapien
gaattgtcctcatgaagggcaaaga

SEQ ID NO: 4215699 - DNA, 25 bp, Homo sapien
gaaacctatggtacacatctcagaa

SEQ ID NO: 4215700 - DNA, 25 bp, Homo sapien
aatgtgtgggttttcactgtgggca

SEQ ID NO: 4215701 - DNA, 25 bp, Homo sapien
ggagatgagattgtcttactttgga

SEQ ID NO: 4215702 - DNA, 25 bp, Homo sapien
atgagattgtcttactttggaatcc

SEQ ID NO: 4215703 - DNA, 25 bp, Homo sapien
gatgaatcaccaaaaggagatgaga

SEQ ID NO: 4215704 - DNA, 25 bp, Homo sapien
aaaagccgtggagatgaatcaccaa

SEQ ID NO: 4215705 - DNA, 25 bp, Homo sapien
ttcaatatctctcgccactaatgga

SEQ ID NO: 4215706 - DNA, 25 bp, Homo sapien
ggtttgtcttcaatatctctcgcca

SEQ ID NO: 4215707 - DNA, 25 bp, Homo sapien
aatatctctcgccactaatggagtt

SEQ ID NO: 4215708 - DNA, 25 bp, Homo sapien
tgtcttcaatatctctcgccactaa

SEQ ID NO: 4215709 - DNA, 25 bp, Homo sapien
cctgttggtgtcaataaagggttca

SEQ ID NO: 4215710 - DNA, 25 bp, Homo sapien
ttggtgtcaataaagggttcacagc

SEQ ID NO: 4215711 - DNA, 25 bp, Homo sapien
ggtgtcaataaagggttcacagcca

SEQ ID NO: 4215712 - DNA, 25 bp, Homo sapien
cagttggaggcccaaatggtgaggg

SEQ ID NO: 4215713 - DNA, 25 bp, Homo sapien
actgtcttgggtcagttggagctac

SEQ ID NO: 4215714 - DNA, 25 bp, Homo sapien
ttggagctacggtggaaggcaatac

SEQ ID NO: 4215715 - DNA, 25 bp, Homo sapien
tgtttggtagaacagaggatccaaa

SEQ ID NO: 4215716 - DNA, 25 bp, Homo sapien
tgggaaggaacgcaaaactgtcttg

SEQ ID NO: 4215717 - DNA, 25 bp, Homo sapien
ttggactgtctcctttggtccttga

SEQ ID NO: 4215718 - DNA, 25 bp, Homo sapien
gatctggcccttgcttggatgcttg

SEQ ID NO: 4215719 - DNA, 25 bp, Homo sapien
gaaccaatttactgagtgggcccag

SEQ ID NO: 4215720 - DNA, 25 bp, Homo sapien
atccaggatctgctgttggactgtc

SEQ ID NO: 4215721 - DNA, 25 bp, Homo sapien
agtatgatgccgttgaatcatttca

SEQ ID NO: 4215722 - DNA, 25 bp, Homo sapien
cagtatgatgccgttgaatcatttc

SEQ ID NO: 4215723 - DNA, 25 bp, Homo sapien
tatgatgccgttgaatcatttcatt

SEQ ID NO: 4215724 - DNA, 25 bp, Homo sapien
gtatgatgccgttgaatcatttcat

SEQ ID NO: 4215725 - DNA, 25 bp, Homo sapien
tcaaagtgtggtgcagttgccgcta

SEQ ID NO: 4215726 - DNA, 25 bp, Homo sapien
agggagcatgctcctgccatggtag

SEQ ID NO: 4215727 - DNA, 25 bp, Homo sapien
gtatttttcctgagtcgacgacatc

SEQ ID NO: 4215728 - DNA, 25 bp, Homo sapien
tgtgaaaatgcaggtcaccggcagg

SEQ ID NO: 4215729 - DNA, 25 bp, Homo sapien
gacttctggttgctgggtgcttcaa

SEQ ID NO: 4215730 - DNA, 25 bp, Homo sapien
tcatcacaggttgcaaaaatctgct

SEQ ID NO: 4215731 - DNA, 25 bp, Homo sapien
catagggaactgcatgagtctgacc

SEQ ID NO: 4215732 - DNA, 25 bp, Homo sapien
tgttggcaagagctgtcgttggctt

SEQ ID NO: 4215733 - DNA, 25 bp, Homo sapien
agattccccccaattgtaaccagtg

SEQ ID NO: 4215734 - DNA, 25 bp, Homo sapien
gattccccccaattgtaaccagtgc

SEQ ID NO: 4215735 - DNA, 25 bp, Homo sapien
cccccaattgtaaccagtgcatgtg

SEQ ID NO: 4215736 - DNA, 25 bp, Homo sapien
tccccccaattgtaaccagtgcatg

SEQ ID NO: 4215737 - DNA, 25 bp, Homo sapien
ctgagcatagtctgaacaacctgga

SEQ ID NO: 4215738 - DNA, 25 bp, Homo sapien
acctggaaggctgcgaatgaagctg

SEQ ID NO: 4215739 - DNA, 25 bp, Homo sapien
gaacaacctggaaggctgcgaatga

SEQ ID NO: 4215740 - DNA, 25 bp, Homo sapien
gcatagtctgaacaacctggaaggc

SEQ ID NO: 4215741 - DNA, 25 bp, Homo sapien
caacgtgtggtccaacttgggtgac

SEQ ID NO: 4215742 - DNA, 25 bp, Homo sapien
tgcaacgtgtggtccaacttgggtg

SEQ ID NO: 4215743 - DNA, 25 bp, Homo sapien
actgcaacgtgtggtccaacttggg

SEQ ID NO: 4215744 - DNA, 25 bp, Homo sapien
gcaacgtgtggtccaacttgggtga

SEQ ID NO: 4215745 - DNA, 25 bp, Homo sapien
tcacagtacacttcctggggaacca

SEQ ID NO: 4215746 - DNA, 25 bp, Homo sapien
cttcacagtacacttcctggggaac

SEQ ID NO: 4215747 - DNA, 25 bp, Homo sapien
ttcacagtacacttcctggggaacc

SEQ ID NO: 4215748 - DNA, 25 bp, Homo sapien
tccatggtaacaggcttgatctctg

SEQ ID NO: 4215749 - DNA, 25 bp, Homo sapien
gctccatggtaacaggcttgatctc

SEQ ID NO: 4215750 - DNA, 25 bp, Homo sapien
tggtaacaggcttgatctctgtctg

SEQ ID NO: 4215751 - DNA, 25 bp, Homo sapien
catggtaacaggcttgatctctgtc

SEQ ID NO: 4215752 - DNA, 25 bp, Homo sapien
ttgtgtctccatcggcacaagctga

SEQ ID NO: 4215753 - DNA, 25 bp, Homo sapien
tgattctgtttctcggtagtaataa

SEQ ID NO: 4215754 - DNA, 25 bp, Homo sapien
gtgtctccatcggcacaagctgatt

SEQ ID NO: 4215755 - DNA, 25 bp, Homo sapien
attctgtttctcggtagtaataaca

SEQ ID NO: 4215756 - DNA, 25 bp, Homo sapien
tgccttttcagtaagtcctggccca

SEQ ID NO: 4215757 - DNA, 25 bp, Homo sapien
cctggcccacgggtgtcagtgtttc

SEQ ID NO: 4215758 - DNA, 25 bp, Homo sapien
tggcccacgggtgtcagtgtttctg

SEQ ID NO: 4215759 - DNA, 25 bp, Homo sapien
cttttcagtaagtcctggcccacgg

SEQ ID NO: 4215760 - DNA, 25 bp, Homo sapien
cattatcttgaaagttcttatagta

SEQ ID NO: 4215761 - DNA, 25 bp, Homo sapien
tggcgccctcattatcttgaaagtt

SEQ ID NO: 4215762 - DNA, 25 bp, Homo sapien
gccctcattatcttgaaagttctta

SEQ ID NO: 4215763 - DNA, 25 bp, Homo sapien
acaggccagagtcataaagggacgt

SEQ ID NO: 4215764 - DNA, 25 bp, Homo sapien
cagcaaggggttcccaaagcttttg

SEQ ID NO: 4215765 - DNA, 25 bp, Homo sapien
cccaaagcttttgttgttatcaaga

SEQ ID NO: 4215766 - DNA, 25 bp, Homo sapien
agcttttgttgttatcaagaaggat

SEQ ID NO: 4215767 - DNA, 25 bp, Homo sapien
atccagcaaggggttcccaaagctt

SEQ ID NO: 4215768 - DNA, 25 bp, Homo sapien
tgatagagggggggaaagaatgctt

SEQ ID NO: 4215769 - DNA, 25 bp, Homo sapien
ctgatagagggggggaaagaatgct

SEQ ID NO: 4215770 - DNA, 25 bp, Homo sapien
actggtccatggcgtccagacgagg

SEQ ID NO: 4215771 - DNA, 25 bp, Homo sapien
cactggtccatggcgtccagacgag

SEQ ID NO: 4215772 - DNA, 25 bp, Homo sapien
ccactggtccatggcgtccagacga

SEQ ID NO: 4215773 - DNA, 25 bp, Homo sapien
tattgagagttacaagtgggagaaa

SEQ ID NO: 4215774 - DNA, 25 bp, Homo sapien
attgagagttacaagtgggagaaag

SEQ ID NO: 4215775 - DNA, 25 bp, Homo sapien
ttattgagagttacaagtgggagaa

SEQ ID NO: 4215776 - DNA, 25 bp, Homo sapien
tattttttattgagagttacaagtg

SEQ ID NO: 4215777 - DNA, 25 bp, Homo sapien
tagatttctccaaagggtttcgatg

SEQ ID NO: 4215778 - DNA, 25 bp, Homo sapien
gaagctaaatcgtgccagtttggcc

SEQ ID NO: 4215779 - DNA, 25 bp, Homo sapien
gggtttcttaggcttctgactcagg

SEQ ID NO: 4215780 - DNA, 25 bp, Homo sapien
ccagtcattctgcagtctcagggaa

SEQ ID NO: 4215781 - DNA, 25 bp, Homo sapien
ccatagtgcctcgaagatgctcttc

SEQ ID NO: 4215782 - DNA, 25 bp, Homo sapien
tagtgccggccctagctttaatccc

SEQ ID NO: 4215783 - DNA, 25 bp, Homo sapien
ctccatcaattgcatgatctttaaa

SEQ ID NO: 4215784 - DNA, 25 bp, Homo sapien
gagtaatggcaaagtttctccatca

SEQ ID NO: 4215785 - DNA, 25 bp, Homo sapien
atgcttgtcttataggaaatgaaag

SEQ ID NO: 4215786 - DNA, 25 bp, Homo sapien
gatgtatctgctggttgatcaaatg

SEQ ID NO: 4215787 - DNA, 25 bp, Homo sapien
ccaggaattaggatccagaagaggg

SEQ ID NO: 4215788 - DNA, 25 bp, Homo sapien
tgtagaacatacttcccacatgctg

SEQ ID NO: 4215789 - DNA, 25 bp, Homo sapien
ttagtttctcatactacctcgctca

SEQ ID NO: 4215790 - DNA, 25 bp, Homo sapien
tacctcgctcaattcctttaggaat

SEQ ID NO: 4215791 - DNA, 25 bp, Homo sapien
gtttctcatactacctcgctcaatt

SEQ ID NO: 4215792 - DNA, 25 bp, Homo sapien
catactacctcgctcaattccttta

SEQ ID NO: 4215793 - DNA, 25 bp, Homo sapien
aagagatggagtcgtggtcagcttc

SEQ ID NO: 4215794 - DNA, 25 bp, Homo sapien
taaggatgcgtctccagtcatttgg

SEQ ID NO: 4215795 - DNA, 25 bp, Homo sapien
tgtaatatcctaggctctttggaaa

SEQ ID NO: 4215796 - DNA, 25 bp, Homo sapien
tccagtactgggaaatcctcacaca

SEQ ID NO: 4215797 - DNA, 25 bp, Homo sapien
cctagcttgggcctgcttcacgctg

SEQ ID NO: 4215798 - DNA, 25 bp, Homo sapien
ttccctagcttgggcctgcttcacg

SEQ ID NO: 4215799 - DNA, 25 bp, Homo sapien
ccctagcttgggcctgcttcacgct

SEQ ID NO: 4215800 - DNA, 25 bp, Homo sapien
tccctagcttgggcctgcttcacgc

SEQ ID NO: 4215801 - DNA, 25 bp, Homo sapien
cgcgcctggccaaaactcgaaaatt

SEQ ID NO: 4215802 - DNA, 25 bp, Homo sapien
gcagcgtcagaagatccatttccaa

SEQ ID NO: 4215803 - DNA, 25 bp, Homo sapien
gagctgaggcaccttcaagtttcct

SEQ ID NO: 4215804 - DNA, 25 bp, Homo sapien
tcagaggctgctttctagagtttgc

SEQ ID NO: 4215805 - DNA, 25 bp, Homo sapien
caagcggagtagatcacacaagggc

SEQ ID NO: 4215806 - DNA, 25 bp, Homo sapien
catgcaagagttgtagtggctgctt

SEQ ID NO: 4215807 - DNA, 25 bp, Homo sapien
gtgtagtcacgcgacatgcaagagt

SEQ ID NO: 4215808 - DNA, 25 bp, Homo sapien
tagtggctgcttcaactcgctgctc

SEQ ID NO: 4215809 - DNA, 25 bp, Homo sapien
tcacgcgacatgcaagagttgtagt

SEQ ID NO: 4215810 - DNA, 25 bp, Homo sapien
gtgtgctggatgcaagcaccccatc

SEQ ID NO: 4215811 - DNA, 25 bp, Homo sapien
gcctatgaaggacaatcctggcacg

SEQ ID NO: 4215812 - DNA, 25 bp, Homo sapien
ggctccagtgtggtggcctatgaag

SEQ ID NO: 4215813 - DNA, 25 bp, Homo sapien
gcactttgttttccacgaggagcaa

SEQ ID NO: 4215814 - DNA, 25 bp, Homo sapien
ctaagaagctggctgtgcagcattt

SEQ ID NO: 4215815 - DNA, 25 bp, Homo sapien
gtgttacctgctctaagaagctggc

SEQ ID NO: 4215816 - DNA, 25 bp, Homo sapien
gggctttgtatgtgttacctgctct

SEQ ID NO: 4215817 - DNA, 25 bp, Homo sapien
tgagccctggcatgccgagggcttt

SEQ ID NO: 4215818 - DNA, 25 bp, Homo sapien
gctaagcattgtgtgaagtgcaaca

SEQ ID NO: 4215819 - DNA, 25 bp, Homo sapien
tgcaacaaggccatcgcatcttggg

SEQ ID NO: 4215820 - DNA, 25 bp, Homo sapien
tgtagcaactgcaagcaagtcatgg

SEQ ID NO: 4215821 - DNA, 25 bp, Homo sapien
tactgtgtgacttgccatgagacca

SEQ ID NO: 4215822 - DNA, 25 bp, Homo sapien
aaggggaccatctcgcacaaagacc

SEQ ID NO: 4215823 - DNA, 25 bp, Homo sapien
ggaccatctcgcacaaagaccgctt

SEQ ID NO: 4215824 - DNA, 25 bp, Homo sapien
gggaccatctcgcacaaagaccgct

SEQ ID NO: 4215825 - DNA, 25 bp, Homo sapien
ccatctcgcacaaagaccgcttcac

SEQ ID NO: 4215826 - DNA, 25 bp, Homo sapien
aagacaacacttgcagccagccctg

SEQ ID NO: 4215827 - DNA, 25 bp, Homo sapien
ctgaggcgtaaaagacaacacttgc

SEQ ID NO: 4215828 - DNA, 25 bp, Homo sapien
ttgcagccagccctggtacttgcat

SEQ ID NO: 4215829 - DNA, 25 bp, Homo sapien
cacttgcagccagccctggtacttg

SEQ ID NO: 4215830 - DNA, 25 bp, Homo sapien
tggccataacattgaaagctgggac

SEQ ID NO: 4215831 - DNA, 25 bp, Homo sapien
catttggtggccataacattgaaag

SEQ ID NO: 4215832 - DNA, 25 bp, Homo sapien
ttggtggccataacattgaaagctg

SEQ ID NO: 4215833 - DNA, 25 bp, Homo sapien
taacattgaaagctgggacagcagg

SEQ ID NO: 4215834 - DNA, 25 bp, Homo sapien
tagcaaatttatagaaatagggaca

SEQ ID NO: 4215835 - DNA, 25 bp, Homo sapien
ctatagcaaatttatagaaataggg

SEQ ID NO: 4215836 - DNA, 25 bp, Homo sapien
atagcaaatttatagaaatagggac

SEQ ID NO: 4215837 - DNA, 25 bp, Homo sapien
tatagcaaatttatagaaataggga

SEQ ID NO: 4215838 - DNA, 25 bp, Homo sapien
tcaccagaatgggaaataatgacaa

SEQ ID NO: 4215839 - DNA, 25 bp, Homo sapien
tgacaatgacgggctcataggcaca

SEQ ID NO: 4215840 - DNA, 25 bp, Homo sapien
taatgacaatgacgggctcataggc

SEQ ID NO: 4215841 - DNA, 25 bp, Homo sapien
caatgacgggctcataggcacatgt

SEQ ID NO: 4215842 - DNA, 25 bp, Homo sapien
gccatgggctcaggagttgtttcag

SEQ ID NO: 4215843 - DNA, 25 bp, Homo sapien
tctgagtgatgcttctatggaacca

SEQ ID NO: 4215844 - DNA, 25 bp, Homo sapien
gcacagctgcaggactgtagctcat

SEQ ID NO: 4215845 - DNA, 25 bp, Homo sapien
caggacccagggatagccatgggct

SEQ ID NO: 4215846 - DNA, 25 bp, Homo sapien
tctgtagtctcaaggacatttcagt

SEQ ID NO: 4215847 - DNA, 25 bp, Homo sapien
aggtcaactgtttggatctgtagtc

SEQ ID NO: 4215848 - DNA, 25 bp, Homo sapien
ttggatctgtagtctcaaggacatt

SEQ ID NO: 4215849 - DNA, 25 bp, Homo sapien
ttgtaaggtcaactgtttggatctg

SEQ ID NO: 4215850 - DNA, 25 bp, Homo sapien
ccgagaccgttgagtgacagagata

SEQ ID NO: 4215851 - DNA, 25 bp, Homo sapien
tgacttatctaaggctccacaggtg

SEQ ID NO: 4215852 - DNA, 25 bp, Homo sapien
gatcgactgagacctactgaaccct

SEQ ID NO: 4215853 - DNA, 25 bp, Homo sapien
tagaatccagaagtaagagaacccg

SEQ ID NO: 4215854 - DNA, 25 bp, Homo sapien
cagcggtccttagcggtgccttctc

SEQ ID NO: 4215855 - DNA, 25 bp, Homo sapien
ccgttatgtaatccgccggctggcg

SEQ ID NO: 4215856 - DNA, 25 bp, Homo sapien
aaacctcgcgagaacgcgccccgag

SEQ ID NO: 4215857 - DNA, 25 bp, Homo sapien
ccgaggcccgttatgtaatccgccg

SEQ ID NO: 4215858 - DNA, 25 bp, Homo sapien
gatccgcttcttgtgtctcctgcgt

SEQ ID NO: 4215859 - DNA, 25 bp, Homo sapien
ctggatccgcttcttgtgtctcctg

SEQ ID NO: 4215860 - DNA, 25 bp, Homo sapien
tcttgtgtctcctgcgttccgccat

SEQ ID NO: 4215861 - DNA, 25 bp, Homo sapien
gcttcttgtgtctcctgcgttccgc

SEQ ID NO: 4215862 - DNA, 25 bp, Homo sapien
taatttcaggccagctaaggccaga

SEQ ID NO: 4215863 - DNA, 25 bp, Homo sapien
tatgaaggtttctcagcacatcagc

SEQ ID NO: 4215864 - DNA, 25 bp, Homo sapien
gtctatgcgcacaaagaaccagctg

SEQ ID NO: 4215865 - DNA, 25 bp, Homo sapien
cgttactacgaggatgacacactgg

SEQ ID NO: 4215866 - DNA, 25 bp, Homo sapien
aaatatgttttcttaccgatgcaga

SEQ ID NO: 4215867 - DNA, 25 bp, Homo sapien
ttttcttaccgatgcagacagggag

SEQ ID NO: 4215868 - DNA, 25 bp, Homo sapien
tctgccactgtcacattactccaca

SEQ ID NO: 4215869 - DNA, 25 bp, Homo sapien
tatgttttcttaccgatgcagacag

SEQ ID NO: 4215870 - DNA, 25 bp, Homo sapien
ggaaatgtgacaacagtcctcttgc

SEQ ID NO: 4215871 - DNA, 25 bp, Homo sapien
tcttgctagaaacttcgatgggaca

SEQ ID NO: 4215872 - DNA, 25 bp, Homo sapien
gttttcagtgaccagtaatgagtcc

SEQ ID NO: 4215873 - DNA, 25 bp, Homo sapien
cataagtgtgttaggctgcatgaaa

SEQ ID NO: 4215874 - DNA, 25 bp, Homo sapien
gaatagtcatcaaggtaggcaagga

SEQ ID NO: 4215875 - DNA, 25 bp, Homo sapien
aatcaagagtaagtatgtcacaggc

SEQ ID NO: 4215876 - DNA, 25 bp, Homo sapien
cgttgaagccagaaagatagattgc

SEQ ID NO: 4215877 - DNA, 25 bp, Homo sapien
gagtatctagacaacagcagtgccc

SEQ ID NO: 4215878 - DNA, 25 bp, Homo sapien
catctttggatgctacagttaacag

SEQ ID NO: 4215879 - DNA, 25 bp, Homo sapien
gctacagttaacagcaaagatttgt

SEQ ID NO: 4215880 - DNA, 25 bp, Homo sapien
tatcatctttggatgctacagttaa

SEQ ID NO: 4215881 - DNA, 25 bp, Homo sapien
tggatgctacagttaacagcaaaga

SEQ ID NO: 4215882 - DNA, 25 bp, Homo sapien
tctgcaactaccagctgtgggctat

SEQ ID NO: 4215883 - DNA, 25 bp, Homo sapien
tggaagtgcactgacaaagagtcgt

SEQ ID NO: 4215884 - DNA, 25 bp, Homo sapien
tcaagctttctctggagcgacctaa

SEQ ID NO: 4215885 - DNA, 25 bp, Homo sapien
taaaatacactacacttcgcagagc

SEQ ID NO: 4215886 - DNA, 25 bp, Homo sapien
tctcttctttagatggttcaccaac

SEQ ID NO: 4215887 - DNA, 25 bp, Homo sapien
aacccggtgacccatcatattggtg

SEQ ID NO: 4215888 - DNA, 25 bp, Homo sapien
ctttgttggacagttgaatcgaaga

SEQ ID NO: 4215889 - DNA, 25 bp, Homo sapien
gttgaatcgaagatacttggccaca

SEQ ID NO: 4215890 - DNA, 25 bp, Homo sapien
ggttaacttcataacatatgtacac

SEQ ID NO: 4215891 - DNA, 25 bp, Homo sapien
cagaataatcaactgccatatgtcc

SEQ ID NO: 4215892 - DNA, 25 bp, Homo sapien
tatgtacactaatacgattttactg

SEQ ID NO: 4215893 - DNA, 25 bp, Homo sapien
catatcccaaatgtaggttaacttc

SEQ ID NO: 4215894 - DNA, 25 bp, Homo sapien
cccctacttataagctctggtgtta

SEQ ID NO: 4215895 - DNA, 25 bp, Homo sapien
tgacatcagcttataatgacattgt

SEQ ID NO: 4215896 - DNA, 25 bp, Homo sapien
ctcacttcagaggcgcatgccatca

SEQ ID NO: 4215897 - DNA, 25 bp, Homo sapien
cacttttaattgatgagaaaggcaa

SEQ ID NO: 4215898 - DNA, 25 bp, Homo sapien
cagactccctggttgtaaataaagc

SEQ ID NO: 4215899 - DNA, 25 bp, Homo sapien
agactccctggttgtaaataaagct

SEQ ID NO: 4215900 - DNA, 25 bp, Homo sapien
cagcctggaagtttgtaccgtggag

SEQ ID NO: 4215901 - DNA, 25 bp, Homo sapien
gcttgctggagctaattctaactag

SEQ ID NO: 4215902 - DNA, 25 bp, Homo sapien
tccccacgagcagattcaagttgcc

SEQ ID NO: 4215903 - DNA, 25 bp, Homo sapien
agttgccctggatatatgcttgctg

SEQ ID NO: 4215904 - DNA, 25 bp, Homo sapien
tgtcactgtgttcagtcccctgaag

SEQ ID NO: 4215905 - DNA, 25 bp, Homo sapien
ggtccagcctatgagcacttccaca

SEQ ID NO: 4215906 - DNA, 25 bp, Homo sapien
tactcaagaaattgggttgccctta

SEQ ID NO: 4215907 - DNA, 25 bp, Homo sapien
gccacaatacaatctagaagctacg

SEQ ID NO: 4215908 - DNA, 25 bp, Homo sapien
cattacactccccatatagatagag

SEQ ID NO: 4215909 - DNA, 25 bp, Homo sapien
acaggtatggcattacactccccat

SEQ ID NO: 4215910 - DNA, 25 bp, Homo sapien
ggtatggcattacactccccatata

SEQ ID NO: 4215911 - DNA, 25 bp, Homo sapien
tggcattacactccccatatagata

SEQ ID NO: 4215912 - DNA, 25 bp, Homo sapien
tagggctcggtgaaaaaactgcttc

SEQ ID NO: 4215913 - DNA, 25 bp, Homo sapien
agggctcggtgaaaaaactgcttct

SEQ ID NO: 4215914 - DNA, 25 bp, Homo sapien
gctcggtgaaaaaactgcttcttta

SEQ ID NO: 4215915 - DNA, 25 bp, Homo sapien
ttgtcttctcatcctttatattttc

SEQ ID NO: 4215916 - DNA, 25 bp, Homo sapien
tctttatgtctttatcatatttcat

SEQ ID NO: 4215917 - DNA, 25 bp, Homo sapien
tccactttcagcttttcctttatct

SEQ ID NO: 4215918 - DNA, 25 bp, Homo sapien
ttttttgtcttctcatcctttatat

SEQ ID NO: 4215919 - DNA, 25 bp, Homo sapien
aacctgatcatcatgtggctcaagt

SEQ ID NO: 4215920 - DNA, 25 bp, Homo sapien
atttccatccagaaaaacctgatca

SEQ ID NO: 4215921 - DNA, 25 bp, Homo sapien
gaaaaacctgatcatcatgtggctc

SEQ ID NO: 4215922 - DNA, 25 bp, Homo sapien
tgatcatcatgtggctcaagtttga

SEQ ID NO: 4215923 - DNA, 25 bp, Homo sapien
tacatttaagagcataattagattt

SEQ ID NO: 4215924 - DNA, 25 bp, Homo sapien
aaactgaacttctagttataggctt

SEQ ID NO: 4215925 - DNA, 25 bp, Homo sapien
acatttaagagcataattagatttc

SEQ ID NO: 4215926 - DNA, 25 bp, Homo sapien
actgaacttctagttataggcttac

SEQ ID NO: 4215927 - DNA, 25 bp, Homo sapien
tgtaatgatgaaccagtctgggata

SEQ ID NO: 4215928 - DNA, 25 bp, Homo sapien
aatgtaatgatgaaccagtctggga

SEQ ID NO: 4215929 - DNA, 25 bp, Homo sapien
taatgtaatgatgaaccagtctggg

SEQ ID NO: 4215930 - DNA, 25 bp, Homo sapien
taatgatgaaccagtctgggataaa

SEQ ID NO: 4215931 - DNA, 25 bp, Homo sapien
ctgggtcatagatccatacatacac

SEQ ID NO: 4215932 - DNA, 25 bp, Homo sapien
tgtatgggaacagcctagaattgct

SEQ ID NO: 4215933 - DNA, 25 bp, Homo sapien
tgattatggcatagggtaaattcct

SEQ ID NO: 4215934 - DNA, 25 bp, Homo sapien
cacactttgtgcaactgtatgggaa

SEQ ID NO: 4215935 - DNA, 25 bp, Homo sapien
tttcaaagatactgacaaactgccc

SEQ ID NO: 4215936 - DNA, 25 bp, Homo sapien
ccacactgaggtaataaacacctac

SEQ ID NO: 4215937 - DNA, 25 bp, Homo sapien
tactggctacaaaacagcctgcacc

SEQ ID NO: 4215938 - DNA, 25 bp, Homo sapien
taaacacctactctcatttctgctg

SEQ ID NO: 4215939 - DNA, 25 bp, Homo sapien
agggtggccgctattactgcaatca

SEQ ID NO: 4215940 - DNA, 25 bp, Homo sapien
tagaatctttcgtggtataaacgga

SEQ ID NO: 4215941 - DNA, 25 bp, Homo sapien
tctccaattatgatgcaatgatagg

SEQ ID NO: 4215942 - DNA, 25 bp, Homo sapien
gaaaatcgttatagctgtcttgact

SEQ ID NO: 4215943 - DNA, 25 bp, Homo sapien
tctgaaagactcctgtacacattag

SEQ ID NO: 4215944 - DNA, 25 bp, Homo sapien
tggtccaaggcacacgtttactatg

SEQ ID NO: 4215945 - DNA, 25 bp, Homo sapien
cccctatatgtatcttggtccaagg

SEQ ID NO: 4215946 - DNA, 25 bp, Homo sapien
tatacattactacttctgatttaaa

SEQ ID NO: 4215947 - DNA, 25 bp, Homo sapien
gataaattagccctggataaggaac

SEQ ID NO: 4215948 - DNA, 25 bp, Homo sapien
cactgtccgtgtctgaatgccgttc

SEQ ID NO: 4215949 - DNA, 25 bp, Homo sapien
cactactgtgctgggatcgatcatc

SEQ ID NO: 4215950 - DNA, 25 bp, Homo sapien
tcaatgaagcccacatcagcagtca

SEQ ID NO: 4215951 - DNA, 25 bp, Homo sapien
caagaaccaaaagtggtgccttcct

SEQ ID NO: 4215952 - DNA, 25 bp, Homo sapien
acttattcattcagtcccaaaatta

SEQ ID NO: 4215953 - DNA, 25 bp, Homo sapien
tcattcagtcccaaaattagtcaga

SEQ ID NO: 4215954 - DNA, 25 bp, Homo sapien
tattcattcagtcccaaaattagtc

SEQ ID NO: 4215955 - DNA, 25 bp, Homo sapien
ttcattcagtcccaaaattagtcag

SEQ ID NO: 4215956 - DNA, 25 bp, Homo sapien
tagctaaaccagaagtgttgctgca

SEQ ID NO: 4215957 - DNA, 25 bp, Homo sapien
taaactgtaccaataatagtgccaa

SEQ ID NO: 4215958 - DNA, 25 bp, Homo sapien
taaagaatgctacaaatgccatgtg

SEQ ID NO: 4215959 - DNA, 25 bp, Homo sapien
catgtgttcaatatggtaatcagcc

SEQ ID NO: 4215960 - DNA, 25 bp, Homo sapien
tcagtcagacgtacaaatcagtgtg

SEQ ID NO: 4215961 - DNA, 25 bp, Homo sapien
tctctgctggagacgaccatctttc

SEQ ID NO: 4215962 - DNA, 25 bp, Homo sapien
tacagaatacactttacgttacgcc

SEQ ID NO: 4215963 - DNA, 25 bp, Homo sapien
gacgaccatctttctctcagtcaga

SEQ ID NO: 4215964 - DNA, 25 bp, Homo sapien
tatctttcacagcaatgcctcctgg

SEQ ID NO: 4215965 - DNA, 25 bp, Homo sapien
gaagctgctgtagaaagatcacaga

SEQ ID NO: 4215966 - DNA, 25 bp, Homo sapien
tgttctgtgggttactcaaacttcc

SEQ ID NO: 4215967 - DNA, 25 bp, Homo sapien
gaacattaaggcgtacaaagctact

SEQ ID NO: 4215968 - DNA, 25 bp, Homo sapien
gcaaagactgacatacactacctat

SEQ ID NO: 4215969 - DNA, 25 bp, Homo sapien
tgagaaacagcctaaagcaaagact

SEQ ID NO: 4215970 - DNA, 25 bp, Homo sapien
tgtataagacgtaaagtcaaactgc

SEQ ID NO: 4215971 - DNA, 25 bp, Homo sapien
caaagcaagatgctctcactgtgac

SEQ ID NO: 4215972 - DNA, 25 bp, Homo sapien
taaaatgtgtcgatacagaaaacat

SEQ ID NO: 4215973 - DNA, 25 bp, Homo sapien
agcaatcaagccaagtttaataaaa

SEQ ID NO: 4215974 - DNA, 25 bp, Homo sapien
aaatgtgtcgatacagaaaacatat

SEQ ID NO: 4215975 - DNA, 25 bp, Homo sapien
ttaataaaatgtgtcgatacagaaa

SEQ ID NO: 4215976 - DNA, 25 bp, Homo sapien
gcattaacatcaaatagccacattt

SEQ ID NO: 4215977 - DNA, 25 bp, Homo sapien
gaaactattaaagtgattgcagcct

SEQ ID NO: 4215978 - DNA, 25 bp, Homo sapien
cagccttgacatagttgcattaaca

SEQ ID NO: 4215979 - DNA, 25 bp, Homo sapien
cacatttatgtccacttacagggac

SEQ ID NO: 4215980 - DNA, 25 bp, Homo sapien
tctgcaaatgggacgggaaaatacc

SEQ ID NO: 4215981 - DNA, 25 bp, Homo sapien
caatgttactggtgataaactcaga

SEQ ID NO: 4215982 - DNA, 25 bp, Homo sapien
caccatgtttataccccaaaatagg

SEQ ID NO: 4215983 - DNA, 25 bp, Homo sapien
tatatatatgcttactgtggaaatg

SEQ ID NO: 4215984 - DNA, 25 bp, Homo sapien
ggccatgctccaaatgtctttaaga

SEQ ID NO: 4215985 - DNA, 25 bp, Homo sapien
gcttagttaggccaattgataccct

SEQ ID NO: 4215986 - DNA, 25 bp, Homo sapien
tattgagtgcctgggtattatcaca

SEQ ID NO: 4215987 - DNA, 25 bp, Homo sapien
cactgaggattgtaatagaggcagc

SEQ ID NO: 4215988 - DNA, 25 bp, Homo sapien
agttacctaggccatatggtttgaa

SEQ ID NO: 4215989 - DNA, 25 bp, Homo sapien
cctgaatagtattcaactaaatcta

SEQ ID NO: 4215990 - DNA, 25 bp, Homo sapien
tcaattaaagttacctaggccatat

SEQ ID NO: 4215991 - DNA, 25 bp, Homo sapien
ctgaatagtattcaactaaatctat

SEQ ID NO: 4215992 - DNA, 25 bp, Homo sapien
gcttgatgaaaatgtgaccagtggc

SEQ ID NO: 4215993 - DNA, 25 bp, Homo sapien
taatgagaatcaaccatacttgctg

SEQ ID NO: 4215994 - DNA, 25 bp, Homo sapien
gcagctaactgatcctcatgatgta

SEQ ID NO: 4215995 - DNA, 25 bp, Homo sapien
caaagacctgaaatactgtggaaac

SEQ ID NO: 4215996 - DNA, 25 bp, Homo sapien
gcaactccaggctagtagcagcaga

SEQ ID NO: 4215997 - DNA, 25 bp, Homo sapien
tgatctctggccaggacactccttg

SEQ ID NO: 4215998 - DNA, 25 bp, Homo sapien
gaagagccgagaataggcaccctac

SEQ ID NO: 4215999 - DNA, 25 bp, Homo sapien
ccactgctgtggtccattcgggtca

SEQ ID NO: 4216000 - DNA, 25 bp, Homo sapien
agacctctaagggattcacggatag

SEQ ID NO: 4216001 - DNA, 25 bp, Homo sapien
gaccaaagtgtgatgatatgacccc

SEQ ID NO: 4216002 - DNA, 25 bp, Homo sapien
tcaatgacgagtgcagacaacaatc

SEQ ID NO: 4216003 - DNA, 25 bp, Homo sapien
aataaacgcattgggacctactcag

SEQ ID NO: 4216004 - DNA, 25 bp, Homo sapien
tattccctatgattaagccactcag

SEQ ID NO: 4216005 - DNA, 25 bp, Homo sapien
ccccaatattccctatgattaagcc

SEQ ID NO: 4216006 - DNA, 25 bp, Homo sapien
tttctagactcaacccccaatattc

SEQ ID NO: 4216007 - DNA, 25 bp, Homo sapien
ccctatgattaagccactcaggacc

SEQ ID NO: 4216008 - DNA, 25 bp, Homo sapien
tcagctctccacttctggagatcca

SEQ ID NO: 4216009 - DNA, 25 bp, Homo sapien
gatttcctgctgttaacccaaagac

SEQ ID NO: 4216010 - DNA, 25 bp, Homo sapien
cattctcctgttgcctaaacctgaa

SEQ ID NO: 4216011 - DNA, 25 bp, Homo sapien
ccagttgcttttagctgatagtgac

SEQ ID NO: 4216012 - DNA, 25 bp, Homo sapien
aggaactgtggcagacagagacctt

SEQ ID NO: 4216013 - DNA, 25 bp, Homo sapien
gcagacagagaccttggttgctccc

SEQ ID NO: 4216014 - DNA, 25 bp, Homo sapien
tcctgaggggaactctgtctcaggg

SEQ ID NO: 4216015 - DNA, 25 bp, Homo sapien
acagagaccttggttgctccccact

SEQ ID NO: 4216016 - DNA, 25 bp, Homo sapien
ggcagagagttcatgttctaataag

SEQ ID NO: 4216017 - DNA, 25 bp, Homo sapien
gagagttcatgttctaataagggaa

SEQ ID NO: 4216018 - DNA, 25 bp, Homo sapien
tccgccaagattccaacgtgtgcaa

SEQ ID NO: 4216019 - DNA, 25 bp, Homo sapien
tcaacgggatgtgaggtgcttccgc

SEQ ID NO: 4216020 - DNA, 25 bp, Homo sapien
tgcagaggccaactgaatcacagag

SEQ ID NO: 4216021 - DNA, 25 bp, Homo sapien
cagaggccaactgaatcacagagga

SEQ ID NO: 4216022 - DNA, 25 bp, Homo sapien
aagtgcagaggccaactgaatcaca

SEQ ID NO: 4216023 - DNA, 25 bp, Homo sapien
gagaagtgcagaggccaactgaatc

SEQ ID NO: 4216024 - DNA, 25 bp, Homo sapien
cgggcgtcagagacgggcaaccttt

SEQ ID NO: 4216025 - DNA, 25 bp, Homo sapien
gctccgcaaggttgaggccccgaca

SEQ ID NO: 4216026 - DNA, 25 bp, Homo sapien
ccgaggatcgatggctgtcggctcc

SEQ ID NO: 4216027 - DNA, 25 bp, Homo sapien
cagaccaggaaatgcgggcgtcaga

SEQ ID NO: 4216028 - DNA, 25 bp, Homo sapien
cgcggtaatccccatcccgaagcag

SEQ ID NO: 4216029 - DNA, 25 bp, Homo sapien
cagttgctaaggctccgcggtaatc

SEQ ID NO: 4216030 - DNA, 25 bp, Homo sapien
gctcgggcgtccgggctccactcct

SEQ ID NO: 4216031 - DNA, 25 bp, Homo sapien
tcgggcgtccgggctccactcctgg

SEQ ID NO: 4216032 - DNA, 25 bp, Homo sapien
taatctagagggaattttgagccag

SEQ ID NO: 4216033 - DNA, 25 bp, Homo sapien
aggagtttcagtctccgggttcctg

SEQ ID NO: 4216034 - DNA, 25 bp, Homo sapien
tggtcgcaggtaatctagagggaat

SEQ ID NO: 4216035 - DNA, 25 bp, Homo sapien
gagggaattttgagccagccaggat

SEQ ID NO: 4216036 - DNA, 25 bp, Homo sapien
cgtgcgttcgtctccggactgcagg

SEQ ID NO: 4216037 - DNA, 25 bp, Homo sapien
gaggcccggtccgtgcgttcgtctc

SEQ ID NO: 4216038 - DNA, 25 bp, Homo sapien
gagacatttgcgcaagtgtaggacg

SEQ ID NO: 4216039 - DNA, 25 bp, Homo sapien
taggacgaagcgagagcggttcctt

SEQ ID NO: 4216040 - DNA, 25 bp, Homo sapien
gatgcttctcggtgggggttatctc

SEQ ID NO: 4216041 - DNA, 25 bp, Homo sapien
ttatctctgggatttaagcgacact

SEQ ID NO: 4216042 - DNA, 25 bp, Homo sapien
tctctgggatttaagcgacacttcc

SEQ ID NO: 4216043 - DNA, 25 bp, Homo sapien
tctgggatttaagcgacacttcccc

SEQ ID NO: 4216044 - DNA, 25 bp, Homo sapien
aaataaatcggcacctccagtaggg

SEQ ID NO: 4216045 - DNA, 25 bp, Homo sapien
gcatcaacttgatccgctcagcttt

SEQ ID NO: 4216046 - DNA, 25 bp, Homo sapien
tgagcaaaataaatcggcacctcca

SEQ ID NO: 4216047 - DNA, 25 bp, Homo sapien
gctcagctttgtcacactcagcaaa

SEQ ID NO: 4216048 - DNA, 25 bp, Homo sapien
gctattagcaatcaactctccagag

SEQ ID NO: 4216049 - DNA, 25 bp, Homo sapien
tctagcccaacaagggagccatttg

SEQ ID NO: 4216050 - DNA, 25 bp, Homo sapien
agtttggtcactaaagggcctggca

SEQ ID NO: 4216051 - DNA, 25 bp, Homo sapien
gaatcagggcgaaatggtgtcacat

SEQ ID NO: 4216052 - DNA, 25 bp, Homo sapien
tccctaaagatgtgatttaaagcaa

SEQ ID NO: 4216053 - DNA, 25 bp, Homo sapien
cctgtctccctaaagatgtgattta

SEQ ID NO: 4216054 - DNA, 25 bp, Homo sapien
agatgtgatttaaagcaatcttctt

SEQ ID NO: 4216055 - DNA, 25 bp, Homo sapien
tccctgtctccctaaagatgtgatt

SEQ ID NO: 4216056 - DNA, 25 bp, Homo sapien
agcgagaatgtttgccccgtgaccc

SEQ ID NO: 4216057 - DNA, 25 bp, Homo sapien
caactcgagtgacaaaggcccacaa

SEQ ID NO: 4216058 - DNA, 25 bp, Homo sapien
cacggcacacgtacatgggaagaaa

SEQ ID NO: 4216059 - DNA, 25 bp, Homo sapien
cacacacctagactgacaactcgag

SEQ ID NO: 4216060 - DNA, 25 bp, Homo sapien
catgtgggaacccagatgggcagcc

SEQ ID NO: 4216061 - DNA, 25 bp, Homo sapien
ccatgtgggaacccagatgggcagc

SEQ ID NO: 4216062 - DNA, 25 bp, Homo sapien
gtgggaacccagatgggcagcccat

SEQ ID NO: 4216063 - DNA, 25 bp, Homo sapien
ctaaggccatgtgggaacccagatg

SEQ ID NO: 4216064 - DNA, 25 bp, Homo sapien
caagttgtggcccagttctcatcaa

SEQ ID NO: 4216065 - DNA, 25 bp, Homo sapien
gtttgtatccacatgaatgctaggg

SEQ ID NO: 4216066 - DNA, 25 bp, Homo sapien
tggagattttaatccccgaacaaca

SEQ ID NO: 4216067 - DNA, 25 bp, Homo sapien
caccctgttagcatttgtcatggag

SEQ ID NO: 4216068 - DNA, 25 bp, Homo sapien
ctatgaaatggccactgcacaaagc

SEQ ID NO: 4216069 - DNA, 25 bp, Homo sapien
gataaacttcactggctatgaaatg

SEQ ID NO: 4216070 - DNA, 25 bp, Homo sapien
caaccatatttcatcatggcagggt

SEQ ID NO: 4216071 - DNA, 25 bp, Homo sapien
aaaattgccagtgccaaccatattt

SEQ ID NO: 4216072 - DNA, 25 bp, Homo sapien
ctgctccactatctgcgggctcggg

SEQ ID NO: 4216073 - DNA, 25 bp, Homo sapien
attctccccaacgtcggtgcagcgc

SEQ ID NO: 4216074 - DNA, 25 bp, Homo sapien
cctccgccgcacgggacttggacat

SEQ ID NO: 4216075 - DNA, 25 bp, Homo sapien
cccctctgctccactatctgcgggc

SEQ ID NO: 4216076 - DNA, 25 bp, Homo sapien
ttcgtgacgtgtaacggagttctcc

SEQ ID NO: 4216077 - DNA, 25 bp, Homo sapien
cgtgtaacggagttctcctcctgaa

SEQ ID NO: 4216078 - DNA, 25 bp, Homo sapien
gacgtgtaacggagttctcctcctg

SEQ ID NO: 4216079 - DNA, 25 bp, Homo sapien
cgtgacgtgtaacggagttctcctc

SEQ ID NO: 4216080 - DNA, 25 bp, Homo sapien
ggagatccacggagatccaccatgg

SEQ ID NO: 4216081 - DNA, 25 bp, Homo sapien
gaggctccggtgcttttctaccaca

SEQ ID NO: 4216082 - DNA, 25 bp, Homo sapien
atcacaagacgaggccggaggtttt

SEQ ID NO: 4216083 - DNA, 25 bp, Homo sapien
cattgatgaggtcagtcttcactcc

SEQ ID NO: 4216084 - DNA, 25 bp, Homo sapien
gcatgcatgggaagcacaaaacgtt

SEQ ID NO: 4216085 - DNA, 25 bp, Homo sapien
catgcatgggaagcacaaaacgttc

SEQ ID NO: 4216086 - DNA, 25 bp, Homo sapien
gcatgggaagcacaaaacgttcaac

SEQ ID NO: 4216087 - DNA, 25 bp, Homo sapien
tgcatgggaagcacaaaacgttcaa

SEQ ID NO: 4216088 - DNA, 25 bp, Homo sapien
tgttaggagaacaagagcttggagc

SEQ ID NO: 4216089 - DNA, 25 bp, Homo sapien
ggagaacaagagcttggagccatcc

SEQ ID NO: 4216090 - DNA, 25 bp, Homo sapien
ttaggagaacaagagcttggagcca

SEQ ID NO: 4216091 - DNA, 25 bp, Homo sapien
agaacaagagcttggagccatcccg

SEQ ID NO: 4216092 - DNA, 25 bp, Homo sapien
gcacggggaagacaagcttactgcc

SEQ ID NO: 4216093 - DNA, 25 bp, Homo sapien
gacaagcttactgcccaatctttta

SEQ ID NO: 4216094 - DNA, 25 bp, Homo sapien
gaaagcacggggaagacaagcttac

SEQ ID NO: 4216095 - DNA, 25 bp, Homo sapien
gggaagacaagcttactgcccaatc

SEQ ID NO: 4216096 - DNA, 25 bp, Homo sapien
ggaaatctatgccggcccgcgctca

SEQ ID NO: 4216097 - DNA, 25 bp, Homo sapien
gtgctcagaaaagccgcagcgggtg

SEQ ID NO: 4216098 - DNA, 25 bp, Homo sapien
cttcacaccccgatgcttccaggtg

SEQ ID NO: 4216099 - DNA, 25 bp, Homo sapien
cgctcagggccacgagctcagtaag

SEQ ID NO: 4216100 - DNA, 25 bp, Homo sapien
aatacagccgcttcactcacttcaa

SEQ ID NO: 4216101 - DNA, 25 bp, Homo sapien
tggtcccactacaaatctctaattt

SEQ ID NO: 4216102 - DNA, 25 bp, Homo sapien
ttttaataaattcagcgttcacatt

SEQ ID NO: 4216103 - DNA, 25 bp, Homo sapien
agaattagcccagtttcaggaaatt

SEQ ID NO: 4216104 - DNA, 25 bp, Homo sapien
ggatctgggcttgtgtactcacccc

SEQ ID NO: 4216105 - DNA, 25 bp, Homo sapien
ggctggcagccgcagttcgggttgg

SEQ ID NO: 4216106 - DNA, 25 bp, Homo sapien
tctgacaaacacgaggcctagacgg

SEQ ID NO: 4216107 - DNA, 25 bp, Homo sapien
tcatggctgcgacctcgcaggagcc

SEQ ID NO: 4216108 - DNA, 25 bp, Homo sapien
gtgtagggagggtcgaggccgccac

SEQ ID NO: 4216109 - DNA, 25 bp, Homo sapien
ggtgaaaaccttggcctatcttaga

SEQ ID NO: 4216110 - DNA, 25 bp, Homo sapien
ccttggcctatcttagattcccggg

SEQ ID NO: 4216111 - DNA, 25 bp, Homo sapien
ctccagccttgacagtctaggtgaa

SEQ ID NO: 4216112 - DNA, 25 bp, Homo sapien
agtaagaatgggtcctgcatagctg

SEQ ID NO: 4216113 - DNA, 25 bp, Homo sapien
cactcagtaagaatgggtcctgcat

SEQ ID NO: 4216114 - DNA, 25 bp, Homo sapien
tctcactcagtaagaatgggtcctg

SEQ ID NO: 4216115 - DNA, 25 bp, Homo sapien
taagaatgggtcctgcatagctggg

SEQ ID NO: 4216116 - DNA, 25 bp, Homo sapien
tatctcacatctacactcccgtcag

SEQ ID NO: 4216117 - DNA, 25 bp, Homo sapien
gacaggctctcatacctgcttccat

SEQ ID NO: 4216118 - DNA, 25 bp, Homo sapien
caggtacaacaaagatactatctca

SEQ ID NO: 4216119 - DNA, 25 bp, Homo sapien
tagcaccgttgtgaggcccagggta

SEQ ID NO: 4216120 - DNA, 25 bp, Homo sapien
ccctattggtcaaggagtccagttc

SEQ ID NO: 4216121 - DNA, 25 bp, Homo sapien
gcaattagcaagactcacactgtgg

SEQ ID NO: 4216122 - DNA, 25 bp, Homo sapien
tgtgcctcctatatggcaaacctga

SEQ ID NO: 4216123 - DNA, 25 bp, Homo sapien
tcatctcaacaggagagacaaccag

SEQ ID NO: 4216124 - DNA, 25 bp, Homo sapien
catgtgcgttagacaacaggatggg

SEQ ID NO: 4216125 - DNA, 25 bp, Homo sapien
tggaaagtcctctgtacattcacga

SEQ ID NO: 4216126 - DNA, 25 bp, Homo sapien
tttggtgagcccgataagtggagca

SEQ ID NO: 4216127 - DNA, 25 bp, Homo sapien
aacgctgtgaacatgaacattctgg

SEQ ID NO: 4216128 - DNA, 25 bp, Homo sapien
gctgcgttcagcttattctcccctg

SEQ ID NO: 4216129 - DNA, 25 bp, Homo sapien
catgcgcgctgatgatcaaaagtcg

SEQ ID NO: 4216130 - DNA, 25 bp, Homo sapien
tcaaaagtcgtttctggacaacaca

SEQ ID NO: 4216131 - DNA, 25 bp, Homo sapien
gggctgcccggcactaatggctgaa

SEQ ID NO: 4216132 - DNA, 25 bp, Homo sapien
taccaatatgctatgtgagtaagct

SEQ ID NO: 4216133 - DNA, 25 bp, Homo sapien
ttgactgatgatcttcctatttaat

SEQ ID NO: 4216134 - DNA, 25 bp, Homo sapien
ttttactgccttcaattatgttatt

SEQ ID NO: 4216135 - DNA, 25 bp, Homo sapien
cattttgatataccaatatgctatg

SEQ ID NO: 4216136 - DNA, 25 bp, Homo sapien
actatgcagcgtaaaacaagagatc

SEQ ID NO: 4216137 - DNA, 25 bp, Homo sapien
gattgaaccattactctcatggcca

SEQ ID NO: 4216138 - DNA, 25 bp, Homo sapien
aagagatcatgtctttcacaggaac

SEQ ID NO: 4216139 - DNA, 25 bp, Homo sapien
gagagggctatcagttttgatgaca

SEQ ID NO: 4216140 - DNA, 25 bp, Homo sapien
tttctacaatactactcaatcgcag

SEQ ID NO: 4216141 - DNA, 25 bp, Homo sapien
gaggcttcagtgatacatacatttt

SEQ ID NO: 4216142 - DNA, 25 bp, Homo sapien
caactggagattggttcaaaacaac

SEQ ID NO: 4216143 - DNA, 25 bp, Homo sapien
catgagaacattaggaagcggtagg

SEQ ID NO: 4216144 - DNA, 25 bp, Homo sapien
tgactccagacagcatgaccccagt

SEQ ID NO: 4216145 - DNA, 25 bp, Homo sapien
ttgtcagtgaagtttagaagcgatg

SEQ ID NO: 4216146 - DNA, 25 bp, Homo sapien
cagattaagtcttttcctgaagctc

SEQ ID NO: 4216147 - DNA, 25 bp, Homo sapien
gaagcgatgcttatggggcccctta

SEQ ID NO: 4216148 - DNA, 25 bp, Homo sapien
tttcaagaagacctgctgaaataca

SEQ ID NO: 4216149 - DNA, 25 bp, Homo sapien
tgctgacatagaaaggacagtgacg

SEQ ID NO: 4216150 - DNA, 25 bp, Homo sapien
tatacaagctgtcaggaaaactgga

SEQ ID NO: 4216151 - DNA, 25 bp, Homo sapien
tcctgatagcctgtaccaaagtagt

SEQ ID NO: 4216152 - DNA, 25 bp, Homo sapien
tcccaacaggttatgaaagctacaa

SEQ ID NO: 4216153 - DNA, 25 bp, Homo sapien
tggaatctgaactttaagtaaaaca

SEQ ID NO: 4216154 - DNA, 25 bp, Homo sapien
catctcaatatatgctggaatctga

SEQ ID NO: 4216155 - DNA, 25 bp, Homo sapien
gagaaaactattgacaaagtataac

SEQ ID NO: 4216156 - DNA, 25 bp, Homo sapien
gtataaccagggaatattcatctca

SEQ ID NO: 4216157 - DNA, 25 bp, Homo sapien
cagcacttccagttgacaaatggat

SEQ ID NO: 4216158 - DNA, 25 bp, Homo sapien
gatccaaaggtaatccaatgtcttt

SEQ ID NO: 4216159 - DNA, 25 bp, Homo sapien
taggaattgtaagtggaatgaagca

SEQ ID NO: 4216160 - DNA, 25 bp, Homo sapien
aatcattattgatataggcttttca

SEQ ID NO: 4216161 - DNA, 25 bp, Homo sapien
ttaatatgtcctgagttctttctgt

SEQ ID NO: 4216162 - DNA, 25 bp, Homo sapien
tttttaatatgtcctgagttctttc

SEQ ID NO: 4216163 - DNA, 25 bp, Homo sapien
aaaattatgatcttatgacagctgt

SEQ ID NO: 4216164 - DNA, 25 bp, Homo sapien
attatgatcttatgacagctgtaac

SEQ ID NO: 4216165 - DNA, 25 bp, Homo sapien
gatttacataacagtttgcatccag

SEQ ID NO: 4216166 - DNA, 25 bp, Homo sapien
tgtaatatagtgtccctgaataact

SEQ ID NO: 4216167 - DNA, 25 bp, Homo sapien
taaagttgtcagtgaaatctcagat

SEQ ID NO: 4216168 - DNA, 25 bp, Homo sapien
cattctgaaatgctatcagtcaggg

SEQ ID NO: 4216169 - DNA, 25 bp, Homo sapien
ttttgagaagtcagtggcaccaatg

SEQ ID NO: 4216170 - DNA, 25 bp, Homo sapien
taaagagcaagaactgtggaccaga

SEQ ID NO: 4216171 - DNA, 25 bp, Homo sapien
taaagccttaaggtgttcatgggcg

SEQ ID NO: 4216172 - DNA, 25 bp, Homo sapien
cacttaagacggtacctggcacaca

SEQ ID NO: 4216173 - DNA, 25 bp, Homo sapien
tagttggctgtctatatgcatttgg

SEQ ID NO: 4216174 - DNA, 25 bp, Homo sapien
taaactgtttaaacacaccctgatg

SEQ ID NO: 4216175 - DNA, 25 bp, Homo sapien
atatttcagtcccatatttggccaa

SEQ ID NO: 4216176 - DNA, 25 bp, Homo sapien
gtcttgaacataggattatttgtcc

SEQ ID NO: 4216177 - DNA, 25 bp, Homo sapien
cctgtccgacagtgtagcaactttc

SEQ ID NO: 4216178 - DNA, 25 bp, Homo sapien
tggatggatactgacaatggtggca

SEQ ID NO: 4216179 - DNA, 25 bp, Homo sapien
cacatatatagtaaaagggcatcct

SEQ ID NO: 4216180 - DNA, 25 bp, Homo sapien
tccacccaggatgaacaaagatcac

SEQ ID NO: 4216181 - DNA, 25 bp, Homo sapien
gtcttgcctcagccttccaagtagc

SEQ ID NO: 4216182 - DNA, 25 bp, Homo sapien
cccgggttgaagcgattgtcttgcc

SEQ ID NO: 4216183 - DNA, 25 bp, Homo sapien
cctcccgggttgaagcgattgtctt

SEQ ID NO: 4216184 - DNA, 25 bp, Homo sapien
tggaattacaggtgcccgccgccac

SEQ ID NO: 4216185 - DNA, 25 bp, Homo sapien
tgacatgttgggcaattactcagct

SEQ ID NO: 4216186 - DNA, 25 bp, Homo sapien
gaatgaggattaacacactggtctg

SEQ ID NO: 4216187 - DNA, 25 bp, Homo sapien
cttccagatatgcagtatggtgcct

SEQ ID NO: 4216188 - DNA, 25 bp, Homo sapien
tatggtgcctgtactactcaaaagt

SEQ ID NO: 4216189 - DNA, 25 bp, Homo sapien
gcttgggagcatggatattaatagt

SEQ ID NO: 4216190 - DNA, 25 bp, Homo sapien
gatatcacagttgaatcacctctgt

SEQ ID NO: 4216191 - DNA, 25 bp, Homo sapien
gagttgccagaattacagagtttcc

SEQ ID NO: 4216192 - DNA, 25 bp, Homo sapien
cacagcagtgtggatcatgaaatga

SEQ ID NO: 4216193 - DNA, 25 bp, Homo sapien
ttcactctctatacccactgtctcc

SEQ ID NO: 4216194 - DNA, 25 bp, Homo sapien
tcactctctatacccactgtctcca

SEQ ID NO: 4216195 - DNA, 25 bp, Homo sapien
cactctctatacccactgtctccat

SEQ ID NO: 4216196 - DNA, 25 bp, Homo sapien
caagcccagtgatagtcaagtcaag

SEQ ID NO: 4216197 - DNA, 25 bp, Homo sapien
tcaaaaatatcggtactgccaaggt

SEQ ID NO: 4216198 - DNA, 25 bp, Homo sapien
tgtgcacgcatcaactctctgaagg

SEQ ID NO: 4216199 - DNA, 25 bp, Homo sapien
tgaatatcaagctaggcccagccct

SEQ ID NO: 4216200 - DNA, 25 bp, Homo sapien
ccgtcgtccaagtggccctgatggg

SEQ ID NO: 4216201 - DNA, 25 bp, Homo sapien
cagcgagagaacatatccttaggca

SEQ ID NO: 4216202 - DNA, 25 bp, Homo sapien
ccttaggcaggtctgtataaacctt

SEQ ID NO: 4216203 - DNA, 25 bp, Homo sapien
cacttagtcgttggaatcgtaagcc

SEQ ID NO: 4216204 - DNA, 25 bp, Homo sapien
gtgactttgtgtgactttaaacagg

SEQ ID NO: 4216205 - DNA, 25 bp, Homo sapien
gctttttatagattgtgtgactttg

SEQ ID NO: 4216206 - DNA, 25 bp, Homo sapien
tggtgaaactaggttaatttatgga

SEQ ID NO: 4216207 - DNA, 25 bp, Homo sapien
tccagaccagctgggtggcttatac

SEQ ID NO: 4216208 - DNA, 25 bp, Homo sapien
aagttccttagtttgataatatgtt

SEQ ID NO: 4216209 - DNA, 25 bp, Homo sapien
gaagttccttagtttgataatatgt

SEQ ID NO: 4216210 - DNA, 25 bp, Homo sapien
ttccaggcagggcataatagaaaag

SEQ ID NO: 4216211 - DNA, 25 bp, Homo sapien
aattactttctcactacctagttca

SEQ ID NO: 4216212 - DNA, 25 bp, Homo sapien
tatagaggaacaaatttgggataga

SEQ ID NO: 4216213 - DNA, 25 bp, Homo sapien
ctcactacctagttcagtgatttgg

SEQ ID NO: 4216214 - DNA, 25 bp, Homo sapien
tatgaccttctgataatgaacactt

SEQ ID NO: 4216215 - DNA, 25 bp, Homo sapien
acagcaaattcagccaatcacactt

SEQ ID NO: 4216216 - DNA, 25 bp, Homo sapien
ttcagaattcaactcaagacccacc

SEQ ID NO: 4216217 - DNA, 25 bp, Homo sapien
cagctgatattacaacagcagcaac

SEQ ID NO: 4216218 - DNA, 25 bp, Homo sapien
ccctattagttggaagcacgtttag

SEQ ID NO: 4216219 - DNA, 25 bp, Homo sapien
gggtcaaatgatatatataccctca

SEQ ID NO: 4216220 - DNA, 25 bp, Homo sapien
ctcatttgggaagctttataagtaa

SEQ ID NO: 4216221 - DNA, 25 bp, Homo sapien
taatgtagatattcaggtgacctat

SEQ ID NO: 4216222 - DNA, 25 bp, Homo sapien
ggctccctaccacttgactgtgcta

SEQ ID NO: 4216223 - DNA, 25 bp, Homo sapien
catgtgccaccagtttgcagaaaag

SEQ ID NO: 4216224 - DNA, 25 bp, Homo sapien
gcatctccctttctataaacatgtg

SEQ ID NO: 4216225 - DNA, 25 bp, Homo sapien
cctgttgagtggcttctttgtggag

SEQ ID NO: 4216226 - DNA, 25 bp, Homo sapien
aaaactaatggaaagcttcatgaat

SEQ ID NO: 4216227 - DNA, 25 bp, Homo sapien
tcatttttgggcaggagccatgcta

SEQ ID NO: 4216228 - DNA, 25 bp, Homo sapien
aagcttcatgaatttgaatgtcatt

SEQ ID NO: 4216229 - DNA, 25 bp, Homo sapien
ttgaatgtcatttttgggcaggagc

SEQ ID NO: 4216230 - DNA, 25 bp, Homo sapien
tacacataccttgctatggtaatgg

SEQ ID NO: 4216231 - DNA, 25 bp, Homo sapien
ggcaaggatgctcaatctagtcagg

SEQ ID NO: 4216232 - DNA, 25 bp, Homo sapien
tatcatcgccagtgccatagaggac

SEQ ID NO: 4216233 - DNA, 25 bp, Homo sapien
agaggtttaactttatccagaagat

SEQ ID NO: 4216234 - DNA, 25 bp, Homo sapien
tcccacaggaagtgtcacacagcag

SEQ ID NO: 4216235 - DNA, 25 bp, Homo sapien
tggaagaccatctacatctcccaca

SEQ ID NO: 4216236 - DNA, 25 bp, Homo sapien
cacacagcagtcaagtatgtcccaa

SEQ ID NO: 4216237 - DNA, 25 bp, Homo sapien
taggcaagtttgtccagtggaagac

SEQ ID NO: 4216238 - DNA, 25 bp, Homo sapien
tcttattgcctcattccgtggtgga

SEQ ID NO: 4216239 - DNA, 25 bp, Homo sapien
agctggcatctcacgagggccgtct

SEQ ID NO: 4216240 - DNA, 25 bp, Homo sapien
ctatagcagaataccaagactgtgt

SEQ ID NO: 4216241 - DNA, 25 bp, Homo sapien
agtctaatatgaaggagctggcatc

SEQ ID NO: 4216242 - DNA, 25 bp, Homo sapien
tgggtaggcctcttgtgcaccagaa

SEQ ID NO: 4216243 - DNA, 25 bp, Homo sapien
gaaatgcagtgcgatggtttggcca

SEQ ID NO: 4216244 - DNA, 25 bp, Homo sapien
caaccgatgtttagacttatgccga

SEQ ID NO: 4216245 - DNA, 25 bp, Homo sapien
tttgtgccaggcctcgaaatgcagt

SEQ ID NO: 4216246 - DNA, 25 bp, Homo sapien
tcttcagcaccgagggagatacagc

SEQ ID NO: 4216247 - DNA, 25 bp, Homo sapien
gtcccttccaactttaatgctctgt

SEQ ID NO: 4216248 - DNA, 25 bp, Homo sapien
ggtcacatcaattcgaaagtccctt

SEQ ID NO: 4216249 - DNA, 25 bp, Homo sapien
gccatgaattcttcctcagtatggg

SEQ ID NO: 4216250 - DNA, 25 bp, Homo sapien
tagcctcgcaacttggtcacgtctg

SEQ ID NO: 4216251 - DNA, 25 bp, Homo sapien
ttcccgctggtgaagtctgtctctc

SEQ ID NO: 4216252 - DNA, 25 bp, Homo sapien
acttgaggttccttgcgcgtagggt

SEQ ID NO: 4216253 - DNA, 25 bp, Homo sapien
cccgggatagatttgcgtgcaggtt

SEQ ID NO: 4216254 - DNA, 25 bp, Homo sapien
ggaatgggagacgctgatcatggca

SEQ ID NO: 4216255 - DNA, 25 bp, Homo sapien
aacacgccgagaggggtgctttcac

SEQ ID NO: 4216256 - DNA, 25 bp, Homo sapien
catggcatcaaacacgccgagaggg

SEQ ID NO: 4216257 - DNA, 25 bp, Homo sapien
aatgggagacgctgatcatggcatc

SEQ ID NO: 4216258 - DNA, 25 bp, Homo sapien
gtcggtccctcccacttcgctcgct

SEQ ID NO: 4216259 - DNA, 25 bp, Homo sapien
tcctgcgtcggtccctcccacttcg

SEQ ID NO: 4216260 - DNA, 25 bp, Homo sapien
ctcccacttcgctcgctccaaaggc

SEQ ID NO: 4216261 - DNA, 25 bp, Homo sapien
acttcgctcgctccaaaggcccaca

SEQ ID NO: 4216262 - DNA, 25 bp, Homo sapien
ctcgccggagcagccggaaccgcgc

SEQ ID NO: 4216263 - DNA, 25 bp, Homo sapien
cccgcagcgccgacccaagggtcgc

SEQ ID NO: 4216264 - DNA, 25 bp, Homo sapien
ctcccactgcccgtaggcgccgccg

SEQ ID NO: 4216265 - DNA, 25 bp, Homo sapien
cgacccaagggtcgcctcgccggag

SEQ ID NO: 4216266 - DNA, 25 bp, Homo sapien
gcgcttcgggcgccgtgggggactc

SEQ ID NO: 4216267 - DNA, 25 bp, Homo sapien
cttgccggagaaccgcggccgtccg

SEQ ID NO: 4216268 - DNA, 25 bp, Homo sapien
ccgccgcctgcgcttgccggagaac

SEQ ID NO: 4216269 - DNA, 25 bp, Homo sapien
ctgcgcttgccggagaaccgcggcc

SEQ ID NO: 4216270 - DNA, 25 bp, Homo sapien
ctgtccctctgggtcggcatctcct

SEQ ID NO: 4216271 - DNA, 25 bp, Homo sapien
tctgggtcggcatctcctcactccc

SEQ ID NO: 4216272 - DNA, 25 bp, Homo sapien
tgtccctctgggtcggcatctcctc

SEQ ID NO: 4216273 - DNA, 25 bp, Homo sapien
gctgtccctctgggtcggcatctcc

SEQ ID NO: 4216274 - DNA, 25 bp, Homo sapien
ccgccgcctgcgaccgtgtgggaca

SEQ ID NO: 4216275 - DNA, 25 bp, Homo sapien
cgccgcctgcgaccgtgtgggacat

SEQ ID NO: 4216276 - DNA, 25 bp, Homo sapien
ttgcaaaggccctcaaaggagatgg

SEQ ID NO: 4216277 - DNA, 25 bp, Homo sapien
gaacctcattgcaaaggccctcaaa

SEQ ID NO: 4216278 - DNA, 25 bp, Homo sapien
ctcaaaggagatggaaggttcaaaa

SEQ ID NO: 4216279 - DNA, 25 bp, Homo sapien
gtctcgaacctcattgcaaaggccc

SEQ ID NO: 4216280 - DNA, 25 bp, Homo sapien
atggtgaagagctgttcgttgtcaa

SEQ ID NO: 4216281 - DNA, 25 bp, Homo sapien
ttcatggtgaagagctgttcgttgt

SEQ ID NO: 4216282 - DNA, 25 bp, Homo sapien
tggctgtgatcaattagctgtaaac

SEQ ID NO: 4216283 - DNA, 25 bp, Homo sapien
taactggctgtgatcaattagctgt

SEQ ID NO: 4216284 - DNA, 25 bp, Homo sapien
gtaaacaccactgcacctggaccag

SEQ ID NO: 4216285 - DNA, 25 bp, Homo sapien
taaacaccactgcacctggaccagc

SEQ ID NO: 4216286 - DNA, 25 bp, Homo sapien
ctgaccacagtttaaattgtcactg

SEQ ID NO: 4216287 - DNA, 25 bp, Homo sapien
actgagatgatactgtacacgggtc

SEQ ID NO: 4216288 - DNA, 25 bp, Homo sapien
tgagatgatactgtacacgggtctc

SEQ ID NO: 4216289 - DNA, 25 bp, Homo sapien
ccaactgagatgatactgtacacgg

SEQ ID NO: 4216290 - DNA, 25 bp, Homo sapien
ttcttctaactccaactgagatgat

SEQ ID NO: 4216291 - DNA, 25 bp, Homo sapien
ggacgttctggtacacaagggaaca

SEQ ID NO: 4216292 - DNA, 25 bp, Homo sapien
ctaactggtctcaaagtgactttct

SEQ ID NO: 4216293 - DNA, 25 bp, Homo sapien
cctaactggtctcaaagtgactttc

SEQ ID NO: 4216294 - DNA, 25 bp, Homo sapien
atatacaaacttccctaactggtct

SEQ ID NO: 4216295 - DNA, 25 bp, Homo sapien
atacaaacttccctaactggtctca

SEQ ID NO: 4216296 - DNA, 25 bp, Homo sapien
aaacgcttggcttggaaagtgtggc

SEQ ID NO: 4216297 - DNA, 25 bp, Homo sapien
acgcttggcttggaaagtgtggcca

SEQ ID NO: 4216298 - DNA, 25 bp, Homo sapien
cctgttgaaacgcttggcttggaaa

SEQ ID NO: 4216299 - DNA, 25 bp, Homo sapien
gttgaaacgcttggcttggaaagtg

SEQ ID NO: 4216300 - DNA, 25 bp, Homo sapien
cacttcttatgaaccaagagtttgc

SEQ ID NO: 4216301 - DNA, 25 bp, Homo sapien
gtggcaaagaatgccgcccacattc

SEQ ID NO: 4216302 - DNA, 25 bp, Homo sapien
gaatgccgcccacattcaattgtga

SEQ ID NO: 4216303 - DNA, 25 bp, Homo sapien
atggcacttcttatgaaccaagagt

SEQ ID NO: 4216304 - DNA, 25 bp, Homo sapien
atggatgactgatccatgggcatca

SEQ ID NO: 4216305 - DNA, 25 bp, Homo sapien
tagtccagagaagatcatgctgttc

SEQ ID NO: 4216306 - DNA, 25 bp, Homo sapien
gagatacaggacctctggttttcac

SEQ ID NO: 4216307 - DNA, 25 bp, Homo sapien
gaacagacaaggatggaacttctac

SEQ ID NO: 4216308 - DNA, 25 bp, Homo sapien
gagagcaagcatcacaacctggtag

SEQ ID NO: 4216309 - DNA, 25 bp, Homo sapien
gcaaccattaatgagtttgaaataa

SEQ ID NO: 4216310 - DNA, 25 bp, Homo sapien
cagcaaccattaatgagtttgaaat

SEQ ID NO: 4216311 - DNA, 25 bp, Homo sapien
aacagcaaccattaatgagtttgaa

SEQ ID NO: 4216312 - DNA, 25 bp, Homo sapien
acagcaaccattaatgagtttgaaa

SEQ ID NO: 4216313 - DNA, 25 bp, Homo sapien
caacttgatccaaactctcatgact

SEQ ID NO: 4216314 - DNA, 25 bp, Homo sapien
catgacttgaaggattatatggaat

SEQ ID NO: 4216315 - DNA, 25 bp, Homo sapien
aactctcatgacttgaaggattata

SEQ ID NO: 4216316 - DNA, 25 bp, Homo sapien
ccaacttgatccaaactctcatgac

SEQ ID NO: 4216317 - DNA, 25 bp, Homo sapien
gcacaaaacggaagggtctactata

SEQ ID NO: 4216318 - DNA, 25 bp, Homo sapien
aataagcaattcaggcacaaaacgg

SEQ ID NO: 4216319 - DNA, 25 bp, Homo sapien
taaagtctaagcaggtcaatatgtc

SEQ ID NO: 4216320 - DNA, 25 bp, Homo sapien
aactcctgagccttattaaaaagct

SEQ ID NO: 4216321 - DNA, 25 bp, Homo sapien
aaaagaatgatacgggaaagagagg

SEQ ID NO: 4216322 - DNA, 25 bp, Homo sapien
cagtgtgaactaaatctttcatgtc

SEQ ID NO: 4216323 - DNA, 25 bp, Homo sapien
ggaggcagtgtgaactaaatctttc

SEQ ID NO: 4216324 - DNA, 25 bp, Homo sapien
tggacataactagaaatggtttaaa

SEQ ID NO: 4216325 - DNA, 25 bp, Homo sapien
ttaactaacaatagatacaagggct

SEQ ID NO: 4216326 - DNA, 25 bp, Homo sapien
taacatcaaataggtgactaacagg

SEQ ID NO: 4216327 - DNA, 25 bp, Homo sapien
cgggtgcctgtgcaataatcctgtc

SEQ ID NO: 4216328 - DNA, 25 bp, Homo sapien
gctgaggtggcttgaactcaagaag

SEQ ID NO: 4216329 - DNA, 25 bp, Homo sapien
tcacgcccaagttgattttttagta

SEQ ID NO: 4216330 - DNA, 25 bp, Homo sapien
catcacgcccaagttgattttttag

SEQ ID NO: 4216331 - DNA, 25 bp, Homo sapien
gctgcttataggtcttattttgaga

SEQ ID NO: 4216332 - DNA, 25 bp, Homo sapien
tctgataattagtgacgatgagtgg

SEQ ID NO: 4216333 - DNA, 25 bp, Homo sapien
tttcattgcataaatacgatctgtt

SEQ ID NO: 4216334 - DNA, 25 bp, Homo sapien
tcattgcataaatacgatctgtttt

SEQ ID NO: 4216335 - DNA, 25 bp, Homo sapien
tcctgaagacctagactggatgaag

SEQ ID NO: 4216336 - DNA, 25 bp, Homo sapien
aagacctagactggatgaagctttg

SEQ ID NO: 4216337 - DNA, 25 bp, Homo sapien
aaaggatgattggatgcctgctcaa

SEQ ID NO: 4216338 - DNA, 25 bp, Homo sapien
ggaaaggatgattggatgcctgctc

SEQ ID NO: 4216339 - DNA, 25 bp, Homo sapien
aggaaaggatgattggatgcctgct

SEQ ID NO: 4216340 - DNA, 25 bp, Homo sapien
gaaaggatgattggatgcctgctca

SEQ ID NO: 4216341 - DNA, 25 bp, Homo sapien
ttcctgttctgcctaaagtaggtca

SEQ ID NO: 4216342 - DNA, 25 bp, Homo sapien
tagcaggaagttataagcctaacac

SEQ ID NO: 4216343 - DNA, 25 bp, Homo sapien
gatatcaacttcatgaattagggca

SEQ ID NO: 4216344 - DNA, 25 bp, Homo sapien
taattacgacatggctatttcctgt

SEQ ID NO: 4216345 - DNA, 25 bp, Homo sapien
tttctttgtcgctgcatatgaaaca

SEQ ID NO: 4216346 - DNA, 25 bp, Homo sapien
ttctttgtcgctgcatatgaaacat

SEQ ID NO: 4216347 - DNA, 25 bp, Homo sapien
tatgaaacattaggtctcctccatt

SEQ ID NO: 4216348 - DNA, 25 bp, Homo sapien
ggtctcctccatttacatactctat

SEQ ID NO: 4216349 - DNA, 25 bp, Homo sapien
gctagactgatttctgcagagtaaa

SEQ ID NO: 4216350 - DNA, 25 bp, Homo sapien
cacatgccgtagtcagtgagtttaa

SEQ ID NO: 4216351 - DNA, 25 bp, Homo sapien
cagtgagtttaatgtggccttcaga

SEQ ID NO: 4216352 - DNA, 25 bp, Homo sapien
cagagtccagtaatacattgtccag

SEQ ID NO: 4216353 - DNA, 25 bp, Homo sapien
catatgccatgttgttagcatttag

SEQ ID NO: 4216354 - DNA, 25 bp, Homo sapien
cacatttacatactggttgttgtat

SEQ ID NO: 4216355 - DNA, 25 bp, Homo sapien
ttaaatcttcgatacaactaggttg

SEQ ID NO: 4216356 - DNA, 25 bp, Homo sapien
ttaacaaggaatagttccttacaca

SEQ ID NO: 4216357 - DNA, 25 bp, Homo sapien
gataagactcctctatcactgtcac

SEQ ID NO: 4216358 - DNA, 25 bp, Homo sapien
gggataagactcctctatcactgtc

SEQ ID NO: 4216359 - DNA, 25 bp, Homo sapien
cttggggataagactcctctatcac

SEQ ID NO: 4216360 - DNA, 25 bp, Homo sapien
tggggataagactcctctatcactg

SEQ ID NO: 4216361 - DNA, 25 bp, Homo sapien
ttcacctgaggaaagtgcctccaga

SEQ ID NO: 4216362 - DNA, 25 bp, Homo sapien
atgaactcttgggtttgagacgagc

SEQ ID NO: 4216363 - DNA, 25 bp, Homo sapien
cttaaatgactttataatattgatc

SEQ ID NO: 4216364 - DNA, 25 bp, Homo sapien
tgtaaatgtatgaactgcattcccc

SEQ ID NO: 4216365 - DNA, 25 bp, Homo sapien
acaagattttaccatgttggccagg

SEQ ID NO: 4216366 - DNA, 25 bp, Homo sapien
ctcaagtgatctgcctgccgggcct

SEQ ID NO: 4216367 - DNA, 25 bp, Homo sapien
ccagctaatcttttggtgtttttag

SEQ ID NO: 4216368 - DNA, 25 bp, Homo sapien
tagagacaagattttaccatgttgg

SEQ ID NO: 4216369 - DNA, 25 bp, Homo sapien
atgaaacaccttgactaacttgatt

SEQ ID NO: 4216370 - DNA, 25 bp, Homo sapien
agatttatgaaacaccttgactaac

SEQ ID NO: 4216371 - DNA, 25 bp, Homo sapien
tttatgaaacaccttgactaacttg

SEQ ID NO: 4216372 - DNA, 25 bp, Homo sapien
tatgaaacaccttgactaacttgat

SEQ ID NO: 4216373 - DNA, 25 bp, Homo sapien
ggcaacggcaatacattctcatgaa

SEQ ID NO: 4216374 - DNA, 25 bp, Homo sapien
aggcacatcagttcataaaaccacg

SEQ ID NO: 4216375 - DNA, 25 bp, Homo sapien
gactgaatgtcagaatgtaggtcca

SEQ ID NO: 4216376 - DNA, 25 bp, Homo sapien
taaaaccacgaaaggctgccactta

SEQ ID NO: 4216377 - DNA, 25 bp, Homo sapien
agttccagctccctagaggcaacca

SEQ ID NO: 4216378 - DNA, 25 bp, Homo sapien
gttccagctccctagaggcaaccac

SEQ ID NO: 4216379 - DNA, 25 bp, Homo sapien
ggccctccagagacattctgggcat

SEQ ID NO: 4216380 - DNA, 25 bp, Homo sapien
gtggccctccagagacattctgggc

SEQ ID NO: 4216381 - DNA, 25 bp, Homo sapien
cttccttccattcttgtccctgact

SEQ ID NO: 4216382 - DNA, 25 bp, Homo sapien
tgtgcccggcccttccttccattct

SEQ ID NO: 4216383 - DNA, 25 bp, Homo sapien
ccttccattcttgtccctgactcac

SEQ ID NO: 4216384 - DNA, 25 bp, Homo sapien
ctgtgcccggcccttccttccattc

SEQ ID NO: 4216385 - DNA, 25 bp, Homo sapien
ccaataattaatgggacaatcacca

SEQ ID NO: 4216386 - DNA, 25 bp, Homo sapien
aatcaccaagaaattgtaacaaata

SEQ ID NO: 4216387 - DNA, 25 bp, Homo sapien
aaacacactaacaggcagagtaaag

SEQ ID NO: 4216388 - DNA, 25 bp, Homo sapien
ggcagagtaaaggaactacccaata

SEQ ID NO: 4216389 - DNA, 25 bp, Homo sapien
cctatcatataagttcagcatctgc

SEQ ID NO: 4216390 - DNA, 25 bp, Homo sapien
tcactagaacaattgcctttattat

SEQ ID NO: 4216391 - DNA, 25 bp, Homo sapien
tcacctatcatataagttcagcatc

SEQ ID NO: 4216392 - DNA, 25 bp, Homo sapien
tcatataagttcagcatctgcagtg

SEQ ID NO: 4216393 - DNA, 25 bp, Homo sapien
ggttgtatctcctggccgtaatcct

SEQ ID NO: 4216394 - DNA, 25 bp, Homo sapien
ttaggagtaccacagaaagtgctgg

SEQ ID NO: 4216395 - DNA, 25 bp, Homo sapien
caggagcaatgtaattaggagtacc

SEQ ID NO: 4216396 - DNA, 25 bp, Homo sapien
aagtgctggttgtatctcctggccg

SEQ ID NO: 4216397 - DNA, 25 bp, Homo sapien
gacagtggattcagactttgagcag

SEQ ID NO: 4216398 - DNA, 25 bp, Homo sapien
taagtgtatcttcgggtgcctgaga

SEQ ID NO: 4216399 - DNA, 25 bp, Homo sapien
cactgtctcgatttcaaagtctggg

SEQ ID NO: 4216400 - DNA, 25 bp, Homo sapien
tagctgataaagaccagtgaaggac

SEQ ID NO: 4216401 - DNA, 25 bp, Homo sapien
tccaactatcatggtaggcactgaa

SEQ ID NO: 4216402 - DNA, 25 bp, Homo sapien
tactttcagactcatgcccaatatc

SEQ ID NO: 4216403 - DNA, 25 bp, Homo sapien
tatttcagagtaatctccttggtct

SEQ ID NO: 4216404 - DNA, 25 bp, Homo sapien
tcatttatcaacaagggtaggtacc

SEQ ID NO: 4216405 - DNA, 25 bp, Homo sapien
actccaagagcccaccagtcaacac

SEQ ID NO: 4216406 - DNA, 25 bp, Homo sapien
tccaagagcccaccagtcaacactg

SEQ ID NO: 4216407 - DNA, 25 bp, Homo sapien
agagcccaccagtcaacactgaaac

SEQ ID NO: 4216408 - DNA, 25 bp, Homo sapien
caagagcccaccagtcaacactgaa

SEQ ID NO: 4216409 - DNA, 25 bp, Homo sapien
gttctggtcagggttatcggagctc

SEQ ID NO: 4216410 - DNA, 25 bp, Homo sapien
ggtcagggttatcggagctcccaac

SEQ ID NO: 4216411 - DNA, 25 bp, Homo sapien
atcctctgtgttctggtcagggtta

SEQ ID NO: 4216412 - DNA, 25 bp, Homo sapien
ctgtgttctggtcagggttatcgga

SEQ ID NO: 4216413 - DNA, 25 bp, Homo sapien
taccaccagtcaggattatattttc

SEQ ID NO: 4216414 - DNA, 25 bp, Homo sapien
caaaacctaataccaccagtcagga

SEQ ID NO: 4216415 - DNA, 25 bp, Homo sapien
aaagtagtaacctgaatcactctca

SEQ ID NO: 4216416 - DNA, 25 bp, Homo sapien
ccagttactcgggagtgtgcctgta

SEQ ID NO: 4216417 - DNA, 25 bp, Homo sapien
tgcacctggcaatctttaaatttct

SEQ ID NO: 4216418 - DNA, 25 bp, Homo sapien
ctgcacctggcaatctttaaatttc

SEQ ID NO: 4216419 - DNA, 25 bp, Homo sapien
ctgcgcccagcaatggctggctaat

SEQ ID NO: 4216420 - DNA, 25 bp, Homo sapien
ctcatgaaggtaagtgatccgccca

SEQ ID NO: 4216421 - DNA, 25 bp, Homo sapien
gaaaactcttcagaacacttgcagc

SEQ ID NO: 4216422 - DNA, 25 bp, Homo sapien
aatcatttgacagcacccagccatt

SEQ ID NO: 4216423 - DNA, 25 bp, Homo sapien
agccatttctttgcatgacctagtg

SEQ ID NO: 4216424 - DNA, 25 bp, Homo sapien
tttctgaagttggaatggtctacct

SEQ ID NO: 4216425 - DNA, 25 bp, Homo sapien
gaaagtacaactccagaacaaattg

SEQ ID NO: 4216426 - DNA, 25 bp, Homo sapien
cagcaaatcctgtttgaggatgaca

SEQ ID NO: 4216427 - DNA, 25 bp, Homo sapien
tcaacatttcggaagaacgggtgtc

SEQ ID NO: 4216428 - DNA, 25 bp, Homo sapien
tcccaatcaacatttcggaagaacg

SEQ ID NO: 4216429 - DNA, 25 bp, Homo sapien
gatgacaacccaatcgttccttagg

SEQ ID NO: 4216430 - DNA, 25 bp, Homo sapien
gaaacctaatagttgagtaatcaaa

SEQ ID NO: 4216431 - DNA, 25 bp, Homo sapien
gataataatgaaacctaatagttga

SEQ ID NO: 4216432 - DNA, 25 bp, Homo sapien
aaaattggcccaagataataatgaa

SEQ ID NO: 4216433 - DNA, 25 bp, Homo sapien
aaaaaattggcccaagataataatg

SEQ ID NO: 4216434 - DNA, 25 bp, Homo sapien
ctgagaatcaaagttgtccaaacca

SEQ ID NO: 4216435 - DNA, 25 bp, Homo sapien
tgagaatcaaagttgtccaaaccaa

SEQ ID NO: 4216436 - DNA, 25 bp, Homo sapien
gagagtcttccaagagtagggaata

SEQ ID NO: 4216437 - DNA, 25 bp, Homo sapien
caaggtcacgtcagagaggttatca

SEQ ID NO: 4216438 - DNA, 25 bp, Homo sapien
tatctgagcatgcttacacagaggg

SEQ ID NO: 4216439 - DNA, 25 bp, Homo sapien
tctaggaaaatagcagggacacccc

SEQ ID NO: 4216440 - DNA, 25 bp, Homo sapien
acaaagttacagaggatacagtccc

SEQ ID NO: 4216441 - DNA, 25 bp, Homo sapien
caccgcagggagatcatgggtcaca

SEQ ID NO: 4216442 - DNA, 25 bp, Homo sapien
tctagttggagaaatcaaggaaggc

SEQ ID NO: 4216443 - DNA, 25 bp, Homo sapien
caagtaattagggtggagcacagga

SEQ ID NO: 4216444 - DNA, 25 bp, Homo sapien
tctagacgaatcaagaatggagtac

SEQ ID NO: 4216445 - DNA, 25 bp, Homo sapien
ggagttcaaaactgaggactgcgaa

SEQ ID NO: 4216446 - DNA, 25 bp, Homo sapien
taatcccacaagcaagtttagagcc

SEQ ID NO: 4216447 - DNA, 25 bp, Homo sapien
gaacaacattcctagttacaggtga

SEQ ID NO: 4216448 - DNA, 25 bp, Homo sapien
ggattgatatactcaaaaccttcaa

SEQ ID NO: 4216449 - DNA, 25 bp, Homo sapien
aaagaggattgatatactcaaaacc

SEQ ID NO: 4216450 - DNA, 25 bp, Homo sapien
tatactcaaaaccttcaaattcaga

SEQ ID NO: 4216451 - DNA, 25 bp, Homo sapien
gacatcaaaagaggattgatatact

SEQ ID NO: 4216452 - DNA, 25 bp, Homo sapien
taaatggcaacatgagtagaataca

SEQ ID NO: 4216453 - DNA, 25 bp, Homo sapien
acatgagtagaatacatggttgaaa

SEQ ID NO: 4216454 - DNA, 25 bp, Homo sapien
attttgacatgattgtctggaagct

SEQ ID NO: 4216455 - DNA, 25 bp, Homo sapien
ttttgacatgattgtctggaagcta

SEQ ID NO: 4216456 - DNA, 25 bp, Homo sapien
tctaaggtgggctcactagtgtgca

SEQ ID NO: 4216457 - DNA, 25 bp, Homo sapien
tctgagaactaatgccctatgggaa

SEQ ID NO: 4216458 - DNA, 25 bp, Homo sapien
tacttaacatccaatccaggctgca

SEQ ID NO: 4216459 - DNA, 25 bp, Homo sapien
taaatgtaccggcactgaacaagca

SEQ ID NO: 4216460 - DNA, 25 bp, Homo sapien
tttcatagagcaagcgagcaaagtc

SEQ ID NO: 4216461 - DNA, 25 bp, Homo sapien
tactgaggacgctttcatagagcaa

SEQ ID NO: 4216462 - DNA, 25 bp, Homo sapien
caagcgagcaaagtctgtgcagtca

SEQ ID NO: 4216463 - DNA, 25 bp, Homo sapien
gtctgtgcagtcagaccacagggca

SEQ ID NO: 4216464 - DNA, 25 bp, Homo sapien
tctgactgttgtaaagagacccaac

SEQ ID NO: 4216465 - DNA, 25 bp, Homo sapien
gacgccggtgactcacataggcaaa

SEQ ID NO: 4216466 - DNA, 25 bp, Homo sapien
gcctgggttcctcggtgtctatgcc

SEQ ID NO: 4216467 - DNA, 25 bp, Homo sapien
gcaaattttgtgatgagtcagaggg

SEQ ID NO: 4216468 - DNA, 25 bp, Homo sapien
cctttggaccctttcactgtggctg

SEQ ID NO: 4216469 - DNA, 25 bp, Homo sapien
tgactgggcagtctaaatatgccct

SEQ ID NO: 4216470 - DNA, 25 bp, Homo sapien
ctttcagtgcgcagggaagtctccc

SEQ ID NO: 4216471 - DNA, 25 bp, Homo sapien
tgtggctgcgggctatcagtcctga

SEQ ID NO: 4216472 - DNA, 25 bp, Homo sapien
tctggccttagggtattctctgagc

SEQ ID NO: 4216473 - DNA, 25 bp, Homo sapien
cctcgttgagtagggtttctcctct

SEQ ID NO: 4216474 - DNA, 25 bp, Homo sapien
tactggatctacaaggtccctattt

SEQ ID NO: 4216475 - DNA, 25 bp, Homo sapien
tcttatctgccaagtcagtactgga

SEQ ID NO: 4216476 - DNA, 25 bp, Homo sapien
cagtatcttcccctcgttgagtagg

SEQ ID NO: 4216477 - DNA, 25 bp, Homo sapien
aagaccaccatgagagtgtgcttgt

SEQ ID NO: 4216478 - DNA, 25 bp, Homo sapien
gcaagaccaccatgagagtgtgctt

SEQ ID NO: 4216479 - DNA, 25 bp, Homo sapien
caagaccaccatgagagtgtgcttg

SEQ ID NO: 4216480 - DNA, 25 bp, Homo sapien
gagcaagaccaccatgagagtgtgc

SEQ ID NO: 4216481 - DNA, 25 bp, Homo sapien
ttccatctgttattgccatagagac

SEQ ID NO: 4216482 - DNA, 25 bp, Homo sapien
aagcgtggcaaagataatgatgttc

SEQ ID NO: 4216483 - DNA, 25 bp, Homo sapien
attgccatagagacagaagcgtggc

SEQ ID NO: 4216484 - DNA, 25 bp, Homo sapien
gagacagaagcgtggcaaagataat

SEQ ID NO: 4216485 - DNA, 25 bp, Homo sapien
caggagactcgagctttgtcccttt

SEQ ID NO: 4216486 - DNA, 25 bp, Homo sapien
gcacaaaattcaggagactcgagct

SEQ ID NO: 4216487 - DNA, 25 bp, Homo sapien
cattttcgtccaatttcttctagtt

SEQ ID NO: 4216488 - DNA, 25 bp, Homo sapien
aatagtccaccgagtagcagtgcac

SEQ ID NO: 4216489 - DNA, 25 bp, Homo sapien
gccgccgtcgccgctcgcccgctcc

SEQ ID NO: 4216490 - DNA, 25 bp, Homo sapien
cgccgccgtcgccgctcgcccgctc

SEQ ID NO: 4216491 - DNA, 25 bp, Homo sapien
cgtcgccgccgtaagccggagccgc

SEQ ID NO: 4216492 - DNA, 25 bp, Homo sapien
ccgcgtcgccgccgtaagccggagc

SEQ ID NO: 4216493 - DNA, 25 bp, Homo sapien
cgcgtcgccgccgtaagccggagcc

SEQ ID NO: 4216494 - DNA, 25 bp, Homo sapien
gcgtcgccgccgtaagccggagccg

SEQ ID NO: 4216495 - DNA, 25 bp, Homo sapien
gctcgacgagctttgtgaattcccc

SEQ ID NO: 4216496 - DNA, 25 bp, Homo sapien
cccgggtaagctcgacgagctttgt

SEQ ID NO: 4216497 - DNA, 25 bp, Homo sapien
gacgagctttgtgaattccccaccg

SEQ ID NO: 4216498 - DNA, 25 bp, Homo sapien
taagctcgacgagctttgtgaattc

SEQ ID NO: 4216499 - DNA, 25 bp, Homo sapien
gaagcgtgatcagccgtggaacacc

SEQ ID NO: 4216500 - DNA, 25 bp, Homo sapien
gaccgggtcgagaccagggcatccc

SEQ ID NO: 4216501 - DNA, 25 bp, Homo sapien
cagggcagtttaggcgccgggcgcg

SEQ ID NO: 4216502 - DNA, 25 bp, Homo sapien
ggccaacgaagcgtgatcagccgtg

SEQ ID NO: 4216503 - DNA, 25 bp, Homo sapien
caaaggattaaggaccaatgccacc

SEQ ID NO: 4216504 - DNA, 25 bp, Homo sapien
ttactcaacacaggccaaggaagag

SEQ ID NO: 4216505 - DNA, 25 bp, Homo sapien
tacagactttcgtccaccacaggaa

SEQ ID NO: 4216506 - DNA, 25 bp, Homo sapien
tgccaccaaccatcgtacagacttt

SEQ ID NO: 4216507 - DNA, 25 bp, Homo sapien
caatttggagttgcgtaaagcgagc

SEQ ID NO: 4216508 - DNA, 25 bp, Homo sapien
tgagttcagtttaccaaggtgaagc

SEQ ID NO: 4216509 - DNA, 25 bp, Homo sapien
gcacccggccgaaatcagtttctta

SEQ ID NO: 4216510 - DNA, 25 bp, Homo sapien
gatcatctcaattagtagtaccggg

SEQ ID NO: 4216511 - DNA, 25 bp, Homo sapien
ttcaaagcgagagccccttaaatta

SEQ ID NO: 4216512 - DNA, 25 bp, Homo sapien
tatgccattccttgtgccataaaat

SEQ ID NO: 4216513 - DNA, 25 bp, Homo sapien
actgaagacgtgtgtaaatcctcac

SEQ ID NO: 4216514 - DNA, 25 bp, Homo sapien
tacaaatgcctatcgtaacttactc

SEQ ID NO: 4216515 - DNA, 25 bp, Homo sapien
ttgaatacacggagcatcaggctga

SEQ ID NO: 4216516 - DNA, 25 bp, Homo sapien
tatctgaagggatgagcaatgggcc

SEQ ID NO: 4216517 - DNA, 25 bp, Homo sapien
tgagaatgcatcacaaacgtctggg

SEQ ID NO: 4216518 - DNA, 25 bp, Homo sapien
gacatgctttcttgggaatgccgag

SEQ ID NO: 4216519 - DNA, 25 bp, Homo sapien
aagtcaaatgaggaaacatactgca

SEQ ID NO: 4216520 - DNA, 25 bp, Homo sapien
tcaagaagcaagatgtgtgccaaag

SEQ ID NO: 4216521 - DNA, 25 bp, Homo sapien
gcactttatggcctaaaaactgcaa

SEQ ID NO: 4216522 - DNA, 25 bp, Homo sapien
caacagatgtagtggtcaagaagca

SEQ ID NO: 4216523 - DNA, 25 bp, Homo sapien
aattgtggccattgtaccatttgca

SEQ ID NO: 4216524 - DNA, 25 bp, Homo sapien
tgcaaatggagataacaccaaagcg

SEQ ID NO: 4216525 - DNA, 25 bp, Homo sapien
aaatgctgttttgagcccacgggaa

SEQ ID NO: 4216526 - DNA, 25 bp, Homo sapien
gaaatcataggtgtatctctgaaaa

SEQ ID NO: 4216527 - DNA, 25 bp, Homo sapien
aacttttccttactctagctgtcat

SEQ ID NO: 4216528 - DNA, 25 bp, Homo sapien
ttacaagtgtgcgacaccacatccg

SEQ ID NO: 4216529 - DNA, 25 bp, Homo sapien
tcctttcaaatcacaaattcttcag

SEQ ID NO: 4216530 - DNA, 25 bp, Homo sapien
tgagcccggcaggtttttatattaa

SEQ ID NO: 4216531 - DNA, 25 bp, Homo sapien
tagggagggtccacatatcctgtta

SEQ ID NO: 4216532 - DNA, 25 bp, Homo sapien
aaccccaatgtggtatcaaccgaat

SEQ ID NO: 4216533 - DNA, 25 bp, Homo sapien
caaccgaataaatggaatgggcact

SEQ ID NO: 4216534 - DNA, 25 bp, Homo sapien
taagcaggtctgtattggtctccat

SEQ ID NO: 4216535 - DNA, 25 bp, Homo sapien
ctatcaggtttccttaatatttcca

SEQ ID NO: 4216536 - DNA, 25 bp, Homo sapien
gaaacagaatccctcagtacactat

SEQ ID NO: 4216537 - DNA, 25 bp, Homo sapien
acagaatccctcagtacactatcag

SEQ ID NO: 4216538 - DNA, 25 bp, Homo sapien
cagtacactatcaggtttccttaat

SEQ ID NO: 4216539 - DNA, 25 bp, Homo sapien
tctgtgatattacctagcactttgg

SEQ ID NO: 4216540 - DNA, 25 bp, Homo sapien
aaggctttagcatagaccggggcaa

SEQ ID NO: 4216541 - DNA, 25 bp, Homo sapien
ctgcttcaaaaagcaagacaatctg

SEQ ID NO: 4216542 - DNA, 25 bp, Homo sapien
agcaagacaatctgagtaaaggctt

SEQ ID NO: 4216543 - DNA, 25 bp, Homo sapien
taagagtcatcatgccacgcacagt

SEQ ID NO: 4216544 - DNA, 25 bp, Homo sapien
taagccgtggagtcagcctgggcaa

SEQ ID NO: 4216545 - DNA, 25 bp, Homo sapien
tgtcaacctgactgggccactgggt

SEQ ID NO: 4216546 - DNA, 25 bp, Homo sapien
tatgcatgctaacatggagtaccag

SEQ ID NO: 4216547 - DNA, 25 bp, Homo sapien
ttcctgctttataacaggataccat

SEQ ID NO: 4216548 - DNA, 25 bp, Homo sapien
cctgctttataacaggataccatga

SEQ ID NO: 4216549 - DNA, 25 bp, Homo sapien
gctttataacaggataccatgactg

SEQ ID NO: 4216550 - DNA, 25 bp, Homo sapien
ttataacaggataccatgactgtaa

SEQ ID NO: 4216551 - DNA, 25 bp, Homo sapien
ttttctaataagagtaacaatacaa

SEQ ID NO: 4216552 - DNA, 25 bp, Homo sapien
gagtaacaatacaattcacctacca

SEQ ID NO: 4216553 - DNA, 25 bp, Homo sapien
aacacatagaaacacatagtaaagg

SEQ ID NO: 4216554 - DNA, 25 bp, Homo sapien
tttccctataatgataaatagaaac

SEQ ID NO: 4216555 - DNA, 25 bp, Homo sapien
tatcaccatacttggagggaataca

SEQ ID NO: 4216556 - DNA, 25 bp, Homo sapien
tctgacaggacaagaaaattgacag

SEQ ID NO: 4216557 - DNA, 25 bp, Homo sapien
aaattgacaggtttaatagggctca

SEQ ID NO: 4216558 - DNA, 25 bp, Homo sapien
aaaacttacaatctagggtgaacat

SEQ ID NO: 4216559 - DNA, 25 bp, Homo sapien
gagagagctctgaatgtcgcccagc

SEQ ID NO: 4216560 - DNA, 25 bp, Homo sapien
tcttatatacctcagagagagagct

SEQ ID NO: 4216561 - DNA, 25 bp, Homo sapien
ggcagactgcaaggctatgtcctga

SEQ ID NO: 4216562 - DNA, 25 bp, Homo sapien
tactgggcagttcttgtatcaaacc

SEQ ID NO: 4216563 - DNA, 25 bp, Homo sapien
catttggggcaaccactttatcaca

SEQ ID NO: 4216564 - DNA, 25 bp, Homo sapien
tttatcacacatgtataagtagtag

SEQ ID NO: 4216565 - DNA, 25 bp, Homo sapien
ctttagactgggatacagcagaagt

SEQ ID NO: 4216566 - DNA, 25 bp, Homo sapien
acacatttggggcaaccactttatc

SEQ ID NO: 4216567 - DNA, 25 bp, Homo sapien
tgagacatctggataagacactgtt

SEQ ID NO: 4216568 - DNA, 25 bp, Homo sapien
tctgactgtcttgatatggacttac

SEQ ID NO: 4216569 - DNA, 25 bp, Homo sapien
ttctcctgttcctcaagtgagacat

SEQ ID NO: 4216570 - DNA, 25 bp, Homo sapien
tttgaagtttaccactactgtgagc

SEQ ID NO: 4216571 - DNA, 25 bp, Homo sapien
cgctagaaaagtatagcaactgaga

SEQ ID NO: 4216572 - DNA, 25 bp, Homo sapien
agtctcctgagctatcaccacgcta

SEQ ID NO: 4216573 - DNA, 25 bp, Homo sapien
tgaggccaggtagcctgtatctatc

SEQ ID NO: 4216574 - DNA, 25 bp, Homo sapien
taaaggtaaaagctccaattatctg

SEQ ID NO: 4216575 - DNA, 25 bp, Homo sapien
gacatctttcacaagaagcggagat

SEQ ID NO: 4216576 - DNA, 25 bp, Homo sapien
ggccaattcccactttgtttatgtc

SEQ ID NO: 4216577 - DNA, 25 bp, Homo sapien
aagcggcagcaacaaggccaattcc

SEQ ID NO: 4216578 - DNA, 25 bp, Homo sapien
ttgcaagtggcagactcagatttcc

SEQ ID NO: 4216579 - DNA, 25 bp, Homo sapien
gcttcttttgcaaaatcaagtttag

SEQ ID NO: 4216580 - DNA, 25 bp, Homo sapien
tgttgcttcttttgcaaaatcaagt

SEQ ID NO: 4216581 - DNA, 25 bp, Homo sapien
aaataagttctcattacttcttcca

SEQ ID NO: 4216582 - DNA, 25 bp, Homo sapien
gttctcattacttcttccatgattt

SEQ ID NO: 4216583 - DNA, 25 bp, Homo sapien
tagattttgaactactcaacatttt

SEQ ID NO: 4216584 - DNA, 25 bp, Homo sapien
aagattcaagctctttctgtaaatt

SEQ ID NO: 4216585 - DNA, 25 bp, Homo sapien
ttcattctgcaaagattcaagctct

SEQ ID NO: 4216586 - DNA, 25 bp, Homo sapien
gcttcattatctgctccaatttttt

SEQ ID NO: 4216587 - DNA, 25 bp, Homo sapien
tcctgcatattcagcctctttgtct

SEQ ID NO: 4216588 - DNA, 25 bp, Homo sapien
ctgtcctgcatattcagcctctttg

SEQ ID NO: 4216589 - DNA, 25 bp, Homo sapien
tgtcctgcatattcagcctctttgt

SEQ ID NO: 4216590 - DNA, 25 bp, Homo sapien
ctgcatattcagcctctttgtcttt

SEQ ID NO: 4216591 - DNA, 25 bp, Homo sapien
gagttcatcttggagttcttgccta

SEQ ID NO: 4216592 - DNA, 25 bp, Homo sapien
gtcttgcttcccgttcctgtctgag

SEQ ID NO: 4216593 - DNA, 25 bp, Homo sapien
tatcggcctcagcatggtccaatct

SEQ ID NO: 4216594 - DNA, 25 bp, Homo sapien
tttcagaatttgcagctttagctct

SEQ ID NO: 4216595 - DNA, 25 bp, Homo sapien
tgaccacagctattttccaacacat

SEQ ID NO: 4216596 - DNA, 25 bp, Homo sapien
tagcagcagcacataacaacacatt

SEQ ID NO: 4216597 - DNA, 25 bp, Homo sapien
gggagattcaactccttgagtagct

SEQ ID NO: 4216598 - DNA, 25 bp, Homo sapien
gaatgcctagttatcgtcatgcaga

SEQ ID NO: 4216599 - DNA, 25 bp, Homo sapien
gatgttgtccctcctgaaactatgg

SEQ ID NO: 4216600 - DNA, 25 bp, Homo sapien
gccattagagaatgacagacttttc

SEQ ID NO: 4216601 - DNA, 25 bp, Homo sapien
cacaacagtggtatcagtttttctc

SEQ ID NO: 4216602 - DNA, 25 bp, Homo sapien
aatggtccattcgtgcaaattttgg

SEQ ID NO: 4216603 - DNA, 25 bp, Homo sapien
aatccgcttgcctagtgaatttggc

SEQ ID NO: 4216604 - DNA, 25 bp, Homo sapien
tatggcacaccaacgcatcttctgg

SEQ ID NO: 4216605 - DNA, 25 bp, Homo sapien
tttgaagtctgaggaaaaatccgct

SEQ ID NO: 4216606 - DNA, 25 bp, Homo sapien
tcacgtgaggtagaggacagttttc

SEQ ID NO: 4216607 - DNA, 25 bp, Homo sapien
aagctcagagcacagtatgtcatgt

SEQ ID NO: 4216608 - DNA, 25 bp, Homo sapien
ctatacaagttatttacaaggcatg

SEQ ID NO: 4216609 - DNA, 25 bp, Homo sapien
cagcacaaaatacaattgaggtata

SEQ ID NO: 4216610 - DNA, 25 bp, Homo sapien
aatttgtaaactaggtgaccagata

SEQ ID NO: 4216611 - DNA, 25 bp, Homo sapien
tcttcgctgtcaagatttaacaact

SEQ ID NO: 4216612 - DNA, 25 bp, Homo sapien
taactttactgacagacaaaggatg

SEQ ID NO: 4216613 - DNA, 25 bp, Homo sapien
tgtcaagatttaacaactgcataca

SEQ ID NO: 4216614 - DNA, 25 bp, Homo sapien
gcatatggccctttaaacagctaaa

SEQ ID NO: 4216615 - DNA, 25 bp, Homo sapien
aaatgatatcctgtctaattcaacc

SEQ ID NO: 4216616 - DNA, 25 bp, Homo sapien
agagtctcagactgcattaaatgat

SEQ ID NO: 4216617 - DNA, 25 bp, Homo sapien
tcaagtagcaattctattcatccac

SEQ ID NO: 4216618 - DNA, 25 bp, Homo sapien
tctaattcaacctatgagatcatag

SEQ ID NO: 4216619 - DNA, 25 bp, Homo sapien
gagaagagtggcaccttcacaattc

SEQ ID NO: 4216620 - DNA, 25 bp, Homo sapien
agagaagagtggcaccttcacaatt

SEQ ID NO: 4216621 - DNA, 25 bp, Homo sapien
catatacttccagcagagaagagtg

SEQ ID NO: 4216622 - DNA, 25 bp, Homo sapien
cctcaatgcatatacttccagcaga

SEQ ID NO: 4216623 - DNA, 25 bp, Homo sapien
actccaagggcgctcggtacagtcc

SEQ ID NO: 4216624 - DNA, 25 bp, Homo sapien
ttcttccctgctgcgagcactccaa

SEQ ID NO: 4216625 - DNA, 25 bp, Homo sapien
cccgacgacccaggattgtgacaga

SEQ ID NO: 4216626 - DNA, 25 bp, Homo sapien
tgggtgtccattccgctccgaccct

SEQ ID NO: 4216627 - DNA, 25 bp, Homo sapien
agtgcctgcccaggtacgtctccca

SEQ ID NO: 4216628 - DNA, 25 bp, Homo sapien
ggtggccgccaggatgtccccgtgc

SEQ ID NO: 4216629 - DNA, 25 bp, Homo sapien
aggctgcgagctcagcggcgaaggg

SEQ ID NO: 4216630 - DNA, 25 bp, Homo sapien
gcccgaggcgggacactggaggtgg

SEQ ID NO: 4216631 - DNA, 25 bp, Homo sapien
gatccagcccacgaagctcgtgacg

SEQ ID NO: 4216632 - DNA, 25 bp, Homo sapien
gaggtggtcacgatgaccccgatcc

SEQ ID NO: 4216633 - DNA, 25 bp, Homo sapien
gcttgcagtggtacagccccgtggc

SEQ ID NO: 4216634 - DNA, 25 bp, Homo sapien
tggtgtagccgcaggtcaccaccca

SEQ ID NO: 4216635 - DNA, 25 bp, Homo sapien
gccagtgttaccaccggccacattg

SEQ ID NO: 4216636 - DNA, 25 bp, Homo sapien
tgtgacgccgtctaatatcccgctc

SEQ ID NO: 4216637 - DNA, 25 bp, Homo sapien
gataagaatactgcggcctagagaa

SEQ ID NO: 4216638 - DNA, 25 bp, Homo sapien
tcccgctctctacccagaggataag

SEQ ID NO: 4216639 - DNA, 25 bp, Homo sapien
caaggccatgtccggacaccaaaag

SEQ ID NO: 4216640 - DNA, 25 bp, Homo sapien
aggccatgtccggacaccaaaagat

SEQ ID NO: 4216641 - DNA, 25 bp, Homo sapien
gcaggcagtcaactggcaatgcagg

SEQ ID NO: 4216642 - DNA, 25 bp, Homo sapien
caggcagtcaactggcaatgcaggt

SEQ ID NO: 4216643 - DNA, 25 bp, Homo sapien
aggaccgaggcagcaatcatcaggg

SEQ ID NO: 4216644 - DNA, 25 bp, Homo sapien
ctggcccatccggatgcagggaaga

SEQ ID NO: 4216645 - DNA, 25 bp, Homo sapien
agctgggcccgcctgtacttagcca

SEQ ID NO: 4216646 - DNA, 25 bp, Homo sapien
aaaatggccggcagacccaggaccg

SEQ ID NO: 4216647 - DNA, 25 bp, Homo sapien
tagggtaccactgagaaagctgtct

SEQ ID NO: 4216648 - DNA, 25 bp, Homo sapien
caaagacggcctattttccccagtg

SEQ ID NO: 4216649 - DNA, 25 bp, Homo sapien
gatacagattgtgggagtccatccc

SEQ ID NO: 4216650 - DNA, 25 bp, Homo sapien
tactgagttaaaggacggagccatc

SEQ ID NO: 4216651 - DNA, 25 bp, Homo sapien
cctgtgagtcagataaagcaccgga

SEQ ID NO: 4216652 - DNA, 25 bp, Homo sapien
agcaccggatgctgatatgtgttcc

SEQ ID NO: 4216653 - DNA, 25 bp, Homo sapien
ttgtggctggaaccaaaatttccac

SEQ ID NO: 4216654 - DNA, 25 bp, Homo sapien
tgacgctggcacacaaattctttgt

SEQ ID NO: 4216655 - DNA, 25 bp, Homo sapien
tgttggaaagggagtcagacaatag

SEQ ID NO: 4216656 - DNA, 25 bp, Homo sapien
ctgttggaaagggagtcagacaata

SEQ ID NO: 4216657 - DNA, 25 bp, Homo sapien
ttggaaagggagtcagacaatagac

SEQ ID NO: 4216658 - DNA, 25 bp, Homo sapien
gttggaaagggagtcagacaataga

SEQ ID NO: 4216659 - DNA, 25 bp, Homo sapien
tctgcaaaccaagtttacttgtgga

SEQ ID NO: 4216660 - DNA, 25 bp, Homo sapien
caaaccaagtttacttgtggagctt

SEQ ID NO: 4216661 - DNA, 25 bp, Homo sapien
agtgtctaggagaagggtttcacct

SEQ ID NO: 4216662 - DNA, 25 bp, Homo sapien
tgcaaaccaagtttacttgtggagc

SEQ ID NO: 4216663 - DNA, 25 bp, Homo sapien
atcctcagagcccaagagaaccttc

SEQ ID NO: 4216664 - DNA, 25 bp, Homo sapien
tgccatcctcagagcccaagagaac

SEQ ID NO: 4216665 - DNA, 25 bp, Homo sapien
ctcagagcccaagagaaccttccgg

SEQ ID NO: 4216666 - DNA, 25 bp, Homo sapien
cagagcccaagagaaccttccgggg

SEQ ID NO: 4216667 - DNA, 25 bp, Homo sapien
ttctaaacatgagcactcaacacaa

SEQ ID NO: 4216668 - DNA, 25 bp, Homo sapien
tgacattcatatggaaggccagaat

SEQ ID NO: 4216669 - DNA, 25 bp, Homo sapien
atgagcactcaacacaacagaccca

SEQ ID NO: 4216670 - DNA, 25 bp, Homo sapien
cattcatatggaaggccagaatttc

SEQ ID NO: 4216671 - DNA, 25 bp, Homo sapien
caaatccggataggagcaaagcagg

SEQ ID NO: 4216672 - DNA, 25 bp, Homo sapien
tagaggagatcagcaggtgccatgc

SEQ ID NO: 4216673 - DNA, 25 bp, Homo sapien
caaagcaggcagacaatatcggaaa

SEQ ID NO: 4216674 - DNA, 25 bp, Homo sapien
cagagctagctcgttccggtcaaaa

SEQ ID NO: 4216675 - DNA, 25 bp, Homo sapien
accctgaggaccttgcacaggccta

SEQ ID NO: 4216676 - DNA, 25 bp, Homo sapien
aggaccttgcacaggcctagcgctg

SEQ ID NO: 4216677 - DNA, 25 bp, Homo sapien
ttgcacaggcctagcgctggcttct

SEQ ID NO: 4216678 - DNA, 25 bp, Homo sapien
caggcctagcgctggcttctctggg

SEQ ID NO: 4216679 - DNA, 25 bp, Homo sapien
gattggaagaatacccagctgctct

SEQ ID NO: 4216680 - DNA, 25 bp, Homo sapien
cagtgttcacagttcccataccagg

SEQ ID NO: 4216681 - DNA, 25 bp, Homo sapien
tctggctttagaagcaactggctcc

SEQ ID NO: 4216682 - DNA, 25 bp, Homo sapien
ccattttatggaagggaccagagac

SEQ ID NO: 4216683 - DNA, 25 bp, Homo sapien
ctgggattacaggcacctgccacac

SEQ ID NO: 4216684 - DNA, 25 bp, Homo sapien
tttgagatggatttttgctctcgtt

SEQ ID NO: 4216685 - DNA, 25 bp, Homo sapien
caaactctgccacatgggttcaagc

SEQ ID NO: 4216686 - DNA, 25 bp, Homo sapien
atcctcgtgcctcagcctcctgcgt

SEQ ID NO: 4216687 - DNA, 25 bp, Homo sapien
tctcccgagcatcaatcctcagcct

SEQ ID NO: 4216688 - DNA, 25 bp, Homo sapien
tgcagactcattctcccgagcatca

SEQ ID NO: 4216689 - DNA, 25 bp, Homo sapien
cagactcattctcccgagcatcaat

SEQ ID NO: 4216690 - DNA, 25 bp, Homo sapien
cattctcccgagcatcaatcctcag

SEQ ID NO: 4216691 - DNA, 25 bp, Homo sapien
ctggagagacatggagaggcggtga

SEQ ID NO: 4216692 - DNA, 25 bp, Homo sapien
cacagggaaccagatggtggcaaca

SEQ ID NO: 4216693 - DNA, 25 bp, Homo sapien
agctcacgatggtggtctcacggtg

SEQ ID NO: 4216694 - DNA, 25 bp, Homo sapien
agtagccaaagctcacgatggtggt

SEQ ID NO: 4216695 - DNA, 25 bp, Homo sapien
tcacggtgggcgcacacagggaacc

SEQ ID NO: 4216696 - DNA, 25 bp, Homo sapien
gctagagcccgcagtgtagtagaaa

SEQ ID NO: 4216697 - DNA, 25 bp, Homo sapien
catctccagcgcagcagaggatgac

SEQ ID NO: 4216698 - DNA, 25 bp, Homo sapien
ggatgacacagccacccacgaggca

SEQ ID NO: 4216699 - DNA, 25 bp, Homo sapien
tatacgtgggcactcttcgcatgag

SEQ ID NO: 4216700 - DNA, 25 bp, Homo sapien
ctctgtgggcagccgggcagccctc

SEQ ID NO: 4216701 - DNA, 25 bp, Homo sapien
taagactacaaaatgccagacagga

SEQ ID NO: 4216702 - DNA, 25 bp, Homo sapien
acactgtgacgagcaaacctagggc

SEQ ID NO: 4216703 - DNA, 25 bp, Homo sapien
cagtttgaaaagcatcttggccggt

SEQ ID NO: 4216704 - DNA, 25 bp, Homo sapien
ccagacaggatgcttttctagacct

SEQ ID NO: 4216705 - DNA, 25 bp, Homo sapien
ccctataaattaccagtagagatta

SEQ ID NO: 4216706 - DNA, 25 bp, Homo sapien
tacttgttcttgaatcactgatcag

SEQ ID NO: 4216707 - DNA, 25 bp, Homo sapien
caataatgatacctctggatacaac

SEQ ID NO: 4216708 - DNA, 25 bp, Homo sapien
cactgatcagattccctataaatta

SEQ ID NO: 4216709 - DNA, 25 bp, Homo sapien
aaatttctgcaaaatggctagccca

SEQ ID NO: 4216710 - DNA, 25 bp, Homo sapien
gaagtctgccaaaatagattgcaat

SEQ ID NO: 4216711 - DNA, 25 bp, Homo sapien
gaccaggcccgtaacttgatgaagt

SEQ ID NO: 4216712 - DNA, 25 bp, Homo sapien
tgattgctgcccattgatcgatgat

SEQ ID NO: 4216713 - DNA, 25 bp, Homo sapien
gggaccaccttataagaatcactga

SEQ ID NO: 4216714 - DNA, 25 bp, Homo sapien
ttggctcccaccctaatgaagagag

SEQ ID NO: 4216715 - DNA, 25 bp, Homo sapien
gaggatacacaacaacaatgcacat

SEQ ID NO: 4216716 - DNA, 25 bp, Homo sapien
tgaagagagtgaatctccagtttac

SEQ ID NO: 4216717 - DNA, 25 bp, Homo sapien
gctattcaagccataagcagcatgt

SEQ ID NO: 4216718 - DNA, 25 bp, Homo sapien
gattcctcaagagctgctattcaag

SEQ ID NO: 4216719 - DNA, 25 bp, Homo sapien
gcagcatgtgccaatgttccaccca

SEQ ID NO: 4216720 - DNA, 25 bp, Homo sapien
cccaactgtgacgatcaggtgatct

SEQ ID NO: 4216721 - DNA, 25 bp, Homo sapien
tacttagctcaagagtaccactggg

SEQ ID NO: 4216722 - DNA, 25 bp, Homo sapien
gaattattggccagtgaggctccag

SEQ ID NO: 4216723 - DNA, 25 bp, Homo sapien
aaagcccgtctgtgcttccgcagga

SEQ ID NO: 4216724 - DNA, 25 bp, Homo sapien
taaatgtttagcaactggccggaag

SEQ ID NO: 4216725 - DNA, 25 bp, Homo sapien
ccctaattcataagggttgttgtga

SEQ ID NO: 4216726 - DNA, 25 bp, Homo sapien
tcaatagttgtgtgatttaagccag

SEQ ID NO: 4216727 - DNA, 25 bp, Homo sapien
tctgtaaatgtacattactcaatag

SEQ ID NO: 4216728 - DNA, 25 bp, Homo sapien
gaaaatatcaatagcccctaattca

SEQ ID NO: 4216729 - DNA, 25 bp, Homo sapien
aggcctgcttattcagaattctgtt

SEQ ID NO: 4216730 - DNA, 25 bp, Homo sapien
ggcctgcttattcagaattctgttc

SEQ ID NO: 4216731 - DNA, 25 bp, Homo sapien
gcctgcttattcagaattctgttcc

SEQ ID NO: 4216732 - DNA, 25 bp, Homo sapien
cctgcttattcagaattctgttcca

SEQ ID NO: 4216733 - DNA, 25 bp, Homo sapien
tagagtagcggttactacctcaggc

SEQ ID NO: 4216734 - DNA, 25 bp, Homo sapien
gttgcacttgaaggctagagtagcg

SEQ ID NO: 4216735 - DNA, 25 bp, Homo sapien
cctctaactcatgggactgttgcaa

SEQ ID NO: 4216736 - DNA, 25 bp, Homo sapien
ttcagaccgcaaagtttataatcct

SEQ ID NO: 4216737 - DNA, 25 bp, Homo sapien
gcttaattgttccaccaaatctggg

SEQ ID NO: 4216738 - DNA, 25 bp, Homo sapien
gggataccgcttgccataatggcca

SEQ ID NO: 4216739 - DNA, 25 bp, Homo sapien
cagatcgaacagaattttatccaca

SEQ ID NO: 4216740 - DNA, 25 bp, Homo sapien
tgtgtatatggttcatgatttgtaa

SEQ ID NO: 4216741 - DNA, 25 bp, Homo sapien
caaagaggctcggacttagagagac

SEQ ID NO: 4216742 - DNA, 25 bp, Homo sapien
ctgccctgaagtgaaatccccaagg

SEQ ID NO: 4216743 - DNA, 25 bp, Homo sapien
gaaatccccaaggaccactctgagg

SEQ ID NO: 4216744 - DNA, 25 bp, Homo sapien
gagcaaagaggctcggacttagaga

SEQ ID NO: 4216745 - DNA, 25 bp, Homo sapien
tttccccaagatagcgctaaataca

SEQ ID NO: 4216746 - DNA, 25 bp, Homo sapien
agatagcgctaaatacaacaaggac

SEQ ID NO: 4216747 - DNA, 25 bp, Homo sapien
cccaagatagcgctaaatacaacaa

SEQ ID NO: 4216748 - DNA, 25 bp, Homo sapien
ttttccccaagatagcgctaaatac

SEQ ID NO: 4216749 - DNA, 25 bp, Homo sapien
ggagaggccagggtcccaaagacat

SEQ ID NO: 4216750 - DNA, 25 bp, Homo sapien
cagaagggagaggccagggtcccaa

SEQ ID NO: 4216751 - DNA, 25 bp, Homo sapien
tcaagtacagaagggagaggccagg

SEQ ID NO: 4216752 - DNA, 25 bp, Homo sapien
tacagaagggagaggccagggtccc

SEQ ID NO: 4216753 - DNA, 25 bp, Homo sapien
gttaagtgccttcacagttaactcc

SEQ ID NO: 4216754 - DNA, 25 bp, Homo sapien
acaaagtcccgcgttcctcaataag

SEQ ID NO: 4216755 - DNA, 25 bp, Homo sapien
taagtgccttcacagttaactcccc

SEQ ID NO: 4216756 - DNA, 25 bp, Homo sapien
cctcaataaggagattgttaagtgc

SEQ ID NO: 4216757 - DNA, 25 bp, Homo sapien
gaatccacttcttgtcaccctgagt

SEQ ID NO: 4216758 - DNA, 25 bp, Homo sapien
tagaatccacttcttgtcaccctga

SEQ ID NO: 4216759 - DNA, 25 bp, Homo sapien
tggcccactgagccctcagcacttt

SEQ ID NO: 4216760 - DNA, 25 bp, Homo sapien
gatgcctcttcattcagactccagg

SEQ ID NO: 4216761 - DNA, 25 bp, Homo sapien
caggtctggcactgaacccagtcat

SEQ ID NO: 4216762 - DNA, 25 bp, Homo sapien
ccatccagccatgtgggcttcatga

SEQ ID NO: 4216763 - DNA, 25 bp, Homo sapien
cactttcaacgtctgcaggtctggc

SEQ ID NO: 4216764 - DNA, 25 bp, Homo sapien
gggcttcatgatgacattcactttc

SEQ ID NO: 4216765 - DNA, 25 bp, Homo sapien
tagctcctgcagaatagctacctgg

SEQ ID NO: 4216766 - DNA, 25 bp, Homo sapien
tgagaactagggtactctggacccc

SEQ ID NO: 4216767 - DNA, 25 bp, Homo sapien
cccctggacaggtgacaactgagga

SEQ ID NO: 4216768 - DNA, 25 bp, Homo sapien
caaattacttctggaaacagagctt

SEQ ID NO: 4216769 - DNA, 25 bp, Homo sapien
tccatgtagtcacatcatctgatga

SEQ ID NO: 4216770 - DNA, 25 bp, Homo sapien
ttccatgtagtcacatcatctgatg

SEQ ID NO: 4216771 - DNA, 25 bp, Homo sapien
ccatgtagtcacatcatctgatgac

SEQ ID NO: 4216772 - DNA, 25 bp, Homo sapien
ccctggaaatcagcgctcgagaaga

SEQ ID NO: 4216773 - DNA, 25 bp, Homo sapien
tggaaatcagcgctcgagaagaggc

SEQ ID NO: 4216774 - DNA, 25 bp, Homo sapien
aaatcagcgctcgagaagaggccct

SEQ ID NO: 4216775 - DNA, 25 bp, Homo sapien
agcaccctggaaatcagcgctcgag

SEQ ID NO: 4216776 - DNA, 25 bp, Homo sapien
ttgtcttgtgactttgggaaattta

SEQ ID NO: 4216777 - DNA, 25 bp, Homo sapien
tgtcttgtgactttgggaaatttac

SEQ ID NO: 4216778 - DNA, 25 bp, Homo sapien
gcccttgaacattgctggacgcgtg

SEQ ID NO: 4216779 - DNA, 25 bp, Homo sapien
catctgcaattcctcagcccttgaa

SEQ ID NO: 4216780 - DNA, 25 bp, Homo sapien
gtaactctggccttcagctgaaccc

SEQ ID NO: 4216781 - DNA, 25 bp, Homo sapien
aatggtccatagcaatcatttgtgg

SEQ ID NO: 4216782 - DNA, 25 bp, Homo sapien
ttgactacctgttaagttcctggca

SEQ ID NO: 4216783 - DNA, 25 bp, Homo sapien
ttcattgtagcaggaaaatgtcctc

SEQ ID NO: 4216784 - DNA, 25 bp, Homo sapien
tgggtcatggacttactggaagact

SEQ ID NO: 4216785 - DNA, 25 bp, Homo sapien
tatgtgcagcttgttacggttgtca

SEQ ID NO: 4216786 - DNA, 25 bp, Homo sapien
caccaggcccattcgtgtaaaagcg

SEQ ID NO: 4216787 - DNA, 25 bp, Homo sapien
tgtaaaagcggctgctaaaggcctg

SEQ ID NO: 4216788 - DNA, 25 bp, Homo sapien
taaaagcggctgctaaaggcctggg

SEQ ID NO: 4216789 - DNA, 25 bp, Homo sapien
ccattcgtgtaaaagcggctgctaa

SEQ ID NO: 4216790 - DNA, 25 bp, Homo sapien
caccgcagacgtgcccgagatctgg

SEQ ID NO: 4216791 - DNA, 25 bp, Homo sapien
acagcaccgcagacgtgcccgagat

SEQ ID NO: 4216792 - DNA, 25 bp, Homo sapien
ggacagcaccgcagacgtgcccgag

SEQ ID NO: 4216793 - DNA, 25 bp, Homo sapien
agcaccgcagacgtgcccgagatct

SEQ ID NO: 4216794 - DNA, 25 bp, Homo sapien
ctcggtatctgcgatgggggcctcc

SEQ ID NO: 4216795 - DNA, 25 bp, Homo sapien
cggtatctgcgatgggggcctccag

SEQ ID NO: 4216796 - DNA, 25 bp, Homo sapien
tgctcggtatctgcgatgggggcct

SEQ ID NO: 4216797 - DNA, 25 bp, Homo sapien
ctgctcggtatctgcgatgggggcc

SEQ ID NO: 4216798 - DNA, 25 bp, Homo sapien
agctccgaccgcttggcgctggcat

SEQ ID NO: 4216799 - DNA, 25 bp, Homo sapien
ctccagctccgaccgcttggcgctg

SEQ ID NO: 4216800 - DNA, 25 bp, Homo sapien
gcctccagctccgaccgcttggcgc

SEQ ID NO: 4216801 - DNA, 25 bp, Homo sapien
cgaccgcttggcgctggcatcctta

SEQ ID NO: 4216802 - DNA, 25 bp, Homo sapien
gcgatctccatgtccagggccagtt

SEQ ID NO: 4216803 - DNA, 25 bp, Homo sapien
actccagccgggctctcctcgccct

SEQ ID NO: 4216804 - DNA, 25 bp, Homo sapien
ctatggatactcgtgttctgcatcc

SEQ ID NO: 4216805 - DNA, 25 bp, Homo sapien
tctccatgtccagggccagtttgac

SEQ ID NO: 4216806 - DNA, 25 bp, Homo sapien
caggacgtcagaggactcggatacc

SEQ ID NO: 4216807 - DNA, 25 bp, Homo sapien
cggataccagcttcccatcgcgggt

SEQ ID NO: 4216808 - DNA, 25 bp, Homo sapien
aggacgtcagaggactcggatacca

SEQ ID NO: 4216809 - DNA, 25 bp, Homo sapien
actcggataccagcttcccatcgcg

SEQ ID NO: 4216810 - DNA, 25 bp, Homo sapien
tcttccacaatctcgaaagtagcct

SEQ ID NO: 4216811 - DNA, 25 bp, Homo sapien
ccacaatctcgaaagtagcctgcat

SEQ ID NO: 4216812 - DNA, 25 bp, Homo sapien
tctgcaggctcatcttccacaatct

SEQ ID NO: 4216813 - DNA, 25 bp, Homo sapien
ggctcatcttccacaatctcgaaag

SEQ ID NO: 4216814 - DNA, 25 bp, Homo sapien
ttcaataacctccaaaatattttca

SEQ ID NO: 4216815 - DNA, 25 bp, Homo sapien
ccaaaatattttcatagagggagat

SEQ ID NO: 4216816 - DNA, 25 bp, Homo sapien
acctccaaaatattttcatagaggg

SEQ ID NO: 4216817 - DNA, 25 bp, Homo sapien
tccaaaatattttcatagagggaga

SEQ ID NO: 4216818 - DNA, 25 bp, Homo sapien
agcctttttagtccagttataagag

SEQ ID NO: 4216819 - DNA, 25 bp, Homo sapien
taggagagaattgttggttgtcact

SEQ ID NO: 4216820 - DNA, 25 bp, Homo sapien
ttgagaaatattcgggtaggagaga

SEQ ID NO: 4216821 - DNA, 25 bp, Homo sapien
tgagttgagaaatattcgggtagga

SEQ ID NO: 4216822 - DNA, 25 bp, Homo sapien
ttgaacccagcccattgtaatctca

SEQ ID NO: 4216823 - DNA, 25 bp, Homo sapien
gggtatggctgatcccccacagaat

SEQ ID NO: 4216824 - DNA, 25 bp, Homo sapien
cagcccattgtaatctcagggcagg

SEQ ID NO: 4216825 - DNA, 25 bp, Homo sapien
atctgtcatctctgttggtgccact

SEQ ID NO: 4216826 - DNA, 25 bp, Homo sapien
gggaggccacgtgagggctcaggtg

SEQ ID NO: 4216827 - DNA, 25 bp, Homo sapien
tggggaggccacgtgagggctcagg

SEQ ID NO: 4216828 - DNA, 25 bp, Homo sapien
ggaggccacgtgagggctcaggtgg

SEQ ID NO: 4216829 - DNA, 25 bp, Homo sapien
ggggaggccacgtgagggctcaggt

SEQ ID NO: 4216830 - DNA, 25 bp, Homo sapien
ctgccgacagccatgggataaacac

SEQ ID NO: 4216831 - DNA, 25 bp, Homo sapien
gataatgagtttcctccagcaaagc

SEQ ID NO: 4216832 - DNA, 25 bp, Homo sapien
ttctgcagcacctagtagtgtggac

SEQ ID NO: 4216833 - DNA, 25 bp, Homo sapien
cacctagcatggctgtaggagggac

SEQ ID NO: 4216834 - DNA, 25 bp, Homo sapien
cttaaattgctgatggtgataatga

SEQ ID NO: 4216835 - DNA, 25 bp, Homo sapien
tcattctgctactctgctactgtat

SEQ ID NO: 4216836 - DNA, 25 bp, Homo sapien
aggctcctgcttaagaggtgacagc

SEQ ID NO: 4216837 - DNA, 25 bp, Homo sapien
cgtaaggaatggagtgaaagcagtc

SEQ ID NO: 4216838 - DNA, 25 bp, Homo sapien
ttcaattgcagacaacaaaacacca

SEQ ID NO: 4216839 - DNA, 25 bp, Homo sapien
ccgctctatcctcttgaaccacaat

SEQ ID NO: 4216840 - DNA, 25 bp, Homo sapien
tggcttctttgcaccactcaggagc

SEQ ID NO: 4216841 - DNA, 25 bp, Homo sapien
tccctgacatctggtacaactggct

SEQ ID NO: 4216842 - DNA, 25 bp, Homo sapien
gaaccacaatgtgaggagcatttcc

SEQ ID NO: 4216843 - DNA, 25 bp, Homo sapien
acacccctcgcctttttacatccat

SEQ ID NO: 4216844 - DNA, 25 bp, Homo sapien
cacacccctcgcctttttacatcca

SEQ ID NO: 4216845 - DNA, 25 bp, Homo sapien
cagcagcgcacagcttgtgaggttc

SEQ ID NO: 4216846 - DNA, 25 bp, Homo sapien
gagccggctgacaatttttctccct

SEQ ID NO: 4216847 - DNA, 25 bp, Homo sapien
cctggagccggctgacaatttttct

SEQ ID NO: 4216848 - DNA, 25 bp, Homo sapien
tggagccggctgacaatttttctcc

SEQ ID NO: 4216849 - DNA, 25 bp, Homo sapien
gcaaatagaagccatcactttcata

SEQ ID NO: 4216850 - DNA, 25 bp, Homo sapien
caggaatacgaagtgcaaatagaag

SEQ ID NO: 4216851 - DNA, 25 bp, Homo sapien
ctaattaccaggaatacgaagtgca

SEQ ID NO: 4216852 - DNA, 25 bp, Homo sapien
cgaagtgcaaatagaagccatcact

SEQ ID NO: 4216853 - DNA, 25 bp, Homo sapien
aagcaagcactcaggggaattgcgt

SEQ ID NO: 4216854 - DNA, 25 bp, Homo sapien
gaaatggtcccaactccctgtttgc

SEQ ID NO: 4216855 - DNA, 25 bp, Homo sapien
gaccagggggcattcttgccaccct

SEQ ID NO: 4216856 - DNA, 25 bp, Homo sapien
attgcgtgaagagaataggaccagg

SEQ ID NO: 4216857 - DNA, 25 bp, Homo sapien
ctatatttgattaacataatctggg

SEQ ID NO: 4216858 - DNA, 25 bp, Homo sapien
cataatctgggggtaatgaatatgg

SEQ ID NO: 4216859 - DNA, 25 bp, Homo sapien
ttgttctctccagtacatttcctac

SEQ ID NO: 4216860 - DNA, 25 bp, Homo sapien
tattgccaatagtcacctagaagca

SEQ ID NO: 4216861 - DNA, 25 bp, Homo sapien
gccttccttagttatagctgtgaag

SEQ ID NO: 4216862 - DNA, 25 bp, Homo sapien
ttctcccagaggccctgtaagcctt

SEQ ID NO: 4216863 - DNA, 25 bp, Homo sapien
actgaaccctcgagcatgccagcaa

SEQ ID NO: 4216864 - DNA, 25 bp, Homo sapien
cagcaagcaccacaatgatgactct

SEQ ID NO: 4216865 - DNA, 25 bp, Homo sapien
ggaaagaggaaagccgttctccaca

SEQ ID NO: 4216866 - DNA, 25 bp, Homo sapien
aggtaaataagaatcccttggagtg

SEQ ID NO: 4216867 - DNA, 25 bp, Homo sapien
cttggagtggaagtaccaggtgcac

SEQ ID NO: 4216868 - DNA, 25 bp, Homo sapien
gaaagccgttctccacaagtttgag

SEQ ID NO: 4216869 - DNA, 25 bp, Homo sapien
caccaaaagtggttgtgacagggac

SEQ ID NO: 4216870 - DNA, 25 bp, Homo sapien
gagattagaccttaagccacaggca

SEQ ID NO: 4216871 - DNA, 25 bp, Homo sapien
tccgggccttgacggctgaactaag

SEQ ID NO: 4216872 - DNA, 25 bp, Homo sapien
ttgctatagaatcagggcccatttt

SEQ ID NO: 4216873 - DNA, 25 bp, Homo sapien
tatttatgatcaatgccaccactca

SEQ ID NO: 4216874 - DNA, 25 bp, Homo sapien
gccaccactcaggtagtgatcacca

SEQ ID NO: 4216875 - DNA, 25 bp, Homo sapien
gatcaatgccaccactcaggtagtg

SEQ ID NO: 4216876 - DNA, 25 bp, Homo sapien
caggtagtgatcaccataggaaaca

SEQ ID NO: 4216877 - DNA, 25 bp, Homo sapien
cagcattgaatgttggtgctgtgca

SEQ ID NO: 4216878 - DNA, 25 bp, Homo sapien
gaccaattgtttacgtgattcagca

SEQ ID NO: 4216879 - DNA, 25 bp, Homo sapien
gatggatgctggtgcaggatcaatc

SEQ ID NO: 4216880 - DNA, 25 bp, Homo sapien
cattgtctttctgtaagatggctct

SEQ ID NO: 4216881 - DNA, 25 bp, Homo sapien
cattttataaagcatgatgggtcaa

SEQ ID NO: 4216882 - DNA, 25 bp, Homo sapien
ggtgtcacaggattggtttctcctg

SEQ ID NO: 4216883 - DNA, 25 bp, Homo sapien
tgttgtctaagttgtgcattgagca

SEQ ID NO: 4216884 - DNA, 25 bp, Homo sapien
caagaatatgttggagaagtataaa

SEQ ID NO: 4216885 - DNA, 25 bp, Homo sapien
caccagaaccctgagtttcaagcac

SEQ ID NO: 4216886 - DNA, 25 bp, Homo sapien
tggaaccccaatgggacaggagaac

SEQ ID NO: 4216887 - DNA, 25 bp, Homo sapien
cctgaatgaagttagggagccaagt

SEQ ID NO: 4216888 - DNA, 25 bp, Homo sapien
tagattcctttgtgagcctacacca

SEQ ID NO: 4216889 - DNA, 25 bp, Homo sapien
tacatcagcatgcataggacagacc

SEQ ID NO: 4216890 - DNA, 25 bp, Homo sapien
gggccttggcatcactagtttaaaa

SEQ ID NO: 4216891 - DNA, 25 bp, Homo sapien
gttcatctcacggaactggttaggc

SEQ ID NO: 4216892 - DNA, 25 bp, Homo sapien
gcagacattatgacctcagccaaat

SEQ ID NO: 4216893 - DNA, 25 bp, Homo sapien
caaagaatgaaagcacggaagccct

SEQ ID NO: 4216894 - DNA, 25 bp, Homo sapien
tgtatcctgactgagcagggtgccc

SEQ ID NO: 4216895 - DNA, 25 bp, Homo sapien
aagccctttggaagatgagccatca

SEQ ID NO: 4216896 - DNA, 25 bp, Homo sapien
tcccctgggttgtggtaggcattct

SEQ ID NO: 4216897 - DNA, 25 bp, Homo sapien
gacaagacattcaattcaggagccc

SEQ ID NO: 4216898 - DNA, 25 bp, Homo sapien
tctgtactagattaggcagcctccc

SEQ ID NO: 4216899 - DNA, 25 bp, Homo sapien
tccgcttcataccaggagtcctgtg

SEQ ID NO: 4216900 - DNA, 25 bp, Homo sapien
cagcaacagcctggaacgggtgatc

SEQ ID NO: 4216901 - DNA, 25 bp, Homo sapien
ttgtcaagaagcgaagagaaggcca

SEQ ID NO: 4216902 - DNA, 25 bp, Homo sapien
tttcatctggaaggtaggccgggac

SEQ ID NO: 4216903 - DNA, 25 bp, Homo sapien
tgtggctgcctacaagcgaaaaacg

SEQ ID NO: 4216904 - DNA, 25 bp, Homo sapien
ttaagacatgtgatcctgggcccca

SEQ ID NO: 4216905 - DNA, 25 bp, Homo sapien
tgccaggtacctgttacagacggcc

SEQ ID NO: 4216906 - DNA, 25 bp, Homo sapien
gccaaaggagagtcctcagaaacct

SEQ ID NO: 4216907 - DNA, 25 bp, Homo sapien
tatagcgtgggcactttgccgctgc

SEQ ID NO: 4216908 - DNA, 25 bp, Homo sapien
ttgccgctgctgtcagatcctgcca

SEQ ID NO: 4216909 - DNA, 25 bp, Homo sapien
gaatgatctgtgtagtttgaacctg

SEQ ID NO: 4216910 - DNA, 25 bp, Homo sapien
gagtcttatgtccattcagattccc

SEQ ID NO: 4216911 - DNA, 25 bp, Homo sapien
tctgtgaacactggccataggctca

SEQ ID NO: 4216912 - DNA, 25 bp, Homo sapien
tctgcccagctctttcagaataatg

SEQ ID NO: 4216913 - DNA, 25 bp, Homo sapien
taaggaattctatatcacctgggaa

SEQ ID NO: 4216914 - DNA, 25 bp, Homo sapien
ttctatatcacctgggaagatggac

SEQ ID NO: 4216915 - DNA, 25 bp, Homo sapien
tcatcggtcatgtccccagaattcc

SEQ ID NO: 4216916 - DNA, 25 bp, Homo sapien
gaagatggactctgcatcaccagaa

SEQ ID NO: 4216917 - DNA, 25 bp, Homo sapien
aaatcttcaagatatttctgcttaa

SEQ ID NO: 4216918 - DNA, 25 bp, Homo sapien
tctgcttaaattgcaccaggtgctg

SEQ ID NO: 4216919 - DNA, 25 bp, Homo sapien
tcctgcattggcgttcccattccat

SEQ ID NO: 4216920 - DNA, 25 bp, Homo sapien
ccttcctgcattggcgttcccattc

SEQ ID NO: 4216921 - DNA, 25 bp, Homo sapien
ggtcagcaccagcatagacatgact

SEQ ID NO: 4216922 - DNA, 25 bp, Homo sapien
tgctccaagcaaatgtggccagata

SEQ ID NO: 4216923 - DNA, 25 bp, Homo sapien
ctgttgggctgagctctagcaccag

SEQ ID NO: 4216924 - DNA, 25 bp, Homo sapien
gactgacttttggttcaggtgctgc

SEQ ID NO: 4216925 - DNA, 25 bp, Homo sapien
tttacagttattatcagatctgcag

SEQ ID NO: 4216926 - DNA, 25 bp, Homo sapien
tacagttattatcagatctgcagac

SEQ ID NO: 4216927 - DNA, 25 bp, Homo sapien
cagttattatcagatctgcagacac

SEQ ID NO: 4216928 - DNA, 25 bp, Homo sapien
tattttacagttattatcagatctg

SEQ ID NO: 4216929 - DNA, 25 bp, Homo sapien
catgatgctgaaagctcgtgctgcc

SEQ ID NO: 4216930 - DNA, 25 bp, Homo sapien
tctaataaatagcacagtgggcgtc

SEQ ID NO: 4216931 - DNA, 25 bp, Homo sapien
tagccactggatcagattcacctgg

SEQ ID NO: 4216932 - DNA, 25 bp, Homo sapien
tcgtgctgccaccaatttaagtaag

SEQ ID NO: 4216933 - DNA, 25 bp, Homo sapien
tcactacctctgagtaggtgtccat

SEQ ID NO: 4216934 - DNA, 25 bp, Homo sapien
gaggttctctagcaagtacaacaga

SEQ ID NO: 4216935 - DNA, 25 bp, Homo sapien
aagaacttgggtggatttgatcagc

SEQ ID NO: 4216936 - DNA, 25 bp, Homo sapien
tgtaggtggcatctcaggtctagct

SEQ ID NO: 4216937 - DNA, 25 bp, Homo sapien
cattgatggtaagggcaggcactgc

SEQ ID NO: 4216938 - DNA, 25 bp, Homo sapien
tgttaatttccaagggctgccataa

SEQ ID NO: 4216939 - DNA, 25 bp, Homo sapien
tgtcatagccctggatagagctgcc

SEQ ID NO: 4216940 - DNA, 25 bp, Homo sapien
tatgtccccttcgaagctctacagg

SEQ ID NO: 4216941 - DNA, 25 bp, Homo sapien
tacaatcacatttacaggaaccagg

SEQ ID NO: 4216942 - DNA, 25 bp, Homo sapien
agggaaaaccatctacactggacag

SEQ ID NO: 4216943 - DNA, 25 bp, Homo sapien
ctatgggcccaaaaggaagaccaga

SEQ ID NO: 4216944 - DNA, 25 bp, Homo sapien
gccacatctgggcacgtgcctatgg

SEQ ID NO: 4216945 - DNA, 25 bp, Homo sapien
tgtcatgagaatttgcacaaccagc

SEQ ID NO: 4216946 - DNA, 25 bp, Homo sapien
gaggcgatgttgacttggggagacc

SEQ ID NO: 4216947 - DNA, 25 bp, Homo sapien
aattcagaggcgatgttgacttggg

SEQ ID NO: 4216948 - DNA, 25 bp, Homo sapien
aggcgatgttgacttggggagacct

SEQ ID NO: 4216949 - DNA, 25 bp, Homo sapien
tagaaaattcagaggcgatgttgac

SEQ ID NO: 4216950 - DNA, 25 bp, Homo sapien
cagatcagtaatattcttgtcctca

SEQ ID NO: 4216951 - DNA, 25 bp, Homo sapien
tcagatcagtaatattcttgtcctc

SEQ ID NO: 4216952 - DNA, 25 bp, Homo sapien
tcatcaggagccctttgatcaggtc

SEQ ID NO: 4216953 - DNA, 25 bp, Homo sapien
ttgatcaggtccttcaggttatggg

SEQ ID NO: 4216954 - DNA, 25 bp, Homo sapien
tcaatgtttagtgcaccagaatcac

SEQ ID NO: 4216955 - DNA, 25 bp, Homo sapien
cagagcagcctgaaatccaaaggag

SEQ ID NO: 4216956 - DNA, 25 bp, Homo sapien
tcagcagattgaatcaggaccagct

SEQ ID NO: 4216957 - DNA, 25 bp, Homo sapien
ctgggagggctacttctatgagaga

SEQ ID NO: 4216958 - DNA, 25 bp, Homo sapien
tcacagagtgtcatccagaattctg

SEQ ID NO: 4216959 - DNA, 25 bp, Homo sapien
tatgcctggcttgggatgcagcgac

SEQ ID NO: 4216960 - DNA, 25 bp, Homo sapien
gatgacttccattcgttgactctga

SEQ ID NO: 4216961 - DNA, 25 bp, Homo sapien
taacttgttctatatctggctccaa

SEQ ID NO: 4216962 - DNA, 25 bp, Homo sapien
aaacttctcattagtgaatgcgttg

SEQ ID NO: 4216963 - DNA, 25 bp, Homo sapien
gaatgcgttgtattactccttaact

SEQ ID NO: 4216964 - DNA, 25 bp, Homo sapien
ccagcctgagttttgaactatatga

SEQ ID NO: 4216965 - DNA, 25 bp, Homo sapien
gtcctattagcatacacaataaagg

SEQ ID NO: 4216966 - DNA, 25 bp, Homo sapien
aggaggtggcttaccctgacttctc

SEQ ID NO: 4216967 - DNA, 25 bp, Homo sapien
tagtggctactactcatcgaaggca

SEQ ID NO: 4216968 - DNA, 25 bp, Homo sapien
tagaagcaccaataccataatgagt

SEQ ID NO: 4216969 - DNA, 25 bp, Homo sapien
gactttaggtaagtgtggttcatgc

SEQ ID NO: 4216970 - DNA, 25 bp, Homo sapien
ggtttggcaaaatccatactgcagg

SEQ ID NO: 4216971 - DNA, 25 bp, Homo sapien
tggtggtgccactacttcaggtact

SEQ ID NO: 4216972 - DNA, 25 bp, Homo sapien
gatgtgcctttttgtactgctgagc

SEQ ID NO: 4216973 - DNA, 25 bp, Homo sapien
gctaatagaattgtgtcgccaaaca

SEQ ID NO: 4216974 - DNA, 25 bp, Homo sapien
tgtaaatgtaatctcaagtgcttag

SEQ ID NO: 4216975 - DNA, 25 bp, Homo sapien
gtgctgattatagctgtgaaccacc

SEQ ID NO: 4216976 - DNA, 25 bp, Homo sapien
gcccggccaggaaatcttactgtag

SEQ ID NO: 4216977 - DNA, 25 bp, Homo sapien
gctcttatagttagcccaaagactc

SEQ ID NO: 4216978 - DNA, 25 bp, Homo sapien
tgaacaccaacttagctaccaagtg

SEQ ID NO: 4216979 - DNA, 25 bp, Homo sapien
taccaagtgaggtcaagtgcctgaa

SEQ ID NO: 4216980 - DNA, 25 bp, Homo sapien
tatggcaatgcataccaggctttca

SEQ ID NO: 4216981 - DNA, 25 bp, Homo sapien
tctcctccttagaacaggtagaaac

SEQ ID NO: 4216982 - DNA, 25 bp, Homo sapien
caagtctctgtaccagcgctttatg

SEQ ID NO: 4216983 - DNA, 25 bp, Homo sapien
tgttgctaaccaagctcttgactct

SEQ ID NO: 4216984 - DNA, 25 bp, Homo sapien
taccatgtatagaatgtggactgtc

SEQ ID NO: 4216985 - DNA, 25 bp, Homo sapien
tgttaaaaatcacgagttaccatgt

SEQ ID NO: 4216986 - DNA, 25 bp, Homo sapien
gcaatataatgagacgcccatcttt

SEQ ID NO: 4216987 - DNA, 25 bp, Homo sapien
caagctaggtgcattggtgcacacc

SEQ ID NO: 4216988 - DNA, 25 bp, Homo sapien
tagtggcacagtacgaacatttaac

SEQ ID NO: 4216989 - DNA, 25 bp, Homo sapien
aaatagacaagctgtgctttaggga

SEQ ID NO: 4216990 - DNA, 25 bp, Homo sapien
aagtgcactaatccgcagcacgtgg

SEQ ID NO: 4216991 - DNA, 25 bp, Homo sapien
gccggaagtgcactaatccgcagca

SEQ ID NO: 4216992 - DNA, 25 bp, Homo sapien
cgctcttcacgtgactgggcggagc

SEQ ID NO: 4216993 - DNA, 25 bp, Homo sapien
gttgccagggcgctcttcacgtgac

SEQ ID NO: 4216994 - DNA, 25 bp, Homo sapien
ccaggaggaaagaatggatgagtcg

SEQ ID NO: 4216995 - DNA, 25 bp, Homo sapien
accccaaactctaaggaatgccaat

SEQ ID NO: 4216996 - DNA, 25 bp, Homo sapien
cccaaactctaaggaatgccaatgc

SEQ ID NO: 4216997 - DNA, 25 bp, Homo sapien
ggaatgccaatgccaggaggaaaga

SEQ ID NO: 4216998 - DNA, 25 bp, Homo sapien
ccccaagataggatactgcggtagg

SEQ ID NO: 4216999 - DNA, 25 bp, Homo sapien
taggatactgcggtaggttgcgaaa

SEQ ID NO: 4217000 - DNA, 25 bp, Homo sapien
gaagggggagcacatctcttttaag

SEQ ID NO: 4217001 - DNA, 25 bp, Homo sapien
taggttgcgaaatgaaactgtgaag

SEQ ID NO: 4217002 - DNA, 25 bp, Homo sapien
ttataatatcattaggtgtcatgag

SEQ ID NO: 4217003 - DNA, 25 bp, Homo sapien
taatatcattaggtgtcatgagact

SEQ ID NO: 4217004 - DNA, 25 bp, Homo sapien
agcacaagaaaaacctacccccatg

SEQ ID NO: 4217005 - DNA, 25 bp, Homo sapien
gcacaagaaaaacctacccccatga

SEQ ID NO: 4217006 - DNA, 25 bp, Homo sapien
ccattaatgtgtggacagataaaca

SEQ ID NO: 4217007 - DNA, 25 bp, Homo sapien
cgtggaaaaactcgaactcttctgc

SEQ ID NO: 4217008 - DNA, 25 bp, Homo sapien
ttttgacacatgctatgaggttact

SEQ ID NO: 4217009 - DNA, 25 bp, Homo sapien
caatttcacttgtgtgcatataccc

SEQ ID NO: 4217010 - DNA, 25 bp, Homo sapien
ctctgcctgtatatttttaagcagc

SEQ ID NO: 4217011 - DNA, 25 bp, Homo sapien
tgcaatgcggcgatttcggcctact

SEQ ID NO: 4217012 - DNA, 25 bp, Homo sapien
atgcggcgatttcggcctactacaa

SEQ ID NO: 4217013 - DNA, 25 bp, Homo sapien
tcctctgcctgtatatttttaagca

SEQ ID NO: 4217014 - DNA, 25 bp, Homo sapien
tgagcagagtacctgatattgagta

SEQ ID NO: 4217015 - DNA, 25 bp, Homo sapien
tatttggcagaaattattatttagc

SEQ ID NO: 4217016 - DNA, 25 bp, Homo sapien
gatattgagtaagtgctcaaatact

SEQ ID NO: 4217017 - DNA, 25 bp, Homo sapien
gctcaaatacttggggaatcacaaa

SEQ ID NO: 4217018 - DNA, 25 bp, Homo sapien
ctcaaggggcactgatagagaacac

SEQ ID NO: 4217019 - DNA, 25 bp, Homo sapien
tttgtggcacaagccaactttcagg

SEQ ID NO: 4217020 - DNA, 25 bp, Homo sapien
aacacaatctcatccacccctcaag

SEQ ID NO: 4217021 - DNA, 25 bp, Homo sapien
cactccaagagtgtgttgttgggag

SEQ ID NO: 4217022 - DNA, 25 bp, Homo sapien
gtctgaatccccatgcttacatagg

SEQ ID NO: 4217023 - DNA, 25 bp, Homo sapien
taacctaatgagcaaatccagtcct

SEQ ID NO: 4217024 - DNA, 25 bp, Homo sapien
gatctgctacacaaaagtggacact

SEQ ID NO: 4217025 - DNA, 25 bp, Homo sapien
cactgatgaggcatggatacttgcc

SEQ ID NO: 4217026 - DNA, 25 bp, Homo sapien
tttagttgagttccttttatgaaca

SEQ ID NO: 4217027 - DNA, 25 bp, Homo sapien
gagcaaatatttagttgagttcctt

SEQ ID NO: 4217028 - DNA, 25 bp, Homo sapien
attgagcaaatatttagttgagttc

SEQ ID NO: 4217029 - DNA, 25 bp, Homo sapien
tagttgagttccttttatgaacaag

SEQ ID NO: 4217030 - DNA, 25 bp, Homo sapien
tccttctcacagtactttcccattc

SEQ ID NO: 4217031 - DNA, 25 bp, Homo sapien
catttccttctcacagtactttccc

SEQ ID NO: 4217032 - DNA, 25 bp, Homo sapien
atttccttctcacagtactttccca

SEQ ID NO: 4217033 - DNA, 25 bp, Homo sapien
tttccttctcacagtactttcccat

SEQ ID NO: 4217034 - DNA, 25 bp, Homo sapien
ggcagaggagctatcacaatcacaa

SEQ ID NO: 4217035 - DNA, 25 bp, Homo sapien
gagagattactaacctggcagagga

SEQ ID NO: 4217036 - DNA, 25 bp, Homo sapien
caatatcttgtgcttacagggtcct

SEQ ID NO: 4217037 - DNA, 25 bp, Homo sapien
gtcatgactcccaggaaaaggtcct

SEQ ID NO: 4217038 - DNA, 25 bp, Homo sapien
cagggtgctaacgtatctctaggct

SEQ ID NO: 4217039 - DNA, 25 bp, Homo sapien
tgctttttaattgaggacagcctgg

SEQ ID NO: 4217040 - DNA, 25 bp, Homo sapien
gatgggtcccaaaagcttagcaggg

SEQ ID NO: 4217041 - DNA, 25 bp, Homo sapien
tggccattactaacacgcattgtac

SEQ ID NO: 4217042 - DNA, 25 bp, Homo sapien
cctaggagctacagagactgtgtaa

SEQ ID NO: 4217043 - DNA, 25 bp, Homo sapien
cagaaacaataagggaaccgtctgt

SEQ ID NO: 4217044 - DNA, 25 bp, Homo sapien
tcctggcctttaccctgttcacatt

SEQ ID NO: 4217045 - DNA, 25 bp, Homo sapien
ttgctgcagaattccaaaagaagag

SEQ ID NO: 4217046 - DNA, 25 bp, Homo sapien
caaggttgtggcttccggtgatgca

SEQ ID NO: 4217047 - DNA, 25 bp, Homo sapien
tgagggaagtgacatagtaactaga

SEQ ID NO: 4217048 - DNA, 25 bp, Homo sapien
cagactcagcaaatggtattaagcc

SEQ ID NO: 4217049 - DNA, 25 bp, Homo sapien
tattaagccattgagcagagcttcc

SEQ ID NO: 4217050 - DNA, 25 bp, Homo sapien
gatagtcctggttgcactttaacat

SEQ ID NO: 4217051 - DNA, 25 bp, Homo sapien
gggctaatttcaggcctggttccta

SEQ ID NO: 4217052 - DNA, 25 bp, Homo sapien
tgtctatacctaggaacaagggttc

SEQ ID NO: 4217053 - DNA, 25 bp, Homo sapien
tgaaattgctccaaccgctctcagg

SEQ ID NO: 4217054 - DNA, 25 bp, Homo sapien
cctgtttcttcataacacccctcat

SEQ ID NO: 4217055 - DNA, 25 bp, Homo sapien
caagaagttaaaggctcactggccg

SEQ ID NO: 4217056 - DNA, 25 bp, Homo sapien
catggaaccgctcctgactgtggac

SEQ ID NO: 4217057 - DNA, 25 bp, Homo sapien
ggtatcatttacgacgcggcacaga

SEQ ID NO: 4217058 - DNA, 25 bp, Homo sapien
tggctgaacctgaggaaactgatca

SEQ ID NO: 4217059 - DNA, 25 bp, Homo sapien
cacctacacgaaacaatatgccagc

SEQ ID NO: 4217060 - DNA, 25 bp, Homo sapien
gtcccagagtgtcacctacacgaaa

SEQ ID NO: 4217061 - DNA, 25 bp, Homo sapien
aaggttcgctgctgggggaactcca

SEQ ID NO: 4217062 - DNA, 25 bp, Homo sapien
caagaggtcagtataagtcccagag

SEQ ID NO: 4217063 - DNA, 25 bp, Homo sapien
tgtgcatctggcatttgagatgctt

SEQ ID NO: 4217064 - DNA, 25 bp, Homo sapien
tcagtgctttggcatctggagcagt

SEQ ID NO: 4217065 - DNA, 25 bp, Homo sapien
ggagcagttatctccttgtcagagc

SEQ ID NO: 4217066 - DNA, 25 bp, Homo sapien
ggcatctggagcagttatctccttg

SEQ ID NO: 4217067 - DNA, 25 bp, Homo sapien
tttaagaaagctctataggctttag

SEQ ID NO: 4217068 - DNA, 25 bp, Homo sapien
gctggcttcatcaagtaagtggaat

SEQ ID NO: 4217069 - DNA, 25 bp, Homo sapien
tgctggcttcatcaagtaagtggaa

SEQ ID NO: 4217070 - DNA, 25 bp, Homo sapien
agctctataggctttagtgccatca

SEQ ID NO: 4217071 - DNA, 25 bp, Homo sapien
gaatgtgattgccaccagctcttta

SEQ ID NO: 4217072 - DNA, 25 bp, Homo sapien
actgtaattggatgctgatgtggac

SEQ ID NO: 4217073 - DNA, 25 bp, Homo sapien
cctcatggtccctttagctctcaaa

SEQ ID NO: 4217074 - DNA, 25 bp, Homo sapien
gatttcgatttcactcccgaatgtg

SEQ ID NO: 4217075 - DNA, 25 bp, Homo sapien
aaagatggaccatgtgcccttcgga

SEQ ID NO: 4217076 - DNA, 25 bp, Homo sapien
tgtaccttatctccttaggctgaag

SEQ ID NO: 4217077 - DNA, 25 bp, Homo sapien
cgtgcgatctggaggaagtagccaa

SEQ ID NO: 4217078 - DNA, 25 bp, Homo sapien
ggctgaaggccataactacatagtg

SEQ ID NO: 4217079 - DNA, 25 bp, Homo sapien
tcagtgagtcagcagaagagaatta

SEQ ID NO: 4217080 - DNA, 25 bp, Homo sapien
gaattaagggctcactgtaaaggcc

SEQ ID NO: 4217081 - DNA, 25 bp, Homo sapien
gaataaagacttttagctgctacat

SEQ ID NO: 4217082 - DNA, 25 bp, Homo sapien
aacatctgcacgtgggttcttaaaa

SEQ ID NO: 4217083 - DNA, 25 bp, Homo sapien
ttagcagcagggatgcttagactgg

SEQ ID NO: 4217084 - DNA, 25 bp, Homo sapien
gccctgttaatttctaatgatagct

SEQ ID NO: 4217085 - DNA, 25 bp, Homo sapien
cctgtggcctgtgatcctattagca

SEQ ID NO: 4217086 - DNA, 25 bp, Homo sapien
ggccttgttgctgacacttcccaaa

SEQ ID NO: 4217087 - DNA, 25 bp, Homo sapien
tggcttctttctctttctccagcat

SEQ ID NO: 4217088 - DNA, 25 bp, Homo sapien
atatcagtatgatgttctgttgaac

SEQ ID NO: 4217089 - DNA, 25 bp, Homo sapien
gttgaacatcggcagaatttgaagg

SEQ ID NO: 4217090 - DNA, 25 bp, Homo sapien
aaatggcatgtgattttctgggcct

SEQ ID NO: 4217091 - DNA, 25 bp, Homo sapien
cctggcaataactgtgtgggctccc

SEQ ID NO: 4217092 - DNA, 25 bp, Homo sapien
cacagtgcgggagttgggctgacat

SEQ ID NO: 4217093 - DNA, 25 bp, Homo sapien
ttcctgccacagtgcgggagttggg

SEQ ID NO: 4217094 - DNA, 25 bp, Homo sapien
gagttctgactttgtccgctttgtc

SEQ ID NO: 4217095 - DNA, 25 bp, Homo sapien
tcacctggatcctgtgatgggaggg

SEQ ID NO: 4217096 - DNA, 25 bp, Homo sapien
tttccagggtgaggccttgaagctg

SEQ ID NO: 4217097 - DNA, 25 bp, Homo sapien
ctgctttgttattgctgccctgggt

SEQ ID NO: 4217098 - DNA, 25 bp, Homo sapien
gctttgttattgctgccctgggtca

SEQ ID NO: 4217099 - DNA, 25 bp, Homo sapien
tctctttccagggtgaggccttgaa

SEQ ID NO: 4217100 - DNA, 25 bp, Homo sapien
tcccagtgaaacctagagaaccttc

SEQ ID NO: 4217101 - DNA, 25 bp, Homo sapien
aaggaggcggcccattctttgtcct

SEQ ID NO: 4217102 - DNA, 25 bp, Homo sapien
ttgtttagtagggtcaactgccacc

SEQ ID NO: 4217103 - DNA, 25 bp, Homo sapien
tcccctggagaaactgccttctgat

SEQ ID NO: 4217104 - DNA, 25 bp, Homo sapien
tgaattagcggaggatctaggagcc

SEQ ID NO: 4217105 - DNA, 25 bp, Homo sapien
cacagtcgtactgaaagggaggcag

SEQ ID NO: 4217106 - DNA, 25 bp, Homo sapien
ggctcatggcttgcacactggctaa

SEQ ID NO: 4217107 - DNA, 25 bp, Homo sapien
tctttgccacgtcccaaggatgagg

SEQ ID NO: 4217108 - DNA, 25 bp, Homo sapien
tttgctccaaggctaaaaatcaccc

SEQ ID NO: 4217109 - DNA, 25 bp, Homo sapien
gataacagcccagttgactcctcct

SEQ ID NO: 4217110 - DNA, 25 bp, Homo sapien
gctaagctatttaacccatacgtga

SEQ ID NO: 4217111 - DNA, 25 bp, Homo sapien
tatgaggcaccagttctgattcttg

SEQ ID NO: 4217112 - DNA, 25 bp, Homo sapien
tccagctattctctacctaaatgag

SEQ ID NO: 4217113 - DNA, 25 bp, Homo sapien
tgctctttccactgtcatcgtggag

SEQ ID NO: 4217114 - DNA, 25 bp, Homo sapien
taccgggttaaatgccttgttctca

SEQ ID NO: 4217115 - DNA, 25 bp, Homo sapien
cataaactggtctcttagtgtgaac

SEQ ID NO: 4217116 - DNA, 25 bp, Homo sapien
ttaatatggaccatccccaaagcca

SEQ ID NO: 4217117 - DNA, 25 bp, Homo sapien
tctcatcaccggaatattgctacat

SEQ ID NO: 4217118 - DNA, 25 bp, Homo sapien
gaccaactttgggtatgtactgccg

SEQ ID NO: 4217119 - DNA, 25 bp, Homo sapien
gctacatactatggtgcttttatca

SEQ ID NO: 4217120 - DNA, 25 bp, Homo sapien
cgtagcctgtgatcctttatgataa

SEQ ID NO: 4217121 - DNA, 25 bp, Homo sapien
ctattcaaattctcgtagcctgtga

SEQ ID NO: 4217122 - DNA, 25 bp, Homo sapien
taaattgtctcctactttttgccac

SEQ ID NO: 4217123 - DNA, 25 bp, Homo sapien
actgtgggtggcaattctgataggt

SEQ ID NO: 4217124 - DNA, 25 bp, Homo sapien
aatgggagtggaaaaccagagttca

SEQ ID NO: 4217125 - DNA, 25 bp, Homo sapien
atgggagtggaaaaccagagttcat

SEQ ID NO: 4217126 - DNA, 25 bp, Homo sapien
tctagttagtaccagctcgggaaaa

SEQ ID NO: 4217127 - DNA, 25 bp, Homo sapien
ctctagttagtaccagctcgggaaa

SEQ ID NO: 4217128 - DNA, 25 bp, Homo sapien
tagttagtaccagctcgggaaaaga

SEQ ID NO: 4217129 - DNA, 25 bp, Homo sapien
ttagtaccagctcgggaaaagagga

SEQ ID NO: 4217130 - DNA, 25 bp, Homo sapien
atatcttctttatctgcagctagga

SEQ ID NO: 4217131 - DNA, 25 bp, Homo sapien
atcttctttatctgcagctaggagg

SEQ ID NO: 4217132 - DNA, 25 bp, Homo sapien
tctcagacaataggggccagcttcg

SEQ ID NO: 4217133 - DNA, 25 bp, Homo sapien
ggccagcttcgggctgcatttggca

SEQ ID NO: 4217134 - DNA, 25 bp, Homo sapien
aagtgaatgagacaggactgtgggt

SEQ ID NO: 4217135 - DNA, 25 bp, Homo sapien
taagtgaatgagacaggactgtggg

SEQ ID NO: 4217136 - DNA, 25 bp, Homo sapien
ttctttctgaacaggagactgctcc

SEQ ID NO: 4217137 - DNA, 25 bp, Homo sapien
atgacaccagtgtggtcctttttct

SEQ ID NO: 4217138 - DNA, 25 bp, Homo sapien
tctttctgaacaggagactgctcct

SEQ ID NO: 4217139 - DNA, 25 bp, Homo sapien
tcatgacaccagtgtggtccttttt

SEQ ID NO: 4217140 - DNA, 25 bp, Homo sapien
actgccaccccaagaatgatagctg

SEQ ID NO: 4217141 - DNA, 25 bp, Homo sapien
gatttgtgttactgccaccccaaga

SEQ ID NO: 4217142 - DNA, 25 bp, Homo sapien
agccaaatgggtcccgatttgtgtt

SEQ ID NO: 4217143 - DNA, 25 bp, Homo sapien
aatgatagctgggaacactgtggtc

SEQ ID NO: 4217144 - DNA, 25 bp, Homo sapien
tacttgattaacagcgtctttgtca

SEQ ID NO: 4217145 - DNA, 25 bp, Homo sapien
caactgtgtgtctggatggtataat

SEQ ID NO: 4217146 - DNA, 25 bp, Homo sapien
ttttgtcagtcatgatgccattgca

SEQ ID NO: 4217147 - DNA, 25 bp, Homo sapien
acattgtgtttaaagaatactcggg

SEQ ID NO: 4217148 - DNA, 25 bp, Homo sapien
gcatggtgggaactcctgttcctca

SEQ ID NO: 4217149 - DNA, 25 bp, Homo sapien
gcttccagaaccctagtggcatggt

SEQ ID NO: 4217150 - DNA, 25 bp, Homo sapien
taactggcagtcagcaagaccgaac

SEQ ID NO: 4217151 - DNA, 25 bp, Homo sapien
aaggtttcttccaggctacatggaa

SEQ ID NO: 4217152 - DNA, 25 bp, Homo sapien
aaaacctggaagatggctgagagac

SEQ ID NO: 4217153 - DNA, 25 bp, Homo sapien
gacagtaccctcgaagtagttctga

SEQ ID NO: 4217154 - DNA, 25 bp, Homo sapien
gagattgttctgcttgtattcccat

SEQ ID NO: 4217155 - DNA, 25 bp, Homo sapien
ctgaaagacctttgtgggttgtgga

SEQ ID NO: 4217156 - DNA, 25 bp, Homo sapien
ttctagatatgagatcccattgtct

SEQ ID NO: 4217157 - DNA, 25 bp, Homo sapien
caatgaagctgtgctgtaactccat

SEQ ID NO: 4217158 - DNA, 25 bp, Homo sapien
gatatgagatcccattgtctttgcc

SEQ ID NO: 4217159 - DNA, 25 bp, Homo sapien
gataacgggcaaatggtgaaaccca

SEQ ID NO: 4217160 - DNA, 25 bp, Homo sapien
cagattcataggtctcggttgggtc

SEQ ID NO: 4217161 - DNA, 25 bp, Homo sapien
cattcccaagcaagttaacaggtga

SEQ ID NO: 4217162 - DNA, 25 bp, Homo sapien
tgaagttggttgagaaggccccaga

SEQ ID NO: 4217163 - DNA, 25 bp, Homo sapien
tagaaccctactatgaacggagtgt

SEQ ID NO: 4217164 - DNA, 25 bp, Homo sapien
tgagctatttgtgaagcttccctta

SEQ ID NO: 4217165 - DNA, 25 bp, Homo sapien
catctacttcttgagctaatgagct

SEQ ID NO: 4217166 - DNA, 25 bp, Homo sapien
tcttgagctaatgagctatttgtga

SEQ ID NO: 4217167 - DNA, 25 bp, Homo sapien
gaagcttcccttatgcctcttgaac

SEQ ID NO: 4217168 - DNA, 25 bp, Homo sapien
tgaagatgcacagtagacaagcctc

SEQ ID NO: 4217169 - DNA, 25 bp, Homo sapien
ctgaagatgcacagtagacaagcct

SEQ ID NO: 4217170 - DNA, 25 bp, Homo sapien
gaagatgcacagtagacaagcctcc

SEQ ID NO: 4217171 - DNA, 25 bp, Homo sapien
ctttttactatcaacctctggccgt

SEQ ID NO: 4217172 - DNA, 25 bp, Homo sapien
actatcaacctctggccgtggccat

SEQ ID NO: 4217173 - DNA, 25 bp, Homo sapien
gccatgaatttctcggtctaaatct

SEQ ID NO: 4217174 - DNA, 25 bp, Homo sapien
caacctctggccgtggccatgaatt

SEQ ID NO: 4217175 - DNA, 25 bp, Homo sapien
ctgatgtataatctcttattcggcg

SEQ ID NO: 4217176 - DNA, 25 bp, Homo sapien
tcaaaacactgtctcggtgactgca

SEQ ID NO: 4217177 - DNA, 25 bp, Homo sapien
tataatctcttattcggcgtagcac

SEQ ID NO: 4217178 - DNA, 25 bp, Homo sapien
tgcaaagtgattcccctgatgtata

SEQ ID NO: 4217179 - DNA, 25 bp, Homo sapien
agtcaaaggtctcagggtcataggc

SEQ ID NO: 4217180 - DNA, 25 bp, Homo sapien
gataaggctaaagtagaggttctca

SEQ ID NO: 4217181 - DNA, 25 bp, Homo sapien
aggccactgtggctctgagtataga

SEQ ID NO: 4217182 - DNA, 25 bp, Homo sapien
ttctcataatccagaaatcgtctct

SEQ ID NO: 4217183 - DNA, 25 bp, Homo sapien
catggatcttctggtctcgctgtca

SEQ ID NO: 4217184 - DNA, 25 bp, Homo sapien
tcatggaggattgagtcatattttc

SEQ ID NO: 4217185 - DNA, 25 bp, Homo sapien
cataggctctacatggatcttctgg

SEQ ID NO: 4217186 - DNA, 25 bp, Homo sapien
aaggctgtcctcttgagaccactgc

SEQ ID NO: 4217187 - DNA, 25 bp, Homo sapien
tgggccttaaactccaggtcattct

SEQ ID NO: 4217188 - DNA, 25 bp, Homo sapien
ccctgggccttaaactccaggtcat

SEQ ID NO: 4217189 - DNA, 25 bp, Homo sapien
tagttaatcatcttcccctgggcct

SEQ ID NO: 4217190 - DNA, 25 bp, Homo sapien
gttattactttggtagttaatcatc

SEQ ID NO: 4217191 - DNA, 25 bp, Homo sapien
ccagatgcctgtgatgagtgatgga

SEQ ID NO: 4217192 - DNA, 25 bp, Homo sapien
cttggctgctatccagatgcctgtg

SEQ ID NO: 4217193 - DNA, 25 bp, Homo sapien
ttggctgctatccagatgcctgtga

SEQ ID NO: 4217194 - DNA, 25 bp, Homo sapien
agagctactgttctggatgagcagc

SEQ ID NO: 4217195 - DNA, 25 bp, Homo sapien
aaggctaggctatgctgcggtaaca

SEQ ID NO: 4217196 - DNA, 25 bp, Homo sapien
ggtttgggagccacagatctggtat

SEQ ID NO: 4217197 - DNA, 25 bp, Homo sapien
ccacgggcatcctggtaacttttgt

SEQ ID NO: 4217198 - DNA, 25 bp, Homo sapien
ttttgagacatctgagtctctgttt

SEQ ID NO: 4217199 - DNA, 25 bp, Homo sapien
gacatctgagtctctgtttcgccca

SEQ ID NO: 4217200 - DNA, 25 bp, Homo sapien
tgagacatctgagtctctgtttcgc

SEQ ID NO: 4217201 - DNA, 25 bp, Homo sapien
tttttgagacatctgagtctctgtt

SEQ ID NO: 4217202 - DNA, 25 bp, Homo sapien
ttcctgcctggcatgagattgccat

SEQ ID NO: 4217203 - DNA, 25 bp, Homo sapien
tccttccagctaaggggtattcgtg

SEQ ID NO: 4217204 - DNA, 25 bp, Homo sapien
ccttccagctaaggggtattcgtgt

SEQ ID NO: 4217205 - DNA, 25 bp, Homo sapien
tttcttcataggaacttcctgcctg

SEQ ID NO: 4217206 - DNA, 25 bp, Homo sapien
gtgctgccagaaggcctcgtctggc

SEQ ID NO: 4217207 - DNA, 25 bp, Homo sapien
aaaattacagcaacagaccggattc

SEQ ID NO: 4217208 - DNA, 25 bp, Homo sapien
ttggcatcaggacatccagagagct

SEQ ID NO: 4217209 - DNA, 25 bp, Homo sapien
tctggtagcacttggcatcaggaca

SEQ ID NO: 4217210 - DNA, 25 bp, Homo sapien
gaagggcattatcacaactccaaga

SEQ ID NO: 4217211 - DNA, 25 bp, Homo sapien
gagtcacccatgacatcatctcctg

SEQ ID NO: 4217212 - DNA, 25 bp, Homo sapien
ccactgtcctagcacaggcattgca

SEQ ID NO: 4217213 - DNA, 25 bp, Homo sapien
catctctcatatgaacgcctgcagg

SEQ ID NO: 4217214 - DNA, 25 bp, Homo sapien
gaacacggctcaggtagtggaccag

SEQ ID NO: 4217215 - DNA, 25 bp, Homo sapien
tagtcttgtgtcagccgagtcctgc

SEQ ID NO: 4217216 - DNA, 25 bp, Homo sapien
gagtctgtgggcagttgcactcaac

SEQ ID NO: 4217217 - DNA, 25 bp, Homo sapien
actcaactacttctccgtggctggt

SEQ ID NO: 4217218 - DNA, 25 bp, Homo sapien
ctctactgcctctcaagtaggcctt

SEQ ID NO: 4217219 - DNA, 25 bp, Homo sapien
tctactgcctctcaagtaggccttc

SEQ ID NO: 4217220 - DNA, 25 bp, Homo sapien
tactgcctctcaagtaggccttcat

SEQ ID NO: 4217221 - DNA, 25 bp, Homo sapien
ctactgcctctcaagtaggccttca

SEQ ID NO: 4217222 - DNA, 25 bp, Homo sapien
acggacacagtttctggtacttcca

SEQ ID NO: 4217223 - DNA, 25 bp, Homo sapien
ccagcaccaacggacacagtttctg

SEQ ID NO: 4217224 - DNA, 25 bp, Homo sapien
ttctggtacttccattgcagaagtc

SEQ ID NO: 4217225 - DNA, 25 bp, Homo sapien
ctggtacttccattgcagaagtcac

SEQ ID NO: 4217226 - DNA, 25 bp, Homo sapien
gcagacttgcgatggttacatgaca

SEQ ID NO: 4217227 - DNA, 25 bp, Homo sapien
cctactgtgggtgagaagtcccctg

SEQ ID NO: 4217228 - DNA, 25 bp, Homo sapien
taggtagaatgtaggtagaatgccc

SEQ ID NO: 4217229 - DNA, 25 bp, Homo sapien
tagaatgcccctacctcagtgacat

SEQ ID NO: 4217230 - DNA, 25 bp, Homo sapien
tttagcgtgcatagccttacctggg

SEQ ID NO: 4217231 - DNA, 25 bp, Homo sapien
cgtaaggcggtatttcatgtcacta

SEQ ID NO: 4217232 - DNA, 25 bp, Homo sapien
gacaagatcaaacaacgtaaggcgg

SEQ ID NO: 4217233 - DNA, 25 bp, Homo sapien
cagcaagaccttgatgggcaattaa

SEQ ID NO: 4217234 - DNA, 25 bp, Homo sapien
catgaaggtgtaatctgaaaactca

SEQ ID NO: 4217235 - DNA, 25 bp, Homo sapien
gccaaaacaagcaggacggacctat

SEQ ID NO: 4217236 - DNA, 25 bp, Homo sapien
cggacctatgaaataagtgcgtaat

SEQ ID NO: 4217237 - DNA, 25 bp, Homo sapien
ggttcagcttggtgtggctctactt

SEQ ID NO: 4217238 - DNA, 25 bp, Homo sapien
gttcacactttttatcacctgcatc

SEQ ID NO: 4217239 - DNA, 25 bp, Homo sapien
aaaggggcagtaatcaaggaggaat

SEQ ID NO: 4217240 - DNA, 25 bp, Homo sapien
ggcagtaatcaaggaggaatgagtt

SEQ ID NO: 4217241 - DNA, 25 bp, Homo sapien
caaggaggaatgagttgctggaaac

SEQ ID NO: 4217242 - DNA, 25 bp, Homo sapien
taatcaaggaggaatgagttgctgg

SEQ ID NO: 4217243 - DNA, 25 bp, Homo sapien
ctgatggcagaattagatcatatct

SEQ ID NO: 4217244 - DNA, 25 bp, Homo sapien
actgaaatctgagtgttgatcatca

SEQ ID NO: 4217245 - DNA, 25 bp, Homo sapien
gactctgcttgataacttatcactg

SEQ ID NO: 4217246 - DNA, 25 bp, Homo sapien
attagatcatatctgcactcgatga

SEQ ID NO: 4217247 - DNA, 25 bp, Homo sapien
gactggtttctcgtacactgtagcc

SEQ ID NO: 4217248 - DNA, 25 bp, Homo sapien
tgtagccacgtgagtcttccaaacg

SEQ ID NO: 4217249 - DNA, 25 bp, Homo sapien
tcttctgactggtttctcgtacact

SEQ ID NO: 4217250 - DNA, 25 bp, Homo sapien
tccaaacgcacagtttcaatctggt

SEQ ID NO: 4217251 - DNA, 25 bp, Homo sapien
tagaatctggagtaacttgagtctg

SEQ ID NO: 4217252 - DNA, 25 bp, Homo sapien
gatagaatctggagtaacttgagtc

SEQ ID NO: 4217253 - DNA, 25 bp, Homo sapien
agaatctggagtaacttgagtctga

SEQ ID NO: 4217254 - DNA, 25 bp, Homo sapien
atagaatctggagtaacttgagtct

SEQ ID NO: 4217255 - DNA, 25 bp, Homo sapien
tcctgtgattgaatcatggccgcca

SEQ ID NO: 4217256 - DNA, 25 bp, Homo sapien
taatttcgagtcttgcccgttcggc

SEQ ID NO: 4217257 - DNA, 25 bp, Homo sapien
gtgcccttcttgtttcgacgccatt

SEQ ID NO: 4217258 - DNA, 25 bp, Homo sapien
gatagtggttctaaagtccacccag

SEQ ID NO: 4217259 - DNA, 25 bp, Homo sapien
ttttctgagataccaagcacggagc

SEQ ID NO: 4217260 - DNA, 25 bp, Homo sapien
gatgtgattttaagttgggccggga

SEQ ID NO: 4217261 - DNA, 25 bp, Homo sapien
ggttttctgagataccaagcacgga

SEQ ID NO: 4217262 - DNA, 25 bp, Homo sapien
ctgatgtgattttaagttgggccgg

SEQ ID NO: 4217263 - DNA, 25 bp, Homo sapien
gaaatagatctctcggctctgaggg

SEQ ID NO: 4217264 - DNA, 25 bp, Homo sapien
agaagtagacatggcgagcgactcc

SEQ ID NO: 4217265 - DNA, 25 bp, Homo sapien
catgaggacgcgagtgaaatagacc

SEQ ID NO: 4217266 - DNA, 25 bp, Homo sapien
ggtacgtgtcttcctctggccgtgg

SEQ ID NO: 4217267 - DNA, 25 bp, Homo sapien
acgcgcggaggatcgggatccggcg

SEQ ID NO: 4217268 - DNA, 25 bp, Homo sapien
gaggatcgggatccggcgctgtggg

SEQ ID NO: 4217269 - DNA, 25 bp, Homo sapien
ccggcggaccgacgcgcggaggatc

SEQ ID NO: 4217270 - DNA, 25 bp, Homo sapien
gaccgacgcgcggaggatcgggatc

SEQ ID NO: 4217271 - DNA, 25 bp, Homo sapien
acacgcaccgctgctcggggcttgg

SEQ ID NO: 4217272 - DNA, 25 bp, Homo sapien
gggcttggagatccgcgcaggctgg

SEQ ID NO: 4217273 - DNA, 25 bp, Homo sapien
ccagcgcccttagccgatcggggcg

SEQ ID NO: 4217274 - DNA, 25 bp, Homo sapien
gcccttagccgatcggggcgctcag

SEQ ID NO: 4217275 - DNA, 25 bp, Homo sapien
attataacagccaatgcagccgcca

SEQ ID NO: 4217276 - DNA, 25 bp, Homo sapien
gagttgatgtgtctcattataacag

SEQ ID NO: 4217277 - DNA, 25 bp, Homo sapien
gacagttctgcgtggttctccaccc

SEQ ID NO: 4217278 - DNA, 25 bp, Homo sapien
tcctcccaggaagcggtgatagaca

SEQ ID NO: 4217279 - DNA, 25 bp, Homo sapien
cgggatcagccgtccggcattccgg

SEQ ID NO: 4217280 - DNA, 25 bp, Homo sapien
cagctgcaaactgccgaagcgccca

SEQ ID NO: 4217281 - DNA, 25 bp, Homo sapien
tcggcgagtgaccagcacccgggat

SEQ ID NO: 4217282 - DNA, 25 bp, Homo sapien
tgcactgtgcgtgtgcgcttcttcc

SEQ ID NO: 4217283 - DNA, 25 bp, Homo sapien
gatctcccatctttcccgcttctgg

SEQ ID NO: 4217284 - DNA, 25 bp, Homo sapien
tctcccatctttcccgcttctggca

SEQ ID NO: 4217285 - DNA, 25 bp, Homo sapien
ctcagatctcccatctttcccgctt

SEQ ID NO: 4217286 - DNA, 25 bp, Homo sapien
agatctcccatctttcccgcttctg

SEQ ID NO: 4217287 - DNA, 25 bp, Homo sapien
attgcggcacgagcaagtcctgggt

SEQ ID NO: 4217288 - DNA, 25 bp, Homo sapien
gggaattgcggcacgagcaagtcct

SEQ ID NO: 4217289 - DNA, 25 bp, Homo sapien
agtcctgggtgtggcgatgccaaga

SEQ ID NO: 4217290 - DNA, 25 bp, Homo sapien
ttgtttccgtggggaattgcggcac

SEQ ID NO: 4217291 - DNA, 25 bp, Homo sapien
gctactgcacccagagagcaagctt

SEQ ID NO: 4217292 - DNA, 25 bp, Homo sapien
ctgaagccttctagctactgcaccc

SEQ ID NO: 4217293 - DNA, 25 bp, Homo sapien
tgaagccttctagctactgcaccca

SEQ ID NO: 4217294 - DNA, 25 bp, Homo sapien
gattaagaaaccatcagtgcagtgg

SEQ ID NO: 4217295 - DNA, 25 bp, Homo sapien
catttcgacgtggtggcttactgca

SEQ ID NO: 4217296 - DNA, 25 bp, Homo sapien
tctgggtaggtctgccacgaaaacg

SEQ ID NO: 4217297 - DNA, 25 bp, Homo sapien
tattttgcatggctaaggcgggaga

SEQ ID NO: 4217298 - DNA, 25 bp, Homo sapien
cactaatcattttcagccctgccat

SEQ ID NO: 4217299 - DNA, 25 bp, Homo sapien
cttatgggtagggtaacacaactgg

SEQ ID NO: 4217300 - DNA, 25 bp, Homo sapien
tctgaagttccaggttttggtgaag

SEQ ID NO: 4217301 - DNA, 25 bp, Homo sapien
tggtgaagggtccttccactgttcc

SEQ ID NO: 4217302 - DNA, 25 bp, Homo sapien
aagacagcacgtggaagttcaggct

SEQ ID NO: 4217303 - DNA, 25 bp, Homo sapien
gaagagttccagcacggtgtggcca

SEQ ID NO: 4217304 - DNA, 25 bp, Homo sapien
gacacagaaatttagaccatagcac

SEQ ID NO: 4217305 - DNA, 25 bp, Homo sapien
gccaggctgcctccgttataagtga

SEQ ID NO: 4217306 - DNA, 25 bp, Homo sapien
tagcactattcaacagaaaaagcct

SEQ ID NO: 4217307 - DNA, 25 bp, Homo sapien
ttatgaaaagaagattgcaaggtaa

SEQ ID NO: 4217308 - DNA, 25 bp, Homo sapien
cttatgaaaagaagattgcaaggta

SEQ ID NO: 4217309 - DNA, 25 bp, Homo sapien
agattgcaaggtaagtgtgtgtagt

SEQ ID NO: 4217310 - DNA, 25 bp, Homo sapien
gcaaggtaagtgtgtgtagtgggta

SEQ ID NO: 4217311 - DNA, 25 bp, Homo sapien
catgtcatcataggtagcaaagtgg

SEQ ID NO: 4217312 - DNA, 25 bp, Homo sapien
acactgtgagtagcggcaaagcagc

SEQ ID NO: 4217313 - DNA, 25 bp, Homo sapien
tgtgagtagcggcaaagcagctgcc

SEQ ID NO: 4217314 - DNA, 25 bp, Homo sapien
gggcaccattcacagatagtacact

SEQ ID NO: 4217315 - DNA, 25 bp, Homo sapien
gatagtacactgtgagtagcggcaa

SEQ ID NO: 4217316 - DNA, 25 bp, Homo sapien
tagatggcctcatccaagactgtga

SEQ ID NO: 4217317 - DNA, 25 bp, Homo sapien
ttagatggcctcatccaagactgtg

SEQ ID NO: 4217318 - DNA, 25 bp, Homo sapien
tgtggatgtttgtcttgtagcccgt

SEQ ID NO: 4217319 - DNA, 25 bp, Homo sapien
tggctcttaggtgccaattcgtcca

SEQ ID NO: 4217320 - DNA, 25 bp, Homo sapien
tagcccgtgcgttggctcttaggtg

SEQ ID NO: 4217321 - DNA, 25 bp, Homo sapien
tgtttgtcttgtagcccgtgcgttg

SEQ ID NO: 4217322 - DNA, 25 bp, Homo sapien
agtccccaggagaagggcagctttc

SEQ ID NO: 4217323 - DNA, 25 bp, Homo sapien
cagtccccaggagaagggcagcttt

SEQ ID NO: 4217324 - DNA, 25 bp, Homo sapien
gtccccaggagaagggcagctttcc

SEQ ID NO: 4217325 - DNA, 25 bp, Homo sapien
cttgtaggccagatccagggttgaa

SEQ ID NO: 4217326 - DNA, 25 bp, Homo sapien
tacagagaaacattgagagttgtga

SEQ ID NO: 4217327 - DNA, 25 bp, Homo sapien
tgccactgagcttacaatagccaaa

SEQ ID NO: 4217328 - DNA, 25 bp, Homo sapien
tgagagttgtgatccttccgggcct

SEQ ID NO: 4217329 - DNA, 25 bp, Homo sapien
cagtaatgaatacaagtgttaatgt

SEQ ID NO: 4217330 - DNA, 25 bp, Homo sapien
tcttccagagttccacttctgcagt

SEQ ID NO: 4217331 - DNA, 25 bp, Homo sapien
gttccacttctgcagtgtaaacttg

SEQ ID NO: 4217332 - DNA, 25 bp, Homo sapien
tgctttatcactaaggtctaacact

SEQ ID NO: 4217333 - DNA, 25 bp, Homo sapien
taaggtctaacacttggtgcttcat

SEQ ID NO: 4217334 - DNA, 25 bp, Homo sapien
agtcagccttgggtgccgagaacat

SEQ ID NO: 4217335 - DNA, 25 bp, Homo sapien
gtcagccttgggtgccgagaacatt

SEQ ID NO: 4217336 - DNA, 25 bp, Homo sapien
tcagtcagccttgggtgccgagaac

SEQ ID NO: 4217337 - DNA, 25 bp, Homo sapien
tcagccttgggtgccgagaacattc

SEQ ID NO: 4217338 - DNA, 25 bp, Homo sapien
gctgctccatgtgaagtgttctggg

SEQ ID NO: 4217339 - DNA, 25 bp, Homo sapien
tctcctcttggcgtaggaaagggcc

SEQ ID NO: 4217340 - DNA, 25 bp, Homo sapien
aaaggccaattgtaaagggacagca

SEQ ID NO: 4217341 - DNA, 25 bp, Homo sapien
taaagggacagcaagtcttaagtgt

SEQ ID NO: 4217342 - DNA, 25 bp, Homo sapien
ttacttccgtggagcgtagcgagcc

SEQ ID NO: 4217343 - DNA, 25 bp, Homo sapien
cagcagatcattggtgttacttccg

SEQ ID NO: 4217344 - DNA, 25 bp, Homo sapien
gaagtaggctcgtgtatctacgtct

SEQ ID NO: 4217345 - DNA, 25 bp, Homo sapien
tactttgacgccagtgggaatggcg

SEQ ID NO: 4217346 - DNA, 25 bp, Homo sapien
tcacttcacaattgtcatttctcat

SEQ ID NO: 4217347 - DNA, 25 bp, Homo sapien
cttctctgtcacttcacaattgtca

SEQ ID NO: 4217348 - DNA, 25 bp, Homo sapien
tctctgtcacttcacaattgtcatt

SEQ ID NO: 4217349 - DNA, 25 bp, Homo sapien
tgtcacttcacaattgtcatttctc

SEQ ID NO: 4217350 - DNA, 25 bp, Homo sapien
gcaggaagcctgttgctatggagac

SEQ ID NO: 4217351 - DNA, 25 bp, Homo sapien
cagcaggaagcctgttgctatggag

SEQ ID NO: 4217352 - DNA, 25 bp, Homo sapien
agcaggaagcctgttgctatggaga

SEQ ID NO: 4217353 - DNA, 25 bp, Homo sapien
caggaagcctgttgctatggagaca

SEQ ID NO: 4217354 - DNA, 25 bp, Homo sapien
aaattccaactgcttagcttgatat

SEQ ID NO: 4217355 - DNA, 25 bp, Homo sapien
ccaactgcttagcttgatattcaag

SEQ ID NO: 4217356 - DNA, 25 bp, Homo sapien
attcaagatcctccaaactatacat

SEQ ID NO: 4217357 - DNA, 25 bp, Homo sapien
gcttagcttgatattcaagatcctc

SEQ ID NO: 4217358 - DNA, 25 bp, Homo sapien
gtcaccctttgataccatatcagct

SEQ ID NO: 4217359 - DNA, 25 bp, Homo sapien
caccctttgataccatatcagctct

SEQ ID NO: 4217360 - DNA, 25 bp, Homo sapien
accctttgataccatatcagctctg

SEQ ID NO: 4217361 - DNA, 25 bp, Homo sapien
ccctttgataccatatcagctctgt

SEQ ID NO: 4217362 - DNA, 25 bp, Homo sapien
caccagtagcctccccacctctcat

SEQ ID NO: 4217363 - DNA, 25 bp, Homo sapien
ctgcattgcaccagtagcctcccca

SEQ ID NO: 4217364 - DNA, 25 bp, Homo sapien
tccccacctctcatccctcattttc

SEQ ID NO: 4217365 - DNA, 25 bp, Homo sapien
agtagcctccccacctctcatccct

SEQ ID NO: 4217366 - DNA, 25 bp, Homo sapien
ggggatattatgataccagatttat

SEQ ID NO: 4217367 - DNA, 25 bp, Homo sapien
tggggatattatgataccagattta

SEQ ID NO: 4217368 - DNA, 25 bp, Homo sapien
ctggggatattatgataccagattt

SEQ ID NO: 4217369 - DNA, 25 bp, Homo sapien
tgctgcatctggttgaactgaaggg

SEQ ID NO: 4217370 - DNA, 25 bp, Homo sapien
gttcccatggcacaggctcagtctg

SEQ ID NO: 4217371 - DNA, 25 bp, Homo sapien
tctgtgattcaatgccaagtctgca

SEQ ID NO: 4217372 - DNA, 25 bp, Homo sapien
cagtctgagacgttcctccctctgt

SEQ ID NO: 4217373 - DNA, 25 bp, Homo sapien
gtgttcccactctcctccaatctac

SEQ ID NO: 4217374 - DNA, 25 bp, Homo sapien
ctgtgtgtgttcccactctcctcca

SEQ ID NO: 4217375 - DNA, 25 bp, Homo sapien
tgtgtgtgttcccactctcctccaa

SEQ ID NO: 4217376 - DNA, 25 bp, Homo sapien
tgtgtgttcccactctcctccaatc

SEQ ID NO: 4217377 - DNA, 25 bp, Homo sapien
tcttgcaccgtgaggatccgggcaa

SEQ ID NO: 4217378 - DNA, 25 bp, Homo sapien
gtacccatgatgaggtgaactgagg

SEQ ID NO: 4217379 - DNA, 25 bp, Homo sapien
ctctcacctgtacccatgatgaggt

SEQ ID NO: 4217380 - DNA, 25 bp, Homo sapien
acagtgagtgacgagtcctctcacc

SEQ ID NO: 4217381 - DNA, 25 bp, Homo sapien
ggggagacagctcacctgtaccagg

SEQ ID NO: 4217382 - DNA, 25 bp, Homo sapien
gccactatggctctggagggccagt

SEQ ID NO: 4217383 - DNA, 25 bp, Homo sapien
taccagggccactatggctctggag

SEQ ID NO: 4217384 - DNA, 25 bp, Homo sapien
cctgtaccagggccactatggctct

SEQ ID NO: 4217385 - DNA, 25 bp, Homo sapien
ggcatcctggcttctcactgaatca

SEQ ID NO: 4217386 - DNA, 25 bp, Homo sapien
gaagtcccgcagtgggtcttcctct

SEQ ID NO: 4217387 - DNA, 25 bp, Homo sapien
cagtgggcaaacagaagtcccgcag

SEQ ID NO: 4217388 - DNA, 25 bp, Homo sapien
gcatcctggcttctcactgaatcag

SEQ ID NO: 4217389 - DNA, 25 bp, Homo sapien
gtttctgcattgagagttgacagtg

SEQ ID NO: 4217390 - DNA, 25 bp, Homo sapien
aatatagttcatgagctgtttctgc

SEQ ID NO: 4217391 - DNA, 25 bp, Homo sapien
taaatatagttcatgagctgtttct

SEQ ID NO: 4217392 - DNA, 25 bp, Homo sapien
tgcattgagagttgacagtgaatgt

SEQ ID NO: 4217393 - DNA, 25 bp, Homo sapien
tttaaatccagccctgtgcccaaac

SEQ ID NO: 4217394 - DNA, 25 bp, Homo sapien
ctttaaatccagccctgtgcccaaa

SEQ ID NO: 4217395 - DNA, 25 bp, Homo sapien
tcaagcaggacagccaagagtccac

SEQ ID NO: 4217396 - DNA, 25 bp, Homo sapien
gagtccacagcacaaagcatactgg

SEQ ID NO: 4217397 - DNA, 25 bp, Homo sapien
aaaaaccccatagatttacagactg

SEQ ID NO: 4217398 - DNA, 25 bp, Homo sapien
aaaagcatttggatcaagcaggaca

SEQ ID NO: 4217399 - DNA, 25 bp, Homo sapien
acactgtctcccctcttgctgtaag

SEQ ID NO: 4217400 - DNA, 25 bp, Homo sapien
ctcacactgtctcccctcttgctgt

SEQ ID NO: 4217401 - DNA, 25 bp, Homo sapien
tagggggtactccagacttcttcca

SEQ ID NO: 4217402 - DNA, 25 bp, Homo sapien
gccagaaggccttgccaattcttag

SEQ ID NO: 4217403 - DNA, 25 bp, Homo sapien
tggtagccacatttattcccattct

SEQ ID NO: 4217404 - DNA, 25 bp, Homo sapien
aaactttgcaggctcctctggtagc

SEQ ID NO: 4217405 - DNA, 25 bp, Homo sapien
ggtatggaaaagcatgtctaagggc

SEQ ID NO: 4217406 - DNA, 25 bp, Homo sapien
ccattagaatccagaaactttgcag

SEQ ID NO: 4217407 - DNA, 25 bp, Homo sapien
agagtcagtgaagggagagaggggt

SEQ ID NO: 4217408 - DNA, 25 bp, Homo sapien
gaaggtaatggaaaattacagtcaa

SEQ ID NO: 4217409 - DNA, 25 bp, Homo sapien
gtcagtgaagggagagaggggtggg

SEQ ID NO: 4217410 - DNA, 25 bp, Homo sapien
ggaaggtaatggaaaattacagtca

SEQ ID NO: 4217411 - DNA, 25 bp, Homo sapien
cacatgagcaggcatagagtccacg

SEQ ID NO: 4217412 - DNA, 25 bp, Homo sapien
tgaagttggaagttgagctacgtct

SEQ ID NO: 4217413 - DNA, 25 bp, Homo sapien
gagctacgtcttgacacatgagcag

SEQ ID NO: 4217414 - DNA, 25 bp, Homo sapien
cacgactcggagagaaaataaggag

SEQ ID NO: 4217415 - DNA, 25 bp, Homo sapien
ctatgggaaggcctaactctagctg

SEQ ID NO: 4217416 - DNA, 25 bp, Homo sapien
ggcctaactctagctgagaacccac

SEQ ID NO: 4217417 - DNA, 25 bp, Homo sapien
gatttagagctatgggaaggcctaa

SEQ ID NO: 4217418 - DNA, 25 bp, Homo sapien
tagagatttagagctatgggaaggc

SEQ ID NO: 4217419 - DNA, 25 bp, Homo sapien
ggctctcaaagagttcctcactgct

SEQ ID NO: 4217420 - DNA, 25 bp, Homo sapien
aggctctcaaagagttcctcactgc

SEQ ID NO: 4217421 - DNA, 25 bp, Homo sapien
tactgccttctgttgggaccaaaga

SEQ ID NO: 4217422 - DNA, 25 bp, Homo sapien
gaccaaagaggccatagtgcccatg

SEQ ID NO: 4217423 - DNA, 25 bp, Homo sapien
aagccaggcctgacgcattctcgta

SEQ ID NO: 4217424 - DNA, 25 bp, Homo sapien
ttgtctgaagaaagcctactgcctt

SEQ ID NO: 4217425 - DNA, 25 bp, Homo sapien
gcagacgtcgtaagaaggttcgagt

SEQ ID NO: 4217426 - DNA, 25 bp, Homo sapien
agacgtcgtaagaaggttcgagtgt

SEQ ID NO: 4217427 - DNA, 25 bp, Homo sapien
tgtggcacatctcacgcttgtgtgt

SEQ ID NO: 4217428 - DNA, 25 bp, Homo sapien
gtcgtaagaaggttcgagtgtggca

SEQ ID NO: 4217429 - DNA, 25 bp, Homo sapien
tttgggtcagctgagttcaccagag

SEQ ID NO: 4217430 - DNA, 25 bp, Homo sapien
ctaggcactaaagcatgggatgttt

SEQ ID NO: 4217431 - DNA, 25 bp, Homo sapien
gcattgcataggcaactccaggcca

SEQ ID NO: 4217432 - DNA, 25 bp, Homo sapien
caagggtatttaaaggcactaggca

SEQ ID NO: 4217433 - DNA, 25 bp, Homo sapien
agtatagcccaagctctaagccacg

SEQ ID NO: 4217434 - DNA, 25 bp, Homo sapien
gaatattccgttcttggccatgaag

SEQ ID NO: 4217435 - DNA, 25 bp, Homo sapien
gaattcaaaagctaatcagcactgg

SEQ ID NO: 4217436 - DNA, 25 bp, Homo sapien
catggtactgtactgcctcaacaaa

SEQ ID NO: 4217437 - DNA, 25 bp, Homo sapien
ggttttaataaggagcgagtcacag

SEQ ID NO: 4217438 - DNA, 25 bp, Homo sapien
tcctggttttaataaggagcgagtc

SEQ ID NO: 4217439 - DNA, 25 bp, Homo sapien
taataaggagcgagtcacagggcaa

SEQ ID NO: 4217440 - DNA, 25 bp, Homo sapien
ttttaataaggagcgagtcacaggg

SEQ ID NO: 4217441 - DNA, 25 bp, Homo sapien
tgttttctgagaccaaggaggctct

SEQ ID NO: 4217442 - DNA, 25 bp, Homo sapien
gcctcccttgtgcatagttacagca

SEQ ID NO: 4217443 - DNA, 25 bp, Homo sapien
caattctgaagttgaggtagatgcc

SEQ ID NO: 4217444 - DNA, 25 bp, Homo sapien
gagagtgctggctctaggaaactca

SEQ ID NO: 4217445 - DNA, 25 bp, Homo sapien
caaggatttgaattggcttacaaga

SEQ ID NO: 4217446 - DNA, 25 bp, Homo sapien
ggcttacaagaatatttgcataaca

SEQ ID NO: 4217447 - DNA, 25 bp, Homo sapien
tgactttatgctataccaaggattt

SEQ ID NO: 4217448 - DNA, 25 bp, Homo sapien
tgatagccaacatgtatacagcagg

SEQ ID NO: 4217449 - DNA, 25 bp, Homo sapien
tactctgctcgtgaccagtggcaag

SEQ ID NO: 4217450 - DNA, 25 bp, Homo sapien
gaacctggtgaccaatggcaggata

SEQ ID NO: 4217451 - DNA, 25 bp, Homo sapien
caatggcaggatatagaggttgccc

SEQ ID NO: 4217452 - DNA, 25 bp, Homo sapien
tgaccagtggcaagaacctggtgac

SEQ ID NO: 4217453 - DNA, 25 bp, Homo sapien
ttgggttggtaagcttgtgctccac

SEQ ID NO: 4217454 - DNA, 25 bp, Homo sapien
gggttggtaagcttgtgctccactt

SEQ ID NO: 4217455 - DNA, 25 bp, Homo sapien
ggtaagcttgtgctccactttctca

SEQ ID NO: 4217456 - DNA, 25 bp, Homo sapien
gttggtaagcttgtgctccactttc

SEQ ID NO: 4217457 - DNA, 25 bp, Homo sapien
ttgcctagcctagttcctttcttat

SEQ ID NO: 4217458 - DNA, 25 bp, Homo sapien
tgaaacgttaagtagtggagtgttg

SEQ ID NO: 4217459 - DNA, 25 bp, Homo sapien
tcgcactagaccttctaggtataaa

SEQ ID NO: 4217460 - DNA, 25 bp, Homo sapien
aattgctttctttgtgtcgtcgcac

SEQ ID NO: 4217461 - DNA, 25 bp, Homo sapien
tcccctgaggtttgttcagctcatc

SEQ ID NO: 4217462 - DNA, 25 bp, Homo sapien
ccacaggtcttgaggctcgttttct

SEQ ID NO: 4217463 - DNA, 25 bp, Homo sapien
taatgtgctcgcatagctgctcctt

SEQ ID NO: 4217464 - DNA, 25 bp, Homo sapien
ttttaaagtcatcagccacaggtct

SEQ ID NO: 4217465 - DNA, 25 bp, Homo sapien
tatatcactattgtggggaaaaatt

SEQ ID NO: 4217466 - DNA, 25 bp, Homo sapien
aaatatatcactattgtggggaaaa

SEQ ID NO: 4217467 - DNA, 25 bp, Homo sapien
atatatcactattgtggggaaaaat

SEQ ID NO: 4217468 - DNA, 25 bp, Homo sapien
aatatatcactattgtggggaaaaa

SEQ ID NO: 4217469 - DNA, 25 bp, Homo sapien
tggtccctcagccttactaaggtcc

SEQ ID NO: 4217470 - DNA, 25 bp, Homo sapien
cttttcaacatgcatatctggacac

SEQ ID NO: 4217471 - DNA, 25 bp, Homo sapien
ttactaaggtccctgcaggcagtcc

SEQ ID NO: 4217472 - DNA, 25 bp, Homo sapien
tttccggtttagcatccgttggtga

SEQ ID NO: 4217473 - DNA, 25 bp, Homo sapien
gaatggcattagtaaccaccacgtg

SEQ ID NO: 4217474 - DNA, 25 bp, Homo sapien
tgacaagggagccagtgcgcatgct

SEQ ID NO: 4217475 - DNA, 25 bp, Homo sapien
cagccccgagctggcttgacaaggg

SEQ ID NO: 4217476 - DNA, 25 bp, Homo sapien
tcctccttgtccctaactctgtgaa

SEQ ID NO: 4217477 - DNA, 25 bp, Homo sapien
ttctgtgcccatgactacagctcca

SEQ ID NO: 4217478 - DNA, 25 bp, Homo sapien
tgacaggtaccaccgtccgctgcag

SEQ ID NO: 4217479 - DNA, 25 bp, Homo sapien
catagagtggggtgacaggtaccac

SEQ ID NO: 4217480 - DNA, 25 bp, Homo sapien
cgtccgctgcagcactggcgcagtg

SEQ ID NO: 4217481 - DNA, 25 bp, Homo sapien
agtaggaagaccagctctccggttc

SEQ ID NO: 4217482 - DNA, 25 bp, Homo sapien
gcagtaggaagaccagctctccggt

SEQ ID NO: 4217483 - DNA, 25 bp, Homo sapien
tacagcggatgggtgtgctgtgtcc

SEQ ID NO: 4217484 - DNA, 25 bp, Homo sapien
tgtgtcctgagacagacagcagtag

SEQ ID NO: 4217485 - DNA, 25 bp, Homo sapien
tagcatgaggcatcactacggaggc

SEQ ID NO: 4217486 - DNA, 25 bp, Homo sapien
tgtgttgtacagagatgaccatgcc

SEQ ID NO: 4217487 - DNA, 25 bp, Homo sapien
gactcggtaaaaccctggtcagcta

SEQ ID NO: 4217488 - DNA, 25 bp, Homo sapien
gaggcactgcacgtattgaaagatc

SEQ ID NO: 4217489 - DNA, 25 bp, Homo sapien
agctggtgtggtactgaatgcctga

SEQ ID NO: 4217490 - DNA, 25 bp, Homo sapien
actgaatgcctgatggatggccagg

SEQ ID NO: 4217491 - DNA, 25 bp, Homo sapien
gctggtgtggtactgaatgcctgat

SEQ ID NO: 4217492 - DNA, 25 bp, Homo sapien
ggtactgaatgcctgatggatggcc

SEQ ID NO: 4217493 - DNA, 25 bp, Homo sapien
tgtgttcccacgtggatccgtagga

SEQ ID NO: 4217494 - DNA, 25 bp, Homo sapien
ctatatgagccagcccagaatacca

SEQ ID NO: 4217495 - DNA, 25 bp, Homo sapien
atgaccgtgggccaaagggctttgt

SEQ ID NO: 4217496 - DNA, 25 bp, Homo sapien
tggagatcacgcaaatttcactggt

SEQ ID NO: 4217497 - DNA, 25 bp, Homo sapien
gctcccgccgtgtgatgtgaccact

SEQ ID NO: 4217498 - DNA, 25 bp, Homo sapien
ggctcagatccaggagtgccgtcct

SEQ ID NO: 4217499 - DNA, 25 bp, Homo sapien
tgaactaccgccacgcctgtatttg

SEQ ID NO: 4217500 - DNA, 25 bp, Homo sapien
ttttgtgacgcccttgagaaccgcc

SEQ ID NO: 4217501 - DNA, 25 bp, Homo sapien
ccagcccgcagagcacggtcctggg

SEQ ID NO: 4217502 - DNA, 25 bp, Homo sapien
aggaagtgccgcgtcccaaggcttc

SEQ ID NO: 4217503 - DNA, 25 bp, Homo sapien
acggtcctgggggtgtgatcacagc

SEQ ID NO: 4217504 - DNA, 25 bp, Homo sapien
agtgccgcgtcccaaggcttcgagc

SEQ ID NO: 4217505 - DNA, 25 bp, Homo sapien
aggatgcaccgcctcgccgccacag

SEQ ID NO: 4217506 - DNA, 25 bp, Homo sapien
tgcaggatgcaccgcctcgccgcca

SEQ ID NO: 4217507 - DNA, 25 bp, Homo sapien
ctgcaggatgcaccgcctcgccgcc

SEQ ID NO: 4217508 - DNA, 25 bp, Homo sapien
ggagcgcagagccgcgcaggctcag

SEQ ID NO: 4217509 - DNA, 25 bp, Homo sapien
tggagcgcagagccgcgcaggctca

SEQ ID NO: 4217510 - DNA, 25 bp, Homo sapien
gagcgcagagccgcgcaggctcagg

SEQ ID NO: 4217511 - DNA, 25 bp, Homo sapien
ctggagcgcagagccgcgcaggctc

SEQ ID NO: 4217512 - DNA, 25 bp, Homo sapien
aaagctgacaactctggcacgcact

SEQ ID NO: 4217513 - DNA, 25 bp, Homo sapien
gcacgccttcgggtggaattcctgc

SEQ ID NO: 4217514 - DNA, 25 bp, Homo sapien
caacttggacgggatttcagcgagt

SEQ ID NO: 4217515 - DNA, 25 bp, Homo sapien
ttcagcgagtgagtcggcggcggac

SEQ ID NO: 4217516 - DNA, 25 bp, Homo sapien
tcccctgagattcagtccacctggc

SEQ ID NO: 4217517 - DNA, 25 bp, Homo sapien
gatgggccgcttctgtctctgttca

SEQ ID NO: 4217518 - DNA, 25 bp, Homo sapien
aaagatcaccggctccctcatcccc

SEQ ID NO: 4217519 - DNA, 25 bp, Homo sapien
ttttactggtcagggtaaagctgct

SEQ ID NO: 4217520 - DNA, 25 bp, Homo sapien
gaaggatcaagctcatattctgtag

SEQ ID NO: 4217521 - DNA, 25 bp, Homo sapien
tattctgtagcatgtatacaaggcc

SEQ ID NO: 4217522 - DNA, 25 bp, Homo sapien
ggctttcctcaatctggacccgcaa

SEQ ID NO: 4217523 - DNA, 25 bp, Homo sapien
tatagacccagattaaagacggctc

SEQ ID NO: 4217524 - DNA, 25 bp, Homo sapien
ttcactgcagtctgctggaagcatg

SEQ ID NO: 4217525 - DNA, 25 bp, Homo sapien
cagaacaataccatgtggcttgtgc

SEQ ID NO: 4217526 - DNA, 25 bp, Homo sapien
ctgcagtctgctggaagcatgccat

SEQ ID NO: 4217527 - DNA, 25 bp, Homo sapien
ctgttgcagaacaataccatgtggc

SEQ ID NO: 4217528 - DNA, 25 bp, Homo sapien
ctgaatttgcaatagtttagcctga

SEQ ID NO: 4217529 - DNA, 25 bp, Homo sapien
tgaatttgcaatagtttagcctgac

SEQ ID NO: 4217530 - DNA, 25 bp, Homo sapien
gcttcatgcaaatacagctgactgt

SEQ ID NO: 4217531 - DNA, 25 bp, Homo sapien
aatacagctgactgtagaacctcct

SEQ ID NO: 4217532 - DNA, 25 bp, Homo sapien
ctcagcttcatgcaaatacagctga

SEQ ID NO: 4217533 - DNA, 25 bp, Homo sapien
tgcaaatacagctgactgtagaacc

SEQ ID NO: 4217534 - DNA, 25 bp, Homo sapien
cacagtatggtctatcccattatct

SEQ ID NO: 4217535 - DNA, 25 bp, Homo sapien
aggctcccacactcatttcctccag

SEQ ID NO: 4217536 - DNA, 25 bp, Homo sapien
cagtgattcctgctgttgcttgtcc

SEQ ID NO: 4217537 - DNA, 25 bp, Homo sapien
cattatctttggacccagctactgg

SEQ ID NO: 4217538 - DNA, 25 bp, Homo sapien
aaagctccctaccaaaagcaaaatg

SEQ ID NO: 4217539 - DNA, 25 bp, Homo sapien
tgtgtgtaacaaaggtcaggctatg

SEQ ID NO: 4217540 - DNA, 25 bp, Homo sapien
tatgcccgtttaatacaagttgtga

SEQ ID NO: 4217541 - DNA, 25 bp, Homo sapien
ggaaatggaccatgttgtgtgtaac

SEQ ID NO: 4217542 - DNA, 25 bp, Homo sapien
tgaccagattgcctgtcccaaagag

SEQ ID NO: 4217543 - DNA, 25 bp, Homo sapien
gaccagattgcctgtcccaaagaga

SEQ ID NO: 4217544 - DNA, 25 bp, Homo sapien
gtcccaaagagactttatctgttag

SEQ ID NO: 4217545 - DNA, 25 bp, Homo sapien
gagactttatctgttagagtcgaca

SEQ ID NO: 4217546 - DNA, 25 bp, Homo sapien
ggcggtagcttcaccaaacacttca

SEQ ID NO: 4217547 - DNA, 25 bp, Homo sapien
tcttggctcagggaaaaaggcggta

SEQ ID NO: 4217548 - DNA, 25 bp, Homo sapien
caaggtcgctgtaggctgctttgca

SEQ ID NO: 4217549 - DNA, 25 bp, Homo sapien
taactgactgcaagttgggcctgca

SEQ ID NO: 4217550 - DNA, 25 bp, Homo sapien
caataactccagagcatacactgag

SEQ ID NO: 4217551 - DNA, 25 bp, Homo sapien
ccaaggcttgtaagaaaagacagga

SEQ ID NO: 4217552 - DNA, 25 bp, Homo sapien
aaagctccattccagataggacaag

SEQ ID NO: 4217553 - DNA, 25 bp, Homo sapien
gcaattcgaacactccatcctgtga

SEQ ID NO: 4217554 - DNA, 25 bp, Homo sapien
agtgaggagtccacactgaaaggag

SEQ ID NO: 4217555 - DNA, 25 bp, Homo sapien
gaggagtccacactgaaaggagggc

SEQ ID NO: 4217556 - DNA, 25 bp, Homo sapien
ggagtgaggagtccacactgaaagg

SEQ ID NO: 4217557 - DNA, 25 bp, Homo sapien
agggagtgaggagtccacactgaaa

SEQ ID NO: 4217558 - DNA, 25 bp, Homo sapien
taaggatggatgtgatttcaatggg

SEQ ID NO: 4217559 - DNA, 25 bp, Homo sapien
gagaaataggatctgaagtgggttt

SEQ ID NO: 4217560 - DNA, 25 bp, Homo sapien
gatgtgatttcaatgggaggtgaca

SEQ ID NO: 4217561 - DNA, 25 bp, Homo sapien
catcgatgataaaggcaccatggag

SEQ ID NO: 4217562 - DNA, 25 bp, Homo sapien
cagaaaatgactcagtggatttatg

SEQ ID NO: 4217563 - DNA, 25 bp, Homo sapien
agaaaatgactcagtggatttatgg

SEQ ID NO: 4217564 - DNA, 25 bp, Homo sapien
tggatttatggctctgatttcctcc

SEQ ID NO: 4217565 - DNA, 25 bp, Homo sapien
cagtggatttatggctctgatttcc

SEQ ID NO: 4217566 - DNA, 25 bp, Homo sapien
taagccaacagtagaagcacaccag

SEQ ID NO: 4217567 - DNA, 25 bp, Homo sapien
ctctgtaagccaacagtagaagcac

SEQ ID NO: 4217568 - DNA, 25 bp, Homo sapien
gccaacagtagaagcacaccagttg

SEQ ID NO: 4217569 - DNA, 25 bp, Homo sapien
acagtagaagcacaccagttgtgat

SEQ ID NO: 4217570 - DNA, 25 bp, Homo sapien
aaatgaagtggacatcccataatgc

SEQ ID NO: 4217571 - DNA, 25 bp, Homo sapien
gtggacatcccataatgctcagaat

SEQ ID NO: 4217572 - DNA, 25 bp, Homo sapien
tagaagcaatatgggcccaggagag

SEQ ID NO: 4217573 - DNA, 25 bp, Homo sapien
taatgctcagaatcacaaaggtgaa

SEQ ID NO: 4217574 - DNA, 25 bp, Homo sapien
tactcttcgtagtgtggtgggtcca

SEQ ID NO: 4217575 - DNA, 25 bp, Homo sapien
cagagtagggtaaagcttaggcaca

SEQ ID NO: 4217576 - DNA, 25 bp, Homo sapien
tagccaaggtaattagtccctgcaa

SEQ ID NO: 4217577 - DNA, 25 bp, Homo sapien
ggcttgaagtgtcaggtggtactct

SEQ ID NO: 4217578 - DNA, 25 bp, Homo sapien
catctagactagcactccaggtact

SEQ ID NO: 4217579 - DNA, 25 bp, Homo sapien
caaatgtcaatggagctttatccct

SEQ ID NO: 4217580 - DNA, 25 bp, Homo sapien
tcccagtcagatgcagtacccattt

SEQ ID NO: 4217581 - DNA, 25 bp, Homo sapien
tcttttgccattcagccccgatgaa

SEQ ID NO: 4217582 - DNA, 25 bp, Homo sapien
tagtagcatgatttgggattatgtg

SEQ ID NO: 4217583 - DNA, 25 bp, Homo sapien
agtagcatgatttgggattatgtgt

SEQ ID NO: 4217584 - DNA, 25 bp, Homo sapien
atagtagcatgatttgggattatgt

SEQ ID NO: 4217585 - DNA, 25 bp, Homo sapien
tgaactttaacaagatgacctggat

SEQ ID NO: 4217586 - DNA, 25 bp, Homo sapien
gaactttaacaagatgacctggatt

SEQ ID NO: 4217587 - DNA, 25 bp, Homo sapien
tgtgaactttaacaagatgacctgg

SEQ ID NO: 4217588 - DNA, 25 bp, Homo sapien
tgtgtgaactttaacaagatgacct

SEQ ID NO: 4217589 - DNA, 25 bp, Homo sapien
gggtaccaattgacagaacattcac

SEQ ID NO: 4217590 - DNA, 25 bp, Homo sapien
accaattgacagaacattcacacac

SEQ ID NO: 4217591 - DNA, 25 bp, Homo sapien
gtaccaattgacagaacattcacac

SEQ ID NO: 4217592 - DNA, 25 bp, Homo sapien
ggtaccaattgacagaacattcaca

SEQ ID NO: 4217593 - DNA, 25 bp, Homo sapien
tgagctgccagcttgtctacatagt

SEQ ID NO: 4217594 - DNA, 25 bp, Homo sapien
tacctgatttgtgcagcaatgagct

SEQ ID NO: 4217595 - DNA, 25 bp, Homo sapien
cagcttgtctacatagtcccttctg

SEQ ID NO: 4217596 - DNA, 25 bp, Homo sapien
ccctgatacctgatttgtgcagcaa

SEQ ID NO: 4217597 - DNA, 25 bp, Homo sapien
caataggtagctcaggcagcactcc

SEQ ID NO: 4217598 - DNA, 25 bp, Homo sapien
gaatggcacttctcaactgctggtg

SEQ ID NO: 4217599 - DNA, 25 bp, Homo sapien
cacaaattgtttgactagacgagac

SEQ ID NO: 4217600 - DNA, 25 bp, Homo sapien
tagacgagacctctgagagtatctg

SEQ ID NO: 4217601 - DNA, 25 bp, Homo sapien
caaatttaggaggaacactgctcca

SEQ ID NO: 4217602 - DNA, 25 bp, Homo sapien
aatttaggaggaacactgctccaaa

SEQ ID NO: 4217603 - DNA, 25 bp, Homo sapien
actgctccaaatttactgtccattc

SEQ ID NO: 4217604 - DNA, 25 bp, Homo sapien
ggcaaatttaggaggaacactgctc

SEQ ID NO: 4217605 - DNA, 25 bp, Homo sapien
agctgtaggatcaaagacccttggg

SEQ ID NO: 4217606 - DNA, 25 bp, Homo sapien
tctgcagctgtaggatcaaagaccc

SEQ ID NO: 4217607 - DNA, 25 bp, Homo sapien
gctccctggtgccagaatgtctgca

SEQ ID NO: 4217608 - DNA, 25 bp, Homo sapien
ccttgacctttaaggctccctggtg

SEQ ID NO: 4217609 - DNA, 25 bp, Homo sapien
tacagtttggaacaagattaaatgc

SEQ ID NO: 4217610 - DNA, 25 bp, Homo sapien
ctttgctcatatatgtccagtttac

SEQ ID NO: 4217611 - DNA, 25 bp, Homo sapien
ccagtttacagtttggaacaagatt

SEQ ID NO: 4217612 - DNA, 25 bp, Homo sapien
tggaacaagattaaatgcctctaat

SEQ ID NO: 4217613 - DNA, 25 bp, Homo sapien
gaaggcttcttgtgttgtgattggt

SEQ ID NO: 4217614 - DNA, 25 bp, Homo sapien
cagacctgtcactgctaaactcagt

SEQ ID NO: 4217615 - DNA, 25 bp, Homo sapien
cagtgagtggcttagagccttagat

SEQ ID NO: 4217616 - DNA, 25 bp, Homo sapien
tttgcccacaatcacagaaagccat

SEQ ID NO: 4217617 - DNA, 25 bp, Homo sapien
cttgatgtccctcggatagcactgg

SEQ ID NO: 4217618 - DNA, 25 bp, Homo sapien
gaagacagtgcaatgtacgcagcta

SEQ ID NO: 4217619 - DNA, 25 bp, Homo sapien
caaagctatattgggagtggcccag

SEQ ID NO: 4217620 - DNA, 25 bp, Homo sapien
tatgcgagtccttaatgcaaggcat

SEQ ID NO: 4217621 - DNA, 25 bp, Homo sapien
caaagattatggatatgatagggcc

SEQ ID NO: 4217622 - DNA, 25 bp, Homo sapien
taaaggcttctatacgttacagagt

SEQ ID NO: 4217623 - DNA, 25 bp, Homo sapien
caaaagttttctccagagtcgagcc

SEQ ID NO: 4217624 - DNA, 25 bp, Homo sapien
gcttgatcgaatgcaacaatcttga

SEQ ID NO: 4217625 - DNA, 25 bp, Homo sapien
ttttcgtgccgccatttcttctcag

SEQ ID NO: 4217626 - DNA, 25 bp, Homo sapien
agcctccgcaacacttttcgtgccg

SEQ ID NO: 4217627 - DNA, 25 bp, Homo sapien
cacagcctccgcaacacttttcgtg

SEQ ID NO: 4217628 - DNA, 25 bp, Homo sapien
cgcaacacttttcgtgccgccattt

SEQ ID NO: 4217629 - DNA, 25 bp, Homo sapien
attttggggtgcgaggagatcattt

SEQ ID NO: 4217630 - DNA, 25 bp, Homo sapien
tattttggggtgcgaggagatcatt

SEQ ID NO: 4217631 - DNA, 25 bp, Homo sapien
ttttggggtgcgaggagatcatttt

SEQ ID NO: 4217632 - DNA, 25 bp, Homo sapien
ctattttggggtgcgaggagatcat

SEQ ID NO: 4217633 - DNA, 25 bp, Homo sapien
ggcatcggctgagaccttcatcctg

SEQ ID NO: 4217634 - DNA, 25 bp, Homo sapien
tgccagccactgaagagaacctcct

SEQ ID NO: 4217635 - DNA, 25 bp, Homo sapien
cagcggcatcggctgagaccttcat

SEQ ID NO: 4217636 - DNA, 25 bp, Homo sapien
ggtgctgtttagtgccagccactga

SEQ ID NO: 4217637 - DNA, 25 bp, Homo sapien
tccgagggcccacaaggatgagatg

SEQ ID NO: 4217638 - DNA, 25 bp, Homo sapien
gagatttagggatggcttctaccaa

SEQ ID NO: 4217639 - DNA, 25 bp, Homo sapien
tactttgcgtaatccctgagacttc

SEQ ID NO: 4217640 - DNA, 25 bp, Homo sapien
gatgggccttgtgatcttcagagag

SEQ ID NO: 4217641 - DNA, 25 bp, Homo sapien
aaagaatcactgacggagtcctgct

SEQ ID NO: 4217642 - DNA, 25 bp, Homo sapien
gctgaaagaatcactgacggagtcc

SEQ ID NO: 4217643 - DNA, 25 bp, Homo sapien
gagctgaaagaatcactgacggagt

SEQ ID NO: 4217644 - DNA, 25 bp, Homo sapien
tgaaagaatcactgacggagtcctg

SEQ ID NO: 4217645 - DNA, 25 bp, Homo sapien
ttttagagggagtctaatcttgctt

SEQ ID NO: 4217646 - DNA, 25 bp, Homo sapien
agggcaggctagaggctccaaaaag

SEQ ID NO: 4217647 - DNA, 25 bp, Homo sapien
cccagggcaggctagaggctccaaa

SEQ ID NO: 4217648 - DNA, 25 bp, Homo sapien
gggcaggctagaggctccaaaaagg

SEQ ID NO: 4217649 - DNA, 25 bp, Homo sapien
tcccagggcaggctagaggctccaa

SEQ ID NO: 4217650 - DNA, 25 bp, Homo sapien
caaaatcattagacgacaagtacgc

SEQ ID NO: 4217651 - DNA, 25 bp, Homo sapien
gaaatgagtcccaaaaatgccttat

SEQ ID NO: 4217652 - DNA, 25 bp, Homo sapien
cagaggcattgcatttaccacataa

SEQ ID NO: 4217653 - DNA, 25 bp, Homo sapien
tattgaccttctagacgaagcccag

SEQ ID NO: 4217654 - DNA, 25 bp, Homo sapien
aatgtcagggctacaaaatctggca

SEQ ID NO: 4217655 - DNA, 25 bp, Homo sapien
catgcttgcaaacgctcctttatct

SEQ ID NO: 4217656 - DNA, 25 bp, Homo sapien
tgctgatgtttacttagaaatgtca

SEQ ID NO: 4217657 - DNA, 25 bp, Homo sapien
tgcactggctccctcataagggaca

SEQ ID NO: 4217658 - DNA, 25 bp, Homo sapien
ctacatacttctgggggctagagaa

SEQ ID NO: 4217659 - DNA, 25 bp, Homo sapien
tctagagcttcatctcccttgagaa

SEQ ID NO: 4217660 - DNA, 25 bp, Homo sapien
tctactactgtagtccgatctagag

SEQ ID NO: 4217661 - DNA, 25 bp, Homo sapien
gggctagagaaactagtcttatcct

SEQ ID NO: 4217662 - DNA, 25 bp, Homo sapien
aagcttcatatcctgatccacggat

SEQ ID NO: 4217663 - DNA, 25 bp, Homo sapien
tgatccacggatccccgaatattcc

SEQ ID NO: 4217664 - DNA, 25 bp, Homo sapien
tatcctgatccacggatccccgaat

SEQ ID NO: 4217665 - DNA, 25 bp, Homo sapien
acggatccccgaatattcctgatga

SEQ ID NO: 4217666 - DNA, 25 bp, Homo sapien
ccttttggcaatatgacatgacaca

SEQ ID NO: 4217667 - DNA, 25 bp, Homo sapien
cttgcccatccagtcttccggaaag

SEQ ID NO: 4217668 - DNA, 25 bp, Homo sapien
ccatccagtcttccggaaagtttag

SEQ ID NO: 4217669 - DNA, 25 bp, Homo sapien
gtttagaaatgatgcaaccttttgg

SEQ ID NO: 4217670 - DNA, 25 bp, Homo sapien
gtccttgaggccagtaacacttcca

SEQ ID NO: 4217671 - DNA, 25 bp, Homo sapien
cacaaaggagttctttctgcaagag

SEQ ID NO: 4217672 - DNA, 25 bp, Homo sapien
tccagcagtgttattggttcagtcc

SEQ ID NO: 4217673 - DNA, 25 bp, Homo sapien
gtttctggttctcaggatgtacacc

SEQ ID NO: 4217674 - DNA, 25 bp, Homo sapien
tctaggtggagatcttgaaacaaac

SEQ ID NO: 4217675 - DNA, 25 bp, Homo sapien
catgatcatattccagctgcgtaac

SEQ ID NO: 4217676 - DNA, 25 bp, Homo sapien
aaaatgcagtagtttcctaggttga

SEQ ID NO: 4217677 - DNA, 25 bp, Homo sapien
gttctgcaggttaggaaaaaacaca

SEQ ID NO: 4217678 - DNA, 25 bp, Homo sapien
caggaatcggagaccagcttgtctg

SEQ ID NO: 4217679 - DNA, 25 bp, Homo sapien
gaggttttagtcaagctgtcactca

SEQ ID NO: 4217680 - DNA, 25 bp, Homo sapien
tctgagtggttctgactcaaggtct

SEQ ID NO: 4217681 - DNA, 25 bp, Homo sapien
tgtttccaacgtcatacacatggct

SEQ ID NO: 4217682 - DNA, 25 bp, Homo sapien
caactgctggctgctaatttgtgca

SEQ ID NO: 4217683 - DNA, 25 bp, Homo sapien
tgctggttctgtctggcaattacat

SEQ ID NO: 4217684 - DNA, 25 bp, Homo sapien
tgtgcaccatttggatgctggttct

SEQ ID NO: 4217685 - DNA, 25 bp, Homo sapien
taatatcgacttgttaactctggga

SEQ ID NO: 4217686 - DNA, 25 bp, Homo sapien
ggcttgcaaagactagaaatctgct

SEQ ID NO: 4217687 - DNA, 25 bp, Homo sapien
gaaaatccgttatattatctacaca

SEQ ID NO: 4217688 - DNA, 25 bp, Homo sapien
ggtctgctggcaaccaattagctca

SEQ ID NO: 4217689 - DNA, 25 bp, Homo sapien
ggaagatgtcataatggcttgcaaa

SEQ ID NO: 4217690 - DNA, 25 bp, Homo sapien
ttaggaggatgcaaaatcttcccca

SEQ ID NO: 4217691 - DNA, 25 bp, Homo sapien
taggaggatgcaaaatcttccccat

SEQ ID NO: 4217692 - DNA, 25 bp, Homo sapien
gggtgcaggaacagtaggtcttcta

SEQ ID NO: 4217693 - DNA, 25 bp, Homo sapien
ctttcaagtggcgtttttcgatgaa

SEQ ID NO: 4217694 - DNA, 25 bp, Homo sapien
caggaacagtaggtcttctaaaaca

SEQ ID NO: 4217695 - DNA, 25 bp, Homo sapien
tcaagtggcgtttttcgatgaaagt

SEQ ID NO: 4217696 - DNA, 25 bp, Homo sapien
agccgtaccaccgcagggcaggatt

SEQ ID NO: 4217697 - DNA, 25 bp, Homo sapien
taagccgtaccaccgcagggcagga

SEQ ID NO: 4217698 - DNA, 25 bp, Homo sapien
cttaagccgtaccaccgcagggcag

SEQ ID NO: 4217699 - DNA, 25 bp, Homo sapien
gccgtaccaccgcagggcaggattg

SEQ ID NO: 4217700 - DNA, 25 bp, Homo sapien
cacatctgtggttttgccgcctttt

SEQ ID NO: 4217701 - DNA, 25 bp, Homo sapien
cagtcacatctgtggttttgccgcc

SEQ ID NO: 4217702 - DNA, 25 bp, Homo sapien
gtcacatctgtggttttgccgcctt

SEQ ID NO: 4217703 - DNA, 25 bp, Homo sapien
caccagtcacatctgtggttttgcc

SEQ ID NO: 4217704 - DNA, 25 bp, Homo sapien
caccgggtcgcccacgccttcccag

SEQ ID NO: 4217705 - DNA, 25 bp, Homo sapien
tccctagggctgaaacgcggggctc

SEQ ID NO: 4217706 - DNA, 25 bp, Homo sapien
ggtcgcccacgccttcccagccggc

SEQ ID NO: 4217707 - DNA, 25 bp, Homo sapien
tctgggcgcgccacacaccgggtcg

SEQ ID NO: 4217708 - DNA, 25 bp, Homo sapien
cagccgccggctcgccaagtccggc

SEQ ID NO: 4217709 - DNA, 25 bp, Homo sapien
gggaggaggacgtggcgtgctcgga

SEQ ID NO: 4217710 - DNA, 25 bp, Homo sapien
ggctcgggaccctccccgcgagcat

SEQ ID NO: 4217711 - DNA, 25 bp, Homo sapien
gggagtgtcccggagaggcccagcc

SEQ ID NO: 4217712 - DNA, 25 bp, Homo sapien
ggcgcccctcggggtgaccgactga

SEQ ID NO: 4217713 - DNA, 25 bp, Homo sapien
gcgcccctcggggtgaccgactgac

SEQ ID NO: 4217714 - DNA, 25 bp, Homo sapien
aggcgcccctcggggtgaccgactg

SEQ ID NO: 4217715 - DNA, 25 bp, Homo sapien
tcaagaaaccgcagaagactggctc

SEQ ID NO: 4217716 - DNA, 25 bp, Homo sapien
caaaatatgattaagcctgggaggg

SEQ ID NO: 4217717 - DNA, 25 bp, Homo sapien
ccatctcaaccagcaaggcggaggt

SEQ ID NO: 4217718 - DNA, 25 bp, Homo sapien
gagcaactccggcagcagaaatcat

SEQ ID NO: 4217719 - DNA, 25 bp, Homo sapien
caccatccagccttaggagtttggt

SEQ ID NO: 4217720 - DNA, 25 bp, Homo sapien
tcatcagtgctacatccttccctag

SEQ ID NO: 4217721 - DNA, 25 bp, Homo sapien
cttcatcagtgctacatccttccct

SEQ ID NO: 4217722 - DNA, 25 bp, Homo sapien
cagtgctacatccttccctagccat

SEQ ID NO: 4217723 - DNA, 25 bp, Homo sapien
atcagtgctacatccttccctagcc

SEQ ID NO: 4217724 - DNA, 25 bp, Homo sapien
gtctgccaagcaggacgtctgacat

SEQ ID NO: 4217725 - DNA, 25 bp, Homo sapien
tggactcaccgatgactcagtggaa

SEQ ID NO: 4217726 - DNA, 25 bp, Homo sapien
aaaaagtccttcattagtctgccaa

SEQ ID NO: 4217727 - DNA, 25 bp, Homo sapien
cgtctgacatcaggctagaatcctc

SEQ ID NO: 4217728 - DNA, 25 bp, Homo sapien
gtcacatgaacagagacactcaagg

SEQ ID NO: 4217729 - DNA, 25 bp, Homo sapien
gagccaaaggcaaggtcaagacaaa

SEQ ID NO: 4217730 - DNA, 25 bp, Homo sapien
gagattgagcataaaacactgagag

SEQ ID NO: 4217731 - DNA, 25 bp, Homo sapien
taaaccagttagagatgtgcacagc

SEQ ID NO: 4217732 - DNA, 25 bp, Homo sapien
tgagccaactccgaatggaacccct

SEQ ID NO: 4217733 - DNA, 25 bp, Homo sapien
gatgtaactgtctcctaaaggcccc

SEQ ID NO: 4217734 - DNA, 25 bp, Homo sapien
gggcaatcaggctcccttaggctgt

SEQ ID NO: 4217735 - DNA, 25 bp, Homo sapien
cggccacagccttccatatagctgg

SEQ ID NO: 4217736 - DNA, 25 bp, Homo sapien
tatatttccgaaagaacttatctga

SEQ ID NO: 4217737 - DNA, 25 bp, Homo sapien
tgaaacaagactggcacgagctgat

SEQ ID NO: 4217738 - DNA, 25 bp, Homo sapien
tagaaattgcataatcctgaccaat

SEQ ID NO: 4217739 - DNA, 25 bp, Homo sapien
ttcagaatattacagcaaggagcag

SEQ ID NO: 4217740 - DNA, 25 bp, Homo sapien
gtgtagtaaacacattcccgtggca

SEQ ID NO: 4217741 - DNA, 25 bp, Homo sapien
ggaatgcaccctcaaaccaatgagc

SEQ ID NO: 4217742 - DNA, 25 bp, Homo sapien
gaacttcctttagcaggctgccttg

SEQ ID NO: 4217743 - DNA, 25 bp, Homo sapien
tcccgtggcaatcatgtgatggtca

SEQ ID NO: 4217744 - DNA, 25 bp, Homo sapien
ttctattaaactagcagaagcatct

SEQ ID NO: 4217745 - DNA, 25 bp, Homo sapien
aacacagaatcccaccaaggccaaa

SEQ ID NO: 4217746 - DNA, 25 bp, Homo sapien
cacaagaatcattgcaagatacctc

SEQ ID NO: 4217747 - DNA, 25 bp, Homo sapien
gctcccaacacagaatcccaccaag

SEQ ID NO: 4217748 - DNA, 25 bp, Homo sapien
aaattccaggctcatgtcaataagt

SEQ ID NO: 4217749 - DNA, 25 bp, Homo sapien
caggctcatgtcaataagttttgtg

SEQ ID NO: 4217750 - DNA, 25 bp, Homo sapien
ttccaggctcatgtcaataagtttt

SEQ ID NO: 4217751 - DNA, 25 bp, Homo sapien
ggctcatgtcaataagttttgtgct

SEQ ID NO: 4217752 - DNA, 25 bp, Homo sapien
cctgctgaacggctggagaatgaac

SEQ ID NO: 4217753 - DNA, 25 bp, Homo sapien
gaaaacatatattggtcagacctcc

SEQ ID NO: 4217754 - DNA, 25 bp, Homo sapien
tgtgtcgttacatcagccttgcaaa

SEQ ID NO: 4217755 - DNA, 25 bp, Homo sapien
gactgggtcaggcaggaataaagct

SEQ ID NO: 4217756 - DNA, 25 bp, Homo sapien
gatggttttgagacacccctccata

SEQ ID NO: 4217757 - DNA, 25 bp, Homo sapien
cacccctccataggtctctcatgct

SEQ ID NO: 4217758 - DNA, 25 bp, Homo sapien
tggttttgagacacccctccatagg

SEQ ID NO: 4217759 - DNA, 25 bp, Homo sapien
cccctccataggtctctcatgcttc

SEQ ID NO: 4217760 - DNA, 25 bp, Homo sapien
gctagtgaagtgttttatttgattg

SEQ ID NO: 4217761 - DNA, 25 bp, Homo sapien
tttgcttcctaacaactacctgatg

SEQ ID NO: 4217762 - DNA, 25 bp, Homo sapien
acctgatgtcttgtattctctgtga

SEQ ID NO: 4217763 - DNA, 25 bp, Homo sapien
tctctgtgaagttgctagtgaagtg

SEQ ID NO: 4217764 - DNA, 25 bp, Homo sapien
gaactgtggcaacctccatgaactc

SEQ ID NO: 4217765 - DNA, 25 bp, Homo sapien
tctgatgttgactgatccaaaggcc

SEQ ID NO: 4217766 - DNA, 25 bp, Homo sapien
ggtccacctggctactatactttca

SEQ ID NO: 4217767 - DNA, 25 bp, Homo sapien
taagaaacagagctaaacctatgcc

SEQ ID NO: 4217768 - DNA, 25 bp, Homo sapien
cttcgatcaactgatgactcagtac

SEQ ID NO: 4217769 - DNA, 25 bp, Homo sapien
aaatcctccaaacctctgcggacag

SEQ ID NO: 4217770 - DNA, 25 bp, Homo sapien
ctcagtactgatcttcccagggaaa

SEQ ID NO: 4217771 - DNA, 25 bp, Homo sapien
cagggaaatcctccaaacctctgcg

SEQ ID NO: 4217772 - DNA, 25 bp, Homo sapien
aaaaggtgtgagctgttctaggccc

SEQ ID NO: 4217773 - DNA, 25 bp, Homo sapien
gaagttcagctctgactcaggcttg

SEQ ID NO: 4217774 - DNA, 25 bp, Homo sapien
taaacatccctagtagatcagaggc

SEQ ID NO: 4217775 - DNA, 25 bp, Homo sapien
ccgatatgggtcactggctgcgaca

SEQ ID NO: 4217776 - DNA, 25 bp, Homo sapien
gtctagaagaacatacaccaaagtg

SEQ ID NO: 4217777 - DNA, 25 bp, Homo sapien
taacataggaaggtgttcacaacac

SEQ ID NO: 4217778 - DNA, 25 bp, Homo sapien
gaagtgcacgctgtgatactctgtg

SEQ ID NO: 4217779 - DNA, 25 bp, Homo sapien
taacaggttaacaaggaagtgcacg

SEQ ID NO: 4217780 - DNA, 25 bp, Homo sapien
caatagaatgcttagtgcaatttac

SEQ ID NO: 4217781 - DNA, 25 bp, Homo sapien
taatgcttaacttatggataataga

SEQ ID NO: 4217782 - DNA, 25 bp, Homo sapien
ccagactatgaggaagtgttcacaa

SEQ ID NO: 4217783 - DNA, 25 bp, Homo sapien
tggataatagaataacgaataagtt

SEQ ID NO: 4217784 - DNA, 25 bp, Homo sapien
tcacaccctgacatcccaaggatga

SEQ ID NO: 4217785 - DNA, 25 bp, Homo sapien
atctcacaccctgacatcccaagga

SEQ ID NO: 4217786 - DNA, 25 bp, Homo sapien
cactcatatcacaatacatctcaca

SEQ ID NO: 4217787 - DNA, 25 bp, Homo sapien
ctgacatcccaaggatgacagtcaa

SEQ ID NO: 4217788 - DNA, 25 bp, Homo sapien
gacggatttgggatgttactaagaa

SEQ ID NO: 4217789 - DNA, 25 bp, Homo sapien
gggcacacattcctacaactaatgg

SEQ ID NO: 4217790 - DNA, 25 bp, Homo sapien
taaccatggaaacaccaacagcatc

SEQ ID NO: 4217791 - DNA, 25 bp, Homo sapien
tgcaatctgacttactgaatcacag

SEQ ID NO: 4217792 - DNA, 25 bp, Homo sapien
tttctcattgtttcttgtgtgagtc

SEQ ID NO: 4217793 - DNA, 25 bp, Homo sapien
atttctcattgtttcttgtgtgagt

SEQ ID NO: 4217794 - DNA, 25 bp, Homo sapien
ctatttctcattgtttcttgtgtga

SEQ ID NO: 4217795 - DNA, 25 bp, Homo sapien
tatttctcattgtttcttgtgtgag

SEQ ID NO: 4217796 - DNA, 25 bp, Homo sapien
ggcaattactcagttcctaagcaaa

SEQ ID NO: 4217797 - DNA, 25 bp, Homo sapien
tcggtgttaatagtaccatcatgct

SEQ ID NO: 4217798 - DNA, 25 bp, Homo sapien
gaagtcttatcccaactagaaaagc

SEQ ID NO: 4217799 - DNA, 25 bp, Homo sapien
caagcccaaagcctgatagtttatc

SEQ ID NO: 4217800 - DNA, 25 bp, Homo sapien
atggagaacttccctcaactggctt

SEQ ID NO: 4217801 - DNA, 25 bp, Homo sapien
tggagaacttccctcaactggcttc

SEQ ID NO: 4217802 - DNA, 25 bp, Homo sapien
catggagaacttccctcaactggct

SEQ ID NO: 4217803 - DNA, 25 bp, Homo sapien
tcatggagaacttccctcaactggc

SEQ ID NO: 4217804 - DNA, 25 bp, Homo sapien
caatggtggcagttccagagggatt

SEQ ID NO: 4217805 - DNA, 25 bp, Homo sapien
tctccgttcagcaatggtggcagtt

SEQ ID NO: 4217806 - DNA, 25 bp, Homo sapien
ggcatcatggctacctctccgttca

SEQ ID NO: 4217807 - DNA, 25 bp, Homo sapien
cattcaccaagtggggcatcatggc

SEQ ID NO: 4217808 - DNA, 25 bp, Homo sapien
tgccctacgtgtcttgtcgagatca

SEQ ID NO: 4217809 - DNA, 25 bp, Homo sapien
tctggccaaccaagcaaactagtca

SEQ ID NO: 4217810 - DNA, 25 bp, Homo sapien
cagtgactagtgacaaaggagattc

SEQ ID NO: 4217811 - DNA, 25 bp, Homo sapien
aagggtgggttcacactgccctacg

SEQ ID NO: 4217812 - DNA, 25 bp, Homo sapien
tcactccaggtgtaagaacgtggcc

SEQ ID NO: 4217813 - DNA, 25 bp, Homo sapien
actaacacggaaggctggcagccag

SEQ ID NO: 4217814 - DNA, 25 bp, Homo sapien
catgaactacttgagcacagtgagc

SEQ ID NO: 4217815 - DNA, 25 bp, Homo sapien
cctaccctagtgagatgacggcacg

SEQ ID NO: 4217816 - DNA, 25 bp, Homo sapien
gcctgctgggcaagctgaattacag

SEQ ID NO: 4217817 - DNA, 25 bp, Homo sapien
tctcttggctacacaggcaaatggg

SEQ ID NO: 4217818 - DNA, 25 bp, Homo sapien
ttacagacatgtgggagaaatcaac

SEQ ID NO: 4217819 - DNA, 25 bp, Homo sapien
tagggaaatgccacgtagcctgctg

SEQ ID NO: 4217820 - DNA, 25 bp, Homo sapien
gtccacccctagagtcaatcctgtg

SEQ ID NO: 4217821 - DNA, 25 bp, Homo sapien
tgtccacccctagagtcaatcctgt

SEQ ID NO: 4217822 - DNA, 25 bp, Homo sapien
tgcaatgtccacccctagagtcaat

SEQ ID NO: 4217823 - DNA, 25 bp, Homo sapien
gcctgcaatgtccacccctagagtc

SEQ ID NO: 4217824 - DNA, 25 bp, Homo sapien
ctgtatgatgtgagaggtggctgag

SEQ ID NO: 4217825 - DNA, 25 bp, Homo sapien
taacaactgtatgatgtgagaggtg

SEQ ID NO: 4217826 - DNA, 25 bp, Homo sapien
acaactgtatgatgtgagaggtggc

SEQ ID NO: 4217827 - DNA, 25 bp, Homo sapien
caactgtatgatgtgagaggtggct

SEQ ID NO: 4217828 - DNA, 25 bp, Homo sapien
ctcaacagatgatctgatctgatgg

SEQ ID NO: 4217829 - DNA, 25 bp, Homo sapien
gctgctcaggtaaaacacattccct

SEQ ID NO: 4217830 - DNA, 25 bp, Homo sapien
aacacattccctctcaacagatgat

SEQ ID NO: 4217831 - DNA, 25 bp, Homo sapien
acagatgatctgatctgatggtcac

SEQ ID NO: 4217832 - DNA, 25 bp, Homo sapien
ccttggaagggtaatttgctaaatg

SEQ ID NO: 4217833 - DNA, 25 bp, Homo sapien
ctccacttaactgcccaattatttg

SEQ ID NO: 4217834 - DNA, 25 bp, Homo sapien
aatttgctaaatgcagactgtccat

SEQ ID NO: 4217835 - DNA, 25 bp, Homo sapien
cacttaactgcccaattatttgcaa

SEQ ID NO: 4217836 - DNA, 25 bp, Homo sapien
gagttaatgtggagatcatgtaaga

SEQ ID NO: 4217837 - DNA, 25 bp, Homo sapien
cactgccaccttctggagttaatgt

SEQ ID NO: 4217838 - DNA, 25 bp, Homo sapien
actactgtgcaaaaaccaagtgcca

SEQ ID NO: 4217839 - DNA, 25 bp, Homo sapien
ggaatggcctctataaagtttacaa

SEQ ID NO: 4217840 - DNA, 25 bp, Homo sapien
tttgggctctccttaagggctcacc

SEQ ID NO: 4217841 - DNA, 25 bp, Homo sapien
tctccttaagggctcacctcccaat

SEQ ID NO: 4217842 - DNA, 25 bp, Homo sapien
aacatttgggctctccttaagggct

SEQ ID NO: 4217843 - DNA, 25 bp, Homo sapien
catttgggctctccttaagggctca

SEQ ID NO: 4217844 - DNA, 25 bp, Homo sapien
gacagcagacatgaatgagctggcg

SEQ ID NO: 4217845 - DNA, 25 bp, Homo sapien
atgagctggcggcaaaaggtcttgc

SEQ ID NO: 4217846 - DNA, 25 bp, Homo sapien
gagctggcggcaaaaggtcttgcat

SEQ ID NO: 4217847 - DNA, 25 bp, Homo sapien
agcccaatgaccggtcctgacagca

SEQ ID NO: 4217848 - DNA, 25 bp, Homo sapien
ctggattaacttgaacgagaataac

SEQ ID NO: 4217849 - DNA, 25 bp, Homo sapien
tattgtgaaagtctcacctggatta

SEQ ID NO: 4217850 - DNA, 25 bp, Homo sapien
tgaatgcactgaagtgttccatcct

SEQ ID NO: 4217851 - DNA, 25 bp, Homo sapien
catcctctgctcttattgtgaaagt

SEQ ID NO: 4217852 - DNA, 25 bp, Homo sapien
gaagtttccccatattgtgcatcga

SEQ ID NO: 4217853 - DNA, 25 bp, Homo sapien
aaataggtgaaagactctatagtcc

SEQ ID NO: 4217854 - DNA, 25 bp, Homo sapien
catgctctactattacgcaaggaaa

SEQ ID NO: 4217855 - DNA, 25 bp, Homo sapien
aggttttaattgttcacggtatctg

SEQ ID NO: 4217856 - DNA, 25 bp, Homo sapien
actgtacctacaagtcctctcccat

SEQ ID NO: 4217857 - DNA, 25 bp, Homo sapien
cagaaatttccattacaatgtgacc

SEQ ID NO: 4217858 - DNA, 25 bp, Homo sapien
aacataagtagagttttgatctctt

SEQ ID NO: 4217859 - DNA, 25 bp, Homo sapien
tcccactgtacctacaagtcctctc

SEQ ID NO: 4217860 - DNA, 25 bp, Homo sapien
caatttagaaaaacaccgccggatg

SEQ ID NO: 4217861 - DNA, 25 bp, Homo sapien
tgaggtctttctagtggtgtcacaa

SEQ ID NO: 4217862 - DNA, 25 bp, Homo sapien
gagatcacaatgagcttctgaggtc

SEQ ID NO: 4217863 - DNA, 25 bp, Homo sapien
tattaggctgacagtttcaaccacg

SEQ ID NO: 4217864 - DNA, 25 bp, Homo sapien
tgacagttgcacgtacaatcacagc

SEQ ID NO: 4217865 - DNA, 25 bp, Homo sapien
cataacctggactttctgctctggg

SEQ ID NO: 4217866 - DNA, 25 bp, Homo sapien
cacaatcccagcaagatgacagttg

SEQ ID NO: 4217867 - DNA, 25 bp, Homo sapien
taaaagggtttctcaggtcagcgta

SEQ ID NO: 4217868 - DNA, 25 bp, Homo sapien
taaaataagaggatacagccttctc

SEQ ID NO: 4217869 - DNA, 25 bp, Homo sapien
ctctgaatatagctgctcaggcgtg

SEQ ID NO: 4217870 - DNA, 25 bp, Homo sapien
tgtaaaaggaggcacattagaaaaa

SEQ ID NO: 4217871 - DNA, 25 bp, Homo sapien
tgcccagccagaagtatggaattca

SEQ ID NO: 4217872 - DNA, 25 bp, Homo sapien
gagttctcattcagtgcacaggaga

SEQ ID NO: 4217873 - DNA, 25 bp, Homo sapien
cacaccgctggtagagaaaaaccat

SEQ ID NO: 4217874 - DNA, 25 bp, Homo sapien
ctgagatgtgactcccaacgttgga

SEQ ID NO: 4217875 - DNA, 25 bp, Homo sapien
cttcagagaggaaatacccaagttg

SEQ ID NO: 4217876 - DNA, 25 bp, Homo sapien
aaaaactgacattgctggatctagc

SEQ ID NO: 4217877 - DNA, 25 bp, Homo sapien
gatgctctttaacctgtgaccgagt

SEQ ID NO: 4217878 - DNA, 25 bp, Homo sapien
tgaccgagttacgtcccaatgaaac

SEQ ID NO: 4217879 - DNA, 25 bp, Homo sapien
ttcacaaggtaccacagtgcagcag

SEQ ID NO: 4217880 - DNA, 25 bp, Homo sapien
tgagagaaagcacccgacatggctg

SEQ ID NO: 4217881 - DNA, 25 bp, Homo sapien
aaaatgaaaaggtaccacttctctg

SEQ ID NO: 4217882 - DNA, 25 bp, Homo sapien
tctaaatctctgaaggtgaggccca

SEQ ID NO: 4217883 - DNA, 25 bp, Homo sapien
ccaagtttaacaaccagtgagagaa

SEQ ID NO: 4217884 - DNA, 25 bp, Homo sapien
tgatttgacctggaattcgatacgg

SEQ ID NO: 4217885 - DNA, 25 bp, Homo sapien
gatcaaacagattaattagctgctt

SEQ ID NO: 4217886 - DNA, 25 bp, Homo sapien
ttcgatacggttcatttccacatca

SEQ ID NO: 4217887 - DNA, 25 bp, Homo sapien
aaaacattctacaaggataagtgat

SEQ ID NO: 4217888 - DNA, 25 bp, Homo sapien
ccctgttcatgccagtgtgcaaaga

SEQ ID NO: 4217889 - DNA, 25 bp, Homo sapien
aaaatactgggcatcgaagtttcca

SEQ ID NO: 4217890 - DNA, 25 bp, Homo sapien
ttcagtttgaaataatggacacagg

SEQ ID NO: 4217891 - DNA, 25 bp, Homo sapien
tatgtgccacatctacaacaaggaa

SEQ ID NO: 4217892 - DNA, 25 bp, Homo sapien
tccctgggaccagtcagatatgctc

SEQ ID NO: 4217893 - DNA, 25 bp, Homo sapien
caaagcttgggaacacctctagaga

SEQ ID NO: 4217894 - DNA, 25 bp, Homo sapien
gaatgatggctaggcacaactgctc

SEQ ID NO: 4217895 - DNA, 25 bp, Homo sapien
gggtaaaaccctgtacacatctgct

SEQ ID NO: 4217896 - DNA, 25 bp, Homo sapien
gagttttaaatagatggttttcatg

SEQ ID NO: 4217897 - DNA, 25 bp, Homo sapien
gagactgtcattcagatttgggagt

SEQ ID NO: 4217898 - DNA, 25 bp, Homo sapien
attttaagcaagatgagactgtcat

SEQ ID NO: 4217899 - DNA, 25 bp, Homo sapien
tttaagcaagatgagactgtcattc

SEQ ID NO: 4217900 - DNA, 25 bp, Homo sapien
tcagtctacaggcagtcgccaccat

SEQ ID NO: 4217901 - DNA, 25 bp, Homo sapien
cagtctacaggcagtcgccaccatg

SEQ ID NO: 4217902 - DNA, 25 bp, Homo sapien
aagtagctcagtctacaggcagtcg

SEQ ID NO: 4217903 - DNA, 25 bp, Homo sapien
tagctcagtctacaggcagtcgcca

SEQ ID NO: 4217904 - DNA, 25 bp, Homo sapien
tctgtactggcacaactagagttcc

SEQ ID NO: 4217905 - DNA, 25 bp, Homo sapien
taagtccaaggtacatgtgcaatca

SEQ ID NO: 4217906 - DNA, 25 bp, Homo sapien
ctatgggctctttcctatatgggca

SEQ ID NO: 4217907 - DNA, 25 bp, Homo sapien
tggctcgacccaagggaaaacactg

SEQ ID NO: 4217908 - DNA, 25 bp, Homo sapien
tgaccacaagacagtaaattctaaa

SEQ ID NO: 4217909 - DNA, 25 bp, Homo sapien
ctgtctttgaagaagacgggccaac

SEQ ID NO: 4217910 - DNA, 25 bp, Homo sapien
gccaacattctacttgaccacaaga

SEQ ID NO: 4217911 - DNA, 25 bp, Homo sapien
gaagacgggccaacattctacttga

SEQ ID NO: 4217912 - DNA, 25 bp, Homo sapien
gccaaatagacaacacaatcagctt

SEQ ID NO: 4217913 - DNA, 25 bp, Homo sapien
gctgaaagcttcgtgcctacactca

SEQ ID NO: 4217914 - DNA, 25 bp, Homo sapien
caatcagctttccgtaatttctctg

SEQ ID NO: 4217915 - DNA, 25 bp, Homo sapien
gctgctagtgtggcaaaaaggtgaa

SEQ ID NO: 4217916 - DNA, 25 bp, Homo sapien
tgttacctgaagacaaaacggattg

SEQ ID NO: 4217917 - DNA, 25 bp, Homo sapien
taaggataggaggaacaagaagccc

SEQ ID NO: 4217918 - DNA, 25 bp, Homo sapien
caaatgatgggatgtcaaaccttcc

SEQ ID NO: 4217919 - DNA, 25 bp, Homo sapien
gaggaggttacacatctagccatgt

SEQ ID NO: 4217920 - DNA, 25 bp, Homo sapien
taagtctacctagctggaagaaatg

SEQ ID NO: 4217921 - DNA, 25 bp, Homo sapien
ccatgcacaggattaggtgttttcc

SEQ ID NO: 4217922 - DNA, 25 bp, Homo sapien
taagacggtgacttccaaagtggtc

SEQ ID NO: 4217923 - DNA, 25 bp, Homo sapien
taatcaatcttcaggctatcaggcc

SEQ ID NO: 4217924 - DNA, 25 bp, Homo sapien
caatcgcaggctctcttcaccactt

SEQ ID NO: 4217925 - DNA, 25 bp, Homo sapien
tcaatcgcaggctctcttcaccact

SEQ ID NO: 4217926 - DNA, 25 bp, Homo sapien
aatcgcaggctctcttcaccacttc

SEQ ID NO: 4217927 - DNA, 25 bp, Homo sapien
tcgcaggctctcttcaccacttcat

SEQ ID NO: 4217928 - DNA, 25 bp, Homo sapien
ctatgacacagatcatgaaacatga

SEQ ID NO: 4217929 - DNA, 25 bp, Homo sapien
tatgacacagatcatgaaacatgag

SEQ ID NO: 4217930 - DNA, 25 bp, Homo sapien
tgacacagatcatgaaacatgagag

SEQ ID NO: 4217931 - DNA, 25 bp, Homo sapien
acacagatcatgaaacatgagagag

SEQ ID NO: 4217932 - DNA, 25 bp, Homo sapien
cacttaatccacttcagacattgaa

SEQ ID NO: 4217933 - DNA, 25 bp, Homo sapien
gactgtgggccacttaatccacttc

SEQ ID NO: 4217934 - DNA, 25 bp, Homo sapien
ccgcgaagtgctcgtaatgaagaaa

SEQ ID NO: 4217935 - DNA, 25 bp, Homo sapien
ttgaaaagccacaccgcgaagtgct

SEQ ID NO: 4217936 - DNA, 25 bp, Homo sapien
tctttcaggtggactaataagcatc

SEQ ID NO: 4217937 - DNA, 25 bp, Homo sapien
tataagctgtccctttcaactagga

SEQ ID NO: 4217938 - DNA, 25 bp, Homo sapien
tctcaagggcaaggtaataagcagg

SEQ ID NO: 4217939 - DNA, 25 bp, Homo sapien
tacaaacacttttggacagtctaac

SEQ ID NO: 4217940 - DNA, 25 bp, Homo sapien
gagatgaacaggactcacgacaccc

SEQ ID NO: 4217941 - DNA, 25 bp, Homo sapien
tactggcaagaagttcagccatggt

SEQ ID NO: 4217942 - DNA, 25 bp, Homo sapien
ggtcaatacagatgtaaataaagca

SEQ ID NO: 4217943 - DNA, 25 bp, Homo sapien
ttacacaatgaataagaagaggtca

SEQ ID NO: 4217944 - DNA, 25 bp, Homo sapien
gaacagactacctcgttgccatggt

SEQ ID NO: 4217945 - DNA, 25 bp, Homo sapien
cacctgttgaggtaggaacaccttg

SEQ ID NO: 4217946 - DNA, 25 bp, Homo sapien
gaacaccttgtcatagaaaatttgg

SEQ ID NO: 4217947 - DNA, 25 bp, Homo sapien
tttcttgtatagacagagtgtcacc

SEQ ID NO: 4217948 - DNA, 25 bp, Homo sapien
gggtagtcacagtaaccattcacca

SEQ ID NO: 4217949 - DNA, 25 bp, Homo sapien
ttcgccaaggcaacctgataacata

SEQ ID NO: 4217950 - DNA, 25 bp, Homo sapien
taagaagccgttacttcgccaaggc

SEQ ID NO: 4217951 - DNA, 25 bp, Homo sapien
cataacaggtttcttagcaacaggg

SEQ ID NO: 4217952 - DNA, 25 bp, Homo sapien
tctttcccaggtgttcatatcacaa

SEQ ID NO: 4217953 - DNA, 25 bp, Homo sapien
ttctttcccaggtgttcatatcaca

SEQ ID NO: 4217954 - DNA, 25 bp, Homo sapien
ggcgcggcaccatagatgcttctaa

SEQ ID NO: 4217955 - DNA, 25 bp, Homo sapien
taaatgagagttcttacagaccagc

SEQ ID NO: 4217956 - DNA, 25 bp, Homo sapien
tattgtttgagaggcaccagactgc

SEQ ID NO: 4217957 - DNA, 25 bp, Homo sapien
tcctctaagttgtccggcagctggg

SEQ ID NO: 4217958 - DNA, 25 bp, Homo sapien
taaatgccccgaggtaaaatgcaga

SEQ ID NO: 4217959 - DNA, 25 bp, Homo sapien
aataggaacaggtgagcatgactcc

SEQ ID NO: 4217960 - DNA, 25 bp, Homo sapien
caactaagggaggtctcagcaggaa

SEQ ID NO: 4217961 - DNA, 25 bp, Homo sapien
tggtatcctctagacaaacttgttg

SEQ ID NO: 4217962 - DNA, 25 bp, Homo sapien
tgttgaacccaacgtaactgccaga

SEQ ID NO: 4217963 - DNA, 25 bp, Homo sapien
tcagcatggagtcaggcatatagcc

SEQ ID NO: 4217964 - DNA, 25 bp, Homo sapien
tttcaaatcacaaggccagcgttag

SEQ ID NO: 4217965 - DNA, 25 bp, Homo sapien
tcaggtaccaggagacaggcttgta

SEQ ID NO: 4217966 - DNA, 25 bp, Homo sapien
caagaatttctagtctggcccagtc

SEQ ID NO: 4217967 - DNA, 25 bp, Homo sapien
ggcccagtcattgtctttaaaagga

SEQ ID NO: 4217968 - DNA, 25 bp, Homo sapien
taccaagaaccaaaactgagttgct

SEQ ID NO: 4217969 - DNA, 25 bp, Homo sapien
tgttaaataagggtagccaccatct

SEQ ID NO: 4217970 - DNA, 25 bp, Homo sapien
tggtggctggctcgcctatttagca

SEQ ID NO: 4217971 - DNA, 25 bp, Homo sapien
tagaagtgcaagaacctcatggcca

SEQ ID NO: 4217972 - DNA, 25 bp, Homo sapien
tctgagatgcgacttcctggctcca

SEQ ID NO: 4217973 - DNA, 25 bp, Homo sapien
tgtctaaggcaaacaacaaatggca

SEQ ID NO: 4217974 - DNA, 25 bp, Homo sapien
tagaagtagtcataccactcccaag

SEQ ID NO: 4217975 - DNA, 25 bp, Homo sapien
tgttgggacttcatagaagtagtca

SEQ ID NO: 4217976 - DNA, 25 bp, Homo sapien
atcttgtgttgggacttcatagaag

SEQ ID NO: 4217977 - DNA, 25 bp, Homo sapien
gacttcatagaagtagtcataccac

SEQ ID NO: 4217978 - DNA, 25 bp, Homo sapien
gaagagcaccactctcaaggttgaa

SEQ ID NO: 4217979 - DNA, 25 bp, Homo sapien
caccgtgccaggtctagatcatatt

SEQ ID NO: 4217980 - DNA, 25 bp, Homo sapien
ggttgaacccttggacacaacagaa

SEQ ID NO: 4217981 - DNA, 25 bp, Homo sapien
tggaaccacaagcaacaggcagatt

SEQ ID NO: 4217982 - DNA, 25 bp, Homo sapien
ctaaaacagacgagtcagatgttaa

SEQ ID NO: 4217983 - DNA, 25 bp, Homo sapien
aaacagacgagtcagatgttaatag

SEQ ID NO: 4217984 - DNA, 25 bp, Homo sapien
taaaacagacgagtcagatgttaat

SEQ ID NO: 4217985 - DNA, 25 bp, Homo sapien
aaaacagacgagtcagatgttaata

SEQ ID NO: 4217986 - DNA, 25 bp, Homo sapien
gaatggatccattgggtgacatcat

SEQ ID NO: 4217987 - DNA, 25 bp, Homo sapien
gatccattgggtgacatcatgggaa

SEQ ID NO: 4217988 - DNA, 25 bp, Homo sapien
ttgggtgacatcatgggaacttcag

SEQ ID NO: 4217989 - DNA, 25 bp, Homo sapien
aggaatggatccattgggtgacatc

SEQ ID NO: 4217990 - DNA, 25 bp, Homo sapien
tgtccacaatgttccagccatgcag

SEQ ID NO: 4217991 - DNA, 25 bp, Homo sapien
tatgctttattcacgtacaggaaca

SEQ ID NO: 4217992 - DNA, 25 bp, Homo sapien
tgcatattgtgctgaggctaggaca

SEQ ID NO: 4217993 - DNA, 25 bp, Homo sapien
gaaatttaagtgcaaacagccaagt

SEQ ID NO: 4217994 - DNA, 25 bp, Homo sapien
gatgctgagatacaatccccatgag

SEQ ID NO: 4217995 - DNA, 25 bp, Homo sapien
cagaactaactagcagagggacaga

SEQ ID NO: 4217996 - DNA, 25 bp, Homo sapien
tacatgcgaaggcaaccaactctag

SEQ ID NO: 4217997 - DNA, 25 bp, Homo sapien
gaaagaggcccaaggtatctaggga

SEQ ID NO: 4217998 - DNA, 25 bp, Homo sapien
atagtgtgatacagcccaatactcc

SEQ ID NO: 4217999 - DNA, 25 bp, Homo sapien
tgaacttagtgcgaccaccctgtca

SEQ ID NO: 4218000 - DNA, 25 bp, Homo sapien
gtgatacagcccaatactcctgggc

SEQ ID NO: 4218001 - DNA, 25 bp, Homo sapien
caccctgtcagcatagtgtgataca

SEQ ID NO: 4218002 - DNA, 25 bp, Homo sapien
cctgcagagtacttacagcttgata

SEQ ID NO: 4218003 - DNA, 25 bp, Homo sapien
cagagtacttacagcttgataacag

SEQ ID NO: 4218004 - DNA, 25 bp, Homo sapien
tatcattctaggtttcggaccagct

SEQ ID NO: 4218005 - DNA, 25 bp, Homo sapien
ggaaaaataagtgactggtgatgtt

SEQ ID NO: 4218006 - DNA, 25 bp, Homo sapien
tattttgctcaccaatcaggagtac

SEQ ID NO: 4218007 - DNA, 25 bp, Homo sapien
tcaggagtacaaatgcatcggtact

SEQ ID NO: 4218008 - DNA, 25 bp, Homo sapien
ccctctgcattttctaatatggtag

SEQ ID NO: 4218009 - DNA, 25 bp, Homo sapien
taatcctataggaggctgagcagtt

SEQ ID NO: 4218010 - DNA, 25 bp, Homo sapien
acactgggtgagttgcctggacaca

SEQ ID NO: 4218011 - DNA, 25 bp, Homo sapien
cctcagaagcaactgggcacacaga

SEQ ID NO: 4218012 - DNA, 25 bp, Homo sapien
ggcagattctgcacgtggacacata

SEQ ID NO: 4218013 - DNA, 25 bp, Homo sapien
caacatgcctaaagtgggatcccag

SEQ ID NO: 4218014 - DNA, 25 bp, Homo sapien
ggactccagtactatcttcaatcac

SEQ ID NO: 4218015 - DNA, 25 bp, Homo sapien
ggtgtgaccaccacccggcggactc

SEQ ID NO: 4218016 - DNA, 25 bp, Homo sapien
acccggcggactccagtactatctt

SEQ ID NO: 4218017 - DNA, 25 bp, Homo sapien
gagactggggtgtgaccaccacccg

SEQ ID NO: 4218018 - DNA, 25 bp, Homo sapien
taacaggtgggtagtaagccgtgtg

SEQ ID NO: 4218019 - DNA, 25 bp, Homo sapien
catatctccaggtccggtaacaggt

SEQ ID NO: 4218020 - DNA, 25 bp, Homo sapien
aagccgtgtgtgagttatgaataaa

SEQ ID NO: 4218021 - DNA, 25 bp, Homo sapien
gggaaaaaactgaggcggcatatct

SEQ ID NO: 4218022 - DNA, 25 bp, Homo sapien
tggcgatcgatctggcggtctttca

SEQ ID NO: 4218023 - DNA, 25 bp, Homo sapien
tcttctcgggtgatgtaggttgaca

SEQ ID NO: 4218024 - DNA, 25 bp, Homo sapien
tctgaatcattcgactttgggctgc

SEQ ID NO: 4218025 - DNA, 25 bp, Homo sapien
tagccattgtatactgttgtgcagc

SEQ ID NO: 4218026 - DNA, 25 bp, Homo sapien
tgtaaaagatgtggaaacatcattt

SEQ ID NO: 4218027 - DNA, 25 bp, Homo sapien
tctgtcttgataattcactctatgg

SEQ ID NO: 4218028 - DNA, 25 bp, Homo sapien
gataattcactctatggcaaacatc

SEQ ID NO: 4218029 - DNA, 25 bp, Homo sapien
aaaagatgtggaaacatcatttgag

SEQ ID NO: 4218030 - DNA, 25 bp, Homo sapien
cagaagctcttccatagacactcaa

SEQ ID NO: 4218031 - DNA, 25 bp, Homo sapien
gctcttccatagacactcaaaaata

SEQ ID NO: 4218032 - DNA, 25 bp, Homo sapien
gtcagaagctcttccatagacactc

SEQ ID NO: 4218033 - DNA, 25 bp, Homo sapien
gaagctcttccatagacactcaaaa

SEQ ID NO: 4218034 - DNA, 25 bp, Homo sapien
ttattcttcgtctacactatgtgat

SEQ ID NO: 4218035 - DNA, 25 bp, Homo sapien
tcgtctacactatgtgattcacgtt

SEQ ID NO: 4218036 - DNA, 25 bp, Homo sapien
tgtgattcacgtttgcctttttgct

SEQ ID NO: 4218037 - DNA, 25 bp, Homo sapien
tacactatgtgattcacgtttgcct

SEQ ID NO: 4218038 - DNA, 25 bp, Homo sapien
gatgaattccactgacctgagctca

SEQ ID NO: 4218039 - DNA, 25 bp, Homo sapien
ttatctgttacagggagccaagacc

SEQ ID NO: 4218040 - DNA, 25 bp, Homo sapien
aacacctcgtctgagcatgcctagg

SEQ ID NO: 4218041 - DNA, 25 bp, Homo sapien
catgcctaggatatgtgctcacaag

SEQ ID NO: 4218042 - DNA, 25 bp, Homo sapien
cagaatgcggaagacatggtgtaca

SEQ ID NO: 4218043 - DNA, 25 bp, Homo sapien
tacaagttgccaggtgtaaggaaag

SEQ ID NO: 4218044 - DNA, 25 bp, Homo sapien
tccgcaatgtagcagggcaggtcta

SEQ ID NO: 4218045 - DNA, 25 bp, Homo sapien
gatctacttaaacctagtgctgacc

SEQ ID NO: 4218046 - DNA, 25 bp, Homo sapien
tagagctccattccacagaaggaga

SEQ ID NO: 4218047 - DNA, 25 bp, Homo sapien
agaagttcaacaccctgcctcttga

SEQ ID NO: 4218048 - DNA, 25 bp, Homo sapien
gacaaaatcgatgttgacatagcag

SEQ ID NO: 4218049 - DNA, 25 bp, Homo sapien
gtttatgtaaagatcctagagctcc

SEQ ID NO: 4218050 - DNA, 25 bp, Homo sapien
ccaccatgacctggtcttttctggc

SEQ ID NO: 4218051 - DNA, 25 bp, Homo sapien
catccccaccatgacctggtctttt

SEQ ID NO: 4218052 - DNA, 25 bp, Homo sapien
tttctgagaataacacctacatgga

SEQ ID NO: 4218053 - DNA, 25 bp, Homo sapien
ttctgagaataacacctacatggaa

SEQ ID NO: 4218054 - DNA, 25 bp, Homo sapien
tctgccttgcactgaacgtttggaa

SEQ ID NO: 4218055 - DNA, 25 bp, Homo sapien
gcttgcatgcgtggatggtgtctcc

SEQ ID NO: 4218056 - DNA, 25 bp, Homo sapien
gatgcagacttgacgtttacctaag

SEQ ID NO: 4218057 - DNA, 25 bp, Homo sapien
atggagaccagttaaggcagcccca

SEQ ID NO: 4218058 - DNA, 25 bp, Homo sapien
tgcccagagttacagtccaggaaga

SEQ ID NO: 4218059 - DNA, 25 bp, Homo sapien
aaacgatcgtacttgcccagagtta

SEQ ID NO: 4218060 - DNA, 25 bp, Homo sapien
tccaacaattaaacgatcgtacttg

SEQ ID NO: 4218061 - DNA, 25 bp, Homo sapien
ccagagttacagtccaggaagataa

SEQ ID NO: 4218062 - DNA, 25 bp, Homo sapien
gacaggcagaatccagagtacaatt

SEQ ID NO: 4218063 - DNA, 25 bp, Homo sapien
gagccaagtgaagctcatcacctga

SEQ ID NO: 4218064 - DNA, 25 bp, Homo sapien
tgtgtgggtacatactaaaatgcct

SEQ ID NO: 4218065 - DNA, 25 bp, Homo sapien
tccagagggctcaagagttccagca

SEQ ID NO: 4218066 - DNA, 25 bp, Homo sapien
tcgtgctgccacagactaagaagga

SEQ ID NO: 4218067 - DNA, 25 bp, Homo sapien
taagcatgatctaagcgtgcctcga

SEQ ID NO: 4218068 - DNA, 25 bp, Homo sapien
taagcgagttaactaagcccttggc

SEQ ID NO: 4218069 - DNA, 25 bp, Homo sapien
taaaacccagggacacaatttgcac

SEQ ID NO: 4218070 - DNA, 25 bp, Homo sapien
tgtggtttctctattcccgaaagaa

SEQ ID NO: 4218071 - DNA, 25 bp, Homo sapien
aaagaatgtcttgcaccctctttac

SEQ ID NO: 4218072 - DNA, 25 bp, Homo sapien
aagaatgtcttgcaccctctttact

SEQ ID NO: 4218073 - DNA, 25 bp, Homo sapien
ctctattcccgaaagaatgtcttgc

SEQ ID NO: 4218074 - DNA, 25 bp, Homo sapien
actgtcagattcaaccactcttctt

SEQ ID NO: 4218075 - DNA, 25 bp, Homo sapien
cgtctgcactgtcagattcaaccac

SEQ ID NO: 4218076 - DNA, 25 bp, Homo sapien
tccctgcatttggtgcatattccat

SEQ ID NO: 4218077 - DNA, 25 bp, Homo sapien
ggtgcatattccattacacagagca

SEQ ID NO: 4218078 - DNA, 25 bp, Homo sapien
gacaacacaactgctcttgcctgaa

SEQ ID NO: 4218079 - DNA, 25 bp, Homo sapien
tctcgtcctttgtctgataaggcca

SEQ ID NO: 4218080 - DNA, 25 bp, Homo sapien
tgtggggtccacaggaaagtccaac

SEQ ID NO: 4218081 - DNA, 25 bp, Homo sapien
gataaggccacctcgtaactgtagg

SEQ ID NO: 4218082 - DNA, 25 bp, Homo sapien
tttcgatggcaacaggagctctcct

SEQ ID NO: 4218083 - DNA, 25 bp, Homo sapien
caacttaggctgagtggtgactgct

SEQ ID NO: 4218084 - DNA, 25 bp, Homo sapien
ctgaagctctgttgtctggcctaca

SEQ ID NO: 4218085 - DNA, 25 bp, Homo sapien
catgtatgttacctgctgagcctct

SEQ ID NO: 4218086 - DNA, 25 bp, Homo sapien
gatctttcaggttacattctaattc

SEQ ID NO: 4218087 - DNA, 25 bp, Homo sapien
ctttcaggttacattctaattcttc

SEQ ID NO: 4218088 - DNA, 25 bp, Homo sapien
gttgctggtctaagatctttcaggt

SEQ ID NO: 4218089 - DNA, 25 bp, Homo sapien
ctcacatgataatctgttgctggtc

SEQ ID NO: 4218090 - DNA, 25 bp, Homo sapien
gcttcaccgaagcaattcaaggcag

SEQ ID NO: 4218091 - DNA, 25 bp, Homo sapien
caatggctcgcttaagtacacaccc

SEQ ID NO: 4218092 - DNA, 25 bp, Homo sapien
ggcagaggaagctacatctaaataa

SEQ ID NO: 4218093 - DNA, 25 bp, Homo sapien
tggaaaaactgcaacgagcttggga

SEQ ID NO: 4218094 - DNA, 25 bp, Homo sapien
cagaagtatacccaggcagatcagg

SEQ ID NO: 4218095 - DNA, 25 bp, Homo sapien
gatcaggtcctatatgttcccaaaa

SEQ ID NO: 4218096 - DNA, 25 bp, Homo sapien
gcagctccccgctttagatggagca

SEQ ID NO: 4218097 - DNA, 25 bp, Homo sapien
tgctgcagagttcgctagagtcccc

SEQ ID NO: 4218098 - DNA, 25 bp, Homo sapien
taatatgatgtctgaaccttacttc

SEQ ID NO: 4218099 - DNA, 25 bp, Homo sapien
tatctaaactactatctacttctga

SEQ ID NO: 4218100 - DNA, 25 bp, Homo sapien
tgaaaaatatctggagcgctctcat

SEQ ID NO: 4218101 - DNA, 25 bp, Homo sapien
gaagacatttcaggtgtgtgtgatg

SEQ ID NO: 4218102 - DNA, 25 bp, Homo sapien
ggacagtcatcccaacaggtatttg

SEQ ID NO: 4218103 - DNA, 25 bp, Homo sapien
ccagctccatttcaagataggcagg

SEQ ID NO: 4218104 - DNA, 25 bp, Homo sapien
taaaaccccatgagctactctctgg

SEQ ID NO: 4218105 - DNA, 25 bp, Homo sapien
aaacagacacagtcagtggcagtga

SEQ ID NO: 4218106 - DNA, 25 bp, Homo sapien
tccactgcagggttagtgaactttt

SEQ ID NO: 4218107 - DNA, 25 bp, Homo sapien
tggtgaagctaacaggctcggagca

SEQ ID NO: 4218108 - DNA, 25 bp, Homo sapien
tcggagcaggatccctttacggaat

SEQ ID NO: 4218109 - DNA, 25 bp, Homo sapien
ggaaaggacactcgggtgcacagct

SEQ ID NO: 4218110 - DNA, 25 bp, Homo sapien
aataattgggagaatatgtaaatca

SEQ ID NO: 4218111 - DNA, 25 bp, Homo sapien
ggagaatatgtaaatcacctactaa

SEQ ID NO: 4218112 - DNA, 25 bp, Homo sapien
tgataaataattgggagaatatgta

SEQ ID NO: 4218113 - DNA, 25 bp, Homo sapien
ttgggagaatatgtaaatcacctac

SEQ ID NO: 4218114 - DNA, 25 bp, Homo sapien
ctgtttgtcgcatgtggtctggtgc

SEQ ID NO: 4218115 - DNA, 25 bp, Homo sapien
tatcaatatcaacaactaatttcat

SEQ ID NO: 4218116 - DNA, 25 bp, Homo sapien
tcgcatgtggtctggtgctagctgt

SEQ ID NO: 4218117 - DNA, 25 bp, Homo sapien
cttggctgtttgtcgcatgtggtct

SEQ ID NO: 4218118 - DNA, 25 bp, Homo sapien
gcagctcagcttcccctgagatgta

SEQ ID NO: 4218119 - DNA, 25 bp, Homo sapien
ccctggcaaaaggcagctcagcttc

SEQ ID NO: 4218120 - DNA, 25 bp, Homo sapien
tcccctgagatgtatctgaatccta

SEQ ID NO: 4218121 - DNA, 25 bp, Homo sapien
gcttcccctgagatgtatctgaatc

SEQ ID NO: 4218122 - DNA, 25 bp, Homo sapien
aagagctacaggtgatgccgcagtg

SEQ ID NO: 4218123 - DNA, 25 bp, Homo sapien
aagaggagtcggatcgtgtctccca

SEQ ID NO: 4218124 - DNA, 25 bp, Homo sapien
gatctagagagacagtggaactaca

SEQ ID NO: 4218125 - DNA, 25 bp, Homo sapien
gcaagagcctaacaaacagcacagt

SEQ ID NO: 4218126 - DNA, 25 bp, Homo sapien
aaacttatgagttacccacctggct

SEQ ID NO: 4218127 - DNA, 25 bp, Homo sapien
tgacatacctcaacagtagagagag

SEQ ID NO: 4218128 - DNA, 25 bp, Homo sapien
gagagagtccccactatgaataaat

SEQ ID NO: 4218129 - DNA, 25 bp, Homo sapien
taaagctgatggttcctgcgttcct

SEQ ID NO: 4218130 - DNA, 25 bp, Homo sapien
ccactctaaaaggtagttggtgatt

SEQ ID NO: 4218131 - DNA, 25 bp, Homo sapien
tttttgaaccgttgtcaattggtgc

SEQ ID NO: 4218132 - DNA, 25 bp, Homo sapien
gttggtgatttttgaaccgttgtca

SEQ ID NO: 4218133 - DNA, 25 bp, Homo sapien
gtgatttttgaaccgttgtcaattg

SEQ ID NO: 4218134 - DNA, 25 bp, Homo sapien
tctcacagaggccactcaacagtgt

SEQ ID NO: 4218135 - DNA, 25 bp, Homo sapien
atgtgacttctatgtactgctctgc

SEQ ID NO: 4218136 - DNA, 25 bp, Homo sapien
ccaagcggcagtgtgttttacctta

SEQ ID NO: 4218137 - DNA, 25 bp, Homo sapien
acagggcactcgcacatgggtagaa

SEQ ID NO: 4218138 - DNA, 25 bp, Homo sapien
gtagataccttccaagggcctctgg

SEQ ID NO: 4218139 - DNA, 25 bp, Homo sapien
ttgagaataaggacactccaccgta

SEQ ID NO: 4218140 - DNA, 25 bp, Homo sapien
caaggggggcatccgatacaggaca

SEQ ID NO: 4218141 - DNA, 25 bp, Homo sapien
ctaggccagaaatgcactgggtcca

SEQ ID NO: 4218142 - DNA, 25 bp, Homo sapien
aaatgaaaggcttctaggtcaagtg

SEQ ID NO: 4218143 - DNA, 25 bp, Homo sapien
cgcgcccgacctacagttgcttttt

SEQ ID NO: 4218144 - DNA, 25 bp, Homo sapien
gaaaggcttctaggtcaagtgtttc

SEQ ID NO: 4218145 - DNA, 25 bp, Homo sapien
gagtcatcgcgcccgacctacagtt

SEQ ID NO: 4218146 - DNA, 25 bp, Homo sapien
tctctgagactgaggtccctaaaag

SEQ ID NO: 4218147 - DNA, 25 bp, Homo sapien
ggttggtccatccacctagtgaagg

SEQ ID NO: 4218148 - DNA, 25 bp, Homo sapien
caagggagccgagggcctaatttca

SEQ ID NO: 4218149 - DNA, 25 bp, Homo sapien
gaaacaaccgtaagacatggcagtg

SEQ ID NO: 4218150 - DNA, 25 bp, Homo sapien
ggctgctgaatccagacatgggctg

SEQ ID NO: 4218151 - DNA, 25 bp, Homo sapien
gctgaatccagacatgggctgaagg

SEQ ID NO: 4218152 - DNA, 25 bp, Homo sapien
ccagacatgggctgaaggattctgg

SEQ ID NO: 4218153 - DNA, 25 bp, Homo sapien
gctgctgaatccagacatgggctga

SEQ ID NO: 4218154 - DNA, 25 bp, Homo sapien
ggttatcagttgtcacgtgcttgtg

SEQ ID NO: 4218155 - DNA, 25 bp, Homo sapien
tatcagttgtcacgtgcttgtggcc

SEQ ID NO: 4218156 - DNA, 25 bp, Homo sapien
ttggttatcagttgtcacgtgcttg

SEQ ID NO: 4218157 - DNA, 25 bp, Homo sapien
atttggttatcagttgtcacgtgct

SEQ ID NO: 4218158 - DNA, 25 bp, Homo sapien
gattggaaacgatacttcctgttcc

SEQ ID NO: 4218159 - DNA, 25 bp, Homo sapien
gggtatttccaacaccgctggcact

SEQ ID NO: 4218160 - DNA, 25 bp, Homo sapien
cgctggcactaacagatgaagctgg

SEQ ID NO: 4218161 - DNA, 25 bp, Homo sapien
cctggcactaacaacactagaagtg

SEQ ID NO: 4218162 - DNA, 25 bp, Homo sapien
caaagctttgtcaacttgcagtgct

SEQ ID NO: 4218163 - DNA, 25 bp, Homo sapien
tcccgaagaagcactgtctgaaacc

SEQ ID NO: 4218164 - DNA, 25 bp, Homo sapien
tgccggacaaagctttgtcaacttg

SEQ ID NO: 4218165 - DNA, 25 bp, Homo sapien
gtgcttctggctcccgaagaagcac

SEQ ID NO: 4218166 - DNA, 25 bp, Homo sapien
atgtcgtttcgagcggccagcctga

SEQ ID NO: 4218167 - DNA, 25 bp, Homo sapien
ctggtaccaatgtcgtttcgagcgg

SEQ ID NO: 4218168 - DNA, 25 bp, Homo sapien
ttcgagcggccagcctgaatgtgta

SEQ ID NO: 4218169 - DNA, 25 bp, Homo sapien
accaatgtcgtttcgagcggccagc

SEQ ID NO: 4218170 - DNA, 25 bp, Homo sapien
ggttctgcatcttgagtccacgtga

SEQ ID NO: 4218171 - DNA, 25 bp, Homo sapien
cagttgatttagtgtggaggcagca

SEQ ID NO: 4218172 - DNA, 25 bp, Homo sapien
caagttacgggtcaaggagccttca

SEQ ID NO: 4218173 - DNA, 25 bp, Homo sapien
tgacattcaccagcttaaaggaggc

SEQ ID NO: 4218174 - DNA, 25 bp, Homo sapien
caacgtgacccatgtgatgccagct

SEQ ID NO: 4218175 - DNA, 25 bp, Homo sapien
cagaaggcatctgagggatatttcc

SEQ ID NO: 4218176 - DNA, 25 bp, Homo sapien
taatgtgtagcacaccacctcttgg

SEQ ID NO: 4218177 - DNA, 25 bp, Homo sapien
cagctcgaaccagccttggtgcaga

SEQ ID NO: 4218178 - DNA, 25 bp, Homo sapien
aatcctctccagtgtattttgggtg

SEQ ID NO: 4218179 - DNA, 25 bp, Homo sapien
aaatcctctccagtgtattttgggt

SEQ ID NO: 4218180 - DNA, 25 bp, Homo sapien
atcctctccagtgtattttgggtgg

SEQ ID NO: 4218181 - DNA, 25 bp, Homo sapien
tcctctccagtgtattttgggtgga

SEQ ID NO: 4218182 - DNA, 25 bp, Homo sapien
tcatagccagcatcgataataaggg

SEQ ID NO: 4218183 - DNA, 25 bp, Homo sapien
ttttaaagcgtagggcaatgccacc

SEQ ID NO: 4218184 - DNA, 25 bp, Homo sapien
ccttgtggagaaacgttagcagtat

SEQ ID NO: 4218185 - DNA, 25 bp, Homo sapien
aaaacaagtatgtcatcacctggtt

SEQ ID NO: 4218186 - DNA, 25 bp, Homo sapien
caaacaagaacttcgcttggacagc

SEQ ID NO: 4218187 - DNA, 25 bp, Homo sapien
catgagatgtaactgggcctttgac

SEQ ID NO: 4218188 - DNA, 25 bp, Homo sapien
ggcctgtcaggactcgtcgtacaaa

SEQ ID NO: 4218189 - DNA, 25 bp, Homo sapien
ttccttccgtattagaagcagtcag

SEQ ID NO: 4218190 - DNA, 25 bp, Homo sapien
cacacatatattccgaatgcagaaa

SEQ ID NO: 4218191 - DNA, 25 bp, Homo sapien
tattgaagaatgaacgatgcatgca

SEQ ID NO: 4218192 - DNA, 25 bp, Homo sapien
gaggtgaggcacaatatccttttgc

SEQ ID NO: 4218193 - DNA, 25 bp, Homo sapien
ggcttgtcactactaaaatgaatca

SEQ ID NO: 4218194 - DNA, 25 bp, Homo sapien
taaccaaatgtcttattagcaataa

SEQ ID NO: 4218195 - DNA, 25 bp, Homo sapien
ttctagacatgaccaaaaggcaaaa

SEQ ID NO: 4218196 - DNA, 25 bp, Homo sapien
tcaggactcataaaatcacacacca

SEQ ID NO: 4218197 - DNA, 25 bp, Homo sapien
ccattatactatctgaattctagac

SEQ ID NO: 4218198 - DNA, 25 bp, Homo sapien
tagcaagtacttgaggatttctgaa

SEQ ID NO: 4218199 - DNA, 25 bp, Homo sapien
cagtaatctctagcaagtacttgag

SEQ ID NO: 4218200 - DNA, 25 bp, Homo sapien
atttccatcagtaatctctagcaag

SEQ ID NO: 4218201 - DNA, 25 bp, Homo sapien
ttctgaaccaccattgtccttaggg

SEQ ID NO: 4218202 - DNA, 25 bp, Homo sapien
ggatttgaataaaacaattgccaaa

SEQ ID NO: 4218203 - DNA, 25 bp, Homo sapien
tggatttgaataaaacaattgccaa

SEQ ID NO: 4218204 - DNA, 25 bp, Homo sapien
ctattggatttgaataaaacaattg

SEQ ID NO: 4218205 - DNA, 25 bp, Homo sapien
attggatttgaataaaacaattgcc

SEQ ID NO: 4218206 - DNA, 25 bp, Homo sapien
caccactctcggctgcttataagaa

SEQ ID NO: 4218207 - DNA, 25 bp, Homo sapien
tttgagactgcaatgggccatgttt

SEQ ID NO: 4218208 - DNA, 25 bp, Homo sapien
gaccccatcactatgaaaaatgtat

SEQ ID NO: 4218209 - DNA, 25 bp, Homo sapien
ttatctgattaattaggaaccctag

SEQ ID NO: 4218210 - DNA, 25 bp, Homo sapien
acatcagcactgcttgcttgtaaaa

SEQ ID NO: 4218211 - DNA, 25 bp, Homo sapien
catcagcactgcttgcttgtaaaag

SEQ ID NO: 4218212 - DNA, 25 bp, Homo sapien
gaaaccataatgaaacgtgccgctg

SEQ ID NO: 4218213 - DNA, 25 bp, Homo sapien
tacttcttggccacgaggcttctgg

SEQ ID NO: 4218214 - DNA, 25 bp, Homo sapien
caagctatcaaatgctcctggtgtg

SEQ ID NO: 4218215 - DNA, 25 bp, Homo sapien
taatacttagtgttgctggctagac

SEQ ID NO: 4218216 - DNA, 25 bp, Homo sapien
aacaagacttatgcatgactttatg

SEQ ID NO: 4218217 - DNA, 25 bp, Homo sapien
tatgcatgactttatgcctcttgta

SEQ ID NO: 4218218 - DNA, 25 bp, Homo sapien
gcatgactttatgcctcttgtaaaa

SEQ ID NO: 4218219 - DNA, 25 bp, Homo sapien
gacttatgcatgactttatgcctct

SEQ ID NO: 4218220 - DNA, 25 bp, Homo sapien
gtagccgacccactgtaggccactt

SEQ ID NO: 4218221 - DNA, 25 bp, Homo sapien
catgctcggagtttgtacaaagtgc

SEQ ID NO: 4218222 - DNA, 25 bp, Homo sapien
gtgaaggtgtattcggtagccgacc

SEQ ID NO: 4218223 - DNA, 25 bp, Homo sapien
tgtgtccgccggtactgatgcagca

SEQ ID NO: 4218224 - DNA, 25 bp, Homo sapien
caaaaccctcggtggtcgacattga

SEQ ID NO: 4218225 - DNA, 25 bp, Homo sapien
gacctggtgcaatgcttagtgtgcg

SEQ ID NO: 4218226 - DNA, 25 bp, Homo sapien
tgcgaacagggagactttcagaaca

SEQ ID NO: 4218227 - DNA, 25 bp, Homo sapien
acttctttgtgctttggtctaccca

SEQ ID NO: 4218228 - DNA, 25 bp, Homo sapien
tccacgctgtactctgagacctcac

SEQ ID NO: 4218229 - DNA, 25 bp, Homo sapien
cagccactttccgatgcaggaacat

SEQ ID NO: 4218230 - DNA, 25 bp, Homo sapien
gacctcacagccactttccgatgca

SEQ ID NO: 4218231 - DNA, 25 bp, Homo sapien
cacgctgtactctgagacctcacag

SEQ ID NO: 4218232 - DNA, 25 bp, Homo sapien
aggctacgtcttcgggctccgtcat

SEQ ID NO: 4218233 - DNA, 25 bp, Homo sapien
aagcaggttgccgacggtgcactcc

SEQ ID NO: 4218234 - DNA, 25 bp, Homo sapien
cctcacccggaagcgatacacggtt

SEQ ID NO: 4218235 - DNA, 25 bp, Homo sapien
catggtacacttccgaggctacgtc

SEQ ID NO: 4218236 - DNA, 25 bp, Homo sapien
tctatttatttgcatggagcccatc

SEQ ID NO: 4218237 - DNA, 25 bp, Homo sapien
acaaaccactggcactttggacggg

SEQ ID NO: 4218238 - DNA, 25 bp, Homo sapien
ccaaaagcctcacagttactgggac

SEQ ID NO: 4218239 - DNA, 25 bp, Homo sapien
ggagaaatccagttttgggcactct

SEQ ID NO: 4218240 - DNA, 25 bp, Homo sapien
tggacctcagaaggtgactacagcg

SEQ ID NO: 4218241 - DNA, 25 bp, Homo sapien
caccagcccagttgcacatttatct

SEQ ID NO: 4218242 - DNA, 25 bp, Homo sapien
ggaataaacccaagctgaagatagt

SEQ ID NO: 4218243 - DNA, 25 bp, Homo sapien
gacacaacagtgtgctcatcactat

SEQ ID NO: 4218244 - DNA, 25 bp, Homo sapien
acacatccatcaggtgtacaagaaa

SEQ ID NO: 4218245 - DNA, 25 bp, Homo sapien
acatccatcaggtgtacaagaaata

SEQ ID NO: 4218246 - DNA, 25 bp, Homo sapien
aacccactaagacacatccatcagg

SEQ ID NO: 4218247 - DNA, 25 bp, Homo sapien
tcccaacccactaagacacatccat

SEQ ID NO: 4218248 - DNA, 25 bp, Homo sapien
tttcaaaacgggtgtctgtcccatg

SEQ ID NO: 4218249 - DNA, 25 bp, Homo sapien
tgtagtctacagcaatactgtgcag

SEQ ID NO: 4218250 - DNA, 25 bp, Homo sapien
tgtgcagcaggcaacaggtctctta

SEQ ID NO: 4218251 - DNA, 25 bp, Homo sapien
tccaacctgtactctgagatgtcag

SEQ ID NO: 4218252 - DNA, 25 bp, Homo sapien
ggacaagttcactgtacggccctgc

SEQ ID NO: 4218253 - DNA, 25 bp, Homo sapien
cccagttcagtacaaggcacgcaga

SEQ ID NO: 4218254 - DNA, 25 bp, Homo sapien
tattgcacggctcttcccagttcag

SEQ ID NO: 4218255 - DNA, 25 bp, Homo sapien
gacgctggcgtctggcaaaggacaa

SEQ ID NO: 4218256 - DNA, 25 bp, Homo sapien
ctggaaggagatctttcataacatg

SEQ ID NO: 4218257 - DNA, 25 bp, Homo sapien
ggaaggagatctttcataacatgca

SEQ ID NO: 4218258 - DNA, 25 bp, Homo sapien
gagatctttcataacatgcatggtg

SEQ ID NO: 4218259 - DNA, 25 bp, Homo sapien
tctttcataacatgcatggtggtgt

SEQ ID NO: 4218260 - DNA, 25 bp, Homo sapien
caaaaccgtccagtgagtccctgaa

SEQ ID NO: 4218261 - DNA, 25 bp, Homo sapien
cacttggtcattttccccgagaggt

SEQ ID NO: 4218262 - DNA, 25 bp, Homo sapien
tctgggctcttagaaacagctggga

SEQ ID NO: 4218263 - DNA, 25 bp, Homo sapien
gagacaatactctggacatctgggc

SEQ ID NO: 4218264 - DNA, 25 bp, Homo sapien
catgtgttccctcagttgaacccct

SEQ ID NO: 4218265 - DNA, 25 bp, Homo sapien
gttccctcagttgaacccctgagct

SEQ ID NO: 4218266 - DNA, 25 bp, Homo sapien
aacatgtgttccctcagttgaaccc

SEQ ID NO: 4218267 - DNA, 25 bp, Homo sapien
tgtgttccctcagttgaacccctga

SEQ ID NO: 4218268 - DNA, 25 bp, Homo sapien
gctttctggtacgtggaagatgttt

SEQ ID NO: 4218269 - DNA, 25 bp, Homo sapien
tctgaggtgctttctggtacgtgga

SEQ ID NO: 4218270 - DNA, 25 bp, Homo sapien
ttctccataacagaactatcctctg

SEQ ID NO: 4218271 - DNA, 25 bp, Homo sapien
ctttccatagttcctacactactaa

SEQ ID NO: 4218272 - DNA, 25 bp, Homo sapien
tcaaagctatcttataaggaaaagg

SEQ ID NO: 4218273 - DNA, 25 bp, Homo sapien
aaaggtggcattctcccaatgtgag

SEQ ID NO: 4218274 - DNA, 25 bp, Homo sapien
ttcaatttccatctgtctaaaatgg

SEQ ID NO: 4218275 - DNA, 25 bp, Homo sapien
gctcaatatactagccttggcatat

SEQ ID NO: 4218276 - DNA, 25 bp, Homo sapien
tctgtcctccagctgtagtgtgtac

SEQ ID NO: 4218277 - DNA, 25 bp, Homo sapien
taatgaactgactaaatggtccagc

SEQ ID NO: 4218278 - DNA, 25 bp, Homo sapien
agcagcagcacattctagcctagga

SEQ ID NO: 4218279 - DNA, 25 bp, Homo sapien
ggagttactgtctccccattttagc

SEQ ID NO: 4218280 - DNA, 25 bp, Homo sapien
tgaggcactagtgggctgctgcccc

SEQ ID NO: 4218281 - DNA, 25 bp, Homo sapien
ctatgaggcactagtgggctgctgc

SEQ ID NO: 4218282 - DNA, 25 bp, Homo sapien
cttggggcagagccttcacttccca

SEQ ID NO: 4218283 - DNA, 25 bp, Homo sapien
ttggggcagagccttcacttcccac

SEQ ID NO: 4218284 - DNA, 25 bp, Homo sapien
tcttaaaatgcacaagctgatcctg

SEQ ID NO: 4218285 - DNA, 25 bp, Homo sapien
aatttacgttcttcccgcctcagtg

SEQ ID NO: 4218286 - DNA, 25 bp, Homo sapien
caactccgattctgttagggcagca

SEQ ID NO: 4218287 - DNA, 25 bp, Homo sapien
gacaggaagcagcatcaactccgat

SEQ ID NO: 4218288 - DNA, 25 bp, Homo sapien
gaaatggatagtattcgccctcact

SEQ ID NO: 4218289 - DNA, 25 bp, Homo sapien
gcatttgggaacgaacggtgctcaa

SEQ ID NO: 4218290 - DNA, 25 bp, Homo sapien
taccgactaagcatgaacgtgccaa

SEQ ID NO: 4218291 - DNA, 25 bp, Homo sapien
gatgttggcaagagtccccgtttac

SEQ ID NO: 4218292 - DNA, 25 bp, Homo sapien
tgcccatgaagcttcagaggcatca

SEQ ID NO: 4218293 - DNA, 25 bp, Homo sapien
gtgcccatgaagcttcagaggcatc

SEQ ID NO: 4218294 - DNA, 25 bp, Homo sapien
tgtgcccatgaagcttcagaggcat

SEQ ID NO: 4218295 - DNA, 25 bp, Homo sapien
caatatctctgaggggtcttctact

SEQ ID NO: 4218296 - DNA, 25 bp, Homo sapien
tatctctgaggggtcttctactcta

SEQ ID NO: 4218297 - DNA, 25 bp, Homo sapien
aatatctctgaggggtcttctactc

SEQ ID NO: 4218298 - DNA, 25 bp, Homo sapien
atctctgaggggtcttctactctac

SEQ ID NO: 4218299 - DNA, 25 bp, Homo sapien
tgtgcattgcttcaaccctggggaa

SEQ ID NO: 4218300 - DNA, 25 bp, Homo sapien
agtgtgcattgcttcaaccctgggg

SEQ ID NO: 4218301 - DNA, 25 bp, Homo sapien
gtgtgcattgcttcaaccctgggga

SEQ ID NO: 4218302 - DNA, 25 bp, Homo sapien
cagtgtgcattgcttcaaccctggg

SEQ ID NO: 4218303 - DNA, 25 bp, Homo sapien
tgttctgagagaccacggacatcac

SEQ ID NO: 4218304 - DNA, 25 bp, Homo sapien
tgaagtacaggcagagacgcttcct

SEQ ID NO: 4218305 - DNA, 25 bp, Homo sapien
aaagtcagccgcatggtaagaggca

SEQ ID NO: 4218306 - DNA, 25 bp, Homo sapien
cgcttccttggaacacactggtgag

SEQ ID NO: 4218307 - DNA, 25 bp, Homo sapien
taatgtagcccactgtctactccgg

SEQ ID NO: 4218308 - DNA, 25 bp, Homo sapien
gaataagcatgcgtctaagcagtcc

SEQ ID NO: 4218309 - DNA, 25 bp, Homo sapien
aaatcatgatctgctcgttgctctg

SEQ ID NO: 4218310 - DNA, 25 bp, Homo sapien
catgtaattaaccagatactgagcc

SEQ ID NO: 4218311 - DNA, 25 bp, Homo sapien
ttattttcagtgaaggcggagttag

SEQ ID NO: 4218312 - DNA, 25 bp, Homo sapien
tgcaattccccatggagaggaactt

SEQ ID NO: 4218313 - DNA, 25 bp, Homo sapien
caattccccatggagaggaacttgg

SEQ ID NO: 4218314 - DNA, 25 bp, Homo sapien
tgaaggcggagttaggcagctccag

SEQ ID NO: 4218315 - DNA, 25 bp, Homo sapien
tactaccctaatgaagacatccttg

SEQ ID NO: 4218316 - DNA, 25 bp, Homo sapien
cagcctctgcaatcaagttcctgag

SEQ ID NO: 4218317 - DNA, 25 bp, Homo sapien
tatccacgtgtgtattcatcagcct

SEQ ID NO: 4218318 - DNA, 25 bp, Homo sapien
ttaacaaagcctgtcagagtcaatg

SEQ ID NO: 4218319 - DNA, 25 bp, Homo sapien
gatatttaggattatggatcgttga

SEQ ID NO: 4218320 - DNA, 25 bp, Homo sapien
ggattatggatcgttgagaacacat

SEQ ID NO: 4218321 - DNA, 25 bp, Homo sapien
ccattcctcaactgctaaggagata

SEQ ID NO: 4218322 - DNA, 25 bp, Homo sapien
cattcctcaactgctaaggagatat

SEQ ID NO: 4218323 - DNA, 25 bp, Homo sapien
ttctgaaggagtagcatgtgaattc

SEQ ID NO: 4218324 - DNA, 25 bp, Homo sapien
taggtttctgagaagggcccttctc

SEQ ID NO: 4218325 - DNA, 25 bp, Homo sapien
gaattccgtcagtctctggaccttg

SEQ ID NO: 4218326 - DNA, 25 bp, Homo sapien
ggttgtgctgaaggtataggtttct

SEQ ID NO: 4218327 - DNA, 25 bp, Homo sapien
cacctttcattgatggtaccgtctc

SEQ ID NO: 4218328 - DNA, 25 bp, Homo sapien
cagaatgtagttaacagggtcacct

SEQ ID NO: 4218329 - DNA, 25 bp, Homo sapien
tccaaccaatacctgcagaatgtag

SEQ ID NO: 4218330 - DNA, 25 bp, Homo sapien
ccttctaactgtgttactcgaggtg

SEQ ID NO: 4218331 - DNA, 25 bp, Homo sapien
catccgctgatgttaatcgacactg

SEQ ID NO: 4218332 - DNA, 25 bp, Homo sapien
tgttaatcgacactggtagatgtca

SEQ ID NO: 4218333 - DNA, 25 bp, Homo sapien
gacatcatccgctgatgttaatcga

SEQ ID NO: 4218334 - DNA, 25 bp, Homo sapien
gctgatgttaatcgacactggtaga

SEQ ID NO: 4218335 - DNA, 25 bp, Homo sapien
taattaaaatcagctgcttgcccca

SEQ ID NO: 4218336 - DNA, 25 bp, Homo sapien
gaaaaacagaaagcgaatcacctag

SEQ ID NO: 4218337 - DNA, 25 bp, Homo sapien
tctttacgcaacaaatctgagcacc

SEQ ID NO: 4218338 - DNA, 25 bp, Homo sapien
gcttgccccacattgtgacacctga

SEQ ID NO: 4218339 - DNA, 25 bp, Homo sapien
caatgggcctataaactcttagagt

SEQ ID NO: 4218340 - DNA, 25 bp, Homo sapien
gatgagaggcaagggtaccgttact

SEQ ID NO: 4218341 - DNA, 25 bp, Homo sapien
ctattgagggcataatgttgggcac

SEQ ID NO: 4218342 - DNA, 25 bp, Homo sapien
cagaattacatgactatgggaggga

SEQ ID NO: 4218343 - DNA, 25 bp, Homo sapien
gaacagtgcatactcggctgctgga

SEQ ID NO: 4218344 - DNA, 25 bp, Homo sapien
gcaagaatccataacccttaattca

SEQ ID NO: 4218345 - DNA, 25 bp, Homo sapien
gaaatcctgtaaataacagggagct

SEQ ID NO: 4218346 - DNA, 25 bp, Homo sapien
aagtaatacccagacaactgaaagc

SEQ ID NO: 4218347 - DNA, 25 bp, Homo sapien
aggcacccttatgggcttttcctct

SEQ ID NO: 4218348 - DNA, 25 bp, Homo sapien
tttgacaaaggcacccttatgggct

SEQ ID NO: 4218349 - DNA, 25 bp, Homo sapien
tttcctcttgactcaatccaattta

SEQ ID NO: 4218350 - DNA, 25 bp, Homo sapien
ctcaatccaatttaaacggcatggc

SEQ ID NO: 4218351 - DNA, 25 bp, Homo sapien
aacccacagtacttaggaactaatg

SEQ ID NO: 4218352 - DNA, 25 bp, Homo sapien
ctgtgcagctctgcgcatcagggca

SEQ ID NO: 4218353 - DNA, 25 bp, Homo sapien
cagcaggccacgctttgtgtccctt

SEQ ID NO: 4218354 - DNA, 25 bp, Homo sapien
cccaggactgtgcagctctgcgcat

SEQ ID NO: 4218355 - DNA, 25 bp, Homo sapien
taacatgtagcaacctcctaggacg

SEQ ID NO: 4218356 - DNA, 25 bp, Homo sapien
tggcactcggaagcattaagcagac

SEQ ID NO: 4218357 - DNA, 25 bp, Homo sapien
cccattgttatggtgactgccgcaa

SEQ ID NO: 4218358 - DNA, 25 bp, Homo sapien
gcaaaccccttacggtcctgagaga

SEQ ID NO: 4218359 - DNA, 25 bp, Homo sapien
taataggccactcaccagtactggt

SEQ ID NO: 4218360 - DNA, 25 bp, Homo sapien
tgacaactggatacattacaaacgc

SEQ ID NO: 4218361 - DNA, 25 bp, Homo sapien
tgttagatccgcatgaggagtgcac

SEQ ID NO: 4218362 - DNA, 25 bp, Homo sapien
tccagcaggatgattttttgacaac

SEQ ID NO: 4218363 - DNA, 25 bp, Homo sapien
tgtctctagaagaatcttggtttag

SEQ ID NO: 4218364 - DNA, 25 bp, Homo sapien
attaatttatagcaacactgttgtc

SEQ ID NO: 4218365 - DNA, 25 bp, Homo sapien
ctgttgtctctagaagaatcttggt

SEQ ID NO: 4218366 - DNA, 25 bp, Homo sapien
tagcaacactgttgtctctagaaga

SEQ ID NO: 4218367 - DNA, 25 bp, Homo sapien
catacgcggaacctgtagtctgtgt

SEQ ID NO: 4218368 - DNA, 25 bp, Homo sapien
cacaatgatggctgcaaactgttca

SEQ ID NO: 4218369 - DNA, 25 bp, Homo sapien
cctgagaggtgtctaaacagcgacg

SEQ ID NO: 4218370 - DNA, 25 bp, Homo sapien
cattttgggatcatctaagctcccc

SEQ ID NO: 4218371 - DNA, 25 bp, Homo sapien
agatccagggagagaatctaggctc

SEQ ID NO: 4218372 - DNA, 25 bp, Homo sapien
catggccaggcaaacccacagaaat

SEQ ID NO: 4218373 - DNA, 25 bp, Homo sapien
gatttcttatacaggcagctcatag

SEQ ID NO: 4218374 - DNA, 25 bp, Homo sapien
tgggcagaggcactaaactgtcacc

SEQ ID NO: 4218375 - DNA, 25 bp, Homo sapien
cactacgtcaatataggcacacaga

SEQ ID NO: 4218376 - DNA, 25 bp, Homo sapien
tggtcatagtgggtcatagcacaca

SEQ ID NO: 4218377 - DNA, 25 bp, Homo sapien
cctgaggtactcgaacattatggac

SEQ ID NO: 4218378 - DNA, 25 bp, Homo sapien
tgttgccaaggaacaagactgacct

SEQ ID NO: 4218379 - DNA, 25 bp, Homo sapien
tgactggaatttcttgtgccaggga

SEQ ID NO: 4218380 - DNA, 25 bp, Homo sapien
ggcagtttgcttcacatgactggaa

SEQ ID NO: 4218381 - DNA, 25 bp, Homo sapien
catacagagaagagtcagagcatca

SEQ ID NO: 4218382 - DNA, 25 bp, Homo sapien
gaatgtatgtccaacagtgaggtaa

SEQ ID NO: 4218383 - DNA, 25 bp, Homo sapien
aatcaccttttagttggcccatgga

SEQ ID NO: 4218384 - DNA, 25 bp, Homo sapien
gcctggcctccaaaaacacgtgaat

SEQ ID NO: 4218385 - DNA, 25 bp, Homo sapien
tgttgttgaatgagacctgcaggaa

SEQ ID NO: 4218386 - DNA, 25 bp, Homo sapien
tgattgtggctcacagtcctccaag

SEQ ID NO: 4218387 - DNA, 25 bp, Homo sapien
acatgtccttcacatagtagcagga

SEQ ID NO: 4218388 - DNA, 25 bp, Homo sapien
caccatacatctggcaaagggttaa

SEQ ID NO: 4218389 - DNA, 25 bp, Homo sapien
gatttaattaactcccattgagtcc

SEQ ID NO: 4218390 - DNA, 25 bp, Homo sapien
gatatacaagtggtcaacagataca

SEQ ID NO: 4218391 - DNA, 25 bp, Homo sapien
gctcaaggaactagcaactacactc

SEQ ID NO: 4218392 - DNA, 25 bp, Homo sapien
gctggcaagccaataaatctctcaa

SEQ ID NO: 4218393 - DNA, 25 bp, Homo sapien
tcatgcctcgtgtaaacgttcagga

SEQ ID NO: 4218394 - DNA, 25 bp, Homo sapien
tcaggaagttccaccaaaatgggta

SEQ ID NO: 4218395 - DNA, 25 bp, Homo sapien
gaacgtctggtcgaaatcagtagaa

SEQ ID NO: 4218396 - DNA, 25 bp, Homo sapien
aacttaactgggtgattagtgaccg

SEQ ID NO: 4218397 - DNA, 25 bp, Homo sapien
caagtttggtgcctgaaagactctc

SEQ ID NO: 4218398 - DNA, 25 bp, Homo sapien
caatttaaattgcaacaccagccag

SEQ ID NO: 4218399 - DNA, 25 bp, Homo sapien
tatgattacttggacttccagaccc

SEQ ID NO: 4218400 - DNA, 25 bp, Homo sapien
agttttgctgcttatatcccattgc

SEQ ID NO: 4218401 - DNA, 25 bp, Homo sapien
tattggttcacaactatggaatgga

SEQ ID NO: 4218402 - DNA, 25 bp, Homo sapien
cataatcctgtgcaatacttagtca

SEQ ID NO: 4218403 - DNA, 25 bp, Homo sapien
taaatgtcctgttctgtatgctcag

SEQ ID NO: 4218404 - DNA, 25 bp, Homo sapien
cacatttcaagtatccagtagctcg

SEQ ID NO: 4218405 - DNA, 25 bp, Homo sapien
cactcagaacagtacagctctagag

SEQ ID NO: 4218406 - DNA, 25 bp, Homo sapien
cagtagctcgaggttaccactcaga

SEQ ID NO: 4218407 - DNA, 25 bp, Homo sapien
tcatacagctttgtaaggaagtcag

SEQ ID NO: 4218408 - DNA, 25 bp, Homo sapien
tataaacctgctagtgtcctccaag

SEQ ID NO: 4218409 - DNA, 25 bp, Homo sapien
tctggaccggtgattctcgtgatat

SEQ ID NO: 4218410 - DNA, 25 bp, Homo sapien
gggatcctaagctctcacctacgag

SEQ ID NO: 4218411 - DNA, 25 bp, Homo sapien
taaatgctgtttcccactgcggata

SEQ ID NO: 4218412 - DNA, 25 bp, Homo sapien
gaacttttccaagatccagctcaga

SEQ ID NO: 4218413 - DNA, 25 bp, Homo sapien
tagaccataatgctccagggataat

SEQ ID NO: 4218414 - DNA, 25 bp, Homo sapien
caacagggctcattgtacatgcctc

SEQ ID NO: 4218415 - DNA, 25 bp, Homo sapien
cgatcaggcactatacactgtgtct

SEQ ID NO: 4218416 - DNA, 25 bp, Homo sapien
tgacgatcaggcactatacactgtg

SEQ ID NO: 4218417 - DNA, 25 bp, Homo sapien
acagcccagacttgacgatcaggca

SEQ ID NO: 4218418 - DNA, 25 bp, Homo sapien
ccagacttgacgatcaggcactata

SEQ ID NO: 4218419 - DNA, 25 bp, Homo sapien
tttgaccacagtattccctgctgcc

SEQ ID NO: 4218420 - DNA, 25 bp, Homo sapien
cagaaatatttgtatcctcctccaa

SEQ ID NO: 4218421 - DNA, 25 bp, Homo sapien
ccagaaatatttgtatcctcctcca

SEQ ID NO: 4218422 - DNA, 25 bp, Homo sapien
ctccagaaatatttgtatcctcctc

SEQ ID NO: 4218423 - DNA, 25 bp, Homo sapien
gaaatatttgtatcctcctccaacc

SEQ ID NO: 4218424 - DNA, 25 bp, Homo sapien
tcttctctctattgaggagaatttg

SEQ ID NO: 4218425 - DNA, 25 bp, Homo sapien
taagatacgggaagcagctgtggac

SEQ ID NO: 4218426 - DNA, 25 bp, Homo sapien
ttctggacaactgtggattccttct

SEQ ID NO: 4218427 - DNA, 25 bp, Homo sapien
gtggactggctatttttgaaggaca

SEQ ID NO: 4218428 - DNA, 25 bp, Homo sapien
ggattccttcttgtagaacatgaat

SEQ ID NO: 4218429 - DNA, 25 bp, Homo sapien
gcctggctgagacagcacatatctg

SEQ ID NO: 4218430 - DNA, 25 bp, Homo sapien
ccctgattacttccttaatcttttg

SEQ ID NO: 4218431 - DNA, 25 bp, Homo sapien
ctccctgattacttccttaatcttt

SEQ ID NO: 4218432 - DNA, 25 bp, Homo sapien
ttttgtcattgatctcaacattctg

SEQ ID NO: 4218433 - DNA, 25 bp, Homo sapien
tacctcatatcagtttgctagcaga

SEQ ID NO: 4218434 - DNA, 25 bp, Homo sapien
tagtgtatcacagtagtagcctcca

SEQ ID NO: 4218435 - DNA, 25 bp, Homo sapien
ggcaccactaaaagatcgcagtttg

SEQ ID NO: 4218436 - DNA, 25 bp, Homo sapien
tcaggatgatacactatgaagatgt

SEQ ID NO: 4218437 - DNA, 25 bp, Homo sapien
cagaaagtgacatgacatggctgcc

SEQ ID NO: 4218438 - DNA, 25 bp, Homo sapien
catttggctgacatcacatggcgga

SEQ ID NO: 4218439 - DNA, 25 bp, Homo sapien
tccccactggttagtacaaaggctg

SEQ ID NO: 4218440 - DNA, 25 bp, Homo sapien
cagaagccatggatgagccaagtca

SEQ ID NO: 4218441 - DNA, 25 bp, Homo sapien
tgatcacaggcagctttcaactctg

SEQ ID NO: 4218442 - DNA, 25 bp, Homo sapien
tgtaatcaaaccgaagcttggccag

SEQ ID NO: 4218443 - DNA, 25 bp, Homo sapien
gatgtgaagtgaaaaggcataccgc

SEQ ID NO: 4218444 - DNA, 25 bp, Homo sapien
tctgaatcatatgtgactgagtgcc

SEQ ID NO: 4218445 - DNA, 25 bp, Homo sapien
ctagacaaccaccgtgtttgtaaca

SEQ ID NO: 4218446 - DNA, 25 bp, Homo sapien
agagcagtcaccatggaaatccact

SEQ ID NO: 4218447 - DNA, 25 bp, Homo sapien
aagagcagtcaccatggaaatccac

SEQ ID NO: 4218448 - DNA, 25 bp, Homo sapien
gacaaccaccgtgtttgtaacagca

SEQ ID NO: 4218449 - DNA, 25 bp, Homo sapien
ttatttgtgcacattcaattgaaaa

SEQ ID NO: 4218450 - DNA, 25 bp, Homo sapien
ggtgcccattttcagcatacaaaaa

SEQ ID NO: 4218451 - DNA, 25 bp, Homo sapien
aacctaaggtagtgcacactgtgac

SEQ ID NO: 4218452 - DNA, 25 bp, Homo sapien
gataaaacacattagctcaaaatgg

SEQ ID NO: 4218453 - DNA, 25 bp, Homo sapien
taccattgccattccctgactcaga

SEQ ID NO: 4218454 - DNA, 25 bp, Homo sapien
tctggtaccattgccattccctgac

SEQ ID NO: 4218455 - DNA, 25 bp, Homo sapien
tggtaccattgccattccctgactc

SEQ ID NO: 4218456 - DNA, 25 bp, Homo sapien
tctctggtaccattgccattccctg

SEQ ID NO: 4218457 - DNA, 25 bp, Homo sapien
tccaggcgagcagttttggtctcca

SEQ ID NO: 4218458 - DNA, 25 bp, Homo sapien
tagatttgcctctgacatgtccagg

SEQ ID NO: 4218459 - DNA, 25 bp, Homo sapien
tagcattagatcctcccctagattt

SEQ ID NO: 4218460 - DNA, 25 bp, Homo sapien
ggtctccaggaactgttgtaggctg

SEQ ID NO: 4218461 - DNA, 25 bp, Homo sapien
aaacagaacttgtcattttggttgc

SEQ ID NO: 4218462 - DNA, 25 bp, Homo sapien
tcaaacagaacttgtcattttggtt

SEQ ID NO: 4218463 - DNA, 25 bp, Homo sapien
agaacttgtcattttggttgccttt

SEQ ID NO: 4218464 - DNA, 25 bp, Homo sapien
acagaacttgtcattttggttgcct

SEQ ID NO: 4218465 - DNA, 25 bp, Homo sapien
tgcatggcgtgtgcatattctctta

SEQ ID NO: 4218466 - DNA, 25 bp, Homo sapien
gcataacttgtgtccccattgtgga

SEQ ID NO: 4218467 - DNA, 25 bp, Homo sapien
ggagtagtttgggtgatgcatggcg

SEQ ID NO: 4218468 - DNA, 25 bp, Homo sapien
caggatagttgcataacttgtgtcc

SEQ ID NO: 4218469 - DNA, 25 bp, Homo sapien
ctccccattcactatcccagaagat

SEQ ID NO: 4218470 - DNA, 25 bp, Homo sapien
gaagatgccaggatcccatcaatca

SEQ ID NO: 4218471 - DNA, 25 bp, Homo sapien
tcactatcccagaagatgccaggat

SEQ ID NO: 4218472 - DNA, 25 bp, Homo sapien
actatcccagaagatgccaggatcc

SEQ ID NO: 4218473 - DNA, 25 bp, Homo sapien
taacttgggcaacattggcaatgct

SEQ ID NO: 4218474 - DNA, 25 bp, Homo sapien
gtatgaattcgctgggcttttggtc

SEQ ID NO: 4218475 - DNA, 25 bp, Homo sapien
tgggttgctccctcatcaatcaagt

SEQ ID NO: 4218476 - DNA, 25 bp, Homo sapien
tgtttcttcttatccagctcaatct

SEQ ID NO: 4218477 - DNA, 25 bp, Homo sapien
ttccaacgatgtcccccgtagtcat

SEQ ID NO: 4218478 - DNA, 25 bp, Homo sapien
acattatggtacagttttccaacga

SEQ ID NO: 4218479 - DNA, 25 bp, Homo sapien
ctgtgtttttggcagcgccccacat

SEQ ID NO: 4218480 - DNA, 25 bp, Homo sapien
gtgtttttggcagcgccccacatgg

SEQ ID NO: 4218481 - DNA, 25 bp, Homo sapien
tagccacacgactcttcccttgggt

SEQ ID NO: 4218482 - DNA, 25 bp, Homo sapien
tttatcttttagtgggctcctgatg

SEQ ID NO: 4218483 - DNA, 25 bp, Homo sapien
ctcctgatggtggtttggagctcca

SEQ ID NO: 4218484 - DNA, 25 bp, Homo sapien
acagccatagccacacgactcttcc

SEQ ID NO: 4218485 - DNA, 25 bp, Homo sapien
cacatcatccaggtggtcataagct

SEQ ID NO: 4218486 - DNA, 25 bp, Homo sapien
catcatccaggtggtcataagctac

SEQ ID NO: 4218487 - DNA, 25 bp, Homo sapien
acatcatccaggtggtcataagcta

SEQ ID NO: 4218488 - DNA, 25 bp, Homo sapien
gcacatcatccaggtggtcataagc

SEQ ID NO: 4218489 - DNA, 25 bp, Homo sapien
cacacaaaactgttgggcagcagat

SEQ ID NO: 4218490 - DNA, 25 bp, Homo sapien
tggaaccatccttatgtagacacac

SEQ ID NO: 4218491 - DNA, 25 bp, Homo sapien
gctacaattccatgcctgtcccagg

SEQ ID NO: 4218492 - DNA, 25 bp, Homo sapien
cacaaaactgttgggcagcagatgc

SEQ ID NO: 4218493 - DNA, 25 bp, Homo sapien
aatcctgagggaaacagtaacaata

SEQ ID NO: 4218494 - DNA, 25 bp, Homo sapien
tggaacaatgctatctaaatcctga

SEQ ID NO: 4218495 - DNA, 25 bp, Homo sapien
gaggaattcgctcatataattatgg

SEQ ID NO: 4218496 - DNA, 25 bp, Homo sapien
aattgaaaggttaatcagcttatcc

SEQ ID NO: 4218497 - DNA, 25 bp, Homo sapien
ttccatttacaaactattttatatg

SEQ ID NO: 4218498 - DNA, 25 bp, Homo sapien
cttccatttacaaactattttatat

SEQ ID NO: 4218499 - DNA, 25 bp, Homo sapien
tccatttacaaactattttatatgt

SEQ ID NO: 4218500 - DNA, 25 bp, Homo sapien
catttacaaactattttatatgtta

SEQ ID NO: 4218501 - DNA, 25 bp, Homo sapien
aagttatagatacacttcggggctt

SEQ ID NO: 4218502 - DNA, 25 bp, Homo sapien
tttgaaagaacactaaacatactgt

SEQ ID NO: 4218503 - DNA, 25 bp, Homo sapien
ggcttttgaaagaacactaaacata

SEQ ID NO: 4218504 - DNA, 25 bp, Homo sapien
tatagatacacttcggggcttttga

SEQ ID NO: 4218505 - DNA, 25 bp, Homo sapien
cttctttaagaagtaagttatgtca

SEQ ID NO: 4218506 - DNA, 25 bp, Homo sapien
tgctttttgcacaactcatgtctgt

SEQ ID NO: 4218507 - DNA, 25 bp, Homo sapien
tgaaacaactgaaaggaagccctgt

SEQ ID NO: 4218508 - DNA, 25 bp, Homo sapien
gattttgaataagtcctcaccaaga

SEQ ID NO: 4218509 - DNA, 25 bp, Homo sapien
gacacctgcatcatcgaaggtcttt

SEQ ID NO: 4218510 - DNA, 25 bp, Homo sapien
acctgcatcatcgaaggtctttttt

SEQ ID NO: 4218511 - DNA, 25 bp, Homo sapien
cacctgcatcatcgaaggtcttttt

SEQ ID NO: 4218512 - DNA, 25 bp, Homo sapien
ctgcatcatcgaaggtctttttttc

SEQ ID NO: 4218513 - DNA, 25 bp, Homo sapien
ggcaccacggagagaaagtagaacc

SEQ ID NO: 4218514 - DNA, 25 bp, Homo sapien
tgagtaatgatacagggcaccacgg

SEQ ID NO: 4218515 - DNA, 25 bp, Homo sapien
taaagtcttcactgccagtgggaac

SEQ ID NO: 4218516 - DNA, 25 bp, Homo sapien
gatttgagttgaggatctctgcctg

SEQ ID NO: 4218517 - DNA, 25 bp, Homo sapien
ccagctctggatcatagagtgacct

SEQ ID NO: 4218518 - DNA, 25 bp, Homo sapien
tactgatacctacagctacagaaag

SEQ ID NO: 4218519 - DNA, 25 bp, Homo sapien
cagagtgggccaatctctctgttct

SEQ ID NO: 4218520 - DNA, 25 bp, Homo sapien
cattaggacgttctttttagaagca

SEQ ID NO: 4218521 - DNA, 25 bp, Homo sapien
tacagctcggtgttgaggaacaagc

SEQ ID NO: 4218522 - DNA, 25 bp, Homo sapien
cagattactcaagggttgtcagtgc

SEQ ID NO: 4218523 - DNA, 25 bp, Homo sapien
tgaccctgttgacagaagccctaga

SEQ ID NO: 4218524 - DNA, 25 bp, Homo sapien
ggcttgcttcagttggcaccgtgca

SEQ ID NO: 4218525 - DNA, 25 bp, Homo sapien
tggagagtttattaggcaagaagga

SEQ ID NO: 4218526 - DNA, 25 bp, Homo sapien
cacatggtgttatccggaggcagcc

SEQ ID NO: 4218527 - DNA, 25 bp, Homo sapien
atgacacgtggcacacaccgggaca

SEQ ID NO: 4218528 - DNA, 25 bp, Homo sapien
tgtagcctgcaaaacacctggtcca

SEQ ID NO: 4218529 - DNA, 25 bp, Homo sapien
gatggagtttcaccatgttagccag

SEQ ID NO: 4218530 - DNA, 25 bp, Homo sapien
gtagatgagactacaggtgctgcca

SEQ ID NO: 4218531 - DNA, 25 bp, Homo sapien
cgagtagatgagactacaggtgctg

SEQ ID NO: 4218532 - DNA, 25 bp, Homo sapien
atggagtttcaccatgttagccagg

SEQ ID NO: 4218533 - DNA, 25 bp, Homo sapien
tagtcctaatggcaggtgaccttgc

SEQ ID NO: 4218534 - DNA, 25 bp, Homo sapien
gaaacataggtgtcttcagttgacc

SEQ ID NO: 4218535 - DNA, 25 bp, Homo sapien
tatagcaattcacaagacgaacagc

SEQ ID NO: 4218536 - DNA, 25 bp, Homo sapien
tcttatatcaaggagctccactggg

SEQ ID NO: 4218537 - DNA, 25 bp, Homo sapien
aaagtgctgggatcacaggcataag

SEQ ID NO: 4218538 - DNA, 25 bp, Homo sapien
aagtgatcctcttgctttggcttcc

SEQ ID NO: 4218539 - DNA, 25 bp, Homo sapien
attttttaggagagacaaagtcttg

SEQ ID NO: 4218540 - DNA, 25 bp, Homo sapien
caggcataagccaccgtgcctacct

SEQ ID NO: 4218541 - DNA, 25 bp, Homo sapien
cctctctgaactgttatggttttag

SEQ ID NO: 4218542 - DNA, 25 bp, Homo sapien
ctctctgaactgttatggttttagt

SEQ ID NO: 4218543 - DNA, 25 bp, Homo sapien
ctctgaactgttatggttttagtgt

SEQ ID NO: 4218544 - DNA, 25 bp, Homo sapien
tctctgaactgttatggttttagtg

SEQ ID NO: 4218545 - DNA, 25 bp, Homo sapien
tagcattgtcacttgacgtcttccc

SEQ ID NO: 4218546 - DNA, 25 bp, Homo sapien
catacaagggaaagagtccagtggt

SEQ ID NO: 4218547 - DNA, 25 bp, Homo sapien
cctacaaacatgtagtttacatagc

SEQ ID NO: 4218548 - DNA, 25 bp, Homo sapien
ggacaacatatctgtctttctacag

SEQ ID NO: 4218549 - DNA, 25 bp, Homo sapien
cactttgcaaggacaccgtagaggg

SEQ ID NO: 4218550 - DNA, 25 bp, Homo sapien
cacagcaagtggtgaggtgcagccc

SEQ ID NO: 4218551 - DNA, 25 bp, Homo sapien
tataagaaacgcgtgaatgagcagc

SEQ ID NO: 4218552 - DNA, 25 bp, Homo sapien
tagggatctctcgtttcacccgagg

SEQ ID NO: 4218553 - DNA, 25 bp, Homo sapien
cttaggatagccctggactggtgag

SEQ ID NO: 4218554 - DNA, 25 bp, Homo sapien
caaagaaaggagtctacgctgctgg

SEQ ID NO: 4218555 - DNA, 25 bp, Homo sapien
catggacttctgtttatcggactcg

SEQ ID NO: 4218556 - DNA, 25 bp, Homo sapien
gctaccgatggaatgcatttggacc

SEQ ID NO: 4218557 - DNA, 25 bp, Homo sapien
gcatacactctgactaggccaaatt

SEQ ID NO: 4218558 - DNA, 25 bp, Homo sapien
ggtaaaaagttgcatacactctgac

SEQ ID NO: 4218559 - DNA, 25 bp, Homo sapien
gaggtaaaaagttgcatacactctg

SEQ ID NO: 4218560 - DNA, 25 bp, Homo sapien
aaagttgcatacactctgactaggc

SEQ ID NO: 4218561 - DNA, 25 bp, Homo sapien
agagatatgtttcctcaatgactcc

SEQ ID NO: 4218562 - DNA, 25 bp, Homo sapien
tgccaggatatctctccctaacaaa

SEQ ID NO: 4218563 - DNA, 25 bp, Homo sapien
gatatctctccctaacaaaggagtg

SEQ ID NO: 4218564 - DNA, 25 bp, Homo sapien
gagatatgtttcctcaatgactccc

SEQ ID NO: 4218565 - DNA, 25 bp, Homo sapien
gcgaacacagactataccaccagga

SEQ ID NO: 4218566 - DNA, 25 bp, Homo sapien
taaagccaccatgagactgtccaca

SEQ ID NO: 4218567 - DNA, 25 bp, Homo sapien
catatgcagagtcagatggttcacc

SEQ ID NO: 4218568 - DNA, 25 bp, Homo sapien
ggcaatattctagacacccatggta

SEQ ID NO: 4218569 - DNA, 25 bp, Homo sapien
ggtactgccaggtatgaggcatccc

SEQ ID NO: 4218570 - DNA, 25 bp, Homo sapien
acaggtactgccaggtatgaggcat

SEQ ID NO: 4218571 - DNA, 25 bp, Homo sapien
atttcctcccatggggacaggtact

SEQ ID NO: 4218572 - DNA, 25 bp, Homo sapien
tactgccaggtatgaggcatcccat

SEQ ID NO: 4218573 - DNA, 25 bp, Homo sapien
agtttgcagagaagtgcccggatgt

SEQ ID NO: 4218574 - DNA, 25 bp, Homo sapien
tcaaataagcccaacgactcgggcg

SEQ ID NO: 4218575 - DNA, 25 bp, Homo sapien
cgattggcgcgtgatgtcaacctct

SEQ ID NO: 4218576 - DNA, 25 bp, Homo sapien
caggtgtttctgtgactaccgcata

SEQ ID NO: 4218577 - DNA, 25 bp, Homo sapien
aaataccgccattcctcgccggcgg

SEQ ID NO: 4218578 - DNA, 25 bp, Homo sapien
cgccacaaccgattcaaaaactaag

SEQ ID NO: 4218579 - DNA, 25 bp, Homo sapien
tcaaacgccgactcctctcacaaat

SEQ ID NO: 4218580 - DNA, 25 bp, Homo sapien
ctaggagttccacctcttcaaacgc

SEQ ID NO: 4218581 - DNA, 25 bp, Homo sapien
acgtcgaccgcaggcaaaagagccc

SEQ ID NO: 4218582 - DNA, 25 bp, Homo sapien
gtcgaccgcaggcaaaagagccctt

SEQ ID NO: 4218583 - DNA, 25 bp, Homo sapien
ggacgtcgaccgcaggcaaaagagc

SEQ ID NO: 4218584 - DNA, 25 bp, Homo sapien
gaccgcaggcaaaagagcccttggc

SEQ ID NO: 4218585 - DNA, 25 bp, Homo sapien
cagtctaggtaacaagaggtagact

SEQ ID NO: 4218586 - DNA, 25 bp, Homo sapien
gtctaggtaacaagaggtagactcc

SEQ ID NO: 4218587 - DNA, 25 bp, Homo sapien
ccagtctaggtaacaagaggtagac

SEQ ID NO: 4218588 - DNA, 25 bp, Homo sapien
ctaggtaacaagaggtagactccgt

SEQ ID NO: 4218589 - DNA, 25 bp, Homo sapien
tttaaggactggaagaggaaaatca

SEQ ID NO: 4218590 - DNA, 25 bp, Homo sapien
gactggaagaggaaaatcaaaaata

SEQ ID NO: 4218591 - DNA, 25 bp, Homo sapien
taaggactggaagaggaaaatcaaa

SEQ ID NO: 4218592 - DNA, 25 bp, Homo sapien
ctgctttaaggactggaagaggaaa

SEQ ID NO: 4218593 - DNA, 25 bp, Homo sapien
acatatgaagtagatccaataagta

SEQ ID NO: 4218594 - DNA, 25 bp, Homo sapien
gaagagtctgccaagctagtcctcc

SEQ ID NO: 4218595 - DNA, 25 bp, Homo sapien
tcccagtagtggatgttaatacact

SEQ ID NO: 4218596 - DNA, 25 bp, Homo sapien
cagtaactttagaatcaaaaatgga

SEQ ID NO: 4218597 - DNA, 25 bp, Homo sapien
cactcttgtttcaatctgaggcatc

SEQ ID NO: 4218598 - DNA, 25 bp, Homo sapien
gcttcttgaaccaatatcactcttg

SEQ ID NO: 4218599 - DNA, 25 bp, Homo sapien
atatcactcttgtttcaatctgagg

SEQ ID NO: 4218600 - DNA, 25 bp, Homo sapien
tttccagcttcttgaaccaatatca

SEQ ID NO: 4218601 - DNA, 25 bp, Homo sapien
catccgattttccaggacaactttc

SEQ ID NO: 4218602 - DNA, 25 bp, Homo sapien
ttttcatccgattttccaggacaac

SEQ ID NO: 4218603 - DNA, 25 bp, Homo sapien
taatttttcatccgattttccagga

SEQ ID NO: 4218604 - DNA, 25 bp, Homo sapien
ttatctttataacagggacttccat

SEQ ID NO: 4218605 - DNA, 25 bp, Homo sapien
gccctagcaaactaaaacagctgga

SEQ ID NO: 4218606 - DNA, 25 bp, Homo sapien
gcaaggctagtgtgatgtgctaaat

SEQ ID NO: 4218607 - DNA, 25 bp, Homo sapien
taatccaacctggtgtcccaataag

SEQ ID NO: 4218608 - DNA, 25 bp, Homo sapien
aacctacacacaccttaatcttgga

SEQ ID NO: 4218609 - DNA, 25 bp, Homo sapien
taatacaactggtggtccaataact

SEQ ID NO: 4218610 - DNA, 25 bp, Homo sapien
gaaagtccgtgactacaaatacatt

SEQ ID NO: 4218611 - DNA, 25 bp, Homo sapien
gaggtcattaaagacagaatcctga

SEQ ID NO: 4218612 - DNA, 25 bp, Homo sapien
tacattttcaaattccggagaatcc

SEQ ID NO: 4218613 - DNA, 25 bp, Homo sapien
caacgggcgacatgaaaatggcaaa

SEQ ID NO: 4218614 - DNA, 25 bp, Homo sapien
cctaaatccagtaaagcatagtact

SEQ ID NO: 4218615 - DNA, 25 bp, Homo sapien
cttgtacaatacaacgggcgacatg

SEQ ID NO: 4218616 - DNA, 25 bp, Homo sapien
tactagattcatcatacttgtacaa

SEQ ID NO: 4218617 - DNA, 25 bp, Homo sapien
gtgtacaatttgccaccaaatgtgt

SEQ ID NO: 4218618 - DNA, 25 bp, Homo sapien
gatggaccaatgtcaccaacctgac

SEQ ID NO: 4218619 - DNA, 25 bp, Homo sapien
caatttgccaccaaatgtgtaactt

SEQ ID NO: 4218620 - DNA, 25 bp, Homo sapien
tgtgatggaccaatgtcaccaacct

SEQ ID NO: 4218621 - DNA, 25 bp, Homo sapien
tagggtaaattgaagagtacactaa

SEQ ID NO: 4218622 - DNA, 25 bp, Homo sapien
ctaagattcaatcctagtgagagta

SEQ ID NO: 4218623 - DNA, 25 bp, Homo sapien
aagtcactaaaaccttagatatgag

SEQ ID NO: 4218624 - DNA, 25 bp, Homo sapien
tatgaagggcacttagacagccagg

SEQ ID NO: 4218625 - DNA, 25 bp, Homo sapien
cattccgcctttcccaagctttata

SEQ ID NO: 4218626 - DNA, 25 bp, Homo sapien
ttggagtacctagactcacagcaac

SEQ ID NO: 4218627 - DNA, 25 bp, Homo sapien
cataattggagtacctagactcaca

SEQ ID NO: 4218628 - DNA, 25 bp, Homo sapien
tgttcattccgcctttcccaagctt

SEQ ID NO: 4218629 - DNA, 25 bp, Homo sapien
aattcatttctaaagtcatcaactg

SEQ ID NO: 4218630 - DNA, 25 bp, Homo sapien
catttctaaagtcatcaactgctgc

SEQ ID NO: 4218631 - DNA, 25 bp, Homo sapien
tttctaaagtcatcaactgctgcat

SEQ ID NO: 4218632 - DNA, 25 bp, Homo sapien
ttcatttctaaagtcatcaactgct

SEQ ID NO: 4218633 - DNA, 25 bp, Homo sapien
actatattctcttcaactacaaggt

SEQ ID NO: 4218634 - DNA, 25 bp, Homo sapien
tctttgaaggttcaaagggaagatc

SEQ ID NO: 4218635 - DNA, 25 bp, Homo sapien
tttcatctccaagcggtaaatattt

SEQ ID NO: 4218636 - DNA, 25 bp, Homo sapien
ctacaaggtgagtgcatctttcatc

SEQ ID NO: 4218637 - DNA, 25 bp, Homo sapien
ttttatcagagaagctattaatagt

SEQ ID NO: 4218638 - DNA, 25 bp, Homo sapien
attttatcagagaagctattaatag

SEQ ID NO: 4218639 - DNA, 25 bp, Homo sapien
tattttatcagagaagctattaata

SEQ ID NO: 4218640 - DNA, 25 bp, Homo sapien
tttatcagagaagctattaatagtg

SEQ ID NO: 4218641 - DNA, 25 bp, Homo sapien
gctcgggcatccatttgaatgcttc

SEQ ID NO: 4218642 - DNA, 25 bp, Homo sapien
ccagctcgggcatccatttgaatgc

SEQ ID NO: 4218643 - DNA, 25 bp, Homo sapien
cgggcatccatttgaatgcttcccc

SEQ ID NO: 4218644 - DNA, 25 bp, Homo sapien
ttctccagctcgggcatccatttga

SEQ ID NO: 4218645 - DNA, 25 bp, Homo sapien
ttagagaaagcattgacactgattt

SEQ ID NO: 4218646 - DNA, 25 bp, Homo sapien
tgttaggggtatttagagaaagcat

SEQ ID NO: 4218647 - DNA, 25 bp, Homo sapien
ctgttaggggtatttagagaaagca

SEQ ID NO: 4218648 - DNA, 25 bp, Homo sapien
gagaaagcattgacactgatttctt

SEQ ID NO: 4218649 - DNA, 25 bp, Homo sapien
ggggtggaaatggtgacacgtctgt

SEQ ID NO: 4218650 - DNA, 25 bp, Homo sapien
gaaagctgagcaagtgtttctttta

SEQ ID NO: 4218651 - DNA, 25 bp, Homo sapien
gtgacacgtctgtctctcttgaaag

SEQ ID NO: 4218652 - DNA, 25 bp, Homo sapien
ttgaaagctgagcaagtgtttcttt

SEQ ID NO: 4218653 - DNA, 25 bp, Homo sapien
ctccatagttaatgctagactctgg

SEQ ID NO: 4218654 - DNA, 25 bp, Homo sapien
gaatgctcagctgatgggcgcttac

SEQ ID NO: 4218655 - DNA, 25 bp, Homo sapien
gatatctaggagtgaccctatggaa

SEQ ID NO: 4218656 - DNA, 25 bp, Homo sapien
taatgctagactctggtgtgttgga

SEQ ID NO: 4218657 - DNA, 25 bp, Homo sapien
taaagctcttttgcaacttgccacc

SEQ ID NO: 4218658 - DNA, 25 bp, Homo sapien
gagtggagcttttagaagacttagt

SEQ ID NO: 4218659 - DNA, 25 bp, Homo sapien
ggagtggagcttttagaagacttag

SEQ ID NO: 4218660 - DNA, 25 bp, Homo sapien
aaagctcttttgcaacttgccacct

SEQ ID NO: 4218661 - DNA, 25 bp, Homo sapien
caaggataggtccaccacgttgtcc

SEQ ID NO: 4218662 - DNA, 25 bp, Homo sapien
aaaatagtcttaatctcctctggtg

SEQ ID NO: 4218663 - DNA, 25 bp, Homo sapien
tacatcaaagatatctgggatgcta

SEQ ID NO: 4218664 - DNA, 25 bp, Homo sapien
tttatcttagtgtgtacatcaaaga

SEQ ID NO: 4218665 - DNA, 25 bp, Homo sapien
gctctcatcccaattaactataagg

SEQ ID NO: 4218666 - DNA, 25 bp, Homo sapien
ttttgctctcatcccaattaactat

SEQ ID NO: 4218667 - DNA, 25 bp, Homo sapien
ttgctctcatcccaattaactataa

SEQ ID NO: 4218668 - DNA, 25 bp, Homo sapien
ctctcatcccaattaactataaggt

SEQ ID NO: 4218669 - DNA, 25 bp, Homo sapien
gagggtaggaggaaggagaggaaca

SEQ ID NO: 4218670 - DNA, 25 bp, Homo sapien
aggtggagggtaggaggaaggagag

SEQ ID NO: 4218671 - DNA, 25 bp, Homo sapien
ggtaggaggaaggagaggaacagga

SEQ ID NO: 4218672 - DNA, 25 bp, Homo sapien
tggagggtaggaggaaggagaggaa

SEQ ID NO: 4218673 - DNA, 25 bp, Homo sapien
ttccttgctcatttcaaagaagttt

SEQ ID NO: 4218674 - DNA, 25 bp, Homo sapien
aagttcaacaaggctctgccgtcca

SEQ ID NO: 4218675 - DNA, 25 bp, Homo sapien
cctctgtactggtcggataagaagt

SEQ ID NO: 4218676 - DNA, 25 bp, Homo sapien
cactgggtaacctctgtactggtcg

SEQ ID NO: 4218677 - DNA, 25 bp, Homo sapien
aaagtaatgcaacactgggtaacct

SEQ ID NO: 4218678 - DNA, 25 bp, Homo sapien
agtgatccaatagctttttctaaag

SEQ ID NO: 4218679 - DNA, 25 bp, Homo sapien
cattacttccttcagtgatccaata

SEQ ID NO: 4218680 - DNA, 25 bp, Homo sapien
tcatcagctgtatgcttcttaagat

SEQ ID NO: 4218681 - DNA, 25 bp, Homo sapien
ttttcatcagctgtatgcttcttaa

SEQ ID NO: 4218682 - DNA, 25 bp, Homo sapien
aaaaatttgcttttgagcttctgtt

SEQ ID NO: 4218683 - DNA, 25 bp, Homo sapien
catctacttcataaacaacatcaaa

SEQ ID NO: 4218684 - DNA, 25 bp, Homo sapien
tcataaacaacatcaaaaatttgct

SEQ ID NO: 4218685 - DNA, 25 bp, Homo sapien
ttttctcttatcctcattaatatgc

SEQ ID NO: 4218686 - DNA, 25 bp, Homo sapien
ttcggtgagaagataaaagattagc

SEQ ID NO: 4218687 - DNA, 25 bp, Homo sapien
gaagagagttacttgttctcctctg

SEQ ID NO: 4218688 - DNA, 25 bp, Homo sapien
gagaaattgtttcaacccgctgtac

SEQ ID NO: 4218689 - DNA, 25 bp, Homo sapien
cccgctgtactaagcttcggtgaga

SEQ ID NO: 4218690 - DNA, 25 bp, Homo sapien
tattatactatgtgaagtacatctt

SEQ ID NO: 4218691 - DNA, 25 bp, Homo sapien
aatcagtagtgttattatactatgt

SEQ ID NO: 4218692 - DNA, 25 bp, Homo sapien
atcagtagtgttattatactatgtg

SEQ ID NO: 4218693 - DNA, 25 bp, Homo sapien
gtcgggtttggccatgaggactcct

SEQ ID NO: 4218694 - DNA, 25 bp, Homo sapien
taggtgaatatgcttaagagaagct

SEQ ID NO: 4218695 - DNA, 25 bp, Homo sapien
taaaagtgccaataaccttgtgccg

SEQ ID NO: 4218696 - DNA, 25 bp, Homo sapien
gtgaatatgcttaagagaagctggg

SEQ ID NO: 4218697 - DNA, 25 bp, Homo sapien
tatgtccaataccttcttaatctga

SEQ ID NO: 4218698 - DNA, 25 bp, Homo sapien
ttatgtccaataccttcttaatctg

SEQ ID NO: 4218699 - DNA, 25 bp, Homo sapien
ctcttatgtccaataccttcttaat

SEQ ID NO: 4218700 - DNA, 25 bp, Homo sapien
tcttatgtccaataccttcttaatc

SEQ ID NO: 4218701 - DNA, 25 bp, Homo sapien
atggagtaaattaaacctacaatga

SEQ ID NO: 4218702 - DNA, 25 bp, Homo sapien
ttagcagtctgaccaactatattta

SEQ ID NO: 4218703 - DNA, 25 bp, Homo sapien
ggatagaggtgcaagaacaattact

SEQ ID NO: 4218704 - DNA, 25 bp, Homo sapien
accaagaatgtatccgaccggcata

SEQ ID NO: 4218705 - DNA, 25 bp, Homo sapien
gacagatgtatgcaagtttagttcc

SEQ ID NO: 4218706 - DNA, 25 bp, Homo sapien
gtttagttccctcagagcaatgaaa

SEQ ID NO: 4218707 - DNA, 25 bp, Homo sapien
tatgcaagtttagttccctcagagc

SEQ ID NO: 4218708 - DNA, 25 bp, Homo sapien
aaatgaactatcacttctccacttt

SEQ ID NO: 4218709 - DNA, 25 bp, Homo sapien
ataaccataaacattaagtgtcact

SEQ ID NO: 4218710 - DNA, 25 bp, Homo sapien
taaccataaacattaagtgtcactc

SEQ ID NO: 4218711 - DNA, 25 bp, Homo sapien
tcttttggaagttcatctgatgtca

SEQ ID NO: 4218712 - DNA, 25 bp, Homo sapien
gctacatgtcgacacagcatcttta

SEQ ID NO: 4218713 - DNA, 25 bp, Homo sapien
agttcatctgatgtcatctggaaac

SEQ ID NO: 4218714 - DNA, 25 bp, Homo sapien
ggtgttagctacatgtcgacacagc

SEQ ID NO: 4218715 - DNA, 25 bp, Homo sapien
atcacagggtacattacaagaagtc

SEQ ID NO: 4218716 - DNA, 25 bp, Homo sapien
gctataagactatgagggcctacct

SEQ ID NO: 4218717 - DNA, 25 bp, Homo sapien
ttttagccatgtctaagagtatcaa

SEQ ID NO: 4218718 - DNA, 25 bp, Homo sapien
caagaagtcccaaaatcttcactga

SEQ ID NO: 4218719 - DNA, 25 bp, Homo sapien
actcaatgtactgtccatatctttt

SEQ ID NO: 4218720 - DNA, 25 bp, Homo sapien
attctggatcagcagtataaataag

SEQ ID NO: 4218721 - DNA, 25 bp, Homo sapien
tactcaatgtactgtccatatcttt

SEQ ID NO: 4218722 - DNA, 25 bp, Homo sapien
ttccctccactgagccgtgggatgt

SEQ ID NO: 4218723 - DNA, 25 bp, Homo sapien
tcattacatgcttatcattgctgga

SEQ ID NO: 4218724 - DNA, 25 bp, Homo sapien
cgtgggatgtcataagagcccttcg

SEQ ID NO: 4218725 - DNA, 25 bp, Homo sapien
aatgatgatgtgctagaaagacgac

SEQ ID NO: 4218726 - DNA, 25 bp, Homo sapien
caaggatttgaacactagggttcca

SEQ ID NO: 4218727 - DNA, 25 bp, Homo sapien
gctacaggtggcttcgagaaagcta

SEQ ID NO: 4218728 - DNA, 25 bp, Homo sapien
taataacttgccaaaacacatacag

SEQ ID NO: 4218729 - DNA, 25 bp, Homo sapien
tatttatgtgtcttacctgcggaaa

SEQ ID NO: 4218730 - DNA, 25 bp, Homo sapien
ccaattacattgcttgtggaaacag

SEQ ID NO: 4218731 - DNA, 25 bp, Homo sapien
aggagtactgagagcgcccaccagt

SEQ ID NO: 4218732 - DNA, 25 bp, Homo sapien
cataaacatgcttagtaaatccaat

SEQ ID NO: 4218733 - DNA, 25 bp, Homo sapien
agagtttaggcgctgaacataaaca

SEQ ID NO: 4218734 - DNA, 25 bp, Homo sapien
gtatctctgaaaaactagctcggaa

SEQ ID NO: 4218735 - DNA, 25 bp, Homo sapien
tagtatctctgaaaaactagctcgg

SEQ ID NO: 4218736 - DNA, 25 bp, Homo sapien
cttctagtatctctgaaaaactagc

SEQ ID NO: 4218737 - DNA, 25 bp, Homo sapien
tagctcggaaagcagaatgacgtac

SEQ ID NO: 4218738 - DNA, 25 bp, Homo sapien
aggcttgtttccattagtggttggc

SEQ ID NO: 4218739 - DNA, 25 bp, Homo sapien
tttccattagtggttggcaaatctc

SEQ ID NO: 4218740 - DNA, 25 bp, Homo sapien
cttgtttccattagtggttggcaaa

SEQ ID NO: 4218741 - DNA, 25 bp, Homo sapien
tgtttccattagtggttggcaaatc

SEQ ID NO: 4218742 - DNA, 25 bp, Homo sapien
gcttaagttctcatcaacaaggttg

SEQ ID NO: 4218743 - DNA, 25 bp, Homo sapien
tgtaagagctagtaaggtaattggc

SEQ ID NO: 4218744 - DNA, 25 bp, Homo sapien
tgagtgaaacagcaatccttctgga

SEQ ID NO: 4218745 - DNA, 25 bp, Homo sapien
gttttacatccctgagaagtcttaa

SEQ ID NO: 4218746 - DNA, 25 bp, Homo sapien
caaatgagttgtagatctacttaac

SEQ ID NO: 4218747 - DNA, 25 bp, Homo sapien
gagttgtagatctacttaacgtatg

SEQ ID NO: 4218748 - DNA, 25 bp, Homo sapien
tctacttaacgtatgacttctcctt

SEQ ID NO: 4218749 - DNA, 25 bp, Homo sapien
gtagatctacttaacgtatgacttc

SEQ ID NO: 4218750 - DNA, 25 bp, Homo sapien
tccacatgctagatcttgaaaacgc

SEQ ID NO: 4218751 - DNA, 25 bp, Homo sapien
tataccgtactctctctgaaacagc

SEQ ID NO: 4218752 - DNA, 25 bp, Homo sapien
tactctatcagggttgcaaagctac

SEQ ID NO: 4218753 - DNA, 25 bp, Homo sapien
catgaagggtacaaacagtctttac

SEQ ID NO: 4218754 - DNA, 25 bp, Homo sapien
tctgaattactgactataaaaaggc

SEQ ID NO: 4218755 - DNA, 25 bp, Homo sapien
aagtggcacatacatggcatagaaa

SEQ ID NO: 4218756 - DNA, 25 bp, Homo sapien
catttactactctcagaagtggcac

SEQ ID NO: 4218757 - DNA, 25 bp, Homo sapien
ggctattgtgaaagatatcacactt

SEQ ID NO: 4218758 - DNA, 25 bp, Homo sapien
cctggtgctggggtgtactaagctt

SEQ ID NO: 4218759 - DNA, 25 bp, Homo sapien
gtgtactaagctttaccattaaaca

SEQ ID NO: 4218760 - DNA, 25 bp, Homo sapien
ctaagctttaccattaaacacaacg

SEQ ID NO: 4218761 - DNA, 25 bp, Homo sapien
tgctggggtgtactaagctttacca

SEQ ID NO: 4218762 - DNA, 25 bp, Homo sapien
tccatgggggccacctgtccgtccc

SEQ ID NO: 4218763 - DNA, 25 bp, Homo sapien
tccgtccctgctgctgcgactccat

SEQ ID NO: 4218764 - DNA, 25 bp, Homo sapien
tcttcgccacgtgaggctccatggg

SEQ ID NO: 4218765 - DNA, 25 bp, Homo sapien
ccctgctgctgcgactccatgccat

SEQ ID NO: 4218766 - DNA, 25 bp, Homo sapien
aggaacccgtctctcaggcactcgt

SEQ ID NO: 4218767 - DNA, 25 bp, Homo sapien
actggcattggaattgtgtttggca

SEQ ID NO: 4218768 - DNA, 25 bp, Homo sapien
aggcactcgtctctcaggcactcat

SEQ ID NO: 4218769 - DNA, 25 bp, Homo sapien
ttcagggactggcattggaattgtg

SEQ ID NO: 4218770 - DNA, 25 bp, Homo sapien
actggggcactgttcatttctccgg

SEQ ID NO: 4218771 - DNA, 25 bp, Homo sapien
tctccggctcagatccactgttgca

SEQ ID NO: 4218772 - DNA, 25 bp, Homo sapien
gaaaaaatgcagaccactggggcac

SEQ ID NO: 4218773 - DNA, 25 bp, Homo sapien
gctgggcgccgagaccaagggctaa

SEQ ID NO: 4218774 - DNA, 25 bp, Homo sapien
tgacataccctggaggatttacccc

SEQ ID NO: 4218775 - DNA, 25 bp, Homo sapien
ctgcaatgtgtagggcactggtgtc

SEQ ID NO: 4218776 - DNA, 25 bp, Homo sapien
ttgataagggtttcctgcaatgtgt

SEQ ID NO: 4218777 - DNA, 25 bp, Homo sapien
catttatagaggttgataagggttt

SEQ ID NO: 4218778 - DNA, 25 bp, Homo sapien
cttcatccactgaggaggaagaaag

SEQ ID NO: 4218779 - DNA, 25 bp, Homo sapien
ccctccttcatccactgaggaggaa

SEQ ID NO: 4218780 - DNA, 25 bp, Homo sapien
tttccctccttcatccactgaggag

SEQ ID NO: 4218781 - DNA, 25 bp, Homo sapien
atccactgaggaggaagaaagatgt

SEQ ID NO: 4218782 - DNA, 25 bp, Homo sapien
cacaggctcgtacttcttcacaggc

SEQ ID NO: 4218783 - DNA, 25 bp, Homo sapien
ggcttttcagcactcttagaagaca

SEQ ID NO: 4218784 - DNA, 25 bp, Homo sapien
taataatgtggggatctgatacgat

SEQ ID NO: 4218785 - DNA, 25 bp, Homo sapien
tgatacgataatgcactacatgttg

SEQ ID NO: 4218786 - DNA, 25 bp, Homo sapien
gattgctgaggtgatgcagggaaga

SEQ ID NO: 4218787 - DNA, 25 bp, Homo sapien
tcagattcgtgggaaggtgaaagaa

SEQ ID NO: 4218788 - DNA, 25 bp, Homo sapien
gtccacagatttcctggtgtgaata

SEQ ID NO: 4218789 - DNA, 25 bp, Homo sapien
tccaggtgtccacagatttcctggt

SEQ ID NO: 4218790 - DNA, 25 bp, Homo sapien
acctgtccaatagtttttgctctcc

SEQ ID NO: 4218791 - DNA, 25 bp, Homo sapien
tccatagagttctgtcccactaaca

SEQ ID NO: 4218792 - DNA, 25 bp, Homo sapien
ccatagagttctgtcccactaacat

SEQ ID NO: 4218793 - DNA, 25 bp, Homo sapien
ctccaaaaccacctgtccaatagtt

SEQ ID NO: 4218794 - DNA, 25 bp, Homo sapien
atgagaaggtggtctggcaatgaca

SEQ ID NO: 4218795 - DNA, 25 bp, Homo sapien
cagttagatgagaaggtggtctggc

SEQ ID NO: 4218796 - DNA, 25 bp, Homo sapien
tttctctgtcagtagtgagtcacag

SEQ ID NO: 4218797 - DNA, 25 bp, Homo sapien
gtagtgagtcacagttagatgagaa

SEQ ID NO: 4218798 - DNA, 25 bp, Homo sapien
gctgttcctcatggagtggatttgg

SEQ ID NO: 4218799 - DNA, 25 bp, Homo sapien
tggatttgggggcccagcactttct

SEQ ID NO: 4218800 - DNA, 25 bp, Homo sapien
ggagctgttcctcatggagtggatt

SEQ ID NO: 4218801 - DNA, 25 bp, Homo sapien
ttcccactcagtacataggcctttg

SEQ ID NO: 4218802 - DNA, 25 bp, Homo sapien
cttcaagacccagtgcagacaccat

SEQ ID NO: 4218803 - DNA, 25 bp, Homo sapien
tctgctcttccttcaagacccagtg

SEQ ID NO: 4218804 - DNA, 25 bp, Homo sapien
ggaattcttggtttctaaatgccca

SEQ ID NO: 4218805 - DNA, 25 bp, Homo sapien
taaatgcccaaactctgctcttcct

SEQ ID NO: 4218806 - DNA, 25 bp, Homo sapien
gcactcctgctctcagacttttgct

SEQ ID NO: 4218807 - DNA, 25 bp, Homo sapien
tcctccttgtttactatggctgctg

SEQ ID NO: 4218808 - DNA, 25 bp, Homo sapien
tggctgctgtaccaatgagctgcac

SEQ ID NO: 4218809 - DNA, 25 bp, Homo sapien
aatgagctgcactcctgctctcaga

SEQ ID NO: 4218810 - DNA, 25 bp, Homo sapien
ggctttatacacaggtgacatttcg

SEQ ID NO: 4218811 - DNA, 25 bp, Homo sapien
catttcggacctatgaggtgtttgc

SEQ ID NO: 4218812 - DNA, 25 bp, Homo sapien
tatcctctatctgctcttggatggc

SEQ ID NO: 4218813 - DNA, 25 bp, Homo sapien
tgaagaattgcactcccatacccat

SEQ ID NO: 4218814 - DNA, 25 bp, Homo sapien
aacggaatggtaatgttgctgtaca

SEQ ID NO: 4218815 - DNA, 25 bp, Homo sapien
tttttgcaatccatcacaaggagac

SEQ ID NO: 4218816 - DNA, 25 bp, Homo sapien
tgattacgatcattgtcctgagagc

SEQ ID NO: 4218817 - DNA, 25 bp, Homo sapien
ctgagagcagattcatgttgtgcct

SEQ ID NO: 4218818 - DNA, 25 bp, Homo sapien
atgggctgaatttctcacgtgaaag

SEQ ID NO: 4218819 - DNA, 25 bp, Homo sapien
tctcacgtgaaaggcattggcagca

SEQ ID NO: 4218820 - DNA, 25 bp, Homo sapien
gaatttctcacgtgaaaggcattgg

SEQ ID NO: 4218821 - DNA, 25 bp, Homo sapien
taatatttggagtggaagggaccag

SEQ ID NO: 4218822 - DNA, 25 bp, Homo sapien
aagttgaaaggatggtcattccaga

SEQ ID NO: 4218823 - DNA, 25 bp, Homo sapien
gcaaagttgaaaggatggtcattcc

SEQ ID NO: 4218824 - DNA, 25 bp, Homo sapien
gttgaaaggatggtcattccagaga

SEQ ID NO: 4218825 - DNA, 25 bp, Homo sapien
gaaaggatggtcattccagagagaa

SEQ ID NO: 4218826 - DNA, 25 bp, Homo sapien
aaaagcgttaggctctgcatcagct

SEQ ID NO: 4218827 - DNA, 25 bp, Homo sapien
aattgttcacgaatagaaggtccca

SEQ ID NO: 4218828 - DNA, 25 bp, Homo sapien
tgccaacaaggtagatgccatgaga

SEQ ID NO: 4218829 - DNA, 25 bp, Homo sapien
gcatcagctttgaccataggaaacg

SEQ ID NO: 4218830 - DNA, 25 bp, Homo sapien
cagtaaaactagtaagctctcccct

SEQ ID NO: 4218831 - DNA, 25 bp, Homo sapien
tagtattcgcttgcaaagagaggcg

SEQ ID NO: 4218832 - DNA, 25 bp, Homo sapien
ggcgtgtctgtgatgatcagctgca

SEQ ID NO: 4218833 - DNA, 25 bp, Homo sapien
taaagaagcatctaaggctaggtgc

SEQ ID NO: 4218834 - DNA, 25 bp, Homo sapien
ggagagcagaatccatggaagaacc

SEQ ID NO: 4218835 - DNA, 25 bp, Homo sapien
ccatcgtcttcaggttggagagcag

SEQ ID NO: 4218836 - DNA, 25 bp, Homo sapien
catcgtcttcaggttggagagcaga

SEQ ID NO: 4218837 - DNA, 25 bp, Homo sapien
gagcagaatccatggaagaacccat

SEQ ID NO: 4218838 - DNA, 25 bp, Homo sapien
ggcatgtatttgatccaaggttgag

SEQ ID NO: 4218839 - DNA, 25 bp, Homo sapien
tgagtgttcccatgaaggagatagt

SEQ ID NO: 4218840 - DNA, 25 bp, Homo sapien
gccagtaggagaggttcacttttaa

SEQ ID NO: 4218841 - DNA, 25 bp, Homo sapien
tatttgaggtagtatgccagtagga

SEQ ID NO: 4218842 - DNA, 25 bp, Homo sapien
ttccaagaactgatgcttgactgtc

SEQ ID NO: 4218843 - DNA, 25 bp, Homo sapien
ggttccctctgctggtagggaaatg

SEQ ID NO: 4218844 - DNA, 25 bp, Homo sapien
gctggtagggaaatgttccaagaac

SEQ ID NO: 4218845 - DNA, 25 bp, Homo sapien
gttccaagaactgatgcttgactgt

SEQ ID NO: 4218846 - DNA, 25 bp, Homo sapien
agaatttgctccacagagattagca

SEQ ID NO: 4218847 - DNA, 25 bp, Homo sapien
cagagattagcataattcccccatg

SEQ ID NO: 4218848 - DNA, 25 bp, Homo sapien
tcagaatttgctccacagagattag

SEQ ID NO: 4218849 - DNA, 25 bp, Homo sapien
ttctcagaatttgctccacagagat

SEQ ID NO: 4218850 - DNA, 25 bp, Homo sapien
ctgcctgccgctcttatcatcctcc

SEQ ID NO: 4218851 - DNA, 25 bp, Homo sapien
atcatcctccgcacctgtccttctt

SEQ ID NO: 4218852 - DNA, 25 bp, Homo sapien
tcttatcatcctccgcacctgtcct

SEQ ID NO: 4218853 - DNA, 25 bp, Homo sapien
ccgctcttatcatcctccgcacctg

SEQ ID NO: 4218854 - DNA, 25 bp, Homo sapien
cgccccaggaatctagcaggaaaat

SEQ ID NO: 4218855 - DNA, 25 bp, Homo sapien
ggctggtttctagatttactccaag

SEQ ID NO: 4218856 - DNA, 25 bp, Homo sapien
ttcctaatgtagaggtgcctgttat

SEQ ID NO: 4218857 - DNA, 25 bp, Homo sapien
gagctctctcaaataattttcctta

SEQ ID NO: 4218858 - DNA, 25 bp, Homo sapien
tagaaatgcgcttgacctcttgctc

SEQ ID NO: 4218859 - DNA, 25 bp, Homo sapien
taaagtaatagaaatgcgcttgacc

SEQ ID NO: 4218860 - DNA, 25 bp, Homo sapien
tgatgatggaaaaacttgcataaag

SEQ ID NO: 4218861 - DNA, 25 bp, Homo sapien
cttgcataaagtaatagaaatgcgc

SEQ ID NO: 4218862 - DNA, 25 bp, Homo sapien
aaattcaaactttccagccatgagg

SEQ ID NO: 4218863 - DNA, 25 bp, Homo sapien
taacaaaattcaaactttccagcca

SEQ ID NO: 4218864 - DNA, 25 bp, Homo sapien
aaaattcaaactttccagccatgag

SEQ ID NO: 4218865 - DNA, 25 bp, Homo sapien
acaaaattcaaactttccagccatg

SEQ ID NO: 4218866 - DNA, 25 bp, Homo sapien
tgatgtatagttgctcatatagtct

SEQ ID NO: 4218867 - DNA, 25 bp, Homo sapien
cttggcatgttgcatgtgtctagaa

SEQ ID NO: 4218868 - DNA, 25 bp, Homo sapien
gctatcagttacattgtctcctttt

SEQ ID NO: 4218869 - DNA, 25 bp, Homo sapien
tcttagtcttgctaaaagtttgtta

SEQ ID NO: 4218870 - DNA, 25 bp, Homo sapien
ggcacaagatgtcttcacccagcat

SEQ ID NO: 4218871 - DNA, 25 bp, Homo sapien
atccttcctctctccgccatcacac

SEQ ID NO: 4218872 - DNA, 25 bp, Homo sapien
aaggcacaagatgtcttcacccagc

SEQ ID NO: 4218873 - DNA, 25 bp, Homo sapien
gaaaggcacaagatgtcttcaccca

SEQ ID NO: 4218874 - DNA, 25 bp, Homo sapien
aaggtacagctccttgtcctcgtcg

SEQ ID NO: 4218875 - DNA, 25 bp, Homo sapien
cagctccttgtcctcgtcgttcaca

SEQ ID NO: 4218876 - DNA, 25 bp, Homo sapien
gctccttgtcctcgtcgttcacatt

SEQ ID NO: 4218877 - DNA, 25 bp, Homo sapien
gtacagctccttgtcctcgtcgttc

SEQ ID NO: 4218878 - DNA, 25 bp, Homo sapien
tcctggaggagtagtgcttccgcag

SEQ ID NO: 4218879 - DNA, 25 bp, Homo sapien
ccagtaagggcccatgtgctgagtc

SEQ ID NO: 4218880 - DNA, 25 bp, Homo sapien
taatctcagccacggcttaggccct

SEQ ID NO: 4218881 - DNA, 25 bp, Homo sapien
cttaggccctgtcttccagtaaggg

SEQ ID NO: 4218882 - DNA, 25 bp, Homo sapien
gtttgtattcacaccagaagctaaa

SEQ ID NO: 4218883 - DNA, 25 bp, Homo sapien
tcgttaaaaacagtcatcgtatgct

SEQ ID NO: 4218884 - DNA, 25 bp, Homo sapien
cagttatgtgggtaaaattggtcct

SEQ ID NO: 4218885 - DNA, 25 bp, Homo sapien
tgtcatgcctagatactattccctg

SEQ ID NO: 4218886 - DNA, 25 bp, Homo sapien
acactagtgaagatcccaaatgtaa

SEQ ID NO: 4218887 - DNA, 25 bp, Homo sapien
gaggctctatgggacatgcacacac

SEQ ID NO: 4218888 - DNA, 25 bp, Homo sapien
aggctctatgggacatgcacacact

SEQ ID NO: 4218889 - DNA, 25 bp, Homo sapien
atcttctctctccccatctccactc

SEQ ID NO: 4218890 - DNA, 25 bp, Homo sapien
cttctctctccccatctccactcat

SEQ ID NO: 4218891 - DNA, 25 bp, Homo sapien
cctcccatcttctctctccccatct

SEQ ID NO: 4218892 - DNA, 25 bp, Homo sapien
ccatcttctctctccccatctccac

SEQ ID NO: 4218893 - DNA, 25 bp, Homo sapien
gcaattgccaggttccttttttgga

SEQ ID NO: 4218894 - DNA, 25 bp, Homo sapien
ttttctgcaattgccaggttccttt

SEQ ID NO: 4218895 - DNA, 25 bp, Homo sapien
tgcaattgccaggttccttttttgg

SEQ ID NO: 4218896 - DNA, 25 bp, Homo sapien
cactggatttattgatattgtggag

SEQ ID NO: 4218897 - DNA, 25 bp, Homo sapien
tcactggatttattgatattgtgga

SEQ ID NO: 4218898 - DNA, 25 bp, Homo sapien
ttctttatctggtgaaactgtacaa

SEQ ID NO: 4218899 - DNA, 25 bp, Homo sapien
aaactgtacaatgactgttctgttc

SEQ ID NO: 4218900 - DNA, 25 bp, Homo sapien
caggcctattctgttttaaatcttt

SEQ ID NO: 4218901 - DNA, 25 bp, Homo sapien
gcctattctgttttaaatcttttga

SEQ ID NO: 4218902 - DNA, 25 bp, Homo sapien
attctgttttaaatcttttgatggt

SEQ ID NO: 4218903 - DNA, 25 bp, Homo sapien
tattctgttttaaatcttttgatgg

SEQ ID NO: 4218904 - DNA, 25 bp, Homo sapien
tctgatagtaaagccacacatttga

SEQ ID NO: 4218905 - DNA, 25 bp, Homo sapien
ctgcgaccggcctagaaggtaaatt

SEQ ID NO: 4218906 - DNA, 25 bp, Homo sapien
cctacagaattgtgcgtgacaagat

SEQ ID NO: 4218907 - DNA, 25 bp, Homo sapien
gaatgcatgtacgttagatggaaag

SEQ ID NO: 4218908 - DNA, 25 bp, Homo sapien
cttttcctctaggattatgtaccat

SEQ ID NO: 4218909 - DNA, 25 bp, Homo sapien
ctatcagcaccgagccctgaagatt

SEQ ID NO: 4218910 - DNA, 25 bp, Homo sapien
cactgtataaagctgatccctatca

SEQ ID NO: 4218911 - DNA, 25 bp, Homo sapien
tgcttaagtcaatggctgcaaaaag

SEQ ID NO: 4218912 - DNA, 25 bp, Homo sapien
taagagtttggtctgtgttgctgct

SEQ ID NO: 4218913 - DNA, 25 bp, Homo sapien
aacagggtctacctggatgcaaggg

SEQ ID NO: 4218914 - DNA, 25 bp, Homo sapien
agaggctgggaaataatagtccttg

SEQ ID NO: 4218915 - DNA, 25 bp, Homo sapien
cggtaacagggtctacctggatgca

SEQ ID NO: 4218916 - DNA, 25 bp, Homo sapien
taacagggtctacctggatgcaagg

SEQ ID NO: 4218917 - DNA, 25 bp, Homo sapien
tcctagaggtaacgtagacatgcat

SEQ ID NO: 4218918 - DNA, 25 bp, Homo sapien
ctgtctcctagaggtaacgtagaca

SEQ ID NO: 4218919 - DNA, 25 bp, Homo sapien
tctcctagaggtaacgtagacatgc

SEQ ID NO: 4218920 - DNA, 25 bp, Homo sapien
gtctcctagaggtaacgtagacatg

SEQ ID NO: 4218921 - DNA, 25 bp, Homo sapien
tcccgtatgcagaattaacctggaa

SEQ ID NO: 4218922 - DNA, 25 bp, Homo sapien
aaagcccgtggacatacagtacaat

SEQ ID NO: 4218923 - DNA, 25 bp, Homo sapien
ctttttattatgtcccgtatgcaga

SEQ ID NO: 4218924 - DNA, 25 bp, Homo sapien
ttaacctggaaagcccgtggacata

SEQ ID NO: 4218925 - DNA, 25 bp, Homo sapien
caatcactacgtcatttgaactgtg

SEQ ID NO: 4218926 - DNA, 25 bp, Homo sapien
aatatgcactatatttgttgccagc

SEQ ID NO: 4218927 - DNA, 25 bp, Homo sapien
attccagtgggccagagcaatcact

SEQ ID NO: 4218928 - DNA, 25 bp, Homo sapien
tgggccagagcaatcactacgtcat

SEQ ID NO: 4218929 - DNA, 25 bp, Homo sapien
tgttcatgggaggtttcagtgcatg

SEQ ID NO: 4218930 - DNA, 25 bp, Homo sapien
aaagttatgttcatgggaggtttca

SEQ ID NO: 4218931 - DNA, 25 bp, Homo sapien
ttcatgggaggtttcagtgcatgaa

SEQ ID NO: 4218932 - DNA, 25 bp, Homo sapien
agttatgttcatgggaggtttcagt

SEQ ID NO: 4218933 - DNA, 25 bp, Homo sapien
agcagctaggatgactggctaattt

SEQ ID NO: 4218934 - DNA, 25 bp, Homo sapien
caagagacaccatttctcgaagatc

SEQ ID NO: 4218935 - DNA, 25 bp, Homo sapien
ctagcagctaggatgactggctaat

SEQ ID NO: 4218936 - DNA, 25 bp, Homo sapien
aagagacaccatttctcgaagatcc

SEQ ID NO: 4218937 - DNA, 25 bp, Homo sapien
atctcagtgaatgcccgcttcaata

SEQ ID NO: 4218938 - DNA, 25 bp, Homo sapien
agtgaatgcccgcttcaatacaaac

SEQ ID NO: 4218939 - DNA, 25 bp, Homo sapien
agaatctcagtgaatgcccgcttca

SEQ ID NO: 4218940 - DNA, 25 bp, Homo sapien
tgaatgcccgcttcaatacaaacca

SEQ ID NO: 4218941 - DNA, 25 bp, Homo sapien
aacatcatcaaggataaaaaaccca

SEQ ID NO: 4218942 - DNA, 25 bp, Homo sapien
cctagtgcagaatttagaaacatca

SEQ ID NO: 4218943 - DNA, 25 bp, Homo sapien
ctgtttcctagtgcagaatttagaa

SEQ ID NO: 4218944 - DNA, 25 bp, Homo sapien
accatttgttgaaggactgaagtca

SEQ ID NO: 4218945 - DNA, 25 bp, Homo sapien
catagctgctatgactctggtaact

SEQ ID NO: 4218946 - DNA, 25 bp, Homo sapien
gctgctatgactctggtaacttgta

SEQ ID NO: 4218947 - DNA, 25 bp, Homo sapien
ctgctatgactctggtaacttgtac

SEQ ID NO: 4218948 - DNA, 25 bp, Homo sapien
tagctgctatgactctggtaacttg

SEQ ID NO: 4218949 - DNA, 25 bp, Homo sapien
accattgcaaagagttcttggtgac

SEQ ID NO: 4218950 - DNA, 25 bp, Homo sapien
caccattgcaaagagttcttggtga

SEQ ID NO: 4218951 - DNA, 25 bp, Homo sapien
tcaccattgcaaagagttcttggtg

SEQ ID NO: 4218952 - DNA, 25 bp, Homo sapien
ccattgcaaagagttcttggtgacc

SEQ ID NO: 4218953 - DNA, 25 bp, Homo sapien
tggagttttactgcttagctgtttg

SEQ ID NO: 4218954 - DNA, 25 bp, Homo sapien
ctggagttttactgcttagctgttt

SEQ ID NO: 4218955 - DNA, 25 bp, Homo sapien
ctggctctttctcagtccatctgaa

SEQ ID NO: 4218956 - DNA, 25 bp, Homo sapien
gaatggcctttctgccctgcatgct

SEQ ID NO: 4218957 - DNA, 25 bp, Homo sapien
cctgggaatggcctttctgccctgc

SEQ ID NO: 4218958 - DNA, 25 bp, Homo sapien
cctgcatgctctctgctctgtgcct

SEQ ID NO: 4218959 - DNA, 25 bp, Homo sapien
cacaatttaagaagacttgtccttc

SEQ ID NO: 4218960 - DNA, 25 bp, Homo sapien
gtgacttgtagccactccattgtcg

SEQ ID NO: 4218961 - DNA, 25 bp, Homo sapien
tccattgtcggcacaatttaagaag

SEQ ID NO: 4218962 - DNA, 25 bp, Homo sapien
tttctgtgacttgtagccactccat

SEQ ID NO: 4218963 - DNA, 25 bp, Homo sapien
tcccacactttttgtgtcccacatt

SEQ ID NO: 4218964 - DNA, 25 bp, Homo sapien
tttaatagtagagaattctccaact

SEQ ID NO: 4218965 - DNA, 25 bp, Homo sapien
atcccacactttttgtgtcccacat

SEQ ID NO: 4218966 - DNA, 25 bp, Homo sapien
cgtgctccggttccaggcgttttcg

SEQ ID NO: 4218967 - DNA, 25 bp, Homo sapien
tgtgaggttcgccaaaccactcaga

SEQ ID NO: 4218968 - DNA, 25 bp, Homo sapien
gcccagacgcgaggcgtcggacgct

SEQ ID NO: 4218969 - DNA, 25 bp, Homo sapien
tgagtgaacgggcacgaccgcccag

SEQ ID NO: 4218970 - DNA, 25 bp, Homo sapien
caaaccactcagagcggcgtgtgag

SEQ ID NO: 4218971 - DNA, 25 bp, Homo sapien
tcactccgtggcgttgtcgggtgca

SEQ ID NO: 4218972 - DNA, 25 bp, Homo sapien
ggtggctgcagatgcgtcccctgct

SEQ ID NO: 4218973 - DNA, 25 bp, Homo sapien
tcagctaagtgagcaatcgcctccg

SEQ ID NO: 4218974 - DNA, 25 bp, Homo sapien
tgaaactggaagacacctatgaagc

SEQ ID NO: 4218975 - DNA, 25 bp, Homo sapien
aataggaagttctcggcaatccccg

SEQ ID NO: 4218976 - DNA, 25 bp, Homo sapien
gacacgatttcctaaaaccgccaga

SEQ ID NO: 4218977 - DNA, 25 bp, Homo sapien
ttggaaaactcagctactagcctgg

SEQ ID NO: 4218978 - DNA, 25 bp, Homo sapien
ggcccttgggcacgcgtatatgtat

SEQ ID NO: 4218979 - DNA, 25 bp, Homo sapien
cctgatcctcggcttacagccgcgg

SEQ ID NO: 4218980 - DNA, 25 bp, Homo sapien
ccacaggccgggactccgaattgaa

SEQ ID NO: 4218981 - DNA, 25 bp, Homo sapien
cgaattgaagggtcaaccctccgcg

SEQ ID NO: 4218982 - DNA, 25 bp, Homo sapien
tctgctccgaagacgccaatgaaga

SEQ ID NO: 4218983 - DNA, 25 bp, Homo sapien
gtgagcgccgcacagtcgctcgctc

SEQ ID NO: 4218984 - DNA, 25 bp, Homo sapien
tttggaggcgactgcactccgcccg

SEQ ID NO: 4218985 - DNA, 25 bp, Homo sapien
actggggcgccgctctaaggctttg

SEQ ID NO: 4218986 - DNA, 25 bp, Homo sapien
tctctccggtctctccggctcggac

SEQ ID NO: 4218987 - DNA, 25 bp, Homo sapien
ccgctttctcgtaatctgttcctta

SEQ ID NO: 4218988 - DNA, 25 bp, Homo sapien
tcagcctccgtatttcgccaggaaa

SEQ ID NO: 4218989 - DNA, 25 bp, Homo sapien
tcagccgatttccatgctcttggtc

SEQ ID NO: 4218990 - DNA, 25 bp, Homo sapien
tatttcttttgtacctctcagccga

SEQ ID NO: 4218991 - DNA, 25 bp, Homo sapien
taatatattagttgctcaacgcggg

SEQ ID NO: 4218992 - DNA, 25 bp, Homo sapien
tatccctgtcaaactaaccggcgga

SEQ ID NO: 4218993 - DNA, 25 bp, Homo sapien
tctagggagtgacatcttgactgga

SEQ ID NO: 4218994 - DNA, 25 bp, Homo sapien
tcttcccaggagagtttattgccca

SEQ ID NO: 4218995 - DNA, 25 bp, Homo sapien
cctgggggatttgtcacaaatttgg

SEQ ID NO: 4218996 - DNA, 25 bp, Homo sapien
ttgagtggcctcaagcttcacaggt

SEQ ID NO: 4218997 - DNA, 25 bp, Homo sapien
ggatttgtcacaaatttggaacttg

SEQ ID NO: 4218998 - DNA, 25 bp, Homo sapien
ttggaacttgagtggcctcaagctt

SEQ ID NO: 4218999 - DNA, 25 bp, Homo sapien
cctagtagtagggattatagccact

SEQ ID NO: 4219000 - DNA, 25 bp, Homo sapien
tatagccactaggtacaacacctga

SEQ ID NO: 4219001 - DNA, 25 bp, Homo sapien
tttgcctcccctggaaagactgctg

SEQ ID NO: 4219002 - DNA, 25 bp, Homo sapien
tgttctattatagaccccaactggc

SEQ ID NO: 4219003 - DNA, 25 bp, Homo sapien
attaatatgagacagctggattgcc

SEQ ID NO: 4219004 - DNA, 25 bp, Homo sapien
gaatcccgagggatcctcttatcac

SEQ ID NO: 4219005 - DNA, 25 bp, Homo sapien
tgaagtattagaagacaatccaccc

SEQ ID NO: 4219006 - DNA, 25 bp, Homo sapien
gccttaagaagttagccaagacatc

SEQ ID NO: 4219007 - DNA, 25 bp, Homo sapien
tattcaagcacctaagacagtgtct

SEQ ID NO: 4219008 - DNA, 25 bp, Homo sapien
ttctcactagatgttggaggcactg

SEQ ID NO: 4219009 - DNA, 25 bp, Homo sapien
gacatgtaatctagctcccgtatca

SEQ ID NO: 4219010 - DNA, 25 bp, Homo sapien
ggaatacttcacactgtcgatggaa

SEQ ID NO: 4219011 - DNA, 25 bp, Homo sapien
aacacgcctggatagaattctcaga

SEQ ID NO: 4219012 - DNA, 25 bp, Homo sapien
gacctggagctagaggatagactcg

SEQ ID NO: 4219013 - DNA, 25 bp, Homo sapien
ggcagggactgtggttcatatctca

SEQ ID NO: 4219014 - DNA, 25 bp, Homo sapien
ttcactagtaggcaaaatatggcac

SEQ ID NO: 4219015 - DNA, 25 bp, Homo sapien
gaggccatactcattgcaataagag

SEQ ID NO: 4219016 - DNA, 25 bp, Homo sapien
cctgataaaggtgctagaaaatgct

SEQ ID NO: 4219017 - DNA, 25 bp, Homo sapien
tcacccactgttttactagaggcca

SEQ ID NO: 4219018 - DNA, 25 bp, Homo sapien
ggagaaacccactgaactatgaaat

SEQ ID NO: 4219019 - DNA, 25 bp, Homo sapien
gaatccatataggtggtctctccaa

SEQ ID NO: 4219020 - DNA, 25 bp, Homo sapien
gataggctaaatatgaacgtgctcc

SEQ ID NO: 4219021 - DNA, 25 bp, Homo sapien
ttcatcaagaaaggtgccctcacac

SEQ ID NO: 4219022 - DNA, 25 bp, Homo sapien
tctggaagactataagaagcgctaa

SEQ ID NO: 4219023 - DNA, 25 bp, Homo sapien
agcatagatttgtgtggtccagaac

SEQ ID NO: 4219024 - DNA, 25 bp, Homo sapien
catgaaaagattcctcgaccaattc

SEQ ID NO: 4219025 - DNA, 25 bp, Homo sapien
ggtccagaacagaataaacctgagg

SEQ ID NO: 4219026 - DNA, 25 bp, Homo sapien
tcaaaagcatagatttgtgtggtcc

SEQ ID NO: 4219027 - DNA, 25 bp, Homo sapien
acaatccagttaagaagagagagct

SEQ ID NO: 4219028 - DNA, 25 bp, Homo sapien
aaaacaatccagttaagaagagaga

SEQ ID NO: 4219029 - DNA, 25 bp, Homo sapien
gagagctaattgtgctatcattttt

SEQ ID NO: 4219030 - DNA, 25 bp, Homo sapien
aagaagagagagctaattgtgctat

SEQ ID NO: 4219031 - DNA, 25 bp, Homo sapien
aataacagcagatgatccttccttg

SEQ ID NO: 4219032 - DNA, 25 bp, Homo sapien
ctttgtgaagattggtggaggatat

SEQ ID NO: 4219033 - DNA, 25 bp, Homo sapien
ggtggaggatataataacagcagat

SEQ ID NO: 4219034 - DNA, 25 bp, Homo sapien
gatgatccttccttgacaacatgca

SEQ ID NO: 4219035 - DNA, 25 bp, Homo sapien
cactacttctctttgatgtgcgaat

SEQ ID NO: 4219036 - DNA, 25 bp, Homo sapien
tctctttgatgtgcgaatatcacct

SEQ ID NO: 4219037 - DNA, 25 bp, Homo sapien
tttgatgtgcgaatatcacctatta

SEQ ID NO: 4219038 - DNA, 25 bp, Homo sapien
cgaatatcacctattattcccaggg

SEQ ID NO: 4219039 - DNA, 25 bp, Homo sapien
gattttgtactaggatttaggaagc

SEQ ID NO: 4219040 - DNA, 25 bp, Homo sapien
gagatatatctacagccatcatgac

SEQ ID NO: 4219041 - DNA, 25 bp, Homo sapien
taaggcttcgggatgggattttgta

SEQ ID NO: 4219042 - DNA, 25 bp, Homo sapien
tctgcctgaagataataaggcttcg

SEQ ID NO: 4219043 - DNA, 25 bp, Homo sapien
tttttgaaatctcgagcacccggta

SEQ ID NO: 4219044 - DNA, 25 bp, Homo sapien
tgaattcccggtgctgatgtccaga

SEQ ID NO: 4219045 - DNA, 25 bp, Homo sapien
gcaatgattcaaggagacggtctct

SEQ ID NO: 4219046 - DNA, 25 bp, Homo sapien
gatgcaaccacgatccagaatcctg

SEQ ID NO: 4219047 - DNA, 25 bp, Homo sapien
gacagccgcagaaacggcggccgaa

SEQ ID NO: 4219048 - DNA, 25 bp, Homo sapien
cctctccttaaagtattgctaggag

SEQ ID NO: 4219049 - DNA, 25 bp, Homo sapien
gggcttttccgctctacatgcaggt

SEQ ID NO: 4219050 - DNA, 25 bp, Homo sapien
ggcggccgaagcaccagcgatttct

SEQ ID NO: 4219051 - DNA, 25 bp, Homo sapien
gcaagagtgggcattgactgcagat

SEQ ID NO: 4219052 - DNA, 25 bp, Homo sapien
aatcaaatccagttagctgcaggtc

SEQ ID NO: 4219053 - DNA, 25 bp, Homo sapien
ctagttgtctggttacagtgaggca

SEQ ID NO: 4219054 - DNA, 25 bp, Homo sapien
cagtgaggcaaacgtatttatatcc

SEQ ID NO: 4219055 - DNA, 25 bp, Homo sapien
ttgtgatagcacatggccagcctga

SEQ ID NO: 4219056 - DNA, 25 bp, Homo sapien
tttccaaagttggtagccaccagtg

SEQ ID NO: 4219057 - DNA, 25 bp, Homo sapien
caaacataatttggccacgtgcatc

SEQ ID NO: 4219058 - DNA, 25 bp, Homo sapien
catttctgatatctgaccagggaga

SEQ ID NO: 4219059 - DNA, 25 bp, Homo sapien
catttactgagtgcgaaagatcccc

SEQ ID NO: 4219060 - DNA, 25 bp, Homo sapien
ggaaaagccatgcatactaccagta

SEQ ID NO: 4219061 - DNA, 25 bp, Homo sapien
taacatggcgctccatcatagaccg

SEQ ID NO: 4219062 - DNA, 25 bp, Homo sapien
tgtctacatgccaacaggaaaagcc

SEQ ID NO: 4219063 - DNA, 25 bp, Homo sapien
tctacatattttcttgccgggcttt

SEQ ID NO: 4219064 - DNA, 25 bp, Homo sapien
acatattttcttgccgggctttctg

SEQ ID NO: 4219065 - DNA, 25 bp, Homo sapien
tttctacatattttcttgccgggct

SEQ ID NO: 4219066 - DNA, 25 bp, Homo sapien
tccttttctacatattttcttgccg

SEQ ID NO: 4219067 - DNA, 25 bp, Homo sapien
tcatcagattccaaacatcacctaa

SEQ ID NO: 4219068 - DNA, 25 bp, Homo sapien
tcacctaaccatttacttcccagca

SEQ ID NO: 4219069 - DNA, 25 bp, Homo sapien
catcagcaaatcatccttagggaga

SEQ ID NO: 4219070 - DNA, 25 bp, Homo sapien
ttcccagcatcagcaaatcatcctt

SEQ ID NO: 4219071 - DNA, 25 bp, Homo sapien
gatgctaccagcaccagaacacaag

SEQ ID NO: 4219072 - DNA, 25 bp, Homo sapien
tgtggacaagctacattcagatgca

SEQ ID NO: 4219073 - DNA, 25 bp, Homo sapien
gaaaagcatactctcctatgagtga

SEQ ID NO: 4219074 - DNA, 25 bp, Homo sapien
tatccttaggatgagaaagtccata

SEQ ID NO: 4219075 - DNA, 25 bp, Homo sapien
aaatgcaatcccagtagaacagaac

SEQ ID NO: 4219076 - DNA, 25 bp, Homo sapien
cctgccccacaaggatgctataatg

SEQ ID NO: 4219077 - DNA, 25 bp, Homo sapien
gaactgagttatgaattttgttatt

SEQ ID NO: 4219078 - DNA, 25 bp, Homo sapien
caaggatgctataatgaaatctgac

SEQ ID NO: 4219079 - DNA, 25 bp, Homo sapien
tgtttactgtctaatatttgaccac

SEQ ID NO: 4219080 - DNA, 25 bp, Homo sapien
tgtttgttagcgactctcacaggag

SEQ ID NO: 4219081 - DNA, 25 bp, Homo sapien
tttcttgtttgttagcgactctcac

SEQ ID NO: 4219082 - DNA, 25 bp, Homo sapien
ttagcgactctcacaggagagcaac

SEQ ID NO: 4219083 - DNA, 25 bp, Homo sapien
actcacactcatgtactgtgcatag

SEQ ID NO: 4219084 - DNA, 25 bp, Homo sapien
tgtgcatagcaacatactaattttt

SEQ ID NO: 4219085 - DNA, 25 bp, Homo sapien
gaaccccactatacttctgcccatg

SEQ ID NO: 4219086 - DNA, 25 bp, Homo sapien
aatattgttcgtttgctgttgtata

SEQ ID NO: 4219087 - DNA, 25 bp, Homo sapien
tagcccctaggactcattaaacact

SEQ ID NO: 4219088 - DNA, 25 bp, Homo sapien
gagtccttgcttgattgtcccctat

SEQ ID NO: 4219089 - DNA, 25 bp, Homo sapien
tgtcccctatgacaagtaccaagtc

SEQ ID NO: 4219090 - DNA, 25 bp, Homo sapien
tcattgctccccttagatgtgaagg

SEQ ID NO: 4219091 - DNA, 25 bp, Homo sapien
gagatgtccattccctgccttgggt

SEQ ID NO: 4219092 - DNA, 25 bp, Homo sapien
taaaccatctggcattgaatcctgg

SEQ ID NO: 4219093 - DNA, 25 bp, Homo sapien
tagagaaatactccaagctccggag

SEQ ID NO: 4219094 - DNA, 25 bp, Homo sapien
ctaagggcacagtcaatggagctaa

SEQ ID NO: 4219095 - DNA, 25 bp, Homo sapien
agcaatttccactacaactaaatga

SEQ ID NO: 4219096 - DNA, 25 bp, Homo sapien
tagcaatttccactacaactaaatg

SEQ ID NO: 4219097 - DNA, 25 bp, Homo sapien
ttagcaatttccactacaactaaat

SEQ ID NO: 4219098 - DNA, 25 bp, Homo sapien
tatactcagacagcctatggcagtg

SEQ ID NO: 4219099 - DNA, 25 bp, Homo sapien
ccagcaggtcagcatcggaaagcaa

SEQ ID NO: 4219100 - DNA, 25 bp, Homo sapien
taaacacagcactagatgagaacag

SEQ ID NO: 4219101 - DNA, 25 bp, Homo sapien
aaatgccatgggtgtaatatctgcc

SEQ ID NO: 4219102 - DNA, 25 bp, Homo sapien
cattctactttatctgcccattttt

SEQ ID NO: 4219103 - DNA, 25 bp, Homo sapien
gatggtggtagtggtggtacgtgtg

SEQ ID NO: 4219104 - DNA, 25 bp, Homo sapien
caggatggtggtagtggtggtacgt

SEQ ID NO: 4219105 - DNA, 25 bp, Homo sapien
ggatggtggtagtggtggtacgtgt

SEQ ID NO: 4219106 - DNA, 25 bp, Homo sapien
aggatggtggtagtggtggtacgtg

SEQ ID NO: 4219107 - DNA, 25 bp, Homo sapien
ctttattcagctgcaatctaagcag

SEQ ID NO: 4219108 - DNA, 25 bp, Homo sapien
ttctttattcagctgcaatctaagc

SEQ ID NO: 4219109 - DNA, 25 bp, Homo sapien
tctttattcagctgcaatctaagca

SEQ ID NO: 4219110 - DNA, 25 bp, Homo sapien
gacacgtctcacatgtaacctagga

SEQ ID NO: 4219111 - DNA, 25 bp, Homo sapien
tcttaaatgtagcagacttattccc

SEQ ID NO: 4219112 - DNA, 25 bp, Homo sapien
ctattacagttagggattctagaac

SEQ ID NO: 4219113 - DNA, 25 bp, Homo sapien
tgttcaggatgtcaatagagggaaa

SEQ ID NO: 4219114 - DNA, 25 bp, Homo sapien
gctcaatgataggaatggcagctat

SEQ ID NO: 4219115 - DNA, 25 bp, Homo sapien
tagctcaatgataggaatggcagct

SEQ ID NO: 4219116 - DNA, 25 bp, Homo sapien
ttgtagctcaatgataggaatggca

SEQ ID NO: 4219117 - DNA, 25 bp, Homo sapien
tcaatgataggaatggcagctatat

SEQ ID NO: 4219118 - DNA, 25 bp, Homo sapien
cagggttcagactgtttaaggagca

SEQ ID NO: 4219119 - DNA, 25 bp, Homo sapien
tatggcagagaaagaaccgatcctt

SEQ ID NO: 4219120 - DNA, 25 bp, Homo sapien
gcaaccatgagaatgctttgccaca

SEQ ID NO: 4219121 - DNA, 25 bp, Homo sapien
accaagataacaatgcccatgagtg

SEQ ID NO: 4219122 - DNA, 25 bp, Homo sapien
tgagataatgcaaggcttcaagctt

SEQ ID NO: 4219123 - DNA, 25 bp, Homo sapien
gagataatgcaaggcttcaagcttc

SEQ ID NO: 4219124 - DNA, 25 bp, Homo sapien
ttcaagcttctggagttacacttct

SEQ ID NO: 4219125 - DNA, 25 bp, Homo sapien
atgagataatgcaaggcttcaagct

SEQ ID NO: 4219126 - DNA, 25 bp, Homo sapien
gagctctggttccactactagggct

SEQ ID NO: 4219127 - DNA, 25 bp, Homo sapien
taagattctatagtctgtcaaaggc

SEQ ID NO: 4219128 - DNA, 25 bp, Homo sapien
tgtcaaaggcatcactacctcagct

SEQ ID NO: 4219129 - DNA, 25 bp, Homo sapien
tgttgacctccagtcccgttgatct

SEQ ID NO: 4219130 - DNA, 25 bp, Homo sapien
aaggtcctttaaaatcagacctcag

SEQ ID NO: 4219131 - DNA, 25 bp, Homo sapien
agtcgctatagccataacgaaccat

SEQ ID NO: 4219132 - DNA, 25 bp, Homo sapien
ctttactttatagtcgctatagcca

SEQ ID NO: 4219133 - DNA, 25 bp, Homo sapien
cctcagaggatctcttgtcttcagc

SEQ ID NO: 4219134 - DNA, 25 bp, Homo sapien
tatggtcagtgaaggaacacggtgc

SEQ ID NO: 4219135 - DNA, 25 bp, Homo sapien
ggaagatgtgcagatttctccctga

SEQ ID NO: 4219136 - DNA, 25 bp, Homo sapien
gattcatcatgtaggctccagagga

SEQ ID NO: 4219137 - DNA, 25 bp, Homo sapien
ccaagtgcttaatcagggccaaaaa

SEQ ID NO: 4219138 - DNA, 25 bp, Homo sapien
ggttctgtagccttctgcgtacttc

SEQ ID NO: 4219139 - DNA, 25 bp, Homo sapien
ctgtagccttctgcgtacttccaaa

SEQ ID NO: 4219140 - DNA, 25 bp, Homo sapien
ttccaaattgtagctatcaaacaca

SEQ ID NO: 4219141 - DNA, 25 bp, Homo sapien
tagccttctgcgtacttccaaattg

SEQ ID NO: 4219142 - DNA, 25 bp, Homo sapien
cattctgttgcttagttcactgaga

SEQ ID NO: 4219143 - DNA, 25 bp, Homo sapien
tacctcccactggtgggcaattttc

SEQ ID NO: 4219144 - DNA, 25 bp, Homo sapien
ggaactcaaggccacaaaggctaca

SEQ ID NO: 4219145 - DNA, 25 bp, Homo sapien
cagtgtgtctattcaccagtcctca

SEQ ID NO: 4219146 - DNA, 25 bp, Homo sapien
ttgaccaatgatgccgtgagagcca

SEQ ID NO: 4219147 - DNA, 25 bp, Homo sapien
caagttgaccaatgatgccgtgaga

SEQ ID NO: 4219148 - DNA, 25 bp, Homo sapien
caatgatgccgtgagagccattttt

SEQ ID NO: 4219149 - DNA, 25 bp, Homo sapien
agtcaagttgaccaatgatgccgtg

SEQ ID NO: 4219150 - DNA, 25 bp, Homo sapien
ttgcagtagacatagtagtggcccc

SEQ ID NO: 4219151 - DNA, 25 bp, Homo sapien
cagagaggttaaccagaatcgtagc

SEQ ID NO: 4219152 - DNA, 25 bp, Homo sapien
gaatcgtagctaccaatgatggaaa

SEQ ID NO: 4219153 - DNA, 25 bp, Homo sapien
tagtggccccaactttagatgagaa

SEQ ID NO: 4219154 - DNA, 25 bp, Homo sapien
cagtctcttcatctgacccatacat

SEQ ID NO: 4219155 - DNA, 25 bp, Homo sapien
cttctaccagttgcttcagtctctt

SEQ ID NO: 4219156 - DNA, 25 bp, Homo sapien
tttcttctaccagttgcttcagtct

SEQ ID NO: 4219157 - DNA, 25 bp, Homo sapien
cttttcttctaccagttgcttcagt

SEQ ID NO: 4219158 - DNA, 25 bp, Homo sapien
taagttctatacaccattcaatgga

SEQ ID NO: 4219159 - DNA, 25 bp, Homo sapien
tgaactatctgcgaaaccagacagg

SEQ ID NO: 4219160 - DNA, 25 bp, Homo sapien
tacatagaaatagctcactagtccc

SEQ ID NO: 4219161 - DNA, 25 bp, Homo sapien
cccagcattgtgatatcagctagca

SEQ ID NO: 4219162 - DNA, 25 bp, Homo sapien
ccccgggaagaagtagtatcaggca

SEQ ID NO: 4219163 - DNA, 25 bp, Homo sapien
tcaggcagtgcatcaactgacccct

SEQ ID NO: 4219164 - DNA, 25 bp, Homo sapien
tgaagctgtgcattcagcccccggg

SEQ ID NO: 4219165 - DNA, 25 bp, Homo sapien
ggtgcaatccgaaggtctttttgag

SEQ ID NO: 4219166 - DNA, 25 bp, Homo sapien
agtcactttaaaccgaaattctgag

SEQ ID NO: 4219167 - DNA, 25 bp, Homo sapien
cagtaatcctggtttattgtctcca

SEQ ID NO: 4219168 - DNA, 25 bp, Homo sapien
ctataaaggatttgtaaaggagcca

SEQ ID NO: 4219169 - DNA, 25 bp, Homo sapien
ttcttagcagcatcaaaaaatacag

SEQ ID NO: 4219170 - DNA, 25 bp, Homo sapien
gaagctctcctggaacagtatcttc

SEQ ID NO: 4219171 - DNA, 25 bp, Homo sapien
atccttcctccctgacagtacagct

SEQ ID NO: 4219172 - DNA, 25 bp, Homo sapien
tccttcctccctgacagtacagctg

SEQ ID NO: 4219173 - DNA, 25 bp, Homo sapien
tgtaacttgtacttccttagctgga

SEQ ID NO: 4219174 - DNA, 25 bp, Homo sapien
cttccttagctggatcatgattatg

SEQ ID NO: 4219175 - DNA, 25 bp, Homo sapien
tcgttttctcagtctttgtaacttg

SEQ ID NO: 4219176 - DNA, 25 bp, Homo sapien
ggacgcagtgtatgaacacattctg

SEQ ID NO: 4219177 - DNA, 25 bp, Homo sapien
ggtgggaaggccagcttccaacaaa

SEQ ID NO: 4219178 - DNA, 25 bp, Homo sapien
gggtgggaaggccagcttccaacaa

SEQ ID NO: 4219179 - DNA, 25 bp, Homo sapien
gccagcttccaacaaaggagcgtac

SEQ ID NO: 4219180 - DNA, 25 bp, Homo sapien
gaaggccagcttccaacaaaggagc

SEQ ID NO: 4219181 - DNA, 25 bp, Homo sapien
tagtcacaagcaaggcatctctgag

SEQ ID NO: 4219182 - DNA, 25 bp, Homo sapien
tagggatgagccattaagaatgtgc

SEQ ID NO: 4219183 - DNA, 25 bp, Homo sapien
caagtcactaagttctatagacact

SEQ ID NO: 4219184 - DNA, 25 bp, Homo sapien
cggtctgctccatacagaaggctca

SEQ ID NO: 4219185 - DNA, 25 bp, Homo sapien
gagtcagattgtttctataatgttc

SEQ ID NO: 4219186 - DNA, 25 bp, Homo sapien
tccaccttctttggctataattgcc

SEQ ID NO: 4219187 - DNA, 25 bp, Homo sapien
taaactatcaattagctctaaaggc

SEQ ID NO: 4219188 - DNA, 25 bp, Homo sapien
caccatcacctatgtttcttgtaaa

SEQ ID NO: 4219189 - DNA, 25 bp, Homo sapien
cttataaggccagcaatagtttcag

SEQ ID NO: 4219190 - DNA, 25 bp, Homo sapien
taaggaccctactcttacgacctca

SEQ ID NO: 4219191 - DNA, 25 bp, Homo sapien
tctgaatacagacaccttgaggctt

SEQ ID NO: 4219192 - DNA, 25 bp, Homo sapien
aagctgattccatatctgatgaggg

SEQ ID NO: 4219193 - DNA, 25 bp, Homo sapien
ttggcagaatcagcgtcgatgacta

SEQ ID NO: 4219194 - DNA, 25 bp, Homo sapien
caaaactttatcctaatcttggcag

SEQ ID NO: 4219195 - DNA, 25 bp, Homo sapien
tttatcctaatcttggcagaatcag

SEQ ID NO: 4219196 - DNA, 25 bp, Homo sapien
gtcgatgactaagcagtcactttcc

SEQ ID NO: 4219197 - DNA, 25 bp, Homo sapien
ctggactaagtttatagagagagat

SEQ ID NO: 4219198 - DNA, 25 bp, Homo sapien
caatgggatgtatggctttaagaga

SEQ ID NO: 4219199 - DNA, 25 bp, Homo sapien
taaactggactaagtttatagagag

SEQ ID NO: 4219200 - DNA, 25 bp, Homo sapien
gagagagattggaacaataacaatg

SEQ ID NO: 4219201 - DNA, 25 bp, Homo sapien
ataatataagcttgaggctctgcat

SEQ ID NO: 4219202 - DNA, 25 bp, Homo sapien
cgtataatataagcttgaggctctg

SEQ ID NO: 4219203 - DNA, 25 bp, Homo sapien
gtataatataagcttgaggctctgc

SEQ ID NO: 4219204 - DNA, 25 bp, Homo sapien
tataatataagcttgaggctctgca

SEQ ID NO: 4219205 - DNA, 25 bp, Homo sapien
aaaggttcttgagacatagacacac

SEQ ID NO: 4219206 - DNA, 25 bp, Homo sapien
ttgtgccaggccttggatgaattgg

SEQ ID NO: 4219207 - DNA, 25 bp, Homo sapien
ataaaaaggttcttgagacatagac

SEQ ID NO: 4219208 - DNA, 25 bp, Homo sapien
caatcctgccctctgtaatttgtgc

SEQ ID NO: 4219209 - DNA, 25 bp, Homo sapien
tctcagtacaacagggatgaccatc

SEQ ID NO: 4219210 - DNA, 25 bp, Homo sapien
tcatcttcagcaccgtcattatcac

SEQ ID NO: 4219211 - DNA, 25 bp, Homo sapien
ttcatcttcagcaccgtcattatca

SEQ ID NO: 4219212 - DNA, 25 bp, Homo sapien
ttcagcaccgtcattatcacctaaa

SEQ ID NO: 4219213 - DNA, 25 bp, Homo sapien
tcttcagcaccgtcattatcaccta

SEQ ID NO: 4219214 - DNA, 25 bp, Homo sapien
tatacaccatcactggtttgggacc

SEQ ID NO: 4219215 - DNA, 25 bp, Homo sapien
gatagttgactgtgatgacgatcac

SEQ ID NO: 4219216 - DNA, 25 bp, Homo sapien
gatcacattgccataacttgccaag

SEQ ID NO: 4219217 - DNA, 25 bp, Homo sapien
cgagtactccaagtcgatagttgac

SEQ ID NO: 4219218 - DNA, 25 bp, Homo sapien
caaactggccactgctcaggatttt

SEQ ID NO: 4219219 - DNA, 25 bp, Homo sapien
ttgcaatccaatcctcacagtgcgg

SEQ ID NO: 4219220 - DNA, 25 bp, Homo sapien
tagcgagttaatccattgccttgca

SEQ ID NO: 4219221 - DNA, 25 bp, Homo sapien
taaaatcaggtcaaagtcaagtcct

SEQ ID NO: 4219222 - DNA, 25 bp, Homo sapien
tgttttgtcacgttgagaggaggcc

SEQ ID NO: 4219223 - DNA, 25 bp, Homo sapien
cagagtttatgttttgtcacgttga

SEQ ID NO: 4219224 - DNA, 25 bp, Homo sapien
ggaggcctatcaaggacagcctttg

SEQ ID NO: 4219225 - DNA, 25 bp, Homo sapien
tcacgttgagaggaggcctatcaag

SEQ ID NO: 4219226 - DNA, 25 bp, Homo sapien
ccacacagtaagagtgatattctgt

SEQ ID NO: 4219227 - DNA, 25 bp, Homo sapien
aaatcatacaccacacagtaagagt

SEQ ID NO: 4219228 - DNA, 25 bp, Homo sapien
tccagggtgggggaaaatcatacac

SEQ ID NO: 4219229 - DNA, 25 bp, Homo sapien
catacaccacacagtaagagtgata

SEQ ID NO: 4219230 - DNA, 25 bp, Homo sapien
accaccacgccaagctgatttttgc

SEQ ID NO: 4219231 - DNA, 25 bp, Homo sapien
accttggcctcccaaggtgctggga

SEQ ID NO: 4219232 - DNA, 25 bp, Homo sapien
catttttactagagacagggtttca

SEQ ID NO: 4219233 - DNA, 25 bp, Homo sapien
ggcctcaggccatccacccaccttg

SEQ ID NO: 4219234 - DNA, 25 bp, Homo sapien
tgaccctggctgaagaaaagaccca

SEQ ID NO: 4219235 - DNA, 25 bp, Homo sapien
aaggttacccgtccattccacagat

SEQ ID NO: 4219236 - DNA, 25 bp, Homo sapien
gatcaaatatctacctaagggctag

SEQ ID NO: 4219237 - DNA, 25 bp, Homo sapien
tctctgcaaagttccaaggttaccc

SEQ ID NO: 4219238 - DNA, 25 bp, Homo sapien
gactaagctgcttatgccacggaag

SEQ ID NO: 4219239 - DNA, 25 bp, Homo sapien
tattcctagaaatgcatatcctgag

SEQ ID NO: 4219240 - DNA, 25 bp, Homo sapien
ttttgattacgtatgcagagcagtc

SEQ ID NO: 4219241 - DNA, 25 bp, Homo sapien
tgttagccaggataaggcctcacct

SEQ ID NO: 4219242 - DNA, 25 bp, Homo sapien
gagccatcagtacaatgcaccagtg

SEQ ID NO: 4219243 - DNA, 25 bp, Homo sapien
gccactgtagtagttgtgttcacag

SEQ ID NO: 4219244 - DNA, 25 bp, Homo sapien
tatgccttgtagcaccgtcctcatc

SEQ ID NO: 4219245 - DNA, 25 bp, Homo sapien
tatcaacatccaatggcaatgccac

SEQ ID NO: 4219246 - DNA, 25 bp, Homo sapien
gtaacatccagttctaaatcaagca

SEQ ID NO: 4219247 - DNA, 25 bp, Homo sapien
tagaatatagacttagctgtatgaa

SEQ ID NO: 4219248 - DNA, 25 bp, Homo sapien
gaatggtatatgactgtaacatcca

SEQ ID NO: 4219249 - DNA, 25 bp, Homo sapien
gcctgtttactcaatctctaaagtg

SEQ ID NO: 4219250 - DNA, 25 bp, Homo sapien
ccagaacttcacaacaggatttgtc

SEQ ID NO: 4219251 - DNA, 25 bp, Homo sapien
tctccaatcaatggcttcctccaga

SEQ ID NO: 4219252 - DNA, 25 bp, Homo sapien
ggcttcctccagaacttcacaacag

SEQ ID NO: 4219253 - DNA, 25 bp, Homo sapien
gaacttcacaacaggatttgtcctt

SEQ ID NO: 4219254 - DNA, 25 bp, Homo sapien
ctccatgcatgccatccgaatgtac

SEQ ID NO: 4219255 - DNA, 25 bp, Homo sapien
ctgtgccctccctccatgcatgcca

SEQ ID NO: 4219256 - DNA, 25 bp, Homo sapien
gctactgagacttcagctgtgccct

SEQ ID NO: 4219257 - DNA, 25 bp, Homo sapien
tttcatttgctactgagacttcagc

SEQ ID NO: 4219258 - DNA, 25 bp, Homo sapien
gttcagatgtcaatccccaatactg

SEQ ID NO: 4219259 - DNA, 25 bp, Homo sapien
cattcctcccctggttatgctgtaa

SEQ ID NO: 4219260 - DNA, 25 bp, Homo sapien
tatgctacatgttctatgagctcag

SEQ ID NO: 4219261 - DNA, 25 bp, Homo sapien
tgaccattaatggtaaagcactcct

SEQ ID NO: 4219262 - DNA, 25 bp, Homo sapien
taaaagatttaagttcagtcagcaa

SEQ ID NO: 4219263 - DNA, 25 bp, Homo sapien
taatatcaccactcttatgaacacc

SEQ ID NO: 4219264 - DNA, 25 bp, Homo sapien
tctaaagtgacagactatgggacat

SEQ ID NO: 4219265 - DNA, 25 bp, Homo sapien
tgaacaccataatcaactgttaatg

SEQ ID NO: 4219266 - DNA, 25 bp, Homo sapien
tccctgtgaacctgaatcctaaagt

SEQ ID NO: 4219267 - DNA, 25 bp, Homo sapien
catttatgcacacagaccctaggaa

SEQ ID NO: 4219268 - DNA, 25 bp, Homo sapien
gcactgttgggttctgtatggaaga

SEQ ID NO: 4219269 - DNA, 25 bp, Homo sapien
taggcctctgtgtaaaacagttctc

SEQ ID NO: 4219270 - DNA, 25 bp, Homo sapien
aagcctttgtcggttactccttcat

SEQ ID NO: 4219271 - DNA, 25 bp, Homo sapien
ttccttttgtgctcaagcgtgagta

SEQ ID NO: 4219272 - DNA, 25 bp, Homo sapien
gaataagatgagctacataagaaat

SEQ ID NO: 4219273 - DNA, 25 bp, Homo sapien
gtcggttactccttcatgtgtccag

SEQ ID NO: 4219274 - DNA, 25 bp, Homo sapien
tagccctcttttcgcaatccaggag

SEQ ID NO: 4219275 - DNA, 25 bp, Homo sapien
gcactgattttagaggccaccttct

SEQ ID NO: 4219276 - DNA, 25 bp, Homo sapien
gataacacctcaaaggtagacctgg

SEQ ID NO: 4219277 - DNA, 25 bp, Homo sapien
cacaagtggtgtgcaagtcccagca

SEQ ID NO: 4219278 - DNA, 25 bp, Homo sapien
cagcacatgtagatgtagttagtta

SEQ ID NO: 4219279 - DNA, 25 bp, Homo sapien
tttccatatcagcacatgtagatgt

SEQ ID NO: 4219280 - DNA, 25 bp, Homo sapien
tattaatatattgtagtcctctttc

SEQ ID NO: 4219281 - DNA, 25 bp, Homo sapien
tgtagttagttattgatttgaacag

SEQ ID NO: 4219282 - DNA, 25 bp, Homo sapien
gagaattcctgtacccacgtagctt

SEQ ID NO: 4219283 - DNA, 25 bp, Homo sapien
taagtaagatatcttgccaaccaaa

SEQ ID NO: 4219284 - DNA, 25 bp, Homo sapien
acgtagcttcttacctgaatattgg

SEQ ID NO: 4219285 - DNA, 25 bp, Homo sapien
ccaaatcatctaggatatcaatggt

SEQ ID NO: 4219286 - DNA, 25 bp, Homo sapien
gaatgctagtcctgccagtaacgca

SEQ ID NO: 4219287 - DNA, 25 bp, Homo sapien
cagtaacgcagctgatttgcataca

SEQ ID NO: 4219288 - DNA, 25 bp, Homo sapien
cacatcagagcaagggagaaactta

SEQ ID NO: 4219289 - DNA, 25 bp, Homo sapien
tatagggttctgtattatggtcacc

SEQ ID NO: 4219290 - DNA, 25 bp, Homo sapien
taaagttcagatggcagagggtcac

SEQ ID NO: 4219291 - DNA, 25 bp, Homo sapien
tcaatgtccgcagtggtcaaacacc

SEQ ID NO: 4219292 - DNA, 25 bp, Homo sapien
taagtagttgcaaagcctgtagccc

SEQ ID NO: 4219293 - DNA, 25 bp, Homo sapien
taaacggcaatagtcctagggctca

SEQ ID NO: 4219294 - DNA, 25 bp, Homo sapien
caaaattttagtgaggtgaagagtg

SEQ ID NO: 4219295 - DNA, 25 bp, Homo sapien
taatatattggttaaagcactggaa

SEQ ID NO: 4219296 - DNA, 25 bp, Homo sapien
taatgataatgcttgaaaagatccc

SEQ ID NO: 4219297 - DNA, 25 bp, Homo sapien
taattagctgtgtccctttaggaaa

SEQ ID NO: 4219298 - DNA, 25 bp, Homo sapien
tcttatgtctgtaagcttgaagaat

SEQ ID NO: 4219299 - DNA, 25 bp, Homo sapien
cattcaagattgaagttcacagtgg

SEQ ID NO: 4219300 - DNA, 25 bp, Homo sapien
tatgcaccgtatctcttttgaagga

SEQ ID NO: 4219301 - DNA, 25 bp, Homo sapien
tttggcaaaatctctaccagttccc

SEQ ID NO: 4219302 - DNA, 25 bp, Homo sapien
gggctactgatccttaccttacagg

SEQ ID NO: 4219303 - DNA, 25 bp, Homo sapien
tacatttacgaaggtcacaacatat

SEQ ID NO: 4219304 - DNA, 25 bp, Homo sapien
gcctgcaagaagtgatctactttct

SEQ ID NO: 4219305 - DNA, 25 bp, Homo sapien
gctgacacatattagcctgcaagaa

SEQ ID NO: 4219306 - DNA, 25 bp, Homo sapien
ggaagtcaataccaagcccaagttg

SEQ ID NO: 4219307 - DNA, 25 bp, Homo sapien
taaaaacaggttaggagcccatgca

SEQ ID NO: 4219308 - DNA, 25 bp, Homo sapien
taaaggatgtgagtagcacgaggcc

SEQ ID NO: 4219309 - DNA, 25 bp, Homo sapien
tatggcccgtacaatagtgctatga

SEQ ID NO: 4219310 - DNA, 25 bp, Homo sapien
gaaaacttgcaagcttccaatgagt

SEQ ID NO: 4219311 - DNA, 25 bp, Homo sapien
tctctggagatgagttatgcctggc

SEQ ID NO: 4219312 - DNA, 25 bp, Homo sapien
gatgttggcctctagtaggactaca

SEQ ID NO: 4219313 - DNA, 25 bp, Homo sapien
tacctcttggtaagtcacggtgctt

SEQ ID NO: 4219314 - DNA, 25 bp, Homo sapien
caatggaacactcatatactatatg

SEQ ID NO: 4219315 - DNA, 25 bp, Homo sapien
tatactatatgaccctgaagtatct

SEQ ID NO: 4219316 - DNA, 25 bp, Homo sapien
ggaaacaatggaacactcatatact

SEQ ID NO: 4219317 - DNA, 25 bp, Homo sapien
cctgaagtatctatgagactgtatc

SEQ ID NO: 4219318 - DNA, 25 bp, Homo sapien
gattctccctagaccttgcagtaag

SEQ ID NO: 4219319 - DNA, 25 bp, Homo sapien
tgtaatacgctgattttagcccagt

SEQ ID NO: 4219320 - DNA, 25 bp, Homo sapien
tacagatgtggtactcagatggatc

SEQ ID NO: 4219321 - DNA, 25 bp, Homo sapien
gggactctcctcagtagtacaacta

SEQ ID NO: 4219322 - DNA, 25 bp, Homo sapien
tattgggataagctaggcctactgc

SEQ ID NO: 4219323 - DNA, 25 bp, Homo sapien
tttcacagacactgcacaacagggt

SEQ ID NO: 4219324 - DNA, 25 bp, Homo sapien
gatctctagcgggattgcctggaaa

SEQ ID NO: 4219325 - DNA, 25 bp, Homo sapien
tgtatgatgggcagaatgattcccc

SEQ ID NO: 4219326 - DNA, 25 bp, Homo sapien
ttgttcttgttctgtatctgttggc

SEQ ID NO: 4219327 - DNA, 25 bp, Homo sapien
tgttcttgttctgtatctgttggca

SEQ ID NO: 4219328 - DNA, 25 bp, Homo sapien
gttcttgttctgtatctgttggcat

SEQ ID NO: 4219329 - DNA, 25 bp, Homo sapien
tcagtcttgtataatcagcgtgtgc

SEQ ID NO: 4219330 - DNA, 25 bp, Homo sapien
tataaggctctttatgggcctggat

SEQ ID NO: 4219331 - DNA, 25 bp, Homo sapien
ctcccttggaacactgcaatatcat

SEQ ID NO: 4219332 - DNA, 25 bp, Homo sapien
gcgtgtgctattgtaagcttttcct

SEQ ID NO: 4219333 - DNA, 25 bp, Homo sapien
gctgccgcatggcgctaatctttgt

SEQ ID NO: 4219334 - DNA, 25 bp, Homo sapien
acgctgccgcatggcgctaatcttt

SEQ ID NO: 4219335 - DNA, 25 bp, Homo sapien
cgctgccgcatggcgctaatctttg

SEQ ID NO: 4219336 - DNA, 25 bp, Homo sapien
tgccgcatggcgctaatctttgtat

SEQ ID NO: 4219337 - DNA, 25 bp, Homo sapien
tccagctcccaggttagcagaaagt

SEQ ID NO: 4219338 - DNA, 25 bp, Homo sapien
gttagcagaaagtggcacaatggtt

SEQ ID NO: 4219339 - DNA, 25 bp, Homo sapien
ttggattgtattcttccagctccca

SEQ ID NO: 4219340 - DNA, 25 bp, Homo sapien
ttcccctactctgcagacaggctcc

SEQ ID NO: 4219341 - DNA, 25 bp, Homo sapien
gacagatgtcctagttaagtactgg

SEQ ID NO: 4219342 - DNA, 25 bp, Homo sapien
taaactattgccacaatgacacaag

SEQ ID NO: 4219343 - DNA, 25 bp, Homo sapien
tcacagtggaaacaggacaactgat

SEQ ID NO: 4219344 - DNA, 25 bp, Homo sapien
ttaagattgatcctgtgtacccaca

SEQ ID NO: 4219345 - DNA, 25 bp, Homo sapien
agtttgtttctagtccagtgcctga

SEQ ID NO: 4219346 - DNA, 25 bp, Homo sapien
cctctcaggaagatcattatgtgcc

SEQ ID NO: 4219347 - DNA, 25 bp, Homo sapien
tattttaggcatcagcgaggcaaaa

SEQ ID NO: 4219348 - DNA, 25 bp, Homo sapien
tgagctctactcaggagaactccgt

SEQ ID NO: 4219349 - DNA, 25 bp, Homo sapien
gaaatcaggatataacaggatagga

SEQ ID NO: 4219350 - DNA, 25 bp, Homo sapien
gaccaggaacctacaagatataact

SEQ ID NO: 4219351 - DNA, 25 bp, Homo sapien
tcaggacagtttttccgaatgacac

SEQ ID NO: 4219352 - DNA, 25 bp, Homo sapien
tctcagatgggtcagactccttcat

SEQ ID NO: 4219353 - DNA, 25 bp, Homo sapien
gatattgacattcactctcaaagag

SEQ ID NO: 4219354 - DNA, 25 bp, Homo sapien
taatccacgaaagctacacagaagt

SEQ ID NO: 4219355 - DNA, 25 bp, Homo sapien
cttcggataattggagcagcaagca

SEQ ID NO: 4219356 - DNA, 25 bp, Homo sapien
gcagcaagcaaaactatctggcatg

SEQ ID NO: 4219357 - DNA, 25 bp, Homo sapien
gagcaaattatgattctgtactatg

SEQ ID NO: 4219358 - DNA, 25 bp, Homo sapien
ttttataagccatgcacaagcagaa

SEQ ID NO: 4219359 - DNA, 25 bp, Homo sapien
gaaggcctgaatggtttgaagagca

SEQ ID NO: 4219360 - DNA, 25 bp, Homo sapien
gttctggaaggcctgaatggtttga

SEQ ID NO: 4219361 - DNA, 25 bp, Homo sapien
tcagtaagacaaagggtgccatcag

SEQ ID NO: 4219362 - DNA, 25 bp, Homo sapien
gcctgggagtccaataggatgatct

SEQ ID NO: 4219363 - DNA, 25 bp, Homo sapien
ggatgatctgaacagtcactctaaa

SEQ ID NO: 4219364 - DNA, 25 bp, Homo sapien
ccatcagtttgataagactctgcta

SEQ ID NO: 4219365 - DNA, 25 bp, Homo sapien
ctgtggcagcccttccaggacatct

SEQ ID NO: 4219366 - DNA, 25 bp, Homo sapien
cttgttgagatttatgcaatggact

SEQ ID NO: 4219367 - DNA, 25 bp, Homo sapien
gccctgcactatcatctgtggcagc

SEQ ID NO: 4219368 - DNA, 25 bp, Homo sapien
ccttccaggacatcttgttgagatt

SEQ ID NO: 4219369 - DNA, 25 bp, Homo sapien
tgcgtagcacagtcacttgaaggga

SEQ ID NO: 4219370 - DNA, 25 bp, Homo sapien
tccaccagtcggaagttatgccaca

SEQ ID NO: 4219371 - DNA, 25 bp, Homo sapien
cttgaagggagccacacaaattccg

SEQ ID NO: 4219372 - DNA, 25 bp, Homo sapien
tgtttgctgctatcactgtccacca

SEQ ID NO: 4219373 - DNA, 25 bp, Homo sapien
cacttgctgcttaggccagtagcct

SEQ ID NO: 4219374 - DNA, 25 bp, Homo sapien
taagaggctttatgccccgtagtcc

SEQ ID NO: 4219375 - DNA, 25 bp, Homo sapien
tagcctaaggccagagtcagaatga

SEQ ID NO: 4219376 - DNA, 25 bp, Homo sapien
taatccttacatatccttggccctg

SEQ ID NO: 4219377 - DNA, 25 bp, Homo sapien
aagaaaagacaacaggactcctggg

SEQ ID NO: 4219378 - DNA, 25 bp, Homo sapien
aagagtcttggctactaagcgggca

SEQ ID NO: 4219379 - DNA, 25 bp, Homo sapien
caaaatagccttatgctgctgaaga

SEQ ID NO: 4219380 - DNA, 25 bp, Homo sapien
taagcgggcaattgtcacaaagtac

SEQ ID NO: 4219381 - DNA, 25 bp, Homo sapien
cagcctattagggtgtaaccagaaa

SEQ ID NO: 4219382 - DNA, 25 bp, Homo sapien
tagcccatgcatcaaagcaattaga

SEQ ID NO: 4219383 - DNA, 25 bp, Homo sapien
ttagctggctgtttactgagtggtc

SEQ ID NO: 4219384 - DNA, 25 bp, Homo sapien
aatcaattatcctgctagcccatgc

SEQ ID NO: 4219385 - DNA, 25 bp, Homo sapien
taaagactatatgctaggactgaca

SEQ ID NO: 4219386 - DNA, 25 bp, Homo sapien
aaatagggcctgctgtaggaagtac

SEQ ID NO: 4219387 - DNA, 25 bp, Homo sapien
tatttatgatttatgacccatggct

SEQ ID NO: 4219388 - DNA, 25 bp, Homo sapien
ctcaggaaggaatcttaaagctttc

SEQ ID NO: 4219389 - DNA, 25 bp, Homo sapien
tctgcttattatggctgaaacaaaa

SEQ ID NO: 4219390 - DNA, 25 bp, Homo sapien
ctgcttattatggctgaaacaaaat

SEQ ID NO: 4219391 - DNA, 25 bp, Homo sapien
gctgtacaaagtgggtttcaaagta

SEQ ID NO: 4219392 - DNA, 25 bp, Homo sapien
aaaataactacagggcagaactggg

SEQ ID NO: 4219393 - DNA, 25 bp, Homo sapien
tattattctatggtaagctggatca

SEQ ID NO: 4219394 - DNA, 25 bp, Homo sapien
tgcacagtttcagaagggtaccgag

SEQ ID NO: 4219395 - DNA, 25 bp, Homo sapien
gaactgggtttaggcattgcctttg

SEQ ID NO: 4219396 - DNA, 25 bp, Homo sapien
taagtccaactgaaccacagtatgg

SEQ ID NO: 4219397 - DNA, 25 bp, Homo sapien
gctaagtccaactgaaccacagtat

SEQ ID NO: 4219398 - DNA, 25 bp, Homo sapien
agtccaactgaaccacagtatggca

SEQ ID NO: 4219399 - DNA, 25 bp, Homo sapien
caactgaaccacagtatggcatatt

SEQ ID NO: 4219400 - DNA, 25 bp, Homo sapien
actactagctttaataaaatgagaa

SEQ ID NO: 4219401 - DNA, 25 bp, Homo sapien
tcattagttgtcaatacaagtgaga

SEQ ID NO: 4219402 - DNA, 25 bp, Homo sapien
ggaatatttgacagtaaagccatga

SEQ ID NO: 4219403 - DNA, 25 bp, Homo sapien
aatatttgacagtaaagccatgact

SEQ ID NO: 4219404 - DNA, 25 bp, Homo sapien
tgtgtgcgggtaacaataaatctgt

SEQ ID NO: 4219405 - DNA, 25 bp, Homo sapien
gacacattttagtggatcactacca

SEQ ID NO: 4219406 - DNA, 25 bp, Homo sapien
gagaattgctagaacgagaatcgct

SEQ ID NO: 4219407 - DNA, 25 bp, Homo sapien
tatctctgccctagagtcctgtgtg

SEQ ID NO: 4219408 - DNA, 25 bp, Homo sapien
tctttgctttgatgggctttgcaag

SEQ ID NO: 4219409 - DNA, 25 bp, Homo sapien
cacgtaactccttattatgattctt

SEQ ID NO: 4219410 - DNA, 25 bp, Homo sapien
ctttgctttgatgggctttgcaaga

SEQ ID NO: 4219411 - DNA, 25 bp, Homo sapien
ctccttattatgattctttgctttg

SEQ ID NO: 4219412 - DNA, 25 bp, Homo sapien
gttacaagcaggagcccccatgcct

SEQ ID NO: 4219413 - DNA, 25 bp, Homo sapien
tagcagcacagactcattgtcatgg

SEQ ID NO: 4219414 - DNA, 25 bp, Homo sapien
cctgagactggggtgtaagtatggg

SEQ ID NO: 4219415 - DNA, 25 bp, Homo sapien
cctgtgcagggccattccaagtaca

SEQ ID NO: 4219416 - DNA, 25 bp, Homo sapien
tttagcagcacagactcattgtcat

SEQ ID NO: 4219417 - DNA, 25 bp, Homo sapien
cagtcacttggggacaatttttggc

SEQ ID NO: 4219418 - DNA, 25 bp, Homo sapien
caagacctagacatcaatgtttttt

SEQ ID NO: 4219419 - DNA, 25 bp, Homo sapien
acatcaagacctagacatcaatgtt

SEQ ID NO: 4219420 - DNA, 25 bp, Homo sapien
tcagtcacttggggacaatttttgg

SEQ ID NO: 4219421 - DNA, 25 bp, Homo sapien
tcagtaactgcagattcaaaggctc

SEQ ID NO: 4219422 - DNA, 25 bp, Homo sapien
tagggaacttcattaccaagaggca

SEQ ID NO: 4219423 - DNA, 25 bp, Homo sapien
tctagagccacgatttccccaatgg

SEQ ID NO: 4219424 - DNA, 25 bp, Homo sapien
gggaacctcattaccaagagccaag

SEQ ID NO: 4219425 - DNA, 25 bp, Homo sapien
cagagaatttaacagcagtgcctcc

SEQ ID NO: 4219426 - DNA, 25 bp, Homo sapien
tgatggatttccacctcaaaggaag

SEQ ID NO: 4219427 - DNA, 25 bp, Homo sapien
gcctccccacactgagatgatggat

SEQ ID NO: 4219428 - DNA, 25 bp, Homo sapien
cagatgccagcgtttttggaggcct

SEQ ID NO: 4219429 - DNA, 25 bp, Homo sapien
ggttgctgctactgcgatttcccag

SEQ ID NO: 4219430 - DNA, 25 bp, Homo sapien
gattgttccattggagtggtctggt

SEQ ID NO: 4219431 - DNA, 25 bp, Homo sapien
attacagcgctccaaccactcaaag

SEQ ID NO: 4219432 - DNA, 25 bp, Homo sapien
gatttcccagctattaacatagaca

SEQ ID NO: 4219433 - DNA, 25 bp, Homo sapien
actgcagggcctgtcactgttacca

SEQ ID NO: 4219434 - DNA, 25 bp, Homo sapien
catgtcatcagaggtatacaaggag

SEQ ID NO: 4219435 - DNA, 25 bp, Homo sapien
taataggactctaggaacaccaggg

SEQ ID NO: 4219436 - DNA, 25 bp, Homo sapien
gactggagacagtggacaaagccct

SEQ ID NO: 4219437 - DNA, 25 bp, Homo sapien
tatttggcttatacgtctagctgtg

SEQ ID NO: 4219438 - DNA, 25 bp, Homo sapien
tgcagagaattaggctaaccattcc

SEQ ID NO: 4219439 - DNA, 25 bp, Homo sapien
ttcctaatagtgcatgggacatagt

SEQ ID NO: 4219440 - DNA, 25 bp, Homo sapien
tgtttgcttgttggacctcaagtgc

SEQ ID NO: 4219441 - DNA, 25 bp, Homo sapien
gacagcaaaacttgagccatcctga

SEQ ID NO: 4219442 - DNA, 25 bp, Homo sapien
tacatctggcaccaaagagattgtg

SEQ ID NO: 4219443 - DNA, 25 bp, Homo sapien
caggatgatagaactttgggtagac

SEQ ID NO: 4219444 - DNA, 25 bp, Homo sapien
tattgatgtataggaccacattccc

SEQ ID NO: 4219445 - DNA, 25 bp, Homo sapien
ccttcactgggataagcctctggca

SEQ ID NO: 4219446 - DNA, 25 bp, Homo sapien
tctgaagggtataaacttggctgcc

SEQ ID NO: 4219447 - DNA, 25 bp, Homo sapien
taggactgcttagatactaccaaag

SEQ ID NO: 4219448 - DNA, 25 bp, Homo sapien
cctggctcagagtagaaataatgtg

SEQ ID NO: 4219449 - DNA, 25 bp, Homo sapien
ccaggataccaggaactaaattgct

SEQ ID NO: 4219450 - DNA, 25 bp, Homo sapien
caatgtaggccttgtgtagacttat

SEQ ID NO: 4219451 - DNA, 25 bp, Homo sapien
tccctgaagatatcaacaatggctt

SEQ ID NO: 4219452 - DNA, 25 bp, Homo sapien
ggcttgttgtcgttttctcctgaaa

SEQ ID NO: 4219453 - DNA, 25 bp, Homo sapien
gtaaatatacttgctccacagagct

SEQ ID NO: 4219454 - DNA, 25 bp, Homo sapien
taatactttgtgtgatggcactatg

SEQ ID NO: 4219455 - DNA, 25 bp, Homo sapien
actttgtgtgatggcactatgtaaa

SEQ ID NO: 4219456 - DNA, 25 bp, Homo sapien
ctgtgtttgtctgtaagtaatactt

SEQ ID NO: 4219457 - DNA, 25 bp, Homo sapien
ccaccattagggtaagttatagaag

SEQ ID NO: 4219458 - DNA, 25 bp, Homo sapien
gaaaaggagtttctggtagagatca

SEQ ID NO: 4219459 - DNA, 25 bp, Homo sapien
ttagtatgcacttcgatgatgtaaa

SEQ ID NO: 4219460 - DNA, 25 bp, Homo sapien
tgtcccacatcacaagaagggcaaa

SEQ ID NO: 4219461 - DNA, 25 bp, Homo sapien
taggaatacgaatagatacaaagtc

SEQ ID NO: 4219462 - DNA, 25 bp, Homo sapien
gcaactcagtaatggatttggatgt

SEQ ID NO: 4219463 - DNA, 25 bp, Homo sapien
tatgtgcatatggtggcaactcagt

SEQ ID NO: 4219464 - DNA, 25 bp, Homo sapien
tgtgcctgcttatatgcatctgtgc

SEQ ID NO: 4219465 - DNA, 25 bp, Homo sapien
ccttttacaatctgtgtgcagcaga

SEQ ID NO: 4219466 - DNA, 25 bp, Homo sapien
caaggtcacagaagatcccaagtga

SEQ ID NO: 4219467 - DNA, 25 bp, Homo sapien
tacgaccttttaatgatgcacaaat

SEQ ID NO: 4219468 - DNA, 25 bp, Homo sapien
cttctgcagcaagcacaatttttct

SEQ ID NO: 4219469 - DNA, 25 bp, Homo sapien
ccgggttcaaacggctctactgcct

SEQ ID NO: 4219470 - DNA, 25 bp, Homo sapien
tgcctcccgggttcaaacggctcta

SEQ ID NO: 4219471 - DNA, 25 bp, Homo sapien
tcccgggttcaaacggctctactgc

SEQ ID NO: 4219472 - DNA, 25 bp, Homo sapien
ctcccgggttcaaacggctctactg

SEQ ID NO: 4219473 - DNA, 25 bp, Homo sapien
tttcctaattgattctattttccta

SEQ ID NO: 4219474 - DNA, 25 bp, Homo sapien
ttttagatgggatagcctactcctg

SEQ ID NO: 4219475 - DNA, 25 bp, Homo sapien
gctatgtccttcagtattctaccaa

SEQ ID NO: 4219476 - DNA, 25 bp, Homo sapien
tcctaactagctatgtccttcagta

SEQ ID NO: 4219477 - DNA, 25 bp, Homo sapien
gacagctttacagacgtggctgccc

SEQ ID NO: 4219478 - DNA, 25 bp, Homo sapien
tgttcctgctctggactgcaagctt

SEQ ID NO: 4219479 - DNA, 25 bp, Homo sapien
ttcagtatccttgatgtgccccaca

SEQ ID NO: 4219480 - DNA, 25 bp, Homo sapien
tgctaaagtggcaaacaccaatacc

SEQ ID NO: 4219481 - DNA, 25 bp, Homo sapien
tcagtcttagacagaaacacgtgag

SEQ ID NO: 4219482 - DNA, 25 bp, Homo sapien
taggaaatgggcaataattgtgatt

SEQ ID NO: 4219483 - DNA, 25 bp, Homo sapien
cctaggtatttatatagagtcagtc

SEQ ID NO: 4219484 - DNA, 25 bp, Homo sapien
ttataatcacaaacaacaccccaac

SEQ ID NO: 4219485 - DNA, 25 bp, Homo sapien
ccttgtcatcatgtagttggtcatt

SEQ ID NO: 4219486 - DNA, 25 bp, Homo sapien
cttgtcatcatgtagttggtcatta

SEQ ID NO: 4219487 - DNA, 25 bp, Homo sapien
ccaaagtaacatccgtgtctgatcg

SEQ ID NO: 4219488 - DNA, 25 bp, Homo sapien
gccagcatgtatctgggcaagactg

SEQ ID NO: 4219489 - DNA, 25 bp, Homo sapien
caagactgtgtaacggactgcttaa

SEQ ID NO: 4219490 - DNA, 25 bp, Homo sapien
gaaggtctgatgtgccccttacacg

SEQ ID NO: 4219491 - DNA, 25 bp, Homo sapien
aatgtctgtgcctatctggctccac

SEQ ID NO: 4219492 - DNA, 25 bp, Homo sapien
taagaatgtgtaattcctgggcaag

SEQ ID NO: 4219493 - DNA, 25 bp, Homo sapien
ccccagttcttatgatgtggaaaca

SEQ ID NO: 4219494 - DNA, 25 bp, Homo sapien
ctgggcaagtcgtactgtcaggttg

SEQ ID NO: 4219495 - DNA, 25 bp, Homo sapien
tctaaagatcagtaatgctgagctt

SEQ ID NO: 4219496 - DNA, 25 bp, Homo sapien
cgtatctcattttgattttgactgg

SEQ ID NO: 4219497 - DNA, 25 bp, Homo sapien
tgtaggtcccctctatgagtccatg

SEQ ID NO: 4219498 - DNA, 25 bp, Homo sapien
aaaatccagactaccattgatgggc

SEQ ID NO: 4219499 - DNA, 25 bp, Homo sapien
cacttatgtgtctatacggtgctat

SEQ ID NO: 4219500 - DNA, 25 bp, Homo sapien
tattaaatgtacaccaactagcaga

SEQ ID NO: 4219501 - DNA, 25 bp, Homo sapien
gtctatactatacagcacactacgg

SEQ ID NO: 4219502 - DNA, 25 bp, Homo sapien
tacagcattaacctattgctaggca

SEQ ID NO: 4219503 - DNA, 25 bp, Homo sapien
gcaggaaaaggcttatccagtcctt

SEQ ID NO: 4219504 - DNA, 25 bp, Homo sapien
ttagcggagccaaggaacaatgagc

SEQ ID NO: 4219505 - DNA, 25 bp, Homo sapien
tggagtgacctgctgttcaagtccc

SEQ ID NO: 4219506 - DNA, 25 bp, Homo sapien
ggtgctacagcccaatctgtggtca

SEQ ID NO: 4219507 - DNA, 25 bp, Homo sapien
tttaaaagggagcttagcgctcctc

SEQ ID NO: 4219508 - DNA, 25 bp, Homo sapien
tgctatgtacttgatgccatgtaaa

SEQ ID NO: 4219509 - DNA, 25 bp, Homo sapien
tatctttactacaggaactttctgg

SEQ ID NO: 4219510 - DNA, 25 bp, Homo sapien
agcatctatatcagtggttttcaaa

SEQ ID NO: 4219511 - DNA, 25 bp, Homo sapien
ctgctacacctttgccattttctct

SEQ ID NO: 4219512 - DNA, 25 bp, Homo sapien
acacctttgccattttctctcctgg

SEQ ID NO: 4219513 - DNA, 25 bp, Homo sapien
ctttgccattttctctcctggccat

SEQ ID NO: 4219514 - DNA, 25 bp, Homo sapien
cacctttgccattttctctcctggc

SEQ ID NO: 4219515 - DNA, 25 bp, Homo sapien
tcggattgtcaaagcctctttctca

SEQ ID NO: 4219516 - DNA, 25 bp, Homo sapien
taccttgtactatttgcgtaactcg

SEQ ID NO: 4219517 - DNA, 25 bp, Homo sapien
tgcgtaactcggattgtcaaagcct

SEQ ID NO: 4219518 - DNA, 25 bp, Homo sapien
tcaacctccttgtcatcatactgtc

SEQ ID NO: 4219519 - DNA, 25 bp, Homo sapien
caattccccggcagccagtcactcc

SEQ ID NO: 4219520 - DNA, 25 bp, Homo sapien
ccggcagccagtcactccttaatgt

SEQ ID NO: 4219521 - DNA, 25 bp, Homo sapien
agccagtcactccttaatgttttgc

SEQ ID NO: 4219522 - DNA, 25 bp, Homo sapien
ggcagccagtcactccttaatgttt

SEQ ID NO: 4219523 - DNA, 25 bp, Homo sapien
tcctggtggcatacgagagtttcct

SEQ ID NO: 4219524 - DNA, 25 bp, Homo sapien
gggtccacactatccagcttcaagt

SEQ ID NO: 4219525 - DNA, 25 bp, Homo sapien
tgtgtatgagaaattgatccagtcc

SEQ ID NO: 4219526 - DNA, 25 bp, Homo sapien
gtttcctcagaattgccagggtcca

SEQ ID NO: 4219527 - DNA, 25 bp, Homo sapien
tgctggatatctgggaatatggaat

SEQ ID NO: 4219528 - DNA, 25 bp, Homo sapien
aatatggaattagaccttcgcctct

SEQ ID NO: 4219529 - DNA, 25 bp, Homo sapien
aaggaagcataaatatcagacaggg

SEQ ID NO: 4219530 - DNA, 25 bp, Homo sapien
aaaaatttgctggatatctgggaat

SEQ ID NO: 4219531 - DNA, 25 bp, Homo sapien
tgcggggtttttttctatgtcagaa

SEQ ID NO: 4219532 - DNA, 25 bp, Homo sapien
attgcggggtttttttctatgtcag

SEQ ID NO: 4219533 - DNA, 25 bp, Homo sapien
ttgcggggtttttttctatgtcaga

SEQ ID NO: 4219534 - DNA, 25 bp, Homo sapien
cctcttggtaatcaggtggtctgtg

SEQ ID NO: 4219535 - DNA, 25 bp, Homo sapien
cagcttcctcttggtaatcaggtgg

SEQ ID NO: 4219536 - DNA, 25 bp, Homo sapien
ctctagtagaatctcctcttcagct

SEQ ID NO: 4219537 - DNA, 25 bp, Homo sapien
ttcctcttggtaatcaggtggtctg

SEQ ID NO: 4219538 - DNA, 25 bp, Homo sapien
tagctgtacttcattaagtcatgac

SEQ ID NO: 4219539 - DNA, 25 bp, Homo sapien
gacttatcttgcttatagctgtact

SEQ ID NO: 4219540 - DNA, 25 bp, Homo sapien
ttttctgcacaaagtctgacttatc

SEQ ID NO: 4219541 - DNA, 25 bp, Homo sapien
tctgcacaaagtctgacttatcttg

SEQ ID NO: 4219542 - DNA, 25 bp, Homo sapien
ggactagtgggctggacaatgtact

SEQ ID NO: 4219543 - DNA, 25 bp, Homo sapien
tgtactttctacttaaggcagaaga

SEQ ID NO: 4219544 - DNA, 25 bp, Homo sapien
tttgtaagtggtgttagaatcctgg

SEQ ID NO: 4219545 - DNA, 25 bp, Homo sapien
gaccctccagaagctccataataga

SEQ ID NO: 4219546 - DNA, 25 bp, Homo sapien
tttccattgcccacctatttactag

SEQ ID NO: 4219547 - DNA, 25 bp, Homo sapien
gcccacctatttactagatcctgat

SEQ ID NO: 4219548 - DNA, 25 bp, Homo sapien
cctatttactagatcctgattttct

SEQ ID NO: 4219549 - DNA, 25 bp, Homo sapien
cattgcccacctatttactagatcc

SEQ ID NO: 4219550 - DNA, 25 bp, Homo sapien
taagcttggttctgtagccttcctg

SEQ ID NO: 4219551 - DNA, 25 bp, Homo sapien
gagttattgttacccaagccaggct

SEQ ID NO: 4219552 - DNA, 25 bp, Homo sapien
taagtaccgtagctcaagaaagcca

SEQ ID NO: 4219553 - DNA, 25 bp, Homo sapien
aattcatttatcctagtacggctca

SEQ ID NO: 4219554 - DNA, 25 bp, Homo sapien
gcctgtcctcaaccacctgtgtgta

SEQ ID NO: 4219555 - DNA, 25 bp, Homo sapien
tctagtagaaaaacaccctgacgct

SEQ ID NO: 4219556 - DNA, 25 bp, Homo sapien
tcaggtacctttcaatgacacgctc

SEQ ID NO: 4219557 - DNA, 25 bp, Homo sapien
tcttgtatgagtcacacacaggttc

SEQ ID NO: 4219558 - DNA, 25 bp, Homo sapien
tggcttccctgtctcacaagattca

SEQ ID NO: 4219559 - DNA, 25 bp, Homo sapien
aagattcatccacatcgaactgccc

SEQ ID NO: 4219560 - DNA, 25 bp, Homo sapien
gattcatccacatcgaactgcccaa

SEQ ID NO: 4219561 - DNA, 25 bp, Homo sapien
catggcttccctgtctcacaagatt

SEQ ID NO: 4219562 - DNA, 25 bp, Homo sapien
cagttttgccaaggattgatctgct

SEQ ID NO: 4219563 - DNA, 25 bp, Homo sapien
ccagtatctgatttcgcccctgtca

SEQ ID NO: 4219564 - DNA, 25 bp, Homo sapien
ggtgctctagctaaaacgaaattca

SEQ ID NO: 4219565 - DNA, 25 bp, Homo sapien
ggcttgaagttggtgtgatcctcga

SEQ ID NO: 4219566 - DNA, 25 bp, Homo sapien
ggcaaggtctctgttttcgttagtg

SEQ ID NO: 4219567 - DNA, 25 bp, Homo sapien
aactgcagcccgcaatcttgcttat

SEQ ID NO: 4219568 - DNA, 25 bp, Homo sapien
tctgctttggactctcagggcaagg

SEQ ID NO: 4219569 - DNA, 25 bp, Homo sapien
gactttgtggacacttttgtcctga

SEQ ID NO: 4219570 - DNA, 25 bp, Homo sapien
tattttttcttgccatttattcttc

SEQ ID NO: 4219571 - DNA, 25 bp, Homo sapien
tgataaatcctattttttcttgcca

SEQ ID NO: 4219572 - DNA, 25 bp, Homo sapien
ttttttcttgccatttattcttcat

SEQ ID NO: 4219573 - DNA, 25 bp, Homo sapien
cctgataaatcctattttttcttgc

SEQ ID NO: 4219574 - DNA, 25 bp, Homo sapien
tcttctcttgtacttagtattaaag

SEQ ID NO: 4219575 - DNA, 25 bp, Homo sapien
cttctcttgtacttagtattaaagg

SEQ ID NO: 4219576 - DNA, 25 bp, Homo sapien
tagtcattcaacgactgtacattga

SEQ ID NO: 4219577 - DNA, 25 bp, Homo sapien
cagcttccagatgatacgtatcttc

SEQ ID NO: 4219578 - DNA, 25 bp, Homo sapien
tcagaacctgacacataatagtcat

SEQ ID NO: 4219579 - DNA, 25 bp, Homo sapien
cagggactagttgtacagcttccag

SEQ ID NO: 4219580 - DNA, 25 bp, Homo sapien
ctaggcacttggctaagtacttgca

SEQ ID NO: 4219581 - DNA, 25 bp, Homo sapien
tcagtgatgccaacgtccttctagt

SEQ ID NO: 4219582 - DNA, 25 bp, Homo sapien
cagatgctcgctcttcaagcaataa

SEQ ID NO: 4219583 - DNA, 25 bp, Homo sapien
gactaatcctatgttgtatcaccag

SEQ ID NO: 4219584 - DNA, 25 bp, Homo sapien
taagctcagatttgtaattgaaaat

SEQ ID NO: 4219585 - DNA, 25 bp, Homo sapien
ttcatgtccgggtgacaagtctgag

SEQ ID NO: 4219586 - DNA, 25 bp, Homo sapien
cctgcttgaagtcactgtccttttc

SEQ ID NO: 4219587 - DNA, 25 bp, Homo sapien
tctgggtgcagttttcactaagcat

SEQ ID NO: 4219588 - DNA, 25 bp, Homo sapien
tcttcaccacaatttaaggctgtta

SEQ ID NO: 4219589 - DNA, 25 bp, Homo sapien
tcaccacaatttaaggctgttagcg

SEQ ID NO: 4219590 - DNA, 25 bp, Homo sapien
caatttaaggctgttagcgttttct

SEQ ID NO: 4219591 - DNA, 25 bp, Homo sapien
tattcttcaccacaatttaaggctg

SEQ ID NO: 4219592 - DNA, 25 bp, Homo sapien
tctggcaactagagttagtctcaag

SEQ ID NO: 4219593 - DNA, 25 bp, Homo sapien
gatctggcaactagagttagtctca

SEQ ID NO: 4219594 - DNA, 25 bp, Homo sapien
ctgatctggcaactagagttagtct

SEQ ID NO: 4219595 - DNA, 25 bp, Homo sapien
tggcaactagagttagtctcaagtg

SEQ ID NO: 4219596 - DNA, 25 bp, Homo sapien
gagatcaaggagtccatagttcccc

SEQ ID NO: 4219597 - DNA, 25 bp, Homo sapien
tagttcccctttgcagcctgatcgc

SEQ ID NO: 4219598 - DNA, 25 bp, Homo sapien
gcctgatcgcctgtactcaagaaac

SEQ ID NO: 4219599 - DNA, 25 bp, Homo sapien
cccagcaccagatccaaaaacagtg

SEQ ID NO: 4219600 - DNA, 25 bp, Homo sapien
ctttggttgaattgctccaacggtt

SEQ ID NO: 4219601 - DNA, 25 bp, Homo sapien
ttggttgaattgctccaacggttac

SEQ ID NO: 4219602 - DNA, 25 bp, Homo sapien
tttggttgaattgctccaacggtta

SEQ ID NO: 4219603 - DNA, 25 bp, Homo sapien
gaacaacatggtaagccttggacag

SEQ ID NO: 4219604 - DNA, 25 bp, Homo sapien
taataatgcagttggaatgggtgat

SEQ ID NO: 4219605 - DNA, 25 bp, Homo sapien
ccatatgtttggtgctcctatcaca

SEQ ID NO: 4219606 - DNA, 25 bp, Homo sapien
ggagatggagttcataaagaacaac

SEQ ID NO: 4219607 - DNA, 25 bp, Homo sapien
ggaatatttcctccagtttggctgt

SEQ ID NO: 4219608 - DNA, 25 bp, Homo sapien
atcttctcctatttaactctccaac

SEQ ID NO: 4219609 - DNA, 25 bp, Homo sapien
atatttcctccagtttggctgtgtc

SEQ ID NO: 4219610 - DNA, 25 bp, Homo sapien
gggccaatcttctcctatttaactc

SEQ ID NO: 4219611 - DNA, 25 bp, Homo sapien
gacggtcagcccagtcagtatacat

SEQ ID NO: 4219612 - DNA, 25 bp, Homo sapien
tgcaggttgaaaactaacagcccag

SEQ ID NO: 4219613 - DNA, 25 bp, Homo sapien
ccaaagtttgagtgaagatccgctg

SEQ ID NO: 4219614 - DNA, 25 bp, Homo sapien
cactgatggtccgtaaacaaagcca

SEQ ID NO: 4219615 - DNA, 25 bp, Homo sapien
tgaatgtgtgtaagggctgaatccc

SEQ ID NO: 4219616 - DNA, 25 bp, Homo sapien
tgaggtaccaactccaaccagaggt

SEQ ID NO: 4219617 - DNA, 25 bp, Homo sapien
cattaagggaacatcatcaggtgac

SEQ ID NO: 4219618 - DNA, 25 bp, Homo sapien
gagtagtccctttgatccactgaaa

SEQ ID NO: 4219619 - DNA, 25 bp, Homo sapien
taagtcttgtaggttgaaagccaag

SEQ ID NO: 4219620 - DNA, 25 bp, Homo sapien
gaatcttcagtgatcgtttactgca

SEQ ID NO: 4219621 - DNA, 25 bp, Homo sapien
taaatagtaagtcttgtaggttgaa

SEQ ID NO: 4219622 - DNA, 25 bp, Homo sapien
gatcgtttactgcaatccatcaaaa

SEQ ID NO: 4219623 - DNA, 25 bp, Homo sapien
tatggtctacacaataaaacggctc

SEQ ID NO: 4219624 - DNA, 25 bp, Homo sapien
taattacggcttaatcagcagcaca

SEQ ID NO: 4219625 - DNA, 25 bp, Homo sapien
tgtgataatggtgtacctgccagtc

SEQ ID NO: 4219626 - DNA, 25 bp, Homo sapien
taaggccattaacagcattgacgct

SEQ ID NO: 4219627 - DNA, 25 bp, Homo sapien
tcttagcattggactaatagtcatt

SEQ ID NO: 4219628 - DNA, 25 bp, Homo sapien
catggccaagatgtacaaagttggt

SEQ ID NO: 4219629 - DNA, 25 bp, Homo sapien
ctttaatgagcaaagatcatgtttc

SEQ ID NO: 4219630 - DNA, 25 bp, Homo sapien
cacaatgaccagtgacatggccaag

SEQ ID NO: 4219631 - DNA, 25 bp, Homo sapien
gagttgccagcaagacgtctacaaa

SEQ ID NO: 4219632 - DNA, 25 bp, Homo sapien
taagtatatgggtctgaaagggcca

SEQ ID NO: 4219633 - DNA, 25 bp, Homo sapien
ttcacatacagatcaggaagtcgga

SEQ ID NO: 4219634 - DNA, 25 bp, Homo sapien
aaaggcacttaagccctgcacacgg

SEQ ID NO: 4219635 - DNA, 25 bp, Homo sapien
ggtcataactagtaataggataggc

SEQ ID NO: 4219636 - DNA, 25 bp, Homo sapien
taactagtaataggataggccatgg

SEQ ID NO: 4219637 - DNA, 25 bp, Homo sapien
ggagaagaggtcataactagtaata

SEQ ID NO: 4219638 - DNA, 25 bp, Homo sapien
aataggataggccatggaaacagga

SEQ ID NO: 4219639 - DNA, 25 bp, Homo sapien
tgtctgctacataccttaactggtg

SEQ ID NO: 4219640 - DNA, 25 bp, Homo sapien
taactggtgaactggctcaatagaa

SEQ ID NO: 4219641 - DNA, 25 bp, Homo sapien
tatagcatgacttcagataggctgt

SEQ ID NO: 4219642 - DNA, 25 bp, Homo sapien
tttagaattcagacccatggcagtg

SEQ ID NO: 4219643 - DNA, 25 bp, Homo sapien
aattcaggcgatgaagacggtgtgg

SEQ ID NO: 4219644 - DNA, 25 bp, Homo sapien
tcaattcaggcgatgaagacggtgt

SEQ ID NO: 4219645 - DNA, 25 bp, Homo sapien
caattcaggcgatgaagacggtgtg

SEQ ID NO: 4219646 - DNA, 25 bp, Homo sapien
aaaataactcatggaagatatgaaa

SEQ ID NO: 4219647 - DNA, 25 bp, Homo sapien
cttgtgtacatctatccaggagaca

SEQ ID NO: 4219648 - DNA, 25 bp, Homo sapien
accatttggctaccttgctgtatag

SEQ ID NO: 4219649 - DNA, 25 bp, Homo sapien
cacaggtttggttttgggtgcaagc

SEQ ID NO: 4219650 - DNA, 25 bp, Homo sapien
tctgacagttgaacctagagacttc

SEQ ID NO: 4219651 - DNA, 25 bp, Homo sapien
tctgaccaaatcattcctggtgatt

SEQ ID NO: 4219652 - DNA, 25 bp, Homo sapien
cctggtgatttgctggcccctaaat

SEQ ID NO: 4219653 - DNA, 25 bp, Homo sapien
aatttagccccagggactctttcat

SEQ ID NO: 4219654 - DNA, 25 bp, Homo sapien
gactactctcccagttatctttctc

SEQ ID NO: 4219655 - DNA, 25 bp, Homo sapien
gatgtgggaggcaacaaacaggatc

SEQ ID NO: 4219656 - DNA, 25 bp, Homo sapien
acaaacaggatcaggacaagtggac

SEQ ID NO: 4219657 - DNA, 25 bp, Homo sapien
aacaggatcaggacaagtggacaat

SEQ ID NO: 4219658 - DNA, 25 bp, Homo sapien
gaggtcaatgatgtggatgtgggag

SEQ ID NO: 4219659 - DNA, 25 bp, Homo sapien
gaactgcacagttttcttgatcact

SEQ ID NO: 4219660 - DNA, 25 bp, Homo sapien
tttgggccagtgaatctgggtttcc

SEQ ID NO: 4219661 - DNA, 25 bp, Homo sapien
ccatgatgctgccagatatttccaa

SEQ ID NO: 4219662 - DNA, 25 bp, Homo sapien
ctgggtgaggtgccagaactgcaca

SEQ ID NO: 4219663 - DNA, 25 bp, Homo sapien
ggaaacagggacattgccatcaaca

SEQ ID NO: 4219664 - DNA, 25 bp, Homo sapien
cacactttagcaaggcagttgatga

SEQ ID NO: 4219665 - DNA, 25 bp, Homo sapien
tgcacactttagcaaggcagttgat

SEQ ID NO: 4219666 - DNA, 25 bp, Homo sapien
cactttagcaaggcagttgatgagg

SEQ ID NO: 4219667 - DNA, 25 bp, Homo sapien
gaatcaattcggcataagggagttc

SEQ ID NO: 4219668 - DNA, 25 bp, Homo sapien
gaggaatcaattcggcataagggag

SEQ ID NO: 4219669 - DNA, 25 bp, Homo sapien
caattcggcataagggagttcagac

SEQ ID NO: 4219670 - DNA, 25 bp, Homo sapien
cttctgaggaatcaattcggcataa

SEQ ID NO: 4219671 - DNA, 25 bp, Homo sapien
agttggctacttcagagtcagggga

SEQ ID NO: 4219672 - DNA, 25 bp, Homo sapien
gcagttggctacttcagagtcaggg

SEQ ID NO: 4219673 - DNA, 25 bp, Homo sapien
tcagcagttggctacttcagagtca

SEQ ID NO: 4219674 - DNA, 25 bp, Homo sapien
cagcagttggctacttcagagtcag

SEQ ID NO: 4219675 - DNA, 25 bp, Homo sapien
attccaggtctatatccacagcaat

SEQ ID NO: 4219676 - DNA, 25 bp, Homo sapien
aaaagtttctatgccgtagacttga

SEQ ID NO: 4219677 - DNA, 25 bp, Homo sapien
ttctatgccgtagacttgattccag

SEQ ID NO: 4219678 - DNA, 25 bp, Homo sapien
ccaggtctatatccacagcaatgcc

SEQ ID NO: 4219679 - DNA, 25 bp, Homo sapien
cgcccttccgctgtccacagaccat

SEQ ID NO: 4219680 - DNA, 25 bp, Homo sapien
ggcgcccttccgctgtccacagacc

SEQ ID NO: 4219681 - DNA, 25 bp, Homo sapien
gcgcccttccgctgtccacagacca

SEQ ID NO: 4219682 - DNA, 25 bp, Homo sapien
cgcaggcgcgctgtgccctgacggt

SEQ ID NO: 4219683 - DNA, 25 bp, Homo sapien
gcgcgctgtgccctgacggtgcttc

SEQ ID NO: 4219684 - DNA, 25 bp, Homo sapien
caggcgcgctgtgccctgacggtgc

SEQ ID NO: 4219685 - DNA, 25 bp, Homo sapien
gcgctgtgccctgacggtgcttcac

SEQ ID NO: 4219686 - DNA, 25 bp, Homo sapien
tcacggtgctcttgtagccgctggg

SEQ ID NO: 4219687 - DNA, 25 bp, Homo sapien
cagcccgggtagtggatagcgccct

SEQ ID NO: 4219688 - DNA, 25 bp, Homo sapien
gtggatagcgcccttcacggtgctc

SEQ ID NO: 4219689 - DNA, 25 bp, Homo sapien
gcccttcacggtgctcttgtagccg

SEQ ID NO: 4219690 - DNA, 25 bp, Homo sapien
cggcaatgaacagctgcgtccactt

SEQ ID NO: 4219691 - DNA, 25 bp, Homo sapien
cctcagcggcaatgaacagctgcgt

SEQ ID NO: 4219692 - DNA, 25 bp, Homo sapien
gcggcaatgaacagctgcgtccact

SEQ ID NO: 4219693 - DNA, 25 bp, Homo sapien
tcagcggcaatgaacagctgcgtcc

SEQ ID NO: 4219694 - DNA, 25 bp, Homo sapien
gcagcacacggtcgtactctcaggc

SEQ ID NO: 4219695 - DNA, 25 bp, Homo sapien
gcacacggtcgtactctcaggcatg

SEQ ID NO: 4219696 - DNA, 25 bp, Homo sapien
aagcagcacacggtcgtactctcag

SEQ ID NO: 4219697 - DNA, 25 bp, Homo sapien
acacggtcgtactctcaggcatggt

SEQ ID NO: 4219698 - DNA, 25 bp, Homo sapien
ctgagtctcagggttgtgggagata

SEQ ID NO: 4219699 - DNA, 25 bp, Homo sapien
tcatgggtcttctgagtctcagggt

SEQ ID NO: 4219700 - DNA, 25 bp, Homo sapien
gagtctcagggttgtgggagataac

SEQ ID NO: 4219701 - DNA, 25 bp, Homo sapien
cttcatgggtcttctgagtctcagg

SEQ ID NO: 4219702 - DNA, 25 bp, Homo sapien
gctttgtcatttcggccacctctgg

SEQ ID NO: 4219703 - DNA, 25 bp, Homo sapien
ggctttgtcatttcggccacctctg

SEQ ID NO: 4219704 - DNA, 25 bp, Homo sapien
catctctgcggatggtggagggctt

SEQ ID NO: 4219705 - DNA, 25 bp, Homo sapien
gagacgtccagtctggcggacagca

SEQ ID NO: 4219706 - DNA, 25 bp, Homo sapien
ggtggttgccacctccgaaaggatg

SEQ ID NO: 4219707 - DNA, 25 bp, Homo sapien
tgagacccactttgcggtcagcggg

SEQ ID NO: 4219708 - DNA, 25 bp, Homo sapien
acaaactttactgagcccctcatca

SEQ ID NO: 4219709 - DNA, 25 bp, Homo sapien
gaaacactgtggtcaaagaagaaaa

SEQ ID NO: 4219710 - DNA, 25 bp, Homo sapien
actgtggtcaaagaagaaaattcct

SEQ ID NO: 4219711 - DNA, 25 bp, Homo sapien
tgtgtgaaacactgtggtcaaagaa

SEQ ID NO: 4219712 - DNA, 25 bp, Homo sapien
acactgtggtcaaagaagaaaattc

SEQ ID NO: 4219713 - DNA, 25 bp, Homo sapien
cagattccaaaacaagcaaccgttt

SEQ ID NO: 4219714 - DNA, 25 bp, Homo sapien
gccggattttcagcagccgtaaagc

SEQ ID NO: 4219715 - DNA, 25 bp, Homo sapien
tcagccgcttggcaaggaacgggct

SEQ ID NO: 4219716 - DNA, 25 bp, Homo sapien
gccgcgagcgtcagccgcttggcaa

SEQ ID NO: 4219717 - DNA, 25 bp, Homo sapien
gctcgtctgcggtacggctgccggg

SEQ ID NO: 4219718 - DNA, 25 bp, Homo sapien
gctagcgcgccgtgtcgggctgcct

SEQ ID NO: 4219719 - DNA, 25 bp, Homo sapien
tgcctggccggcgtgcactgcatac

SEQ ID NO: 4219720 - DNA, 25 bp, Homo sapien
ggactcggagctgctacgctcctct

SEQ ID NO: 4219721 - DNA, 25 bp, Homo sapien
tgcatacgtgtgtgaacgtgtcaga

SEQ ID NO: 4219722 - DNA, 25 bp, Homo sapien
ccctattttcccatgcgtggttaca

SEQ ID NO: 4219723 - DNA, 25 bp, Homo sapien
gagatgtcagaccactcacctacca

SEQ ID NO: 4219724 - DNA, 25 bp, Homo sapien
gactgatctctatcctcaggcgcag

SEQ ID NO: 4219725 - DNA, 25 bp, Homo sapien
cccctaattttagttggtcagtgag

SEQ ID NO: 4219726 - DNA, 25 bp, Homo sapien
ttccatcagtctatgtgtctgggtt

SEQ ID NO: 4219727 - DNA, 25 bp, Homo sapien
ggtttcatcatagcccataactgat

SEQ ID NO: 4219728 - DNA, 25 bp, Homo sapien
gagacttaaaatggtttcatcatag

SEQ ID NO: 4219729 - DNA, 25 bp, Homo sapien
tagcccataactgatcttactgatc

SEQ ID NO: 4219730 - DNA, 25 bp, Homo sapien
catcatagcccataactgatcttac

SEQ ID NO: 4219731 - DNA, 25 bp, Homo sapien
gatactggatgagcatttcctacac

SEQ ID NO: 4219732 - DNA, 25 bp, Homo sapien
tggatgagcatttcctacaccatca

SEQ ID NO: 4219733 - DNA, 25 bp, Homo sapien
ttttctctttaaacagcactgcaga

SEQ ID NO: 4219734 - DNA, 25 bp, Homo sapien
aacagcactgcagatactggatgag

SEQ ID NO: 4219735 - DNA, 25 bp, Homo sapien
tatgacacacatagccaatagaatg

SEQ ID NO: 4219736 - DNA, 25 bp, Homo sapien
gaaaaatccgcaaagcattcaaggg

SEQ ID NO: 4219737 - DNA, 25 bp, Homo sapien
gataaaggtgcaagcattttgttcc

SEQ ID NO: 4219738 - DNA, 25 bp, Homo sapien
aactgctgttatattcttgagacta

SEQ ID NO: 4219739 - DNA, 25 bp, Homo sapien
tgaactaaattatggcaaggctaac

SEQ ID NO: 4219740 - DNA, 25 bp, Homo sapien
cacaagaaggtggaaggttcttcca

SEQ ID NO: 4219741 - DNA, 25 bp, Homo sapien
aacagaaagccccatgagaagaaag

SEQ ID NO: 4219742 - DNA, 25 bp, Homo sapien
gcatatcccacatggttagcacagt

SEQ ID NO: 4219743 - DNA, 25 bp, Homo sapien
tcactgtcctataatctgggcaaag

SEQ ID NO: 4219744 - DNA, 25 bp, Homo sapien
tgtcaacacaaagatagccaaaata

SEQ ID NO: 4219745 - DNA, 25 bp, Homo sapien
cagacacacaccataagctggcatc

SEQ ID NO: 4219746 - DNA, 25 bp, Homo sapien
aagtgaacccctagagttatgacca

SEQ ID NO: 4219747 - DNA, 25 bp, Homo sapien
atatcaagcttgctacataacacct

SEQ ID NO: 4219748 - DNA, 25 bp, Homo sapien
tcaagcttgctacataacaccttgg

SEQ ID NO: 4219749 - DNA, 25 bp, Homo sapien
tatcaagcttgctacataacacctt

SEQ ID NO: 4219750 - DNA, 25 bp, Homo sapien
caagcttgctacataacaccttgga

SEQ ID NO: 4219751 - DNA, 25 bp, Homo sapien
tataaagtgagagatacgggttcag

SEQ ID NO: 4219752 - DNA, 25 bp, Homo sapien
taaagtgagagatacgggttcagtt

SEQ ID NO: 4219753 - DNA, 25 bp, Homo sapien
aagtgagagatacgggttcagtttc

SEQ ID NO: 4219754 - DNA, 25 bp, Homo sapien
gtgagagatacgggttcagtttcat

SEQ ID NO: 4219755 - DNA, 25 bp, Homo sapien
ggacactagtctcattcacgaatac

SEQ ID NO: 4219756 - DNA, 25 bp, Homo sapien
cattcacgaatactcttccttcatg

SEQ ID NO: 4219757 - DNA, 25 bp, Homo sapien
tcagcccttgcagtctcttttatag

SEQ ID NO: 4219758 - DNA, 25 bp, Homo sapien
ctcttttataggacactagtctcat

SEQ ID NO: 4219759 - DNA, 25 bp, Homo sapien
tacaggaaagcttaaacgaaatgca

SEQ ID NO: 4219760 - DNA, 25 bp, Homo sapien
tcattgatctctgctttgatggagg

SEQ ID NO: 4219761 - DNA, 25 bp, Homo sapien
gcatttgtgtaagagatgtagatac

SEQ ID NO: 4219762 - DNA, 25 bp, Homo sapien
gatttttgatgtaaaataagccgaa

SEQ ID NO: 4219763 - DNA, 25 bp, Homo sapien
aagacgccctaagacatcaaaagct

SEQ ID NO: 4219764 - DNA, 25 bp, Homo sapien
taaaagacgccctaagacatcaaaa

SEQ ID NO: 4219765 - DNA, 25 bp, Homo sapien
aaagctattttgaacgtccagctgg

SEQ ID NO: 4219766 - DNA, 25 bp, Homo sapien
gttgaataaaagacgccctaagaca

SEQ ID NO: 4219767 - DNA, 25 bp, Homo sapien
ctctgaggttgacagatgctctatg

SEQ ID NO: 4219768 - DNA, 25 bp, Homo sapien
cagggcaatcatcagtaactctgag

SEQ ID NO: 4219769 - DNA, 25 bp, Homo sapien
gacagatgctctatgtctcttggca

SEQ ID NO: 4219770 - DNA, 25 bp, Homo sapien
ggttgacagatgctctatgtctctt

SEQ ID NO: 4219771 - DNA, 25 bp, Homo sapien
attaacaattggattgcttttcatt

SEQ ID NO: 4219772 - DNA, 25 bp, Homo sapien
ttaacaattggattgcttttcatta

SEQ ID NO: 4219773 - DNA, 25 bp, Homo sapien
taacaattggattgcttttcattaa

SEQ ID NO: 4219774 - DNA, 25 bp, Homo sapien
tgcacagggatagctttagaagata

SEQ ID NO: 4219775 - DNA, 25 bp, Homo sapien
gtagtatcaaataaagcaccaacag

SEQ ID NO: 4219776 - DNA, 25 bp, Homo sapien
gaaacagaatactcagttgcacata

SEQ ID NO: 4219777 - DNA, 25 bp, Homo sapien
gctacattagcaaacaaaaacttgg

SEQ ID NO: 4219778 - DNA, 25 bp, Homo sapien
agtagtggtcctcatagcatggagt

SEQ ID NO: 4219779 - DNA, 25 bp, Homo sapien
gggccgattgacacttcatatggcc

SEQ ID NO: 4219780 - DNA, 25 bp, Homo sapien
agagtagtggtcctcatagcatgga

SEQ ID NO: 4219781 - DNA, 25 bp, Homo sapien
gacacttcatatggccaggtgcccc

SEQ ID NO: 4219782 - DNA, 25 bp, Homo sapien
gggtcccctcttgaagagatgttag

SEQ ID NO: 4219783 - DNA, 25 bp, Homo sapien
gagatgttagttctggtttctcctc

SEQ ID NO: 4219784 - DNA, 25 bp, Homo sapien
tgctgtggttgtattattaggaagg

SEQ ID NO: 4219785 - DNA, 25 bp, Homo sapien
tgttgctgtggttgtattattagga

SEQ ID NO: 4219786 - DNA, 25 bp, Homo sapien
aaaacagcaagaagcaggcagttca

SEQ ID NO: 4219787 - DNA, 25 bp, Homo sapien
aactgctgccactatcagcaaaaca

SEQ ID NO: 4219788 - DNA, 25 bp, Homo sapien
tgctgccactatcagcaaaacagca

SEQ ID NO: 4219789 - DNA, 25 bp, Homo sapien
aaacagcaagaagcaggcagttcat

SEQ ID NO: 4219790 - DNA, 25 bp, Homo sapien
tcaaagtgaaccatcagcagaaaag

SEQ ID NO: 4219791 - DNA, 25 bp, Homo sapien
caattgctgacacaactaacatttc

SEQ ID NO: 4219792 - DNA, 25 bp, Homo sapien
gaaaaaccacctctatcaattgctg

SEQ ID NO: 4219793 - DNA, 25 bp, Homo sapien
gcagagagatttgtggaacactgtc

SEQ ID NO: 4219794 - DNA, 25 bp, Homo sapien
aaatgggatttgtaacgagatcgct

SEQ ID NO: 4219795 - DNA, 25 bp, Homo sapien
tagcacagagtttggcaactaacat

SEQ ID NO: 4219796 - DNA, 25 bp, Homo sapien
caggtcaaatcaatcccatgcaata

SEQ ID NO: 4219797 - DNA, 25 bp, Homo sapien
ttacctgttcgacaagctaaactag

SEQ ID NO: 4219798 - DNA, 25 bp, Homo sapien
gacgtctcccgtgtttattattcca

SEQ ID NO: 4219799 - DNA, 25 bp, Homo sapien
tattccactctgtgtggctgtacat

SEQ ID NO: 4219800 - DNA, 25 bp, Homo sapien
tcccagctttggacgtctcccgtgt

SEQ ID NO: 4219801 - DNA, 25 bp, Homo sapien
atagtattacatccctcactcccgt

SEQ ID NO: 4219802 - DNA, 25 bp, Homo sapien
tctgttgtaattcacctccatcttt

SEQ ID NO: 4219803 - DNA, 25 bp, Homo sapien
tataggctacagctttcaaaatctg

SEQ ID NO: 4219804 - DNA, 25 bp, Homo sapien
aatatgtaatgcaatgacatgctgg

SEQ ID NO: 4219805 - DNA, 25 bp, Homo sapien
tgcaatgacatgctggatataggct

SEQ ID NO: 4219806 - DNA, 25 bp, Homo sapien
tgccataacaggctcttctggagtg

SEQ ID NO: 4219807 - DNA, 25 bp, Homo sapien
tacggcaaaatatagacccaaaatc

SEQ ID NO: 4219808 - DNA, 25 bp, Homo sapien
catgccataacaggctcttctggag

SEQ ID NO: 4219809 - DNA, 25 bp, Homo sapien
tggtgtgtgaaaggtacggcaaaat

SEQ ID NO: 4219810 - DNA, 25 bp, Homo sapien
ctgggtttgcctttggggcgcccat

SEQ ID NO: 4219811 - DNA, 25 bp, Homo sapien
ccttagggttatagatcctgggtca

SEQ ID NO: 4219812 - DNA, 25 bp, Homo sapien
aacagtcaatcaagggagtcaagtg

SEQ ID NO: 4219813 - DNA, 25 bp, Homo sapien
tctttgcattacagtgccaagtgca

SEQ ID NO: 4219814 - DNA, 25 bp, Homo sapien
taacaggactatagtttgcatagga

SEQ ID NO: 4219815 - DNA, 25 bp, Homo sapien
cagcaaagcctatgttgccaagcga

SEQ ID NO: 4219816 - DNA, 25 bp, Homo sapien
ctacagctgcaaggttaaatccatt

SEQ ID NO: 4219817 - DNA, 25 bp, Homo sapien
ctggttggctgttgcaaaaattgct

SEQ ID NO: 4219818 - DNA, 25 bp, Homo sapien
aaagcctatgttgccaagcgaggaa

SEQ ID NO: 4219819 - DNA, 25 bp, Homo sapien
gcttctgcaggttacaggagactga

SEQ ID NO: 4219820 - DNA, 25 bp, Homo sapien
tacttcaattgaatgttcctagtgc

SEQ ID NO: 4219821 - DNA, 25 bp, Homo sapien
tagtgcaactggagggcttctgcag

SEQ ID NO: 4219822 - DNA, 25 bp, Homo sapien
ccaggtgcctaatagtcaatgctca

SEQ ID NO: 4219823 - DNA, 25 bp, Homo sapien
tttgttagatgcatacattgcaaaa

SEQ ID NO: 4219824 - DNA, 25 bp, Homo sapien
tacagttttaggtttcacatttcag

SEQ ID NO: 4219825 - DNA, 25 bp, Homo sapien
tctgatggggttgtttggccttttc

SEQ ID NO: 4219826 - DNA, 25 bp, Homo sapien
caaagggttgtagataggtggtctt

SEQ ID NO: 4219827 - DNA, 25 bp, Homo sapien
tttcatgagtatacccatcacgctg

SEQ ID NO: 4219828 - DNA, 25 bp, Homo sapien
ccaagtctgacttagaacactctga

SEQ ID NO: 4219829 - DNA, 25 bp, Homo sapien
tgggattgacctaatcctagcccag

SEQ ID NO: 4219830 - DNA, 25 bp, Homo sapien
tagtatgctagaagctgatgctgca

SEQ ID NO: 4219831 - DNA, 25 bp, Homo sapien
taataaatccagacgctttctccct

SEQ ID NO: 4219832 - DNA, 25 bp, Homo sapien
ggaggcctctatgacctaaaatttg

SEQ ID NO: 4219833 - DNA, 25 bp, Homo sapien
gcaatttctaaagatgggcatctaa

SEQ ID NO: 4219834 - DNA, 25 bp, Homo sapien
caggcaacagggtttagatctggta

SEQ ID NO: 4219835 - DNA, 25 bp, Homo sapien
gagagccacagatgtagttccaagc

SEQ ID NO: 4219836 - DNA, 25 bp, Homo sapien
gaagacctagttcctccattagtga

SEQ ID NO: 4219837 - DNA, 25 bp, Homo sapien
gaagatgtaataggtcccagacaga

SEQ ID NO: 4219838 - DNA, 25 bp, Homo sapien
tatcacaataggtggtgactccagc

SEQ ID NO: 4219839 - DNA, 25 bp, Homo sapien
ccaggaaatgggagaccaagtgtct

SEQ ID NO: 4219840 - DNA, 25 bp, Homo sapien
tcggatgcagcatgccacataggct

SEQ ID NO: 4219841 - DNA, 25 bp, Homo sapien
acttcatcgttgattcactgcagga

SEQ ID NO: 4219842 - DNA, 25 bp, Homo sapien
gggagattccccgatcttgactctt

SEQ ID NO: 4219843 - DNA, 25 bp, Homo sapien
gatgcagtggagtaataactcttgt

SEQ ID NO: 4219844 - DNA, 25 bp, Homo sapien
gcaaactccaaaacgcaaaatgtag

SEQ ID NO: 4219845 - DNA, 25 bp, Homo sapien
cctgtagtaactacttcaaagctaa

SEQ ID NO: 4219846 - DNA, 25 bp, Homo sapien
tacattaggtaatacttcagaaact

SEQ ID NO: 4219847 - DNA, 25 bp, Homo sapien
ggtcctgtttgcccacatataagag

SEQ ID NO: 4219848 - DNA, 25 bp, Homo sapien
tcctgtttgcccacatataagaggg

SEQ ID NO: 4219849 - DNA, 25 bp, Homo sapien
cctgtttgcccacatataagagggg

SEQ ID NO: 4219850 - DNA, 25 bp, Homo sapien
gtcctgtttgcccacatataagagg

SEQ ID NO: 4219851 - DNA, 25 bp, Homo sapien
gaatctgaatggtcgcaactgtatc

SEQ ID NO: 4219852 - DNA, 25 bp, Homo sapien
tagtagatattggatctttccaagc

SEQ ID NO: 4219853 - DNA, 25 bp, Homo sapien
gcctaattgaaatcacttttaaaca

SEQ ID NO: 4219854 - DNA, 25 bp, Homo sapien
caactgtatcttctaacctgcctaa

SEQ ID NO: 4219855 - DNA, 25 bp, Homo sapien
tcagagatgtcacagtagagttaga

SEQ ID NO: 4219856 - DNA, 25 bp, Homo sapien
caaaggtatgagtttacagaaccaa

SEQ ID NO: 4219857 - DNA, 25 bp, Homo sapien
taagtgtggacatagactgacattg

SEQ ID NO: 4219858 - DNA, 25 bp, Homo sapien
taagctatcatgataagagactcat

SEQ ID NO: 4219859 - DNA, 25 bp, Homo sapien
gcatttgggtcataatcaatcaaca

SEQ ID NO: 4219860 - DNA, 25 bp, Homo sapien
agggcagaggcactatccaaccaag

SEQ ID NO: 4219861 - DNA, 25 bp, Homo sapien
tgtgtaacagaagtgacctttgctc

SEQ ID NO: 4219862 - DNA, 25 bp, Homo sapien
gctccacttcttagtaagttcctca

SEQ ID NO: 4219863 - DNA, 25 bp, Homo sapien
gctgagtgctgaattgtgcatcctt

SEQ ID NO: 4219864 - DNA, 25 bp, Homo sapien
catacgtgctatacaatttaaagga

SEQ ID NO: 4219865 - DNA, 25 bp, Homo sapien
ggaatatataatcataacctatgga

SEQ ID NO: 4219866 - DNA, 25 bp, Homo sapien
taattaataggaccaatgttgttgt

SEQ ID NO: 4219867 - DNA, 25 bp, Homo sapien
tctttgactgtctggtagaattctg

SEQ ID NO: 4219868 - DNA, 25 bp, Homo sapien
gtcctggacttctttgtgttggtaa

SEQ ID NO: 4219869 - DNA, 25 bp, Homo sapien
cctggacttctttgtgttggtaatt

SEQ ID NO: 4219870 - DNA, 25 bp, Homo sapien
tgactgtctggtagaattctgctgt

SEQ ID NO: 4219871 - DNA, 25 bp, Homo sapien
caatcatattatcagcagacagcga

SEQ ID NO: 4219872 - DNA, 25 bp, Homo sapien
ccgtgggtctgtcataggtggcttc

SEQ ID NO: 4219873 - DNA, 25 bp, Homo sapien
tgttcgatttctcacagggaatgat

SEQ ID NO: 4219874 - DNA, 25 bp, Homo sapien
gagctttccggagtagtctttagag

SEQ ID NO: 4219875 - DNA, 25 bp, Homo sapien
tacggtggccagatttacaaaatga

SEQ ID NO: 4219876 - DNA, 25 bp, Homo sapien
cataatgggcactactttctactgt

SEQ ID NO: 4219877 - DNA, 25 bp, Homo sapien
ttctgtaaagtgaatggctgctgtc

SEQ ID NO: 4219878 - DNA, 25 bp, Homo sapien
tactttcctgctgactacctaccag

SEQ ID NO: 4219879 - DNA, 25 bp, Homo sapien
ttgcagtgtcatattggttttggta

SEQ ID NO: 4219880 - DNA, 25 bp, Homo sapien
gtttcaatcccatttacttctgctc

SEQ ID NO: 4219881 - DNA, 25 bp, Homo sapien
cctctcactactgtttttgcagtgt

SEQ ID NO: 4219882 - DNA, 25 bp, Homo sapien
tactaagattgagtttggttgccct

SEQ ID NO: 4219883 - DNA, 25 bp, Homo sapien
ggcttgcaggacctgttttactatg

SEQ ID NO: 4219884 - DNA, 25 bp, Homo sapien
ggacctgttttactatgaagtgaga

SEQ ID NO: 4219885 - DNA, 25 bp, Homo sapien
cctgttttactatgaagtgagatca

SEQ ID NO: 4219886 - DNA, 25 bp, Homo sapien
tgcaggacctgttttactatgaagt

SEQ ID NO: 4219887 - DNA, 25 bp, Homo sapien
tgcaagctttgtgaccttctgactt

SEQ ID NO: 4219888 - DNA, 25 bp, Homo sapien
cttctgactttctactgtagtattg

SEQ ID NO: 4219889 - DNA, 25 bp, Homo sapien
gactttctactgtagtattgtaaca

SEQ ID NO: 4219890 - DNA, 25 bp, Homo sapien
tgtaacagtatactacctgctttct

SEQ ID NO: 4219891 - DNA, 25 bp, Homo sapien
gagggccaagcagtttcaagttgtg

SEQ ID NO: 4219892 - DNA, 25 bp, Homo sapien
agcagtttcaagttgtgtcacttac

SEQ ID NO: 4219893 - DNA, 25 bp, Homo sapien
ttaaagagggccaagcagtttcaag

SEQ ID NO: 4219894 - DNA, 25 bp, Homo sapien
ttttaaagagggccaagcagtttca

SEQ ID NO: 4219895 - DNA, 25 bp, Homo sapien
tgcaaagacgtgttaggtaaacttg

SEQ ID NO: 4219896 - DNA, 25 bp, Homo sapien
caaagacgtgttaggtaaacttgct

SEQ ID NO: 4219897 - DNA, 25 bp, Homo sapien
agacgtgttaggtaaacttgcttca

SEQ ID NO: 4219898 - DNA, 25 bp, Homo sapien
acgtgttaggtaaacttgcttcatt

SEQ ID NO: 4219899 - DNA, 25 bp, Homo sapien
aaactagaggcttcccatatacttt

SEQ ID NO: 4219900 - DNA, 25 bp, Homo sapien
ctgaatacagacaggtgatgcaccc

SEQ ID NO: 4219901 - DNA, 25 bp, Homo sapien
tatcatatgcacaattggaacaaac

SEQ ID NO: 4219902 - DNA, 25 bp, Homo sapien
gctatttaggtggttgccaaacagt

SEQ ID NO: 4219903 - DNA, 25 bp, Homo sapien
ggagagctattattagaaacgctca

SEQ ID NO: 4219904 - DNA, 25 bp, Homo sapien
ttagaaacgctcaaaacatccaggc

SEQ ID NO: 4219905 - DNA, 25 bp, Homo sapien
tgtagccttcagagtagggatttcc

SEQ ID NO: 4219906 - DNA, 25 bp, Homo sapien
tcctctgtacttggaacatcttccc

SEQ ID NO: 4219907 - DNA, 25 bp, Homo sapien
gaaatttcaactccaagatgtcctg

SEQ ID NO: 4219908 - DNA, 25 bp, Homo sapien
gcaaagaccctctcttgtacctgga

SEQ ID NO: 4219909 - DNA, 25 bp, Homo sapien
tcatggaacacaggtccaacaggag

SEQ ID NO: 4219910 - DNA, 25 bp, Homo sapien
gaagggctagtgaaagccttcctca

SEQ ID NO: 4219911 - DNA, 25 bp, Homo sapien
tatctcacgttctattcaagtacac

SEQ ID NO: 4219912 - DNA, 25 bp, Homo sapien
caggttttaactaagtaccatgtca

SEQ ID NO: 4219913 - DNA, 25 bp, Homo sapien
tgaaacaatttcagtaccataaaat

SEQ ID NO: 4219914 - DNA, 25 bp, Homo sapien
tcaagtacactgcttgccatcttat

SEQ ID NO: 4219915 - DNA, 25 bp, Homo sapien
tatggtttaacaagcatacgtgcac

SEQ ID NO: 4219916 - DNA, 25 bp, Homo sapien
ttttggacacaatatacaacctgca

SEQ ID NO: 4219917 - DNA, 25 bp, Homo sapien
gcctcccgaagtgttcgactatgca

SEQ ID NO: 4219918 - DNA, 25 bp, Homo sapien
ggttaaacatatctgtcaccagagc

SEQ ID NO: 4219919 - DNA, 25 bp, Homo sapien
gcaatgcaacctgtcaatttggcag

SEQ ID NO: 4219920 - DNA, 25 bp, Homo sapien
tatagattgccctcacaccctagag

SEQ ID NO: 4219921 - DNA, 25 bp, Homo sapien
cactgtaatcagtgggctggaggct

SEQ ID NO: 4219922 - DNA, 25 bp, Homo sapien
tatgtttccttccaagcagaatggc

SEQ ID NO: 4219923 - DNA, 25 bp, Homo sapien
gggtctgtcaaccagtggttcatac

SEQ ID NO: 4219924 - DNA, 25 bp, Homo sapien
aatctgacaaaacctatgaactctg

SEQ ID NO: 4219925 - DNA, 25 bp, Homo sapien
tcatactagaagtccatattcctcc

SEQ ID NO: 4219926 - DNA, 25 bp, Homo sapien
caacaggaatatattaggatgtaaa

SEQ ID NO: 4219927 - DNA, 25 bp, Homo sapien
ttggctaggccatacattttgtcag

SEQ ID NO: 4219928 - DNA, 25 bp, Homo sapien
gatattgagcttactgccaacaaga

SEQ ID NO: 4219929 - DNA, 25 bp, Homo sapien
aagagcggcagaacagatattgagc

SEQ ID NO: 4219930 - DNA, 25 bp, Homo sapien
gaaaccagaattaacctatccttgc

SEQ ID NO: 4219931 - DNA, 25 bp, Homo sapien
taaccaagatgcaggacaaagtcct

SEQ ID NO: 4219932 - DNA, 25 bp, Homo sapien
tatttatcgtagtctttaccgcctc

SEQ ID NO: 4219933 - DNA, 25 bp, Homo sapien
agaaggaagaagtctcttttgcagc

SEQ ID NO: 4219934 - DNA, 25 bp, Homo sapien
cgttgtagagataccttgttgtggc

SEQ ID NO: 4219935 - DNA, 25 bp, Homo sapien
tggggtattgctcaaaaagtctttc

SEQ ID NO: 4219936 - DNA, 25 bp, Homo sapien
ctggggtattgctcaaaaagtcttt

SEQ ID NO: 4219937 - DNA, 25 bp, Homo sapien
ggccgtgtaagcatatgcccttgga

SEQ ID NO: 4219938 - DNA, 25 bp, Homo sapien
cacgatgctagtatctgctcagctt

SEQ ID NO: 4219939 - DNA, 25 bp, Homo sapien
ctgtcaggactttcagaaatgtaga

SEQ ID NO: 4219940 - DNA, 25 bp, Homo sapien
aagcaaagaggtggaattggctcac

SEQ ID NO: 4219941 - DNA, 25 bp, Homo sapien
tgtgatagtttataaaattctaacg

SEQ ID NO: 4219942 - DNA, 25 bp, Homo sapien
aaagctaattgtgatagtttataaa

SEQ ID NO: 4219943 - DNA, 25 bp, Homo sapien
tatttgttattgattaaaagtatac

SEQ ID NO: 4219944 - DNA, 25 bp, Homo sapien
tgaattgagattgcatgtctagtat

SEQ ID NO: 4219945 - DNA, 25 bp, Homo sapien
tctttctttctgacctgactggaaa

SEQ ID NO: 4219946 - DNA, 25 bp, Homo sapien
attctttctttctgacctgactgga

SEQ ID NO: 4219947 - DNA, 25 bp, Homo sapien
tttctgacctgactggaaatggcat

SEQ ID NO: 4219948 - DNA, 25 bp, Homo sapien
catccataacctccagtattctttc

SEQ ID NO: 4219949 - DNA, 25 bp, Homo sapien
tcccgtgcaaatatattcaacaata

SEQ ID NO: 4219950 - DNA, 25 bp, Homo sapien
aacttcccgtgcaaatatattcaac

SEQ ID NO: 4219951 - DNA, 25 bp, Homo sapien
ctgaaaacttcccgtgcaaatatat

SEQ ID NO: 4219952 - DNA, 25 bp, Homo sapien
aaaacttcccgtgcaaatatattca

SEQ ID NO: 4219953 - DNA, 25 bp, Homo sapien
tacctgccatagatctaataattgg

SEQ ID NO: 4219954 - DNA, 25 bp, Homo sapien
gatatacccgcacaaatgacctaaa

SEQ ID NO: 4219955 - DNA, 25 bp, Homo sapien
ttttaaatggctggatacctgccat

SEQ ID NO: 4219956 - DNA, 25 bp, Homo sapien
tcatcaaggttgctatagccatccc

SEQ ID NO: 4219957 - DNA, 25 bp, Homo sapien
ccagccctagtggaagacagctata

SEQ ID NO: 4219958 - DNA, 25 bp, Homo sapien
ttccaaaatcgctctaaaggctgtg

SEQ ID NO: 4219959 - DNA, 25 bp, Homo sapien
cttgaggctacatcgtaaagggcac

SEQ ID NO: 4219960 - DNA, 25 bp, Homo sapien
taaacatcctgtcaactgtcagtgg

SEQ ID NO: 4219961 - DNA, 25 bp, Homo sapien
ccaatctatgtgcaaacattctggg

SEQ ID NO: 4219962 - DNA, 25 bp, Homo sapien
taaggcatgagccaaaatagtttat

SEQ ID NO: 4219963 - DNA, 25 bp, Homo sapien
cataaaaccttatactttgtctcat

SEQ ID NO: 4219964 - DNA, 25 bp, Homo sapien
taaatggcacaactgagagctccaa

SEQ ID NO: 4219965 - DNA, 25 bp, Homo sapien
ttgtgataggcattctgttagctgt

SEQ ID NO: 4219966 - DNA, 25 bp, Homo sapien
cttgtgataggcattctgttagctg

SEQ ID NO: 4219967 - DNA, 25 bp, Homo sapien
tgagggcagaatcaccttgagtgcg

SEQ ID NO: 4219968 - DNA, 25 bp, Homo sapien
taaacaacttgtcagccagtaccac

SEQ ID NO: 4219969 - DNA, 25 bp, Homo sapien
tacaaataaaggtctgaagatgcag

SEQ ID NO: 4219970 - DNA, 25 bp, Homo sapien
ttgaagaaactacccttctcagggc

SEQ ID NO: 4219971 - DNA, 25 bp, Homo sapien
cccgacctcaggtgaccatcccgcc

SEQ ID NO: 4219972 - DNA, 25 bp, Homo sapien
cctcaggtgaccatcccgcctcaga

SEQ ID NO: 4219973 - DNA, 25 bp, Homo sapien
tatgtttagtatagacgaggtttct

SEQ ID NO: 4219974 - DNA, 25 bp, Homo sapien
caggtgaccatcccgcctcagactc

SEQ ID NO: 4219975 - DNA, 25 bp, Homo sapien
cttatctcccgctctggtaaagaag

SEQ ID NO: 4219976 - DNA, 25 bp, Homo sapien
gctctattcttatctcccgctctgg

SEQ ID NO: 4219977 - DNA, 25 bp, Homo sapien
tcgatatgctctattcttatctccc

SEQ ID NO: 4219978 - DNA, 25 bp, Homo sapien
tcctccatattctcgatatgctcta

SEQ ID NO: 4219979 - DNA, 25 bp, Homo sapien
tcaatgaccccagatattgattttt

SEQ ID NO: 4219980 - DNA, 25 bp, Homo sapien
ggcttctggttttatgcccaggaca

SEQ ID NO: 4219981 - DNA, 25 bp, Homo sapien
aattcatgtctatccagaagctgtg

SEQ ID NO: 4219982 - DNA, 25 bp, Homo sapien
gaatgccacggattgcaggtaacac

SEQ ID NO: 4219983 - DNA, 25 bp, Homo sapien
tcccagagactgacatgatccaagg

SEQ ID NO: 4219984 - DNA, 25 bp, Homo sapien
caataggagaaatggctggcagaag

SEQ ID NO: 4219985 - DNA, 25 bp, Homo sapien
gggtctgaaaaacctgcaattcatc

SEQ ID NO: 4219986 - DNA, 25 bp, Homo sapien
ccaaatacctctccctaagtgaatg

SEQ ID NO: 4219987 - DNA, 25 bp, Homo sapien
gaacaattccgttactcattacctg

SEQ ID NO: 4219988 - DNA, 25 bp, Homo sapien
tgacaaaattaagtgtcaaaaatca

SEQ ID NO: 4219989 - DNA, 25 bp, Homo sapien
cttataaaggaacttgtatactcct

SEQ ID NO: 4219990 - DNA, 25 bp, Homo sapien
ttaattaggcatgtgcaaggcttgg

SEQ ID NO: 4219991 - DNA, 25 bp, Homo sapien
tctattaagataatgagctatgaat

SEQ ID NO: 4219992 - DNA, 25 bp, Homo sapien
gctaccccgtcgctagttacttaga

SEQ ID NO: 4219993 - DNA, 25 bp, Homo sapien
tggacccaaagcataacagtagtga

SEQ ID NO: 4219994 - DNA, 25 bp, Homo sapien
gcacccagggcaagcatttgtaaat

SEQ ID NO: 4219995 - DNA, 25 bp, Homo sapien
tcctacccgggaaatgaatcatctc

SEQ ID NO: 4219996 - DNA, 25 bp, Homo sapien
gattgctgcctccaaagagagtcta

SEQ ID NO: 4219997 - DNA, 25 bp, Homo sapien
cagagtaactcagcaggatttagga

SEQ ID NO: 4219998 - DNA, 25 bp, Homo sapien
tatataagatctagacaacgacagg

SEQ ID NO: 4219999 - DNA, 25 bp, Homo sapien
gaataaattcctgggatgaacctgg

SEQ ID NO: 4220000 - DNA, 25 bp, Homo sapien
ccaagatgtcccaagaaattagtga

SEQ ID NO: 4220001 - DNA, 25 bp, Homo sapien
aattagtgacatgaattggcctggc

SEQ ID NO: 4220002 - DNA, 25 bp, Homo sapien
ctttaagagtatgagagaggaccaa

SEQ ID NO: 4220003 - DNA, 25 bp, Homo sapien
gaagctcaggagaataacaacagtc

SEQ ID NO: 4220004 - DNA, 25 bp, Homo sapien
caccgtctagctggaattggtcaaa

SEQ ID NO: 4220005 - DNA, 25 bp, Homo sapien
tagtctctgaatgccctaggttctg

SEQ ID NO: 4220006 - DNA, 25 bp, Homo sapien
aagtactgtgagtgtcctggagctc

SEQ ID NO: 4220007 - DNA, 25 bp, Homo sapien
tgtcccactctaagtcaagggcagt

SEQ ID NO: 4220008 - DNA, 25 bp, Homo sapien
gcttgcaacactgacgtgaaccatg

SEQ ID NO: 4220009 - DNA, 25 bp, Homo sapien
caatttggcctaacaaggctcacca

SEQ ID NO: 4220010 - DNA, 25 bp, Homo sapien
taaatctgaaaatgtgcgctcccct

SEQ ID NO: 4220011 - DNA, 25 bp, Homo sapien
ggcaatctttgcatcccaatttggc

SEQ ID NO: 4220012 - DNA, 25 bp, Homo sapien
tacagagtactagctgggagtgtaa

SEQ ID NO: 4220013 - DNA, 25 bp, Homo sapien
ggacccataattgttaatctgtgtc

SEQ ID NO: 4220014 - DNA, 25 bp, Homo sapien
caaatatggctacttcatggaccca

SEQ ID NO: 4220015 - DNA, 25 bp, Homo sapien
ctaactacagagtactagctgggag

SEQ ID NO: 4220016 - DNA, 25 bp, Homo sapien
gatctgctactactaggaggtacgg

SEQ ID NO: 4220017 - DNA, 25 bp, Homo sapien
acggaattaaggctgagatggctca

SEQ ID NO: 4220018 - DNA, 25 bp, Homo sapien
tcatggaaagtaatagcagggatct

SEQ ID NO: 4220019 - DNA, 25 bp, Homo sapien
cataggtttagagcatgtccaggaa

SEQ ID NO: 4220020 - DNA, 25 bp, Homo sapien
atattggtacaagctgatcttacaa

SEQ ID NO: 4220021 - DNA, 25 bp, Homo sapien
ctatgtagcagcttgaaatacaata

SEQ ID NO: 4220022 - DNA, 25 bp, Homo sapien
tattggtacaagctgatcttacaag

SEQ ID NO: 4220023 - DNA, 25 bp, Homo sapien
ttggtacaagctgatcttacaagtt

SEQ ID NO: 4220024 - DNA, 25 bp, Homo sapien
gagagttaccctgtctgatcttata

SEQ ID NO: 4220025 - DNA, 25 bp, Homo sapien
tcctgcaactatccaagaaactatg

SEQ ID NO: 4220026 - DNA, 25 bp, Homo sapien
tggctactacgaaagggacacctgt

SEQ ID NO: 4220027 - DNA, 25 bp, Homo sapien
tgggtagctcggtaaaatatgggac

SEQ ID NO: 4220028 - DNA, 25 bp, Homo sapien
agtgattaatgtggctacagttgcc

SEQ ID NO: 4220029 - DNA, 25 bp, Homo sapien
gcagctagggaaggctatatgacaa

SEQ ID NO: 4220030 - DNA, 25 bp, Homo sapien
tgaaagcctgttgaaagattcggga

SEQ ID NO: 4220031 - DNA, 25 bp, Homo sapien
tctgtggtggctttctaatgaccct

SEQ ID NO: 4220032 - DNA, 25 bp, Homo sapien
atgacactttaataagaccaacaac

SEQ ID NO: 4220033 - DNA, 25 bp, Homo sapien
caacaactcacattcaatttttaga

SEQ ID NO: 4220034 - DNA, 25 bp, Homo sapien
gacactttaataagaccaacaactc

SEQ ID NO: 4220035 - DNA, 25 bp, Homo sapien
gaccaacaactcacattcaattttt

SEQ ID NO: 4220036 - DNA, 25 bp, Homo sapien
tcagtcttctagaatagtcacagtg

SEQ ID NO: 4220037 - DNA, 25 bp, Homo sapien
aagtcctctaggtctgatccctcac

SEQ ID NO: 4220038 - DNA, 25 bp, Homo sapien
tagtcacagtgataatctgcttcat

SEQ ID NO: 4220039 - DNA, 25 bp, Homo sapien
tcactatctccatccaatttgaagt

SEQ ID NO: 4220040 - DNA, 25 bp, Homo sapien
tattgagatgccaaacaagtcgttc

SEQ ID NO: 4220041 - DNA, 25 bp, Homo sapien
gagagttagcagttttgcactagcc

SEQ ID NO: 4220042 - DNA, 25 bp, Homo sapien
tgtcgtaaaccttcatggcaagtat

SEQ ID NO: 4220043 - DNA, 25 bp, Homo sapien
gggaaatatattgcgaacgaactgc

SEQ ID NO: 4220044 - DNA, 25 bp, Homo sapien
gggttaaattggcaccagaaagcat

SEQ ID NO: 4220045 - DNA, 25 bp, Homo sapien
cgggttaaattggcaccagaaagca

SEQ ID NO: 4220046 - DNA, 25 bp, Homo sapien
actctgtcctgcaaataacttggca

SEQ ID NO: 4220047 - DNA, 25 bp, Homo sapien
tggcatctggctcgtaaagctttaa

SEQ ID NO: 4220048 - DNA, 25 bp, Homo sapien
caattttctgcgttatttaagtatt

SEQ ID NO: 4220049 - DNA, 25 bp, Homo sapien
catacgaactttctgaatcagcaac

SEQ ID NO: 4220050 - DNA, 25 bp, Homo sapien
gctaccaccactacttgctccactc

SEQ ID NO: 4220051 - DNA, 25 bp, Homo sapien
aggctgccatatgcactgctaccac

SEQ ID NO: 4220052 - DNA, 25 bp, Homo sapien
ctaccaccactacttgctccactca

SEQ ID NO: 4220053 - DNA, 25 bp, Homo sapien
taccaccactacttgctccactcac

SEQ ID NO: 4220054 - DNA, 25 bp, Homo sapien
cttaagcttgttttcaatgtttggt

SEQ ID NO: 4220055 - DNA, 25 bp, Homo sapien
tttcaatgtttggttcaatggttag

SEQ ID NO: 4220056 - DNA, 25 bp, Homo sapien
ttttcaatgtttggttcaatggtta

SEQ ID NO: 4220057 - DNA, 25 bp, Homo sapien
attcatccagtgtgcttcattttat

SEQ ID NO: 4220058 - DNA, 25 bp, Homo sapien
ttcatccagtgtgcttcattttatc

SEQ ID NO: 4220059 - DNA, 25 bp, Homo sapien
cacgggccagtagttttggcaggca

SEQ ID NO: 4220060 - DNA, 25 bp, Homo sapien
ggcaggcagcataatgaactgtcat

SEQ ID NO: 4220061 - DNA, 25 bp, Homo sapien
gccagtagttttggcaggcagcata

SEQ ID NO: 4220062 - DNA, 25 bp, Homo sapien
tttccacgggccagtagttttggca

SEQ ID NO: 4220063 - DNA, 25 bp, Homo sapien
cagtacatgcctggaaaagacataa

SEQ ID NO: 4220064 - DNA, 25 bp, Homo sapien
cggttatctcctatctttgtgaagc

SEQ ID NO: 4220065 - DNA, 25 bp, Homo sapien
gcccaggacaatttgtgtttatcca

SEQ ID NO: 4220066 - DNA, 25 bp, Homo sapien
tggacacccctgcaacagtacatgc

SEQ ID NO: 4220067 - DNA, 25 bp, Homo sapien
ttcatttttatatagttgtaccaaa

SEQ ID NO: 4220068 - DNA, 25 bp, Homo sapien
tcttcatttttatatagttgtacca

SEQ ID NO: 4220069 - DNA, 25 bp, Homo sapien
atcttcatttttatatagttgtacc

SEQ ID NO: 4220070 - DNA, 25 bp, Homo sapien
catttttatatagttgtaccaaatt

SEQ ID NO: 4220071 - DNA, 25 bp, Homo sapien
taggcccaaagaggtccactgagtc

SEQ ID NO: 4220072 - DNA, 25 bp, Homo sapien
tggccattaggatgaaagcattgac

SEQ ID NO: 4220073 - DNA, 25 bp, Homo sapien
tggcagatcaagcagcacagagtaa

SEQ ID NO: 4220074 - DNA, 25 bp, Homo sapien
tcttcactgcaaggctggccattag

SEQ ID NO: 4220075 - DNA, 25 bp, Homo sapien
tgtggtgaacccgtatctaaggaac

SEQ ID NO: 4220076 - DNA, 25 bp, Homo sapien
ccagcgggttattacagagggccat

SEQ ID NO: 4220077 - DNA, 25 bp, Homo sapien
gaataatcaatgttcaccagcggaa

SEQ ID NO: 4220078 - DNA, 25 bp, Homo sapien
gaagacatgagctgagccaactggg

SEQ ID NO: 4220079 - DNA, 25 bp, Homo sapien
tacttgaacgcaggacacttgaagg

SEQ ID NO: 4220080 - DNA, 25 bp, Homo sapien
caatagtggaactctagggcccaac

SEQ ID NO: 4220081 - DNA, 25 bp, Homo sapien
ggagaacaccatcggtatcctgcga

SEQ ID NO: 4220082 - DNA, 25 bp, Homo sapien
gaagcttacacaaaacggtcctatg

SEQ ID NO: 4220083 - DNA, 25 bp, Homo sapien
tgccattccataactcacatcgatg

SEQ ID NO: 4220084 - DNA, 25 bp, Homo sapien
tccataactcacatcgatgacttca

SEQ ID NO: 4220085 - DNA, 25 bp, Homo sapien
tctgccattccataactcacatcga

SEQ ID NO: 4220086 - DNA, 25 bp, Homo sapien
cattccataactcacatcgatgact

SEQ ID NO: 4220087 - DNA, 25 bp, Homo sapien
tcaggagtgcgatctgatttgttac

SEQ ID NO: 4220088 - DNA, 25 bp, Homo sapien
aatttcaggagtgcgatctgatttg

SEQ ID NO: 4220089 - DNA, 25 bp, Homo sapien
ttcaggagtgcgatctgatttgtta

SEQ ID NO: 4220090 - DNA, 25 bp, Homo sapien
tttcaggagtgcgatctgatttgtt

SEQ ID NO: 4220091 - DNA, 25 bp, Homo sapien
acaaggcaaaatattgaccaaacca

SEQ ID NO: 4220092 - DNA, 25 bp, Homo sapien
actgaataacattcactggaccaac

SEQ ID NO: 4220093 - DNA, 25 bp, Homo sapien
ttgaccaaaccactgaataacattc

SEQ ID NO: 4220094 - DNA, 25 bp, Homo sapien
caaggcaaaatattgaccaaaccac

SEQ ID NO: 4220095 - DNA, 25 bp, Homo sapien
tagatacttgtctaacatagagaac

SEQ ID NO: 4220096 - DNA, 25 bp, Homo sapien
tcataagatgaacacagggtggttc

SEQ ID NO: 4220097 - DNA, 25 bp, Homo sapien
aaactcagtgttacctgacttaagg

SEQ ID NO: 4220098 - DNA, 25 bp, Homo sapien
taaagggtgtaaatcatctagatac

SEQ ID NO: 4220099 - DNA, 25 bp, Homo sapien
tatctgtggatgagtgttaataaac

SEQ ID NO: 4220100 - DNA, 25 bp, Homo sapien
gaatgagcagtagtggctgtctatt

SEQ ID NO: 4220101 - DNA, 25 bp, Homo sapien
tgtggatgagtgttaataaacttcc

SEQ ID NO: 4220102 - DNA, 25 bp, Homo sapien
ggctgtctattgtgctggttcatca

SEQ ID NO: 4220103 - DNA, 25 bp, Homo sapien
ctaatagagtgtgccaagagattcc

SEQ ID NO: 4220104 - DNA, 25 bp, Homo sapien
agagattcctggaaatgtttttgga

SEQ ID NO: 4220105 - DNA, 25 bp, Homo sapien
gagattcctggaaatgtttttggac

SEQ ID NO: 4220106 - DNA, 25 bp, Homo sapien
atagagtgtgccaagagattcctgg

SEQ ID NO: 4220107 - DNA, 25 bp, Homo sapien
tgtgcttatgactgacccatgggaa

SEQ ID NO: 4220108 - DNA, 25 bp, Homo sapien
tcagtacaggcgtgaaggcagacca

SEQ ID NO: 4220109 - DNA, 25 bp, Homo sapien
gctggtcactgcctaatgagtcacc

SEQ ID NO: 4220110 - DNA, 25 bp, Homo sapien
ggatgcaggccaatgtcaacacaga

SEQ ID NO: 4220111 - DNA, 25 bp, Homo sapien
ggcttacgtgatccaaaggtgctgg

SEQ ID NO: 4220112 - DNA, 25 bp, Homo sapien
gggcttacgtgatccaaaggtgctg

SEQ ID NO: 4220113 - DNA, 25 bp, Homo sapien
gcttacgtgatccaaaggtgctggc

SEQ ID NO: 4220114 - DNA, 25 bp, Homo sapien
cttacgtgatccaaaggtgctggca

SEQ ID NO: 4220115 - DNA, 25 bp, Homo sapien
ggacagctaaattggtgagtctgaa

SEQ ID NO: 4220116 - DNA, 25 bp, Homo sapien
gggctttggacagctaaattggtga

SEQ ID NO: 4220117 - DNA, 25 bp, Homo sapien
gctttggacagctaaattggtgagt

SEQ ID NO: 4220118 - DNA, 25 bp, Homo sapien
gctaaattggtgagtctgaatcctc

SEQ ID NO: 4220119 - DNA, 25 bp, Homo sapien
gatcaaattcattctacgctttatc

SEQ ID NO: 4220120 - DNA, 25 bp, Homo sapien
ttcattctacgctttatcttcttaa

SEQ ID NO: 4220121 - DNA, 25 bp, Homo sapien
caaattcattctacgctttatcttc

SEQ ID NO: 4220122 - DNA, 25 bp, Homo sapien
cattctacgctttatcttcttaaag

SEQ ID NO: 4220123 - DNA, 25 bp, Homo sapien
taggattgattactgctttctgcat

SEQ ID NO: 4220124 - DNA, 25 bp, Homo sapien
ggattgattactgctttctgcatca

SEQ ID NO: 4220125 - DNA, 25 bp, Homo sapien
attgattactgctttctgcatcacc

SEQ ID NO: 4220126 - DNA, 25 bp, Homo sapien
cttaggattgattactgctttctgc

SEQ ID NO: 4220127 - DNA, 25 bp, Homo sapien
gcccaatatgtgatttagctccctc

SEQ ID NO: 4220128 - DNA, 25 bp, Homo sapien
agggatacagcccaatatgtgattt

SEQ ID NO: 4220129 - DNA, 25 bp, Homo sapien
ggtttgacctgagatgaacacctgt

SEQ ID NO: 4220130 - DNA, 25 bp, Homo sapien
tgttcaatgctgtcaaatttggctc

SEQ ID NO: 4220131 - DNA, 25 bp, Homo sapien
ctttggcaaatcacaaggatcgata

SEQ ID NO: 4220132 - DNA, 25 bp, Homo sapien
cgacacttgggtaaccaggcgtaga

SEQ ID NO: 4220133 - DNA, 25 bp, Homo sapien
gcgtagaagggtctcctcctggatt

SEQ ID NO: 4220134 - DNA, 25 bp, Homo sapien
aaggtatcatggctaggattcacag

SEQ ID NO: 4220135 - DNA, 25 bp, Homo sapien
gattctatcccattagcattcccac

SEQ ID NO: 4220136 - DNA, 25 bp, Homo sapien
tcaaagtgtttcagaccctaactgt

SEQ ID NO: 4220137 - DNA, 25 bp, Homo sapien
tattgattcaaagtaccataaggaa

SEQ ID NO: 4220138 - DNA, 25 bp, Homo sapien
tacaggttcaatctaatgaggataa

SEQ ID NO: 4220139 - DNA, 25 bp, Homo sapien
gctttgaactgcgtgccagcacagt

SEQ ID NO: 4220140 - DNA, 25 bp, Homo sapien
gtttcagtgacgctttcaaactcct

SEQ ID NO: 4220141 - DNA, 25 bp, Homo sapien
tcagggttctgctgtattgccagag

SEQ ID NO: 4220142 - DNA, 25 bp, Homo sapien
tcaactctgtacaacaccaatgctg

SEQ ID NO: 4220143 - DNA, 25 bp, Homo sapien
taaacaatacgtggtgtatcaacac

SEQ ID NO: 4220144 - DNA, 25 bp, Homo sapien
taaacagtgcatcctctatagaaaa

SEQ ID NO: 4220145 - DNA, 25 bp, Homo sapien
cttggacatctcatatatattgctg

SEQ ID NO: 4220146 - DNA, 25 bp, Homo sapien
aaaaatcacaatgggtcatactggg

SEQ ID NO: 4220147 - DNA, 25 bp, Homo sapien
caggaaacctaaaccaaacactgca

SEQ ID NO: 4220148 - DNA, 25 bp, Homo sapien
ggaaatcttgacataaagccatgac

SEQ ID NO: 4220149 - DNA, 25 bp, Homo sapien
gaaatcggtattgtctaagtcatca

SEQ ID NO: 4220150 - DNA, 25 bp, Homo sapien
gaaatcacatggatcatatcatcat

SEQ ID NO: 4220151 - DNA, 25 bp, Homo sapien
tgtgtcgaagtcctacctccagtaa

SEQ ID NO: 4220152 - DNA, 25 bp, Homo sapien
tgtgttccccaaaacggtgtgtcga

SEQ ID NO: 4220153 - DNA, 25 bp, Homo sapien
taagttatacagattagggtggccc

SEQ ID NO: 4220154 - DNA, 25 bp, Homo sapien
tgttcctctacgtatatgcataggg

SEQ ID NO: 4220155 - DNA, 25 bp, Homo sapien
gtctaagacaaatcatccttttggg

SEQ ID NO: 4220156 - DNA, 25 bp, Homo sapien
taacggcagacatggcctaatgatt

SEQ ID NO: 4220157 - DNA, 25 bp, Homo sapien
gacatttcaatgattctgaacataa

SEQ ID NO: 4220158 - DNA, 25 bp, Homo sapien
tccatactgttcaaactacccttca

SEQ ID NO: 4220159 - DNA, 25 bp, Homo sapien
tgtgataactacaccacaaactgtg

SEQ ID NO: 4220160 - DNA, 25 bp, Homo sapien
ccttagttcaaaagattttgatttg

SEQ ID NO: 4220161 - DNA, 25 bp, Homo sapien
cttttctgtgataactacaccacaa

SEQ ID NO: 4220162 - DNA, 25 bp, Homo sapien
aaacagaactattccagttccttag

SEQ ID NO: 4220163 - DNA, 25 bp, Homo sapien
tttcttatcttgtaactctgtagat

SEQ ID NO: 4220164 - DNA, 25 bp, Homo sapien
tatgagtttgtatcttatgcatgtg

SEQ ID NO: 4220165 - DNA, 25 bp, Homo sapien
ttgtttctggctatatattgcctaa

SEQ ID NO: 4220166 - DNA, 25 bp, Homo sapien
tgttttaccctgttagcaatgtaac

SEQ ID NO: 4220167 - DNA, 25 bp, Homo sapien
tctagcctgctagaagacttacagt

SEQ ID NO: 4220168 - DNA, 25 bp, Homo sapien
cattggctgtttttggaacgctttg

SEQ ID NO: 4220169 - DNA, 25 bp, Homo sapien
gaatcccattggctgtttttggaac

SEQ ID NO: 4220170 - DNA, 25 bp, Homo sapien
tttttggaacgctttgcaaatgcct

SEQ ID NO: 4220171 - DNA, 25 bp, Homo sapien
ggctgtttttggaacgctttgcaaa

SEQ ID NO: 4220172 - DNA, 25 bp, Homo sapien
atactccatgagccacgtcccccat

SEQ ID NO: 4220173 - DNA, 25 bp, Homo sapien
cagagatgggctgcactaatagaga

SEQ ID NO: 4220174 - DNA, 25 bp, Homo sapien
gctctagagagctacacgcttcatt

SEQ ID NO: 4220175 - DNA, 25 bp, Homo sapien
gaagagatcagttttgcaacgaggg

SEQ ID NO: 4220176 - DNA, 25 bp, Homo sapien
ggttctagcttttggcgaagagatc

SEQ ID NO: 4220177 - DNA, 25 bp, Homo sapien
gaacttgcatgctgacgactcttat

SEQ ID NO: 4220178 - DNA, 25 bp, Homo sapien
ccattacaaatccaacaacattagt

SEQ ID NO: 4220179 - DNA, 25 bp, Homo sapien
agatgtcaagcccattacaaatcca

SEQ ID NO: 4220180 - DNA, 25 bp, Homo sapien
gtaactgttttcaattttgtgactg

SEQ ID NO: 4220181 - DNA, 25 bp, Homo sapien
gatggctgccaactatgatataccg

SEQ ID NO: 4220182 - DNA, 25 bp, Homo sapien
tatgagccaatattgccaaaagctg

SEQ ID NO: 4220183 - DNA, 25 bp, Homo sapien
gacatcaaggcacggataaacgctg

SEQ ID NO: 4220184 - DNA, 25 bp, Homo sapien
gaaaacaatagttcggtctggtctc

SEQ ID NO: 4220185 - DNA, 25 bp, Homo sapien
tacaggatacagactagagttcccc

SEQ ID NO: 4220186 - DNA, 25 bp, Homo sapien
cccccttatgggactgtggaggcta

SEQ ID NO: 4220187 - DNA, 25 bp, Homo sapien
ttttctgaagaaccttcttgaaatc

SEQ ID NO: 4220188 - DNA, 25 bp, Homo sapien
gaggctaatataagccacaacattt

SEQ ID NO: 4220189 - DNA, 25 bp, Homo sapien
tcagttcctgcaatactccccaaaa

SEQ ID NO: 4220190 - DNA, 25 bp, Homo sapien
ttcctgcaatactccccaaaaagtc

SEQ ID NO: 4220191 - DNA, 25 bp, Homo sapien
tactccccaaaaagtcctgtgggca

SEQ ID NO: 4220192 - DNA, 25 bp, Homo sapien
gcaatactccccaaaaagtcctgtg

SEQ ID NO: 4220193 - DNA, 25 bp, Homo sapien
taccaatcaccagaacccagaagga

SEQ ID NO: 4220194 - DNA, 25 bp, Homo sapien
gtctgctcaagaccttgggtgttca

SEQ ID NO: 4220195 - DNA, 25 bp, Homo sapien
gaaggaaacaccgttcaagaggcca

SEQ ID NO: 4220196 - DNA, 25 bp, Homo sapien
tctgattggtcttgaagtgatacca

SEQ ID NO: 4220197 - DNA, 25 bp, Homo sapien
tgggaactccaagatggttgatgaa

SEQ ID NO: 4220198 - DNA, 25 bp, Homo sapien
gatgtcctcgtaagcaaactgcacg

SEQ ID NO: 4220199 - DNA, 25 bp, Homo sapien
gcatcaccttgtatctgtatagaac

SEQ ID NO: 4220200 - DNA, 25 bp, Homo sapien
tctgtatagaactgatattggtttc

SEQ ID NO: 4220201 - DNA, 25 bp, Homo sapien
tcatttggattgttcaaaatcatcc

SEQ ID NO: 4220202 - DNA, 25 bp, Homo sapien
tttggattgttcaaaatcatccctg

SEQ ID NO: 4220203 - DNA, 25 bp, Homo sapien
cttcaaaccagtggtagtcaatggg

SEQ ID NO: 4220204 - DNA, 25 bp, Homo sapien
tggaagtcttcaaaccagtggtagt

SEQ ID NO: 4220205 - DNA, 25 bp, Homo sapien
ggagtagggagaactaagtctgcaa

SEQ ID NO: 4220206 - DNA, 25 bp, Homo sapien
aaagtctctcatggtacgagacggg

SEQ ID NO: 4220207 - DNA, 25 bp, Homo sapien
gcatgggattctcgggagtctaaga

SEQ ID NO: 4220208 - DNA, 25 bp, Homo sapien
gagtttgaactacataggtgaaaaa

SEQ ID NO: 4220209 - DNA, 25 bp, Homo sapien
tgtaatttcctatctaggtgttccg

SEQ ID NO: 4220210 - DNA, 25 bp, Homo sapien
tatgtaatttcctatctaggtgttc

SEQ ID NO: 4220211 - DNA, 25 bp, Homo sapien
gtaatttcctatctaggtgttccgc

SEQ ID NO: 4220212 - DNA, 25 bp, Homo sapien
tgtatgtaatttcctatctaggtgt

SEQ ID NO: 4220213 - DNA, 25 bp, Homo sapien
tgtttttcattttcacctgctcctt

SEQ ID NO: 4220214 - DNA, 25 bp, Homo sapien
ctgaacctgtttttcattttcacct

SEQ ID NO: 4220215 - DNA, 25 bp, Homo sapien
tgaacctgtttttcattttcacctg

SEQ ID NO: 4220216 - DNA, 25 bp, Homo sapien
ttttcattttcacctgctccttcca

SEQ ID NO: 4220217 - DNA, 25 bp, Homo sapien
tggaagcatgaaggcgaaaaacaca

SEQ ID NO: 4220218 - DNA, 25 bp, Homo sapien
tcctacacgatcgttataacaatgt

SEQ ID NO: 4220219 - DNA, 25 bp, Homo sapien
tcattttgcattcaggatgtatgcc

SEQ ID NO: 4220220 - DNA, 25 bp, Homo sapien
caatgtttaaaggattgtctcattt

SEQ ID NO: 4220221 - DNA, 25 bp, Homo sapien
atcgcgcttcggataaacctcattg

SEQ ID NO: 4220222 - DNA, 25 bp, Homo sapien
gcaataatcgcgcttcggataaacc

SEQ ID NO: 4220223 - DNA, 25 bp, Homo sapien
attagcaataatcgcgcttcggata

SEQ ID NO: 4220224 - DNA, 25 bp, Homo sapien
aataatcgcgcttcggataaacctc

SEQ ID NO: 4220225 - DNA, 25 bp, Homo sapien
tatctcatatagtgccaaggaaggg

SEQ ID NO: 4220226 - DNA, 25 bp, Homo sapien
cattggaggaccctacatgggaccc

SEQ ID NO: 4220227 - DNA, 25 bp, Homo sapien
catgggaccccgatgatgaaatggg

SEQ ID NO: 4220228 - DNA, 25 bp, Homo sapien
caagttttcagacaaccgtgacagg

SEQ ID NO: 4220229 - DNA, 25 bp, Homo sapien
gcatgactatcccttctgactcggt

SEQ ID NO: 4220230 - DNA, 25 bp, Homo sapien
tccagaggcagtcaacagtagaagg

SEQ ID NO: 4220231 - DNA, 25 bp, Homo sapien
gatgctccaccagttgttggctgca

SEQ ID NO: 4220232 - DNA, 25 bp, Homo sapien
tccagaggcgcctttttgtcccaga

SEQ ID NO: 4220233 - DNA, 25 bp, Homo sapien
caatttttgttgctcgtgtagaaaa

SEQ ID NO: 4220234 - DNA, 25 bp, Homo sapien
tgaaagagggatccatttcttcaat

SEQ ID NO: 4220235 - DNA, 25 bp, Homo sapien
tgctcgtgtagaaaaacgggcctcg

SEQ ID NO: 4220236 - DNA, 25 bp, Homo sapien
tgaaggttgaaagagggatccattt

SEQ ID NO: 4220237 - DNA, 25 bp, Homo sapien
agagatacctagaagacagatttgc

SEQ ID NO: 4220238 - DNA, 25 bp, Homo sapien
tattataacaactgatacaaacatg

SEQ ID NO: 4220239 - DNA, 25 bp, Homo sapien
aagctatagcttagaatggcatctc

SEQ ID NO: 4220240 - DNA, 25 bp, Homo sapien
gttaccatgctccaagaatcttaag

SEQ ID NO: 4220241 - DNA, 25 bp, Homo sapien
tatggaaaggtagagtctcctcttc

SEQ ID NO: 4220242 - DNA, 25 bp, Homo sapien
taacaaatacatgtcgaaatcagtc

SEQ ID NO: 4220243 - DNA, 25 bp, Homo sapien
gatctgtcgacctagagttattctg

SEQ ID NO: 4220244 - DNA, 25 bp, Homo sapien
cattaaactgtcgtaacagggtcca

SEQ ID NO: 4220245 - DNA, 25 bp, Homo sapien
ggcagcatggttgtccctagggccc

SEQ ID NO: 4220246 - DNA, 25 bp, Homo sapien
aaagtggcagcatggttgtccctag

SEQ ID NO: 4220247 - DNA, 25 bp, Homo sapien
tgaataaactgaatggtataccatt

SEQ ID NO: 4220248 - DNA, 25 bp, Homo sapien
ctgaatggtataccattttagtaag

SEQ ID NO: 4220249 - DNA, 25 bp, Homo sapien
gcttctgccaaaagaattatctctg

SEQ ID NO: 4220250 - DNA, 25 bp, Homo sapien
taagaattaagcttctgccaaaaga

SEQ ID NO: 4220251 - DNA, 25 bp, Homo sapien
attatctctgtagccaatagcaact

SEQ ID NO: 4220252 - DNA, 25 bp, Homo sapien
aggcaaacaataagaattaagcttc

SEQ ID NO: 4220253 - DNA, 25 bp, Homo sapien
gtctctgataatgccagtggagtct

SEQ ID NO: 4220254 - DNA, 25 bp, Homo sapien
attgaaggtctctgataatgccagt

SEQ ID NO: 4220255 - DNA, 25 bp, Homo sapien
cttcctctgaaatgtgagactattt

SEQ ID NO: 4220256 - DNA, 25 bp, Homo sapien
gcaagtatcagaaggccaggaaaga

SEQ ID NO: 4220257 - DNA, 25 bp, Homo sapien
tctgggacctctaaggaagtaatta

SEQ ID NO: 4220258 - DNA, 25 bp, Homo sapien
tctatccatgtgcactgaggaaagg

SEQ ID NO: 4220259 - DNA, 25 bp, Homo sapien
caagcacactgttatggatggaatc

SEQ ID NO: 4220260 - DNA, 25 bp, Homo sapien
ctatatttacagatggtctgggacc

SEQ ID NO: 4220261 - DNA, 25 bp, Homo sapien
tacataccacacattccaagactat

SEQ ID NO: 4220262 - DNA, 25 bp, Homo sapien
actatgaaagcatgtgtgttcttca

SEQ ID NO: 4220263 - DNA, 25 bp, Homo sapien
acataccacacattccaagactatg

SEQ ID NO: 4220264 - DNA, 25 bp, Homo sapien
tatactgcaataatatcctgggatg

SEQ ID NO: 4220265 - DNA, 25 bp, Homo sapien
gataaatctgattgcccattcagaa

SEQ ID NO: 4220266 - DNA, 25 bp, Homo sapien
tgctggttaccaagaaataatgaac

SEQ ID NO: 4220267 - DNA, 25 bp, Homo sapien
gaacactttatagagtatactgcaa

SEQ ID NO: 4220268 - DNA, 25 bp, Homo sapien
tttcgtactcgaaaatacagtagcg

SEQ ID NO: 4220269 - DNA, 25 bp, Homo sapien
tacagtagcgttttcacaaaagtac

SEQ ID NO: 4220270 - DNA, 25 bp, Homo sapien
tcaaaaaatgatccaacccaataag

SEQ ID NO: 4220271 - DNA, 25 bp, Homo sapien
taactcaatggaatgcctagacttc

SEQ ID NO: 4220272 - DNA, 25 bp, Homo sapien
cacgtcaattatcagccttcctaag

SEQ ID NO: 4220273 - DNA, 25 bp, Homo sapien
tccacgtcaattatcagccttccta

SEQ ID NO: 4220274 - DNA, 25 bp, Homo sapien
cgtcaattatcagccttcctaagag

SEQ ID NO: 4220275 - DNA, 25 bp, Homo sapien
atccacgtcaattatcagccttcct

SEQ ID NO: 4220276 - DNA, 25 bp, Homo sapien
tggatagacacagtacgagaggtag

SEQ ID NO: 4220277 - DNA, 25 bp, Homo sapien
cgagaggtagaagtacacagaagca

SEQ ID NO: 4220278 - DNA, 25 bp, Homo sapien
tcaagagtagctagttgctccaagt

SEQ ID NO: 4220279 - DNA, 25 bp, Homo sapien
tcagactgaatctgggagaacatcc

SEQ ID NO: 4220280 - DNA, 25 bp, Homo sapien
tagtgtcatgtttgcttacctgaat

SEQ ID NO: 4220281 - DNA, 25 bp, Homo sapien
ccacaccattagtgtcatgtttgct

SEQ ID NO: 4220282 - DNA, 25 bp, Homo sapien
cctgaataacggattttggccagga

SEQ ID NO: 4220283 - DNA, 25 bp, Homo sapien
tgcttacctgaataacggattttgg

SEQ ID NO: 4220284 - DNA, 25 bp, Homo sapien
cagtcgcccgaaggacagtgttaca

SEQ ID NO: 4220285 - DNA, 25 bp, Homo sapien
gcttcggcgcctaacgatgtctaaa

SEQ ID NO: 4220286 - DNA, 25 bp, Homo sapien
ggtggacccaagagcatatcagtgc

SEQ ID NO: 4220287 - DNA, 25 bp, Homo sapien
gacagggatgataattgggcctcca

SEQ ID NO: 4220288 - DNA, 25 bp, Homo sapien
agatcatgcaaaggctctcgggacc

SEQ ID NO: 4220289 - DNA, 25 bp, Homo sapien
tccctgcaccgagttgcagaatttc

SEQ ID NO: 4220290 - DNA, 25 bp, Homo sapien
cctccaacagttgccaagagctgaa

SEQ ID NO: 4220291 - DNA, 25 bp, Homo sapien
gagttcttttctctcagcgtgctga

SEQ ID NO: 4220292 - DNA, 25 bp, Homo sapien
gttttgaacttctaaagctatatca

SEQ ID NO: 4220293 - DNA, 25 bp, Homo sapien
gaacttctaaagctatatcaagtgc

SEQ ID NO: 4220294 - DNA, 25 bp, Homo sapien
tatcaagtgcattaaagggcagaac

SEQ ID NO: 4220295 - DNA, 25 bp, Homo sapien
aacaggttcgttggcaatttgcaaa

SEQ ID NO: 4220296 - DNA, 25 bp, Homo sapien
acagcattgccatggctagtaagat

SEQ ID NO: 4220297 - DNA, 25 bp, Homo sapien
gacttcatccattccttgttgaaaa

SEQ ID NO: 4220298 - DNA, 25 bp, Homo sapien
gatgacttcatccattccttgttga

SEQ ID NO: 4220299 - DNA, 25 bp, Homo sapien
ttgccatggctagtaagatcattga

SEQ ID NO: 4220300 - DNA, 25 bp, Homo sapien
cattggcctgacaaccgaatcgtca

SEQ ID NO: 4220301 - DNA, 25 bp, Homo sapien
attgaaatgtgccaatgtgctaaca

SEQ ID NO: 4220302 - DNA, 25 bp, Homo sapien
gaatcgtcacaaatatgaaccacaa

SEQ ID NO: 4220303 - DNA, 25 bp, Homo sapien
aaatctcacacattggcctgacaac

SEQ ID NO: 4220304 - DNA, 25 bp, Homo sapien
gctaacagttgatgagtgttgggtt

SEQ ID NO: 4220305 - DNA, 25 bp, Homo sapien
ggctaacagttgatgagtgttgggt

SEQ ID NO: 4220306 - DNA, 25 bp, Homo sapien
ctaacagttgatgagtgttgggttg

SEQ ID NO: 4220307 - DNA, 25 bp, Homo sapien
aatgtcattcagcatccggatgcgg

SEQ ID NO: 4220308 - DNA, 25 bp, Homo sapien
ggatcattagcaggtcgcatctcat

SEQ ID NO: 4220309 - DNA, 25 bp, Homo sapien
aaaaagttcagcactctcccgcagg

SEQ ID NO: 4220310 - DNA, 25 bp, Homo sapien
ctccatgtcttggagaatgtcattc

SEQ ID NO: 4220311 - DNA, 25 bp, Homo sapien
ctataaaaacctggtggtgcctgct

SEQ ID NO: 4220312 - DNA, 25 bp, Homo sapien
tataaaaacctggtggtgcctgctt

SEQ ID NO: 4220313 - DNA, 25 bp, Homo sapien
ataaaaacctggtggtgcctgcttt

SEQ ID NO: 4220314 - DNA, 25 bp, Homo sapien
taaaaacctggtggtgcctgcttta

SEQ ID NO: 4220315 - DNA, 25 bp, Homo sapien
aattttattatatgtgataccaaag

SEQ ID NO: 4220316 - DNA, 25 bp, Homo sapien
tattatatgtgataccaaagtgagc

SEQ ID NO: 4220317 - DNA, 25 bp, Homo sapien
ttattatatgtgataccaaagtgag

SEQ ID NO: 4220318 - DNA, 25 bp, Homo sapien
ttttattatatgtgataccaaagtg

SEQ ID NO: 4220319 - DNA, 25 bp, Homo sapien
ctgctggaagttgcctgcctgagaa

SEQ ID NO: 4220320 - DNA, 25 bp, Homo sapien
taaacaggcaaatgtcagaaggaga

SEQ ID NO: 4220321 - DNA, 25 bp, Homo sapien
caacagtcatcatgcaggatttgga

SEQ ID NO: 4220322 - DNA, 25 bp, Homo sapien
tcagcaacggtttcaggcagataaa

SEQ ID NO: 4220323 - DNA, 25 bp, Homo sapien
tagacatctcataagggagtagtag

SEQ ID NO: 4220324 - DNA, 25 bp, Homo sapien
accaatgagtcaggcttataactac

SEQ ID NO: 4220325 - DNA, 25 bp, Homo sapien
tacttatatctactttactatgttg

SEQ ID NO: 4220326 - DNA, 25 bp, Homo sapien
ggctctgtatactctttatagacat

SEQ ID NO: 4220327 - DNA, 25 bp, Homo sapien
catccgaatattgtgcttttcggac

SEQ ID NO: 4220328 - DNA, 25 bp, Homo sapien
tcccatccgaatattgtgcttttcg

SEQ ID NO: 4220329 - DNA, 25 bp, Homo sapien
tccgaatattgtgcttttcggaccg

SEQ ID NO: 4220330 - DNA, 25 bp, Homo sapien
cccatccgaatattgtgcttttcgg

SEQ ID NO: 4220331 - DNA, 25 bp, Homo sapien
aatgcatgcagttcttaactgtacc

SEQ ID NO: 4220332 - DNA, 25 bp, Homo sapien
ataatgcatgcagttcttaactgta

SEQ ID NO: 4220333 - DNA, 25 bp, Homo sapien
taatgcatgcagttcttaactgtac

SEQ ID NO: 4220334 - DNA, 25 bp, Homo sapien
atgcatgcagttcttaactgtaccc

SEQ ID NO: 4220335 - DNA, 25 bp, Homo sapien
acttccaggcgcagaacattcttta

SEQ ID NO: 4220336 - DNA, 25 bp, Homo sapien
tatactcggaaaattttgtctctac

SEQ ID NO: 4220337 - DNA, 25 bp, Homo sapien
tgttagattcccctgtatactcgga

SEQ ID NO: 4220338 - DNA, 25 bp, Homo sapien
aaaattttgtctctacttccaggcg

SEQ ID NO: 4220339 - DNA, 25 bp, Homo sapien
taaggtcttgtggagtgtagaagct

SEQ ID NO: 4220340 - DNA, 25 bp, Homo sapien
aatgctctggtataaggtcttgtgg

SEQ ID NO: 4220341 - DNA, 25 bp, Homo sapien
tgagcaatgctctggtataaggtct

SEQ ID NO: 4220342 - DNA, 25 bp, Homo sapien
agggttgtgagcaatgctctggtat

SEQ ID NO: 4220343 - DNA, 25 bp, Homo sapien
tgtccaatcggcttctgatattcat

SEQ ID NO: 4220344 - DNA, 25 bp, Homo sapien
atgtccaatcggcttctgatattca

SEQ ID NO: 4220345 - DNA, 25 bp, Homo sapien
tctgacagggcttcttgaagggtct

SEQ ID NO: 4220346 - DNA, 25 bp, Homo sapien
tgaagggtctcatttgatgcaaggg

SEQ ID NO: 4220347 - DNA, 25 bp, Homo sapien
tcctgctttgaagtaaacctgagct

SEQ ID NO: 4220348 - DNA, 25 bp, Homo sapien
tataagtattgaaaaccggcttgtc

SEQ ID NO: 4220349 - DNA, 25 bp, Homo sapien
tatgccctccccataggaacaaaga

SEQ ID NO: 4220350 - DNA, 25 bp, Homo sapien
tcattttagagtccctgcttcagtg

SEQ ID NO: 4220351 - DNA, 25 bp, Homo sapien
taggtcaaccaatcactcagtcaga

SEQ ID NO: 4220352 - DNA, 25 bp, Homo sapien
tgccttacagcaaggagtttcagaa

SEQ ID NO: 4220353 - DNA, 25 bp, Homo sapien
tgtctgcaatgtcactctggcggtg

SEQ ID NO: 4220354 - DNA, 25 bp, Homo sapien
gctagagctattcaatggcaatgtc

SEQ ID NO: 4220355 - DNA, 25 bp, Homo sapien
tatacatttggaggcaccctcaggt

SEQ ID NO: 4220356 - DNA, 25 bp, Homo sapien
tagcttttgggcttacatgcacctg

SEQ ID NO: 4220357 - DNA, 25 bp, Homo sapien
ccaggtctgctaaaggcacttcagt

SEQ ID NO: 4220358 - DNA, 25 bp, Homo sapien
tactgttaggctgggtctgcactca

SEQ ID NO: 4220359 - DNA, 25 bp, Homo sapien
tatatctttgtcaggcaatggaacg

SEQ ID NO: 4220360 - DNA, 25 bp, Homo sapien
taacaagattcttgacggtcccagg

SEQ ID NO: 4220361 - DNA, 25 bp, Homo sapien
tgcttcctgcggacaatttgcaata

SEQ ID NO: 4220362 - DNA, 25 bp, Homo sapien
aaataaggtagtccatttgcagcag

SEQ ID NO: 4220363 - DNA, 25 bp, Homo sapien
tgtgagctacacttaaccatctggc

SEQ ID NO: 4220364 - DNA, 25 bp, Homo sapien
gcttctattcagatgccacgtttgt

SEQ ID NO: 4220365 - DNA, 25 bp, Homo sapien
tagtaattgggacacctcttgagag

SEQ ID NO: 4220366 - DNA, 25 bp, Homo sapien
gcactaaatatctgatgggcatcca

SEQ ID NO: 4220367 - DNA, 25 bp, Homo sapien
tgaacaaggctaaacaccacaacag

SEQ ID NO: 4220368 - DNA, 25 bp, Homo sapien
cagaacacgtttgttaaatggtgcc

SEQ ID NO: 4220369 - DNA, 25 bp, Homo sapien
cctttgtctccaatggcttggagca

SEQ ID NO: 4220370 - DNA, 25 bp, Homo sapien
gtctccaatggcttggagcagaagg

SEQ ID NO: 4220371 - DNA, 25 bp, Homo sapien
tccagtacagaaacctttgtctcca

SEQ ID NO: 4220372 - DNA, 25 bp, Homo sapien
cagtacagaaacctttgtctccaat

SEQ ID NO: 4220373 - DNA, 25 bp, Homo sapien
cccagagttggtctaggatttagca

SEQ ID NO: 4220374 - DNA, 25 bp, Homo sapien
gttggtctaggatttagcagcagcc

SEQ ID NO: 4220375 - DNA, 25 bp, Homo sapien
tcacacctcataagaatcggtttgc

SEQ ID NO: 4220376 - DNA, 25 bp, Homo sapien
tgcagactgccaatacccagagttg

SEQ ID NO: 4220377 - DNA, 25 bp, Homo sapien
caaacgatagaaatagagggacttc

SEQ ID NO: 4220378 - DNA, 25 bp, Homo sapien
ccaaacgatagaaatagagggactt

SEQ ID NO: 4220379 - DNA, 25 bp, Homo sapien
tctaattcattatcggataagaaca

SEQ ID NO: 4220380 - DNA, 25 bp, Homo sapien
tcttttgcatcagtaatagaatcat

SEQ ID NO: 4220381 - DNA, 25 bp, Homo sapien
gttctcagtaggcatatcctcttca

SEQ ID NO: 4220382 - DNA, 25 bp, Homo sapien
tgctggaaatgaaaattcattcttt

SEQ ID NO: 4220383 - DNA, 25 bp, Homo sapien
tccgtagataggtaacacgagtcct

SEQ ID NO: 4220384 - DNA, 25 bp, Homo sapien
gagtccttactttcagctatggctt

SEQ ID NO: 4220385 - DNA, 25 bp, Homo sapien
ttgcttcagttttatccgtagatag

SEQ ID NO: 4220386 - DNA, 25 bp, Homo sapien
ggtaacacgagtccttactttcagc

SEQ ID NO: 4220387 - DNA, 25 bp, Homo sapien
aagaccggttcggtgttctctatag

SEQ ID NO: 4220388 - DNA, 25 bp, Homo sapien
cagaacagaaagaccggttcggtgt

SEQ ID NO: 4220389 - DNA, 25 bp, Homo sapien
agaccggttcggtgttctctatagt

SEQ ID NO: 4220390 - DNA, 25 bp, Homo sapien
cagaaagaccggttcggtgttctct

SEQ ID NO: 4220391 - DNA, 25 bp, Homo sapien
catgtatcctagcatcgccaacagg

SEQ ID NO: 4220392 - DNA, 25 bp, Homo sapien
tccgagcgcaagtactccctgtgga

SEQ ID NO: 4220393 - DNA, 25 bp, Homo sapien
tcaccatctgcaaccagctgttctg

SEQ ID NO: 4220394 - DNA, 25 bp, Homo sapien
agctcaagatcactgctcctccgag

SEQ ID NO: 4220395 - DNA, 25 bp, Homo sapien
gaaattgtggatgacatcaaggaga

SEQ ID NO: 4220396 - DNA, 25 bp, Homo sapien
ggaaattgtggatgacatcaaggag

SEQ ID NO: 4220397 - DNA, 25 bp, Homo sapien
aaattgtggatgacatcaaggagaa

SEQ ID NO: 4220398 - DNA, 25 bp, Homo sapien
tgccctctaccacgccatcctgcat

SEQ ID NO: 4220399 - DNA, 25 bp, Homo sapien
cctctaccacgccatcctgcatctg

SEQ ID NO: 4220400 - DNA, 25 bp, Homo sapien
gggtatgccctctaccacgccatcc

SEQ ID NO: 4220401 - DNA, 25 bp, Homo sapien
actctggtgaagggtcacccacact

SEQ ID NO: 4220402 - DNA, 25 bp, Homo sapien
tagaacgacatggaagattgggcac

SEQ ID NO: 4220403 - DNA, 25 bp, Homo sapien
cacaccttctacaaccagctgcctg

SEQ ID NO: 4220404 - DNA, 25 bp, Homo sapien
ctagaacgacatggaagattgggca

SEQ ID NO: 4220405 - DNA, 25 bp, Homo sapien
accttctacaaccagctgcctgtgg

SEQ ID NO: 4220406 - DNA, 25 bp, Homo sapien
gactcctagtgggtgacgaggccca

SEQ ID NO: 4220407 - DNA, 25 bp, Homo sapien
tgtatgtgcaagaccagcttcgcag

SEQ ID NO: 4220408 - DNA, 25 bp, Homo sapien
tatcaccgggcttgtagtcagcaaa

SEQ ID NO: 4220409 - DNA, 25 bp, Homo sapien
gggccgtcttcccatccatcgtggg

SEQ ID NO: 4220410 - DNA, 25 bp, Homo sapien
aatgtcagtcaaagtaacacaaaca

SEQ ID NO: 4220411 - DNA, 25 bp, Homo sapien
gatttggcttgtaatgtcagtcaaa

SEQ ID NO: 4220412 - DNA, 25 bp, Homo sapien
tcagtcaaagtaacacaaacagtct

SEQ ID NO: 4220413 - DNA, 25 bp, Homo sapien
cacaccagctgatttggcttgtaat

SEQ ID NO: 4220414 - DNA, 25 bp, Homo sapien
cccttcacaagcctggtctgggaag

SEQ ID NO: 4220415 - DNA, 25 bp, Homo sapien
tcatatgccagtgcaggacatccct

SEQ ID NO: 4220416 - DNA, 25 bp, Homo sapien
cagtgcaggacatccctcccttcac

SEQ ID NO: 4220417 - DNA, 25 bp, Homo sapien
cagctgccgcttcttttctagggaa

SEQ ID NO: 4220418 - DNA, 25 bp, Homo sapien
gacagccacatctcctcgagtagca

SEQ ID NO: 4220419 - DNA, 25 bp, Homo sapien
tgggcaagtctgtctttctagtggc

SEQ ID NO: 4220420 - DNA, 25 bp, Homo sapien
tcgagtagcagcaaataactccaga

SEQ ID NO: 4220421 - DNA, 25 bp, Homo sapien
ccaataaaacactgtggcctggttc

SEQ ID NO: 4220422 - DNA, 25 bp, Homo sapien
tggattcaggtttaagatcctgctc

SEQ ID NO: 4220423 - DNA, 25 bp, Homo sapien
caggtttaagatcctgctcaaacca

SEQ ID NO: 4220424 - DNA, 25 bp, Homo sapien
agatcctgctcaaaccaaatgcagc

SEQ ID NO: 4220425 - DNA, 25 bp, Homo sapien
ctcaaaccaaatgcagctcttctgc

SEQ ID NO: 4220426 - DNA, 25 bp, Homo sapien
agatgggtgggattggaggagactg

SEQ ID NO: 4220427 - DNA, 25 bp, Homo sapien
gaagttcccatcaccacatctatct

SEQ ID NO: 4220428 - DNA, 25 bp, Homo sapien
agagaagttcccatcaccacatcta

SEQ ID NO: 4220429 - DNA, 25 bp, Homo sapien
gttcccatcaccacatctatctcct

SEQ ID NO: 4220430 - DNA, 25 bp, Homo sapien
tgcacttttgccagctgaatttgca

SEQ ID NO: 4220431 - DNA, 25 bp, Homo sapien
agctgaatttgcactaggctccaca

SEQ ID NO: 4220432 - DNA, 25 bp, Homo sapien
ttatgcacttttgccagctgaattt

SEQ ID NO: 4220433 - DNA, 25 bp, Homo sapien
ttgccagctgaatttgcactaggct

SEQ ID NO: 4220434 - DNA, 25 bp, Homo sapien
gccgtggctttcagggataaaggta

SEQ ID NO: 4220435 - DNA, 25 bp, Homo sapien
tagggaactgggaaatggccgtggc

SEQ ID NO: 4220436 - DNA, 25 bp, Homo sapien
gagggggatgccattcattaggacc

SEQ ID NO: 4220437 - DNA, 25 bp, Homo sapien
gggatgccattcattaggaccaaaa

SEQ ID NO: 4220438 - DNA, 25 bp, Homo sapien
ggttgaacctcagagtaacttgaca

SEQ ID NO: 4220439 - DNA, 25 bp, Homo sapien
tgctttttggcagaaccgaggatgt

SEQ ID NO: 4220440 - DNA, 25 bp, Homo sapien
tggcagaaccgaggatgtcctttgg

SEQ ID NO: 4220441 - DNA, 25 bp, Homo sapien
gggttgaacctcagagtaacttgac

SEQ ID NO: 4220442 - DNA, 25 bp, Homo sapien
tcatcagcagttagcaatgatctcc

SEQ ID NO: 4220443 - DNA, 25 bp, Homo sapien
ctttgaaaggaattggagctggatc

SEQ ID NO: 4220444 - DNA, 25 bp, Homo sapien
aaaggaattggagctggatcatcag

SEQ ID NO: 4220445 - DNA, 25 bp, Homo sapien
gctggatcatcagcagttagcaatg

SEQ ID NO: 4220446 - DNA, 25 bp, Homo sapien
tgtttggtaggtaaatattgtttga

SEQ ID NO: 4220447 - DNA, 25 bp, Homo sapien
cttcaaaacggaaaggcacttgcat

SEQ ID NO: 4220448 - DNA, 25 bp, Homo sapien
attgtttgaatatgatggagtttgc

SEQ ID NO: 4220449 - DNA, 25 bp, Homo sapien
gagagcttcaaaacggaaaggcact

SEQ ID NO: 4220450 - DNA, 25 bp, Homo sapien
cagtttttcttaaatcgagtgtggt

SEQ ID NO: 4220451 - DNA, 25 bp, Homo sapien
gtggttgcaatcagaaaactgtttg

SEQ ID NO: 4220452 - DNA, 25 bp, Homo sapien
gagtgtggttgcaatcagaaaactg

SEQ ID NO: 4220453 - DNA, 25 bp, Homo sapien
tttcttaaatcgagtgtggttgcaa

SEQ ID NO: 4220454 - DNA, 25 bp, Homo sapien
catctctctcgagggaatatttcag

SEQ ID NO: 4220455 - DNA, 25 bp, Homo sapien
gatgaatggccaaatcaggaatgac

SEQ ID NO: 4220456 - DNA, 25 bp, Homo sapien
caggaatgaccttgcatacaggtta

SEQ ID NO: 4220457 - DNA, 25 bp, Homo sapien
gggtacactcatagttacactaagg

SEQ ID NO: 4220458 - DNA, 25 bp, Homo sapien
cctggtattcggtgccattgaagaa

SEQ ID NO: 4220459 - DNA, 25 bp, Homo sapien
tgatatttgcctatctggcctttga

SEQ ID NO: 4220460 - DNA, 25 bp, Homo sapien
tttcttgggcaacatccagtttgac

SEQ ID NO: 4220461 - DNA, 25 bp, Homo sapien
tcatcagtttgtaaggtcctgcaca

SEQ ID NO: 4220462 - DNA, 25 bp, Homo sapien
gagaagatgtcatggtctataatat

SEQ ID NO: 4220463 - DNA, 25 bp, Homo sapien
aagttgtatttgtgagcaagcagca

SEQ ID NO: 4220464 - DNA, 25 bp, Homo sapien
gaaaaacgggatcagacattcatct

SEQ ID NO: 4220465 - DNA, 25 bp, Homo sapien
gatgtcatggtctataatattttca

SEQ ID NO: 4220466 - DNA, 25 bp, Homo sapien
tttcctaatcttgtccagaagtggc

SEQ ID NO: 4220467 - DNA, 25 bp, Homo sapien
ttcctaatcttgtccagaagtggca

SEQ ID NO: 4220468 - DNA, 25 bp, Homo sapien
tgtttcctaatcttgtccagaagtg

SEQ ID NO: 4220469 - DNA, 25 bp, Homo sapien
ggtgtttcctaatcttgtccagaag

SEQ ID NO: 4220470 - DNA, 25 bp, Homo sapien
cacagttgttccatgctggcatcca

SEQ ID NO: 4220471 - DNA, 25 bp, Homo sapien
tgtataaatctggacccttgcattg

SEQ ID NO: 4220472 - DNA, 25 bp, Homo sapien
gaccatatggtctagagtgccttct

SEQ ID NO: 4220473 - DNA, 25 bp, Homo sapien
catcctctgaggtgtcaatcttcct

SEQ ID NO: 4220474 - DNA, 25 bp, Homo sapien
caaagaggctaatgcagcagatacg

SEQ ID NO: 4220475 - DNA, 25 bp, Homo sapien
gcatgcaatgctgattttgaggcac

SEQ ID NO: 4220476 - DNA, 25 bp, Homo sapien
gcagcagcgtctgaattagtcacgg

SEQ ID NO: 4220477 - DNA, 25 bp, Homo sapien
cacggtgattgtgtgtcttggacat

SEQ ID NO: 4220478 - DNA, 25 bp, Homo sapien
tgaccaggggcttagagccacaggt

SEQ ID NO: 4220479 - DNA, 25 bp, Homo sapien
accaggggcttagagccacaggtca

SEQ ID NO: 4220480 - DNA, 25 bp, Homo sapien
ggtgaccaggggcttagagccacag

SEQ ID NO: 4220481 - DNA, 25 bp, Homo sapien
ccaggggcttagagccacaggtcat

SEQ ID NO: 4220482 - DNA, 25 bp, Homo sapien
cagatgtgtttcatgcctagagctt

SEQ ID NO: 4220483 - DNA, 25 bp, Homo sapien
tgtgtttcatgcctagagcttctaa

SEQ ID NO: 4220484 - DNA, 25 bp, Homo sapien
tgtcagacaataacctgatatttca

SEQ ID NO: 4220485 - DNA, 25 bp, Homo sapien
cctagagcttctaatgtcagacaat

SEQ ID NO: 4220486 - DNA, 25 bp, Homo sapien
ctcccctagattgttctgattgtca

SEQ ID NO: 4220487 - DNA, 25 bp, Homo sapien
tgaaccaggaatatgaagcagctgc

SEQ ID NO: 4220488 - DNA, 25 bp, Homo sapien
cattgtcaccataaggctcccctag

SEQ ID NO: 4220489 - DNA, 25 bp, Homo sapien
gcagctgcatcattgtcaccataag

SEQ ID NO: 4220490 - DNA, 25 bp, Homo sapien
tttggcttcattcccacggtagatc

SEQ ID NO: 4220491 - DNA, 25 bp, Homo sapien
ttcattcccacggtagatcttaaag

SEQ ID NO: 4220492 - DNA, 25 bp, Homo sapien
ccacggtagatcttaaagagatcct

SEQ ID NO: 4220493 - DNA, 25 bp, Homo sapien
ttcccacggtagatcttaaagagat

SEQ ID NO: 4220494 - DNA, 25 bp, Homo sapien
gaatctctttgacaaggtctcagtg

SEQ ID NO: 4220495 - DNA, 25 bp, Homo sapien
caaggtctcagtgtcgtttttgttt

SEQ ID NO: 4220496 - DNA, 25 bp, Homo sapien
gaagtgaaccatatgaatctctttg

SEQ ID NO: 4220497 - DNA, 25 bp, Homo sapien
ttggtgaagtgaaccatatgaatct

SEQ ID NO: 4220498 - DNA, 25 bp, Homo sapien
caaagagctgtgttgttggagactg

SEQ ID NO: 4220499 - DNA, 25 bp, Homo sapien
ctattgagggcagccccaaatgcca

SEQ ID NO: 4220500 - DNA, 25 bp, Homo sapien
acaagaaaggaacggtccatttctg

SEQ ID NO: 4220501 - DNA, 25 bp, Homo sapien
ccatttctgtcagcttgataggcat

SEQ ID NO: 4220502 - DNA, 25 bp, Homo sapien
caggtgtggtcatgagccctgagaa

SEQ ID NO: 4220503 - DNA, 25 bp, Homo sapien
ttcaggtgtggtcatgagccctgag

SEQ ID NO: 4220504 - DNA, 25 bp, Homo sapien
ggtgtggtcatgagccctgagaata

SEQ ID NO: 4220505 - DNA, 25 bp, Homo sapien
gtgtggtcatgagccctgagaatat

SEQ ID NO: 4220506 - DNA, 25 bp, Homo sapien
tagagatactctctattaggtgttc

SEQ ID NO: 4220507 - DNA, 25 bp, Homo sapien
agacagaatttaattggcctagcca

SEQ ID NO: 4220508 - DNA, 25 bp, Homo sapien
ctctattaggtgttcattttctgcc

SEQ ID NO: 4220509 - DNA, 25 bp, Homo sapien
aatttaattggcctagccaaatctc

SEQ ID NO: 4220510 - DNA, 25 bp, Homo sapien
tatctatattcactggtccagtgtc

SEQ ID NO: 4220511 - DNA, 25 bp, Homo sapien
tacacttctcttatccttgttctga

SEQ ID NO: 4220512 - DNA, 25 bp, Homo sapien
ccagtgtctacacttctcttatcct

SEQ ID NO: 4220513 - DNA, 25 bp, Homo sapien
ctatatctatattcactggtccagt

SEQ ID NO: 4220514 - DNA, 25 bp, Homo sapien
cttccttgcaatttcttatcaaatg

SEQ ID NO: 4220515 - DNA, 25 bp, Homo sapien
cgtatctcttccttgcaatttctta

SEQ ID NO: 4220516 - DNA, 25 bp, Homo sapien
tctcttccttgcaatttcttatcaa

SEQ ID NO: 4220517 - DNA, 25 bp, Homo sapien
ttccttgcaatttcttatcaaatgc

SEQ ID NO: 4220518 - DNA, 25 bp, Homo sapien
ccagagccagttcactcaaacatat

SEQ ID NO: 4220519 - DNA, 25 bp, Homo sapien
cactcaaacatattggcgtactctg

SEQ ID NO: 4220520 - DNA, 25 bp, Homo sapien
cgtactctgtggtgcaaattgagct

SEQ ID NO: 4220521 - DNA, 25 bp, Homo sapien
ggcttatagtctcttgtctttacaa

SEQ ID NO: 4220522 - DNA, 25 bp, Homo sapien
tcactcttcctcaggcttttgataa

SEQ ID NO: 4220523 - DNA, 25 bp, Homo sapien
aaagcaaccacatctgctcggtttg

SEQ ID NO: 4220524 - DNA, 25 bp, Homo sapien
accacatctgctcggtttgttacca

SEQ ID NO: 4220525 - DNA, 25 bp, Homo sapien
caaaagcaaccacatctgctcggtt

SEQ ID NO: 4220526 - DNA, 25 bp, Homo sapien
gcaaccacatctgctcggtttgtta

SEQ ID NO: 4220527 - DNA, 25 bp, Homo sapien
gagagtctgggtataagtgaactga

SEQ ID NO: 4220528 - DNA, 25 bp, Homo sapien
catgtctgtgtgtcttgtataagat

SEQ ID NO: 4220529 - DNA, 25 bp, Homo sapien
tttggaaggatcaatgacccactga

SEQ ID NO: 4220530 - DNA, 25 bp, Homo sapien
aactgagctttggaaggatcaatga

SEQ ID NO: 4220531 - DNA, 25 bp, Homo sapien
atccagccaacccatgccgacattc

SEQ ID NO: 4220532 - DNA, 25 bp, Homo sapien
cccatgccgacattctccaagcaac

SEQ ID NO: 4220533 - DNA, 25 bp, Homo sapien
ccatgccgacattctccaagcaact

SEQ ID NO: 4220534 - DNA, 25 bp, Homo sapien
ttatccagccaacccatgccgacat

SEQ ID NO: 4220535 - DNA, 25 bp, Homo sapien
tgattccccaagcaggtggaatgat

SEQ ID NO: 4220536 - DNA, 25 bp, Homo sapien
cccaagcaggtggaatgattgttct

SEQ ID NO: 4220537 - DNA, 25 bp, Homo sapien
gtactgattccccaagcaggtggaa

SEQ ID NO: 4220538 - DNA, 25 bp, Homo sapien
ggaatgattgttctttcctgaatgc

SEQ ID NO: 4220539 - DNA, 25 bp, Homo sapien
caattttactggtgtgctccaggga

SEQ ID NO: 4220540 - DNA, 25 bp, Homo sapien
aattttactggtgtgctccagggaa

SEQ ID NO: 4220541 - DNA, 25 bp, Homo sapien
tcaattttactggtgtgctccaggg

SEQ ID NO: 4220542 - DNA, 25 bp, Homo sapien
attttactggtgtgctccagggaat

SEQ ID NO: 4220543 - DNA, 25 bp, Homo sapien
tagcagagctctgagctagctgggt

SEQ ID NO: 4220544 - DNA, 25 bp, Homo sapien
tacttgccaatcctgtagcagagct

SEQ ID NO: 4220545 - DNA, 25 bp, Homo sapien
caagagctgcataagccttctgctg

SEQ ID NO: 4220546 - DNA, 25 bp, Homo sapien
gctgctctaagacccttagaaggaa

SEQ ID NO: 4220547 - DNA, 25 bp, Homo sapien
cagaattagtatcagtgtggaggtc

SEQ ID NO: 4220548 - DNA, 25 bp, Homo sapien
cctggaaagaaagtctgttaggtat

SEQ ID NO: 4220549 - DNA, 25 bp, Homo sapien
ttaaataaataacgcaaggcagcag

SEQ ID NO: 4220550 - DNA, 25 bp, Homo sapien
gcaaggcagcagaattagtatcagt

SEQ ID NO: 4220551 - DNA, 25 bp, Homo sapien
tctgactgacatttggtgaaacggt

SEQ ID NO: 4220552 - DNA, 25 bp, Homo sapien
ggcccaactcttagaagttcatgga

SEQ ID NO: 4220553 - DNA, 25 bp, Homo sapien
catattccaagcttttaggtttcag

SEQ ID NO: 4220554 - DNA, 25 bp, Homo sapien
taggtttcagccagatgccagacac

SEQ ID NO: 4220555 - DNA, 25 bp, Homo sapien
atgtgggaaacaacaactgtcctac

SEQ ID NO: 4220556 - DNA, 25 bp, Homo sapien
gtattggtttttggtcctaggcaca

SEQ ID NO: 4220557 - DNA, 25 bp, Homo sapien
ctatttcatatccatgctggtattg

SEQ ID NO: 4220558 - DNA, 25 bp, Homo sapien
actgtcctacaaatatccatcacta

SEQ ID NO: 4220559 - DNA, 25 bp, Homo sapien
cattaggccttttgcaaactcttac

SEQ ID NO: 4220560 - DNA, 25 bp, Homo sapien
tctgaatttgcaatgactttctcac

SEQ ID NO: 4220561 - DNA, 25 bp, Homo sapien
gaaattttacagttgactccttcca

SEQ ID NO: 4220562 - DNA, 25 bp, Homo sapien
ttacagttgactccttccagcctct

SEQ ID NO: 4220563 - DNA, 25 bp, Homo sapien
ctcttttcacagtctgaatttgcaa

SEQ ID NO: 4220564 - DNA, 25 bp, Homo sapien
acctggatgttggaaacttcacaga

SEQ ID NO: 4220565 - DNA, 25 bp, Homo sapien
tgaacctggatgttggaaacttcac

SEQ ID NO: 4220566 - DNA, 25 bp, Homo sapien
cctggatgttggaaacttcacagaa

SEQ ID NO: 4220567 - DNA, 25 bp, Homo sapien
tctgaacctggatgttggaaacttc

SEQ ID NO: 4220568 - DNA, 25 bp, Homo sapien
ttaagtctgcccagtaagagcccac

SEQ ID NO: 4220569 - DNA, 25 bp, Homo sapien
cactgagtgacagtggctagagaga

SEQ ID NO: 4220570 - DNA, 25 bp, Homo sapien
gtctgcccagtaagagcccactgag

SEQ ID NO: 4220571 - DNA, 25 bp, Homo sapien
gcccactgagtgacagtggctagag

SEQ ID NO: 4220572 - DNA, 25 bp, Homo sapien
tccatggatgattcttccgtttctt

SEQ ID NO: 4220573 - DNA, 25 bp, Homo sapien
ccatggatgattcttccgtttcttc

SEQ ID NO: 4220574 - DNA, 25 bp, Homo sapien
tgtcgtaattcttgtcatgtgcata

SEQ ID NO: 4220575 - DNA, 25 bp, Homo sapien
tataaagaagaacacactagacatt

SEQ ID NO: 4220576 - DNA, 25 bp, Homo sapien
cttgtcatgtgcataagaatgtatt

SEQ ID NO: 4220577 - DNA, 25 bp, Homo sapien
ttgcctgtcacaagttaatttgaag

SEQ ID NO: 4220578 - DNA, 25 bp, Homo sapien
cgccagtgaatgtaaagggtcaaaa

SEQ ID NO: 4220579 - DNA, 25 bp, Homo sapien
tctcttcgccagtgaatgtaaaggg

SEQ ID NO: 4220580 - DNA, 25 bp, Homo sapien
ggactttggtcttattctcttcgcc

SEQ ID NO: 4220581 - DNA, 25 bp, Homo sapien
aatagattgtagaactttaagactc

SEQ ID NO: 4220582 - DNA, 25 bp, Homo sapien
caggattctagtggatctgtcactt

SEQ ID NO: 4220583 - DNA, 25 bp, Homo sapien
ctaaactgagttccagtcagaagca

SEQ ID NO: 4220584 - DNA, 25 bp, Homo sapien
ggctgggcaggcttataatgtccta

SEQ ID NO: 4220585 - DNA, 25 bp, Homo sapien
ctaatgaaacatgattggacacaaa

SEQ ID NO: 4220586 - DNA, 25 bp, Homo sapien
taccccgatcctaaactgagttcca

SEQ ID NO: 4220587 - DNA, 25 bp, Homo sapien
cctcttcctgttacagaatgtggag

SEQ ID NO: 4220588 - DNA, 25 bp, Homo sapien
ccatctatccctgaaggtcaaaccc

SEQ ID NO: 4220589 - DNA, 25 bp, Homo sapien
ttcctgttacagaatgtggagtgtt

SEQ ID NO: 4220590 - DNA, 25 bp, Homo sapien
tgcttagatggtccttctttaaggt

SEQ ID NO: 4220591 - DNA, 25 bp, Homo sapien
cttcttaggccaagacttgccaagg

SEQ ID NO: 4220592 - DNA, 25 bp, Homo sapien
aagacttgccaagggcttatgctcc

SEQ ID NO: 4220593 - DNA, 25 bp, Homo sapien
taggccaagacttgccaagggctta

SEQ ID NO: 4220594 - DNA, 25 bp, Homo sapien
caagggcttatgctcctttactgga

SEQ ID NO: 4220595 - DNA, 25 bp, Homo sapien
gaacacacacttagagaactggatg

SEQ ID NO: 4220596 - DNA, 25 bp, Homo sapien
ccaggtccaagagaacatacgagca

SEQ ID NO: 4220597 - DNA, 25 bp, Homo sapien
tcagggaagatttcagcccagccag

SEQ ID NO: 4220598 - DNA, 25 bp, Homo sapien
tgcagaaaaaacattggacgttggg

SEQ ID NO: 4220599 - DNA, 25 bp, Homo sapien
tcagtgctctctagcagccagcaga

SEQ ID NO: 4220600 - DNA, 25 bp, Homo sapien
tccaccaactctgggacttcctgag

SEQ ID NO: 4220601 - DNA, 25 bp, Homo sapien
gccagcagacttgcaagtgagggaa

SEQ ID NO: 4220602 - DNA, 25 bp, Homo sapien
tcaaagacttgaggaggcaggcctg

SEQ ID NO: 4220603 - DNA, 25 bp, Homo sapien
ttttgtgttttgattgagctgaaat

SEQ ID NO: 4220604 - DNA, 25 bp, Homo sapien
ttttgattgagctgaaatattcatc

SEQ ID NO: 4220605 - DNA, 25 bp, Homo sapien
gcagccgttcattcaagagtgtatt

SEQ ID NO: 4220606 - DNA, 25 bp, Homo sapien
taatcagcagccgttcattcaagag

SEQ ID NO: 4220607 - DNA, 25 bp, Homo sapien
tatctgtgcatcaccagagggttta

SEQ ID NO: 4220608 - DNA, 25 bp, Homo sapien
tgtgcatcaccagagggtttaaacg

SEQ ID NO: 4220609 - DNA, 25 bp, Homo sapien
aggtatctgtgcatcaccagagggt

SEQ ID NO: 4220610 - DNA, 25 bp, Homo sapien
catcaccagagggtttaaacgtgta

SEQ ID NO: 4220611 - DNA, 25 bp, Homo sapien
tgctcgacactatttctggatttct

SEQ ID NO: 4220612 - DNA, 25 bp, Homo sapien
tatctgctcgacactatttctggat

SEQ ID NO: 4220613 - DNA, 25 bp, Homo sapien
aatatctgctcgacactatttctgg

SEQ ID NO: 4220614 - DNA, 25 bp, Homo sapien
gacaaaatatctgctcgacactatt

SEQ ID NO: 4220615 - DNA, 25 bp, Homo sapien
caatgactttgactacctctgcctc

SEQ ID NO: 4220616 - DNA, 25 bp, Homo sapien
tcatgtctgtcagtgttcagtccac

SEQ ID NO: 4220617 - DNA, 25 bp, Homo sapien
gatgtcatgtctatgtcctgtcctg

SEQ ID NO: 4220618 - DNA, 25 bp, Homo sapien
ggctccaactgtctggccattcagt

SEQ ID NO: 4220619 - DNA, 25 bp, Homo sapien
tccaattttgaactcagtgtgctcc

SEQ ID NO: 4220620 - DNA, 25 bp, Homo sapien
ccataagtcatccttcaaacctttg

SEQ ID NO: 4220621 - DNA, 25 bp, Homo sapien
tttgtatttacaggacagcttggca

SEQ ID NO: 4220622 - DNA, 25 bp, Homo sapien
gtgctgtctgcccataagtcatcct

SEQ ID NO: 4220623 - DNA, 25 bp, Homo sapien
acaagagtagataagtcttcgtttc

SEQ ID NO: 4220624 - DNA, 25 bp, Homo sapien
agagtagataagtcttcgtttctta

SEQ ID NO: 4220625 - DNA, 25 bp, Homo sapien
gtagataagtcttcgtttcttattc

SEQ ID NO: 4220626 - DNA, 25 bp, Homo sapien
agataagtcttcgtttcttattctg

SEQ ID NO: 4220627 - DNA, 25 bp, Homo sapien
catagacattgagattggacagctc

SEQ ID NO: 4220628 - DNA, 25 bp, Homo sapien
tggacagctctgagcggatcacttc

SEQ ID NO: 4220629 - DNA, 25 bp, Homo sapien
agccttgtgacttggtgaacatcag

SEQ ID NO: 4220630 - DNA, 25 bp, Homo sapien
aaaaattgacatcatgagaggagga

SEQ ID NO: 4220631 - DNA, 25 bp, Homo sapien
gtggatgtggtggaactatattctt

SEQ ID NO: 4220632 - DNA, 25 bp, Homo sapien
tatcagtgtcttgtggataagtggg

SEQ ID NO: 4220633 - DNA, 25 bp, Homo sapien
tgttctctaacattgttggcaggtc

SEQ ID NO: 4220634 - DNA, 25 bp, Homo sapien
ggtccataaggccaatgcttgcata

SEQ ID NO: 4220635 - DNA, 25 bp, Homo sapien
ttgttggagcccagcaaacatgtca

SEQ ID NO: 4220636 - DNA, 25 bp, Homo sapien
cttgttggagcccagcaaacatgtc

SEQ ID NO: 4220637 - DNA, 25 bp, Homo sapien
tgttggagcccagcaaacatgtcat

SEQ ID NO: 4220638 - DNA, 25 bp, Homo sapien
agtatagtggcttgtaacttggaaa

SEQ ID NO: 4220639 - DNA, 25 bp, Homo sapien
aaatgatgtattcttcgtcacagat

SEQ ID NO: 4220640 - DNA, 25 bp, Homo sapien
ttggattgtggacagacaggacaac

SEQ ID NO: 4220641 - DNA, 25 bp, Homo sapien
tattcttcgtcacagatgattctgt

SEQ ID NO: 4220642 - DNA, 25 bp, Homo sapien
taaaaattccaggatctaggctgct

SEQ ID NO: 4220643 - DNA, 25 bp, Homo sapien
ggctgctttgggacatcatttgaaa

SEQ ID NO: 4220644 - DNA, 25 bp, Homo sapien
taaaacagtgaggtctccctgcctt

SEQ ID NO: 4220645 - DNA, 25 bp, Homo sapien
gattttgatgtcagatgaaccagta

SEQ ID NO: 4220646 - DNA, 25 bp, Homo sapien
gagatcagcagatttcgtgcctctt

SEQ ID NO: 4220647 - DNA, 25 bp, Homo sapien
ctttcaggggctttctactgagatc

SEQ ID NO: 4220648 - DNA, 25 bp, Homo sapien
agcaggctgcgccttttgcagagag

SEQ ID NO: 4220649 - DNA, 25 bp, Homo sapien
cagatttcgtgcctcttttatacga

SEQ ID NO: 4220650 - DNA, 25 bp, Homo sapien
ctgtatggcagctccatggtactgg

SEQ ID NO: 4220651 - DNA, 25 bp, Homo sapien
gccatcactagggtacgaagtcttt

SEQ ID NO: 4220652 - DNA, 25 bp, Homo sapien
tcaagagagcttatctccaggtctg

SEQ ID NO: 4220653 - DNA, 25 bp, Homo sapien
cactagggtacgaagtctttgtcca

SEQ ID NO: 4220654 - DNA, 25 bp, Homo sapien
tagggtcagcctacacagaagataa

SEQ ID NO: 4220655 - DNA, 25 bp, Homo sapien
ctaggcagaagctgtgctagggtca

SEQ ID NO: 4220656 - DNA, 25 bp, Homo sapien
ccttgaaggactctgccagtatgtc

SEQ ID NO: 4220657 - DNA, 25 bp, Homo sapien
ggatgacaaaagtctatcccctctc

SEQ ID NO: 4220658 - DNA, 25 bp, Homo sapien
acagacaaggttgcagaggtgctgc

SEQ ID NO: 4220659 - DNA, 25 bp, Homo sapien
tgcaaagaggcacagagcacagaca

SEQ ID NO: 4220660 - DNA, 25 bp, Homo sapien
agcacagacaaggttgcagaggtgc

SEQ ID NO: 4220661 - DNA, 25 bp, Homo sapien
agacaaggttgcagaggtgctgcat

SEQ ID NO: 4220662 - DNA, 25 bp, Homo sapien
gggatagctgtccaacttggcaaca

SEQ ID NO: 4220663 - DNA, 25 bp, Homo sapien
tgcaggcagtttgtcaggactttgt

SEQ ID NO: 4220664 - DNA, 25 bp, Homo sapien
gattccctggtatgacatgtaatga

SEQ ID NO: 4220665 - DNA, 25 bp, Homo sapien
gctttattctagcaatgattccctg

SEQ ID NO: 4220666 - DNA, 25 bp, Homo sapien
gtttccatgtcatttgtagaatgat

SEQ ID NO: 4220667 - DNA, 25 bp, Homo sapien
ggattagtcgtacatgtttccatgt

SEQ ID NO: 4220668 - DNA, 25 bp, Homo sapien
tccatgtcatttgtagaatgataag

SEQ ID NO: 4220669 - DNA, 25 bp, Homo sapien
gtggcatgcatctaacccagttagg

SEQ ID NO: 4220670 - DNA, 25 bp, Homo sapien
catatactctggatccagcgtaggt

SEQ ID NO: 4220671 - DNA, 25 bp, Homo sapien
ggatccagcgtaggtttttgagaac

SEQ ID NO: 4220672 - DNA, 25 bp, Homo sapien
tctatcttagcaattggagagctag

SEQ ID NO: 4220673 - DNA, 25 bp, Homo sapien
ttttgagaacatttctatcttagca

SEQ ID NO: 4220674 - DNA, 25 bp, Homo sapien
tgaaatcaaatgagattgagcactt

SEQ ID NO: 4220675 - DNA, 25 bp, Homo sapien
aaatcaaatgagattgagcactttc

SEQ ID NO: 4220676 - DNA, 25 bp, Homo sapien
cactttcagggtggtctgactgtaa

SEQ ID NO: 4220677 - DNA, 25 bp, Homo sapien
gaaatcaaatgagattgagcacttt

SEQ ID NO: 4220678 - DNA, 25 bp, Homo sapien
gcaatgcccttattttcaatgtgca

SEQ ID NO: 4220679 - DNA, 25 bp, Homo sapien
cagcaatgcccttattttcaatgtg

SEQ ID NO: 4220680 - DNA, 25 bp, Homo sapien
tacagcaatgcccttattttcaatg

SEQ ID NO: 4220681 - DNA, 25 bp, Homo sapien
gtttacagcaatgcccttattttca

SEQ ID NO: 4220682 - DNA, 25 bp, Homo sapien
tcttctggctgatactgtgggcacc

SEQ ID NO: 4220683 - DNA, 25 bp, Homo sapien
ttccatgtgacatgccctctattag

SEQ ID NO: 4220684 - DNA, 25 bp, Homo sapien
tgtgacatgccctctattaggtgct

SEQ ID NO: 4220685 - DNA, 25 bp, Homo sapien
gggcaaggccatgcagttccatgtg

SEQ ID NO: 4220686 - DNA, 25 bp, Homo sapien
ggtccaacagtgctgagatccggat

SEQ ID NO: 4220687 - DNA, 25 bp, Homo sapien
gagatccggataggatttcctggga

SEQ ID NO: 4220688 - DNA, 25 bp, Homo sapien
caacagtgctgagatccggatagga

SEQ ID NO: 4220689 - DNA, 25 bp, Homo sapien
cagtgctgagatccggataggattt

SEQ ID NO: 4220690 - DNA, 25 bp, Homo sapien
tctggggtcctgcagcatggagaca

SEQ ID NO: 4220691 - DNA, 25 bp, Homo sapien
ttcttgagcactctggggtcctgca

SEQ ID NO: 4220692 - DNA, 25 bp, Homo sapien
gaaacaattcctgtttttcttgagc

SEQ ID NO: 4220693 - DNA, 25 bp, Homo sapien
attcctgtttttcttgagcactctg

SEQ ID NO: 4220694 - DNA, 25 bp, Homo sapien
tgaacaacccatctgcaaggcttag

SEQ ID NO: 4220695 - DNA, 25 bp, Homo sapien
tcacaatgaccccatgattcggttc

SEQ ID NO: 4220696 - DNA, 25 bp, Homo sapien
cagtgtcactcaggctcgggtttag

SEQ ID NO: 4220697 - DNA, 25 bp, Homo sapien
tcttgccaaatagtggtctcctgag

SEQ ID NO: 4220698 - DNA, 25 bp, Homo sapien
gccagcacaagaagacaggtacgcc

SEQ ID NO: 4220699 - DNA, 25 bp, Homo sapien
cagcacaagaagacaggtacgccat

SEQ ID NO: 4220700 - DNA, 25 bp, Homo sapien
aatgtagccagcacaagaagacagg

SEQ ID NO: 4220701 - DNA, 25 bp, Homo sapien
tagccagcacaagaagacaggtacg

SEQ ID NO: 4220702 - DNA, 25 bp, Homo sapien
aacacaggcttcgctaggggccgtg

SEQ ID NO: 4220703 - DNA, 25 bp, Homo sapien
agaaggccctgtccggatgtctacc

SEQ ID NO: 4220704 - DNA, 25 bp, Homo sapien
atgtctacccgccagcacagagggg

SEQ ID NO: 4220705 - DNA, 25 bp, Homo sapien
tatgaacaagggctgtagatggcgc

SEQ ID NO: 4220706 - DNA, 25 bp, Homo sapien
gctagaatttgaggatagccttcag

SEQ ID NO: 4220707 - DNA, 25 bp, Homo sapien
ggaggctagaatttgaggatagcct

SEQ ID NO: 4220708 - DNA, 25 bp, Homo sapien
ctagaatttgaggatagccttcagc

SEQ ID NO: 4220709 - DNA, 25 bp, Homo sapien
aggctagaatttgaggatagccttc

SEQ ID NO: 4220710 - DNA, 25 bp, Homo sapien
ttctcccaccgtattctttatctca

SEQ ID NO: 4220711 - DNA, 25 bp, Homo sapien
gacgtgctcttctgttctacctctt

SEQ ID NO: 4220712 - DNA, 25 bp, Homo sapien
ctgctgggaagagagtaacgctttg

SEQ ID NO: 4220713 - DNA, 25 bp, Homo sapien
gtgacaagtctctgacgtgctcttc

SEQ ID NO: 4220714 - DNA, 25 bp, Homo sapien
gctttcttatggactgggttctgag

SEQ ID NO: 4220715 - DNA, 25 bp, Homo sapien
tgctttcttatggactgggttctga

SEQ ID NO: 4220716 - DNA, 25 bp, Homo sapien
ctttggttgctttcttatggactgg

SEQ ID NO: 4220717 - DNA, 25 bp, Homo sapien
tggttgctttcttatggactgggtt

SEQ ID NO: 4220718 - DNA, 25 bp, Homo sapien
taaggatccatagaatactgtagcc

SEQ ID NO: 4220719 - DNA, 25 bp, Homo sapien
ttattgtaacatgtgagagtcctca

SEQ ID NO: 4220720 - DNA, 25 bp, Homo sapien
tcctcatcgttgcattggccaccag

SEQ ID NO: 4220721 - DNA, 25 bp, Homo sapien
ggccaccaggcataaggatccatag

SEQ ID NO: 4220722 - DNA, 25 bp, Homo sapien
ctctagtgttgggaagaggacccag

SEQ ID NO: 4220723 - DNA, 25 bp, Homo sapien
gagatggagtcctgagcttaatggt

SEQ ID NO: 4220724 - DNA, 25 bp, Homo sapien
atcctgccacttctgaggacactct

SEQ ID NO: 4220725 - DNA, 25 bp, Homo sapien
gctttggatatcaatgctgggccat

SEQ ID NO: 4220726 - DNA, 25 bp, Homo sapien
actccacccaggtaacaaggcttct

SEQ ID NO: 4220727 - DNA, 25 bp, Homo sapien
tcactccacccaggtaacaaggctt

SEQ ID NO: 4220728 - DNA, 25 bp, Homo sapien
ctccacccaggtaacaaggcttctt

SEQ ID NO: 4220729 - DNA, 25 bp, Homo sapien
gttcactccacccaggtaacaaggc

SEQ ID NO: 4220730 - DNA, 25 bp, Homo sapien
ctgtgtgaatgctggaaggagctgt

SEQ ID NO: 4220731 - DNA, 25 bp, Homo sapien
taattagtggtagtcactgtgtgaa

SEQ ID NO: 4220732 - DNA, 25 bp, Homo sapien
tcctgcacttcctggactcttgtgt

SEQ ID NO: 4220733 - DNA, 25 bp, Homo sapien
aaacacaggtctgagaggcgtaatt

SEQ ID NO: 4220734 - DNA, 25 bp, Homo sapien
gataaattgatgaaggtgcccaacc

SEQ ID NO: 4220735 - DNA, 25 bp, Homo sapien
tgctgagctcaacaaatacaaactg

SEQ ID NO: 4220736 - DNA, 25 bp, Homo sapien
gattgtgttggcacttacctgaccg

SEQ ID NO: 4220737 - DNA, 25 bp, Homo sapien
catgtagaacacgtagcagagtgct

SEQ ID NO: 4220738 - DNA, 25 bp, Homo sapien
tgggctgccctactggaatctggac

SEQ ID NO: 4220739 - DNA, 25 bp, Homo sapien
ctggctggggtgtacgaagcatctc

SEQ ID NO: 4220740 - DNA, 25 bp, Homo sapien
tgtacgaagcatctctgcagtccct

SEQ ID NO: 4220741 - DNA, 25 bp, Homo sapien
tggaatctggactctgtcttgtcat

SEQ ID NO: 4220742 - DNA, 25 bp, Homo sapien
tcaaagccaccccgattttactgaa

SEQ ID NO: 4220743 - DNA, 25 bp, Homo sapien
gggtcttttctatggtggacatact

SEQ ID NO: 4220744 - DNA, 25 bp, Homo sapien
ctggcaaatctaaatcatctttatc

SEQ ID NO: 4220745 - DNA, 25 bp, Homo sapien
ttccgagagcagctgaacatctggc

SEQ ID NO: 4220746 - DNA, 25 bp, Homo sapien
ctacttataaaagcctgtaaaacag

SEQ ID NO: 4220747 - DNA, 25 bp, Homo sapien
acttataaaagcctgtaaaacagct

SEQ ID NO: 4220748 - DNA, 25 bp, Homo sapien
ttataaaagcctgtaaaacagcttc

SEQ ID NO: 4220749 - DNA, 25 bp, Homo sapien
tctacttataaaagcctgtaaaaca

SEQ ID NO: 4220750 - DNA, 25 bp, Homo sapien
caactgatctttacaaagccaacaa

SEQ ID NO: 4220751 - DNA, 25 bp, Homo sapien
gatctttacaaagccaacaaaaatg

SEQ ID NO: 4220752 - DNA, 25 bp, Homo sapien
agccaactgatctttacaaagccaa

SEQ ID NO: 4220753 - DNA, 25 bp, Homo sapien
actgatctttacaaagccaacaaaa

SEQ ID NO: 4220754 - DNA, 25 bp, Homo sapien
tgttgacagtttccgcagaaatcct

SEQ ID NO: 4220755 - DNA, 25 bp, Homo sapien
tgtaaaagtgtaaaccagcccatga

SEQ ID NO: 4220756 - DNA, 25 bp, Homo sapien
gaccaacattgtggcatggcagcaa

SEQ ID NO: 4220757 - DNA, 25 bp, Homo sapien
tctgtgagcctacctatagcactgg

SEQ ID NO: 4220758 - DNA, 25 bp, Homo sapien
tgtaaactattattgagtagaggcc

SEQ ID NO: 4220759 - DNA, 25 bp, Homo sapien
aaatgtcaagagaaaggccaaagat

SEQ ID NO: 4220760 - DNA, 25 bp, Homo sapien
caaattagatttaatgagagagtac

SEQ ID NO: 4220761 - DNA, 25 bp, Homo sapien
gtactatttttaaggagctatctgt

SEQ ID NO: 4220762 - DNA, 25 bp, Homo sapien
catgattgcaagagaccaagtttca

SEQ ID NO: 4220763 - DNA, 25 bp, Homo sapien
tgatgtgccacgatgctgctccaat

SEQ ID NO: 4220764 - DNA, 25 bp, Homo sapien
agctttattatcctgacgtcttggg

SEQ ID NO: 4220765 - DNA, 25 bp, Homo sapien
cttgggttcttcatgagcatacgat

SEQ ID NO: 4220766 - DNA, 25 bp, Homo sapien
catattaccctgtgacttacgtagg

SEQ ID NO: 4220767 - DNA, 25 bp, Homo sapien
cagacaaatgattgcatgaggccat

SEQ ID NO: 4220768 - DNA, 25 bp, Homo sapien
cattcacgatggttttgtgccagct

SEQ ID NO: 4220769 - DNA, 25 bp, Homo sapien
catcaagagaggcagtcattcacga

SEQ ID NO: 4220770 - DNA, 25 bp, Homo sapien
cttggctgttaatcatactaatttc

SEQ ID NO: 4220771 - DNA, 25 bp, Homo sapien
ctaatttctcgtacatcctaggagt

SEQ ID NO: 4220772 - DNA, 25 bp, Homo sapien
ttcttggctgttaatcatactaatt

SEQ ID NO: 4220773 - DNA, 25 bp, Homo sapien
catactaatttctcgtacatcctag

SEQ ID NO: 4220774 - DNA, 25 bp, Homo sapien
tagtggcactcacaagtaggcaaaa

SEQ ID NO: 4220775 - DNA, 25 bp, Homo sapien
ggtgatgtagatcctggtccagagc

SEQ ID NO: 4220776 - DNA, 25 bp, Homo sapien
tagtgtcacacagtggaagggtttc

SEQ ID NO: 4220777 - DNA, 25 bp, Homo sapien
gagaatacttttggcatgcatgagg

SEQ ID NO: 4220778 - DNA, 25 bp, Homo sapien
tcctgttggtaaagaggttgatcat

SEQ ID NO: 4220779 - DNA, 25 bp, Homo sapien
cttcctgttggtaaagaggttgatc

SEQ ID NO: 4220780 - DNA, 25 bp, Homo sapien
aggcttcctgttggtaaagaggttg

SEQ ID NO: 4220781 - DNA, 25 bp, Homo sapien
ttccctaggcttaggcttcctgttg

SEQ ID NO: 4220782 - DNA, 25 bp, Homo sapien
ggcatgcactaatatttaaaactct

SEQ ID NO: 4220783 - DNA, 25 bp, Homo sapien
gctcatgatcaaaatagaaccctaa

SEQ ID NO: 4220784 - DNA, 25 bp, Homo sapien
cagggtcttgccttatctagtcagg

SEQ ID NO: 4220785 - DNA, 25 bp, Homo sapien
tgcatgcagcgcagtcacggcatac

SEQ ID NO: 4220786 - DNA, 25 bp, Homo sapien
aatttgacagtaatgctcagaagca

SEQ ID NO: 4220787 - DNA, 25 bp, Homo sapien
gatttcaacacttcatggtttcacc

SEQ ID NO: 4220788 - DNA, 25 bp, Homo sapien
agttaattggaatgctgggatcatc

SEQ ID NO: 4220789 - DNA, 25 bp, Homo sapien
gcagcattttggtgaattaatcaac

SEQ ID NO: 4220790 - DNA, 25 bp, Homo sapien
agtggctggcgcctgcttgccactt

SEQ ID NO: 4220791 - DNA, 25 bp, Homo sapien
gatagatttttactactccaatgtt

SEQ ID NO: 4220792 - DNA, 25 bp, Homo sapien
ttatgatagatttttactactccaa

SEQ ID NO: 4220793 - DNA, 25 bp, Homo sapien
ttgccacttggaggctacttgggag

SEQ ID NO: 4220794 - DNA, 25 bp, Homo sapien
catgccatgccgggccatgtctttc

SEQ ID NO: 4220795 - DNA, 25 bp, Homo sapien
caacctcatgggcttaatcagttga

SEQ ID NO: 4220796 - DNA, 25 bp, Homo sapien
tgggcttaatcagttgatcttcctg

SEQ ID NO: 4220797 - DNA, 25 bp, Homo sapien
cctcatgggcttaatcagttgatct

SEQ ID NO: 4220798 - DNA, 25 bp, Homo sapien
ttaagctgccaccaatcagcatctc

SEQ ID NO: 4220799 - DNA, 25 bp, Homo sapien
gcatctctgttcacagggtcagagg

SEQ ID NO: 4220800 - DNA, 25 bp, Homo sapien
catctctgttcacagggtcagagga

SEQ ID NO: 4220801 - DNA, 25 bp, Homo sapien
ctttaagctgccaccaatcagcatc

SEQ ID NO: 4220802 - DNA, 25 bp, Homo sapien
ttatagagattccttttctggcttt

SEQ ID NO: 4220803 - DNA, 25 bp, Homo sapien
gagattccttttctggctttatcct

SEQ ID NO: 4220804 - DNA, 25 bp, Homo sapien
gattccttttctggctttatcctta

SEQ ID NO: 4220805 - DNA, 25 bp, Homo sapien
cttttatagagattccttttctggc

SEQ ID NO: 4220806 - DNA, 25 bp, Homo sapien
tcaggtatggaccagcagtactcct

SEQ ID NO: 4220807 - DNA, 25 bp, Homo sapien
caggtatggaccagcagtactcctt

SEQ ID NO: 4220808 - DNA, 25 bp, Homo sapien
agttatgtcccattttattacacag

SEQ ID NO: 4220809 - DNA, 25 bp, Homo sapien
tcttacgttgtaagtaaatgttgga

SEQ ID NO: 4220810 - DNA, 25 bp, Homo sapien
tctgggaaacgtttatattctaggc

SEQ ID NO: 4220811 - DNA, 25 bp, Homo sapien
gaaacgtttatattctaggcaaatg

SEQ ID NO: 4220812 - DNA, 25 bp, Homo sapien
tgcagatgaccacagttgataattt

SEQ ID NO: 4220813 - DNA, 25 bp, Homo sapien
gatgaccacagttgataatttaatt

SEQ ID NO: 4220814 - DNA, 25 bp, Homo sapien
ttagtcacttcattgcagatgacca

SEQ ID NO: 4220815 - DNA, 25 bp, Homo sapien
cttcattgcagatgaccacagttga

SEQ ID NO: 4220816 - DNA, 25 bp, Homo sapien
tgtaccactccattactggaagtct

SEQ ID NO: 4220817 - DNA, 25 bp, Homo sapien
aagttgtaccactccattactggaa

SEQ ID NO: 4220818 - DNA, 25 bp, Homo sapien
cactccattactggaagtctttgtc

SEQ ID NO: 4220819 - DNA, 25 bp, Homo sapien
accactccattactggaagtctttg

SEQ ID NO: 4220820 - DNA, 25 bp, Homo sapien
atgttaccactacttgatttgctgc

SEQ ID NO: 4220821 - DNA, 25 bp, Homo sapien
gttgttccaccttttgccactggca

SEQ ID NO: 4220822 - DNA, 25 bp, Homo sapien
tactttctgacataacaatttgctc

SEQ ID NO: 4220823 - DNA, 25 bp, Homo sapien
tcctgtgccctttcaacatgctctg

SEQ ID NO: 4220824 - DNA, 25 bp, Homo sapien
ccatagagttgatgtgcctgtctca

SEQ ID NO: 4220825 - DNA, 25 bp, Homo sapien
tctagccctcatgcaaggcaaaggg

SEQ ID NO: 4220826 - DNA, 25 bp, Homo sapien
taatgtgtgccaagttccttcgctc

SEQ ID NO: 4220827 - DNA, 25 bp, Homo sapien
tgttccaatagccaatccaggttct

SEQ ID NO: 4220828 - DNA, 25 bp, Homo sapien
aatgagttagattgaaagctctgct

SEQ ID NO: 4220829 - DNA, 25 bp, Homo sapien
tgtatagaatgtaagcttttcagca

SEQ ID NO: 4220830 - DNA, 25 bp, Homo sapien
caaacaaaatgagttagattgaaag

SEQ ID NO: 4220831 - DNA, 25 bp, Homo sapien
tagaatgtaagcttttcagcatgat

SEQ ID NO: 4220832 - DNA, 25 bp, Homo sapien
tgcttttgtgcatgctgttgttccc

SEQ ID NO: 4220833 - DNA, 25 bp, Homo sapien
ttgccggcctctcaaatacggtagt

SEQ ID NO: 4220834 - DNA, 25 bp, Homo sapien
tcttagttgggattcttgccggcct

SEQ ID NO: 4220835 - DNA, 25 bp, Homo sapien
ttcttatagcctagtttcagtcccc

SEQ ID NO: 4220836 - DNA, 25 bp, Homo sapien
tggggaaacttcgccggcggctcca

SEQ ID NO: 4220837 - DNA, 25 bp, Homo sapien
cggacacgcgggagcccgcggcgtc

SEQ ID NO: 4220838 - DNA, 25 bp, Homo sapien
cagcggcccacacccgagcacaccc

SEQ ID NO: 4220839 - DNA, 25 bp, Homo sapien
ccgtctcgggcccagcggcccacac

SEQ ID NO: 4220840 - DNA, 25 bp, Homo sapien
gtacatttgggcataaatacttcaa

SEQ ID NO: 4220841 - DNA, 25 bp, Homo sapien
cgcttcggagaaccatatgtattta

SEQ ID NO: 4220842 - DNA, 25 bp, Homo sapien
tatgtatttacgcacacaaaggtgt

SEQ ID NO: 4220843 - DNA, 25 bp, Homo sapien
tattacagataaagcacctttccag

SEQ ID NO: 4220844 - DNA, 25 bp, Homo sapien
tgatcgagcaaacctttcaaacaga

SEQ ID NO: 4220845 - DNA, 25 bp, Homo sapien
tgaaataagaactgatcgagcaaac

SEQ ID NO: 4220846 - DNA, 25 bp, Homo sapien
acctttcaaacagacccaccagatg

SEQ ID NO: 4220847 - DNA, 25 bp, Homo sapien
taagaactgatcgagcaaacctttc

SEQ ID NO: 4220848 - DNA, 25 bp, Homo sapien
agtggccacattctctgactgatct

SEQ ID NO: 4220849 - DNA, 25 bp, Homo sapien
gccacattctctgactgatctgtgg

SEQ ID NO: 4220850 - DNA, 25 bp, Homo sapien
ctaatgtctatcagtggccacattc

SEQ ID NO: 4220851 - DNA, 25 bp, Homo sapien
tctctgactgatctgtggctccaac

SEQ ID NO: 4220852 - DNA, 25 bp, Homo sapien
gagattggctagctgcttcccattt

SEQ ID NO: 4220853 - DNA, 25 bp, Homo sapien
aatttctgagattggctagctgctt

SEQ ID NO: 4220854 - DNA, 25 bp, Homo sapien
tgtgagcagggcgatgggaggcact

SEQ ID NO: 4220855 - DNA, 25 bp, Homo sapien
gctggcttgcatagcccatgtgcct

SEQ ID NO: 4220856 - DNA, 25 bp, Homo sapien
ggccctgttccccggtcattgttca

SEQ ID NO: 4220857 - DNA, 25 bp, Homo sapien
ctgttccccggtcattgttcattca

SEQ ID NO: 4220858 - DNA, 25 bp, Homo sapien
gttccccggtcattgttcattcacc

SEQ ID NO: 4220859 - DNA, 25 bp, Homo sapien
ccctgttccccggtcattgttcatt

SEQ ID NO: 4220860 - DNA, 25 bp, Homo sapien
gctataaatctcagtggacggttcg

SEQ ID NO: 4220861 - DNA, 25 bp, Homo sapien
taacacaggtatgacttaggatggc

SEQ ID NO: 4220862 - DNA, 25 bp, Homo sapien
cctgtgtacactgaaactgccattt

SEQ ID NO: 4220863 - DNA, 25 bp, Homo sapien
aaaacttaagtcttgcctaatgctg

SEQ ID NO: 4220864 - DNA, 25 bp, Homo sapien
attgccatcgacgtagccctgtggg

SEQ ID NO: 4220865 - DNA, 25 bp, Homo sapien
caggccatgtacaaacttggaactc

SEQ ID NO: 4220866 - DNA, 25 bp, Homo sapien
catggactcctaatctcagaaaatc

SEQ ID NO: 4220867 - DNA, 25 bp, Homo sapien
gtaggaaacttcgtctcactgccca

SEQ ID NO: 4220868 - DNA, 25 bp, Homo sapien
tattcagttcatccgcaggagagga

SEQ ID NO: 4220869 - DNA, 25 bp, Homo sapien
gccaatagcgggactgacacgtgaa

SEQ ID NO: 4220870 - DNA, 25 bp, Homo sapien
caaaaaagggagatcatggcctcgt

SEQ ID NO: 4220871 - DNA, 25 bp, Homo sapien
tgagcagaaaaatcgcagcgcatcc

SEQ ID NO: 4220872 - DNA, 25 bp, Homo sapien
tctagcatcttttggcaccccgagg

SEQ ID NO: 4220873 - DNA, 25 bp, Homo sapien
ttttggcaccccgaggatggccagg

SEQ ID NO: 4220874 - DNA, 25 bp, Homo sapien
agcaaagcctctagcatcttttggc

SEQ ID NO: 4220875 - DNA, 25 bp, Homo sapien
aggccaaatcccctctgggtctgga

SEQ ID NO: 4220876 - DNA, 25 bp, Homo sapien
cagcagcgtgctctctccttcataa

SEQ ID NO: 4220877 - DNA, 25 bp, Homo sapien
ccagcacacatatctgtgagacagt

SEQ ID NO: 4220878 - DNA, 25 bp, Homo sapien
taatctgtggcgactggagctgaag

SEQ ID NO: 4220879 - DNA, 25 bp, Homo sapien
ccttggtggcggtaaagctttgtgc

SEQ ID NO: 4220880 - DNA, 25 bp, Homo sapien
tgtccactaaacttgtcagctgtat

SEQ ID NO: 4220881 - DNA, 25 bp, Homo sapien
cactaaacttgtcagctgtatccat

SEQ ID NO: 4220882 - DNA, 25 bp, Homo sapien
ctggcttgtccactaaacttgtcag

SEQ ID NO: 4220883 - DNA, 25 bp, Homo sapien
ggcttgtccactaaacttgtcagct

SEQ ID NO: 4220884 - DNA, 25 bp, Homo sapien
tatagccaccgtttcttgagtcctg

SEQ ID NO: 4220885 - DNA, 25 bp, Homo sapien
gaggcatgtctgtccgtagccaaga

SEQ ID NO: 4220886 - DNA, 25 bp, Homo sapien
gcacatctctcaccaaggttcctgt

SEQ ID NO: 4220887 - DNA, 25 bp, Homo sapien
gagggctagactggttgtaacacaa

SEQ ID NO: 4220888 - DNA, 25 bp, Homo sapien
aaaactgactggcaaccgccatgga

SEQ ID NO: 4220889 - DNA, 25 bp, Homo sapien
gaattacggaagactgaagctccca

SEQ ID NO: 4220890 - DNA, 25 bp, Homo sapien
gaaaccgtaaccacgaggactctca

SEQ ID NO: 4220891 - DNA, 25 bp, Homo sapien
aatgctgggcctgaaaatgcactca

SEQ ID NO: 4220892 - DNA, 25 bp, Homo sapien
tgtcgtttcttcagcacacccagtg

SEQ ID NO: 4220893 - DNA, 25 bp, Homo sapien
tggccaaggcctatccaataactgc

SEQ ID NO: 4220894 - DNA, 25 bp, Homo sapien
aacaggaaagatacagtcactgggc

SEQ ID NO: 4220895 - DNA, 25 bp, Homo sapien
actgctagcggctgcatttcactga

SEQ ID NO: 4220896 - DNA, 25 bp, Homo sapien
tccaagtctgaatgactgagcagag

SEQ ID NO: 4220897 - DNA, 25 bp, Homo sapien
gccggagtgctcctctcttagataa

SEQ ID NO: 4220898 - DNA, 25 bp, Homo sapien
gtaataatacacaaacccctgatga

SEQ ID NO: 4220899 - DNA, 25 bp, Homo sapien
tcagcgtgttattgactttccaagt

SEQ ID NO: 4220900 - DNA, 25 bp, Homo sapien
gactcgctgctatgccagtttattt

SEQ ID NO: 4220901 - DNA, 25 bp, Homo sapien
attggaatcactccctgactcgctg

SEQ ID NO: 4220902 - DNA, 25 bp, Homo sapien
agaaaagctctgcaagtcccggcac

SEQ ID NO: 4220903 - DNA, 25 bp, Homo sapien
cacgggcgtcacttgaaaataagca

SEQ ID NO: 4220904 - DNA, 25 bp, Homo sapien
ttattgacaaactccaggccagcgg

SEQ ID NO: 4220905 - DNA, 25 bp, Homo sapien
tatcatcttgagacggaaggcaact

SEQ ID NO: 4220906 - DNA, 25 bp, Homo sapien
caccaggccaagaagatagttttaa

SEQ ID NO: 4220907 - DNA, 25 bp, Homo sapien
tatagccctagggaacacacttagc

SEQ ID NO: 4220908 - DNA, 25 bp, Homo sapien
tcttttgtaagtcgcctggctgccc

SEQ ID NO: 4220909 - DNA, 25 bp, Homo sapien
tatatgagagccgaagcaaagtttc

SEQ ID NO: 4220910 - DNA, 25 bp, Homo sapien
tatattcacttctgtccactaggca

SEQ ID NO: 4220911 - DNA, 25 bp, Homo sapien
cagactccacaagggtgagggttgt

SEQ ID NO: 4220912 - DNA, 25 bp, Homo sapien
cttcgagaaccaggacattgcaaat

SEQ ID NO: 4220913 - DNA, 25 bp, Homo sapien
gagaaccaggacattgcaaatcgct

SEQ ID NO: 4220914 - DNA, 25 bp, Homo sapien
ggacattgcaaatcgctggatctgc

SEQ ID NO: 4220915 - DNA, 25 bp, Homo sapien
ccaggacattgcaaatcgctggatc

SEQ ID NO: 4220916 - DNA, 25 bp, Homo sapien
tgcttccgggcctctgcatccagga

SEQ ID NO: 4220917 - DNA, 25 bp, Homo sapien
tgctcttggttttggcccgttttca

SEQ ID NO: 4220918 - DNA, 25 bp, Homo sapien
ccacaagcgccagggagtaggagca

SEQ ID NO: 4220919 - DNA, 25 bp, Homo sapien
gtgccctgcacacatacttggatac

SEQ ID NO: 4220920 - DNA, 25 bp, Homo sapien
gatacacgcatgagtaagaccacca

SEQ ID NO: 4220921 - DNA, 25 bp, Homo sapien
tccctgcccagtatgatgttggcca

SEQ ID NO: 4220922 - DNA, 25 bp, Homo sapien
caggtgctcaagctgctgctccagc

SEQ ID NO: 4220923 - DNA, 25 bp, Homo sapien
ctggtacaaaggtagttgagtgatc

SEQ ID NO: 4220924 - DNA, 25 bp, Homo sapien
caaaggtagttgagtgatctctggc

SEQ ID NO: 4220925 - DNA, 25 bp, Homo sapien
ggtagttgagtgatctctggccact

SEQ ID NO: 4220926 - DNA, 25 bp, Homo sapien
tgtggacagctaggtttaagccacc

SEQ ID NO: 4220927 - DNA, 25 bp, Homo sapien
taagcggtcacagcctaatgctgcc

SEQ ID NO: 4220928 - DNA, 25 bp, Homo sapien
ggctcctattaacacattttctgct

SEQ ID NO: 4220929 - DNA, 25 bp, Homo sapien
tttcggttctctaagcggtcacagc

SEQ ID NO: 4220930 - DNA, 25 bp, Homo sapien
ctcataaggatctaaagagagcggg

SEQ ID NO: 4220931 - DNA, 25 bp, Homo sapien
ttgcaagatgtgtctgtgcgtctct

SEQ ID NO: 4220932 - DNA, 25 bp, Homo sapien
catccatgggaactgagtcaactca

SEQ ID NO: 4220933 - DNA, 25 bp, Homo sapien
cataaatgcacatcgagaagccaga

SEQ ID NO: 4220934 - DNA, 25 bp, Homo sapien
tagtcatcataacgccccagttcag

SEQ ID NO: 4220935 - DNA, 25 bp, Homo sapien
ctgcattagtcatcataacgcccca

SEQ ID NO: 4220936 - DNA, 25 bp, Homo sapien
tcagtgacagataaggtggataagt

SEQ ID NO: 4220937 - DNA, 25 bp, Homo sapien
cagataaggtggataagtcccattt

SEQ ID NO: 4220938 - DNA, 25 bp, Homo sapien
cctcagctatgcatgtggcaatgag

SEQ ID NO: 4220939 - DNA, 25 bp, Homo sapien
gccctcagctatgcatgtggcaatg

SEQ ID NO: 4220940 - DNA, 25 bp, Homo sapien
cagctatgcatgtggcaatgaggtc

SEQ ID NO: 4220941 - DNA, 25 bp, Homo sapien
tcagctatgcatgtggcaatgaggt

SEQ ID NO: 4220942 - DNA, 25 bp, Homo sapien
gttgaaatccaaatgatagtgcaca

SEQ ID NO: 4220943 - DNA, 25 bp, Homo sapien
cttgttgaaatccaaatgatagtgc

SEQ ID NO: 4220944 - DNA, 25 bp, Homo sapien
ttgaaatccaaatgatagtgcacat

SEQ ID NO: 4220945 - DNA, 25 bp, Homo sapien
tgttgaaatccaaatgatagtgcac

SEQ ID NO: 4220946 - DNA, 25 bp, Homo sapien
tgcaatgcaacctgacacttaaact

SEQ ID NO: 4220947 - DNA, 25 bp, Homo sapien
ggaaaatatataatgggttatgctt

SEQ ID NO: 4220948 - DNA, 25 bp, Homo sapien
aatgcaacctgacacttaaacttgt

SEQ ID NO: 4220949 - DNA, 25 bp, Homo sapien
tttatgcaatgcaacctgacactta

SEQ ID NO: 4220950 - DNA, 25 bp, Homo sapien
ttgttgatacgaagaggttcctcct

SEQ ID NO: 4220951 - DNA, 25 bp, Homo sapien
tttgttgatacgaagaggttcctcc

SEQ ID NO: 4220952 - DNA, 25 bp, Homo sapien
ccacagtcgtcaataatactgcgaa

SEQ ID NO: 4220953 - DNA, 25 bp, Homo sapien
cacacatccacagtcgtcaataata

SEQ ID NO: 4220954 - DNA, 25 bp, Homo sapien
agtcgtcaataatactgcgaattac

SEQ ID NO: 4220955 - DNA, 25 bp, Homo sapien
ttatcgattcacacatccacagtcg

SEQ ID NO: 4220956 - DNA, 25 bp, Homo sapien
gtcatatttctctcaacatccctgc

SEQ ID NO: 4220957 - DNA, 25 bp, Homo sapien
tctaagttgccaaataagaaggagg

SEQ ID NO: 4220958 - DNA, 25 bp, Homo sapien
aagcatcaccaaggagattctcacg

SEQ ID NO: 4220959 - DNA, 25 bp, Homo sapien
tttgtgcagaaatataggtctcttg

SEQ ID NO: 4220960 - DNA, 25 bp, Homo sapien
ctgagctccggttccaggcaagcac

SEQ ID NO: 4220961 - DNA, 25 bp, Homo sapien
gattaacagaagagccagacccttg

SEQ ID NO: 4220962 - DNA, 25 bp, Homo sapien
tgtgtggccggaacctctgtgacta

SEQ ID NO: 4220963 - DNA, 25 bp, Homo sapien
atcaacaggcccgacctggacacgt

SEQ ID NO: 4220964 - DNA, 25 bp, Homo sapien
cgtgcatcgcggcagcaaggttagc

SEQ ID NO: 4220965 - DNA, 25 bp, Homo sapien
tatccaaaacctttcgattcctatc

SEQ ID NO: 4220966 - DNA, 25 bp, Homo sapien
gaagaggcaactccaaaaaccagaa

SEQ ID NO: 4220967 - DNA, 25 bp, Homo sapien
atatccaaaacctttcgattcctat

SEQ ID NO: 4220968 - DNA, 25 bp, Homo sapien
ctggaagaggcaactccaaaaacca

SEQ ID NO: 4220969 - DNA, 25 bp, Homo sapien
tgtaccactgaatagctgttctcca

SEQ ID NO: 4220970 - DNA, 25 bp, Homo sapien
ttcagactccataatcctttaaagc

SEQ ID NO: 4220971 - DNA, 25 bp, Homo sapien
ctgcccgggcctgggagcatttaca

SEQ ID NO: 4220972 - DNA, 25 bp, Homo sapien
tccataatcctttaaagctctgcac

SEQ ID NO: 4220973 - DNA, 25 bp, Homo sapien
ctccaaactgggtgagaagagcgaa

SEQ ID NO: 4220974 - DNA, 25 bp, Homo sapien
ccaaactgggtgagaagagcgaaac

SEQ ID NO: 4220975 - DNA, 25 bp, Homo sapien
cactccaaactgggtgagaagagcg

SEQ ID NO: 4220976 - DNA, 25 bp, Homo sapien
ttgcactccaaactgggtgagaaga

SEQ ID NO: 4220977 - DNA, 25 bp, Homo sapien
gctttaataatctgcctgtttgctg

SEQ ID NO: 4220978 - DNA, 25 bp, Homo sapien
aatgctttaataatctgcctgtttg

SEQ ID NO: 4220979 - DNA, 25 bp, Homo sapien
tgtaacttcatgacaaatgctttaa

SEQ ID NO: 4220980 - DNA, 25 bp, Homo sapien
ccctggataatgcagctttttccat

SEQ ID NO: 4220981 - DNA, 25 bp, Homo sapien
tcttgtaaaccatctgaagaaaggc

SEQ ID NO: 4220982 - DNA, 25 bp, Homo sapien
aaccatctgaagaaaggcctagcat

SEQ ID NO: 4220983 - DNA, 25 bp, Homo sapien
tagcataagggggacgacatccatg

SEQ ID NO: 4220984 - DNA, 25 bp, Homo sapien
caattgtcttgtaaaccatctgaag

SEQ ID NO: 4220985 - DNA, 25 bp, Homo sapien
cctgcagctctttcagggcacaaca

SEQ ID NO: 4220986 - DNA, 25 bp, Homo sapien
ataatatcgacacctgccctgcagc

SEQ ID NO: 4220987 - DNA, 25 bp, Homo sapien
cataatatcgacacctgccctgcag

SEQ ID NO: 4220988 - DNA, 25 bp, Homo sapien
gcagctctttcagggcacaacacat

SEQ ID NO: 4220989 - DNA, 25 bp, Homo sapien
acaatccccacataatgttctgcat

SEQ ID NO: 4220990 - DNA, 25 bp, Homo sapien
aacaatccccacataatgttctgca

SEQ ID NO: 4220991 - DNA, 25 bp, Homo sapien
taacaatccccacataatgttctgc

SEQ ID NO: 4220992 - DNA, 25 bp, Homo sapien
gggtctgaagcagtgggtccatcat

SEQ ID NO: 4220993 - DNA, 25 bp, Homo sapien
cagtgggtccatcattgggacaaga

SEQ ID NO: 4220994 - DNA, 25 bp, Homo sapien
ttgggacaagaacagctttcaacag

SEQ ID NO: 4220995 - DNA, 25 bp, Homo sapien
tccatcattgggacaagaacagctt

SEQ ID NO: 4220996 - DNA, 25 bp, Homo sapien
aaatagtgtctgtgcgtgtgagctg

SEQ ID NO: 4220997 - DNA, 25 bp, Homo sapien
ggcttgagtgttgataaatagtgtc

SEQ ID NO: 4220998 - DNA, 25 bp, Homo sapien
gagtgttgataaatagtgtctgtgc

SEQ ID NO: 4220999 - DNA, 25 bp, Homo sapien
tgataaatagtgtctgtgcgtgtga

SEQ ID NO: 4221000 - DNA, 25 bp, Homo sapien
tctattggcccaaagactcttggaa

SEQ ID NO: 4221001 - DNA, 25 bp, Homo sapien
tcatctattggcccaaagactcttg

SEQ ID NO: 4221002 - DNA, 25 bp, Homo sapien
catctattggcccaaagactcttgg

SEQ ID NO: 4221003 - DNA, 25 bp, Homo sapien
ccacacagtgttaagccaaagttgg

SEQ ID NO: 4221004 - DNA, 25 bp, Homo sapien
caggaatagggacatgtggtcctgc

SEQ ID NO: 4221005 - DNA, 25 bp, Homo sapien
aggaatagggacatgtggtcctgca

SEQ ID NO: 4221006 - DNA, 25 bp, Homo sapien
gaatagggacatgtggtcctgcagt

SEQ ID NO: 4221007 - DNA, 25 bp, Homo sapien
aatagggacatgtggtcctgcagtc

SEQ ID NO: 4221008 - DNA, 25 bp, Homo sapien
tatctgggtaattgcacaactgctt

SEQ ID NO: 4221009 - DNA, 25 bp, Homo sapien
tcacttcggttgcatagatagttaa

SEQ ID NO: 4221010 - DNA, 25 bp, Homo sapien
gagtcattagggcagcacgcccttc

SEQ ID NO: 4221011 - DNA, 25 bp, Homo sapien
cattagggcagcacgcccttctttc

SEQ ID NO: 4221012 - DNA, 25 bp, Homo sapien
tgggtctccctctgtacattttggc

SEQ ID NO: 4221013 - DNA, 25 bp, Homo sapien
tacgaggaaatttcatcaggttctg

SEQ ID NO: 4221014 - DNA, 25 bp, Homo sapien
aactggatgttcatagaatattgat

SEQ ID NO: 4221015 - DNA, 25 bp, Homo sapien
cgttagttggttgcttagttgctgg

SEQ ID NO: 4221016 - DNA, 25 bp, Homo sapien
tctcttgattatggtgtaagttacc

SEQ ID NO: 4221017 - DNA, 25 bp, Homo sapien
gaaaatacccaatcacctgtcatgt

SEQ ID NO: 4221018 - DNA, 25 bp, Homo sapien
cataaaagataaagtctaagagcca

SEQ ID NO: 4221019 - DNA, 25 bp, Homo sapien
catgtgcaacacaaaagacaaatta

SEQ ID NO: 4221020 - DNA, 25 bp, Homo sapien
tttctaagacattctcaccatgact

SEQ ID NO: 4221021 - DNA, 25 bp, Homo sapien
catgactatttaaccctatacgagg

SEQ ID NO: 4221022 - DNA, 25 bp, Homo sapien
gagggagacacgtgcacttgatact

SEQ ID NO: 4221023 - DNA, 25 bp, Homo sapien
tcaactctgttatcaagaaacacca

SEQ ID NO: 4221024 - DNA, 25 bp, Homo sapien
aaaagtgagtcagttgtgcccagac

SEQ ID NO: 4221025 - DNA, 25 bp, Homo sapien
tgcccagactgaaggaacgagaagt

SEQ ID NO: 4221026 - DNA, 25 bp, Homo sapien
gaactgataacaattgcctcgagcc

SEQ ID NO: 4221027 - DNA, 25 bp, Homo sapien
gacaagacactctgccataggaaca

SEQ ID NO: 4221028 - DNA, 25 bp, Homo sapien
caagatgtgttaacagggataacag

SEQ ID NO: 4221029 - DNA, 25 bp, Homo sapien
gttaacagggataacagtgtgaaaa

SEQ ID NO: 4221030 - DNA, 25 bp, Homo sapien
gaagcagaaatttgtcaactgaggc

SEQ ID NO: 4221031 - DNA, 25 bp, Homo sapien
tgaaaaatattaaagtgccttctct

SEQ ID NO: 4221032 - DNA, 25 bp, Homo sapien
tgttccacgtttagtctgatgtttg

SEQ ID NO: 4221033 - DNA, 25 bp, Homo sapien
ccacgtttagtctgatgtttgaccc

SEQ ID NO: 4221034 - DNA, 25 bp, Homo sapien
cactgttccacgtttagtctgatgt

SEQ ID NO: 4221035 - DNA, 25 bp, Homo sapien
cacactgttccacgtttagtctgat

SEQ ID NO: 4221036 - DNA, 25 bp, Homo sapien
catagaattggatacacagtgccaa

SEQ ID NO: 4221037 - DNA, 25 bp, Homo sapien
ccttcactcagtgttctgggccaaa

SEQ ID NO: 4221038 - DNA, 25 bp, Homo sapien
taaacatgtggtagcacaaaactgc

SEQ ID NO: 4221039 - DNA, 25 bp, Homo sapien
ggcctgctggttaccctcaaaacag

SEQ ID NO: 4221040 - DNA, 25 bp, Homo sapien
ccaaagacactgtgtcaattcggag

SEQ ID NO: 4221041 - DNA, 25 bp, Homo sapien
cattcactgggaaattcctacccca

SEQ ID NO: 4221042 - DNA, 25 bp, Homo sapien
agcattcactgggaaattcctaccc

SEQ ID NO: 4221043 - DNA, 25 bp, Homo sapien
tgtcaattcggaggactcaggatgg

SEQ ID NO: 4221044 - DNA, 25 bp, Homo sapien
tcatcaagtgccttgttgcctaaag

SEQ ID NO: 4221045 - DNA, 25 bp, Homo sapien
caacctgtgtcacgtgtaagtccat

SEQ ID NO: 4221046 - DNA, 25 bp, Homo sapien
tctgcttctttccaacctgtgtcac

SEQ ID NO: 4221047 - DNA, 25 bp, Homo sapien
atggtgcttcatcaagtgccttgtt

SEQ ID NO: 4221048 - DNA, 25 bp, Homo sapien
ccagatcattaaagaaatcctgttc

SEQ ID NO: 4221049 - DNA, 25 bp, Homo sapien
gccagatcattaaagaaatcctgtt

SEQ ID NO: 4221050 - DNA, 25 bp, Homo sapien
ttttcagcttggtaatcggtaatat

SEQ ID NO: 4221051 - DNA, 25 bp, Homo sapien
tggtaatcggtaatataatacagcc

SEQ ID NO: 4221052 - DNA, 25 bp, Homo sapien
ctcccagaacataaacgacggtgtt

SEQ ID NO: 4221053 - DNA, 25 bp, Homo sapien
ctacaaaaaccacttcacttccgag

SEQ ID NO: 4221054 - DNA, 25 bp, Homo sapien
caaaaaccacttcacttccgagcat

SEQ ID NO: 4221055 - DNA, 25 bp, Homo sapien
ggtgttatagccacgaaatcctaca

SEQ ID NO: 4221056 - DNA, 25 bp, Homo sapien
tcttttctagttatgtacttgcgga

SEQ ID NO: 4221057 - DNA, 25 bp, Homo sapien
ttcaactagaatgctacttaaccca

SEQ ID NO: 4221058 - DNA, 25 bp, Homo sapien
gccactgtatactcttcaactagaa

SEQ ID NO: 4221059 - DNA, 25 bp, Homo sapien
ggttgtctcacacttgccactgtat

SEQ ID NO: 4221060 - DNA, 25 bp, Homo sapien
attgtggcagatcctagcgcaggtc

SEQ ID NO: 4221061 - DNA, 25 bp, Homo sapien
ggtctcatgtcgctggtcgtaggca

SEQ ID NO: 4221062 - DNA, 25 bp, Homo sapien
cagcagaggcgattgtggcagatcc

SEQ ID NO: 4221063 - DNA, 25 bp, Homo sapien
gatcctagcgcaggtctcatgtcgc

SEQ ID NO: 4221064 - DNA, 25 bp, Homo sapien
ctccaatgatgttatgctgcacaga

SEQ ID NO: 4221065 - DNA, 25 bp, Homo sapien
tccaatgatgttatgctgcacagat

SEQ ID NO: 4221066 - DNA, 25 bp, Homo sapien
caatgatgttatgctgcacagatga

SEQ ID NO: 4221067 - DNA, 25 bp, Homo sapien
tctccaatgatgttatgctgcacag

SEQ ID NO: 4221068 - DNA, 25 bp, Homo sapien
cactattttctagatggatcaggaa

SEQ ID NO: 4221069 - DNA, 25 bp, Homo sapien
gaaatagtccaccatcccaagaata

SEQ ID NO: 4221070 - DNA, 25 bp, Homo sapien
gaaaaagatggtttgaccaccacaa

SEQ ID NO: 4221071 - DNA, 25 bp, Homo sapien
aagatggtttgaccaccacaaaata

SEQ ID NO: 4221072 - DNA, 25 bp, Homo sapien
cagtgacaggttagcactccaactg

SEQ ID NO: 4221073 - DNA, 25 bp, Homo sapien
agatgtgtcaacgacagcatttttt

SEQ ID NO: 4221074 - DNA, 25 bp, Homo sapien
aaaagatgtgtcaacgacagcattt

SEQ ID NO: 4221075 - DNA, 25 bp, Homo sapien
ggttagcactccaactgttgctgat

SEQ ID NO: 4221076 - DNA, 25 bp, Homo sapien
ggagatccacctcaagataccagga

SEQ ID NO: 4221077 - DNA, 25 bp, Homo sapien
ccaggaagccccttggagtcataag

SEQ ID NO: 4221078 - DNA, 25 bp, Homo sapien
gatcattgcaagaccgcagagcagg

SEQ ID NO: 4221079 - DNA, 25 bp, Homo sapien
ggctttgcaaacatcgtggatcaga

SEQ ID NO: 4221080 - DNA, 25 bp, Homo sapien
gacttatcaatcagcctcctcctgg

SEQ ID NO: 4221081 - DNA, 25 bp, Homo sapien
caagttcaatactgactgccatgca

SEQ ID NO: 4221082 - DNA, 25 bp, Homo sapien
tgggactcgagaagaggacttatca

SEQ ID NO: 4221083 - DNA, 25 bp, Homo sapien
tgaggctggaggtacgcatagtctt

SEQ ID NO: 4221084 - DNA, 25 bp, Homo sapien
cgaaatatccttgcaaagtttttgt

SEQ ID NO: 4221085 - DNA, 25 bp, Homo sapien
tcgaaatatccttgcaaagtttttg

SEQ ID NO: 4221086 - DNA, 25 bp, Homo sapien
ctcgaaatatccttgcaaagttttt

SEQ ID NO: 4221087 - DNA, 25 bp, Homo sapien
cctcgaaatatccttgcaaagtttt

SEQ ID NO: 4221088 - DNA, 25 bp, Homo sapien
cattaataaagaaatgcaggtccat

SEQ ID NO: 4221089 - DNA, 25 bp, Homo sapien
gctacaacccgatgatgagtttcag

SEQ ID NO: 4221090 - DNA, 25 bp, Homo sapien
tgagtttcagggtgtttgtgttcaa

SEQ ID NO: 4221091 - DNA, 25 bp, Homo sapien
gagggacatcctgctacaacccgat

SEQ ID NO: 4221092 - DNA, 25 bp, Homo sapien
catcctgctacaacccgatgatgag

SEQ ID NO: 4221093 - DNA, 25 bp, Homo sapien
aagtgacctgcacctcttctgctct

SEQ ID NO: 4221094 - DNA, 25 bp, Homo sapien
ctgggcccagaagtgacctgcacct

SEQ ID NO: 4221095 - DNA, 25 bp, Homo sapien
ggcccagaagtgacctgcacctctt

SEQ ID NO: 4221096 - DNA, 25 bp, Homo sapien
agtgacctgcacctcttctgctctc

SEQ ID NO: 4221097 - DNA, 25 bp, Homo sapien
agattaccacgtatgccatccacca

SEQ ID NO: 4221098 - DNA, 25 bp, Homo sapien
tgcttttcatgcttaccacactcag

SEQ ID NO: 4221099 - DNA, 25 bp, Homo sapien
caccaccacacagggcagtgtagga

SEQ ID NO: 4221100 - DNA, 25 bp, Homo sapien
tgccattaaccattcaagagacgct

SEQ ID NO: 4221101 - DNA, 25 bp, Homo sapien
tgttaagaatttgatggatgtgaag

SEQ ID NO: 4221102 - DNA, 25 bp, Homo sapien
aagaacctggttcatgttaagaatt

SEQ ID NO: 4221103 - DNA, 25 bp, Homo sapien
cgaatgtaagcaaagaacctggttc

SEQ ID NO: 4221104 - DNA, 25 bp, Homo sapien
cgatatgcctatgcgaatgtaagca

SEQ ID NO: 4221105 - DNA, 25 bp, Homo sapien
gaacctggtccacttactgactgta

SEQ ID NO: 4221106 - DNA, 25 bp, Homo sapien
tggtccacttactgactgtaggagt

SEQ ID NO: 4221107 - DNA, 25 bp, Homo sapien
cttactgactgtaggagtgtaggtt

SEQ ID NO: 4221108 - DNA, 25 bp, Homo sapien
aaagaacctggtccacttactgact

SEQ ID NO: 4221109 - DNA, 25 bp, Homo sapien
cgctgaaaggcacaggtgtccttat

SEQ ID NO: 4221110 - DNA, 25 bp, Homo sapien
tgcccctatgtttccttgggcctgg

SEQ ID NO: 4221111 - DNA, 25 bp, Homo sapien
ggcctggtggaagcgcattgttgga

SEQ ID NO: 4221112 - DNA, 25 bp, Homo sapien
attgttggatgactccgctgaaagg

SEQ ID NO: 4221113 - DNA, 25 bp, Homo sapien
tgatttgctgtgagcctctacttgg

SEQ ID NO: 4221114 - DNA, 25 bp, Homo sapien
atttgctgtgagcctctacttggtc

SEQ ID NO: 4221115 - DNA, 25 bp, Homo sapien
gatttgctgtgagcctctacttggt

SEQ ID NO: 4221116 - DNA, 25 bp, Homo sapien
ctgatttgctgtgagcctctacttg

SEQ ID NO: 4221117 - DNA, 25 bp, Homo sapien
ggtgagaagggcaccactagaaatc

SEQ ID NO: 4221118 - DNA, 25 bp, Homo sapien
caccactagaaatcatgccacagag

SEQ ID NO: 4221119 - DNA, 25 bp, Homo sapien
tcatgccacagagcgatggaaagca

SEQ ID NO: 4221120 - DNA, 25 bp, Homo sapien
tagaaatcatgccacagagcgatgg

SEQ ID NO: 4221121 - DNA, 25 bp, Homo sapien
tctgcctacgtcctctattttcaga

SEQ ID NO: 4221122 - DNA, 25 bp, Homo sapien
ccaggggaagggacctcctgcatca

SEQ ID NO: 4221123 - DNA, 25 bp, Homo sapien
gcctacgtcctctattttcagagac

SEQ ID NO: 4221124 - DNA, 25 bp, Homo sapien
tctctgcctacgtcctctattttca

SEQ ID NO: 4221125 - DNA, 25 bp, Homo sapien
gcttggcgcggaaggaatccagcca

SEQ ID NO: 4221126 - DNA, 25 bp, Homo sapien
tgcctgcttggcgcggaaggaatcc

SEQ ID NO: 4221127 - DNA, 25 bp, Homo sapien
ctgcttggcgcggaaggaatccagc

SEQ ID NO: 4221128 - DNA, 25 bp, Homo sapien
cctgcttggcgcggaaggaatccag

SEQ ID NO: 4221129 - DNA, 25 bp, Homo sapien
aggacagcgatgagatgctgctcca

SEQ ID NO: 4221130 - DNA, 25 bp, Homo sapien
ctacacccaaggacagcgatgagat

SEQ ID NO: 4221131 - DNA, 25 bp, Homo sapien
ggaggaacttacgtcctgtgctttc

SEQ ID NO: 4221132 - DNA, 25 bp, Homo sapien
tccaagaatgctcttggaggaactt

SEQ ID NO: 4221133 - DNA, 25 bp, Homo sapien
tgcagcagcactgtggttcatcctc

SEQ ID NO: 4221134 - DNA, 25 bp, Homo sapien
aactgtgacatcagctaggtctgca

SEQ ID NO: 4221135 - DNA, 25 bp, Homo sapien
tgtgacatcagctaggtctgcagca

SEQ ID NO: 4221136 - DNA, 25 bp, Homo sapien
tgacatcagctaggtctgcagcagc

SEQ ID NO: 4221137 - DNA, 25 bp, Homo sapien
caatggcagcttttcacacactgga

SEQ ID NO: 4221138 - DNA, 25 bp, Homo sapien
tcacgagcgaaaccagcaaggtgta

SEQ ID NO: 4221139 - DNA, 25 bp, Homo sapien
gagatgatggaaaagcacggttccc

SEQ ID NO: 4221140 - DNA, 25 bp, Homo sapien
taactaactagcaaatcacgagcga

SEQ ID NO: 4221141 - DNA, 25 bp, Homo sapien
cattgaagggagacccacatttgca

SEQ ID NO: 4221142 - DNA, 25 bp, Homo sapien
tgttgttttgccgaatttcacgtgc

SEQ ID NO: 4221143 - DNA, 25 bp, Homo sapien
gacactcaggtaacagctgcaattg

SEQ ID NO: 4221144 - DNA, 25 bp, Homo sapien
catgtcccctgagtttcctaaagag

SEQ ID NO: 4221145 - DNA, 25 bp, Homo sapien
tcagagaggttatacggcttaactg

SEQ ID NO: 4221146 - DNA, 25 bp, Homo sapien
taatggcagcccaaggatttcattc

SEQ ID NO: 4221147 - DNA, 25 bp, Homo sapien
gaggttatacggcttaactgcatgc

SEQ ID NO: 4221148 - DNA, 25 bp, Homo sapien
taactgcatgcagttcctaatggca

SEQ ID NO: 4221149 - DNA, 25 bp, Homo sapien
aaaatataattatctgcattggcat

SEQ ID NO: 4221150 - DNA, 25 bp, Homo sapien
ctttttttctggctgaaaatataat

SEQ ID NO: 4221151 - DNA, 25 bp, Homo sapien
tgaaaatataattatctgcattggc

SEQ ID NO: 4221152 - DNA, 25 bp, Homo sapien
ttttctggctgaaaatataattatc

SEQ ID NO: 4221153 - DNA, 25 bp, Homo sapien
atgaaagacaaaattatggcaccag

SEQ ID NO: 4221154 - DNA, 25 bp, Homo sapien
gaaagacaaaattatggcaccagcc

SEQ ID NO: 4221155 - DNA, 25 bp, Homo sapien
ctatgaaagacaaaattatggcacc

SEQ ID NO: 4221156 - DNA, 25 bp, Homo sapien
aagacaaaattatggcaccagccat

SEQ ID NO: 4221157 - DNA, 25 bp, Homo sapien
cagaacatcttctcatgggtctatt

SEQ ID NO: 4221158 - DNA, 25 bp, Homo sapien
tggagttccactgcaagatgtacgg

SEQ ID NO: 4221159 - DNA, 25 bp, Homo sapien
catgttcaaggtgggcaccactgcc

SEQ ID NO: 4221160 - DNA, 25 bp, Homo sapien
tacggtaacgtagcacctggaggtg

SEQ ID NO: 4221161 - DNA, 25 bp, Homo sapien
ctgcacaagttcagtagcatccaga

SEQ ID NO: 4221162 - DNA, 25 bp, Homo sapien
ggtgtgggtaggagggaagctccca

SEQ ID NO: 4221163 - DNA, 25 bp, Homo sapien
ggtaggagggaagctcccagaccca

SEQ ID NO: 4221164 - DNA, 25 bp, Homo sapien
gtagcatccagaggatgcacacact

SEQ ID NO: 4221165 - DNA, 25 bp, Homo sapien
gctggccaccaaccctaattgcttc

SEQ ID NO: 4221166 - DNA, 25 bp, Homo sapien
ttgcttccgttgtgtggcagcccca

SEQ ID NO: 4221167 - DNA, 25 bp, Homo sapien
cagccctactggatggtgaagaagc

SEQ ID NO: 4221168 - DNA, 25 bp, Homo sapien
accaaccctaattgcttccgttgtg

SEQ ID NO: 4221169 - DNA, 25 bp, Homo sapien
tctttgggaaaatgatgacgcaaag

SEQ ID NO: 4221170 - DNA, 25 bp, Homo sapien
atgacgcaaagctggtgtcctggac

SEQ ID NO: 4221171 - DNA, 25 bp, Homo sapien
aaatgatgacgcaaagctggtgtcc

SEQ ID NO: 4221172 - DNA, 25 bp, Homo sapien
tgggaaaatgatgacgcaaagctgg

SEQ ID NO: 4221173 - DNA, 25 bp, Homo sapien
gaatgaagcaagcacctggcttccc

SEQ ID NO: 4221174 - DNA, 25 bp, Homo sapien
tggttgggttacttgaatgaagcaa

SEQ ID NO: 4221175 - DNA, 25 bp, Homo sapien
ctgtggttgggttacttgaatgaag

SEQ ID NO: 4221176 - DNA, 25 bp, Homo sapien
ttgggttacttgaatgaagcaagca

SEQ ID NO: 4221177 - DNA, 25 bp, Homo sapien
ggcccaattgccaggagattcttta

SEQ ID NO: 4221178 - DNA, 25 bp, Homo sapien
tattctcttggattggtgggtctgg

SEQ ID NO: 4221179 - DNA, 25 bp, Homo sapien
tgaggacgattctggctggcccaat

SEQ ID NO: 4221180 - DNA, 25 bp, Homo sapien
ggtctggtttactaagcccaaatca

SEQ ID NO: 4221181 - DNA, 25 bp, Homo sapien
aaagaagtcactatgagggtgtccc

SEQ ID NO: 4221182 - DNA, 25 bp, Homo sapien
gaatagccaacaacagagtactgtg

SEQ ID NO: 4221183 - DNA, 25 bp, Homo sapien
ttggtactgtgttgacccacatgga

SEQ ID NO: 4221184 - DNA, 25 bp, Homo sapien
agacaacaccgcaaacagaggcaga

SEQ ID NO: 4221185 - DNA, 25 bp, Homo sapien
ggagttctagttcccctcgctgctc

SEQ ID NO: 4221186 - DNA, 25 bp, Homo sapien
gaggagttctagttcccctcgctgc

SEQ ID NO: 4221187 - DNA, 25 bp, Homo sapien
cgaggagttctagttcccctcgctg

SEQ ID NO: 4221188 - DNA, 25 bp, Homo sapien
ccacgaggagttctagttcccctcg

SEQ ID NO: 4221189 - DNA, 25 bp, Homo sapien
gttaagtaggtcatattgttctggc

SEQ ID NO: 4221190 - DNA, 25 bp, Homo sapien
aagagttaagtaggtcatattgttc

SEQ ID NO: 4221191 - DNA, 25 bp, Homo sapien
agttatcagcttgtgaagagttaag

SEQ ID NO: 4221192 - DNA, 25 bp, Homo sapien
acaaagttatcagcttgtgaagagt

SEQ ID NO: 4221193 - DNA, 25 bp, Homo sapien
tacatggtagtgttaacgttcattt

SEQ ID NO: 4221194 - DNA, 25 bp, Homo sapien
tgaaagttgtaacatctgggatgtg

SEQ ID NO: 4221195 - DNA, 25 bp, Homo sapien
ttccagtttcttcacgtcttgcaat

SEQ ID NO: 4221196 - DNA, 25 bp, Homo sapien
tacctattccattaatactttccac

SEQ ID NO: 4221197 - DNA, 25 bp, Homo sapien
ttgcaacagcttcttaactcttttt

SEQ ID NO: 4221198 - DNA, 25 bp, Homo sapien
gtcctctatttcattgccacagtaa

SEQ ID NO: 4221199 - DNA, 25 bp, Homo sapien
ttttcctgcatcagtctctcctttt

SEQ ID NO: 4221200 - DNA, 25 bp, Homo sapien
tttcttgtcctctatttcattgcca

SEQ ID NO: 4221201 - DNA, 25 bp, Homo sapien
ctcagggactctgccggagaagaaa

SEQ ID NO: 4221202 - DNA, 25 bp, Homo sapien
tgctttagcaattctggatccagtg

SEQ ID NO: 4221203 - DNA, 25 bp, Homo sapien
ccagtgtgctggtgccttgttgctc

SEQ ID NO: 4221204 - DNA, 25 bp, Homo sapien
gccggattcagcgtcctcagggact

SEQ ID NO: 4221205 - DNA, 25 bp, Homo sapien
tatcttcccagcacgttcctatttg

SEQ ID NO: 4221206 - DNA, 25 bp, Homo sapien
aagggttagatagtctcttcctcca

SEQ ID NO: 4221207 - DNA, 25 bp, Homo sapien
cagcatttgtatcagcttgcagagc

SEQ ID NO: 4221208 - DNA, 25 bp, Homo sapien
tgcaatcaatcagccggacagcaag

SEQ ID NO: 4221209 - DNA, 25 bp, Homo sapien
aattttacagagctgtacactcatt

SEQ ID NO: 4221210 - DNA, 25 bp, Homo sapien
caaaattttacagagctgtacactc

SEQ ID NO: 4221211 - DNA, 25 bp, Homo sapien
atccaaaattttacagagctgtaca

SEQ ID NO: 4221212 - DNA, 25 bp, Homo sapien
tccaaaattttacagagctgtacac

SEQ ID NO: 4221213 - DNA, 25 bp, Homo sapien
cctatctgaacttgcctttgaaagc

SEQ ID NO: 4221214 - DNA, 25 bp, Homo sapien
cttcgcagctccctatctgaacttg

SEQ ID NO: 4221215 - DNA, 25 bp, Homo sapien
gctccctatctgaacttgcctttga

SEQ ID NO: 4221216 - DNA, 25 bp, Homo sapien
cctccttcgcagctccctatctgaa

SEQ ID NO: 4221217 - DNA, 25 bp, Homo sapien
ctcttcatctgagacggttactgcc

SEQ ID NO: 4221218 - DNA, 25 bp, Homo sapien
tcttcatctgagacggttactgcca

SEQ ID NO: 4221219 - DNA, 25 bp, Homo sapien
cttcatctgagacggttactgccaa

SEQ ID NO: 4221220 - DNA, 25 bp, Homo sapien
ctctgaactcgctcttcatctgaga

SEQ ID NO: 4221221 - DNA, 25 bp, Homo sapien
caagttgggtcctctagcagtctcc

SEQ ID NO: 4221222 - DNA, 25 bp, Homo sapien
caccatggtgcgtgtcctttgagaa

SEQ ID NO: 4221223 - DNA, 25 bp, Homo sapien
gcatcccagcttgtgaatcagttgt

SEQ ID NO: 4221224 - DNA, 25 bp, Homo sapien
tattggcccttcttgcacagtcact

SEQ ID NO: 4221225 - DNA, 25 bp, Homo sapien
ttcccctcggactgcaacatcagct

SEQ ID NO: 4221226 - DNA, 25 bp, Homo sapien
gatgcagagactgtgttagactgtg

SEQ ID NO: 4221227 - DNA, 25 bp, Homo sapien
tccattcctctctcaagttgacagg

SEQ ID NO: 4221228 - DNA, 25 bp, Homo sapien
ctgtgggcaatttggagtctgcatt

SEQ ID NO: 4221229 - DNA, 25 bp, Homo sapien
cagcttcatgcttggcaccagcaat

SEQ ID NO: 4221230 - DNA, 25 bp, Homo sapien
agcttcatgcttggcaccagcaata

SEQ ID NO: 4221231 - DNA, 25 bp, Homo sapien
cttcatgcttggcaccagcaatatc

SEQ ID NO: 4221232 - DNA, 25 bp, Homo sapien
acagcttcatgcttggcaccagcaa

SEQ ID NO: 4221233 - DNA, 25 bp, Homo sapien
agtggttcccagactgtctcaggag

SEQ ID NO: 4221234 - DNA, 25 bp, Homo sapien
acagcctcaaagtggttcccagact

SEQ ID NO: 4221235 - DNA, 25 bp, Homo sapien
gcctcaaagtggttcccagactgtc

SEQ ID NO: 4221236 - DNA, 25 bp, Homo sapien
cccagactgtctcaggagagcaaaa

SEQ ID NO: 4221237 - DNA, 25 bp, Homo sapien
caaaattgaaacaccaacggctaca

SEQ ID NO: 4221238 - DNA, 25 bp, Homo sapien
cagactgagctctgccacttgtagt

SEQ ID NO: 4221239 - DNA, 25 bp, Homo sapien
tcttgggtgatcagaagagacttcc

SEQ ID NO: 4221240 - DNA, 25 bp, Homo sapien
taagcaggcttgtctagatacgtgc

SEQ ID NO: 4221241 - DNA, 25 bp, Homo sapien
taatctccgccacatccggaaaaaa

SEQ ID NO: 4221242 - DNA, 25 bp, Homo sapien
tttcctgaaatcttaatctggcttc

SEQ ID NO: 4221243 - DNA, 25 bp, Homo sapien
gacatgttccacaactaaaaatgag

SEQ ID NO: 4221244 - DNA, 25 bp, Homo sapien
ctggcttcattgtagctgcataatc

SEQ ID NO: 4221245 - DNA, 25 bp, Homo sapien
gactgctcagagatggaacacttta

SEQ ID NO: 4221246 - DNA, 25 bp, Homo sapien
gaaggtacccctagagcaactagga

SEQ ID NO: 4221247 - DNA, 25 bp, Homo sapien
actaggagtcattctagcagacggc

SEQ ID NO: 4221248 - DNA, 25 bp, Homo sapien
tggcaaggagtctttgaaggtaccc

SEQ ID NO: 4221249 - DNA, 25 bp, Homo sapien
cgcccggcctattacgcaaattttg

SEQ ID NO: 4221250 - DNA, 25 bp, Homo sapien
gcctattacgcaaattttgatgctg

SEQ ID NO: 4221251 - DNA, 25 bp, Homo sapien
gaaagttttcagacagaaagcagta

SEQ ID NO: 4221252 - DNA, 25 bp, Homo sapien
cagaagatgtcattggaaagttttc

SEQ ID NO: 4221253 - DNA, 25 bp, Homo sapien
ttgtcaatcatagaagaaaagttca

SEQ ID NO: 4221254 - DNA, 25 bp, Homo sapien
cagggtattttccataggtggcaat

SEQ ID NO: 4221255 - DNA, 25 bp, Homo sapien
gaaagctatgtctttgtcaatcata

SEQ ID NO: 4221256 - DNA, 25 bp, Homo sapien
caatataggagggtggtttcgaatg

SEQ ID NO: 4221257 - DNA, 25 bp, Homo sapien
aaatgatgatttacaaaatcttcaa

SEQ ID NO: 4221258 - DNA, 25 bp, Homo sapien
atttacaaaatcttcaagatgaaga

SEQ ID NO: 4221259 - DNA, 25 bp, Homo sapien
aaagaattaaggtgttcaaaatgat

SEQ ID NO: 4221260 - DNA, 25 bp, Homo sapien
tgatgatttacaaaatcttcaagat

SEQ ID NO: 4221261 - DNA, 25 bp, Homo sapien
catctgttttcagaatatatagcag

SEQ ID NO: 4221262 - DNA, 25 bp, Homo sapien
tctgttttcagaatatatagcagcg

SEQ ID NO: 4221263 - DNA, 25 bp, Homo sapien
tgttttcagaatatatagcagcgtc

SEQ ID NO: 4221264 - DNA, 25 bp, Homo sapien
ttttcagaatatatagcagcgtcat

SEQ ID NO: 4221265 - DNA, 25 bp, Homo sapien
tgtagagagttggaaagagtgctgc

SEQ ID NO: 4221266 - DNA, 25 bp, Homo sapien
tagagagttggaaagagtgctgctc

SEQ ID NO: 4221267 - DNA, 25 bp, Homo sapien
agagttggaaagagtgctgctccat

SEQ ID NO: 4221268 - DNA, 25 bp, Homo sapien
gagagttggaaagagtgctgctcca

SEQ ID NO: 4221269 - DNA, 25 bp, Homo sapien
aatatttgatgattggccaacacct

SEQ ID NO: 4221270 - DNA, 25 bp, Homo sapien
ttccgtgccaaagtgctctcttttc

SEQ ID NO: 4221271 - DNA, 25 bp, Homo sapien
aaatgtgttctttggagtgacaata

SEQ ID NO: 4221272 - DNA, 25 bp, Homo sapien
caattttcttcccggctgttaaatg

SEQ ID NO: 4221273 - DNA, 25 bp, Homo sapien
ctctaatatgtttcacattgatttt

SEQ ID NO: 4221274 - DNA, 25 bp, Homo sapien
ctttgaccttaaagtcaagatcaag

SEQ ID NO: 4221275 - DNA, 25 bp, Homo sapien
tgctttgaccttaaagtcaagatca

SEQ ID NO: 4221276 - DNA, 25 bp, Homo sapien
tctaatatgtttcacattgattttt

SEQ ID NO: 4221277 - DNA, 25 bp, Homo sapien
ctatttctgccagtaattcacactc

SEQ ID NO: 4221278 - DNA, 25 bp, Homo sapien
tacggactaaatcatcaatatctat

SEQ ID NO: 4221279 - DNA, 25 bp, Homo sapien
ctccctttccactgtgatacggact

SEQ ID NO: 4221280 - DNA, 25 bp, Homo sapien
tcacactcacggttatcaatgagct

SEQ ID NO: 4221281 - DNA, 25 bp, Homo sapien
cgtctagtgctgtgctgagcattca

SEQ ID NO: 4221282 - DNA, 25 bp, Homo sapien
cattcaggctaatagtctggccagc

SEQ ID NO: 4221283 - DNA, 25 bp, Homo sapien
tcttcctaagagctagttggcagtg

SEQ ID NO: 4221284 - DNA, 25 bp, Homo sapien
gacatcctcatgagcaaacatcgat

SEQ ID NO: 4221285 - DNA, 25 bp, Homo sapien
attaaagagctgccccctcggttgc

SEQ ID NO: 4221286 - DNA, 25 bp, Homo sapien
ttaaagagctgccccctcggttgct

SEQ ID NO: 4221287 - DNA, 25 bp, Homo sapien
gagctgccccctcggttgctgagag

SEQ ID NO: 4221288 - DNA, 25 bp, Homo sapien
aattaaagagctgccccctcggttg

SEQ ID NO: 4221289 - DNA, 25 bp, Homo sapien
ggaagacactctttgtctcatttcc

SEQ ID NO: 4221290 - DNA, 25 bp, Homo sapien
acaggaagacactctttgtctcatt

SEQ ID NO: 4221291 - DNA, 25 bp, Homo sapien
ttccacattccaagttttgcgtgct

SEQ ID NO: 4221292 - DNA, 25 bp, Homo sapien
cacattccaagttttgcgtgctcat

SEQ ID NO: 4221293 - DNA, 25 bp, Homo sapien
taagacccttacgatgaggcacggt

SEQ ID NO: 4221294 - DNA, 25 bp, Homo sapien
tcttttaagacccttacgatgaggc

SEQ ID NO: 4221295 - DNA, 25 bp, Homo sapien
gacccttacgatgaggcacggtggc

SEQ ID NO: 4221296 - DNA, 25 bp, Homo sapien
tttaagacccttacgatgaggcacg

SEQ ID NO: 4221297 - DNA, 25 bp, Homo sapien
gatgctacagatatggtgtcccaag

SEQ ID NO: 4221298 - DNA, 25 bp, Homo sapien
caagtggttcatgggtgggcctcct

SEQ ID NO: 4221299 - DNA, 25 bp, Homo sapien
ggtcacagactgcaaccggaactgg

SEQ ID NO: 4221300 - DNA, 25 bp, Homo sapien
taactcagtagcatatagggctccc

SEQ ID NO: 4221301 - DNA, 25 bp, Homo sapien
cccttatctacagggacacattcca

SEQ ID NO: 4221302 - DNA, 25 bp, Homo sapien
ctcagtgaagtcctctttaagtcaa

SEQ ID NO: 4221303 - DNA, 25 bp, Homo sapien
ttaagcctcatgtacccaaatgccc

SEQ ID NO: 4221304 - DNA, 25 bp, Homo sapien
ccaagattggagaagttttcagcta

SEQ ID NO: 4221305 - DNA, 25 bp, Homo sapien
atttgcacctctgcacctttatcca

SEQ ID NO: 4221306 - DNA, 25 bp, Homo sapien
tatatttgcacctctgcacctttat

SEQ ID NO: 4221307 - DNA, 25 bp, Homo sapien
gtatatatatttgcacctctgcacc

SEQ ID NO: 4221308 - DNA, 25 bp, Homo sapien
tatatatttgcacctctgcaccttt

SEQ ID NO: 4221309 - DNA, 25 bp, Homo sapien
tgttttgaatttctcggcagtcggt

SEQ ID NO: 4221310 - DNA, 25 bp, Homo sapien
gcattctggtattcgtgcatcacca

SEQ ID NO: 4221311 - DNA, 25 bp, Homo sapien
catgacaatggctgatatttggctc

SEQ ID NO: 4221312 - DNA, 25 bp, Homo sapien
gggtttccatccctctggcttcaag

SEQ ID NO: 4221313 - DNA, 25 bp, Homo sapien
gcggcaataaaaatacgtgtgcctc

SEQ ID NO: 4221314 - DNA, 25 bp, Homo sapien
caataaaaatacgtgtgcctcctct

SEQ ID NO: 4221315 - DNA, 25 bp, Homo sapien
tacgtgtgcctcctctacctggctg

SEQ ID NO: 4221316 - DNA, 25 bp, Homo sapien
taaaaatacgtgtgcctcctctacc

SEQ ID NO: 4221317 - DNA, 25 bp, Homo sapien
gaggatatgaaatgggctcgcacag

SEQ ID NO: 4221318 - DNA, 25 bp, Homo sapien
ctcgcacaggttctgttttgtaacc

SEQ ID NO: 4221319 - DNA, 25 bp, Homo sapien
catggagcgaatccacttatcacag

SEQ ID NO: 4221320 - DNA, 25 bp, Homo sapien
ctgggccatggagcgaatccactta

SEQ ID NO: 4221321 - DNA, 25 bp, Homo sapien
ctgtgatactaccagtgcccagcat

SEQ ID NO: 4221322 - DNA, 25 bp, Homo sapien
ctgttcctagaaatatctcttgttc

SEQ ID NO: 4221323 - DNA, 25 bp, Homo sapien
gttgtcctagctttggggcctgcca

SEQ ID NO: 4221324 - DNA, 25 bp, Homo sapien
tttgttgtcctagctttggggcctg

SEQ ID NO: 4221325 - DNA, 25 bp, Homo sapien
tttactgttcctagaaatatctctt

SEQ ID NO: 4221326 - DNA, 25 bp, Homo sapien
tttctttcaacgtattttataagca

SEQ ID NO: 4221327 - DNA, 25 bp, Homo sapien
tgcagatttttctttcaacgtattt

SEQ ID NO: 4221328 - DNA, 25 bp, Homo sapien
ctttgcagccttgcagatttttctt

SEQ ID NO: 4221329 - DNA, 25 bp, Homo sapien
cttctttgcagccttgcagattttt

SEQ ID NO: 4221330 - DNA, 25 bp, Homo sapien
gtgcgatcaccaagatgaagactga

SEQ ID NO: 4221331 - DNA, 25 bp, Homo sapien
aacatgtgcgatcaccaagatgaag

SEQ ID NO: 4221332 - DNA, 25 bp, Homo sapien
tccaggaagagatggtctgcccatt

SEQ ID NO: 4221333 - DNA, 25 bp, Homo sapien
tccagcaaaacatgtgcgatcacca

SEQ ID NO: 4221334 - DNA, 25 bp, Homo sapien
gcagctctcagttgggggtccaagg

SEQ ID NO: 4221335 - DNA, 25 bp, Homo sapien
gtccaaggttcaagagtagaacttg

SEQ ID NO: 4221336 - DNA, 25 bp, Homo sapien
agtgcagctctcagttgggggtcca

SEQ ID NO: 4221337 - DNA, 25 bp, Homo sapien
gtgcagctctcagttgggggtccaa

SEQ ID NO: 4221338 - DNA, 25 bp, Homo sapien
ctgcttcagttgagaggactagctc

SEQ ID NO: 4221339 - DNA, 25 bp, Homo sapien
agctctgcttgttctactaccgtga

SEQ ID NO: 4221340 - DNA, 25 bp, Homo sapien
tctactaccgtgacagtaatattaa

SEQ ID NO: 4221341 - DNA, 25 bp, Homo sapien
ctctgcttcagttgagaggactagc

SEQ ID NO: 4221342 - DNA, 25 bp, Homo sapien
aaatctctggccaagtgataccatg

SEQ ID NO: 4221343 - DNA, 25 bp, Homo sapien
cagctcagtgcacaaaggctcaaag

SEQ ID NO: 4221344 - DNA, 25 bp, Homo sapien
tccactgtcatgacctaaatctctg

SEQ ID NO: 4221345 - DNA, 25 bp, Homo sapien
aggctcaaagttatttccactgtca

SEQ ID NO: 4221346 - DNA, 25 bp, Homo sapien
ctagaatcaggattggtgtagtaac

SEQ ID NO: 4221347 - DNA, 25 bp, Homo sapien
atccccgtcatccagtactagaatc

SEQ ID NO: 4221348 - DNA, 25 bp, Homo sapien
ccagtactagaatcaggattggtgt

SEQ ID NO: 4221349 - DNA, 25 bp, Homo sapien
cccgtcatccagtactagaatcagg

SEQ ID NO: 4221350 - DNA, 25 bp, Homo sapien
tgacatcttgagtttagtccaggga

SEQ ID NO: 4221351 - DNA, 25 bp, Homo sapien
acatcttgagtttagtccagggagg

SEQ ID NO: 4221352 - DNA, 25 bp, Homo sapien
ctgatgacatcttgagtttagtcca

SEQ ID NO: 4221353 - DNA, 25 bp, Homo sapien
tcttgagtttagtccagggaggtct

SEQ ID NO: 4221354 - DNA, 25 bp, Homo sapien
ctttttggcctgtcattacgttttg

SEQ ID NO: 4221355 - DNA, 25 bp, Homo sapien
taagattgagttcaattccagaatc

SEQ ID NO: 4221356 - DNA, 25 bp, Homo sapien
taaagctgtgagtaagatatagaca

SEQ ID NO: 4221357 - DNA, 25 bp, Homo sapien
taaataagattgagttcaattccag

SEQ ID NO: 4221358 - DNA, 25 bp, Homo sapien
tgactgcttgaattaattctggcaa

SEQ ID NO: 4221359 - DNA, 25 bp, Homo sapien
tgaaggatgatgcactgaacaacca

SEQ ID NO: 4221360 - DNA, 25 bp, Homo sapien
caaatgatgttcgttgaatgactgc

SEQ ID NO: 4221361 - DNA, 25 bp, Homo sapien
cactgaacaaccatcatcagcacaa

SEQ ID NO: 4221362 - DNA, 25 bp, Homo sapien
gatttgggcatcaggaggtcgaacc

SEQ ID NO: 4221363 - DNA, 25 bp, Homo sapien
taacctcgatccataattgcaccac

SEQ ID NO: 4221364 - DNA, 25 bp, Homo sapien
ggaaaaaatttgcaggatctaagca

SEQ ID NO: 4221365 - DNA, 25 bp, Homo sapien
gtggtgttaaatgcctgtagttccg

SEQ ID NO: 4221366 - DNA, 25 bp, Homo sapien
ttcatgaaggttaacagcacagtct

SEQ ID NO: 4221367 - DNA, 25 bp, Homo sapien
tgctaaatatctggcgcactgtaaa

SEQ ID NO: 4221368 - DNA, 25 bp, Homo sapien
ggaatatcgcttgggtccgaatccc

SEQ ID NO: 4221369 - DNA, 25 bp, Homo sapien
gctttggcacacaattagcactctc

SEQ ID NO: 4221370 - DNA, 25 bp, Homo sapien
tgtgtaaccataggaacggttttgc

SEQ ID NO: 4221371 - DNA, 25 bp, Homo sapien
tagaaaaccttctgtgtaaccatag

SEQ ID NO: 4221372 - DNA, 25 bp, Homo sapien
gcttaagcactgttgcttgtgtaaa

SEQ ID NO: 4221373 - DNA, 25 bp, Homo sapien
taggaacggttttgcttaagcactg

SEQ ID NO: 4221374 - DNA, 25 bp, Homo sapien
tggttttcactagacttaagggcat

SEQ ID NO: 4221375 - DNA, 25 bp, Homo sapien
tatcttcactcataattatcgtgta

SEQ ID NO: 4221376 - DNA, 25 bp, Homo sapien
tgtagatggttttcactagacttaa

SEQ ID NO: 4221377 - DNA, 25 bp, Homo sapien
cataattatcgtgtagatggttttc

SEQ ID NO: 4221378 - DNA, 25 bp, Homo sapien
attgcttgagtatatattgcacact

SEQ ID NO: 4221379 - DNA, 25 bp, Homo sapien
gattgcttgagtatatattgcacac

SEQ ID NO: 4221380 - DNA, 25 bp, Homo sapien
ggattgcttgagtatatattgcaca

SEQ ID NO: 4221381 - DNA, 25 bp, Homo sapien
ttgcttgagtatatattgcacactt

SEQ ID NO: 4221382 - DNA, 25 bp, Homo sapien
cttttagattgattgcatgcctttg

SEQ ID NO: 4221383 - DNA, 25 bp, Homo sapien
ggacttttagattgattgcatgcct

SEQ ID NO: 4221384 - DNA, 25 bp, Homo sapien
ttttagattgattgcatgcctttgc

SEQ ID NO: 4221385 - DNA, 25 bp, Homo sapien
gacttttagattgattgcatgcctt

SEQ ID NO: 4221386 - DNA, 25 bp, Homo sapien
cagcaattactgtacgttcaaatgc

SEQ ID NO: 4221387 - DNA, 25 bp, Homo sapien
caatcaacagcaattactgtacgtt

SEQ ID NO: 4221388 - DNA, 25 bp, Homo sapien
caacagcaattactgtacgttcaaa

SEQ ID NO: 4221389 - DNA, 25 bp, Homo sapien
caattactgtacgttcaaatgccat

SEQ ID NO: 4221390 - DNA, 25 bp, Homo sapien
tggagctccgtagcgtgttgcctga

SEQ ID NO: 4221391 - DNA, 25 bp, Homo sapien
agctccgtagcgtgttgcctgaatc

SEQ ID NO: 4221392 - DNA, 25 bp, Homo sapien
caatggagctccgtagcgtgttgcc

SEQ ID NO: 4221393 - DNA, 25 bp, Homo sapien
gagctccgtagcgtgttgcctgaat

SEQ ID NO: 4221394 - DNA, 25 bp, Homo sapien
cagctatagctgatcaagagggagc

SEQ ID NO: 4221395 - DNA, 25 bp, Homo sapien
taaatctcatctctaggtaggtgac

SEQ ID NO: 4221396 - DNA, 25 bp, Homo sapien
taggtgacactaaagagggcttgca

SEQ ID NO: 4221397 - DNA, 25 bp, Homo sapien
ggattgtttatacccacctggagaa

SEQ ID NO: 4221398 - DNA, 25 bp, Homo sapien
agtcagaggttgtaatagggtctga

SEQ ID NO: 4221399 - DNA, 25 bp, Homo sapien
gagaaaatgccgagtgtctacgagc

SEQ ID NO: 4221400 - DNA, 25 bp, Homo sapien
cataaagaagcagccataggaatag

SEQ ID NO: 4221401 - DNA, 25 bp, Homo sapien
tcgagcaagtgaaaggttacctagg

SEQ ID NO: 4221402 - DNA, 25 bp, Homo sapien
ggttacccatgatcccacattgctc

SEQ ID NO: 4221403 - DNA, 25 bp, Homo sapien
ttcataagtttgcatgaagcagttc

SEQ ID NO: 4221404 - DNA, 25 bp, Homo sapien
gaaaggatgcccaacagtctcttca

SEQ ID NO: 4221405 - DNA, 25 bp, Homo sapien
gagtcacggggcctttgtttgccat

SEQ ID NO: 4221406 - DNA, 25 bp, Homo sapien
tatctatttcttgaatgagccccat

SEQ ID NO: 4221407 - DNA, 25 bp, Homo sapien
tcattttatctatttcttgaatgag

SEQ ID NO: 4221408 - DNA, 25 bp, Homo sapien
ttttatctatttcttgaatgagccc

SEQ ID NO: 4221409 - DNA, 25 bp, Homo sapien
ctgggtttgtacttctcattttatc

SEQ ID NO: 4221410 - DNA, 25 bp, Homo sapien
ttgatagcgtccataaattcacatc

SEQ ID NO: 4221411 - DNA, 25 bp, Homo sapien
tgaggattgatagcgtccataaatt

SEQ ID NO: 4221412 - DNA, 25 bp, Homo sapien
aggattgatagcgtccataaattca

SEQ ID NO: 4221413 - DNA, 25 bp, Homo sapien
gattgatagcgtccataaattcaca

SEQ ID NO: 4221414 - DNA, 25 bp, Homo sapien
tgcatctggccaattgaacagtggg

SEQ ID NO: 4221415 - DNA, 25 bp, Homo sapien
gccaattgaacagtgggataccaca

SEQ ID NO: 4221416 - DNA, 25 bp, Homo sapien
tctggccaattgaacagtgggatac

SEQ ID NO: 4221417 - DNA, 25 bp, Homo sapien
catgcatctggccaattgaacagtg

SEQ ID NO: 4221418 - DNA, 25 bp, Homo sapien
taacagaaggatcaatactctccct

SEQ ID NO: 4221419 - DNA, 25 bp, Homo sapien
cctcttttgtgagatctggagcacg

SEQ ID NO: 4221420 - DNA, 25 bp, Homo sapien
aaaggagtggaacagtaaatcacca

SEQ ID NO: 4221421 - DNA, 25 bp, Homo sapien
tccctcacctcttttgtgagatctg

SEQ ID NO: 4221422 - DNA, 25 bp, Homo sapien
gactagctctaggagatacactctg

SEQ ID NO: 4221423 - DNA, 25 bp, Homo sapien
ggaattctggaacccctgctagagc

SEQ ID NO: 4221424 - DNA, 25 bp, Homo sapien
cattttatgtgccatgactagctct

SEQ ID NO: 4221425 - DNA, 25 bp, Homo sapien
gactactgatagctacgatccacat

SEQ ID NO: 4221426 - DNA, 25 bp, Homo sapien
tgtttttcctactgtgggactgtca

SEQ ID NO: 4221427 - DNA, 25 bp, Homo sapien
tgctgacttctccactgctagaact

SEQ ID NO: 4221428 - DNA, 25 bp, Homo sapien
gatcctctaaaaacagacgagaagg

SEQ ID NO: 4221429 - DNA, 25 bp, Homo sapien
tctgtattcatactgccactggcaa

SEQ ID NO: 4221430 - DNA, 25 bp, Homo sapien
gatttaccgtccaagcaccgtggaa

SEQ ID NO: 4221431 - DNA, 25 bp, Homo sapien
tcaacagtcgagtgcaggtattcct

SEQ ID NO: 4221432 - DNA, 25 bp, Homo sapien
tctgtgtatgagtagaggactttac

SEQ ID NO: 4221433 - DNA, 25 bp, Homo sapien
gaaggctgcatattgtctgtgtatg

SEQ ID NO: 4221434 - DNA, 25 bp, Homo sapien
caaaatgctaccagtgacattcgga

SEQ ID NO: 4221435 - DNA, 25 bp, Homo sapien
tttcacaagcggaacccaaaatgct

SEQ ID NO: 4221436 - DNA, 25 bp, Homo sapien
aagccaagtagagggcggtttcaca

SEQ ID NO: 4221437 - DNA, 25 bp, Homo sapien
cattcggatcagttggctttaagag

SEQ ID NO: 4221438 - DNA, 25 bp, Homo sapien
gcagctgtaatggtgtatcaagcaa

SEQ ID NO: 4221439 - DNA, 25 bp, Homo sapien
gctgtaatggtgtatcaagcaaaca

SEQ ID NO: 4221440 - DNA, 25 bp, Homo sapien
cagctgtaatggtgtatcaagcaaa

SEQ ID NO: 4221441 - DNA, 25 bp, Homo sapien
gagcagctgtaatggtgtatcaagc

SEQ ID NO: 4221442 - DNA, 25 bp, Homo sapien
cagatggtcacatgagcattccaat

SEQ ID NO: 4221443 - DNA, 25 bp, Homo sapien
tcagatggtcacatgagcattccaa

SEQ ID NO: 4221444 - DNA, 25 bp, Homo sapien
gcattccaattctggtcagctagag

SEQ ID NO: 4221445 - DNA, 25 bp, Homo sapien
tccaattctggtcagctagaggcaa

SEQ ID NO: 4221446 - DNA, 25 bp, Homo sapien
gcacagtagccttgtgcagagtttc

SEQ ID NO: 4221447 - DNA, 25 bp, Homo sapien
tgctgttatggtccaaaaatgagtt

SEQ ID NO: 4221448 - DNA, 25 bp, Homo sapien
ccattcccctagtgctgttatggtc

SEQ ID NO: 4221449 - DNA, 25 bp, Homo sapien
tggtgcacagtagccttgtgcagag

SEQ ID NO: 4221450 - DNA, 25 bp, Homo sapien
ttgagagctgaactggccccttttt

SEQ ID NO: 4221451 - DNA, 25 bp, Homo sapien
aaaaaagggtgaagtgagcttgtca

SEQ ID NO: 4221452 - DNA, 25 bp, Homo sapien
tctgtctcttgacttgccgtggtgt

SEQ ID NO: 4221453 - DNA, 25 bp, Homo sapien
taaagacagggccagctacatcatt

SEQ ID NO: 4221454 - DNA, 25 bp, Homo sapien
tgccaagggcccctagtctgttgtt

SEQ ID NO: 4221455 - DNA, 25 bp, Homo sapien
tggtgatgtgtactcaggagcatca

SEQ ID NO: 4221456 - DNA, 25 bp, Homo sapien
atttttgccagtcctgccaagggcc

SEQ ID NO: 4221457 - DNA, 25 bp, Homo sapien
tagttcagctatatgatggtcagat

SEQ ID NO: 4221458 - DNA, 25 bp, Homo sapien
tgacctgacagagatccctcctgag

SEQ ID NO: 4221459 - DNA, 25 bp, Homo sapien
cgttccggatattaagtgacctgac

SEQ ID NO: 4221460 - DNA, 25 bp, Homo sapien
ttaactcttcgatccggcactcctg

SEQ ID NO: 4221461 - DNA, 25 bp, Homo sapien
ggcactcctgtgctttcgttccgga

SEQ ID NO: 4221462 - DNA, 25 bp, Homo sapien
tctggcttattcatgaaaatgtcgt

SEQ ID NO: 4221463 - DNA, 25 bp, Homo sapien
cagtatgtctgtgtgatattcaaag

SEQ ID NO: 4221464 - DNA, 25 bp, Homo sapien
aatgtcgtaagcagaggaacgagag

SEQ ID NO: 4221465 - DNA, 25 bp, Homo sapien
tattcaaagtgaaagctcatttctt

SEQ ID NO: 4221466 - DNA, 25 bp, Homo sapien
ctcctttagccctatatccatggga

SEQ ID NO: 4221467 - DNA, 25 bp, Homo sapien
cctttagccctatatccatgggata

SEQ ID NO: 4221468 - DNA, 25 bp, Homo sapien
ttagccctatatccatgggatacag

SEQ ID NO: 4221469 - DNA, 25 bp, Homo sapien
ctttagccctatatccatgggatac

SEQ ID NO: 4221470 - DNA, 25 bp, Homo sapien
catgtctactctttggctccagctt

SEQ ID NO: 4221471 - DNA, 25 bp, Homo sapien
gctctggccatgcagcaatcgtcat

SEQ ID NO: 4221472 - DNA, 25 bp, Homo sapien
tccaaatatgctggcgggcccatgt

SEQ ID NO: 4221473 - DNA, 25 bp, Homo sapien
tcatgaagcttccaaatatgctggc

SEQ ID NO: 4221474 - DNA, 25 bp, Homo sapien
caagcacgcacatgtagtttcccac

SEQ ID NO: 4221475 - DNA, 25 bp, Homo sapien
catggcctcccttatggactgtgat

SEQ ID NO: 4221476 - DNA, 25 bp, Homo sapien
agttgtgtcaagcacgcacatgtag

SEQ ID NO: 4221477 - DNA, 25 bp, Homo sapien
cagcttaatatgtccaccacatgca

SEQ ID NO: 4221478 - DNA, 25 bp, Homo sapien
caggctctggattcggttgtggtct

SEQ ID NO: 4221479 - DNA, 25 bp, Homo sapien
gtcaagtgataaatggcaggctctg

SEQ ID NO: 4221480 - DNA, 25 bp, Homo sapien
tcagatgtacgtggtcaagtgataa

SEQ ID NO: 4221481 - DNA, 25 bp, Homo sapien
tgtacgtggtcaagtgataaatggc

SEQ ID NO: 4221482 - DNA, 25 bp, Homo sapien
actgtcagttttcacacctcagtga

SEQ ID NO: 4221483 - DNA, 25 bp, Homo sapien
gaaggctgtgcgagggtcttgcagg

SEQ ID NO: 4221484 - DNA, 25 bp, Homo sapien
tcagtgaaggctgtgcgagggtctt

SEQ ID NO: 4221485 - DNA, 25 bp, Homo sapien
aaactgtcagttttcacacctcagt

SEQ ID NO: 4221486 - DNA, 25 bp, Homo sapien
ctcaccacatattggggtcctcctg

SEQ ID NO: 4221487 - DNA, 25 bp, Homo sapien
atcctgtcagctcatagcaggccct

SEQ ID NO: 4221488 - DNA, 25 bp, Homo sapien
tgaaactcatttagcccttgttggg

SEQ ID NO: 4221489 - DNA, 25 bp, Homo sapien
gaccaggcaggattccctccattag

SEQ ID NO: 4221490 - DNA, 25 bp, Homo sapien
ggtatttacctaccagctgcactga

SEQ ID NO: 4221491 - DNA, 25 bp, Homo sapien
gcctttagagttcccagtctagtgg

SEQ ID NO: 4221492 - DNA, 25 bp, Homo sapien
ggagagatgtatagacacatcattg

SEQ ID NO: 4221493 - DNA, 25 bp, Homo sapien
tacaatttacaatccatgttagggt

SEQ ID NO: 4221494 - DNA, 25 bp, Homo sapien
ctgggtatttaaagatgggtctgcc

SEQ ID NO: 4221495 - DNA, 25 bp, Homo sapien
cccttccatgccaaactgtattgaa

SEQ ID NO: 4221496 - DNA, 25 bp, Homo sapien
tattcccttccatgccaaactgtat

SEQ ID NO: 4221497 - DNA, 25 bp, Homo sapien
tcccttccatgccaaactgtattga

SEQ ID NO: 4221498 - DNA, 25 bp, Homo sapien
cttattcccttccatgccaaactgt

SEQ ID NO: 4221499 - DNA, 25 bp, Homo sapien
tccagtaagttggacttgtgtttta

SEQ ID NO: 4221500 - DNA, 25 bp, Homo sapien
caattccagtaagttggacttgtgt

SEQ ID NO: 4221501 - DNA, 25 bp, Homo sapien
ttgtgctctcattccctttgggttc

SEQ ID NO: 4221502 - DNA, 25 bp, Homo sapien
gactgtggacaattccagtaagttg

SEQ ID NO: 4221503 - DNA, 25 bp, Homo sapien
agtggtctgattctgactgtaaagt

SEQ ID NO: 4221504 - DNA, 25 bp, Homo sapien
aatatgtatccccacctcagaaggt

SEQ ID NO: 4221505 - DNA, 25 bp, Homo sapien
tcaccttggaaagtcatgtacattc

SEQ ID NO: 4221506 - DNA, 25 bp, Homo sapien
cctggcttggaagcaagagcactgt

SEQ ID NO: 4221507 - DNA, 25 bp, Homo sapien
gcatggagtaattttgaatgtcacc

SEQ ID NO: 4221508 - DNA, 25 bp, Homo sapien
tgggcatgtaaaatgtaccgtatgg

SEQ ID NO: 4221509 - DNA, 25 bp, Homo sapien
catttcaagtaccatattctcaggg

SEQ ID NO: 4221510 - DNA, 25 bp, Homo sapien
cccacccagaataagctgtgatttt

SEQ ID NO: 4221511 - DNA, 25 bp, Homo sapien
ctcagttgtcctatatatttgggca

SEQ ID NO: 4221512 - DNA, 25 bp, Homo sapien
gagggtctggctgaccgttccttaa

SEQ ID NO: 4221513 - DNA, 25 bp, Homo sapien
gttatcaaattgttgagggtctggc

SEQ ID NO: 4221514 - DNA, 25 bp, Homo sapien
ttaacacgtctgttccagatgctac

SEQ ID NO: 4221515 - DNA, 25 bp, Homo sapien
ggctgaccgttccttaacacgtctg

SEQ ID NO: 4221516 - DNA, 25 bp, Homo sapien
tgactctgtcatccccttcatttgt

SEQ ID NO: 4221517 - DNA, 25 bp, Homo sapien
ccatctgccattgttacatgtccca

SEQ ID NO: 4221518 - DNA, 25 bp, Homo sapien
catctgccattgttacatgtcccag

SEQ ID NO: 4221519 - DNA, 25 bp, Homo sapien
ctcattatcctgtaaacatgactct

SEQ ID NO: 4221520 - DNA, 25 bp, Homo sapien
ctgaatttgttgaaagcttgttcta

SEQ ID NO: 4221521 - DNA, 25 bp, Homo sapien
gaatttgttgaaagcttgttctacc

SEQ ID NO: 4221522 - DNA, 25 bp, Homo sapien
gagagaaacctatgctgaatttgtt

SEQ ID NO: 4221523 - DNA, 25 bp, Homo sapien
acaagagagaaacctatgctgaatt

SEQ ID NO: 4221524 - DNA, 25 bp, Homo sapien
tttttaatgacagcgatccggtgca

SEQ ID NO: 4221525 - DNA, 25 bp, Homo sapien
ttagcaatgctgtgataggtccaac

SEQ ID NO: 4221526 - DNA, 25 bp, Homo sapien
tgaaattagttatctggagctccgt

SEQ ID NO: 4221527 - DNA, 25 bp, Homo sapien
gtgacaggcacgctagacagccatg

SEQ ID NO: 4221528 - DNA, 25 bp, Homo sapien
tagaagcagaaaacgatgtcatagc

SEQ ID NO: 4221529 - DNA, 25 bp, Homo sapien
gacatgtggtctggtcacgtaaaga

SEQ ID NO: 4221530 - DNA, 25 bp, Homo sapien
catttcactggtaacatagaagcag

SEQ ID NO: 4221531 - DNA, 25 bp, Homo sapien
catacagtcatttcgtggacatgtg

SEQ ID NO: 4221532 - DNA, 25 bp, Homo sapien
cattaattcagattgtttcctggga

SEQ ID NO: 4221533 - DNA, 25 bp, Homo sapien
cagattgtttcctgggagtttgagt

SEQ ID NO: 4221534 - DNA, 25 bp, Homo sapien
tgcattaattcagattgtttcctgg

SEQ ID NO: 4221535 - DNA, 25 bp, Homo sapien
cctgggagtttgagtgtacttttgt

SEQ ID NO: 4221536 - DNA, 25 bp, Homo sapien
ttctaatactccattatacagcgtg

SEQ ID NO: 4221537 - DNA, 25 bp, Homo sapien
actccattatacagcgtgtctagaa

SEQ ID NO: 4221538 - DNA, 25 bp, Homo sapien
taatactccattatacagcgtgtct

SEQ ID NO: 4221539 - DNA, 25 bp, Homo sapien
tactccattatacagcgtgtctaga

SEQ ID NO: 4221540 - DNA, 25 bp, Homo sapien
tattgttaaaactgctgtgtgctca

SEQ ID NO: 4221541 - DNA, 25 bp, Homo sapien
tggaccgtaaacaagagacaatgag

SEQ ID NO: 4221542 - DNA, 25 bp, Homo sapien
gaaaagagcttgctttagcttattg

SEQ ID NO: 4221543 - DNA, 25 bp, Homo sapien
tcttgttgacctttatttaacagaa

SEQ ID NO: 4221544 - DNA, 25 bp, Homo sapien
catggccaacgaataagggtagaga

SEQ ID NO: 4221545 - DNA, 25 bp, Homo sapien
ttcgaagccattcatcaggagtcct

SEQ ID NO: 4221546 - DNA, 25 bp, Homo sapien
tttgcaccctcaatgtaagcatctc

SEQ ID NO: 4221547 - DNA, 25 bp, Homo sapien
taatggcccagtcttacttttgcac

SEQ ID NO: 4221548 - DNA, 25 bp, Homo sapien
gaagagagcagtcaaccatgcaagg

SEQ ID NO: 4221549 - DNA, 25 bp, Homo sapien
catttataccaaggtgcagtgccct

SEQ ID NO: 4221550 - DNA, 25 bp, Homo sapien
aaacagaacggtgcccagcagcatt

SEQ ID NO: 4221551 - DNA, 25 bp, Homo sapien
tctcatgagacgacccaagagcgta

SEQ ID NO: 4221552 - DNA, 25 bp, Homo sapien
accactcgccgctttgttgctcttt

SEQ ID NO: 4221553 - DNA, 25 bp, Homo sapien
gcgcgtgctgccctctcacaccact

SEQ ID NO: 4221554 - DNA, 25 bp, Homo sapien
gcgtgctgccctctcacaccactcg

SEQ ID NO: 4221555 - DNA, 25 bp, Homo sapien
cctctcacaccactcgccgctttgt

SEQ ID NO: 4221556 - DNA, 25 bp, Homo sapien
taacattggaatctaatgcagcact

SEQ ID NO: 4221557 - DNA, 25 bp, Homo sapien
ggaaggaccttatcactcatctcat

SEQ ID NO: 4221558 - DNA, 25 bp, Homo sapien
tctagaaaatggctcagattgctct

SEQ ID NO: 4221559 - DNA, 25 bp, Homo sapien
tatcagattatagctaaaaggctgc

SEQ ID NO: 4221560 - DNA, 25 bp, Homo sapien
tcacaaaacgtcataaaggtggctc

SEQ ID NO: 4221561 - DNA, 25 bp, Homo sapien
tggacaccacccttactttctagga

SEQ ID NO: 4221562 - DNA, 25 bp, Homo sapien
tctaggattgcatatgccttcccca

SEQ ID NO: 4221563 - DNA, 25 bp, Homo sapien
gaagctcctcatcactacgcctatg

SEQ ID NO: 4221564 - DNA, 25 bp, Homo sapien
ctcagtcttcttgttgtgactcttc

SEQ ID NO: 4221565 - DNA, 25 bp, Homo sapien
ttaaagtgtccactttgactcagtc

SEQ ID NO: 4221566 - DNA, 25 bp, Homo sapien
atgattcaacattaaagtgtccact

SEQ ID NO: 4221567 - DNA, 25 bp, Homo sapien
ttctcagtcttcttgttgtgactct

SEQ ID NO: 4221568 - DNA, 25 bp, Homo sapien
aaacacgtggacacagggagggcaa

SEQ ID NO: 4221569 - DNA, 25 bp, Homo sapien
ccgcatgttctcattcgtaattggg

SEQ ID NO: 4221570 - DNA, 25 bp, Homo sapien
gaaaacacgtggacacagggagggc

SEQ ID NO: 4221571 - DNA, 25 bp, Homo sapien
tcattcgtaattgggagttgaacaa

SEQ ID NO: 4221572 - DNA, 25 bp, Homo sapien
aatagtttctggagaacctactaca

SEQ ID NO: 4221573 - DNA, 25 bp, Homo sapien
ggagaacctactacaatatttactg

SEQ ID NO: 4221574 - DNA, 25 bp, Homo sapien
ctgtatgaattcgtaaataaatgaa

SEQ ID NO: 4221575 - DNA, 25 bp, Homo sapien
caatatttactgtatgaattcgtaa

SEQ ID NO: 4221576 - DNA, 25 bp, Homo sapien
tcctgccttggtttctcaaattgct

SEQ ID NO: 4221577 - DNA, 25 bp, Homo sapien
cctcctgccttggtttctcaaattg

SEQ ID NO: 4221578 - DNA, 25 bp, Homo sapien
cctgccttggtttctcaaattgctg

SEQ ID NO: 4221579 - DNA, 25 bp, Homo sapien
tcctcctgccttggtttctcaaatt

SEQ ID NO: 4221580 - DNA, 25 bp, Homo sapien
tatgttaatattgaccctggttggg

SEQ ID NO: 4221581 - DNA, 25 bp, Homo sapien
tcaccctgctctctattcactgagt

SEQ ID NO: 4221582 - DNA, 25 bp, Homo sapien
gattcgtcacagctcacaattgtta

SEQ ID NO: 4221583 - DNA, 25 bp, Homo sapien
tacttgtggtgatgtgacataaccc

SEQ ID NO: 4221584 - DNA, 25 bp, Homo sapien
gtgtgttggctgggatataaaagcc

SEQ ID NO: 4221585 - DNA, 25 bp, Homo sapien
tttctcattctcgttcagggttttg

SEQ ID NO: 4221586 - DNA, 25 bp, Homo sapien
cattctcgttcagggttttgtaagg

SEQ ID NO: 4221587 - DNA, 25 bp, Homo sapien
tctcattctcgttcagggttttgta

SEQ ID NO: 4221588 - DNA, 25 bp, Homo sapien
caggcccccatatgtaatgtttccc

SEQ ID NO: 4221589 - DNA, 25 bp, Homo sapien
gacaggcccccatatgtaatgtttc

SEQ ID NO: 4221590 - DNA, 25 bp, Homo sapien
ctgacaggcccccatatgtaatgtt

SEQ ID NO: 4221591 - DNA, 25 bp, Homo sapien
ccctgacaggcccccatatgtaatg

SEQ ID NO: 4221592 - DNA, 25 bp, Homo sapien
tccagctgcaggaccctcgtacctg

SEQ ID NO: 4221593 - DNA, 25 bp, Homo sapien
ccagctgcaggaccctcgtacctgc

SEQ ID NO: 4221594 - DNA, 25 bp, Homo sapien
ctccagctgcaggaccctcgtacct

SEQ ID NO: 4221595 - DNA, 25 bp, Homo sapien
agctgcaggaccctcgtacctgctg

SEQ ID NO: 4221596 - DNA, 25 bp, Homo sapien
gggcttctctttttatctacatgtt

SEQ ID NO: 4221597 - DNA, 25 bp, Homo sapien
gagacttataagcaccaccctcagg

SEQ ID NO: 4221598 - DNA, 25 bp, Homo sapien
ttctacagctttaatctctatctcc

SEQ ID NO: 4221599 - DNA, 25 bp, Homo sapien
aactacctgctttgtgtaaatctga

SEQ ID NO: 4221600 - DNA, 25 bp, Homo sapien
tatgaggtgatgaaagactaagatc

SEQ ID NO: 4221601 - DNA, 25 bp, Homo sapien
gaggtgatgaaagactaagatcaga

SEQ ID NO: 4221602 - DNA, 25 bp, Homo sapien
actgagtatgaggtgatgaaagact

SEQ ID NO: 4221603 - DNA, 25 bp, Homo sapien
gagtatgaggtgatgaaagactaag

SEQ ID NO: 4221604 - DNA, 25 bp, Homo sapien
ctgctttgttccaaaggggtgagag

SEQ ID NO: 4221605 - DNA, 25 bp, Homo sapien
gctttgttccaaaggggtgagagta

SEQ ID NO: 4221606 - DNA, 25 bp, Homo sapien
ttatttagcaaggaacagcattccc

SEQ ID NO: 4221607 - DNA, 25 bp, Homo sapien
tgctttgttccaaaggggtgagagt

SEQ ID NO: 4221608 - DNA, 25 bp, Homo sapien
ttctgtggtttaatttcctttctca

SEQ ID NO: 4221609 - DNA, 25 bp, Homo sapien
tctgtggtttaatttcctttctcac

SEQ ID NO: 4221610 - DNA, 25 bp, Homo sapien
tcttgatcatatctgactttgtcca

SEQ ID NO: 4221611 - DNA, 25 bp, Homo sapien
ggacttcatataactcactccactc

SEQ ID NO: 4221612 - DNA, 25 bp, Homo sapien
tactctgtgaaactttgtttgtagc

SEQ ID NO: 4221613 - DNA, 25 bp, Homo sapien
actttgtccatcaggacttcatata

SEQ ID NO: 4221614 - DNA, 25 bp, Homo sapien
ggtgtgtgtgtcactccactttcag

SEQ ID NO: 4221615 - DNA, 25 bp, Homo sapien
tcaaggcagcacttctatgagtctg

SEQ ID NO: 4221616 - DNA, 25 bp, Homo sapien
ccagggaatggttacagcaggccat

SEQ ID NO: 4221617 - DNA, 25 bp, Homo sapien
cactttcagctaaggtgactcagaa

SEQ ID NO: 4221618 - DNA, 25 bp, Homo sapien
gttaccaatagagatagtagcgtct

SEQ ID NO: 4221619 - DNA, 25 bp, Homo sapien
acttttagtccagatgagttttcaa

SEQ ID NO: 4221620 - DNA, 25 bp, Homo sapien
tgaaaacggacgaatacagttacca

SEQ ID NO: 4221621 - DNA, 25 bp, Homo sapien
gtagcgtcttgtgcccatttcattg

SEQ ID NO: 4221622 - DNA, 25 bp, Homo sapien
gacagagttggcgttctcagacagc

SEQ ID NO: 4221623 - DNA, 25 bp, Homo sapien
tatttaatgtgctggtttgcctcag

SEQ ID NO: 4221624 - DNA, 25 bp, Homo sapien
caggtacagttagtgacatggtgga

SEQ ID NO: 4221625 - DNA, 25 bp, Homo sapien
gttccatgggcaaggtctaagctct

SEQ ID NO: 4221626 - DNA, 25 bp, Homo sapien
gttcttttccattgttctatttatc

SEQ ID NO: 4221627 - DNA, 25 bp, Homo sapien
tcttggctatatgggctattttttg

SEQ ID NO: 4221628 - DNA, 25 bp, Homo sapien
ctgttcttttccattgttctattta

SEQ ID NO: 4221629 - DNA, 25 bp, Homo sapien
cttttccattgttctatttatctgt

SEQ ID NO: 4221630 - DNA, 25 bp, Homo sapien
gctgactttgctatttgaaatgttg

SEQ ID NO: 4221631 - DNA, 25 bp, Homo sapien
gttgaaaatatccttagccgattgc

SEQ ID NO: 4221632 - DNA, 25 bp, Homo sapien
gctttgcgaaagctcctttagccag

SEQ ID NO: 4221633 - DNA, 25 bp, Homo sapien
gagcccgttcactttactattggct

SEQ ID NO: 4221634 - DNA, 25 bp, Homo sapien
tctggagacatgcatagaattccat

SEQ ID NO: 4221635 - DNA, 25 bp, Homo sapien
tgtcatatcggatctggcctccatt

SEQ ID NO: 4221636 - DNA, 25 bp, Homo sapien
cctccattctggagacatgcataga

SEQ ID NO: 4221637 - DNA, 25 bp, Homo sapien
ctggcagttgtcatatcggatctgg

SEQ ID NO: 4221638 - DNA, 25 bp, Homo sapien
gagggtcttgtcagctctgagagac

SEQ ID NO: 4221639 - DNA, 25 bp, Homo sapien
tcagggtcaagtgggtagttgtttc

SEQ ID NO: 4221640 - DNA, 25 bp, Homo sapien
gacatggctggaatttctaagttat

SEQ ID NO: 4221641 - DNA, 25 bp, Homo sapien
tctgagagacatggctggaatttct

SEQ ID NO: 4221642 - DNA, 25 bp, Homo sapien
ctgagataatgagtctagactgctc

SEQ ID NO: 4221643 - DNA, 25 bp, Homo sapien
ctctctaagctcagagcttgccgct

SEQ ID NO: 4221644 - DNA, 25 bp, Homo sapien
gagataatgagtctagactgctcat

SEQ ID NO: 4221645 - DNA, 25 bp, Homo sapien
agagcttgccgctctgagacactgg

SEQ ID NO: 4221646 - DNA, 25 bp, Homo sapien
tagtcataggaaccttaaaggctgg

SEQ ID NO: 4221647 - DNA, 25 bp, Homo sapien
tgtgaatgttcggtgcctctccgct

SEQ ID NO: 4221648 - DNA, 25 bp, Homo sapien
cagtgttagcatagacccttgtgaa

SEQ ID NO: 4221649 - DNA, 25 bp, Homo sapien
gaaagacctaggttgtaattccagc

SEQ ID NO: 4221650 - DNA, 25 bp, Homo sapien
tacaagcacagattaagtggagagt

SEQ ID NO: 4221651 - DNA, 25 bp, Homo sapien
taggcccacttgaggtttatggaca

SEQ ID NO: 4221652 - DNA, 25 bp, Homo sapien
taataaactgaagggtacaagcaca

SEQ ID NO: 4221653 - DNA, 25 bp, Homo sapien
cattgtcgtatgcttgtgtccagcc

SEQ ID NO: 4221654 - DNA, 25 bp, Homo sapien
tgcccttgatcaggttttgccctga

SEQ ID NO: 4221655 - DNA, 25 bp, Homo sapien
tgagtccaccccgagcaggtgtgtc

SEQ ID NO: 4221656 - DNA, 25 bp, Homo sapien
ccaggcttgcccttgatcaggtttt

SEQ ID NO: 4221657 - DNA, 25 bp, Homo sapien
cccgagcaggtgtgtcagcagttct

SEQ ID NO: 4221658 - DNA, 25 bp, Homo sapien
agcatccccaataggtgaagtcatc

SEQ ID NO: 4221659 - DNA, 25 bp, Homo sapien
tccccaataggtgaagtcatctgag

SEQ ID NO: 4221660 - DNA, 25 bp, Homo sapien
gtcatctgagttttcatgtgctggt

SEQ ID NO: 4221661 - DNA, 25 bp, Homo sapien
gcatgctttgcccattgaatacaga

SEQ ID NO: 4221662 - DNA, 25 bp, Homo sapien
gccttggggatactgagagtggtga

SEQ ID NO: 4221663 - DNA, 25 bp, Homo sapien
tctccccgcagaccattccataagt

SEQ ID NO: 4221664 - DNA, 25 bp, Homo sapien
ctgctctccccgcagaccattccat

SEQ ID NO: 4221665 - DNA, 25 bp, Homo sapien
taagtctcaagttgagggttatgct

SEQ ID NO: 4221666 - DNA, 25 bp, Homo sapien
gaggagctgtccaacactcaaggtt

SEQ ID NO: 4221667 - DNA, 25 bp, Homo sapien
atggtccccagaggagctgtccaac

SEQ ID NO: 4221668 - DNA, 25 bp, Homo sapien
aggtggagttgggtaggcatggtcc

SEQ ID NO: 4221669 - DNA, 25 bp, Homo sapien
tggagttgggtaggcatggtcccca

SEQ ID NO: 4221670 - DNA, 25 bp, Homo sapien
gcagtcttgtgagggtatatgcatt

SEQ ID NO: 4221671 - DNA, 25 bp, Homo sapien
gcattcactggagcacacttaaaaa

SEQ ID NO: 4221672 - DNA, 25 bp, Homo sapien
gaataaaccatggtccctgttcttg

SEQ ID NO: 4221673 - DNA, 25 bp, Homo sapien
catggtccctgttcttgagcagtct

SEQ ID NO: 4221674 - DNA, 25 bp, Homo sapien
aactatattacttcaggtccctgga

SEQ ID NO: 4221675 - DNA, 25 bp, Homo sapien
ctaactatattttgcacagggacct

SEQ ID NO: 4221676 - DNA, 25 bp, Homo sapien
tcctcctgccagtggtagggaaaaa

SEQ ID NO: 4221677 - DNA, 25 bp, Homo sapien
gaagtgaatatacctctgggccctg

SEQ ID NO: 4221678 - DNA, 25 bp, Homo sapien
gcgtcagagcatggctcatcaggta

SEQ ID NO: 4221679 - DNA, 25 bp, Homo sapien
gctcatcaggtagctttgcagggcc

SEQ ID NO: 4221680 - DNA, 25 bp, Homo sapien
tttgtgtggaagcagcgtcagagca

SEQ ID NO: 4221681 - DNA, 25 bp, Homo sapien
caggtagctttgcagggcccatgga

SEQ ID NO: 4221682 - DNA, 25 bp, Homo sapien
gagactggtgcagccgtgatttcca

SEQ ID NO: 4221683 - DNA, 25 bp, Homo sapien
tgccaacggctgacgaacattagat

SEQ ID NO: 4221684 - DNA, 25 bp, Homo sapien
gggctcattcacttctgcgcactgt

SEQ ID NO: 4221685 - DNA, 25 bp, Homo sapien
caagggcagaagctttgccaacggc

SEQ ID NO: 4221686 - DNA, 25 bp, Homo sapien
gtccctggaatgtcctcagtctctg

SEQ ID NO: 4221687 - DNA, 25 bp, Homo sapien
catttaacttattccaaaaaggcag

SEQ ID NO: 4221688 - DNA, 25 bp, Homo sapien
taagcctgacaagctgatcatttaa

SEQ ID NO: 4221689 - DNA, 25 bp, Homo sapien
agactgactctactatgacctgtgg

SEQ ID NO: 4221690 - DNA, 25 bp, Homo sapien
caatttaatagagggtgagatgcca

SEQ ID NO: 4221691 - DNA, 25 bp, Homo sapien
tctaacctggtatcacacgggtaac

SEQ ID NO: 4221692 - DNA, 25 bp, Homo sapien
gtgtatccccatagaaaagctcatt

SEQ ID NO: 4221693 - DNA, 25 bp, Homo sapien
gaaaattatgtgataggccagagta

SEQ ID NO: 4221694 - DNA, 25 bp, Homo sapien
tggaaggtacaacaatttcggccat

SEQ ID NO: 4221695 - DNA, 25 bp, Homo sapien
agttgctgaacctgattctggaagg

SEQ ID NO: 4221696 - DNA, 25 bp, Homo sapien
gatttttgtctgcttgcagttgctg

SEQ ID NO: 4221697 - DNA, 25 bp, Homo sapien
ttctggaaggtacaacaatttcggc

SEQ ID NO: 4221698 - DNA, 25 bp, Homo sapien
ggaagatttgtcaagagtaggttag

SEQ ID NO: 4221699 - DNA, 25 bp, Homo sapien
gttcccactgacctagcataattat

SEQ ID NO: 4221700 - DNA, 25 bp, Homo sapien
tgtcagcaggatcatgctacacagt

SEQ ID NO: 4221701 - DNA, 25 bp, Homo sapien
tagtgttcccacgtcagctggagct

SEQ ID NO: 4221702 - DNA, 25 bp, Homo sapien
ccattatgttcataaatcagtgcat

SEQ ID NO: 4221703 - DNA, 25 bp, Homo sapien
cccattatgttcataaatcagtgca

SEQ ID NO: 4221704 - DNA, 25 bp, Homo sapien
ctgcccattatgttcataaatcagt

SEQ ID NO: 4221705 - DNA, 25 bp, Homo sapien
tgcccattatgttcataaatcagtg

SEQ ID NO: 4221706 - DNA, 25 bp, Homo sapien
ttcatagcaagaccagcggtcgatg

SEQ ID NO: 4221707 - DNA, 25 bp, Homo sapien
accagcggtcgatgaagccaaacac

SEQ ID NO: 4221708 - DNA, 25 bp, Homo sapien
gcaagaccagcggtcgatgaagcca

SEQ ID NO: 4221709 - DNA, 25 bp, Homo sapien
tgctgaaaattcatagcaagaccag

SEQ ID NO: 4221710 - DNA, 25 bp, Homo sapien
tacattagcatagtcattgagacca

SEQ ID NO: 4221711 - DNA, 25 bp, Homo sapien
gataaacccgtagaacagtggctgg

SEQ ID NO: 4221712 - DNA, 25 bp, Homo sapien
caatcaagtaacagtgaggttgaga

SEQ ID NO: 4221713 - DNA, 25 bp, Homo sapien
tatagactcaaagacaagactaagt

SEQ ID NO: 4221714 - DNA, 25 bp, Homo sapien
taagcatttcctagatgcgaattat

SEQ ID NO: 4221715 - DNA, 25 bp, Homo sapien
agtgccagcatcatatcttcaaaga

SEQ ID NO: 4221716 - DNA, 25 bp, Homo sapien
tcctagatgcgaattataaaaattc

SEQ ID NO: 4221717 - DNA, 25 bp, Homo sapien
ataaaaattcttggtgagtgccagc

SEQ ID NO: 4221718 - DNA, 25 bp, Homo sapien
actgcctgccgtggaaacggcactc

SEQ ID NO: 4221719 - DNA, 25 bp, Homo sapien
tcatggggcgttttttgagtgctcc

SEQ ID NO: 4221720 - DNA, 25 bp, Homo sapien
gaaacggcactctcatagctgttgg

SEQ ID NO: 4221721 - DNA, 25 bp, Homo sapien
tgagtgctcctgctatgcacaggca

SEQ ID NO: 4221722 - DNA, 25 bp, Homo sapien
taaagtcgggtctatactagttggc

SEQ ID NO: 4221723 - DNA, 25 bp, Homo sapien
tgtgtgaggggtagttgccacaaca

SEQ ID NO: 4221724 - DNA, 25 bp, Homo sapien
gtctatactagttggccagtgacag

SEQ ID NO: 4221725 - DNA, 25 bp, Homo sapien
tttagtgggtggttgataacacgtg

SEQ ID NO: 4221726 - DNA, 25 bp, Homo sapien
cagaaactcattagctaaagcagca

SEQ ID NO: 4221727 - DNA, 25 bp, Homo sapien
gaatcaggggaaaaccgagcttaga

SEQ ID NO: 4221728 - DNA, 25 bp, Homo sapien
agaaggagaggaagtagcgtcaggc

SEQ ID NO: 4221729 - DNA, 25 bp, Homo sapien
ggaaaaccgagcttagaaggagatg

SEQ ID NO: 4221730 - DNA, 25 bp, Homo sapien
ccacaagggtggttcaggttgaact

SEQ ID NO: 4221731 - DNA, 25 bp, Homo sapien
gaataccgctagctttgagttccaa

SEQ ID NO: 4221732 - DNA, 25 bp, Homo sapien
caaggcagtgttatctgcattagga

SEQ ID NO: 4221733 - DNA, 25 bp, Homo sapien
taattaccatcagttagacaagaca

SEQ ID NO: 4221734 - DNA, 25 bp, Homo sapien
aagagttgccgtgactgtgtgatcc

SEQ ID NO: 4221735 - DNA, 25 bp, Homo sapien
tcagtaaagagttgccgtgactgtg

SEQ ID NO: 4221736 - DNA, 25 bp, Homo sapien
ttcctactcctaactcagtaaagag

SEQ ID NO: 4221737 - DNA, 25 bp, Homo sapien
ccgtgactgtgtgatccgggaacag

SEQ ID NO: 4221738 - DNA, 25 bp, Homo sapien
cagcttggcaattatatcagcaaga

SEQ ID NO: 4221739 - DNA, 25 bp, Homo sapien
tctggagtcccaaaaaagaatatgg

SEQ ID NO: 4221740 - DNA, 25 bp, Homo sapien
aacctttggaagaatatccctggtg

SEQ ID NO: 4221741 - DNA, 25 bp, Homo sapien
agagaaaaggaggtatcacaaacct

SEQ ID NO: 4221742 - DNA, 25 bp, Homo sapien
cagatctggccaggaatgtccacaa

SEQ ID NO: 4221743 - DNA, 25 bp, Homo sapien
ttacacagatctggccaggaatgtc

SEQ ID NO: 4221744 - DNA, 25 bp, Homo sapien
tctggccaggaatgtccacaactct

SEQ ID NO: 4221745 - DNA, 25 bp, Homo sapien
tcctggcttctgttacacagatctg

SEQ ID NO: 4221746 - DNA, 25 bp, Homo sapien
caggtcaaagaaaaaccaggtcagg

SEQ ID NO: 4221747 - DNA, 25 bp, Homo sapien
gtttaataggatgacttgggtgcca

SEQ ID NO: 4221748 - DNA, 25 bp, Homo sapien
caacccagtttacaaagaggaagca

SEQ ID NO: 4221749 - DNA, 25 bp, Homo sapien
tatagcagccaatagagacagttgt

SEQ ID NO: 4221750 - DNA, 25 bp, Homo sapien
ggtcgttttgcctcgtggtctccta

SEQ ID NO: 4221751 - DNA, 25 bp, Homo sapien
caaatctagtaaagtcgagggtgga

SEQ ID NO: 4221752 - DNA, 25 bp, Homo sapien
ggaaggcgaaatgaaagtcctccac

SEQ ID NO: 4221753 - DNA, 25 bp, Homo sapien
gaaatcgaggtctgttcctgcaact

SEQ ID NO: 4221754 - DNA, 25 bp, Homo sapien
gaatacactttctactctatctgtt

SEQ ID NO: 4221755 - DNA, 25 bp, Homo sapien
tggcctgaaaggtttccactgagat

SEQ ID NO: 4221756 - DNA, 25 bp, Homo sapien
tgctgccagacatactggaacttct

SEQ ID NO: 4221757 - DNA, 25 bp, Homo sapien
atgctttgaggtaatcttctttgag

SEQ ID NO: 4221758 - DNA, 25 bp, Homo sapien
ttcatgccgtggtgcttcagggagt

SEQ ID NO: 4221759 - DNA, 25 bp, Homo sapien
tcatgccgtggtgcttcagggagtg

SEQ ID NO: 4221760 - DNA, 25 bp, Homo sapien
taatcgtcttctgctcagaacctgc

SEQ ID NO: 4221761 - DNA, 25 bp, Homo sapien
cttaatcgtcttctgctcagaacct

SEQ ID NO: 4221762 - DNA, 25 bp, Homo sapien
tcgtcttctgctcagaacctgcttc

SEQ ID NO: 4221763 - DNA, 25 bp, Homo sapien
gtcttctgctcagaacctgcttctc

SEQ ID NO: 4221764 - DNA, 25 bp, Homo sapien
gccaaatagcaggctggacttctgg

SEQ ID NO: 4221765 - DNA, 25 bp, Homo sapien
ctggacttctggatgacaggctcct

SEQ ID NO: 4221766 - DNA, 25 bp, Homo sapien
ccaaatagcaggctggacttctgga

SEQ ID NO: 4221767 - DNA, 25 bp, Homo sapien
tggcttggatccctgatagccccat

SEQ ID NO: 4221768 - DNA, 25 bp, Homo sapien
ggtagctggcttggatccctgatag

SEQ ID NO: 4221769 - DNA, 25 bp, Homo sapien
tgctggtgttcagagatgaggtagc

SEQ ID NO: 4221770 - DNA, 25 bp, Homo sapien
agatgaggtagctggcttggatccc

SEQ ID NO: 4221771 - DNA, 25 bp, Homo sapien
ttggctgtcatctgcatgggaagag

SEQ ID NO: 4221772 - DNA, 25 bp, Homo sapien
ctgtcatctgcatgggaagagtcac

SEQ ID NO: 4221773 - DNA, 25 bp, Homo sapien
gctgtcatctgcatgggaagagtca

SEQ ID NO: 4221774 - DNA, 25 bp, Homo sapien
tccttggctgtcatctgcatgggaa

SEQ ID NO: 4221775 - DNA, 25 bp, Homo sapien
tgttttgtcctctgggctgttttca

SEQ ID NO: 4221776 - DNA, 25 bp, Homo sapien
agactgggaggggtgatttggtgtt

SEQ ID NO: 4221777 - DNA, 25 bp, Homo sapien
gggtgatttggtgttttgtcctctg

SEQ ID NO: 4221778 - DNA, 25 bp, Homo sapien
gtgatttggtgttttgtcctctggg

SEQ ID NO: 4221779 - DNA, 25 bp, Homo sapien
ttgaggcagagttagctattccctt

SEQ ID NO: 4221780 - DNA, 25 bp, Homo sapien
aggtattgtttagcaaatcccagac

SEQ ID NO: 4221781 - DNA, 25 bp, Homo sapien
aatcccagacattgcgtagactttt

SEQ ID NO: 4221782 - DNA, 25 bp, Homo sapien
tttccaggtattgtttagcaaatcc

SEQ ID NO: 4221783 - DNA, 25 bp, Homo sapien
caaatcccagacattgcgtagactt

SEQ ID NO: 4221784 - DNA, 25 bp, Homo sapien
cttagagaatgttggtccagggtct

SEQ ID NO: 4221785 - DNA, 25 bp, Homo sapien
tagagaatgttggtccagggtctcc

SEQ ID NO: 4221786 - DNA, 25 bp, Homo sapien
gtctcctttccttatggtggatgtc

SEQ ID NO: 4221787 - DNA, 25 bp, Homo sapien
cagggtctcctttccttatggtgga

SEQ ID NO: 4221788 - DNA, 25 bp, Homo sapien
gaggtccggccactggtccatataa

SEQ ID NO: 4221789 - DNA, 25 bp, Homo sapien
catcatgtctataagatgaagaggt

SEQ ID NO: 4221790 - DNA, 25 bp, Homo sapien
tccggccactggtccatataaacat

SEQ ID NO: 4221791 - DNA, 25 bp, Homo sapien
tataagatgaagaggtccggccact

SEQ ID NO: 4221792 - DNA, 25 bp, Homo sapien
ctggctgttgacagttacaatattc

SEQ ID NO: 4221793 - DNA, 25 bp, Homo sapien
cagctggctgttgacagttacaata

SEQ ID NO: 4221794 - DNA, 25 bp, Homo sapien
ggacagctggctgttgacagttaca

SEQ ID NO: 4221795 - DNA, 25 bp, Homo sapien
caggacagctggctgttgacagtta

SEQ ID NO: 4221796 - DNA, 25 bp, Homo sapien
ggaatcccagggaatccgatatact

SEQ ID NO: 4221797 - DNA, 25 bp, Homo sapien
acacatttggccctgttctcaggaa

SEQ ID NO: 4221798 - DNA, 25 bp, Homo sapien
gaggattttgtatggcctggcttct

SEQ ID NO: 4221799 - DNA, 25 bp, Homo sapien
tatactgacacatttggccctgttc

SEQ ID NO: 4221800 - DNA, 25 bp, Homo sapien
gagaaggcatggctttgatgaacac

SEQ ID NO: 4221801 - DNA, 25 bp, Homo sapien
atatggcagagaaggcatggctttg

SEQ ID NO: 4221802 - DNA, 25 bp, Homo sapien
aaggcatggctttgatgaacacagc

SEQ ID NO: 4221803 - DNA, 25 bp, Homo sapien
ttcatatggcagagaaggcatggct

SEQ ID NO: 4221804 - DNA, 25 bp, Homo sapien
tagaggagggaagactagcgggcag

SEQ ID NO: 4221805 - DNA, 25 bp, Homo sapien
gagggaagactagcgggcagaggaa

SEQ ID NO: 4221806 - DNA, 25 bp, Homo sapien
gagagggggacacacaggggtagag

SEQ ID NO: 4221807 - DNA, 25 bp, Homo sapien
aggagggaagactagcgggcagagg

SEQ ID NO: 4221808 - DNA, 25 bp, Homo sapien
caatgtgctaagttctggcgatacc

SEQ ID NO: 4221809 - DNA, 25 bp, Homo sapien
gaagcaaactgatacgccaagggcc

SEQ ID NO: 4221810 - DNA, 25 bp, Homo sapien
taggtgtgtacaggagaagcaaact

SEQ ID NO: 4221811 - DNA, 25 bp, Homo sapien
gccagtttactgaaggatcagctca

SEQ ID NO: 4221812 - DNA, 25 bp, Homo sapien
tatttttgaggccatgcacatacaa

SEQ ID NO: 4221813 - DNA, 25 bp, Homo sapien
aattatttttgaggccatgcacata

SEQ ID NO: 4221814 - DNA, 25 bp, Homo sapien
tcttgaagtttgatattgggggtca

SEQ ID NO: 4221815 - DNA, 25 bp, Homo sapien
ggtcagcccataattcataaacaaa

SEQ ID NO: 4221816 - DNA, 25 bp, Homo sapien
gatgactggagaaatcatggagagt

SEQ ID NO: 4221817 - DNA, 25 bp, Homo sapien
agagtggaaaggtgagattcttgtt

SEQ ID NO: 4221818 - DNA, 25 bp, Homo sapien
ttgatgtggatgactggagaaatca

SEQ ID NO: 4221819 - DNA, 25 bp, Homo sapien
tatttccctactcttccaggatcca

SEQ ID NO: 4221820 - DNA, 25 bp, Homo sapien
cacaagatcagacgattgagatcat

SEQ ID NO: 4221821 - DNA, 25 bp, Homo sapien
acaagatcagacgattgagatcatc

SEQ ID NO: 4221822 - DNA, 25 bp, Homo sapien
aagatcagacgattgagatcatcct

SEQ ID NO: 4221823 - DNA, 25 bp, Homo sapien
caagatcagacgattgagatcatcc

SEQ ID NO: 4221824 - DNA, 25 bp, Homo sapien
gccttcagtgctgtgactgttttcc

SEQ ID NO: 4221825 - DNA, 25 bp, Homo sapien
tcccaggagaatagctcggtcctct

SEQ ID NO: 4221826 - DNA, 25 bp, Homo sapien
tccaggaggtcatggtccctgattt

SEQ ID NO: 4221827 - DNA, 25 bp, Homo sapien
tctcctgccttcagtgctgtgactg

SEQ ID NO: 4221828 - DNA, 25 bp, Homo sapien
tgagcgcaggagtgtgattcccagc

SEQ ID NO: 4221829 - DNA, 25 bp, Homo sapien
ctctgcatgtatgagcgcaggagtg

SEQ ID NO: 4221830 - DNA, 25 bp, Homo sapien
tatgagcgcaggagtgtgattccca

SEQ ID NO: 4221831 - DNA, 25 bp, Homo sapien
catgtatgagcgcaggagtgtgatt

SEQ ID NO: 4221832 - DNA, 25 bp, Homo sapien
gcattgagactcttcggtccacacg

SEQ ID NO: 4221833 - DNA, 25 bp, Homo sapien
aggttaacgtacacctggaggcagg

SEQ ID NO: 4221834 - DNA, 25 bp, Homo sapien
cgcattcagcaaggtgcattgagac

SEQ ID NO: 4221835 - DNA, 25 bp, Homo sapien
tgtttccgtgatggacgcattcagc

SEQ ID NO: 4221836 - DNA, 25 bp, Homo sapien
ctaggcaagagtcacatagcaagtt

SEQ ID NO: 4221837 - DNA, 25 bp, Homo sapien
taggcaagagtcacatagcaagttc

SEQ ID NO: 4221838 - DNA, 25 bp, Homo sapien
ttcccccgcttttcttcttgatgct

SEQ ID NO: 4221839 - DNA, 25 bp, Homo sapien
tgtcttggcaattgaaaagcactag

SEQ ID NO: 4221840 - DNA, 25 bp, Homo sapien
ggccctctgtcttggcaattgaaaa

SEQ ID NO: 4221841 - DNA, 25 bp, Homo sapien
ttgaatcttcaccatggccctctgt

SEQ ID NO: 4221842 - DNA, 25 bp, Homo sapien
tataaactaccactgagaacatctg

SEQ ID NO: 4221843 - DNA, 25 bp, Homo sapien
gagaatcccctggtactagcaaggc

SEQ ID NO: 4221844 - DNA, 25 bp, Homo sapien
tcttgtagcaaggtctggttgacac

SEQ ID NO: 4221845 - DNA, 25 bp, Homo sapien
gaaaactggactttgactgccatga

SEQ ID NO: 4221846 - DNA, 25 bp, Homo sapien
caggagaagtgttgatacttcctga

SEQ ID NO: 4221847 - DNA, 25 bp, Homo sapien
catcatacaggttggccagaagagt

SEQ ID NO: 4221848 - DNA, 25 bp, Homo sapien
gaactgtagagttttgttaggataa

SEQ ID NO: 4221849 - DNA, 25 bp, Homo sapien
gaagagtgaatggaacagcacgttg

SEQ ID NO: 4221850 - DNA, 25 bp, Homo sapien
tattgatccgttggatcctctcaca

SEQ ID NO: 4221851 - DNA, 25 bp, Homo sapien
acatagtagggagaggtactgtgta

SEQ ID NO: 4221852 - DNA, 25 bp, Homo sapien
catagtagggagaggtactgtgtaa

SEQ ID NO: 4221853 - DNA, 25 bp, Homo sapien
ttatctattgatccgttggatcctc

SEQ ID NO: 4221854 - DNA, 25 bp, Homo sapien
gcattattgctctacatataagaat

SEQ ID NO: 4221855 - DNA, 25 bp, Homo sapien
tagggaactcataacagactgcacg

SEQ ID NO: 4221856 - DNA, 25 bp, Homo sapien
tcatgtttgcatatagaacagcttt

SEQ ID NO: 4221857 - DNA, 25 bp, Homo sapien
cttaaggttctttggtgaagaatga

SEQ ID NO: 4221858 - DNA, 25 bp, Homo sapien
tgaagtcctgattacatcctaggga

SEQ ID NO: 4221859 - DNA, 25 bp, Homo sapien
tcccaatagggaatgcttgtcagaa

SEQ ID NO: 4221860 - DNA, 25 bp, Homo sapien
gattgtaatggagcacctaccaaca

SEQ ID NO: 4221861 - DNA, 25 bp, Homo sapien
cacacagtagcagggtcttaaatgg

SEQ ID NO: 4221862 - DNA, 25 bp, Homo sapien
cagctctatagtctcaaatatttct

SEQ ID NO: 4221863 - DNA, 25 bp, Homo sapien
taaagtaacccatctgataatttca

SEQ ID NO: 4221864 - DNA, 25 bp, Homo sapien
gaatgcaagaagtattcaaatcttg

SEQ ID NO: 4221865 - DNA, 25 bp, Homo sapien
acccttggatcactcgaagggaagc

SEQ ID NO: 4221866 - DNA, 25 bp, Homo sapien
ggtagtaaccattcctattgctaga

SEQ ID NO: 4221867 - DNA, 25 bp, Homo sapien
gttagcattaagtggtgacctgtcc

SEQ ID NO: 4221868 - DNA, 25 bp, Homo sapien
tgtaaatattatccccacccatgtg

SEQ ID NO: 4221869 - DNA, 25 bp, Homo sapien
gacagacttcaacttgttatgagga

SEQ ID NO: 4221870 - DNA, 25 bp, Homo sapien
cagagtccagtcgagttttggtcat

SEQ ID NO: 4221871 - DNA, 25 bp, Homo sapien
agcttcagagtccagtcgagttttg

SEQ ID NO: 4221872 - DNA, 25 bp, Homo sapien
gcttcagagtccagtcgagttttgg

SEQ ID NO: 4221873 - DNA, 25 bp, Homo sapien
ttcagagtccagtcgagttttggtc

SEQ ID NO: 4221874 - DNA, 25 bp, Homo sapien
gattatttggaacaatttcaaagtc

SEQ ID NO: 4221875 - DNA, 25 bp, Homo sapien
gcaaagatagattatttggaacaat

SEQ ID NO: 4221876 - DNA, 25 bp, Homo sapien
agatagattatttggaacaatttca

SEQ ID NO: 4221877 - DNA, 25 bp, Homo sapien
agattatttggaacaatttcaaagt

SEQ ID NO: 4221878 - DNA, 25 bp, Homo sapien
gtagctgggaaattctcctttattc

SEQ ID NO: 4221879 - DNA, 25 bp, Homo sapien
tgcccatttcaaagtggatctgaac

SEQ ID NO: 4221880 - DNA, 25 bp, Homo sapien
tcaaagtggatctgaacaatatttt

SEQ ID NO: 4221881 - DNA, 25 bp, Homo sapien
catttcaaagtggatctgaacaata

SEQ ID NO: 4221882 - DNA, 25 bp, Homo sapien
cccatttcaaagtggatctgaacaa

SEQ ID NO: 4221883 - DNA, 25 bp, Homo sapien
tctgttgttgctctagagcagctat

SEQ ID NO: 4221884 - DNA, 25 bp, Homo sapien
cctgttgtttgaacatctgttgttg

SEQ ID NO: 4221885 - DNA, 25 bp, Homo sapien
gttgttgctctagagcagctatcat

SEQ ID NO: 4221886 - DNA, 25 bp, Homo sapien
ctgttgtttgaacatctgttgttgc

SEQ ID NO: 4221887 - DNA, 25 bp, Homo sapien
tttgaccttcttcacctcattttgc

SEQ ID NO: 4221888 - DNA, 25 bp, Homo sapien
tggccaacaccagtaccacatctgt

SEQ ID NO: 4221889 - DNA, 25 bp, Homo sapien
agaatctttcaatgacagctgaggg

SEQ ID NO: 4221890 - DNA, 25 bp, Homo sapien
cacatctgtgagaatctttcaatga

SEQ ID NO: 4221891 - DNA, 25 bp, Homo sapien
gaattctctccacagtgtcattctt

SEQ ID NO: 4221892 - DNA, 25 bp, Homo sapien
aattctctccacagtgtcattcttt

SEQ ID NO: 4221893 - DNA, 25 bp, Homo sapien
tccacagtgtcattctttatcataa

SEQ ID NO: 4221894 - DNA, 25 bp, Homo sapien
ctctccacagtgtcattctttatca

SEQ ID NO: 4221895 - DNA, 25 bp, Homo sapien
gctcttcatcgtgaacagaggcttc

SEQ ID NO: 4221896 - DNA, 25 bp, Homo sapien
ttcacattgtgaagaaaaagtgact

SEQ ID NO: 4221897 - DNA, 25 bp, Homo sapien
tgtaacaatattgtgaggctcttca

SEQ ID NO: 4221898 - DNA, 25 bp, Homo sapien
tattgtgaggctcttcatcgtgaac

SEQ ID NO: 4221899 - DNA, 25 bp, Homo sapien
gctatgttctgcagtcttttggaag

SEQ ID NO: 4221900 - DNA, 25 bp, Homo sapien
ggctatgttctgcagtcttttggaa

SEQ ID NO: 4221901 - DNA, 25 bp, Homo sapien
gagataaacatcagggctctttgat

SEQ ID NO: 4221902 - DNA, 25 bp, Homo sapien
ttgagataaacatcagggctctttg

SEQ ID NO: 4221903 - DNA, 25 bp, Homo sapien
cagaggaacaatgtagatgtagaaa

SEQ ID NO: 4221904 - DNA, 25 bp, Homo sapien
ctattgagataaacatcagggctct

SEQ ID NO: 4221905 - DNA, 25 bp, Homo sapien
agattgtcagtgcctccaaagccat

SEQ ID NO: 4221906 - DNA, 25 bp, Homo sapien
ctggaagtgtgtgccagaaagatcc

SEQ ID NO: 4221907 - DNA, 25 bp, Homo sapien
ggaagtgtgtgccagaaagatccat

SEQ ID NO: 4221908 - DNA, 25 bp, Homo sapien
gaagtgtgtgccagaaagatccatg

SEQ ID NO: 4221909 - DNA, 25 bp, Homo sapien
tctctggaagtgtgtgccagaaaga

SEQ ID NO: 4221910 - DNA, 25 bp, Homo sapien
gaggtgcctctcctgtaccactaaa

SEQ ID NO: 4221911 - DNA, 25 bp, Homo sapien
tatcaccctcttggtaggagcggag

SEQ ID NO: 4221912 - DNA, 25 bp, Homo sapien
ggtcatgggactttcagggttcaca

SEQ ID NO: 4221913 - DNA, 25 bp, Homo sapien
aatctgcaactaggctttccagggc

SEQ ID NO: 4221914 - DNA, 25 bp, Homo sapien
tgtggtaatggcagtggaattttaa

SEQ ID NO: 4221915 - DNA, 25 bp, Homo sapien
gtggtaatggcagtggaattttaac

SEQ ID NO: 4221916 - DNA, 25 bp, Homo sapien
ttagtctatattcttttctctgagt

SEQ ID NO: 4221917 - DNA, 25 bp, Homo sapien
ctttacattcttttagtctatattc

SEQ ID NO: 4221918 - DNA, 25 bp, Homo sapien
cattcttttagtctatattcttttc

SEQ ID NO: 4221919 - DNA, 25 bp, Homo sapien
cttttagtctatattcttttctctg

SEQ ID NO: 4221920 - DNA, 25 bp, Homo sapien
tttgcataatttgtcaaactttgta

SEQ ID NO: 4221921 - DNA, 25 bp, Homo sapien
cattttggctgtgtatcctcactta

SEQ ID NO: 4221922 - DNA, 25 bp, Homo sapien
tgtgaaattgaaactactctttcgg

SEQ ID NO: 4221923 - DNA, 25 bp, Homo sapien
cctcacttatgtactgatttctgat

SEQ ID NO: 4221924 - DNA, 25 bp, Homo sapien
caaacgtgtcatgggattaaaacca

SEQ ID NO: 4221925 - DNA, 25 bp, Homo sapien
tgtatgaagttgataatctgagcca

SEQ ID NO: 4221926 - DNA, 25 bp, Homo sapien
gagggaggacaattcctttcaaaca

SEQ ID NO: 4221927 - DNA, 25 bp, Homo sapien
acttgtattgccatgtatctgttca

SEQ ID NO: 4221928 - DNA, 25 bp, Homo sapien
gtataaccactgctagattctgcca

SEQ ID NO: 4221929 - DNA, 25 bp, Homo sapien
gaagcatcttcacaaatcaggtttg

SEQ ID NO: 4221930 - DNA, 25 bp, Homo sapien
ggaagagcttgacactgatgtttgg

SEQ ID NO: 4221931 - DNA, 25 bp, Homo sapien
gaaacgccctgctagactgatttta

SEQ ID NO: 4221932 - DNA, 25 bp, Homo sapien
cagctaaagcgaagagactggcaca

SEQ ID NO: 4221933 - DNA, 25 bp, Homo sapien
catctctgcatggtacaatttctca

SEQ ID NO: 4221934 - DNA, 25 bp, Homo sapien
tctgttccataggtgaaaacaaagg

SEQ ID NO: 4221935 - DNA, 25 bp, Homo sapien
tatatacgtagaaaaagcagccgac

SEQ ID NO: 4221936 - DNA, 25 bp, Homo sapien
taggacactttagtaccgtattgcc

SEQ ID NO: 4221937 - DNA, 25 bp, Homo sapien
tggtggccatcctgaaaaatatcac

SEQ ID NO: 4221938 - DNA, 25 bp, Homo sapien
tcactatcttcgtttccagtagaaa

SEQ ID NO: 4221939 - DNA, 25 bp, Homo sapien
tgtaattcggctttcttgaagatac

SEQ ID NO: 4221940 - DNA, 25 bp, Homo sapien
gatagatcactttggcatctgataa

SEQ ID NO: 4221941 - DNA, 25 bp, Homo sapien
tccggcagcatttagagagcaagca

SEQ ID NO: 4221942 - DNA, 25 bp, Homo sapien
catgtgtgttactccaagtggccag

SEQ ID NO: 4221943 - DNA, 25 bp, Homo sapien
taagagcaaggtgtctgaacagcgg

SEQ ID NO: 4221944 - DNA, 25 bp, Homo sapien
tagcaggtccttacttcaatccccg

SEQ ID NO: 4221945 - DNA, 25 bp, Homo sapien
ttatttctgaggcctgttcttttcc

SEQ ID NO: 4221946 - DNA, 25 bp, Homo sapien
tgttatttctgaggcctgttctttt

SEQ ID NO: 4221947 - DNA, 25 bp, Homo sapien
tatttctgaggcctgttcttttcca

SEQ ID NO: 4221948 - DNA, 25 bp, Homo sapien
atttctgaggcctgttcttttccat

SEQ ID NO: 4221949 - DNA, 25 bp, Homo sapien
cagcaagacctgcttctctgagctt

SEQ ID NO: 4221950 - DNA, 25 bp, Homo sapien
caattgaagtagctggtacttcaca

SEQ ID NO: 4221951 - DNA, 25 bp, Homo sapien
tctgaccagagatgatggatccagg

SEQ ID NO: 4221952 - DNA, 25 bp, Homo sapien
gtagctggtacttcacagcaagacc

SEQ ID NO: 4221953 - DNA, 25 bp, Homo sapien
gcagcagctgttatttacccacacc

SEQ ID NO: 4221954 - DNA, 25 bp, Homo sapien
ggaaagcttgagtctggtgccttag

SEQ ID NO: 4221955 - DNA, 25 bp, Homo sapien
ggcagcagctgttatttacccacac

SEQ ID NO: 4221956 - DNA, 25 bp, Homo sapien
gaagtagaaacaggagttcgattta

SEQ ID NO: 4221957 - DNA, 25 bp, Homo sapien
tataactgactaggaacaaacaact

SEQ ID NO: 4221958 - DNA, 25 bp, Homo sapien
tcgatttataactgactaggaacaa

SEQ ID NO: 4221959 - DNA, 25 bp, Homo sapien
ggaacaaacaactgacataactcac

SEQ ID NO: 4221960 - DNA, 25 bp, Homo sapien
tcctccactttgattccataaagtg

SEQ ID NO: 4221961 - DNA, 25 bp, Homo sapien
ctccactttgattccataaagtgag

SEQ ID NO: 4221962 - DNA, 25 bp, Homo sapien
tccactttgattccataaagtgagg

SEQ ID NO: 4221963 - DNA, 25 bp, Homo sapien
cctccactttgattccataaagtga

SEQ ID NO: 4221964 - DNA, 25 bp, Homo sapien
gctgtgcgttcttctgccgacatgg

SEQ ID NO: 4221965 - DNA, 25 bp, Homo sapien
taagttgtataccatcccgaaggcg

SEQ ID NO: 4221966 - DNA, 25 bp, Homo sapien
cagtcctttgactcacttcgtggag

SEQ ID NO: 4221967 - DNA, 25 bp, Homo sapien
tcgtggagaccttttgctatgccct

SEQ ID NO: 4221968 - DNA, 25 bp, Homo sapien
tccgcggctctaaccgcatcgggtc

SEQ ID NO: 4221969 - DNA, 25 bp, Homo sapien
cggctctaaccgcatcgggtcccag

SEQ ID NO: 4221970 - DNA, 25 bp, Homo sapien
caggctccgcggctctaaccgcatc

SEQ ID NO: 4221971 - DNA, 25 bp, Homo sapien
ggctctaaccgcatcgggtcccagc

SEQ ID NO: 4221972 - DNA, 25 bp, Homo sapien
gacctaggcactgagaccaactgaa

SEQ ID NO: 4221973 - DNA, 25 bp, Homo sapien
atatctgcaggccacattggagacc

SEQ ID NO: 4221974 - DNA, 25 bp, Homo sapien
gaagcaaaagctcagtagtcagatg

SEQ ID NO: 4221975 - DNA, 25 bp, Homo sapien
aacaatgttctggtcaactgtggac

SEQ ID NO: 4221976 - DNA, 25 bp, Homo sapien
cccctttgcctagagacaagaagat

SEQ ID NO: 4221977 - DNA, 25 bp, Homo sapien
taatgagaagtgtaccctgagcctc

SEQ ID NO: 4221978 - DNA, 25 bp, Homo sapien
tcccttaaggccttgtaatgagaag

SEQ ID NO: 4221979 - DNA, 25 bp, Homo sapien
tatggaatcattgctccctttgtgc

SEQ ID NO: 4221980 - DNA, 25 bp, Homo sapien
tggacaagcacattgcatggcaccc

SEQ ID NO: 4221981 - DNA, 25 bp, Homo sapien
aagatagggagtcttgctagcaggc

SEQ ID NO: 4221982 - DNA, 25 bp, Homo sapien
ctctttagtaaatgagcccaacttc

SEQ ID NO: 4221983 - DNA, 25 bp, Homo sapien
gaactctaatcctggtctgcacatc

SEQ ID NO: 4221984 - DNA, 25 bp, Homo sapien
tctagccaaccaaaggtggaggtca

SEQ ID NO: 4221985 - DNA, 25 bp, Homo sapien
tgaaccagtggtcaaataacgtaaa

SEQ ID NO: 4221986 - DNA, 25 bp, Homo sapien
gaggaagagaccacatgctagaaat

SEQ ID NO: 4221987 - DNA, 25 bp, Homo sapien
tttgaccaggaattctatactcagc

SEQ ID NO: 4221988 - DNA, 25 bp, Homo sapien
tagtattggcccatgcagatccaga

SEQ ID NO: 4221989 - DNA, 25 bp, Homo sapien
cctggaaacggctagacatttggga

SEQ ID NO: 4221990 - DNA, 25 bp, Homo sapien
cattctcggataggaagacaaccaa

SEQ ID NO: 4221991 - DNA, 25 bp, Homo sapien
tggataggtcacttcaaagagggct

SEQ ID NO: 4221992 - DNA, 25 bp, Homo sapien
attaaatcacgggaaaaagatctat

SEQ ID NO: 4221993 - DNA, 25 bp, Homo sapien
catttcattaaatcacgggaaaaag

SEQ ID NO: 4221994 - DNA, 25 bp, Homo sapien
atgttacatttcattaaatcacggg

SEQ ID NO: 4221995 - DNA, 25 bp, Homo sapien
ttcattaaatcacgggaaaaagatc

SEQ ID NO: 4221996 - DNA, 25 bp, Homo sapien
tatgcagaggaaccaataagaccag

SEQ ID NO: 4221997 - DNA, 25 bp, Homo sapien
gattatgtgcaactctaaagagacc

SEQ ID NO: 4221998 - DNA, 25 bp, Homo sapien
cagttggtgtactcagtgacttccc

SEQ ID NO: 4221999 - DNA, 25 bp, Homo sapien
tttaagtgcctaaagaagccagtca

SEQ ID NO: 4222000 - DNA, 25 bp, Homo sapien
gtaatttacaaatagttcaggcaag

SEQ ID NO: 4222001 - DNA, 25 bp, Homo sapien
gtcaaagattctggtctatcaaaag

SEQ ID NO: 4222002 - DNA, 25 bp, Homo sapien
catacgacaaagggctaatttctgt

SEQ ID NO: 4222003 - DNA, 25 bp, Homo sapien
gataaatctcactaaataaaagtca

SEQ ID NO: 4222004 - DNA, 25 bp, Homo sapien
tagtgctgtgtcctgtccaacaaat

SEQ ID NO: 4222005 - DNA, 25 bp, Homo sapien
tcttcatgtaagctctgctatggtt

SEQ ID NO: 4222006 - DNA, 25 bp, Homo sapien
tattctgatacacatctttaatccc

SEQ ID NO: 4222007 - DNA, 25 bp, Homo sapien
atcccttgtaaatgctgggaatttc

SEQ ID NO: 4222008 - DNA, 25 bp, Homo sapien
acctctgtttacgaggttcgagcaa

SEQ ID NO: 4222009 - DNA, 25 bp, Homo sapien
tctgtttacgaggttcgagcaattc

SEQ ID NO: 4222010 - DNA, 25 bp, Homo sapien
gcaacctctgtttacgaggttcgag

SEQ ID NO: 4222011 - DNA, 25 bp, Homo sapien
cctctgtttacgaggttcgagcaat

SEQ ID NO: 4222012 - DNA, 25 bp, Homo sapien
ttagagagactgaaagacctttaca

SEQ ID NO: 4222013 - DNA, 25 bp, Homo sapien
ggaaaatcaagtcctcatcactagt

SEQ ID NO: 4222014 - DNA, 25 bp, Homo sapien
cctttagtgaggaactgcaattcat

SEQ ID NO: 4222015 - DNA, 25 bp, Homo sapien
aaaagctggccgtgagaaaacagat

SEQ ID NO: 4222016 - DNA, 25 bp, Homo sapien
caccgttagtaaaaaggagactctg

SEQ ID NO: 4222017 - DNA, 25 bp, Homo sapien
gggccagatgtaaaaccatgttaga

SEQ ID NO: 4222018 - DNA, 25 bp, Homo sapien
tagcttggaggtttgaggtcacaga

SEQ ID NO: 4222019 - DNA, 25 bp, Homo sapien
ccactctattgaggttttgagttca

SEQ ID NO: 4222020 - DNA, 25 bp, Homo sapien
agatgtatggttgtcccaaagcaga

SEQ ID NO: 4222021 - DNA, 25 bp, Homo sapien
ttagatgtatggttgtcccaaagca

SEQ ID NO: 4222022 - DNA, 25 bp, Homo sapien
tagatgtatggttgtcccaaagcag

SEQ ID NO: 4222023 - DNA, 25 bp, Homo sapien
tgaaaaagccgaaggtcacaaagtc

SEQ ID NO: 4222024 - DNA, 25 bp, Homo sapien
tcacctgatgatggtcgtggaggca

SEQ ID NO: 4222025 - DNA, 25 bp, Homo sapien
cacggttgcctactggttcaattac

SEQ ID NO: 4222026 - DNA, 25 bp, Homo sapien
taatgtagcctcacggaggcattct

SEQ ID NO: 4222027 - DNA, 25 bp, Homo sapien
tagttccatagttcgatagtaaaac

SEQ ID NO: 4222028 - DNA, 25 bp, Homo sapien
tacgaaggtattggtttagacagaa

SEQ ID NO: 4222029 - DNA, 25 bp, Homo sapien
tcagcaatttagagcaaaggcagca

SEQ ID NO: 4222030 - DNA, 25 bp, Homo sapien
aagggacaacagttaagctttatgg

SEQ ID NO: 4222031 - DNA, 25 bp, Homo sapien
tcagaatatttcttcggaagtcctg

SEQ ID NO: 4222032 - DNA, 25 bp, Homo sapien
cacacactggcatgccgatagcaaa

SEQ ID NO: 4222033 - DNA, 25 bp, Homo sapien
ctactatgaggtgaattgaggtccc

SEQ ID NO: 4222034 - DNA, 25 bp, Homo sapien
ggaggatagacatacattgctctac

SEQ ID NO: 4222035 - DNA, 25 bp, Homo sapien
acacagtcatggttgattttcagag

SEQ ID NO: 4222036 - DNA, 25 bp, Homo sapien
cagaggatagcaacatacttcgagt

SEQ ID NO: 4222037 - DNA, 25 bp, Homo sapien
agcaattacttgttctggtacacag

SEQ ID NO: 4222038 - DNA, 25 bp, Homo sapien
tatacttgccctgatattctaaaac

SEQ ID NO: 4222039 - DNA, 25 bp, Homo sapien
tatggtgtagctgtggaaatgcgtc

SEQ ID NO: 4222040 - DNA, 25 bp, Homo sapien
tacattcacgtaggttgcacaaaga

SEQ ID NO: 4222041 - DNA, 25 bp, Homo sapien
tccattggcagttgagaataaaggc

SEQ ID NO: 4222042 - DNA, 25 bp, Homo sapien
ggcattgtaaaacagtccattggca

SEQ ID NO: 4222043 - DNA, 25 bp, Homo sapien
actctttgagtgttcacattgtcac

SEQ ID NO: 4222044 - DNA, 25 bp, Homo sapien
cattgtcacataagggttctcctcc

SEQ ID NO: 4222045 - DNA, 25 bp, Homo sapien
ggtagatacctgttcgaacatagat

SEQ ID NO: 4222046 - DNA, 25 bp, Homo sapien
ggattggaacaaggtactctttgag

SEQ ID NO: 4222047 - DNA, 25 bp, Homo sapien
atttgaaggaaactgcctcagggta

SEQ ID NO: 4222048 - DNA, 25 bp, Homo sapien
gaaagtcttgctggtctatatgtac

SEQ ID NO: 4222049 - DNA, 25 bp, Homo sapien
ccaaatgactgtatagagagaagca

SEQ ID NO: 4222050 - DNA, 25 bp, Homo sapien
caaagaaatgcaggatagtcagcta

SEQ ID NO: 4222051 - DNA, 25 bp, Homo sapien
ctttcggcctttaacagagcaaatg

SEQ ID NO: 4222052 - DNA, 25 bp, Homo sapien
caccctttcggcctttaacagagca

SEQ ID NO: 4222053 - DNA, 25 bp, Homo sapien
gaaaggcaaagtcgagcagcacgag

SEQ ID NO: 4222054 - DNA, 25 bp, Homo sapien
gagcagcacgaggaagatcaggaat

SEQ ID NO: 4222055 - DNA, 25 bp, Homo sapien
gccatttttccagatactagagtgt

SEQ ID NO: 4222056 - DNA, 25 bp, Homo sapien
gatttgatccagtaacaccaatagg

SEQ ID NO: 4222057 - DNA, 25 bp, Homo sapien
caccaatagggttcagcaaatcttc

SEQ ID NO: 4222058 - DNA, 25 bp, Homo sapien
gaggtactggccaaagattcaaagc

SEQ ID NO: 4222059 - DNA, 25 bp, Homo sapien
tcgggatacagaccaattggcatgc

SEQ ID NO: 4222060 - DNA, 25 bp, Homo sapien
caatcactgacatatctgggaactt

SEQ ID NO: 4222061 - DNA, 25 bp, Homo sapien
tgggaactttaccacactgctgaac

SEQ ID NO: 4222062 - DNA, 25 bp, Homo sapien
tcctgcgtgggaatagctaaatcct

SEQ ID NO: 4222063 - DNA, 25 bp, Homo sapien
caatcagaatgatcaactcaaggag

SEQ ID NO: 4222064 - DNA, 25 bp, Homo sapien
tgaaaattctgacggctcataactg

SEQ ID NO: 4222065 - DNA, 25 bp, Homo sapien
cataactgttgaaggaaaggccatc

SEQ ID NO: 4222066 - DNA, 25 bp, Homo sapien
catttgtatacacagctaccttcgg

SEQ ID NO: 4222067 - DNA, 25 bp, Homo sapien
cccttaattcattgtctctagctag

SEQ ID NO: 4222068 - DNA, 25 bp, Homo sapien
cattgtctctagctagtctgttact

SEQ ID NO: 4222069 - DNA, 25 bp, Homo sapien
gaggatctcgtgtagaaattgcttt

SEQ ID NO: 4222070 - DNA, 25 bp, Homo sapien
tttcagagagaggatctcgtgtaga

SEQ ID NO: 4222071 - DNA, 25 bp, Homo sapien
tctctagaattccatttaacagaca

SEQ ID NO: 4222072 - DNA, 25 bp, Homo sapien
ctctagaattccatttaacagacag

SEQ ID NO: 4222073 - DNA, 25 bp, Homo sapien
catctctagaattccatttaacaga

SEQ ID NO: 4222074 - DNA, 25 bp, Homo sapien
tcatctctagaattccatttaacag

SEQ ID NO: 4222075 - DNA, 25 bp, Homo sapien
attggaggccaatcttttaccaagc

SEQ ID NO: 4222076 - DNA, 25 bp, Homo sapien
attacagtccagaagttccatagcc

SEQ ID NO: 4222077 - DNA, 25 bp, Homo sapien
tggaggccaatcttttaccaagcaa

SEQ ID NO: 4222078 - DNA, 25 bp, Homo sapien
aaccataggatctgggtaattacag

SEQ ID NO: 4222079 - DNA, 25 bp, Homo sapien
ccaatcctttgattagtcaatgctt

SEQ ID NO: 4222080 - DNA, 25 bp, Homo sapien
aatcctttgattagtcaatgctttc

SEQ ID NO: 4222081 - DNA, 25 bp, Homo sapien
cctttgattagtcaatgctttcttc

SEQ ID NO: 4222082 - DNA, 25 bp, Homo sapien
aatctcacaagcaagttatccaaat

SEQ ID NO: 4222083 - DNA, 25 bp, Homo sapien
tcaaatacatcccacatgcacgaca

SEQ ID NO: 4222084 - DNA, 25 bp, Homo sapien
taagttaatgagcttttccattgcc

SEQ ID NO: 4222085 - DNA, 25 bp, Homo sapien
tgcacgacaataggactccaaaagc

SEQ ID NO: 4222086 - DNA, 25 bp, Homo sapien
gacttgcctattcaggtgcttcaaa

SEQ ID NO: 4222087 - DNA, 25 bp, Homo sapien
gagcatccatgaaatctggtcgcct

SEQ ID NO: 4222088 - DNA, 25 bp, Homo sapien
tcctagttgatgagcagggtttaga

SEQ ID NO: 4222089 - DNA, 25 bp, Homo sapien
ggtcgcctcatttgctcaactaaaa

SEQ ID NO: 4222090 - DNA, 25 bp, Homo sapien
agacagaaagccctgtagagcatcc

SEQ ID NO: 4222091 - DNA, 25 bp, Homo sapien
tcctatggtaacagaaattctggcc

SEQ ID NO: 4222092 - DNA, 25 bp, Homo sapien
taaaggcagtactgaacttaagata

SEQ ID NO: 4222093 - DNA, 25 bp, Homo sapien
aagatttacaactttcacctcaatt

SEQ ID NO: 4222094 - DNA, 25 bp, Homo sapien
tactcttattttgagggtaggagaa

SEQ ID NO: 4222095 - DNA, 25 bp, Homo sapien
taactctgacatgatgtctgggttc

SEQ ID NO: 4222096 - DNA, 25 bp, Homo sapien
agtaactctgacatgatgtctgggt

SEQ ID NO: 4222097 - DNA, 25 bp, Homo sapien
ggacataattcgacactcttcaagc

SEQ ID NO: 4222098 - DNA, 25 bp, Homo sapien
gcagaggacataattcgacactctt

SEQ ID NO: 4222099 - DNA, 25 bp, Homo sapien
gatcaagaccttgattttgccagat

SEQ ID NO: 4222100 - DNA, 25 bp, Homo sapien
cgaagatcaagaccttgattttgcc

SEQ ID NO: 4222101 - DNA, 25 bp, Homo sapien
tccataatacgaataatttgaagtg

SEQ ID NO: 4222102 - DNA, 25 bp, Homo sapien
tattttccataatacgaataatttg

SEQ ID NO: 4222103 - DNA, 25 bp, Homo sapien
aactgcagtgcacctttcaagccgc

SEQ ID NO: 4222104 - DNA, 25 bp, Homo sapien
tcttgtctttgagccactgatgtag

SEQ ID NO: 4222105 - DNA, 25 bp, Homo sapien
gagaatttcgcaccacctcaataag

SEQ ID NO: 4222106 - DNA, 25 bp, Homo sapien
taagtcccacacagtcaccgattga

SEQ ID NO: 4222107 - DNA, 25 bp, Homo sapien
gaataaacacctcatgagtagtatg

SEQ ID NO: 4222108 - DNA, 25 bp, Homo sapien
cacctcatgagtagtatggaaatat

SEQ ID NO: 4222109 - DNA, 25 bp, Homo sapien
gtatggaaatatagtgattcaggcc

SEQ ID NO: 4222110 - DNA, 25 bp, Homo sapien
tacaaagaataaacacctcatgagt

SEQ ID NO: 4222111 - DNA, 25 bp, Homo sapien
aacgtgtaaacaggtcaatggctgc

SEQ ID NO: 4222112 - DNA, 25 bp, Homo sapien
tgtgacgatctccaattcccaaaat

SEQ ID NO: 4222113 - DNA, 25 bp, Homo sapien
tcgtctttcaccatgatgttactat

SEQ ID NO: 4222114 - DNA, 25 bp, Homo sapien
gaaggtagctacacagtatccagca

SEQ ID NO: 4222115 - DNA, 25 bp, Homo sapien
tggcacacgttctcgtttataacca

SEQ ID NO: 4222116 - DNA, 25 bp, Homo sapien
gcacacgttctcgtttataaccaaa

SEQ ID NO: 4222117 - DNA, 25 bp, Homo sapien
aaacaaatggcacacgttctcgttt

SEQ ID NO: 4222118 - DNA, 25 bp, Homo sapien
caaatggcacacgttctcgtttata

SEQ ID NO: 4222119 - DNA, 25 bp, Homo sapien
cattcttgggctcctttactaatca

SEQ ID NO: 4222120 - DNA, 25 bp, Homo sapien
gggctcctttactaatcactattaa

SEQ ID NO: 4222121 - DNA, 25 bp, Homo sapien
tcttgggctcctttactaatcacta

SEQ ID NO: 4222122 - DNA, 25 bp, Homo sapien
gcattcttgggctcctttactaatc

SEQ ID NO: 4222123 - DNA, 25 bp, Homo sapien
cagtttggtcagtttggagcaaatg

SEQ ID NO: 4222124 - DNA, 25 bp, Homo sapien
aattagagaggctttcgtagacaaa

SEQ ID NO: 4222125 - DNA, 25 bp, Homo sapien
tgattccctttaccccactagaatg

SEQ ID NO: 4222126 - DNA, 25 bp, Homo sapien
taataagaacagtttggtcagtttg

SEQ ID NO: 4222127 - DNA, 25 bp, Homo sapien
gattggcatgctgtcgaatagctag

SEQ ID NO: 4222128 - DNA, 25 bp, Homo sapien
tttttgttgtccagccaccatgatg

SEQ ID NO: 4222129 - DNA, 25 bp, Homo sapien
caaaagattgtagttctggcattcc

SEQ ID NO: 4222130 - DNA, 25 bp, Homo sapien
gcattccagagccaagcatcattga

SEQ ID NO: 4222131 - DNA, 25 bp, Homo sapien
taagtgctatcaaaccctgtttgcg

SEQ ID NO: 4222132 - DNA, 25 bp, Homo sapien
caatcggtctttgcctgctgagagt

SEQ ID NO: 4222133 - DNA, 25 bp, Homo sapien
cttaaggcataacatgaaattgcgc

SEQ ID NO: 4222134 - DNA, 25 bp, Homo sapien
cattaaacaagcagtcaaaaaccca

SEQ ID NO: 4222135 - DNA, 25 bp, Homo sapien
gataggaactgtctaaaccacgaga

SEQ ID NO: 4222136 - DNA, 25 bp, Homo sapien
tggcacctggacatctgctaaagct

SEQ ID NO: 4222137 - DNA, 25 bp, Homo sapien
ttggcactcgggtaaaacacagttc

SEQ ID NO: 4222138 - DNA, 25 bp, Homo sapien
taaatgggatagtgcctgagcctca

SEQ ID NO: 4222139 - DNA, 25 bp, Homo sapien
ttcttcagagttggcaagcatgggc

SEQ ID NO: 4222140 - DNA, 25 bp, Homo sapien
gggcatatacagtctaatcaagtca

SEQ ID NO: 4222141 - DNA, 25 bp, Homo sapien
ttcagaaaaagttaacaggctagct

SEQ ID NO: 4222142 - DNA, 25 bp, Homo sapien
tgcagacatagaaaaaagaggaact

SEQ ID NO: 4222143 - DNA, 25 bp, Homo sapien
tggctggaccaacgattaaacttca

SEQ ID NO: 4222144 - DNA, 25 bp, Homo sapien
taactactgtatacgcacaagggac

SEQ ID NO: 4222145 - DNA, 25 bp, Homo sapien
tcaaatgccgaattcgggaacctcc

SEQ ID NO: 4222146 - DNA, 25 bp, Homo sapien
taaaagatgcctcttgactagggct

SEQ ID NO: 4222147 - DNA, 25 bp, Homo sapien
ggccaagttctccaacctctcttag

SEQ ID NO: 4222148 - DNA, 25 bp, Homo sapien
ctgaatcacactgaaaccattaact

SEQ ID NO: 4222149 - DNA, 25 bp, Homo sapien
cccaattaggtctgaggactgaatc

SEQ ID NO: 4222150 - DNA, 25 bp, Homo sapien
caacctctcttaggaacataagtta

SEQ ID NO: 4222151 - DNA, 25 bp, Homo sapien
ttctgggccatcattaaaaggacat

SEQ ID NO: 4222152 - DNA, 25 bp, Homo sapien
gataaagcttccaggtgaacatctg

SEQ ID NO: 4222153 - DNA, 25 bp, Homo sapien
gtagtgccacattccccaaggtatt

SEQ ID NO: 4222154 - DNA, 25 bp, Homo sapien
taagtgcagtcacaggccaaacttc

SEQ ID NO: 4222155 - DNA, 25 bp, Homo sapien
ttaccagtctagacagcagaggaaa

SEQ ID NO: 4222156 - DNA, 25 bp, Homo sapien
aggaaagctgctgcctagaaaattc

SEQ ID NO: 4222157 - DNA, 25 bp, Homo sapien
tgctgcctagaaaattcactaagtt

SEQ ID NO: 4222158 - DNA, 25 bp, Homo sapien
tgttctttaccagtctagacagcag

SEQ ID NO: 4222159 - DNA, 25 bp, Homo sapien
agttaaatgccctcaagtcgacagg

SEQ ID NO: 4222160 - DNA, 25 bp, Homo sapien
ggctcgtgagatccccatgaaggag

SEQ ID NO: 4222161 - DNA, 25 bp, Homo sapien
gtctcgtaacatgctgggcccgtct

SEQ ID NO: 4222162 - DNA, 25 bp, Homo sapien
tctatatccatcgacaccgaggcgt

SEQ ID NO: 4222163 - DNA, 25 bp, Homo sapien
cttcactgtcttctggcactcatgg

SEQ ID NO: 4222164 - DNA, 25 bp, Homo sapien
ttcttctggaactgtctgggtcttt

SEQ ID NO: 4222165 - DNA, 25 bp, Homo sapien
agcttcaggaagcttatttctgtcc

SEQ ID NO: 4222166 - DNA, 25 bp, Homo sapien
ctgtcttctggcactcatgggccat

SEQ ID NO: 4222167 - DNA, 25 bp, Homo sapien
ttatggtgacgatgtaggagtcccc

SEQ ID NO: 4222168 - DNA, 25 bp, Homo sapien
cttgtccaaagagcgagagggccag

SEQ ID NO: 4222169 - DNA, 25 bp, Homo sapien
tgtagtcagtttgagggatggcccc

SEQ ID NO: 4222170 - DNA, 25 bp, Homo sapien
gaacagggccatatgggacctggct

SEQ ID NO: 4222171 - DNA, 25 bp, Homo sapien
tgcaggtatgggaacacatgacaca

SEQ ID NO: 4222172 - DNA, 25 bp, Homo sapien
cacatgacacatggcctagcttggt

SEQ ID NO: 4222173 - DNA, 25 bp, Homo sapien
tatgggaacacatgacacatggcct

SEQ ID NO: 4222174 - DNA, 25 bp, Homo sapien
catggcctagcttggtattctgttt

SEQ ID NO: 4222175 - DNA, 25 bp, Homo sapien
tgtaagatgaagctcacagttgatc

SEQ ID NO: 4222176 - DNA, 25 bp, Homo sapien
ttcccttgccgaaatctctgaccaa

SEQ ID NO: 4222177 - DNA, 25 bp, Homo sapien
tgatctagcacgtttcttccacctg

SEQ ID NO: 4222178 - DNA, 25 bp, Homo sapien
gagattccacagtagttagtacatt

SEQ ID NO: 4222179 - DNA, 25 bp, Homo sapien
cctcaagggaaaggacgcgagtggt

SEQ ID NO: 4222180 - DNA, 25 bp, Homo sapien
tcttgcccaggttaggcaaggcaga

SEQ ID NO: 4222181 - DNA, 25 bp, Homo sapien
atctcagaccccgaagtgtgccagc

SEQ ID NO: 4222182 - DNA, 25 bp, Homo sapien
aaaggacgcgagtggtcttgcccag

SEQ ID NO: 4222183 - DNA, 25 bp, Homo sapien
gtccttcccgcggacgcacggcggc

SEQ ID NO: 4222184 - DNA, 25 bp, Homo sapien
ctggcctaggctccgcggccgcact

SEQ ID NO: 4222185 - DNA, 25 bp, Homo sapien
ctgtgctgggccgacccctctccct

SEQ ID NO: 4222186 - DNA, 25 bp, Homo sapien
ctagcgctcccggacgctgtgctgg

SEQ ID NO: 4222187 - DNA, 25 bp, Homo sapien
gctttgggcgccagcatcgacgcct

SEQ ID NO: 4222188 - DNA, 25 bp, Homo sapien
tgctctccgcggctacaactcgttg

SEQ ID NO: 4222189 - DNA, 25 bp, Homo sapien
cacgagtgaggcgactctcaggctg

SEQ ID NO: 4222190 - DNA, 25 bp, Homo sapien
cgtcacacgagtgaggcgactctca

SEQ ID NO: 4222191 - DNA, 25 bp, Homo sapien
ctaacaatgtaaacaatcattcctt

SEQ ID NO: 4222192 - DNA, 25 bp, Homo sapien
gacccgagatcacatcattgtcctc

SEQ ID NO: 4222193 - DNA, 25 bp, Homo sapien
ttgtggtgacccgagatcacatcat

SEQ ID NO: 4222194 - DNA, 25 bp, Homo sapien
gtggtgacccgagatcacatcattg

SEQ ID NO: 4222195 - DNA, 25 bp, Homo sapien
ggtgacccgagatcacatcattgtc

SEQ ID NO: 4222196 - DNA, 25 bp, Homo sapien
cttgcttccagttcttagctaccag

SEQ ID NO: 4222197 - DNA, 25 bp, Homo sapien
tcttagctaccagttgggagaaggg

SEQ ID NO: 4222198 - DNA, 25 bp, Homo sapien
gtggaaacagccttagtgaaagtta

SEQ ID NO: 4222199 - DNA, 25 bp, Homo sapien
tgaaagttaagtcaactaataagtg

SEQ ID NO: 4222200 - DNA, 25 bp, Homo sapien
catccataaggaaagcaagcataat

SEQ ID NO: 4222201 - DNA, 25 bp, Homo sapien
tactgaataatacaatggcaccaga

SEQ ID NO: 4222202 - DNA, 25 bp, Homo sapien
caccaaaataggactatgaatctga

SEQ ID NO: 4222203 - DNA, 25 bp, Homo sapien
cagtctcatgcctgacctatagtta

SEQ ID NO: 4222204 - DNA, 25 bp, Homo sapien
gaattacaataagtttctgtagaca

SEQ ID NO: 4222205 - DNA, 25 bp, Homo sapien
ttggtataattcttactactggagt

SEQ ID NO: 4222206 - DNA, 25 bp, Homo sapien
tcttactactggagtgaggaaaaat

SEQ ID NO: 4222207 - DNA, 25 bp, Homo sapien
agtttctgtagacagtaaaaaatgc

SEQ ID NO: 4222208 - DNA, 25 bp, Homo sapien
catgcagcaaccactatccaattaa

SEQ ID NO: 4222209 - DNA, 25 bp, Homo sapien
cctatttatgaggtcacattcaacg

SEQ ID NO: 4222210 - DNA, 25 bp, Homo sapien
attaattagtttcaatacagtccac

SEQ ID NO: 4222211 - DNA, 25 bp, Homo sapien
tatgaggtcacattcaacgttccac

SEQ ID NO: 4222212 - DNA, 25 bp, Homo sapien
aaaagaaacactgtgcctatggcac

SEQ ID NO: 4222213 - DNA, 25 bp, Homo sapien
tccagtcaggtttcaaggcagaaac

SEQ ID NO: 4222214 - DNA, 25 bp, Homo sapien
tatgtgagccacctgaaaatctatg

SEQ ID NO: 4222215 - DNA, 25 bp, Homo sapien
ttgatataaattgtgagaactggat

SEQ ID NO: 4222216 - DNA, 25 bp, Homo sapien
ataacgagaagggtgtagagtcttc

SEQ ID NO: 4222217 - DNA, 25 bp, Homo sapien
ctgaataacgagaagggtgtagagt

SEQ ID NO: 4222218 - DNA, 25 bp, Homo sapien
gaataacgagaagggtgtagagtct

SEQ ID NO: 4222219 - DNA, 25 bp, Homo sapien
taacgagaagggtgtagagtcttcc

SEQ ID NO: 4222220 - DNA, 25 bp, Homo sapien
taagtcttatctgatcacttaggag

SEQ ID NO: 4222221 - DNA, 25 bp, Homo sapien
taattttgtgggaattaatccatac

SEQ ID NO: 4222222 - DNA, 25 bp, Homo sapien
gagaaaatggatgagaatataattt

SEQ ID NO: 4222223 - DNA, 25 bp, Homo sapien
ttttacctaaatattgacccagata

SEQ ID NO: 4222224 - DNA, 25 bp, Homo sapien
gtctcatagaacagacactgtaaca

SEQ ID NO: 4222225 - DNA, 25 bp, Homo sapien
aaattccattgaatccatctgcaat

SEQ ID NO: 4222226 - DNA, 25 bp, Homo sapien
atgatcagagaaaattccattgaat

SEQ ID NO: 4222227 - DNA, 25 bp, Homo sapien
tattttaaatctggctgtctcatag

SEQ ID NO: 4222228 - DNA, 25 bp, Homo sapien
agccccagtgtttcaaagttagcat

SEQ ID NO: 4222229 - DNA, 25 bp, Homo sapien
caggccagccccagtgtttcaaagt

SEQ ID NO: 4222230 - DNA, 25 bp, Homo sapien
ctcaggccagccccagtgtttcaaa

SEQ ID NO: 4222231 - DNA, 25 bp, Homo sapien
ggccagccccagtgtttcaaagtta

SEQ ID NO: 4222232 - DNA, 25 bp, Homo sapien
caagtcatttgacgtctcggtatca

SEQ ID NO: 4222233 - DNA, 25 bp, Homo sapien
ggactgggaaccaggtagttctgat

SEQ ID NO: 4222234 - DNA, 25 bp, Homo sapien
ctgtttctggccttgattccatctg

SEQ ID NO: 4222235 - DNA, 25 bp, Homo sapien
tagaattctaagtacaggactggga

SEQ ID NO: 4222236 - DNA, 25 bp, Homo sapien
cagtaaaggccatttctgctgggca

SEQ ID NO: 4222237 - DNA, 25 bp, Homo sapien
cagtttggtcttggagactctcaga

SEQ ID NO: 4222238 - DNA, 25 bp, Homo sapien
tacaaagtttagctggcggttcttc

SEQ ID NO: 4222239 - DNA, 25 bp, Homo sapien
tacagcaattggaacatcttcagca

SEQ ID NO: 4222240 - DNA, 25 bp, Homo sapien
tcagtacgtttatgcttcaggatca

SEQ ID NO: 4222241 - DNA, 25 bp, Homo sapien
gcttaagaggctatactgtccatgt

SEQ ID NO: 4222242 - DNA, 25 bp, Homo sapien
cactgcttgaggagaactgtacatc

SEQ ID NO: 4222243 - DNA, 25 bp, Homo sapien
gaaactttccttgcatactcgacac

SEQ ID NO: 4222244 - DNA, 25 bp, Homo sapien
gaagtctactccgaaaaccacatac

SEQ ID NO: 4222245 - DNA, 25 bp, Homo sapien
taacatttgtgtgaagtctactccg

SEQ ID NO: 4222246 - DNA, 25 bp, Homo sapien
gcctgttaacatttgtgtgaagtct

SEQ ID NO: 4222247 - DNA, 25 bp, Homo sapien
ttgtatgttcaatagcaacatgcct

SEQ ID NO: 4222248 - DNA, 25 bp, Homo sapien
catttatgaggcaagtcagctgaat

SEQ ID NO: 4222249 - DNA, 25 bp, Homo sapien
tcaagttgtctcatggactggaagg

SEQ ID NO: 4222250 - DNA, 25 bp, Homo sapien
aaacctcatcaagcagtcactacat

SEQ ID NO: 4222251 - DNA, 25 bp, Homo sapien
ctggaaggtgacttattaattccct

SEQ ID NO: 4222252 - DNA, 25 bp, Homo sapien
taacattctgtaagttaaagagaat

SEQ ID NO: 4222253 - DNA, 25 bp, Homo sapien
tattattttaaactaacattctgta

SEQ ID NO: 4222254 - DNA, 25 bp, Homo sapien
aactaacattctgtaagttaaagag

SEQ ID NO: 4222255 - DNA, 25 bp, Homo sapien
acattctgtaagttaaagagaataa

SEQ ID NO: 4222256 - DNA, 25 bp, Homo sapien
tattcaacaatagatagtggctcaa

SEQ ID NO: 4222257 - DNA, 25 bp, Homo sapien
tggttgaaactacaaactatcacgc

SEQ ID NO: 4222258 - DNA, 25 bp, Homo sapien
taatgggagtatccgtggacttaac

SEQ ID NO: 4222259 - DNA, 25 bp, Homo sapien
tcttcctgtaatagtggcttcctag

SEQ ID NO: 4222260 - DNA, 25 bp, Homo sapien
gtaagttatacattttcatgccagc

SEQ ID NO: 4222261 - DNA, 25 bp, Homo sapien
gaatttatggttcctcaacagaaaa

SEQ ID NO: 4222262 - DNA, 25 bp, Homo sapien
gcaagagtcaggcataatggctcat

SEQ ID NO: 4222263 - DNA, 25 bp, Homo sapien
tgggagactacagcccgggagctat

SEQ ID NO: 4222264 - DNA, 25 bp, Homo sapien
catcatcagttaggtaatctcagac

SEQ ID NO: 4222265 - DNA, 25 bp, Homo sapien
tgctgcgaagaattctactgaagtg

SEQ ID NO: 4222266 - DNA, 25 bp, Homo sapien
gaagaggctttttagtgaacaacca

SEQ ID NO: 4222267 - DNA, 25 bp, Homo sapien
gtcactactgttcactgctgcgaag

SEQ ID NO: 4222268 - DNA, 25 bp, Homo sapien
acacctggctaacaaccctctagat

SEQ ID NO: 4222269 - DNA, 25 bp, Homo sapien
caaccctctagatctgtataagtct

SEQ ID NO: 4222270 - DNA, 25 bp, Homo sapien
aagaagattgtggccatttgatttt

SEQ ID NO: 4222271 - DNA, 25 bp, Homo sapien
tgaatattgatgttttggtaagcca

SEQ ID NO: 4222272 - DNA, 25 bp, Homo sapien
taatcacccttcataaagtatggga

SEQ ID NO: 4222273 - DNA, 25 bp, Homo sapien
caagtagtggatacactctccagac

SEQ ID NO: 4222274 - DNA, 25 bp, Homo sapien
gccactctggacataaccaagaatg

SEQ ID NO: 4222275 - DNA, 25 bp, Homo sapien
gccaaccaaaattcagaagagcatg

SEQ ID NO: 4222276 - DNA, 25 bp, Homo sapien
tgtatcctcacatggaaaacaggtg

SEQ ID NO: 4222277 - DNA, 25 bp, Homo sapien
tatttacacggtatacaagcaagtg

SEQ ID NO: 4222278 - DNA, 25 bp, Homo sapien
aacaggtgagcgctctctgggatcc

SEQ ID NO: 4222279 - DNA, 25 bp, Homo sapien
aaatcagcacaaactgatgccaggc

SEQ ID NO: 4222280 - DNA, 25 bp, Homo sapien
ggagaagcagttcacaaaatgaaag

SEQ ID NO: 4222281 - DNA, 25 bp, Homo sapien
taaagaacttcggaaaatagagcag

SEQ ID NO: 4222282 - DNA, 25 bp, Homo sapien
caaaaaagtcatccataacagacac

SEQ ID NO: 4222283 - DNA, 25 bp, Homo sapien
taagcatattagatagtctcaacct

SEQ ID NO: 4222284 - DNA, 25 bp, Homo sapien
cggagaggaggcagggggagtggca

SEQ ID NO: 4222285 - DNA, 25 bp, Homo sapien
agaggaggcagggggagtggcaaag

SEQ ID NO: 4222286 - DNA, 25 bp, Homo sapien
ccgagaagttaaaggcggagaggag

SEQ ID NO: 4222287 - DNA, 25 bp, Homo sapien
cgagaagttaaaggcggagaggagg

SEQ ID NO: 4222288 - DNA, 25 bp, Homo sapien
gcaactcggccacagatgccaaact

SEQ ID NO: 4222289 - DNA, 25 bp, Homo sapien
gcaacagcaactcggccacagatgc

SEQ ID NO: 4222290 - DNA, 25 bp, Homo sapien
cagcaactcggccacagatgccaaa

SEQ ID NO: 4222291 - DNA, 25 bp, Homo sapien
cggcaacagcaactcggccacagat

SEQ ID NO: 4222292 - DNA, 25 bp, Homo sapien
aggtcactccgagcgtcgcaaacgt

SEQ ID NO: 4222293 - DNA, 25 bp, Homo sapien
ggtccccagtcgctcgaaggtcact

SEQ ID NO: 4222294 - DNA, 25 bp, Homo sapien
gggctccgtgggctcgactcggccg

SEQ ID NO: 4222295 - DNA, 25 bp, Homo sapien
gtcacacaacgctgcatgcacgact

SEQ ID NO: 4222296 - DNA, 25 bp, Homo sapien
gaagccaaattcacacacaataagg

SEQ ID NO: 4222297 - DNA, 25 bp, Homo sapien
aacagggttagtgaggcgaagccaa

SEQ ID NO: 4222298 - DNA, 25 bp, Homo sapien
aagtttctcaacctgaagctctagg

SEQ ID NO: 4222299 - DNA, 25 bp, Homo sapien
caagagggcattaacgcttccagcc

SEQ ID NO: 4222300 - DNA, 25 bp, Homo sapien
gggagataaagttagaaaagcacca

SEQ ID NO: 4222301 - DNA, 25 bp, Homo sapien
ggagataaagttagaaaagcaccaa

SEQ ID NO: 4222302 - DNA, 25 bp, Homo sapien
gagggagataaagttagaaaagcac

SEQ ID NO: 4222303 - DNA, 25 bp, Homo sapien
tagagggagataaagttagaaaagc

SEQ ID NO: 4222304 - DNA, 25 bp, Homo sapien
caacaaaatgtgatccttcagtaac

SEQ ID NO: 4222305 - DNA, 25 bp, Homo sapien
gcacaaagtgcttcagtggagaaac

SEQ ID NO: 4222306 - DNA, 25 bp, Homo sapien
tcagtaacaaactccagtaactggt

SEQ ID NO: 4222307 - DNA, 25 bp, Homo sapien
gattgcagtaatcgccttcttagcc

SEQ ID NO: 4222308 - DNA, 25 bp, Homo sapien
aatggatcttcagatcttgagctca

SEQ ID NO: 4222309 - DNA, 25 bp, Homo sapien
ctattattgttccaacctgactgaa

SEQ ID NO: 4222310 - DNA, 25 bp, Homo sapien
gaatggatcttcagatcttgagctc

SEQ ID NO: 4222311 - DNA, 25 bp, Homo sapien
ttattgttccaacctgactgaatgg

SEQ ID NO: 4222312 - DNA, 25 bp, Homo sapien
tttatatccttgcatttctaccaga

SEQ ID NO: 4222313 - DNA, 25 bp, Homo sapien
accagatcatcttcagtggctattc

SEQ ID NO: 4222314 - DNA, 25 bp, Homo sapien
cagtggctattcgatcaagttccgg

SEQ ID NO: 4222315 - DNA, 25 bp, Homo sapien
tcaagttccggattcttatatgttg

SEQ ID NO: 4222316 - DNA, 25 bp, Homo sapien
gccaccttcatgtgtctccgagata

SEQ ID NO: 4222317 - DNA, 25 bp, Homo sapien
tccgagatagcacctcaccaatgat

SEQ ID NO: 4222318 - DNA, 25 bp, Homo sapien
tgtctccgagatagcacctcaccaa

SEQ ID NO: 4222319 - DNA, 25 bp, Homo sapien
tcatgtgtctccgagatagcacctc

SEQ ID NO: 4222320 - DNA, 25 bp, Homo sapien
tcataagataggctttatctccatc

SEQ ID NO: 4222321 - DNA, 25 bp, Homo sapien
taggaagcaattggttatatggcca

SEQ ID NO: 4222322 - DNA, 25 bp, Homo sapien
tagggagaactttatcccacaacat

SEQ ID NO: 4222323 - DNA, 25 bp, Homo sapien
cattgcattgataacagagctcttc

SEQ ID NO: 4222324 - DNA, 25 bp, Homo sapien
caaaaagacaaatcggaggccaggc

SEQ ID NO: 4222325 - DNA, 25 bp, Homo sapien
caataatgttagtctcagccgggcg

SEQ ID NO: 4222326 - DNA, 25 bp, Homo sapien
ggcacaagtctgtaaccacaacact

SEQ ID NO: 4222327 - DNA, 25 bp, Homo sapien
gatgccagggcccaatttcttaagc

SEQ ID NO: 4222328 - DNA, 25 bp, Homo sapien
tgtctactaacaccaggtcatctct

SEQ ID NO: 4222329 - DNA, 25 bp, Homo sapien
ttttggccaaaacacacgtacaaga

SEQ ID NO: 4222330 - DNA, 25 bp, Homo sapien
ctctcaagagggcacattttgcttt

SEQ ID NO: 4222331 - DNA, 25 bp, Homo sapien
tcaaatctttgtccatgtgaagggc

SEQ ID NO: 4222332 - DNA, 25 bp, Homo sapien
gttgattcagagtttgcgaccaaaa

SEQ ID NO: 4222333 - DNA, 25 bp, Homo sapien
cagagtttgcgaccaaaacaaagac

SEQ ID NO: 4222334 - DNA, 25 bp, Homo sapien
tgattcagagtttgcgaccaaaaca

SEQ ID NO: 4222335 - DNA, 25 bp, Homo sapien
ttcagagtttgcgaccaaaacaaag

SEQ ID NO: 4222336 - DNA, 25 bp, Homo sapien
gcatcccaacgattattgagaatga

SEQ ID NO: 4222337 - DNA, 25 bp, Homo sapien
gcagaggcatcccaacgattattga

SEQ ID NO: 4222338 - DNA, 25 bp, Homo sapien
gaggcatcccaacgattattgagaa

SEQ ID NO: 4222339 - DNA, 25 bp, Homo sapien
cccaacgattattgagaatgaaaat

SEQ ID NO: 4222340 - DNA, 25 bp, Homo sapien
caaagaagatacgattctgtgcttc

SEQ ID NO: 4222341 - DNA, 25 bp, Homo sapien
agctcctccaccaagaaatgcaggc

SEQ ID NO: 4222342 - DNA, 25 bp, Homo sapien
aacaaagaagatacgattctgtgct

SEQ ID NO: 4222343 - DNA, 25 bp, Homo sapien
tgaaacaaagaagatacgattctgt

SEQ ID NO: 4222344 - DNA, 25 bp, Homo sapien
cccctgtgctttttgctttctagca

SEQ ID NO: 4222345 - DNA, 25 bp, Homo sapien
cactttctggcatcccctgtgcttt

SEQ ID NO: 4222346 - DNA, 25 bp, Homo sapien
tttctagcactaagaacttcctttg

SEQ ID NO: 4222347 - DNA, 25 bp, Homo sapien
gctttttgctttctagcactaagaa

SEQ ID NO: 4222348 - DNA, 25 bp, Homo sapien
attcctgtaatcttgcatgaaatcc

SEQ ID NO: 4222349 - DNA, 25 bp, Homo sapien
tctaaagaagttcacggcacaggtc

SEQ ID NO: 4222350 - DNA, 25 bp, Homo sapien
catgtttttgcccaacctgatctca

SEQ ID NO: 4222351 - DNA, 25 bp, Homo sapien
tgtaaaagccacatgatgtgaccac

SEQ ID NO: 4222352 - DNA, 25 bp, Homo sapien
ttgggatacgcctaaagctgcagtc

SEQ ID NO: 4222353 - DNA, 25 bp, Homo sapien
tacacagaaacctgaatcatgccct

SEQ ID NO: 4222354 - DNA, 25 bp, Homo sapien
acacagtaatgtgcaatggtttgac

SEQ ID NO: 4222355 - DNA, 25 bp, Homo sapien
tagctgaatgatacaatgattcctg

SEQ ID NO: 4222356 - DNA, 25 bp, Homo sapien
tgcaaaagatataacctagtaaagt

SEQ ID NO: 4222357 - DNA, 25 bp, Homo sapien
ctgcgaggggcccaagccgtaacac

SEQ ID NO: 4222358 - DNA, 25 bp, Homo sapien
tgcgaggggcccaagccgtaacaca

SEQ ID NO: 4222359 - DNA, 25 bp, Homo sapien
gcgaggggcccaagccgtaacacat

SEQ ID NO: 4222360 - DNA, 25 bp, Homo sapien
gctgccaggtttactgaatccatta

SEQ ID NO: 4222361 - DNA, 25 bp, Homo sapien
gctctgatagtgtgctgttcgaact

SEQ ID NO: 4222362 - DNA, 25 bp, Homo sapien
gctagtatctgtttagctctgatag

SEQ ID NO: 4222363 - DNA, 25 bp, Homo sapien
tgtttttcacagtagctagtatctg

SEQ ID NO: 4222364 - DNA, 25 bp, Homo sapien
gatctaattaaacagaggccacacg

SEQ ID NO: 4222365 - DNA, 25 bp, Homo sapien
taagtccactgaaggtcctatcgag

SEQ ID NO: 4222366 - DNA, 25 bp, Homo sapien
catgtggcacctgaatcccagaaag

SEQ ID NO: 4222367 - DNA, 25 bp, Homo sapien
cattataaagcaacagacagggaca

SEQ ID NO: 4222368 - DNA, 25 bp, Homo sapien
tgtattgaaccatctattagcatga

SEQ ID NO: 4222369 - DNA, 25 bp, Homo sapien
ccatctattagcatgactcaaggaa

SEQ ID NO: 4222370 - DNA, 25 bp, Homo sapien
ttcagggtagtctgaagtcctaaag

SEQ ID NO: 4222371 - DNA, 25 bp, Homo sapien
tataaagagtaatcaacgttcaggg

SEQ ID NO: 4222372 - DNA, 25 bp, Homo sapien
tatcaatttggtcttccctctcttc

SEQ ID NO: 4222373 - DNA, 25 bp, Homo sapien
aggttcatctggtttcgaataaagt

SEQ ID NO: 4222374 - DNA, 25 bp, Homo sapien
tcatctggtttcgaataaagtccag

SEQ ID NO: 4222375 - DNA, 25 bp, Homo sapien
aaagtccagtctatcaatttggtct

SEQ ID NO: 4222376 - DNA, 25 bp, Homo sapien
tttaatcatgaagctactgttaccc

SEQ ID NO: 4222377 - DNA, 25 bp, Homo sapien
taatcatgaagctactgttacccac

SEQ ID NO: 4222378 - DNA, 25 bp, Homo sapien
ttttaatcatgaagctactgttacc

SEQ ID NO: 4222379 - DNA, 25 bp, Homo sapien
tattttaatcatgaagctactgtta

SEQ ID NO: 4222380 - DNA, 25 bp, Homo sapien
tacatctggattaggatgaaactct

SEQ ID NO: 4222381 - DNA, 25 bp, Homo sapien
atacatctggattaggatgaaactc

SEQ ID NO: 4222382 - DNA, 25 bp, Homo sapien
tatagaagcgtgtcgccatgcttgg

SEQ ID NO: 4222383 - DNA, 25 bp, Homo sapien
gaagcgtgtcgccatgcttggctat

SEQ ID NO: 4222384 - DNA, 25 bp, Homo sapien
gactatagaagcgtgtcgccatgct

SEQ ID NO: 4222385 - DNA, 25 bp, Homo sapien
tgggactatagaagcgtgtcgccat

SEQ ID NO: 4222386 - DNA, 25 bp, Homo sapien
taaggcgtttacttcatcggtgcat

SEQ ID NO: 4222387 - DNA, 25 bp, Homo sapien
ctgggtctgaagcactaaggcgttt

SEQ ID NO: 4222388 - DNA, 25 bp, Homo sapien
ttcttgctgggtctgaagcactaag

SEQ ID NO: 4222389 - DNA, 25 bp, Homo sapien
catcggtgcatcgatcagccaaatt

SEQ ID NO: 4222390 - DNA, 25 bp, Homo sapien
tttaccttcaatggaatgcctaaag

SEQ ID NO: 4222391 - DNA, 25 bp, Homo sapien
ttaccttcaatggaatgcctaaagg

SEQ ID NO: 4222392 - DNA, 25 bp, Homo sapien
tgttttaccttcaatggaatgccta

SEQ ID NO: 4222393 - DNA, 25 bp, Homo sapien
gttttaccttcaatggaatgcctaa

SEQ ID NO: 4222394 - DNA, 25 bp, Homo sapien
gctggaagtaatggcttcaaatttt

SEQ ID NO: 4222395 - DNA, 25 bp, Homo sapien
agtttatcctgtataccagctggaa

SEQ ID NO: 4222396 - DNA, 25 bp, Homo sapien
ctagggcccaaaaatcgatgtacaa

SEQ ID NO: 4222397 - DNA, 25 bp, Homo sapien
aaaaggaaatacaatatcctcttga

SEQ ID NO: 4222398 - DNA, 25 bp, Homo sapien
caacaataatgatgcccatagaagt

SEQ ID NO: 4222399 - DNA, 25 bp, Homo sapien
tagatgtaacggacgccaatcctgt

SEQ ID NO: 4222400 - DNA, 25 bp, Homo sapien
ccaacaataatgatgcccatagaag

SEQ ID NO: 4222401 - DNA, 25 bp, Homo sapien
aagttctagatgtaacggacgccaa

SEQ ID NO: 4222402 - DNA, 25 bp, Homo sapien
cgtggagctaacaatcatcctcagt

SEQ ID NO: 4222403 - DNA, 25 bp, Homo sapien
ctcgtggagctaacaatcatcctca

SEQ ID NO: 4222404 - DNA, 25 bp, Homo sapien
cactcgtggagctaacaatcatcct

SEQ ID NO: 4222405 - DNA, 25 bp, Homo sapien
gcactcgtggagctaacaatcatcc

SEQ ID NO: 4222406 - DNA, 25 bp, Homo sapien
cttgttggcacaggcgagcaaaagt

SEQ ID NO: 4222407 - DNA, 25 bp, Homo sapien
gttggcacaggcgagcaaaagtggt

SEQ ID NO: 4222408 - DNA, 25 bp, Homo sapien
ttggcacaggcgagcaaaagtggta

SEQ ID NO: 4222409 - DNA, 25 bp, Homo sapien
tttcttgttgcaattagccttcagt

SEQ ID NO: 4222410 - DNA, 25 bp, Homo sapien
tcttgttgcaattagccttcagtga

SEQ ID NO: 4222411 - DNA, 25 bp, Homo sapien
agctattaggaatgaatacaaattc

SEQ ID NO: 4222412 - DNA, 25 bp, Homo sapien
tcatttaaaccttcggtgaaactgc

SEQ ID NO: 4222413 - DNA, 25 bp, Homo sapien
caggcaattttgtgtagcatgtgtc

SEQ ID NO: 4222414 - DNA, 25 bp, Homo sapien
tttgtaaacattgactactaagctg

SEQ ID NO: 4222415 - DNA, 25 bp, Homo sapien
tactaagctgttcttacacaggcaa

SEQ ID NO: 4222416 - DNA, 25 bp, Homo sapien
agacagtccctccaatttgtaaaca

SEQ ID NO: 4222417 - DNA, 25 bp, Homo sapien
caagccagtcttgcccaaatcagaa

SEQ ID NO: 4222418 - DNA, 25 bp, Homo sapien
aaaggtatatatgggatgagctgac

SEQ ID NO: 4222419 - DNA, 25 bp, Homo sapien
gaaagctacatgactaatgccaata

SEQ ID NO: 4222420 - DNA, 25 bp, Homo sapien
tacctagtattcctctttcaaaagc

SEQ ID NO: 4222421 - DNA, 25 bp, Homo sapien
cacgggatatcctaagttacctaga

SEQ ID NO: 4222422 - DNA, 25 bp, Homo sapien
tgtgtgcatatgcttcaggtcatac

SEQ ID NO: 4222423 - DNA, 25 bp, Homo sapien
tagcagatgttacagcggcaatggc

SEQ ID NO: 4222424 - DNA, 25 bp, Homo sapien
cagggcacatattcattgagtgggc

SEQ ID NO: 4222425 - DNA, 25 bp, Homo sapien
gtagaaactgcttagtaaaattctc

SEQ ID NO: 4222426 - DNA, 25 bp, Homo sapien
tagaaactgcttagtaaaattctcc

SEQ ID NO: 4222427 - DNA, 25 bp, Homo sapien
tgaaggtagaaactgcttagtaaaa

SEQ ID NO: 4222428 - DNA, 25 bp, Homo sapien
ggttccagcaatgcgatttactaaa

SEQ ID NO: 4222429 - DNA, 25 bp, Homo sapien
ccagaatctacacagggctttgcta

SEQ ID NO: 4222430 - DNA, 25 bp, Homo sapien
gccatgatggcaacgtgactgtgac

SEQ ID NO: 4222431 - DNA, 25 bp, Homo sapien
caaaaatacacataccctgagacag

SEQ ID NO: 4222432 - DNA, 25 bp, Homo sapien
tggaatcataatgggagcaaagctg

SEQ ID NO: 4222433 - DNA, 25 bp, Homo sapien
tccagcaatatcctaggcaaatgcc

SEQ ID NO: 4222434 - DNA, 25 bp, Homo sapien
taaaattgcactaggaaagcgttcc

SEQ ID NO: 4222435 - DNA, 25 bp, Homo sapien
tatcattcaaaattcagacgtctcc

SEQ ID NO: 4222436 - DNA, 25 bp, Homo sapien
tatttatggatcagaaataactgaa

SEQ ID NO: 4222437 - DNA, 25 bp, Homo sapien
tttacatatgtacagactcaatcag

SEQ ID NO: 4222438 - DNA, 25 bp, Homo sapien
atttccaccagctcaaggaagaatt

SEQ ID NO: 4222439 - DNA, 25 bp, Homo sapien
gaaagtcaacagaacctccactagg

SEQ ID NO: 4222440 - DNA, 25 bp, Homo sapien
cgttccccgggattgtgcatttcta

SEQ ID NO: 4222441 - DNA, 25 bp, Homo sapien
gaaaaatagagttgcacctgctgta

SEQ ID NO: 4222442 - DNA, 25 bp, Homo sapien
tggccaaatgtactgcgttccccgg

SEQ ID NO: 4222443 - DNA, 25 bp, Homo sapien
gaagtaatgtcgatgacccaggacc

SEQ ID NO: 4222444 - DNA, 25 bp, Homo sapien
tcatgggcttggtcataggtgcaca

SEQ ID NO: 4222445 - DNA, 25 bp, Homo sapien
actgtctgactccataggtctgggt

SEQ ID NO: 4222446 - DNA, 25 bp, Homo sapien
taaaccatagattgctgggcctcaa

SEQ ID NO: 4222447 - DNA, 25 bp, Homo sapien
gggttcagacccaaggatccacact

SEQ ID NO: 4222448 - DNA, 25 bp, Homo sapien
taaataagcgatgctgcctatggtg

SEQ ID NO: 4222449 - DNA, 25 bp, Homo sapien
cagtaatgcagtcaaaagaggtcta

SEQ ID NO: 4222450 - DNA, 25 bp, Homo sapien
catagcactacaggttgaagcagag

SEQ ID NO: 4222451 - DNA, 25 bp, Homo sapien
cccttaaacttatgagtccgtggag

SEQ ID NO: 4222452 - DNA, 25 bp, Homo sapien
cgtggtcaactgaacatgaatgtca

SEQ ID NO: 4222453 - DNA, 25 bp, Homo sapien
taaacgtgttagattaaggctctta

SEQ ID NO: 4222454 - DNA, 25 bp, Homo sapien
tagaatgatttgtacacactcgtgg

SEQ ID NO: 4222455 - DNA, 25 bp, Homo sapien
cctctatttgtacagtggctttatg

SEQ ID NO: 4222456 - DNA, 25 bp, Homo sapien
cattgaattccgtcttcagaggcaa

SEQ ID NO: 4222457 - DNA, 25 bp, Homo sapien
gatttgggcttcatatctcaacagc

SEQ ID NO: 4222458 - DNA, 25 bp, Homo sapien
tgtagactgaatatccaaggttcct

SEQ ID NO: 4222459 - DNA, 25 bp, Homo sapien
tagactcatatgacctcagcgattg

SEQ ID NO: 4222460 - DNA, 25 bp, Homo sapien
agaataataaagtggataaaggcaa

SEQ ID NO: 4222461 - DNA, 25 bp, Homo sapien
accaaaacagaatattgtagatggc

SEQ ID NO: 4222462 - DNA, 25 bp, Homo sapien
taaaatcagttgacaattagaataa

SEQ ID NO: 4222463 - DNA, 25 bp, Homo sapien
gcaaattaagatataggaccaaaac

SEQ ID NO: 4222464 - DNA, 25 bp, Homo sapien
taaacattgggattgtccctgcatc

SEQ ID NO: 4222465 - DNA, 25 bp, Homo sapien
acattgggattgtccctgcatctga

SEQ ID NO: 4222466 - DNA, 25 bp, Homo sapien
ttggtaaacattgggattgtccctg

SEQ ID NO: 4222467 - DNA, 25 bp, Homo sapien
catctttcagaagtttggtaaacat

SEQ ID NO: 4222468 - DNA, 25 bp, Homo sapien
gacttaaagtatttagccacaatgt

SEQ ID NO: 4222469 - DNA, 25 bp, Homo sapien
aattttcccattgccaaacatggcc

SEQ ID NO: 4222470 - DNA, 25 bp, Homo sapien
gttgtccacacttatatgcttgagg

SEQ ID NO: 4222471 - DNA, 25 bp, Homo sapien
gcctggattgaaacaattagtatcc

SEQ ID NO: 4222472 - DNA, 25 bp, Homo sapien
gttgccattgcctgctctcatctca

SEQ ID NO: 4222473 - DNA, 25 bp, Homo sapien
gatacctggttctacctagtaggga

SEQ ID NO: 4222474 - DNA, 25 bp, Homo sapien
gattgatgaacactttccagcacaa

SEQ ID NO: 4222475 - DNA, 25 bp, Homo sapien
caccatccagcttacgaaagttcgt

SEQ ID NO: 4222476 - DNA, 25 bp, Homo sapien
gcgaggcactaaaaccatttgaagc

SEQ ID NO: 4222477 - DNA, 25 bp, Homo sapien
taggctggccgttcactgaggaagc

SEQ ID NO: 4222478 - DNA, 25 bp, Homo sapien
tattcatacttaagagcgaggcact

SEQ ID NO: 4222479 - DNA, 25 bp, Homo sapien
gagggaccacaacatttagctagta

SEQ ID NO: 4222480 - DNA, 25 bp, Homo sapien
cgctaaaaggagatcgtgcaggtta

SEQ ID NO: 4222481 - DNA, 25 bp, Homo sapien
tttcaggaagcgtgaagaggttccc

SEQ ID NO: 4222482 - DNA, 25 bp, Homo sapien
tctgtagccttctcaaaaagtgggc

SEQ ID NO: 4222483 - DNA, 25 bp, Homo sapien
aaatggatatgccttcgccactggc

SEQ ID NO: 4222484 - DNA, 25 bp, Homo sapien
ggtactcagttgactacctaaagga

SEQ ID NO: 4222485 - DNA, 25 bp, Homo sapien
tagttttctcacacggctctgctga

SEQ ID NO: 4222486 - DNA, 25 bp, Homo sapien
tgtcctatgtacacaccagggtttg

SEQ ID NO: 4222487 - DNA, 25 bp, Homo sapien
ggatgtcctcagcatgcctctggag

SEQ ID NO: 4222488 - DNA, 25 bp, Homo sapien
gcttttgaagtcagtgcaacccggg

SEQ ID NO: 4222489 - DNA, 25 bp, Homo sapien
agtctttcacgggacatgtctcaga

SEQ ID NO: 4222490 - DNA, 25 bp, Homo sapien
tcatgagtaaacaagcagatcgtgg

SEQ ID NO: 4222491 - DNA, 25 bp, Homo sapien
cctgtgtgaaactagtcatgctgct

SEQ ID NO: 4222492 - DNA, 25 bp, Homo sapien
ggcagtcctcctcatgtgtattaca

SEQ ID NO: 4222493 - DNA, 25 bp, Homo sapien
tcttttgccagtcaggagtgcagtt

SEQ ID NO: 4222494 - DNA, 25 bp, Homo sapien
tagagatggatacctgccatgtagc

SEQ ID NO: 4222495 - DNA, 25 bp, Homo sapien
gacctgaactcatttggtggcacag

SEQ ID NO: 4222496 - DNA, 25 bp, Homo sapien
ccgtgaggtggaaggggcgagggca

SEQ ID NO: 4222497 - DNA, 25 bp, Homo sapien
tctgtaactgccgtgaggtggaagg

SEQ ID NO: 4222498 - DNA, 25 bp, Homo sapien
catctgtaactgccgtgaggtggaa

SEQ ID NO: 4222499 - DNA, 25 bp, Homo sapien
ttcatctgtaactgccgtgaggtgg

SEQ ID NO: 4222500 - DNA, 25 bp, Homo sapien
caaccaggatcatgctcaggtgtgg

SEQ ID NO: 4222501 - DNA, 25 bp, Homo sapien
tcaggtgtggccgtttgtcgcctga

SEQ ID NO: 4222502 - DNA, 25 bp, Homo sapien
gagtgacttgcagaactctcgccaa

SEQ ID NO: 4222503 - DNA, 25 bp, Homo sapien
ttttgttgaggacgtaggagtgact

SEQ ID NO: 4222504 - DNA, 25 bp, Homo sapien
acattatcataattattcagtttgc

SEQ ID NO: 4222505 - DNA, 25 bp, Homo sapien
tatcataattattcagtttgctgat

SEQ ID NO: 4222506 - DNA, 25 bp, Homo sapien
attatcataattattcagtttgctg

SEQ ID NO: 4222507 - DNA, 25 bp, Homo sapien
cataattattcagtttgctgattaa

SEQ ID NO: 4222508 - DNA, 25 bp, Homo sapien
tcatcaatatgtctggaagaggcag

SEQ ID NO: 4222509 - DNA, 25 bp, Homo sapien
ctcatcaatatgtctggaagaggca

SEQ ID NO: 4222510 - DNA, 25 bp, Homo sapien
ggagaaacagcattgcagatccttc

SEQ ID NO: 4222511 - DNA, 25 bp, Homo sapien
aagccatcagcatccttgtctggag

SEQ ID NO: 4222512 - DNA, 25 bp, Homo sapien
ccttgtctggagaaacagcattgca

SEQ ID NO: 4222513 - DNA, 25 bp, Homo sapien
gtctggagaaacagcattgcagatc

SEQ ID NO: 4222514 - DNA, 25 bp, Homo sapien
tagccggtaacatggaatactggtc

SEQ ID NO: 4222515 - DNA, 25 bp, Homo sapien
ggaatactggtccaaacacattcgc

SEQ ID NO: 4222516 - DNA, 25 bp, Homo sapien
gggtagccggtaacatggaatactg

SEQ ID NO: 4222517 - DNA, 25 bp, Homo sapien
tactggtccaaacacattcgccctg

SEQ ID NO: 4222518 - DNA, 25 bp, Homo sapien
ctagggttggaatgtcagttcgctt

SEQ ID NO: 4222519 - DNA, 25 bp, Homo sapien
ggttggaatgtcagttcgcttaatt

SEQ ID NO: 4222520 - DNA, 25 bp, Homo sapien
agggttggaatgtcagttcgcttaa

SEQ ID NO: 4222521 - DNA, 25 bp, Homo sapien
tggaatgtcagttcgcttaattatt

SEQ ID NO: 4222522 - DNA, 25 bp, Homo sapien
cttccagccacaaccacattcttcc

SEQ ID NO: 4222523 - DNA, 25 bp, Homo sapien
attcccatatcagtgactgctgctt

SEQ ID NO: 4222524 - DNA, 25 bp, Homo sapien
attgcaatgggcatttcaacacttt

SEQ ID NO: 4222525 - DNA, 25 bp, Homo sapien
tggtattcttcattagcattgccac

SEQ ID NO: 4222526 - DNA, 25 bp, Homo sapien
aatggtattcttcattagcattgcc

SEQ ID NO: 4222527 - DNA, 25 bp, Homo sapien
atggtattcttcattagcattgcca

SEQ ID NO: 4222528 - DNA, 25 bp, Homo sapien
tcaagtaaatctactatatagtccc

SEQ ID NO: 4222529 - DNA, 25 bp, Homo sapien
agtaaatctactatatagtccccca

SEQ ID NO: 4222530 - DNA, 25 bp, Homo sapien
caagtaaatctactatatagtcccc

SEQ ID NO: 4222531 - DNA, 25 bp, Homo sapien
ctcaaggaggtaccagggctgctcg

SEQ ID NO: 4222532 - DNA, 25 bp, Homo sapien
tcaaggaggtaccagggctgctcgg

SEQ ID NO: 4222533 - DNA, 25 bp, Homo sapien
gccaaagctgagatactgagaccca

SEQ ID NO: 4222534 - DNA, 25 bp, Homo sapien
ccaaagctgagatactgagacccat

SEQ ID NO: 4222535 - DNA, 25 bp, Homo sapien
caagagcagcgatcacagcatcaga

SEQ ID NO: 4222536 - DNA, 25 bp, Homo sapien
ctggcctttgctatagtatcacaaa

SEQ ID NO: 4222537 - DNA, 25 bp, Homo sapien
tctggggctcttttggtgtcggctt

SEQ ID NO: 4222538 - DNA, 25 bp, Homo sapien
tatagtatcacaaaggcaggcaaga

SEQ ID NO: 4222539 - DNA, 25 bp, Homo sapien
ccagtgccagctttatgccccttga

SEQ ID NO: 4222540 - DNA, 25 bp, Homo sapien
ccccttgagctgcagtgtatgtact

SEQ ID NO: 4222541 - DNA, 25 bp, Homo sapien
tgccagctttatgccccttgagctg

SEQ ID NO: 4222542 - DNA, 25 bp, Homo sapien
gtccagtgccagctttatgcccctt

SEQ ID NO: 4222543 - DNA, 25 bp, Homo sapien
tgtccagccaccagcctaggagcca

SEQ ID NO: 4222544 - DNA, 25 bp, Homo sapien
taggagccagacattctttctggtt

SEQ ID NO: 4222545 - DNA, 25 bp, Homo sapien
caccagcctaggagccagacattct

SEQ ID NO: 4222546 - DNA, 25 bp, Homo sapien
gccagacattctttctggttccact

SEQ ID NO: 4222547 - DNA, 25 bp, Homo sapien
cattagctgtttaggtagagcctgt

SEQ ID NO: 4222548 - DNA, 25 bp, Homo sapien
gagcctgtgatttactgttcgtacc

SEQ ID NO: 4222549 - DNA, 25 bp, Homo sapien
gttcgtaccaacaacagtgcaccag

SEQ ID NO: 4222550 - DNA, 25 bp, Homo sapien
catgctttcactcaagggctataac

SEQ ID NO: 4222551 - DNA, 25 bp, Homo sapien
ctcaggcaacaaagcggcgtccaca

SEQ ID NO: 4222552 - DNA, 25 bp, Homo sapien
aacaaagcggcgtccacacaccccg

SEQ ID NO: 4222553 - DNA, 25 bp, Homo sapien
tcaggcaacaaagcggcgtccacac

SEQ ID NO: 4222554 - DNA, 25 bp, Homo sapien
aaagcggcgtccacacaccccggag

SEQ ID NO: 4222555 - DNA, 25 bp, Homo sapien
gagcgatagcccctgactcccttaa

SEQ ID NO: 4222556 - DNA, 25 bp, Homo sapien
ggcgcgactcctaccctaagggcta

SEQ ID NO: 4222557 - DNA, 25 bp, Homo sapien
taagggctaactggcgaagtgactg

SEQ ID NO: 4222558 - DNA, 25 bp, Homo sapien
cagtggccgcgactgcgagtctcga

SEQ ID NO: 4222559 - DNA, 25 bp, Homo sapien
ctcccccgtacacgccgccgctcat

SEQ ID NO: 4222560 - DNA, 25 bp, Homo sapien
acgccgaaaaggcgcgctctctcgt

SEQ ID NO: 4222561 - DNA, 25 bp, Homo sapien
cgaaaaggcgcgctctctcgtccgg

SEQ ID NO: 4222562 - DNA, 25 bp, Homo sapien
cccacacgccgaaaaggcgcgctct

SEQ ID NO: 4222563 - DNA, 25 bp, Homo sapien
gaaaaggcgcgctctctcgtccggc

SEQ ID NO: 4222564 - DNA, 25 bp, Homo sapien
tcacagtataggatccaatgtcaaa

SEQ ID NO: 4222565 - DNA, 25 bp, Homo sapien
agtcctcaccagcataaccagctct

SEQ ID NO: 4222566 - DNA, 25 bp, Homo sapien
ccagcataaccagctctcacagtat

SEQ ID NO: 4222567 - DNA, 25 bp, Homo sapien
ccagctctcacagtataggatccaa

SEQ ID NO: 4222568 - DNA, 25 bp, Homo sapien
ttttttagaggtgaaatggcctcca

SEQ ID NO: 4222569 - DNA, 25 bp, Homo sapien
cacgcagagcattagtatctatgta

SEQ ID NO: 4222570 - DNA, 25 bp, Homo sapien
tatctatgtagtaggtgggaccgcc

SEQ ID NO: 4222571 - DNA, 25 bp, Homo sapien
tattctccctcggaacacgcagagc

SEQ ID NO: 4222572 - DNA, 25 bp, Homo sapien
gctgactcttagctggtgtctggaa

SEQ ID NO: 4222573 - DNA, 25 bp, Homo sapien
ccctaaatggtaagggtagctcgct

SEQ ID NO: 4222574 - DNA, 25 bp, Homo sapien
cactgcaagcctgagaaaggcctgc

SEQ ID NO: 4222575 - DNA, 25 bp, Homo sapien
cccgtttactgaattatcacctgga

SEQ ID NO: 4222576 - DNA, 25 bp, Homo sapien
gatgaatatagcatcttttgagaaa

SEQ ID NO: 4222577 - DNA, 25 bp, Homo sapien
tagaatataagattagtaacttgga

SEQ ID NO: 4222578 - DNA, 25 bp, Homo sapien
aatactttagtatacagaacctact

SEQ ID NO: 4222579 - DNA, 25 bp, Homo sapien
agaaattgtttctatgacttaacaa

SEQ ID NO: 4222580 - DNA, 25 bp, Homo sapien
gtatgatccaaaatagcttggaaac

SEQ ID NO: 4222581 - DNA, 25 bp, Homo sapien
catgcattttgtaggtatgatccaa

SEQ ID NO: 4222582 - DNA, 25 bp, Homo sapien
tttgtaggtatgatccaaaatagct

SEQ ID NO: 4222583 - DNA, 25 bp, Homo sapien
ttgacatgcattttgtaggtatgat

SEQ ID NO: 4222584 - DNA, 25 bp, Homo sapien
gtgttcaaacattaactctgtcagt

SEQ ID NO: 4222585 - DNA, 25 bp, Homo sapien
gatgttgtagtgttcaaacattaac

SEQ ID NO: 4222586 - DNA, 25 bp, Homo sapien
tgtagtgttcaaacattaactctgt

SEQ ID NO: 4222587 - DNA, 25 bp, Homo sapien
gcagggatgttgtagtgttcaaaca

SEQ ID NO: 4222588 - DNA, 25 bp, Homo sapien
aataattggcgtatgtcttctccca

SEQ ID NO: 4222589 - DNA, 25 bp, Homo sapien
aacaagcaataattggcgtatgtct

SEQ ID NO: 4222590 - DNA, 25 bp, Homo sapien
gcaataattggcgtatgtcttctcc

SEQ ID NO: 4222591 - DNA, 25 bp, Homo sapien
aaacaacttcggaacaagcaataat

SEQ ID NO: 4222592 - DNA, 25 bp, Homo sapien
tatcatcagttctaacaagaaatac

SEQ ID NO: 4222593 - DNA, 25 bp, Homo sapien
ggtgtatcatcagttctaacaagaa

SEQ ID NO: 4222594 - DNA, 25 bp, Homo sapien
catcagttctaacaagaaatactaa

SEQ ID NO: 4222595 - DNA, 25 bp, Homo sapien
ctggtgtatcatcagttctaacaag

SEQ ID NO: 4222596 - DNA, 25 bp, Homo sapien
tgatgactgactaaatttgaaggag

SEQ ID NO: 4222597 - DNA, 25 bp, Homo sapien
gaaatagcttccacctaatgctgtg

SEQ ID NO: 4222598 - DNA, 25 bp, Homo sapien
tgggcagacaagaggacgtgcttca

SEQ ID NO: 4222599 - DNA, 25 bp, Homo sapien
caacagcgtaaagaatgggcagaca

SEQ ID NO: 4222600 - DNA, 25 bp, Homo sapien
taggagcatgtgggaagaccaagaa

SEQ ID NO: 4222601 - DNA, 25 bp, Homo sapien
actgcaagtacctcagcacggtctg

SEQ ID NO: 4222602 - DNA, 25 bp, Homo sapien
gagatattcaatagtaaaatctggg

SEQ ID NO: 4222603 - DNA, 25 bp, Homo sapien
ggaaacctattcctgagatattcaa

SEQ ID NO: 4222604 - DNA, 25 bp, Homo sapien
tgccttttccctgaaggttatcctg

SEQ ID NO: 4222605 - DNA, 25 bp, Homo sapien
tgaaggttatcctgtttagtgaagt

SEQ ID NO: 4222606 - DNA, 25 bp, Homo sapien
ctgccttttccctgaaggttatcct

SEQ ID NO: 4222607 - DNA, 25 bp, Homo sapien
tatcctgtttagtgaagtagatgat

SEQ ID NO: 4222608 - DNA, 25 bp, Homo sapien
ctggcactaaaattcctttaacaca

SEQ ID NO: 4222609 - DNA, 25 bp, Homo sapien
taaaattcctttaacacagtagaca

SEQ ID NO: 4222610 - DNA, 25 bp, Homo sapien
aattcctttaacacagtagacacac

SEQ ID NO: 4222611 - DNA, 25 bp, Homo sapien
cactaaaattcctttaacacagtag

SEQ ID NO: 4222612 - DNA, 25 bp, Homo sapien
ccaaaatcagcccagtagaacgacc

SEQ ID NO: 4222613 - DNA, 25 bp, Homo sapien
tggaattgcagtggtatgagtggct

SEQ ID NO: 4222614 - DNA, 25 bp, Homo sapien
catagccatcgtggactggaattgc

SEQ ID NO: 4222615 - DNA, 25 bp, Homo sapien
cttgttgaaggacatagccatcgtg

SEQ ID NO: 4222616 - DNA, 25 bp, Homo sapien
tcatatatggaggaaccaattcaat

SEQ ID NO: 4222617 - DNA, 25 bp, Homo sapien
tatggaggaaccaattcaatattca

SEQ ID NO: 4222618 - DNA, 25 bp, Homo sapien
caatcatatatggaggaaccaattc

SEQ ID NO: 4222619 - DNA, 25 bp, Homo sapien
atgcaatcatatatggaggaaccaa

SEQ ID NO: 4222620 - DNA, 25 bp, Homo sapien
agagatgctaggttaatggagttca

SEQ ID NO: 4222621 - DNA, 25 bp, Homo sapien
ccaagagatgctaggttaatggagt

SEQ ID NO: 4222622 - DNA, 25 bp, Homo sapien
taatggagttcacttcataggggtg

SEQ ID NO: 4222623 - DNA, 25 bp, Homo sapien
aatggagttcacttcataggggtgg

SEQ ID NO: 4222624 - DNA, 25 bp, Homo sapien
gtttgctggagatccttcacgaaca

SEQ ID NO: 4222625 - DNA, 25 bp, Homo sapien
gctggagatccttcacgaacagctt

SEQ ID NO: 4222626 - DNA, 25 bp, Homo sapien
tgtgccaagacctcgtaacctgagg

SEQ ID NO: 4222627 - DNA, 25 bp, Homo sapien
ttacacatataattgtgccaagacc

SEQ ID NO: 4222628 - DNA, 25 bp, Homo sapien
taccgaagcttgaaaatcctggata

SEQ ID NO: 4222629 - DNA, 25 bp, Homo sapien
cataagttgaatctgacacttgaag

SEQ ID NO: 4222630 - DNA, 25 bp, Homo sapien
gacacttgaagtaccgaagcttgaa

SEQ ID NO: 4222631 - DNA, 25 bp, Homo sapien
gaatctgacacttgaagtaccgaag

SEQ ID NO: 4222632 - DNA, 25 bp, Homo sapien
gccattggggaattcataatgaaca

SEQ ID NO: 4222633 - DNA, 25 bp, Homo sapien
ctttagccgctctgcaccaaaatca

SEQ ID NO: 4222634 - DNA, 25 bp, Homo sapien
tccttctggaatctttagccgctct

SEQ ID NO: 4222635 - DNA, 25 bp, Homo sapien
tctgcaccaaaatcacaattgtagc

SEQ ID NO: 4222636 - DNA, 25 bp, Homo sapien
cctaacattgtgtttcctgataacc

SEQ ID NO: 4222637 - DNA, 25 bp, Homo sapien
tcctaacattgtgtttcctgataac

SEQ ID NO: 4222638 - DNA, 25 bp, Homo sapien
ctaacattgtgtttcctgataaccc

SEQ ID NO: 4222639 - DNA, 25 bp, Homo sapien
cacttgtggtgacaacatgactgac

SEQ ID NO: 4222640 - DNA, 25 bp, Homo sapien
cccaacacttgtggtgacaacatga

SEQ ID NO: 4222641 - DNA, 25 bp, Homo sapien
acactgacaaccattagatcactgt

SEQ ID NO: 4222642 - DNA, 25 bp, Homo sapien
tgaacctcaaagtcaatgacactga

SEQ ID NO: 4222643 - DNA, 25 bp, Homo sapien
actgtcaacctaacaatgatttggg

SEQ ID NO: 4222644 - DNA, 25 bp, Homo sapien
tttaaaccgtaacaggagactggca

SEQ ID NO: 4222645 - DNA, 25 bp, Homo sapien
gtttcctcctgccactattacactg

SEQ ID NO: 4222646 - DNA, 25 bp, Homo sapien
aactctgtattagtgtgtttcctcc

SEQ ID NO: 4222647 - DNA, 25 bp, Homo sapien
tattcaacctgtcagtaaaactctg

SEQ ID NO: 4222648 - DNA, 25 bp, Homo sapien
ctgagacagctctctattcaacctg

SEQ ID NO: 4222649 - DNA, 25 bp, Homo sapien
caagcataggttagactaatgtaca

SEQ ID NO: 4222650 - DNA, 25 bp, Homo sapien
taaaaagctgcatactgaagtatag

SEQ ID NO: 4222651 - DNA, 25 bp, Homo sapien
ggctccctgtggttcaaacactgat

SEQ ID NO: 4222652 - DNA, 25 bp, Homo sapien
catgcgattatatgatgagaaaaca

SEQ ID NO: 4222653 - DNA, 25 bp, Homo sapien
caaagaggctagaatggagccgcca

SEQ ID NO: 4222654 - DNA, 25 bp, Homo sapien
tccgttccactgttgtattatttgc

SEQ ID NO: 4222655 - DNA, 25 bp, Homo sapien
catgagctaaacctccgttccactg

SEQ ID NO: 4222656 - DNA, 25 bp, Homo sapien
tttgcaatcaatttcaaccgcatac

SEQ ID NO: 4222657 - DNA, 25 bp, Homo sapien
tatttttgcaaagtagctcatctac

SEQ ID NO: 4222658 - DNA, 25 bp, Homo sapien
atatttttgcaaagtagctcatcta

SEQ ID NO: 4222659 - DNA, 25 bp, Homo sapien
tttgcaaagtagctcatctactaac

SEQ ID NO: 4222660 - DNA, 25 bp, Homo sapien
tttttgcaaagtagctcatctacta

SEQ ID NO: 4222661 - DNA, 25 bp, Homo sapien
ttccctccttcttcatattcttgct

SEQ ID NO: 4222662 - DNA, 25 bp, Homo sapien
ttctttctacacactgcttccctcc

SEQ ID NO: 4222663 - DNA, 25 bp, Homo sapien
ttcatattcttgcttggaaatccac

SEQ ID NO: 4222664 - DNA, 25 bp, Homo sapien
gcattttctttctacacactgcttc

SEQ ID NO: 4222665 - DNA, 25 bp, Homo sapien
ctaaagctatgaaacgtaaggtgac

SEQ ID NO: 4222666 - DNA, 25 bp, Homo sapien
aggaaggtagaagcttgggaactct

SEQ ID NO: 4222667 - DNA, 25 bp, Homo sapien
tacactaaacagagttggaaagcat

SEQ ID NO: 4222668 - DNA, 25 bp, Homo sapien
tggaaagcattttactgaaagcaaa

SEQ ID NO: 4222669 - DNA, 25 bp, Homo sapien
tataaagttcagatgagattcccac

SEQ ID NO: 4222670 - DNA, 25 bp, Homo sapien
taaatgtcacctgctaccttagagt

SEQ ID NO: 4222671 - DNA, 25 bp, Homo sapien
actggaacgtgagaaacgagcccgc

SEQ ID NO: 4222672 - DNA, 25 bp, Homo sapien
gatggtaactgccacagcaaaggca

SEQ ID NO: 4222673 - DNA, 25 bp, Homo sapien
gttgctacagcttttaaatctttgc

SEQ ID NO: 4222674 - DNA, 25 bp, Homo sapien
gaagtcagaactcttgccttgtttc

SEQ ID NO: 4222675 - DNA, 25 bp, Homo sapien
tcctaagtgttccttgcttattttc

SEQ ID NO: 4222676 - DNA, 25 bp, Homo sapien
ctttcatcgaagtcagaactcttgc

SEQ ID NO: 4222677 - DNA, 25 bp, Homo sapien
accgaagggctcctggctaaaggtg

SEQ ID NO: 4222678 - DNA, 25 bp, Homo sapien
ctatccaactcccattgctgtggct

SEQ ID NO: 4222679 - DNA, 25 bp, Homo sapien
ccattgctgtggctccagagagaga

SEQ ID NO: 4222680 - DNA, 25 bp, Homo sapien
gagacagggcagaggaaccgaaggg

SEQ ID NO: 4222681 - DNA, 25 bp, Homo sapien
tgccttatgtggaccattttctcag

SEQ ID NO: 4222682 - DNA, 25 bp, Homo sapien
tataccttggcacctaaataaaaga

SEQ ID NO: 4222683 - DNA, 25 bp, Homo sapien
agcagtgggttataccttggcacct

SEQ ID NO: 4222684 - DNA, 25 bp, Homo sapien
aaagatacaataggaaacgattctt

SEQ ID NO: 4222685 - DNA, 25 bp, Homo sapien
cctaaggcttcttcagactggtcaa

SEQ ID NO: 4222686 - DNA, 25 bp, Homo sapien
gattccatggatgcattagataaag

SEQ ID NO: 4222687 - DNA, 25 bp, Homo sapien
tagacctggtgcttggagaagagac

SEQ ID NO: 4222688 - DNA, 25 bp, Homo sapien
tcaagaaagagctagacctggtgct

SEQ ID NO: 4222689 - DNA, 25 bp, Homo sapien
gagattgccaatgccaagtccagag

SEQ ID NO: 4222690 - DNA, 25 bp, Homo sapien
gccaagtccagagcggttagataag

SEQ ID NO: 4222691 - DNA, 25 bp, Homo sapien
ggccaagcggcagagattgccaatg

SEQ ID NO: 4222692 - DNA, 25 bp, Homo sapien
tgccaagtccagagcggttagataa

SEQ ID NO: 4222693 - DNA, 25 bp, Homo sapien
gcacttggccccaactcgtattccc

SEQ ID NO: 4222694 - DNA, 25 bp, Homo sapien
cacttggccccaactcgtattccca

SEQ ID NO: 4222695 - DNA, 25 bp, Homo sapien
gagcagcatggacctgtcagcaact

SEQ ID NO: 4222696 - DNA, 25 bp, Homo sapien
gacctgtcagcaactaaggaacaaa

SEQ ID NO: 4222697 - DNA, 25 bp, Homo sapien
gcatggacctgtcagcaactaagga

SEQ ID NO: 4222698 - DNA, 25 bp, Homo sapien
gtaatgaagatttacacaaactttg

SEQ ID NO: 4222699 - DNA, 25 bp, Homo sapien
gagtacaccaaatgtgacatccttt

SEQ ID NO: 4222700 - DNA, 25 bp, Homo sapien
gattacttcataccacattgtcaag

SEQ ID NO: 4222701 - DNA, 25 bp, Homo sapien
agtttgttgcctaagagtacaccaa

SEQ ID NO: 4222702 - DNA, 25 bp, Homo sapien
tcctttcaccaatatagattacttc

SEQ ID NO: 4222703 - DNA, 25 bp, Homo sapien
gaaacgcgttttgccagttatgcga

SEQ ID NO: 4222704 - DNA, 25 bp, Homo sapien
tatcgttggcggaaacgcgttttgc

SEQ ID NO: 4222705 - DNA, 25 bp, Homo sapien
gccggcttgagacgccggaagtgac

SEQ ID NO: 4222706 - DNA, 25 bp, Homo sapien
cgccggaagtgacgctatcgttggc

SEQ ID NO: 4222707 - DNA, 25 bp, Homo sapien
gccaatttaccaatgaggacaaagg

SEQ ID NO: 4222708 - DNA, 25 bp, Homo sapien
gaagggaggcgggtcacggaagctg

SEQ ID NO: 4222709 - DNA, 25 bp, Homo sapien
ggtcacggaagctgagagagccaat

SEQ ID NO: 4222710 - DNA, 25 bp, Homo sapien
gatgtggccatcttaagtgagggca

SEQ ID NO: 4222711 - DNA, 25 bp, Homo sapien
ccccaaatccgaggcgagtgccaag

SEQ ID NO: 4222712 - DNA, 25 bp, Homo sapien
gcagccttcggaaagccacgagtga

SEQ ID NO: 4222713 - DNA, 25 bp, Homo sapien
gagctgccaccgcagtaaccgaaac

SEQ ID NO: 4222714 - DNA, 25 bp, Homo sapien
tgaggaagcccccaaatccgaggcg

SEQ ID NO: 4222715 - DNA, 25 bp, Homo sapien
ccaagcccacaacttgtcccggctc

SEQ ID NO: 4222716 - DNA, 25 bp, Homo sapien
ttcacgcccgttctccctaggccag

SEQ ID NO: 4222717 - DNA, 25 bp, Homo sapien
cgtctctcctgtcaagccccaagcc

SEQ ID NO: 4222718 - DNA, 25 bp, Homo sapien
tcatatagctcgtgctccgtctctc

SEQ ID NO: 4222719 - DNA, 25 bp, Homo sapien
caaaatcataaagacagcagaatgg

SEQ ID NO: 4222720 - DNA, 25 bp, Homo sapien
aatcataaagacagcagaatggtgg

SEQ ID NO: 4222721 - DNA, 25 bp, Homo sapien
agtcaaaatcataaagacagcagaa

SEQ ID NO: 4222722 - DNA, 25 bp, Homo sapien
tgagaaatagagtagtcaaaatcat

SEQ ID NO: 4222723 - DNA, 25 bp, Homo sapien
gcacgtagcctcagaaaagttatta

SEQ ID NO: 4222724 - DNA, 25 bp, Homo sapien
tttctggaaccctgaacctcctgac

SEQ ID NO: 4222725 - DNA, 25 bp, Homo sapien
ttgcttacaatgaggtgactaccag

SEQ ID NO: 4222726 - DNA, 25 bp, Homo sapien
taggcccaaggcttcaatgactaat

SEQ ID NO: 4222727 - DNA, 25 bp, Homo sapien
tggtctccactgtgtcgaacaggag

SEQ ID NO: 4222728 - DNA, 25 bp, Homo sapien
agaatctagaaggtctgatgacaaa

SEQ ID NO: 4222729 - DNA, 25 bp, Homo sapien
taacttcaaaaaacgcctgtcatag

SEQ ID NO: 4222730 - DNA, 25 bp, Homo sapien
cccatggtctccactgtgtcgaaca

SEQ ID NO: 4222731 - DNA, 25 bp, Homo sapien
ttttccctgttacatgcaaagactt

SEQ ID NO: 4222732 - DNA, 25 bp, Homo sapien
ttccctgttacatgcaaagacttta

SEQ ID NO: 4222733 - DNA, 25 bp, Homo sapien
aacaaatcagactttacagtctcag

SEQ ID NO: 4222734 - DNA, 25 bp, Homo sapien
gactttacagtctcagtatcttcta

SEQ ID NO: 4222735 - DNA, 25 bp, Homo sapien
ggtcattaaacacaacggaagggca

SEQ ID NO: 4222736 - DNA, 25 bp, Homo sapien
gattcagagctttatctaccgtggc

SEQ ID NO: 4222737 - DNA, 25 bp, Homo sapien
caagaaaagtaagggctcaaccaag

SEQ ID NO: 4222738 - DNA, 25 bp, Homo sapien
taccgtggcagatggtccagacaat

SEQ ID NO: 4222739 - DNA, 25 bp, Homo sapien
gaatcccagtcaatgcaatgtagaa

SEQ ID NO: 4222740 - DNA, 25 bp, Homo sapien
ttgctactggaatcccagtcaatgc

SEQ ID NO: 4222741 - DNA, 25 bp, Homo sapien
gaatacattcaccagagttatgaaa

SEQ ID NO: 4222742 - DNA, 25 bp, Homo sapien
aatgaatacattcaccagagttatg

SEQ ID NO: 4222743 - DNA, 25 bp, Homo sapien
cagtgttctgggacatagccttctg

SEQ ID NO: 4222744 - DNA, 25 bp, Homo sapien
tataatattcccagtgttctgggac

SEQ ID NO: 4222745 - DNA, 25 bp, Homo sapien
ggacatagccttctggaatttctgc

SEQ ID NO: 4222746 - DNA, 25 bp, Homo sapien
tgttctgggacatagccttctggaa

SEQ ID NO: 4222747 - DNA, 25 bp, Homo sapien
aaaacctgactatatcataattgct

SEQ ID NO: 4222748 - DNA, 25 bp, Homo sapien
taagacattaactagtgcgttgaca

SEQ ID NO: 4222749 - DNA, 25 bp, Homo sapien
acctgactatatcataattgctgaa

SEQ ID NO: 4222750 - DNA, 25 bp, Homo sapien
ttaagacattaactagtgcgttgac

SEQ ID NO: 4222751 - DNA, 25 bp, Homo sapien
tcatagaaattacgggcaatccatc

SEQ ID NO: 4222752 - DNA, 25 bp, Homo sapien
ttttcaggactatcatagaaattac

SEQ ID NO: 4222753 - DNA, 25 bp, Homo sapien
ttcatatatcttttcaggactatca

SEQ ID NO: 4222754 - DNA, 25 bp, Homo sapien
ttacgggcaatccatcttgatatgg

SEQ ID NO: 4222755 - DNA, 25 bp, Homo sapien
ttttcagcttcaatctgaaggacgg

SEQ ID NO: 4222756 - DNA, 25 bp, Homo sapien
cagcttcaatctgaaggacggccat

SEQ ID NO: 4222757 - DNA, 25 bp, Homo sapien
agccttttcagcttcaatctgaagg

SEQ ID NO: 4222758 - DNA, 25 bp, Homo sapien
cgtaattcagccttttcagcttcaa

SEQ ID NO: 4222759 - DNA, 25 bp, Homo sapien
aagttccttgtcaattgtctcatag

SEQ ID NO: 4222760 - DNA, 25 bp, Homo sapien
taattgtcaggagttgctttcggag

SEQ ID NO: 4222761 - DNA, 25 bp, Homo sapien
tcctctcacatgcatcaattttcgc

SEQ ID NO: 4222762 - DNA, 25 bp, Homo sapien
tgtctcatagtaataccagggtcca

SEQ ID NO: 4222763 - DNA, 25 bp, Homo sapien
gacagtaatgtcagaggctcttttg

SEQ ID NO: 4222764 - DNA, 25 bp, Homo sapien
tcaatctgaaccaacactgagagac

SEQ ID NO: 4222765 - DNA, 25 bp, Homo sapien
gagacagtaatgtcagaggctcttt

SEQ ID NO: 4222766 - DNA, 25 bp, Homo sapien
aacaaaagcctcaatctgaaccaac

SEQ ID NO: 4222767 - DNA, 25 bp, Homo sapien
tccatttgtcaggtaaataaaacac

SEQ ID NO: 4222768 - DNA, 25 bp, Homo sapien
tacagacatctacagtacaggcatt

SEQ ID NO: 4222769 - DNA, 25 bp, Homo sapien
tggaacttaaaatcctgagttgccc

SEQ ID NO: 4222770 - DNA, 25 bp, Homo sapien
gttgcccctcaataatacagacatc

SEQ ID NO: 4222771 - DNA, 25 bp, Homo sapien
ggcactcgcctttggtcctagctat

SEQ ID NO: 4222772 - DNA, 25 bp, Homo sapien
tctaagggatcccagagattgcatc

SEQ ID NO: 4222773 - DNA, 25 bp, Homo sapien
tgagtgaaagttccttgaggcctcc

SEQ ID NO: 4222774 - DNA, 25 bp, Homo sapien
gcctgaatcttaggaagcctgggtt

SEQ ID NO: 4222775 - DNA, 25 bp, Homo sapien
atatgcacttccagagtgcagctgt

SEQ ID NO: 4222776 - DNA, 25 bp, Homo sapien
gatatgcacttccagagtgcagctg

SEQ ID NO: 4222777 - DNA, 25 bp, Homo sapien
ttttaatccaatggcgagtctccgg

SEQ ID NO: 4222778 - DNA, 25 bp, Homo sapien
caccacggaggtgttttctatcccg

SEQ ID NO: 4222779 - DNA, 25 bp, Homo sapien
gactggcgacgctatttttaatcca

SEQ ID NO: 4222780 - DNA, 25 bp, Homo sapien
ttctatcccgaattgttggcttgca

SEQ ID NO: 4222781 - DNA, 25 bp, Homo sapien
tgtagaccctgtcgccggacctggg

SEQ ID NO: 4222782 - DNA, 25 bp, Homo sapien
tggggcactagcagctcgccgatgt

SEQ ID NO: 4222783 - DNA, 25 bp, Homo sapien
gaaggcgcactcgttcttgtagacc

SEQ ID NO: 4222784 - DNA, 25 bp, Homo sapien
cctgggcacgcggatcgtgggcatg

SEQ ID NO: 4222785 - DNA, 25 bp, Homo sapien
gctcactaagtgtctgccgaactgc

SEQ ID NO: 4222786 - DNA, 25 bp, Homo sapien
tcatctatctttaaacggcggcggg

SEQ ID NO: 4222787 - DNA, 25 bp, Homo sapien
gaactgcagtgttcctgagccaact

SEQ ID NO: 4222788 - DNA, 25 bp, Homo sapien
gaggacgcaaacgatctgcaacgtg

SEQ ID NO: 4222789 - DNA, 25 bp, Homo sapien
aactgcccaacactggccatacaat

SEQ ID NO: 4222790 - DNA, 25 bp, Homo sapien
gaactgcccaacactggccatacaa

SEQ ID NO: 4222791 - DNA, 25 bp, Homo sapien
ccactgggaaggtgcattacagacc

SEQ ID NO: 4222792 - DNA, 25 bp, Homo sapien
tcttgaaaagaagctccactgggaa

SEQ ID NO: 4222793 - DNA, 25 bp, Homo sapien
gaaccaaaccatggagaggtgaacc

SEQ ID NO: 4222794 - DNA, 25 bp, Homo sapien
gaggtgaacctacacgtcaaggtgg

SEQ ID NO: 4222795 - DNA, 25 bp, Homo sapien
tatataccagatgctagaccagctg

SEQ ID NO: 4222796 - DNA, 25 bp, Homo sapien
cactgagtgacggagataggattca

SEQ ID NO: 4222797 - DNA, 25 bp, Homo sapien
actctccaggaaggtcgcactcaaa

SEQ ID NO: 4222798 - DNA, 25 bp, Homo sapien
tgcagggcctgtaactccatggaat

SEQ ID NO: 4222799 - DNA, 25 bp, Homo sapien
tagaaccgctgtgcggcatgacaca

SEQ ID NO: 4222800 - DNA, 25 bp, Homo sapien
gggcagaattagcacaagagagcca

SEQ ID NO: 4222801 - DNA, 25 bp, Homo sapien
cagactctacgtaatgcaggcattc

SEQ ID NO: 4222802 - DNA, 25 bp, Homo sapien
gccaactatgaggacagactagaac

SEQ ID NO: 4222803 - DNA, 25 bp, Homo sapien
gctgcaagacttagaggctctcaca

SEQ ID NO: 4222804 - DNA, 25 bp, Homo sapien
gcctactcgccctaatcagcttttg

SEQ ID NO: 4222805 - DNA, 25 bp, Homo sapien
gagaattcacactaactgaggcttc

SEQ ID NO: 4222806 - DNA, 25 bp, Homo sapien
acagcagccccactcaagtaagcag

SEQ ID NO: 4222807 - DNA, 25 bp, Homo sapien
gggaaccgctcactaaaccactgat

SEQ ID NO: 4222808 - DNA, 25 bp, Homo sapien
gaacagagttcccatcaaagaggcc

SEQ ID NO: 4222809 - DNA, 25 bp, Homo sapien
gaagattgaatttccaggctaaccc

SEQ ID NO: 4222810 - DNA, 25 bp, Homo sapien
tgagtatgaataatggcccagaaca

SEQ ID NO: 4222811 - DNA, 25 bp, Homo sapien
aaatctatcgctatgagaaacccag

SEQ ID NO: 4222812 - DNA, 25 bp, Homo sapien
aacccaggcttccttgagtttgccg

SEQ ID NO: 4222813 - DNA, 25 bp, Homo sapien
gacagtccttgaccctaaatctgct

SEQ ID NO: 4222814 - DNA, 25 bp, Homo sapien
gagtttgccgccagtacctttagaa

SEQ ID NO: 4222815 - DNA, 25 bp, Homo sapien
tccagtttttcgaaaatgtctttca

SEQ ID NO: 4222816 - DNA, 25 bp, Homo sapien
aggtgcatgtatacactctgtccag

SEQ ID NO: 4222817 - DNA, 25 bp, Homo sapien
tatacactctgtccagtttttcgaa

SEQ ID NO: 4222818 - DNA, 25 bp, Homo sapien
tcttttcaggtgcatgtatacactc

SEQ ID NO: 4222819 - DNA, 25 bp, Homo sapien
tgaacctgatcattgagtttatgcc

SEQ ID NO: 4222820 - DNA, 25 bp, Homo sapien
gatccaaaatcgtgcacaaactatt

SEQ ID NO: 4222821 - DNA, 25 bp, Homo sapien
cagcattgaccattgagaagatcca

SEQ ID NO: 4222822 - DNA, 25 bp, Homo sapien
aacagagactgtattaggaaggcta

SEQ ID NO: 4222823 - DNA, 25 bp, Homo sapien
cttagtggcagatgtagtacagacc

SEQ ID NO: 4222824 - DNA, 25 bp, Homo sapien
gaaagatggttgtgtggcgttggtt

SEQ ID NO: 4222825 - DNA, 25 bp, Homo sapien
tagtggattaacaagatcagactgc

SEQ ID NO: 4222826 - DNA, 25 bp, Homo sapien
gaataagttaagtgagttcctgtcc

SEQ ID NO: 4222827 - DNA, 25 bp, Homo sapien
cagagatttaagtgccagtgtgcca

SEQ ID NO: 4222828 - DNA, 25 bp, Homo sapien
gaagtaagacatcctagacagagaa

SEQ ID NO: 4222829 - DNA, 25 bp, Homo sapien
cacagtgtgctccagaaagaagaag

SEQ ID NO: 4222830 - DNA, 25 bp, Homo sapien
gaagtgatttgctatgtctggagca

SEQ ID NO: 4222831 - DNA, 25 bp, Homo sapien
ctcctttttggtaacgctccaccag

SEQ ID NO: 4222832 - DNA, 25 bp, Homo sapien
ctttttggtaacgctccaccagacg

SEQ ID NO: 4222833 - DNA, 25 bp, Homo sapien
tttggtaacgctccaccagacgccc

SEQ ID NO: 4222834 - DNA, 25 bp, Homo sapien
ttttggtaacgctccaccagacgcc

SEQ ID NO: 4222835 - DNA, 25 bp, Homo sapien
caatggtttcaatgtcactgttgag

SEQ ID NO: 4222836 - DNA, 25 bp, Homo sapien
atgattcaatggtttcaatgtcact

SEQ ID NO: 4222837 - DNA, 25 bp, Homo sapien
aaagtcaattgcaggttgtaaccaa

SEQ ID NO: 4222838 - DNA, 25 bp, Homo sapien
tgcaggttgtaaccaaatgattcaa

SEQ ID NO: 4222839 - DNA, 25 bp, Homo sapien
taatatggagggaaagtgatttgac

SEQ ID NO: 4222840 - DNA, 25 bp, Homo sapien
aatgaacatcaaagtaatatggagg

SEQ ID NO: 4222841 - DNA, 25 bp, Homo sapien
tcaaagtaatatggagggaaagtga

SEQ ID NO: 4222842 - DNA, 25 bp, Homo sapien
gaacatcaaagtaatatggagggaa

SEQ ID NO: 4222843 - DNA, 25 bp, Homo sapien
gccagtctcaaataccttgcctcaa

SEQ ID NO: 4222844 - DNA, 25 bp, Homo sapien
taaattgtaagagtcagaaatacca

SEQ ID NO: 4222845 - DNA, 25 bp, Homo sapien
caaaccaaacattactaggtagcaa

SEQ ID NO: 4222846 - DNA, 25 bp, Homo sapien
gaatcaccacgcctggtttcaatgt

SEQ ID NO: 4222847 - DNA, 25 bp, Homo sapien
aaatccaaggtgatgatgaaatacc

SEQ ID NO: 4222848 - DNA, 25 bp, Homo sapien
atccaaggtgatgatgaaataccaa

SEQ ID NO: 4222849 - DNA, 25 bp, Homo sapien
gaaatccaaggtgatgatgaaatac

SEQ ID NO: 4222850 - DNA, 25 bp, Homo sapien
aatccaaggtgatgatgaaatacca

SEQ ID NO: 4222851 - DNA, 25 bp, Homo sapien
gatctgggaatataacaagtttggc

SEQ ID NO: 4222852 - DNA, 25 bp, Homo sapien
gggctggtaactcctcaatatttgg

SEQ ID NO: 4222853 - DNA, 25 bp, Homo sapien
ttcatattcataatcgtcgctattt

SEQ ID NO: 4222854 - DNA, 25 bp, Homo sapien
tatttaaatcgtcatcagtatctag

SEQ ID NO: 4222855 - DNA, 25 bp, Homo sapien
tgcgcatctagctagcagccgtgca

SEQ ID NO: 4222856 - DNA, 25 bp, Homo sapien
acacagagccatgcgcatctagcta

SEQ ID NO: 4222857 - DNA, 25 bp, Homo sapien
atctagctagcagccgtgcacactc

SEQ ID NO: 4222858 - DNA, 25 bp, Homo sapien
gagccatgcgcatctagctagcagc

SEQ ID NO: 4222859 - DNA, 25 bp, Homo sapien
tccctagtgacatggaaaccccaag

SEQ ID NO: 4222860 - DNA, 25 bp, Homo sapien
gaatgaatggtggaaaccgagtccc

SEQ ID NO: 4222861 - DNA, 25 bp, Homo sapien
cagagagagtcatgcaacgtccaga

SEQ ID NO: 4222862 - DNA, 25 bp, Homo sapien
tgtatgccctactgaacactgtgca

SEQ ID NO: 4222863 - DNA, 25 bp, Homo sapien
ctttatgggtttgggacatgccacc

SEQ ID NO: 4222864 - DNA, 25 bp, Homo sapien
taaacgttctggtttgcagtgcact

SEQ ID NO: 4222865 - DNA, 25 bp, Homo sapien
tttcacagaagatcacactggctgc

SEQ ID NO: 4222866 - DNA, 25 bp, Homo sapien
gagtagcccagtgtcatcggtcagt

SEQ ID NO: 4222867 - DNA, 25 bp, Homo sapien
gaactgcatcacaagcaattgttac

SEQ ID NO: 4222868 - DNA, 25 bp, Homo sapien
agaactgcatcacaagcaattgtta

SEQ ID NO: 4222869 - DNA, 25 bp, Homo sapien
gagaactgcatcacaagcaattgtt

SEQ ID NO: 4222870 - DNA, 25 bp, Homo sapien
ggaatcctgactccattgtccagct

SEQ ID NO: 4222871 - DNA, 25 bp, Homo sapien
tatttagatactggcaattcatttt

SEQ ID NO: 4222872 - DNA, 25 bp, Homo sapien
gtccagctgggtgaggttgttggca

SEQ ID NO: 4222873 - DNA, 25 bp, Homo sapien
aatcctgactccattgtccagctgg

SEQ ID NO: 4222874 - DNA, 25 bp, Homo sapien
gatggttcccagtttcacggctagt

SEQ ID NO: 4222875 - DNA, 25 bp, Homo sapien
tgtaatgctccagcgcatgcccgtt

SEQ ID NO: 4222876 - DNA, 25 bp, Homo sapien
gaggttttctcgcaggtcgcatctg

SEQ ID NO: 4222877 - DNA, 25 bp, Homo sapien
gagccgtcagtcagattcaaccaga

SEQ ID NO: 4222878 - DNA, 25 bp, Homo sapien
aactttatccgacagaattcctaca

SEQ ID NO: 4222879 - DNA, 25 bp, Homo sapien
tattgtccccttgcaactttatccg

SEQ ID NO: 4222880 - DNA, 25 bp, Homo sapien
gaattcctacattgcaaatctttct

SEQ ID NO: 4222881 - DNA, 25 bp, Homo sapien
cccttgcaactttatccgacagaat

SEQ ID NO: 4222882 - DNA, 25 bp, Homo sapien
cgctaagtgcttggccaaatgagga

SEQ ID NO: 4222883 - DNA, 25 bp, Homo sapien
tgaagcatatcaattccaaaatgcg

SEQ ID NO: 4222884 - DNA, 25 bp, Homo sapien
tatcaattccaaaatgcgctaagtg

SEQ ID NO: 4222885 - DNA, 25 bp, Homo sapien
caaaatgcgctaagtgcttggccaa

SEQ ID NO: 4222886 - DNA, 25 bp, Homo sapien
tgaccctcagcttgatgtcattgtc

SEQ ID NO: 4222887 - DNA, 25 bp, Homo sapien
ctcactgaccctcagcttgatgtca

SEQ ID NO: 4222888 - DNA, 25 bp, Homo sapien
cattgtcctggagcccattctctgt

SEQ ID NO: 4222889 - DNA, 25 bp, Homo sapien
tggatcacttcccactcactgaccc

SEQ ID NO: 4222890 - DNA, 25 bp, Homo sapien
cccgtgtagccaggaccatacattg

SEQ ID NO: 4222891 - DNA, 25 bp, Homo sapien
tacattggcttcagtttcgtgcccg

SEQ ID NO: 4222892 - DNA, 25 bp, Homo sapien
ttggcttcagtttcgtgcccgactc

SEQ ID NO: 4222893 - DNA, 25 bp, Homo sapien
aggttcttcagacccgtgtagccag

SEQ ID NO: 4222894 - DNA, 25 bp, Homo sapien
atgggcttcgcagcgcacactgagt

SEQ ID NO: 4222895 - DNA, 25 bp, Homo sapien
gcagcgcacactgagtggactggac

SEQ ID NO: 4222896 - DNA, 25 bp, Homo sapien
aagcaataaagatgggcttcgcagc

SEQ ID NO: 4222897 - DNA, 25 bp, Homo sapien
aataaagatgggcttcgcagcgcac

SEQ ID NO: 4222898 - DNA, 25 bp, Homo sapien
tgcccagcctgagtacggtggcaca

SEQ ID NO: 4222899 - DNA, 25 bp, Homo sapien
ctgttgcccagcctgagtacggtgg

SEQ ID NO: 4222900 - DNA, 25 bp, Homo sapien
actgcacccggccttcttattattt

SEQ ID NO: 4222901 - DNA, 25 bp, Homo sapien
gttgcccagcctgagtacggtggca

SEQ ID NO: 4222902 - DNA, 25 bp, Homo sapien
tgttggatctaaaggcgagtagtca

SEQ ID NO: 4222903 - DNA, 25 bp, Homo sapien
gaaatcttgtgttggatctaaaggc

SEQ ID NO: 4222904 - DNA, 25 bp, Homo sapien
gtgtgttgaaatcttgtgttggatc

SEQ ID NO: 4222905 - DNA, 25 bp, Homo sapien
tctaaaggcgagtagtcaaatattc

SEQ ID NO: 4222906 - DNA, 25 bp, Homo sapien
tcatcacctgttcaatgagttcaga

SEQ ID NO: 4222907 - DNA, 25 bp, Homo sapien
ttgaatactggcctgagagaaggcc

SEQ ID NO: 4222908 - DNA, 25 bp, Homo sapien
tgagttcagatttcaccggaggctt

SEQ ID NO: 4222909 - DNA, 25 bp, Homo sapien
gagaaggccatgtcctaacttagtc

SEQ ID NO: 4222910 - DNA, 25 bp, Homo sapien
gtcaacatggcaaacgctcggacac

SEQ ID NO: 4222911 - DNA, 25 bp, Homo sapien
atgtcaacatggcaaacgctcggac

SEQ ID NO: 4222912 - DNA, 25 bp, Homo sapien
caacatggcaaacgctcggacacat

SEQ ID NO: 4222913 - DNA, 25 bp, Homo sapien
acatggcaaacgctcggacacatac

SEQ ID NO: 4222914 - DNA, 25 bp, Homo sapien
tgggcttgccattcagaatgtctgt

SEQ ID NO: 4222915 - DNA, 25 bp, Homo sapien
cccaaggctgcctctatatgttctt

SEQ ID NO: 4222916 - DNA, 25 bp, Homo sapien
ctctccaccctctttacaacctact

SEQ ID NO: 4222917 - DNA, 25 bp, Homo sapien
aggctgcctctatatgttctttcca

SEQ ID NO: 4222918 - DNA, 25 bp, Homo sapien
tttctccatcagcaattgcaaaaca

SEQ ID NO: 4222919 - DNA, 25 bp, Homo sapien
tctccatcagcaattgcaaaacaga

SEQ ID NO: 4222920 - DNA, 25 bp, Homo sapien
catcagcaattgcaaaacagatcag

SEQ ID NO: 4222921 - DNA, 25 bp, Homo sapien
tccatcagcaattgcaaaacagatc

SEQ ID NO: 4222922 - DNA, 25 bp, Homo sapien
tcagttgtgcttccagcgctagcca

SEQ ID NO: 4222923 - DNA, 25 bp, Homo sapien
tagtatcagctgacacgagcatgca

SEQ ID NO: 4222924 - DNA, 25 bp, Homo sapien
tgagagacatacacacgcatcgata

SEQ ID NO: 4222925 - DNA, 25 bp, Homo sapien
taggagcttacggacaacagaggag

SEQ ID NO: 4222926 - DNA, 25 bp, Homo sapien
tgcagagctgctcaagctcacgagc

SEQ ID NO: 4222927 - DNA, 25 bp, Homo sapien
gagcccaccccatactgtttctgga

SEQ ID NO: 4222928 - DNA, 25 bp, Homo sapien
ggagcttgtagagggcttgcccctc

SEQ ID NO: 4222929 - DNA, 25 bp, Homo sapien
gaaaaatggcattgcacggcccagt

SEQ ID NO: 4222930 - DNA, 25 bp, Homo sapien
gcgcggagagatcccgttctgctgt

SEQ ID NO: 4222931 - DNA, 25 bp, Homo sapien
cgcggagagatcccgttctgctgtg

SEQ ID NO: 4222932 - DNA, 25 bp, Homo sapien
gcggagagatcccgttctgctgtgg

SEQ ID NO: 4222933 - DNA, 25 bp, Homo sapien
aattccgggtggctcttgcttacaa

SEQ ID NO: 4222934 - DNA, 25 bp, Homo sapien
ttagaggagaattccgggtggctct

SEQ ID NO: 4222935 - DNA, 25 bp, Homo sapien
tcttgcttacaaaggccttaaacat

SEQ ID NO: 4222936 - DNA, 25 bp, Homo sapien
ggagaattccgggtggctcttgctt

SEQ ID NO: 4222937 - DNA, 25 bp, Homo sapien
ctctactagattcaccaggtgcaag

SEQ ID NO: 4222938 - DNA, 25 bp, Homo sapien
tagattcaccaggtgcaagaagaat

SEQ ID NO: 4222939 - DNA, 25 bp, Homo sapien
ttcaccaggtgcaagaagaattcct

SEQ ID NO: 4222940 - DNA, 25 bp, Homo sapien
tactagattcaccaggtgcaagaag

SEQ ID NO: 4222941 - DNA, 25 bp, Homo sapien
taatccaccctctccgtgtagcgga

SEQ ID NO: 4222942 - DNA, 25 bp, Homo sapien
caggtaactgcatcaggtaatccac

SEQ ID NO: 4222943 - DNA, 25 bp, Homo sapien
aacatcgcttgggttttctgagccg

SEQ ID NO: 4222944 - DNA, 25 bp, Homo sapien
gactttccgggtctgacagcactga

SEQ ID NO: 4222945 - DNA, 25 bp, Homo sapien
aaccattctctctgatttgagggtt

SEQ ID NO: 4222946 - DNA, 25 bp, Homo sapien
gaaccagcttagactgatggaagga

SEQ ID NO: 4222947 - DNA, 25 bp, Homo sapien
catggctgcatagtggaattgctga

SEQ ID NO: 4222948 - DNA, 25 bp, Homo sapien
caagagacctctgctcgaatgtcta

SEQ ID NO: 4222949 - DNA, 25 bp, Homo sapien
gaggtggctcaaatactcatgtgcc

SEQ ID NO: 4222950 - DNA, 25 bp, Homo sapien
tgtcgccctttacagagccagatgc

SEQ ID NO: 4222951 - DNA, 25 bp, Homo sapien
tctggggctgtctttagagttgcac

SEQ ID NO: 4222952 - DNA, 25 bp, Homo sapien
ggaaatgaaaagcaccctctttgga

SEQ ID NO: 4222953 - DNA, 25 bp, Homo sapien
tgcaccaacaggtggtatcaagcca

SEQ ID NO: 4222954 - DNA, 25 bp, Homo sapien
tcaaagaccttgcaatcgctcttac

SEQ ID NO: 4222955 - DNA, 25 bp, Homo sapien
aagagcaaatcaaagaccttgcaat

SEQ ID NO: 4222956 - DNA, 25 bp, Homo sapien
tgaaagagcaaatcaaagaccttgc

SEQ ID NO: 4222957 - DNA, 25 bp, Homo sapien
gggtgaaagagcaaatcaaagacct

SEQ ID NO: 4222958 - DNA, 25 bp, Homo sapien
cgttagttcataagcgatcagttca

SEQ ID NO: 4222959 - DNA, 25 bp, Homo sapien
gcttcccttctcgttagttcataag

SEQ ID NO: 4222960 - DNA, 25 bp, Homo sapien
tctcgttagttcataagcgatcagt

SEQ ID NO: 4222961 - DNA, 25 bp, Homo sapien
ccttctcgttagttcataagcgatc

SEQ ID NO: 4222962 - DNA, 25 bp, Homo sapien
cactaaatggtatcttggcacgtac

SEQ ID NO: 4222963 - DNA, 25 bp, Homo sapien
tgaaggcaggcactaaatggtatct

SEQ ID NO: 4222964 - DNA, 25 bp, Homo sapien
ttcacacccgcagactttgcttgta

SEQ ID NO: 4222965 - DNA, 25 bp, Homo sapien
tgcttgtagggcactgctccagaaa

SEQ ID NO: 4222966 - DNA, 25 bp, Homo sapien
tcaaatcaactagggtggcagacgg

SEQ ID NO: 4222967 - DNA, 25 bp, Homo sapien
caaggactcgactgcatcaaatcaa

SEQ ID NO: 4222968 - DNA, 25 bp, Homo sapien
tatctgaacgtagcaaaactcctgg

SEQ ID NO: 4222969 - DNA, 25 bp, Homo sapien
ggttgaactgctattgaggccatgg

SEQ ID NO: 4222970 - DNA, 25 bp, Homo sapien
agtgaacttctttatctgcactacc

SEQ ID NO: 4222971 - DNA, 25 bp, Homo sapien
agggaatgaagcaaagcgagatgtt

SEQ ID NO: 4222972 - DNA, 25 bp, Homo sapien
aagtgaacttctttatctgcactac

SEQ ID NO: 4222973 - DNA, 25 bp, Homo sapien
gtgaacttctttatctgcactacca

SEQ ID NO: 4222974 - DNA, 25 bp, Homo sapien
aaatgagagagattatatccactgg

SEQ ID NO: 4222975 - DNA, 25 bp, Homo sapien
ctgcaaaatgagagagattatatcc

SEQ ID NO: 4222976 - DNA, 25 bp, Homo sapien
gagagagattatatccactgggctc

SEQ ID NO: 4222977 - DNA, 25 bp, Homo sapien
tatccactgggctctccataatcac

SEQ ID NO: 4222978 - DNA, 25 bp, Homo sapien
cggagatggttgatatcaagtaggt

SEQ ID NO: 4222979 - DNA, 25 bp, Homo sapien
gggggctgatgtctggaagttcttc

SEQ ID NO: 4222980 - DNA, 25 bp, Homo sapien
ggctgtaaccccctggctcggagat

SEQ ID NO: 4222981 - DNA, 25 bp, Homo sapien
taaccccctggctcggagatggttg

SEQ ID NO: 4222982 - DNA, 25 bp, Homo sapien
gtctatcaattggttcatcaggcga

SEQ ID NO: 4222983 - DNA, 25 bp, Homo sapien
tctatcaattggttcatcaggcgat

SEQ ID NO: 4222984 - DNA, 25 bp, Homo sapien
ggtctatcaattggttcatcaggcg

SEQ ID NO: 4222985 - DNA, 25 bp, Homo sapien
aacagtaggacattgagaaacattt

SEQ ID NO: 4222986 - DNA, 25 bp, Homo sapien
ctctataaaatgtcacctgctttgc

SEQ ID NO: 4222987 - DNA, 25 bp, Homo sapien
ctaggaagtttgatcctctataaaa

SEQ ID NO: 4222988 - DNA, 25 bp, Homo sapien
gatcctctataaaatgtcacctgct

SEQ ID NO: 4222989 - DNA, 25 bp, Homo sapien
gaagtttgatcctctataaaatgtc

SEQ ID NO: 4222990 - DNA, 25 bp, Homo sapien
ctagtggcatgagaagcaaggtaac

SEQ ID NO: 4222991 - DNA, 25 bp, Homo sapien
gcaggctcctctggcacagttaatt

SEQ ID NO: 4222992 - DNA, 25 bp, Homo sapien
tcacatgccaggatagtctagtggc

SEQ ID NO: 4222993 - DNA, 25 bp, Homo sapien
tcctagccctagttctggtcccagg

SEQ ID NO: 4222994 - DNA, 25 bp, Homo sapien
tgcttccagcgggaaacccatctcg

SEQ ID NO: 4222995 - DNA, 25 bp, Homo sapien
gtgaacaatgatccagttgaaggcc

SEQ ID NO: 4222996 - DNA, 25 bp, Homo sapien
actgatgactcatcgatgtctgatg

SEQ ID NO: 4222997 - DNA, 25 bp, Homo sapien
gaagtacacagccttgcgacatgct

SEQ ID NO: 4222998 - DNA, 25 bp, Homo sapien
cacgcctggcctaaagctgctgttt

SEQ ID NO: 4222999 - DNA, 25 bp, Homo sapien
tctagggatacatccacagggacct

SEQ ID NO: 4223000 - DNA, 25 bp, Homo sapien
tcccttgatccagaaaacagattcg

SEQ ID NO: 4223001 - DNA, 25 bp, Homo sapien
tcagcatcactgagggtcacatcag

SEQ ID NO: 4223002 - DNA, 25 bp, Homo sapien
cgttgctcgtagtgcctgaatagcc

SEQ ID NO: 4223003 - DNA, 25 bp, Homo sapien
tgatagctacgatttcctctggagg

SEQ ID NO: 4223004 - DNA, 25 bp, Homo sapien
cataaccaggcatggtcagcggctc

SEQ ID NO: 4223005 - DNA, 25 bp, Homo sapien
gaggttggttatccagtccagaagc

SEQ ID NO: 4223006 - DNA, 25 bp, Homo sapien
tccagatccatccttgactctaggt

SEQ ID NO: 4223007 - DNA, 25 bp, Homo sapien
gtttgcattggcattattctccatc

SEQ ID NO: 4223008 - DNA, 25 bp, Homo sapien
gtcttcttcaaactcagggtggcta

SEQ ID NO: 4223009 - DNA, 25 bp, Homo sapien
gactctaggtccttcgggcttggcc

SEQ ID NO: 4223010 - DNA, 25 bp, Homo sapien
gaatccgagaagattgcctttccca

SEQ ID NO: 4223011 - DNA, 25 bp, Homo sapien
agaaatgaatccgagaagattgcct

SEQ ID NO: 4223012 - DNA, 25 bp, Homo sapien
atccgagaagattgcctttcccata

SEQ ID NO: 4223013 - DNA, 25 bp, Homo sapien
aatgaatccgagaagattgcctttc

SEQ ID NO: 4223014 - DNA, 25 bp, Homo sapien
aggttgcccatgaacgtgtgagggc

SEQ ID NO: 4223015 - DNA, 25 bp, Homo sapien
gcccatgaacgtgtgagggcgcagc

SEQ ID NO: 4223016 - DNA, 25 bp, Homo sapien
cccatgaacgtgtgagggcgcagct

SEQ ID NO: 4223017 - DNA, 25 bp, Homo sapien
ttgcccatgaacgtgtgagggcgca

SEQ ID NO: 4223018 - DNA, 25 bp, Homo sapien
cttcctttttgatatggcaaatgta

SEQ ID NO: 4223019 - DNA, 25 bp, Homo sapien
tgtgactgatgaatgcaaatagctc

SEQ ID NO: 4223020 - DNA, 25 bp, Homo sapien
aatgaccactcattgtggatgttcc

SEQ ID NO: 4223021 - DNA, 25 bp, Homo sapien
ggcaaatgtaatgaccactcattgt

SEQ ID NO: 4223022 - DNA, 25 bp, Homo sapien
gaagtcactaaatcatatggcgcac

SEQ ID NO: 4223023 - DNA, 25 bp, Homo sapien
tggcgcacaacacttaaccatgatg

SEQ ID NO: 4223024 - DNA, 25 bp, Homo sapien
taaggtactatactcaagttcgttg

SEQ ID NO: 4223025 - DNA, 25 bp, Homo sapien
cagaatgctggtagggaatcacaac

SEQ ID NO: 4223026 - DNA, 25 bp, Homo sapien
aactttgtggtcattgtaaatcacc

SEQ ID NO: 4223027 - DNA, 25 bp, Homo sapien
ggcacaaactttgtggtcattgtaa

SEQ ID NO: 4223028 - DNA, 25 bp, Homo sapien
tcctgcggtaaaagtacatgtagcc

SEQ ID NO: 4223029 - DNA, 25 bp, Homo sapien
ttagcttggtatcctgcggtaaaag

SEQ ID NO: 4223030 - DNA, 25 bp, Homo sapien
catttgttgtgggtaaggccacacc

SEQ ID NO: 4223031 - DNA, 25 bp, Homo sapien
cattatttggtttctccagaggcca

SEQ ID NO: 4223032 - DNA, 25 bp, Homo sapien
tctatatgaaacacaagtgggcttt

SEQ ID NO: 4223033 - DNA, 25 bp, Homo sapien
cagaaggtgtcaactgatcgtgctc

SEQ ID NO: 4223034 - DNA, 25 bp, Homo sapien
tagaaaagtactgcaccgtgagctc

SEQ ID NO: 4223035 - DNA, 25 bp, Homo sapien
caagttaacattaggaggtgacacc

SEQ ID NO: 4223036 - DNA, 25 bp, Homo sapien
ggatcacctatgagacagggacccc

SEQ ID NO: 4223037 - DNA, 25 bp, Homo sapien
ggtccacagtcagctaggagcagca

SEQ ID NO: 4223038 - DNA, 25 bp, Homo sapien
tcactatgaattgcaggtaaggctc

SEQ ID NO: 4223039 - DNA, 25 bp, Homo sapien
ttgagtagtcatcgccacatatggc

SEQ ID NO: 4223040 - DNA, 25 bp, Homo sapien
tagagtggagtcaggatacagaccc

SEQ ID NO: 4223041 - DNA, 25 bp, Homo sapien
gatggagccaaagtacctcatggac

SEQ ID NO: 4223042 - DNA, 25 bp, Homo sapien
tgagacaagcggcacatcaagagtg

SEQ ID NO: 4223043 - DNA, 25 bp, Homo sapien
gaagagcaaaggtagcagctcccag

SEQ ID NO: 4223044 - DNA, 25 bp, Homo sapien
gtgggcacaggaacagactcagcct

SEQ ID NO: 4223045 - DNA, 25 bp, Homo sapien
taccccacaccatgtaagtctagag

SEQ ID NO: 4223046 - DNA, 25 bp, Homo sapien
caatggcagaatccgtttacttggc

SEQ ID NO: 4223047 - DNA, 25 bp, Homo sapien
caatcaatggcagaatccgtttact

SEQ ID NO: 4223048 - DNA, 25 bp, Homo sapien
aaaacaatcaatggcagaatccgtt

SEQ ID NO: 4223049 - DNA, 25 bp, Homo sapien
tcaatggcagaatccgtttacttgg

SEQ ID NO: 4223050 - DNA, 25 bp, Homo sapien
catccagcagataaagtccaaggca

SEQ ID NO: 4223051 - DNA, 25 bp, Homo sapien
gaggtaacaatgtgccaccactgat

SEQ ID NO: 4223052 - DNA, 25 bp, Homo sapien
gtgacatgacatccagcagataaag

SEQ ID NO: 4223053 - DNA, 25 bp, Homo sapien
tgtgatggctgcctggtaacgccaa

SEQ ID NO: 4223054 - DNA, 25 bp, Homo sapien
gagcaggtttagactatctttatgg

SEQ ID NO: 4223055 - DNA, 25 bp, Homo sapien
ttccctcgagttcttgcaggtctgg

SEQ ID NO: 4223056 - DNA, 25 bp, Homo sapien
tatatatgtacaaccttctgagtcc

SEQ ID NO: 4223057 - DNA, 25 bp, Homo sapien
tgaaaccattaccacacacttggag

SEQ ID NO: 4223058 - DNA, 25 bp, Homo sapien
gtcagccagtttgatttcagcgtca

SEQ ID NO: 4223059 - DNA, 25 bp, Homo sapien
gatttcagcgtcaaagcagcttcaa

SEQ ID NO: 4223060 - DNA, 25 bp, Homo sapien
agtttgatttcagcgtcaaagcagc

SEQ ID NO: 4223061 - DNA, 25 bp, Homo sapien
cagccagtttgatttcagcgtcaaa

SEQ ID NO: 4223062 - DNA, 25 bp, Homo sapien
ttaccacaagcacattctctcatgt

SEQ ID NO: 4223063 - DNA, 25 bp, Homo sapien
taccacaagcacattctctcatgtt

SEQ ID NO: 4223064 - DNA, 25 bp, Homo sapien
accacaagcacattctctcatgttc

SEQ ID NO: 4223065 - DNA, 25 bp, Homo sapien
agctacctttaatggactgagagaa

SEQ ID NO: 4223066 - DNA, 25 bp, Homo sapien
gacaagggcagagctacctttaatg

SEQ ID NO: 4223067 - DNA, 25 bp, Homo sapien
gagagaattggaggcatggaaagag

SEQ ID NO: 4223068 - DNA, 25 bp, Homo sapien
cctttaatggactgagagaattgga

SEQ ID NO: 4223069 - DNA, 25 bp, Homo sapien
cccatgccattatccagggtcccct

SEQ ID NO: 4223070 - DNA, 25 bp, Homo sapien
ctgcatgttcaattcttgctccatt

SEQ ID NO: 4223071 - DNA, 25 bp, Homo sapien
tattcactgataagtcttctagacc

SEQ ID NO: 4223072 - DNA, 25 bp, Homo sapien
gcattctggatgtgatctcatcaat

SEQ ID NO: 4223073 - DNA, 25 bp, Homo sapien
gagaaatccacgatctgcattctgg

SEQ ID NO: 4223074 - DNA, 25 bp, Homo sapien
tgtagactacctccagaccaaaaag

SEQ ID NO: 4223075 - DNA, 25 bp, Homo sapien
gcagcctaaatgcactgtccactag

SEQ ID NO: 4223076 - DNA, 25 bp, Homo sapien
tatagccagcagcctaaatgcactg

SEQ ID NO: 4223077 - DNA, 25 bp, Homo sapien
agcagcctaaatgcactgtccacta

SEQ ID NO: 4223078 - DNA, 25 bp, Homo sapien
cagcagcctaaatgcactgtccact

SEQ ID NO: 4223079 - DNA, 25 bp, Homo sapien
tcgaaataccaagggacatccaatg

SEQ ID NO: 4223080 - DNA, 25 bp, Homo sapien
tttcatggagatcgaaataccaagg

SEQ ID NO: 4223081 - DNA, 25 bp, Homo sapien
aatgggacgatgttaagtttcatgg

SEQ ID NO: 4223082 - DNA, 25 bp, Homo sapien
ctggaaaaatgggacgatgttaagt

SEQ ID NO: 4223083 - DNA, 25 bp, Homo sapien
taggaatggttaactcatgaagccc

SEQ ID NO: 4223084 - DNA, 25 bp, Homo sapien
tacgtgagctgggtgaagagattcc

SEQ ID NO: 4223085 - DNA, 25 bp, Homo sapien
ttgtgagttcaatggagcccggccc

SEQ ID NO: 4223086 - DNA, 25 bp, Homo sapien
gaagctagtctctccagtgcagtgc

SEQ ID NO: 4223087 - DNA, 25 bp, Homo sapien
cactgttatagggaaaaggctctag

SEQ ID NO: 4223088 - DNA, 25 bp, Homo sapien
tcatttatgttggattgctctttaa

SEQ ID NO: 4223089 - DNA, 25 bp, Homo sapien
aaataataagttaaagatctctcct

SEQ ID NO: 4223090 - DNA, 25 bp, Homo sapien
gacacagtcattgttgatttcactg

SEQ ID NO: 4223091 - DNA, 25 bp, Homo sapien
tgtgaaacagatccaacctttctca

SEQ ID NO: 4223092 - DNA, 25 bp, Homo sapien
catctggtggttctacagcctggta

SEQ ID NO: 4223093 - DNA, 25 bp, Homo sapien
tacagcctggtatccagccggagag

SEQ ID NO: 4223094 - DNA, 25 bp, Homo sapien
gcgtggtcgcctcttgaaacagttt

SEQ ID NO: 4223095 - DNA, 25 bp, Homo sapien
gctgaatatatattgactgtggacc

SEQ ID NO: 4223096 - DNA, 25 bp, Homo sapien
tatatattgactgtggaccataact

SEQ ID NO: 4223097 - DNA, 25 bp, Homo sapien
attgactgtggaccataacttggaa

SEQ ID NO: 4223098 - DNA, 25 bp, Homo sapien
actgtggaccataacttggaatctt

SEQ ID NO: 4223099 - DNA, 25 bp, Homo sapien
tgcaaatgaatgtctagaggcccag

SEQ ID NO: 4223100 - DNA, 25 bp, Homo sapien
gctccagatgacacagtagctgtcc

SEQ ID NO: 4223101 - DNA, 25 bp, Homo sapien
ttgtacaccaagagagaggatgctg

SEQ ID NO: 4223102 - DNA, 25 bp, Homo sapien
tgcaggctatatcaggacgatccag

SEQ ID NO: 4223103 - DNA, 25 bp, Homo sapien
caagagtcgcttaggtacatgggca

SEQ ID NO: 4223104 - DNA, 25 bp, Homo sapien
gtacatgggcaggacaaacacacat

SEQ ID NO: 4223105 - DNA, 25 bp, Homo sapien
tttcctggtaacaagagtcgcttag

SEQ ID NO: 4223106 - DNA, 25 bp, Homo sapien
ccatgactggctgtcgatttcctgg

SEQ ID NO: 4223107 - DNA, 25 bp, Homo sapien
actcagtttagtaatagttttatat

SEQ ID NO: 4223108 - DNA, 25 bp, Homo sapien
tcagtttagtaatagttttatatac

SEQ ID NO: 4223109 - DNA, 25 bp, Homo sapien
cactcagtttagtaatagttttata

SEQ ID NO: 4223110 - DNA, 25 bp, Homo sapien
ctcactcagtttagtaatagtttta

SEQ ID NO: 4223111 - DNA, 25 bp, Homo sapien
caaaatgcagcatgccccaaagtca

SEQ ID NO: 4223112 - DNA, 25 bp, Homo sapien
gaagtaatgtcatccataaatttgg

SEQ ID NO: 4223113 - DNA, 25 bp, Homo sapien
cagtttccaaaatgaagtaatgtca

SEQ ID NO: 4223114 - DNA, 25 bp, Homo sapien
gcagctgcaggtcttaaagcattta

SEQ ID NO: 4223115 - DNA, 25 bp, Homo sapien
agcttcattctcatccaccccttcc

SEQ ID NO: 4223116 - DNA, 25 bp, Homo sapien
aattaatttcagtccggaggccagt

SEQ ID NO: 4223117 - DNA, 25 bp, Homo sapien
caattaatttcagtccggaggccag

SEQ ID NO: 4223118 - DNA, 25 bp, Homo sapien
gaaagggctgtcacaattaatttca

SEQ ID NO: 4223119 - DNA, 25 bp, Homo sapien
attaatttcagtccggaggccagtt

SEQ ID NO: 4223120 - DNA, 25 bp, Homo sapien
acatcgggttcggagtggccctcct

SEQ ID NO: 4223121 - DNA, 25 bp, Homo sapien
cgcggtcccgcagtgttgtcattgc

SEQ ID NO: 4223122 - DNA, 25 bp, Homo sapien
cattgctctggcaactgcggacaca

SEQ ID NO: 4223123 - DNA, 25 bp, Homo sapien
gaaatagcagccacgaaaaggagcc

SEQ ID NO: 4223124 - DNA, 25 bp, Homo sapien
ttcaagataaaggagattccgcgcc

SEQ ID NO: 4223125 - DNA, 25 bp, Homo sapien
tcctgggaagaaaccatccgtctca

SEQ ID NO: 4223126 - DNA, 25 bp, Homo sapien
cgtctcatgcgcctgggtcgagaga

SEQ ID NO: 4223127 - DNA, 25 bp, Homo sapien
ccatgtgtgcgtcccagtgaaggca

SEQ ID NO: 4223128 - DNA, 25 bp, Homo sapien
ttcttctggcaagtttgttgagaga

SEQ ID NO: 4223129 - DNA, 25 bp, Homo sapien
tctctatcgcatatgttttttcttt

SEQ ID NO: 4223130 - DNA, 25 bp, Homo sapien
tcatctaacttctctatcgcatatg

SEQ ID NO: 4223131 - DNA, 25 bp, Homo sapien
atctaacttctctatcgcatatgtt

SEQ ID NO: 4223132 - DNA, 25 bp, Homo sapien
acttctctatcgcatatgttttttc

SEQ ID NO: 4223133 - DNA, 25 bp, Homo sapien
ccagattgtctgcaatatatataaa

SEQ ID NO: 4223134 - DNA, 25 bp, Homo sapien
ttccagattgtctgcaatatatata

SEQ ID NO: 4223135 - DNA, 25 bp, Homo sapien
ttttccagattgtctgcaatatata

SEQ ID NO: 4223136 - DNA, 25 bp, Homo sapien
tccagattgtctgcaatatatataa

SEQ ID NO: 4223137 - DNA, 25 bp, Homo sapien
tccactgacttttgcatgatgccaa

SEQ ID NO: 4223138 - DNA, 25 bp, Homo sapien
tagcctgtctgactaaagcctgcat

SEQ ID NO: 4223139 - DNA, 25 bp, Homo sapien
agctaagccgctccatatgatgcct

SEQ ID NO: 4223140 - DNA, 25 bp, Homo sapien
taaagccttttgagtgttcagccct

SEQ ID NO: 4223141 - DNA, 25 bp, Homo sapien
acaggaggtagggttaaggagagat

SEQ ID NO: 4223142 - DNA, 25 bp, Homo sapien
tccaagtttaatgcaagtttattta

SEQ ID NO: 4223143 - DNA, 25 bp, Homo sapien
ctatatttttctatagattttccaa

SEQ ID NO: 4223144 - DNA, 25 bp, Homo sapien
agattttccaagtttaatgcaagtt

SEQ ID NO: 4223145 - DNA, 25 bp, Homo sapien
ttctatagattttccaagtttaatg

SEQ ID NO: 4223146 - DNA, 25 bp, Homo sapien
tgttcctatatgatacatcccatat

SEQ ID NO: 4223147 - DNA, 25 bp, Homo sapien
aaatgttcctatatgatacatccca

SEQ ID NO: 4223148 - DNA, 25 bp, Homo sapien
tgcaaaatgttcctatatgatacat

SEQ ID NO: 4223149 - DNA, 25 bp, Homo sapien
tatatgatacatcccatatctgtgg

SEQ ID NO: 4223150 - DNA, 25 bp, Homo sapien
ccttgaaaggcgatcactctcaagc

SEQ ID NO: 4223151 - DNA, 25 bp, Homo sapien
gatcactctcaagctctacttccag

SEQ ID NO: 4223152 - DNA, 25 bp, Homo sapien
caagctctacttccaggccttttgg

SEQ ID NO: 4223153 - DNA, 25 bp, Homo sapien
gtccttgaaaggcgatcactctcaa

SEQ ID NO: 4223154 - DNA, 25 bp, Homo sapien
tttaactggtaaggcaattactctc

SEQ ID NO: 4223155 - DNA, 25 bp, Homo sapien
aattgcatttttaactggtaaggca

SEQ ID NO: 4223156 - DNA, 25 bp, Homo sapien
tggtaaggcaattactctccattca

SEQ ID NO: 4223157 - DNA, 25 bp, Homo sapien
ttactctccattcaaaaggtctatt

SEQ ID NO: 4223158 - DNA, 25 bp, Homo sapien
gatccaagataatacgtcaattctc

SEQ ID NO: 4223159 - DNA, 25 bp, Homo sapien
accaccaaaaaggagtgcttgctag

SEQ ID NO: 4223160 - DNA, 25 bp, Homo sapien
caattctcttagactctgcaccatc

SEQ ID NO: 4223161 - DNA, 25 bp, Homo sapien
ccagtcctgttgtgtcggggatgac

SEQ ID NO: 4223162 - DNA, 25 bp, Homo sapien
cggggatcagaagcagaacatcaag

SEQ ID NO: 4223163 - DNA, 25 bp, Homo sapien
tcaacggggatcagaagcagaacat

SEQ ID NO: 4223164 - DNA, 25 bp, Homo sapien
gatcagaagcagaacatcaagcaat

SEQ ID NO: 4223165 - DNA, 25 bp, Homo sapien
gtcaacggggatcagaagcagaaca

SEQ ID NO: 4223166 - DNA, 25 bp, Homo sapien
aagagatcgcgttttagtttgcaag

SEQ ID NO: 4223167 - DNA, 25 bp, Homo sapien
gtttcatccccatctaatagggcca

SEQ ID NO: 4223168 - DNA, 25 bp, Homo sapien
gaaaagccaatgataagtacacctg

SEQ ID NO: 4223169 - DNA, 25 bp, Homo sapien
gatgtccagatcagttgttaaaagg

SEQ ID NO: 4223170 - DNA, 25 bp, Homo sapien
cttgccaatctttccccattataag

SEQ ID NO: 4223171 - DNA, 25 bp, Homo sapien
ttgccaatctttccccattataagg

SEQ ID NO: 4223172 - DNA, 25 bp, Homo sapien
tgccaatctttccccattataaggt

SEQ ID NO: 4223173 - DNA, 25 bp, Homo sapien
tgaagcacctaagatttgggatttg

SEQ ID NO: 4223174 - DNA, 25 bp, Homo sapien
ctagcttcatgctcctcatcactga

SEQ ID NO: 4223175 - DNA, 25 bp, Homo sapien
tgctctcaagttaatactagcttca

SEQ ID NO: 4223176 - DNA, 25 bp, Homo sapien
ttctggcaatttccctaattgaagc

SEQ ID NO: 4223177 - DNA, 25 bp, Homo sapien
aggtgtgaagctaacaggacccaaa

SEQ ID NO: 4223178 - DNA, 25 bp, Homo sapien
ttcaggtgtgaagctaacaggaccc

SEQ ID NO: 4223179 - DNA, 25 bp, Homo sapien
atggcacattattctgaaggtactg

SEQ ID NO: 4223180 - DNA, 25 bp, Homo sapien
aaatggcacattattctgaaggtac

SEQ ID NO: 4223181 - DNA, 25 bp, Homo sapien
tgggtcagaagcagtttcctcgtgc

SEQ ID NO: 4223182 - DNA, 25 bp, Homo sapien
ttcctcgtgcgcacccaaaatggga

SEQ ID NO: 4223183 - DNA, 25 bp, Homo sapien
tccacaagagtggactggaagcctg

SEQ ID NO: 4223184 - DNA, 25 bp, Homo sapien
taaacctctttagcccgagtgcggc

SEQ ID NO: 4223185 - DNA, 25 bp, Homo sapien
ccagccacatcttaccagtatagcc

SEQ ID NO: 4223186 - DNA, 25 bp, Homo sapien
cagccacatcttaccagtatagccc

SEQ ID NO: 4223187 - DNA, 25 bp, Homo sapien
gctgtgttcatggtcgttcttcttt

SEQ ID NO: 4223188 - DNA, 25 bp, Homo sapien
ccctttaaatgtggtctgttgtcct

SEQ ID NO: 4223189 - DNA, 25 bp, Homo sapien
aagaagctgtgttcatggtcgttct

SEQ ID NO: 4223190 - DNA, 25 bp, Homo sapien
aatagccctttaaatgtggtctgtt

SEQ ID NO: 4223191 - DNA, 25 bp, Homo sapien
taataatcccaattcagatttcggg

SEQ ID NO: 4223192 - DNA, 25 bp, Homo sapien
aagcctttggtgaaatagctgcaat

SEQ ID NO: 4223193 - DNA, 25 bp, Homo sapien
catcttatggtaagtacagtgcaag

SEQ ID NO: 4223194 - DNA, 25 bp, Homo sapien
gctgcaattgcaagatcgaaatcac

SEQ ID NO: 4223195 - DNA, 25 bp, Homo sapien
aattcttcagaggacgtgctgtttg

SEQ ID NO: 4223196 - DNA, 25 bp, Homo sapien
tgctgccgtatgtctcctcattctg

SEQ ID NO: 4223197 - DNA, 25 bp, Homo sapien
tcttcagaggacgtgctgtttggga

SEQ ID NO: 4223198 - DNA, 25 bp, Homo sapien
ttgggagcatgctgccgtatgtctc

SEQ ID NO: 4223199 - DNA, 25 bp, Homo sapien
aatattccctgtttgtcagtatttg

SEQ ID NO: 4223200 - DNA, 25 bp, Homo sapien
tagtcgactaaagtaatgaccagca

SEQ ID NO: 4223201 - DNA, 25 bp, Homo sapien
ctatcgaaatggttgtagtcgacta

SEQ ID NO: 4223202 - DNA, 25 bp, Homo sapien
ccagtactgtcatgaaaagtgatca

SEQ ID NO: 4223203 - DNA, 25 bp, Homo sapien
gccggccgagtacccggagctccag

SEQ ID NO: 4223204 - DNA, 25 bp, Homo sapien
aaaagcatccggtggcctcagggag

SEQ ID NO: 4223205 - DNA, 25 bp, Homo sapien
accctctgagaacccgctgtgcacc

SEQ ID NO: 4223206 - DNA, 25 bp, Homo sapien
tttcagcaccccgagcggagaacag

SEQ ID NO: 4223207 - DNA, 25 bp, Homo sapien
cctctgaagtagttcaagaagctga

SEQ ID NO: 4223208 - DNA, 25 bp, Homo sapien
aggaagataacctggcctccaaaag

SEQ ID NO: 4223209 - DNA, 25 bp, Homo sapien
caaaagctccgtgcgggacgatgga

SEQ ID NO: 4223210 - DNA, 25 bp, Homo sapien
tcagtgccatgttgaacacaggaag

SEQ ID NO: 4223211 - DNA, 25 bp, Homo sapien
tcaaatacttctaatacagctgctg

SEQ ID NO: 4223212 - DNA, 25 bp, Homo sapien
acttctaatacagctgctgccggag

SEQ ID NO: 4223213 - DNA, 25 bp, Homo sapien
aatacttctaatacagctgctgccg

SEQ ID NO: 4223214 - DNA, 25 bp, Homo sapien
tctcaaatacttctaatacagctgc

SEQ ID NO: 4223215 - DNA, 25 bp, Homo sapien
caccattatcaccactgttgctgct

SEQ ID NO: 4223216 - DNA, 25 bp, Homo sapien
caataacttcatcactaaggctaca

SEQ ID NO: 4223217 - DNA, 25 bp, Homo sapien
ggaaagagtatatagtgcccacaat

SEQ ID NO: 4223218 - DNA, 25 bp, Homo sapien
tgctgcttctatggcagaagcctgg

SEQ ID NO: 4223219 - DNA, 25 bp, Homo sapien
cagacaagcccctaagagaaaaact

SEQ ID NO: 4223220 - DNA, 25 bp, Homo sapien
tgtctgatagtccaaacagcatgat

SEQ ID NO: 4223221 - DNA, 25 bp, Homo sapien
aagaaacatgcataggacacggcca

SEQ ID NO: 4223222 - DNA, 25 bp, Homo sapien
gcagaaattgtggtccaggtccaat

SEQ ID NO: 4223223 - DNA, 25 bp, Homo sapien
cagcttccaagatagacaatagatt

SEQ ID NO: 4223224 - DNA, 25 bp, Homo sapien
gcctcacggattgggacatgggctt

SEQ ID NO: 4223225 - DNA, 25 bp, Homo sapien
gaaagcatcacttcagagtaacttt

SEQ ID NO: 4223226 - DNA, 25 bp, Homo sapien
tagacaatagattcattgcagacat

SEQ ID NO: 4223227 - DNA, 25 bp, Homo sapien
cccacagccacatgttgtgacagtg

SEQ ID NO: 4223228 - DNA, 25 bp, Homo sapien
tccaaaccatcagtgctagaagact

SEQ ID NO: 4223229 - DNA, 25 bp, Homo sapien
caagggtgtcatgtgcctggaccag

SEQ ID NO: 4223230 - DNA, 25 bp, Homo sapien
tgcatcctgtgtcagcaagggtgtc

SEQ ID NO: 4223231 - DNA, 25 bp, Homo sapien
aatcaccacgaacactgctttctgg

SEQ ID NO: 4223232 - DNA, 25 bp, Homo sapien
tcaccacgaacactgctttctggca

SEQ ID NO: 4223233 - DNA, 25 bp, Homo sapien
atcaccacgaacactgctttctggc

SEQ ID NO: 4223234 - DNA, 25 bp, Homo sapien
gatgtgactcttttatgctcctgaa

SEQ ID NO: 4223235 - DNA, 25 bp, Homo sapien
tgtgactcttttatgctcctgaatg

SEQ ID NO: 4223236 - DNA, 25 bp, Homo sapien
ctgatgtgactcttttatgctcctg

SEQ ID NO: 4223237 - DNA, 25 bp, Homo sapien
tgactcttttatgctcctgaatgag

SEQ ID NO: 4223238 - DNA, 25 bp, Homo sapien
acttggaagatgagcggaagagaaa

SEQ ID NO: 4223239 - DNA, 25 bp, Homo sapien
ttctacttctgatggtacccaacag

SEQ ID NO: 4223240 - DNA, 25 bp, Homo sapien
gaggaggctccagtggctctgttaa

SEQ ID NO: 4223241 - DNA, 25 bp, Homo sapien
ggttaccgtattcaagaggaggctc

SEQ ID NO: 4223242 - DNA, 25 bp, Homo sapien
gccgagactctaactgcatgccatt

SEQ ID NO: 4223243 - DNA, 25 bp, Homo sapien
tatcagcagacgtaagccgagactc

SEQ ID NO: 4223244 - DNA, 25 bp, Homo sapien
ccccttgacactggagaaagctatt

SEQ ID NO: 4223245 - DNA, 25 bp, Homo sapien
cacctgctaagcatgcagctgttga

SEQ ID NO: 4223246 - DNA, 25 bp, Homo sapien
tactagaacacatagacaatgtact

SEQ ID NO: 4223247 - DNA, 25 bp, Homo sapien
tgtgtctcaacgatgcttccgctgt

SEQ ID NO: 4223248 - DNA, 25 bp, Homo sapien
ctcagtcttggctatgccgttgaac

SEQ ID NO: 4223249 - DNA, 25 bp, Homo sapien
gccgttgaacttgttatttggtgga

SEQ ID NO: 4223250 - DNA, 25 bp, Homo sapien
ggacatcagcagacgggacaaagat

SEQ ID NO: 4223251 - DNA, 25 bp, Homo sapien
gacaaagatgatgaccctattggct

SEQ ID NO: 4223252 - DNA, 25 bp, Homo sapien
agaattaccccatttcatgtcagga

SEQ ID NO: 4223253 - DNA, 25 bp, Homo sapien
tcaggatctcacttttagaagatgg

SEQ ID NO: 4223254 - DNA, 25 bp, Homo sapien
gtctctccgtgatgccaaaattgtt

SEQ ID NO: 4223255 - DNA, 25 bp, Homo sapien
ccaggagggctaagcacttggtagt

SEQ ID NO: 4223256 - DNA, 25 bp, Homo sapien
tagcctcatggctgtcacaacacag

SEQ ID NO: 4223257 - DNA, 25 bp, Homo sapien
cacttggtagtgcaggaggaattgc

SEQ ID NO: 4223258 - DNA, 25 bp, Homo sapien
aggccatgccactgagctttccatt

SEQ ID NO: 4223259 - DNA, 25 bp, Homo sapien
tggggatggggacacagaaggccat

SEQ ID NO: 4223260 - DNA, 25 bp, Homo sapien
ctgagctttccattcagctcagaga

SEQ ID NO: 4223261 - DNA, 25 bp, Homo sapien
agaaggccatgccactgagctttcc

SEQ ID NO: 4223262 - DNA, 25 bp, Homo sapien
gccctttaggagaatatccaatgtc

SEQ ID NO: 4223263 - DNA, 25 bp, Homo sapien
ctggacagtccatagaaagctggag

SEQ ID NO: 4223264 - DNA, 25 bp, Homo sapien
ctaggagacaaccaggtcctcggtg

SEQ ID NO: 4223265 - DNA, 25 bp, Homo sapien
ggagacaaccaggtcctcggtgtag

SEQ ID NO: 4223266 - DNA, 25 bp, Homo sapien
taccaggaaatgaactagtcaaagt

SEQ ID NO: 4223267 - DNA, 25 bp, Homo sapien
agaagagtaggtgtcactgttagag

SEQ ID NO: 4223268 - DNA, 25 bp, Homo sapien
gacatgtggtccataaagtctgcca

SEQ ID NO: 4223269 - DNA, 25 bp, Homo sapien
gtctgccaccttgctactgtagcca

SEQ ID NO: 4223270 - DNA, 25 bp, Homo sapien
ttctgtttccctccgcttcttgctc

SEQ ID NO: 4223271 - DNA, 25 bp, Homo sapien
tgtttccctccgcttcttgctcttc

SEQ ID NO: 4223272 - DNA, 25 bp, Homo sapien
cttctgtttccctccgcttcttgct

SEQ ID NO: 4223273 - DNA, 25 bp, Homo sapien
ttccctccgcttcttgctcttcccc

SEQ ID NO: 4223274 - DNA, 25 bp, Homo sapien
agtcttggtgacagttctcctattt

SEQ ID NO: 4223275 - DNA, 25 bp, Homo sapien
tcagaattttcgaccaacagacata

SEQ ID NO: 4223276 - DNA, 25 bp, Homo sapien
tggtgacagttctcctatttgtcta

SEQ ID NO: 4223277 - DNA, 25 bp, Homo sapien
gaccaacagacatagaccatcctgt

SEQ ID NO: 4223278 - DNA, 25 bp, Homo sapien
tcggtaggcatatgcatgagaaccc

SEQ ID NO: 4223279 - DNA, 25 bp, Homo sapien
tatgcatgagaaccccctgtcttgt

SEQ ID NO: 4223280 - DNA, 25 bp, Homo sapien
ggtcaagtcggtaggcatatgcatg

SEQ ID NO: 4223281 - DNA, 25 bp, Homo sapien
ttgcacagcgatggtcaagtcggta

SEQ ID NO: 4223282 - DNA, 25 bp, Homo sapien
ctggtagcatgacctgaatcctcat

SEQ ID NO: 4223283 - DNA, 25 bp, Homo sapien
acagtaaggcgtacatcagaccatc

SEQ ID NO: 4223284 - DNA, 25 bp, Homo sapien
tgcctgttaccttaaacagtaaggc

SEQ ID NO: 4223285 - DNA, 25 bp, Homo sapien
aaccagtaccctcacaacatctaaa

SEQ ID NO: 4223286 - DNA, 25 bp, Homo sapien
tgttattaaagatttgcctgttacc

SEQ ID NO: 4223287 - DNA, 25 bp, Homo sapien
ggacttttcttgtagaatgtccagt

SEQ ID NO: 4223288 - DNA, 25 bp, Homo sapien
cttttcttgtagaatgtccagtaca

SEQ ID NO: 4223289 - DNA, 25 bp, Homo sapien
ctggacttttcttgtagaatgtcca

SEQ ID NO: 4223290 - DNA, 25 bp, Homo sapien
gacttttcttgtagaatgtccagta

SEQ ID NO: 4223291 - DNA, 25 bp, Homo sapien
gctgtttcaaggtattttccttctc

SEQ ID NO: 4223292 - DNA, 25 bp, Homo sapien
cctgaagaaggaaagttgctgtttc

SEQ ID NO: 4223293 - DNA, 25 bp, Homo sapien
gttgtataacccaagtcctgaagaa

SEQ ID NO: 4223294 - DNA, 25 bp, Homo sapien
tgttccatgttgtataacccaagtc

SEQ ID NO: 4223295 - DNA, 25 bp, Homo sapien
ggttcttacggtaaactcgagctga

SEQ ID NO: 4223296 - DNA, 25 bp, Homo sapien
tctgagcaagtttctgaggtcgtct

SEQ ID NO: 4223297 - DNA, 25 bp, Homo sapien
gattcccattaccagaaaatcctgc

SEQ ID NO: 4223298 - DNA, 25 bp, Homo sapien
gagtccacatatcaaaagcggttct

SEQ ID NO: 4223299 - DNA, 25 bp, Homo sapien
tcacagccttcccattccacttaac

SEQ ID NO: 4223300 - DNA, 25 bp, Homo sapien
actgaagttaggagtctgatctctg

SEQ ID NO: 4223301 - DNA, 25 bp, Homo sapien
tgttgatttgtagatattgctaatg

SEQ ID NO: 4223302 - DNA, 25 bp, Homo sapien
tattgctaatgagactgaagttagg

SEQ ID NO: 4223303 - DNA, 25 bp, Homo sapien
gaagttaggagtctgatctctgagt

SEQ ID NO: 4223304 - DNA, 25 bp, Homo sapien
tgctgagctctcttcgtgtgggtgt

SEQ ID NO: 4223305 - DNA, 25 bp, Homo sapien
gctctcttcgtgtgggtgtttctgc

SEQ ID NO: 4223306 - DNA, 25 bp, Homo sapien
cgagagggaaatcccgtggacagct

SEQ ID NO: 4223307 - DNA, 25 bp, Homo sapien
tacaatgccgagagggaaatcccgt

SEQ ID NO: 4223308 - DNA, 25 bp, Homo sapien
aagtggcctcaggtcaaactctagg

SEQ ID NO: 4223309 - DNA, 25 bp, Homo sapien
tggcctcaggtcaaactctagggac

SEQ ID NO: 4223310 - DNA, 25 bp, Homo sapien
agtggcctcaggtcaaactctaggg

SEQ ID NO: 4223311 - DNA, 25 bp, Homo sapien
ggcctcaggtcaaactctagggacc

SEQ ID NO: 4223312 - DNA, 25 bp, Homo sapien
gtccaggaaacttagtaggactgat

SEQ ID NO: 4223313 - DNA, 25 bp, Homo sapien
ggctgcatagccgtcagtcctcttt

SEQ ID NO: 4223314 - DNA, 25 bp, Homo sapien
tggccagtgcggtacagtccaggaa

SEQ ID NO: 4223315 - DNA, 25 bp, Homo sapien
catcaggcactatatcaggaggctt

SEQ ID NO: 4223316 - DNA, 25 bp, Homo sapien
tctctaagtgatctatacattcaca

SEQ ID NO: 4223317 - DNA, 25 bp, Homo sapien
taagtgatctatacattcacagaaa

SEQ ID NO: 4223318 - DNA, 25 bp, Homo sapien
ttcacagaaaatggccggcagccga

SEQ ID NO: 4223319 - DNA, 25 bp, Homo sapien
cattcacagaaaatggccggcagcc

SEQ ID NO: 4223320 - DNA, 25 bp, Homo sapien
ttcttccaagttggtagactccttc

SEQ ID NO: 4223321 - DNA, 25 bp, Homo sapien
catccacctttgattcaattcctga

SEQ ID NO: 4223322 - DNA, 25 bp, Homo sapien
ctggaaggtctcacaaatactgctt

SEQ ID NO: 4223323 - DNA, 25 bp, Homo sapien
gactccttccggtcataggctgctt

SEQ ID NO: 4223324 - DNA, 25 bp, Homo sapien
ttctttgagtaaacgctggaattcc

SEQ ID NO: 4223325 - DNA, 25 bp, Homo sapien
gcagttctttgagtaaacgctggaa

SEQ ID NO: 4223326 - DNA, 25 bp, Homo sapien
ttgagtaaacgctggaattcctgca

SEQ ID NO: 4223327 - DNA, 25 bp, Homo sapien
tctggcagttctttgagtaaacgct

SEQ ID NO: 4223328 - DNA, 25 bp, Homo sapien
gtcgcttgctttagtacaacatttc

SEQ ID NO: 4223329 - DNA, 25 bp, Homo sapien
aggtttcgtcgcttgctttagtaca

SEQ ID NO: 4223330 - DNA, 25 bp, Homo sapien
tcgtcgcttgctttagtacaacatt

SEQ ID NO: 4223331 - DNA, 25 bp, Homo sapien
tttcgtcgcttgctttagtacaaca

SEQ ID NO: 4223332 - DNA, 25 bp, Homo sapien
atgacctcgcgctcctcttgaactg

SEQ ID NO: 4223333 - DNA, 25 bp, Homo sapien
ctggagcagccggaactgtacgcgc

SEQ ID NO: 4223334 - DNA, 25 bp, Homo sapien
gccggaactgtacgcgcagctcgat

SEQ ID NO: 4223335 - DNA, 25 bp, Homo sapien
gaagtctgccggcatagaaactgct

SEQ ID NO: 4223336 - DNA, 25 bp, Homo sapien
gggtgatggcttcaccggctctttg

SEQ ID NO: 4223337 - DNA, 25 bp, Homo sapien
gatggcttcaccggctctttgcctg

SEQ ID NO: 4223338 - DNA, 25 bp, Homo sapien
gtgatggcttcaccggctctttgcc

SEQ ID NO: 4223339 - DNA, 25 bp, Homo sapien
ggtgatggcttcaccggctctttgc

SEQ ID NO: 4223340 - DNA, 25 bp, Homo sapien
ctttattgctgctctgactgttcca

SEQ ID NO: 4223341 - DNA, 25 bp, Homo sapien
ctctgactgttccacccttttcctt

SEQ ID NO: 4223342 - DNA, 25 bp, Homo sapien
tgctctgactgttccacccttttcc

SEQ ID NO: 4223343 - DNA, 25 bp, Homo sapien
gctgctctgactgttccaccctttt

SEQ ID NO: 4223344 - DNA, 25 bp, Homo sapien
ttgtcataactcttagataaagcaa

SEQ ID NO: 4223345 - DNA, 25 bp, Homo sapien
gataaagcaatggttcatttgcatc

SEQ ID NO: 4223346 - DNA, 25 bp, Homo sapien
cttagataaagcaatggttcatttg

SEQ ID NO: 4223347 - DNA, 25 bp, Homo sapien
attgtcataactcttagataaagca

SEQ ID NO: 4223348 - DNA, 25 bp, Homo sapien
gcataacattataccgacaaatcgg

SEQ ID NO: 4223349 - DNA, 25 bp, Homo sapien
tggctgtttcgaccaagcacacttt

SEQ ID NO: 4223350 - DNA, 25 bp, Homo sapien
gaaaaaggctggctgtttcgaccaa

SEQ ID NO: 4223351 - DNA, 25 bp, Homo sapien
tgcaaagggagtaaaccagcgaggc

SEQ ID NO: 4223352 - DNA, 25 bp, Homo sapien
ctgagaaggtgccatagaagtgggc

SEQ ID NO: 4223353 - DNA, 25 bp, Homo sapien
gtgccatagaagtgggccaggcaag

SEQ ID NO: 4223354 - DNA, 25 bp, Homo sapien
aaggtgccatagaagtgggccaggc

SEQ ID NO: 4223355 - DNA, 25 bp, Homo sapien
gagaaggtgccatagaagtgggcca

SEQ ID NO: 4223356 - DNA, 25 bp, Homo sapien
tagaggcacggctctcagtagagga

SEQ ID NO: 4223357 - DNA, 25 bp, Homo sapien
tacaatggatgggtgacagtttaca

SEQ ID NO: 4223358 - DNA, 25 bp, Homo sapien
gaggactaaagacaccgtcacagta

SEQ ID NO: 4223359 - DNA, 25 bp, Homo sapien
cagtttacagtatctagaggcacgg

SEQ ID NO: 4223360 - DNA, 25 bp, Homo sapien
cccacaggatgggaatagcttatgt

SEQ ID NO: 4223361 - DNA, 25 bp, Homo sapien
cctagactgacgatggaagaagaat

SEQ ID NO: 4223362 - DNA, 25 bp, Homo sapien
aaagctgccttgtcacatcaaaggc

SEQ ID NO: 4223363 - DNA, 25 bp, Homo sapien
tcaaaggcagattcccctagactga

SEQ ID NO: 4223364 - DNA, 25 bp, Homo sapien
cactttaatgtaccacctttcctat

SEQ ID NO: 4223365 - DNA, 25 bp, Homo sapien
caggtgttgtaggttccaaagtgga

SEQ ID NO: 4223366 - DNA, 25 bp, Homo sapien
caaagtggaatgacgtagttggaat

SEQ ID NO: 4223367 - DNA, 25 bp, Homo sapien
aagtggaatgacgtagttggaatca

SEQ ID NO: 4223368 - DNA, 25 bp, Homo sapien
tccaaagtggaatgacgtagttgga

SEQ ID NO: 4223369 - DNA, 25 bp, Homo sapien
tcatctttcaactgtgcattggtaa

SEQ ID NO: 4223370 - DNA, 25 bp, Homo sapien
gcatgtgaatatgcgaactcagtct

SEQ ID NO: 4223371 - DNA, 25 bp, Homo sapien
tcaactgtgcattggtaatggcatg

SEQ ID NO: 4223372 - DNA, 25 bp, Homo sapien
ccacactggcatcagagttagtcac

SEQ ID NO: 4223373 - DNA, 25 bp, Homo sapien
ctttggtcttagtggtaacagttgg

SEQ ID NO: 4223374 - DNA, 25 bp, Homo sapien
gcatttgatcgaatgatcacattcc

SEQ ID NO: 4223375 - DNA, 25 bp, Homo sapien
cctttggtcttagtggtaacagttg

SEQ ID NO: 4223376 - DNA, 25 bp, Homo sapien
tcagcatttgatcgaatgatcacat

SEQ ID NO: 4223377 - DNA, 25 bp, Homo sapien
cagagaagtgagtctgcttcctttc

SEQ ID NO: 4223378 - DNA, 25 bp, Homo sapien
gagaagtgagtctgcttcctttcct

SEQ ID NO: 4223379 - DNA, 25 bp, Homo sapien
tggtgctgtaaagcagttctggtct

SEQ ID NO: 4223380 - DNA, 25 bp, Homo sapien
tcagagaagtgagtctgcttccttt

SEQ ID NO: 4223381 - DNA, 25 bp, Homo sapien
cagtttcccttgttgctcagtcttt

SEQ ID NO: 4223382 - DNA, 25 bp, Homo sapien
tctcagaggtttctgttatgttcct

SEQ ID NO: 4223383 - DNA, 25 bp, Homo sapien
ctaccagtttcccttgttgctcagt

SEQ ID NO: 4223384 - DNA, 25 bp, Homo sapien
agaggtttctgttatgttcctctga

SEQ ID NO: 4223385 - DNA, 25 bp, Homo sapien
tttggagaggatcaataaaagcaca

SEQ ID NO: 4223386 - DNA, 25 bp, Homo sapien
cctttggagaggatcaataaaagca

SEQ ID NO: 4223387 - DNA, 25 bp, Homo sapien
ctttggagaggatcaataaaagcac

SEQ ID NO: 4223388 - DNA, 25 bp, Homo sapien
gaatgacctctcctacctcttatga

SEQ ID NO: 4223389 - DNA, 25 bp, Homo sapien
ccactacgtgggaatgaagcttttc

SEQ ID NO: 4223390 - DNA, 25 bp, Homo sapien
tataccagcattaagaggtgggctc

SEQ ID NO: 4223391 - DNA, 25 bp, Homo sapien
gcctgcttgggtgggtttaatgcca

SEQ ID NO: 4223392 - DNA, 25 bp, Homo sapien
tccttctcgaaataagttgttgtta

SEQ ID NO: 4223393 - DNA, 25 bp, Homo sapien
ctccttctcgaaataagttgttgtt

SEQ ID NO: 4223394 - DNA, 25 bp, Homo sapien
tgagtgtagtgtctgtgaccagctg

SEQ ID NO: 4223395 - DNA, 25 bp, Homo sapien
gatacaatactagttcactccttgc

SEQ ID NO: 4223396 - DNA, 25 bp, Homo sapien
taagtcttcaaagcgaactccaaaa

SEQ ID NO: 4223397 - DNA, 25 bp, Homo sapien
tccaaaattccttcactggcttggc

SEQ ID NO: 4223398 - DNA, 25 bp, Homo sapien
gtgaggatagatcatgttgatgcta

SEQ ID NO: 4223399 - DNA, 25 bp, Homo sapien
tgttgatgctaaaacccaatacccc

SEQ ID NO: 4223400 - DNA, 25 bp, Homo sapien
cagtgctcttagactgttcgtggtt

SEQ ID NO: 4223401 - DNA, 25 bp, Homo sapien
cattaaagcatttagaactggaata

SEQ ID NO: 4223402 - DNA, 25 bp, Homo sapien
gatagattctaaggttctcagcagg

SEQ ID NO: 4223403 - DNA, 25 bp, Homo sapien
gaattggattgaagctttacaaagc

SEQ ID NO: 4223404 - DNA, 25 bp, Homo sapien
tgaactgtgtagtcagcaatgccca

SEQ ID NO: 4223405 - DNA, 25 bp, Homo sapien
accatttcaagagcttatcgataga

SEQ ID NO: 4223406 - DNA, 25 bp, Homo sapien
taggcagtcattatcatctcttaga

SEQ ID NO: 4223407 - DNA, 25 bp, Homo sapien
catctcttagatctttgcattgtcc

SEQ ID NO: 4223408 - DNA, 25 bp, Homo sapien
ccaccatcttggtttaggcagtcat

SEQ ID NO: 4223409 - DNA, 25 bp, Homo sapien
gatctttgcattgtcccttcggccc

SEQ ID NO: 4223410 - DNA, 25 bp, Homo sapien
ttctttatttagtttggcaagcttc

SEQ ID NO: 4223411 - DNA, 25 bp, Homo sapien
tttggcaagcttctgctctttggct

SEQ ID NO: 4223412 - DNA, 25 bp, Homo sapien
agcttctgctctttggctatcttgc

SEQ ID NO: 4223413 - DNA, 25 bp, Homo sapien
atttagtttggcaagcttctgctct

SEQ ID NO: 4223414 - DNA, 25 bp, Homo sapien
catgtatcatgtgaactccaattat

SEQ ID NO: 4223415 - DNA, 25 bp, Homo sapien
gataaggattattccacctgaccat

SEQ ID NO: 4223416 - DNA, 25 bp, Homo sapien
tattgtaagtcatgattacacagag

SEQ ID NO: 4223417 - DNA, 25 bp, Homo sapien
ggaataatcaggatattgtaagtca

SEQ ID NO: 4223418 - DNA, 25 bp, Homo sapien
tcagttttggaataaatactatgtg

SEQ ID NO: 4223419 - DNA, 25 bp, Homo sapien
tctcttaatctctgccatgaccagc

SEQ ID NO: 4223420 - DNA, 25 bp, Homo sapien
ctcaaaagaccatcagggtctctta

SEQ ID NO: 4223421 - DNA, 25 bp, Homo sapien
tacctaaatctgtcaggttacccat

SEQ ID NO: 4223422 - DNA, 25 bp, Homo sapien
gctacctaaatctgtcaggttaccc

SEQ ID NO: 4223423 - DNA, 25 bp, Homo sapien
tgtgaacggaatcttctaaggccct

SEQ ID NO: 4223424 - DNA, 25 bp, Homo sapien
tgtagatgtctaagtgaggaatgga

SEQ ID NO: 4223425 - DNA, 25 bp, Homo sapien
taaggccctttcctgaatgatcact

SEQ ID NO: 4223426 - DNA, 25 bp, Homo sapien
gaatggatgcttttagcatgtgaac

SEQ ID NO: 4223427 - DNA, 25 bp, Homo sapien
acttcctcattcgggctggagtctg

SEQ ID NO: 4223428 - DNA, 25 bp, Homo sapien
tgctggtgccatgttcgttgtaaaa

SEQ ID NO: 4223429 - DNA, 25 bp, Homo sapien
tattttgaatgtcactcattgatac

SEQ ID NO: 4223430 - DNA, 25 bp, Homo sapien
tctgctgtattagattggtgctggt

SEQ ID NO: 4223431 - DNA, 25 bp, Homo sapien
ggaacaattttagccacctctttga

SEQ ID NO: 4223432 - DNA, 25 bp, Homo sapien
gaactttgcaaattgggccaaccta

SEQ ID NO: 4223433 - DNA, 25 bp, Homo sapien
tagattcattgataacttggtgcag

SEQ ID NO: 4223434 - DNA, 25 bp, Homo sapien
gccaacctatgcaaaacttgcagat

SEQ ID NO: 4223435 - DNA, 25 bp, Homo sapien
aaatttaagtgtatgtgctgatgaa

SEQ ID NO: 4223436 - DNA, 25 bp, Homo sapien
cctctgtatcattcaaatttaagtg

SEQ ID NO: 4223437 - DNA, 25 bp, Homo sapien
ctcctctgtatcattcaaatttaag

SEQ ID NO: 4223438 - DNA, 25 bp, Homo sapien
attcaaatttaagtgtatgtgctga

SEQ ID NO: 4223439 - DNA, 25 bp, Homo sapien
tgtgggttgcaagttcatgtagtag

SEQ ID NO: 4223440 - DNA, 25 bp, Homo sapien
cactgtgggttgcaagttcatgtag

SEQ ID NO: 4223441 - DNA, 25 bp, Homo sapien
aattcactgtgggttgcaagttcat

SEQ ID NO: 4223442 - DNA, 25 bp, Homo sapien
ttggaaaaattcactgtgggttgca

SEQ ID NO: 4223443 - DNA, 25 bp, Homo sapien
gttaaggctcccatcccagcaacaa

SEQ ID NO: 4223444 - DNA, 25 bp, Homo sapien
tagttaaggctcccatcccagcaac

SEQ ID NO: 4223445 - DNA, 25 bp, Homo sapien
ttagttaaggctcccatcccagcaa

SEQ ID NO: 4223446 - DNA, 25 bp, Homo sapien
agttaaggctcccatcccagcaaca

SEQ ID NO: 4223447 - DNA, 25 bp, Homo sapien
gaggccgacgggctgatagttccct

SEQ ID NO: 4223448 - DNA, 25 bp, Homo sapien
tccgctacttgagccgggtggtaca

SEQ ID NO: 4223449 - DNA, 25 bp, Homo sapien
tggaggctgccggaagtacacagac

SEQ ID NO: 4223450 - DNA, 25 bp, Homo sapien
ggctagagaatgcagggcccggagg

SEQ ID NO: 4223451 - DNA, 25 bp, Homo sapien
ccgaccccaggaggctacggaagtg

SEQ ID NO: 4223452 - DNA, 25 bp, Homo sapien
aagacgacccgtggcaatttagcga

SEQ ID NO: 4223453 - DNA, 25 bp, Homo sapien
aggctacggaagtgtggattgtcct

SEQ ID NO: 4223454 - DNA, 25 bp, Homo sapien
tgttcgctccgaagtagagagagca

SEQ ID NO: 4223455 - DNA, 25 bp, Homo sapien
tagtggctgccagagctgcgtcccc

SEQ ID NO: 4223456 - DNA, 25 bp, Homo sapien
gggctgcggtagtggctgccagagc

SEQ ID NO: 4223457 - DNA, 25 bp, Homo sapien
cgtcccctcttccgtggcgcagtgg

SEQ ID NO: 4223458 - DNA, 25 bp, Homo sapien
tagacgcaaacccggggctgcggta

SEQ ID NO: 4223459 - DNA, 25 bp, Homo sapien
cagcgcgcgatcgtcctgtgctcac

SEQ ID NO: 4223460 - DNA, 25 bp, Homo sapien
agcgcgcgatcgtcctgtgctcacg

SEQ ID NO: 4223461 - DNA, 25 bp, Homo sapien
gaaagctcaagggatttttagctaa

SEQ ID NO: 4223462 - DNA, 25 bp, Homo sapien
aagtgacgcctccaactcagatagg

SEQ ID NO: 4223463 - DNA, 25 bp, Homo sapien
gaatctgcgcctctaccaagcagtg

SEQ ID NO: 4223464 - DNA, 25 bp, Homo sapien
cttaaaaagtgacgcctccaactca

SEQ ID NO: 4223465 - DNA, 25 bp, Homo sapien
gatttccaggaaagtgcaaaaagca

SEQ ID NO: 4223466 - DNA, 25 bp, Homo sapien
agcagatccgcttttttggagatga

SEQ ID NO: 4223467 - DNA, 25 bp, Homo sapien
taatttcagaagttgcaggtgcatc

SEQ ID NO: 4223468 - DNA, 25 bp, Homo sapien
tctgtatctcgatgttgtcaactct

SEQ ID NO: 4223469 - DNA, 25 bp, Homo sapien
tgaagtactgttaaaccgaaccgca

SEQ ID NO: 4223470 - DNA, 25 bp, Homo sapien
tatatcaccacgctcaatatctcgg

SEQ ID NO: 4223471 - DNA, 25 bp, Homo sapien
tctccatgaattgctctaaaggtgg

SEQ ID NO: 4223472 - DNA, 25 bp, Homo sapien
agtgggctatatctctcatgatacc

SEQ ID NO: 4223473 - DNA, 25 bp, Homo sapien
acagctctctccgatccatactagg

SEQ ID NO: 4223474 - DNA, 25 bp, Homo sapien
ggcttatgacagtatacaacatgca

SEQ ID NO: 4223475 - DNA, 25 bp, Homo sapien
tcaggactatccatcttgggcaaag

SEQ ID NO: 4223476 - DNA, 25 bp, Homo sapien
gaatatcaatcaacctcaccacgtc

SEQ ID NO: 4223477 - DNA, 25 bp, Homo sapien
ggtatacttgagcacaactgcatgc

SEQ ID NO: 4223478 - DNA, 25 bp, Homo sapien
agacatttcaagctttgataagaac

SEQ ID NO: 4223479 - DNA, 25 bp, Homo sapien
tgtttggtatgaaacagctagtagt

SEQ ID NO: 4223480 - DNA, 25 bp, Homo sapien
tatgaaacagctagtagttgaacaa

SEQ ID NO: 4223481 - DNA, 25 bp, Homo sapien
tcttagttgtttggtatgaaacagc

SEQ ID NO: 4223482 - DNA, 25 bp, Homo sapien
caccagtttggtaatatgataaagg

SEQ ID NO: 4223483 - DNA, 25 bp, Homo sapien
actgtgagaaggcacatctcttaag

SEQ ID NO: 4223484 - DNA, 25 bp, Homo sapien
tatgataaaggatccccatggttac

SEQ ID NO: 4223485 - DNA, 25 bp, Homo sapien
ctcgaatgatgtcaccagtttggta

SEQ ID NO: 4223486 - DNA, 25 bp, Homo sapien
cactaccctcttagactgtattttt

SEQ ID NO: 4223487 - DNA, 25 bp, Homo sapien
acttttttattagtatgatgaaact

SEQ ID NO: 4223488 - DNA, 25 bp, Homo sapien
ccaaacactaccctcttagactgta

SEQ ID NO: 4223489 - DNA, 25 bp, Homo sapien
gagaactaagctgattagtaagaaa

SEQ ID NO: 4223490 - DNA, 25 bp, Homo sapien
taataccagataggtgtggtggaag

SEQ ID NO: 4223491 - DNA, 25 bp, Homo sapien
gctcttcagagctaattacacctaa

SEQ ID NO: 4223492 - DNA, 25 bp, Homo sapien
gaagagaagagctatacagagatac

SEQ ID NO: 4223493 - DNA, 25 bp, Homo sapien
cttttcatggtatctgtcaatatcc

SEQ ID NO: 4223494 - DNA, 25 bp, Homo sapien
tgcataagatggtgtggcaatatta

SEQ ID NO: 4223495 - DNA, 25 bp, Homo sapien
gaactgttgttgaaataatacggat

SEQ ID NO: 4223496 - DNA, 25 bp, Homo sapien
tgtaaaatgactaatttgacattcc

SEQ ID NO: 4223497 - DNA, 25 bp, Homo sapien
aatgtggtattcctcaatccaagag

SEQ ID NO: 4223498 - DNA, 25 bp, Homo sapien
tttgtaggcctctcattaaagatgg

SEQ ID NO: 4223499 - DNA, 25 bp, Homo sapien
tagaaggaattcaactactcctgga

SEQ ID NO: 4223500 - DNA, 25 bp, Homo sapien
attgctatttagctcaacacttctc

SEQ ID NO: 4223501 - DNA, 25 bp, Homo sapien
caaatcccaaggaactctgcatgac

SEQ ID NO: 4223502 - DNA, 25 bp, Homo sapien
gtatgaatcccaagcaagaaatctg

SEQ ID NO: 4223503 - DNA, 25 bp, Homo sapien
tccagtccagaagatgggatcacct

SEQ ID NO: 4223504 - DNA, 25 bp, Homo sapien
cactcgacagtgaaagtatgaatcc

SEQ ID NO: 4223505 - DNA, 25 bp, Homo sapien
gatggtaaaatacgtccttcagcta

SEQ ID NO: 4223506 - DNA, 25 bp, Homo sapien
cattttaaagcccaagatgcggatt

SEQ ID NO: 4223507 - DNA, 25 bp, Homo sapien
taaagcccaagatgcggattgtttt

SEQ ID NO: 4223508 - DNA, 25 bp, Homo sapien
cccaagatgcggattgtttttttct

SEQ ID NO: 4223509 - DNA, 25 bp, Homo sapien
tttctcaatgcagaagcaaaatcat

SEQ ID NO: 4223510 - DNA, 25 bp, Homo sapien
gctcatgtcaaaaaggcatcacttt

SEQ ID NO: 4223511 - DNA, 25 bp, Homo sapien
tactcacaatatacctaaggaacgt

SEQ ID NO: 4223512 - DNA, 25 bp, Homo sapien
tgccctaagcttttagactagatat

SEQ ID NO: 4223513 - DNA, 25 bp, Homo sapien
tataagcatgcttgccttgccctaa

SEQ ID NO: 4223514 - DNA, 25 bp, Homo sapien
tagcatccacatggcgtccaacttt

SEQ ID NO: 4223515 - DNA, 25 bp, Homo sapien
ttaaaatagtcaactccgatcttca

SEQ ID NO: 4223516 - DNA, 25 bp, Homo sapien
aatgctccacgagctaccaaagctt

SEQ ID NO: 4223517 - DNA, 25 bp, Homo sapien
gagctaccaaagcttccacgttttg

SEQ ID NO: 4223518 - DNA, 25 bp, Homo sapien
agttggacagttttctaatgcaagc

SEQ ID NO: 4223519 - DNA, 25 bp, Homo sapien
tgttcaaacttccttttgtcgcata

SEQ ID NO: 4223520 - DNA, 25 bp, Homo sapien
gagttggacagttttctaatgcaag

SEQ ID NO: 4223521 - DNA, 25 bp, Homo sapien
tctattgctttgttcaaacttcctt

SEQ ID NO: 4223522 - DNA, 25 bp, Homo sapien
ttttagcacagaattataccagcag

SEQ ID NO: 4223523 - DNA, 25 bp, Homo sapien
tatctctggcttaggtaactacagg

SEQ ID NO: 4223524 - DNA, 25 bp, Homo sapien
cacaagtctgggttgtgaaacacca

SEQ ID NO: 4223525 - DNA, 25 bp, Homo sapien
actacagggtattgctattcactca

SEQ ID NO: 4223526 - DNA, 25 bp, Homo sapien
ttaaaagtctcatccaaagccaaag

SEQ ID NO: 4223527 - DNA, 25 bp, Homo sapien
taaaagtctcatccaaagccaaagc

SEQ ID NO: 4223528 - DNA, 25 bp, Homo sapien
tagcacagcccagttggatgcatga

SEQ ID NO: 4223529 - DNA, 25 bp, Homo sapien
tactttcgattatggacaaaaacag

SEQ ID NO: 4223530 - DNA, 25 bp, Homo sapien
caccaggtgagctccctataaggac

SEQ ID NO: 4223531 - DNA, 25 bp, Homo sapien
cactatgaagcaatgtcaaacccaa

SEQ ID NO: 4223532 - DNA, 25 bp, Homo sapien
gcagtggtacccatgacccagagtg

SEQ ID NO: 4223533 - DNA, 25 bp, Homo sapien
ccatattgcagttggtatcccataa

SEQ ID NO: 4223534 - DNA, 25 bp, Homo sapien
gccagaacagcattgaggaccatat

SEQ ID NO: 4223535 - DNA, 25 bp, Homo sapien
taaaaccaaatcaccatagagccag

SEQ ID NO: 4223536 - DNA, 25 bp, Homo sapien
agagcttacgcaacttttctgcact

SEQ ID NO: 4223537 - DNA, 25 bp, Homo sapien
tttaagagcttacgcaacttttctg

SEQ ID NO: 4223538 - DNA, 25 bp, Homo sapien
cttcttttaagagcttacgcaactt

SEQ ID NO: 4223539 - DNA, 25 bp, Homo sapien
tcttcttttaagagcttacgcaact

SEQ ID NO: 4223540 - DNA, 25 bp, Homo sapien
cagtagcaccctatcagttatggca

SEQ ID NO: 4223541 - DNA, 25 bp, Homo sapien
cattatacactagatgcagtagcac

SEQ ID NO: 4223542 - DNA, 25 bp, Homo sapien
tttacctccagtatggcactttggg

SEQ ID NO: 4223543 - DNA, 25 bp, Homo sapien
tgaataaatccacccctagttgaga

SEQ ID NO: 4223544 - DNA, 25 bp, Homo sapien
tgaagacactgattcatcagcagaa

SEQ ID NO: 4223545 - DNA, 25 bp, Homo sapien
ccttctggaactgcgagaagactct

SEQ ID NO: 4223546 - DNA, 25 bp, Homo sapien
ctctgaacggttcctcttatgtttc

SEQ ID NO: 4223547 - DNA, 25 bp, Homo sapien
ggatgccctagatgaatgccttctg

SEQ ID NO: 4223548 - DNA, 25 bp, Homo sapien
ctggaactgggtagcactcatcttt

SEQ ID NO: 4223549 - DNA, 25 bp, Homo sapien
tccacttcttgtttatggttaagaa

SEQ ID NO: 4223550 - DNA, 25 bp, Homo sapien
tgtaacctatcctgcttccccagta

SEQ ID NO: 4223551 - DNA, 25 bp, Homo sapien
aaatcatccggtatttcaagtgaag

SEQ ID NO: 4223552 - DNA, 25 bp, Homo sapien
gaggtagaatgcctcacagaacctg

SEQ ID NO: 4223553 - DNA, 25 bp, Homo sapien
gaaatcacgtgatccagagtgagcg

SEQ ID NO: 4223554 - DNA, 25 bp, Homo sapien
actgacttccaagagtattctgagc

SEQ ID NO: 4223555 - DNA, 25 bp, Homo sapien
gtatctttgctcatgtctactgaaa

SEQ ID NO: 4223556 - DNA, 25 bp, Homo sapien
tttgtgtaatggtgccgatatcctt

SEQ ID NO: 4223557 - DNA, 25 bp, Homo sapien
taatggtgccgatatccttggtgta

SEQ ID NO: 4223558 - DNA, 25 bp, Homo sapien
caaccaaaaacttcacttaatggca

SEQ ID NO: 4223559 - DNA, 25 bp, Homo sapien
gcactcaactgttatgactaataca

SEQ ID NO: 4223560 - DNA, 25 bp, Homo sapien
aggaattctcatataccgcaataga

SEQ ID NO: 4223561 - DNA, 25 bp, Homo sapien
tcatataccgcaatagaatgaagaa

SEQ ID NO: 4223562 - DNA, 25 bp, Homo sapien
agagaattatctttaggtgaagaaa

SEQ ID NO: 4223563 - DNA, 25 bp, Homo sapien
cccaggaattctcatataccgcaat

SEQ ID NO: 4223564 - DNA, 25 bp, Homo sapien
tgactgttcacaaaccacttttaat

SEQ ID NO: 4223565 - DNA, 25 bp, Homo sapien
cacttttaatcaaattgggctttag

SEQ ID NO: 4223566 - DNA, 25 bp, Homo sapien
tcaagaaacattcgaacatataatc

SEQ ID NO: 4223567 - DNA, 25 bp, Homo sapien
aattaagacatataatctaccattt

SEQ ID NO: 4223568 - DNA, 25 bp, Homo sapien
aaagctttttatggctatgctagca

SEQ ID NO: 4223569 - DNA, 25 bp, Homo sapien
tgcgtggaatacaggccctaagggc

SEQ ID NO: 4223570 - DNA, 25 bp, Homo sapien
gctactgctatgtttttgctaaaag

SEQ ID NO: 4223571 - DNA, 25 bp, Homo sapien
ggcacttatgctgggtggaagccaa

SEQ ID NO: 4223572 - DNA, 25 bp, Homo sapien
ggcacaggaggtggtaagaagaaat

SEQ ID NO: 4223573 - DNA, 25 bp, Homo sapien
tatttattcagactctgagaaaggg

SEQ ID NO: 4223574 - DNA, 25 bp, Homo sapien
gggtcatcagagaagcatcaaggca

SEQ ID NO: 4223575 - DNA, 25 bp, Homo sapien
ttggtctagttatttattcagactc

SEQ ID NO: 4223576 - DNA, 25 bp, Homo sapien
tacacacccagtacttaaggcctgg

SEQ ID NO: 4223577 - DNA, 25 bp, Homo sapien
taaggcctggacattttactgttgg

SEQ ID NO: 4223578 - DNA, 25 bp, Homo sapien
tactgttggcaagaactgcaagaca

SEQ ID NO: 4223579 - DNA, 25 bp, Homo sapien
cattatctattgctcttgaccaggg

SEQ ID NO: 4223580 - DNA, 25 bp, Homo sapien
ggcagcctacaggataaggtactat

SEQ ID NO: 4223581 - DNA, 25 bp, Homo sapien
ttctggatgagtcccctgcctgatg

SEQ ID NO: 4223582 - DNA, 25 bp, Homo sapien
tgtgtttaagacaccagtctggctg

SEQ ID NO: 4223583 - DNA, 25 bp, Homo sapien
tattatttcatacgcttcttggcca

SEQ ID NO: 4223584 - DNA, 25 bp, Homo sapien
aagatttgctttcagatacagccaa

SEQ ID NO: 4223585 - DNA, 25 bp, Homo sapien
tctgaccttgaaataaacgcattaa

SEQ ID NO: 4223586 - DNA, 25 bp, Homo sapien
gaggtagactgccaaatgtagtagt

SEQ ID NO: 4223587 - DNA, 25 bp, Homo sapien
aattcacgaatgtacatgtgtctcc

SEQ ID NO: 4223588 - DNA, 25 bp, Homo sapien
tagtaggcagcccttctaggccatc

SEQ ID NO: 4223589 - DNA, 25 bp, Homo sapien
cttttgccaataatgagagggtcta

SEQ ID NO: 4223590 - DNA, 25 bp, Homo sapien
tacccagaattctatcaccagatgc

SEQ ID NO: 4223591 - DNA, 25 bp, Homo sapien
taggtcatctaggagtacaagtaca

SEQ ID NO: 4223592 - DNA, 25 bp, Homo sapien
tacctacagctagcacaaaaggcag

SEQ ID NO: 4223593 - DNA, 25 bp, Homo sapien
ccagagtgggttagaactacctaca

SEQ ID NO: 4223594 - DNA, 25 bp, Homo sapien
tcactatcagcaaggtaagcggagg

SEQ ID NO: 4223595 - DNA, 25 bp, Homo sapien
caaaaggcagtcgtcagagctctag

SEQ ID NO: 4223596 - DNA, 25 bp, Homo sapien
tcttcagggtcagtaacatgaatgg

SEQ ID NO: 4223597 - DNA, 25 bp, Homo sapien
tcagggtcagtaacatgaatggagc

SEQ ID NO: 4223598 - DNA, 25 bp, Homo sapien
cagggtcagtaacatgaatggagct

SEQ ID NO: 4223599 - DNA, 25 bp, Homo sapien
ggtcttcagggtcagtaacatgaat

SEQ ID NO: 4223600 - DNA, 25 bp, Homo sapien
taataaattgaccttagcttcctag

SEQ ID NO: 4223601 - DNA, 25 bp, Homo sapien
gaccttagcttcctagagcttttta

SEQ ID NO: 4223602 - DNA, 25 bp, Homo sapien
tcttttgtgatgacatttagcttaa

SEQ ID NO: 4223603 - DNA, 25 bp, Homo sapien
tagcttaagcactcattgttcaact

SEQ ID NO: 4223604 - DNA, 25 bp, Homo sapien
gcatccttgggcgattttgtcactg

SEQ ID NO: 4223605 - DNA, 25 bp, Homo sapien
tgaaggcctaattgctgaacactac

SEQ ID NO: 4223606 - DNA, 25 bp, Homo sapien
cattggataacaatgggaatgtgtt

SEQ ID NO: 4223607 - DNA, 25 bp, Homo sapien
tcctaggctataagcttgtaaagtg

SEQ ID NO: 4223608 - DNA, 25 bp, Homo sapien
cagaagagatactgtgaatctttgc

SEQ ID NO: 4223609 - DNA, 25 bp, Homo sapien
aagcagaagagatactgtgaatctt

SEQ ID NO: 4223610 - DNA, 25 bp, Homo sapien
aagagatactgtgaatctttgcaga

SEQ ID NO: 4223611 - DNA, 25 bp, Homo sapien
gtaagcaggcgctaaacattgattt

SEQ ID NO: 4223612 - DNA, 25 bp, Homo sapien
tgtatggcatatcacctctctaggg

SEQ ID NO: 4223613 - DNA, 25 bp, Homo sapien
gacaaaaacaagtgctcagagtctt

SEQ ID NO: 4223614 - DNA, 25 bp, Homo sapien
taaaatcctagtggtaagccctgat

SEQ ID NO: 4223615 - DNA, 25 bp, Homo sapien
gaaggtgactgtttggatgccaaga

SEQ ID NO: 4223616 - DNA, 25 bp, Homo sapien
tataatatctaacccttaaaggcca

SEQ ID NO: 4223617 - DNA, 25 bp, Homo sapien
gttctgactgcaatttaatgacact

SEQ ID NO: 4223618 - DNA, 25 bp, Homo sapien
ggtaccacaggttgggatatcaaca

SEQ ID NO: 4223619 - DNA, 25 bp, Homo sapien
taattagtaaccagtgaaggactag

SEQ ID NO: 4223620 - DNA, 25 bp, Homo sapien
gaagtccagcaagtttttatgatca

SEQ ID NO: 4223621 - DNA, 25 bp, Homo sapien
tacttgcatgagtttgtagcaggca

SEQ ID NO: 4223622 - DNA, 25 bp, Homo sapien
caccatggttagagagcttacttgc

SEQ ID NO: 4223623 - DNA, 25 bp, Homo sapien
gcttggtccacaatcttgaagtcca

SEQ ID NO: 4223624 - DNA, 25 bp, Homo sapien
caaccccatggctaaagtaactcgg

SEQ ID NO: 4223625 - DNA, 25 bp, Homo sapien
taagaggtggttccgttaggcagca

SEQ ID NO: 4223626 - DNA, 25 bp, Homo sapien
gaatacacaactagtagctccctgg

SEQ ID NO: 4223627 - DNA, 25 bp, Homo sapien
taactcggtcagctgatttggcaga

SEQ ID NO: 4223628 - DNA, 25 bp, Homo sapien
agaggaaatacagacgtttatgcga

SEQ ID NO: 4223629 - DNA, 25 bp, Homo sapien
gacgtttatgcgaaattccacactt

SEQ ID NO: 4223630 - DNA, 25 bp, Homo sapien
tatgcgaaattccacactttaaatg

SEQ ID NO: 4223631 - DNA, 25 bp, Homo sapien
tacagacgtttatgcgaaattccac

SEQ ID NO: 4223632 - DNA, 25 bp, Homo sapien
tgacctgtgattcataaaacccgtt

SEQ ID NO: 4223633 - DNA, 25 bp, Homo sapien
cagcttcagaattgacctgtgattc

SEQ ID NO: 4223634 - DNA, 25 bp, Homo sapien
tcataaaacccgtttggcagagtca

SEQ ID NO: 4223635 - DNA, 25 bp, Homo sapien
cataaaacccgtttggcagagtcat

SEQ ID NO: 4223636 - DNA, 25 bp, Homo sapien
tgatctttccatgtggaagtcattg

SEQ ID NO: 4223637 - DNA, 25 bp, Homo sapien
cattttggaatgatctttccatgtg

SEQ ID NO: 4223638 - DNA, 25 bp, Homo sapien
agaccaaagtgccattagtttcatt

SEQ ID NO: 4223639 - DNA, 25 bp, Homo sapien
cattttcagaggttggagtcaaagc

SEQ ID NO: 4223640 - DNA, 25 bp, Homo sapien
taaatgcctctacatacctgccttt

SEQ ID NO: 4223641 - DNA, 25 bp, Homo sapien
ggcttctctgagatatataagacca

SEQ ID NO: 4223642 - DNA, 25 bp, Homo sapien
tcttcagtaggtaattataaagggc

SEQ ID NO: 4223643 - DNA, 25 bp, Homo sapien
taacaacgcagacattttcaagagt

SEQ ID NO: 4223644 - DNA, 25 bp, Homo sapien
tatagtgaagatcagggaaacctcc

SEQ ID NO: 4223645 - DNA, 25 bp, Homo sapien
tgattagtctcactatgcttgagcc

SEQ ID NO: 4223646 - DNA, 25 bp, Homo sapien
cctgtttaaattctggcccactgtt

SEQ ID NO: 4223647 - DNA, 25 bp, Homo sapien
tctggtgaagcctaactccgcttct

SEQ ID NO: 4223648 - DNA, 25 bp, Homo sapien
ctgctagaatcacagtgagaattat

SEQ ID NO: 4223649 - DNA, 25 bp, Homo sapien
tgctagaatcacagtgagaattatt

SEQ ID NO: 4223650 - DNA, 25 bp, Homo sapien
agaatcacagtgagaattatttcaa

SEQ ID NO: 4223651 - DNA, 25 bp, Homo sapien
ctagaatcacagtgagaattatttc

SEQ ID NO: 4223652 - DNA, 25 bp, Homo sapien
tcaaggagaagtatgaatctcacgg

SEQ ID NO: 4223653 - DNA, 25 bp, Homo sapien
gacactcagtgtgaaactttccctg

SEQ ID NO: 4223654 - DNA, 25 bp, Homo sapien
tgaatctcacggacactcagtgtga

SEQ ID NO: 4223655 - DNA, 25 bp, Homo sapien
gtgtgaaactttccctgtagtccaa

SEQ ID NO: 4223656 - DNA, 25 bp, Homo sapien
catcagaagggtaccagggatcctc

SEQ ID NO: 4223657 - DNA, 25 bp, Homo sapien
taccagggatcctcgaggctgaagc

SEQ ID NO: 4223658 - DNA, 25 bp, Homo sapien
caaggacatcagaagggtaccaggg

SEQ ID NO: 4223659 - DNA, 25 bp, Homo sapien
tccaccaaggacatcagaagggtac

SEQ ID NO: 4223660 - DNA, 25 bp, Homo sapien
ttctccttgtctttgctgtgtaccc

SEQ ID NO: 4223661 - DNA, 25 bp, Homo sapien
tagattttgacgttctccttgtctt

SEQ ID NO: 4223662 - DNA, 25 bp, Homo sapien
ctagattttgacgttctccttgtct

SEQ ID NO: 4223663 - DNA, 25 bp, Homo sapien
gacgttctccttgtctttgctgtgt

SEQ ID NO: 4223664 - DNA, 25 bp, Homo sapien
cttcaatagcaatgaacaattgcca

SEQ ID NO: 4223665 - DNA, 25 bp, Homo sapien
aatagcaatgaacaattgccagcag

SEQ ID NO: 4223666 - DNA, 25 bp, Homo sapien
agccctcccttttagtgtccctctg

SEQ ID NO: 4223667 - DNA, 25 bp, Homo sapien
caatgaacaattgccagcagccctc

SEQ ID NO: 4223668 - DNA, 25 bp, Homo sapien
tttcctagcagccattctgtatcgt

SEQ ID NO: 4223669 - DNA, 25 bp, Homo sapien
ctcctttggaagcaggtagttggaa

SEQ ID NO: 4223670 - DNA, 25 bp, Homo sapien
tgcttgggaactaacagatatttct

SEQ ID NO: 4223671 - DNA, 25 bp, Homo sapien
tatcgtcaaaggtgagttgcagagg

SEQ ID NO: 4223672 - DNA, 25 bp, Homo sapien
tgggcttcagggtcttaagtggtac

SEQ ID NO: 4223673 - DNA, 25 bp, Homo sapien
cacaggatgctctccgattcttcag

SEQ ID NO: 4223674 - DNA, 25 bp, Homo sapien
gctgccaagagcttggtacacagga

SEQ ID NO: 4223675 - DNA, 25 bp, Homo sapien
tccgattcttcagtgtggtctgaga

SEQ ID NO: 4223676 - DNA, 25 bp, Homo sapien
tcacaagtctgctgctgccaagagc

SEQ ID NO: 4223677 - DNA, 25 bp, Homo sapien
gagccattgtccatgacgagcgtgg

SEQ ID NO: 4223678 - DNA, 25 bp, Homo sapien
tgtccatgacgagcgtggcgatatc

SEQ ID NO: 4223679 - DNA, 25 bp, Homo sapien
atgggagagccattgtccatgacga

SEQ ID NO: 4223680 - DNA, 25 bp, Homo sapien
catgacgagcgtggcgatatcatta

SEQ ID NO: 4223681 - DNA, 25 bp, Homo sapien
cattgtccacgtaggacttcttctg

SEQ ID NO: 4223682 - DNA, 25 bp, Homo sapien
gggcctcattgtccacgtaggactt

SEQ ID NO: 4223683 - DNA, 25 bp, Homo sapien
gcctcattgtccacgtaggacttct

SEQ ID NO: 4223684 - DNA, 25 bp, Homo sapien
gtccacgtaggacttcttctgaccc

SEQ ID NO: 4223685 - DNA, 25 bp, Homo sapien
ctgggtcatcccacggttggctttg

SEQ ID NO: 4223686 - DNA, 25 bp, Homo sapien
tctgggtcatcccacggttggcttt

SEQ ID NO: 4223687 - DNA, 25 bp, Homo sapien
tgggtcatcccacggttggctttgg

SEQ ID NO: 4223688 - DNA, 25 bp, Homo sapien
aggctggaaaagagccttgaggcag

SEQ ID NO: 4223689 - DNA, 25 bp, Homo sapien
tgctgatggtgccgacttgggcttc

SEQ ID NO: 4223690 - DNA, 25 bp, Homo sapien
ttgttgctgatggtgccgacttggg

SEQ ID NO: 4223691 - DNA, 25 bp, Homo sapien
ctgatggtgccgacttgggcttcag

SEQ ID NO: 4223692 - DNA, 25 bp, Homo sapien
tggacagtactgcattggtgtagag

SEQ ID NO: 4223693 - DNA, 25 bp, Homo sapien
cattggtgtagaggtctttgcaaat

SEQ ID NO: 4223694 - DNA, 25 bp, Homo sapien
tgccactggacagtactgcattggt

SEQ ID NO: 4223695 - DNA, 25 bp, Homo sapien
cagtactgcattggtgtagaggtct

SEQ ID NO: 4223696 - DNA, 25 bp, Homo sapien
gatctttatctgcattgtgctggga

SEQ ID NO: 4223697 - DNA, 25 bp, Homo sapien
tctttatctgcattgtgctgggagc

SEQ ID NO: 4223698 - DNA, 25 bp, Homo sapien
tttatctgcattgtgctgggagcca

SEQ ID NO: 4223699 - DNA, 25 bp, Homo sapien
tatctgcattgtgctgggagccagg

SEQ ID NO: 4223700 - DNA, 25 bp, Homo sapien
ttaggaggaataacttaaagacatc

SEQ ID NO: 4223701 - DNA, 25 bp, Homo sapien
tgtacaccataaatagacataactt

SEQ ID NO: 4223702 - DNA, 25 bp, Homo sapien
tgaatttatccattccacagttgta

SEQ ID NO: 4223703 - DNA, 25 bp, Homo sapien
tgtacattacagtgactagagttag

SEQ ID NO: 4223704 - DNA, 25 bp, Homo sapien
aatccgtgtgggtgacctaattctt

SEQ ID NO: 4223705 - DNA, 25 bp, Homo sapien
ctttcaatccgtgtgggtgacctaa

SEQ ID NO: 4223706 - DNA, 25 bp, Homo sapien
gtagggcccgcacggaacctgcttc

SEQ ID NO: 4223707 - DNA, 25 bp, Homo sapien
agaactcaggtgccgagaggacagg

SEQ ID NO: 4223708 - DNA, 25 bp, Homo sapien
atccttgggtagacttctgggagga

SEQ ID NO: 4223709 - DNA, 25 bp, Homo sapien
gaggccatcaaagctccaaacaggc

SEQ ID NO: 4223710 - DNA, 25 bp, Homo sapien
tcggactatggctccctttcgctgg

SEQ ID NO: 4223711 - DNA, 25 bp, Homo sapien
caactgccgctttcgttaaacaacg

SEQ ID NO: 4223712 - DNA, 25 bp, Homo sapien
ggaatcacggccttgaaaacagctg

SEQ ID NO: 4223713 - DNA, 25 bp, Homo sapien
taacttcagatggtgcggcttcagg

SEQ ID NO: 4223714 - DNA, 25 bp, Homo sapien
ctatcactgatacagaatggctggg

SEQ ID NO: 4223715 - DNA, 25 bp, Homo sapien
tgttgaagactacagatagacgcag

SEQ ID NO: 4223716 - DNA, 25 bp, Homo sapien
cattatgcttgctgccttaccggct

SEQ ID NO: 4223717 - DNA, 25 bp, Homo sapien
taacctgcaatttgtgctaatgggc

SEQ ID NO: 4223718 - DNA, 25 bp, Homo sapien
cctaaaaagagcagaccatgacccc

SEQ ID NO: 4223719 - DNA, 25 bp, Homo sapien
aactggctgcctaagaataccaggg

SEQ ID NO: 4223720 - DNA, 25 bp, Homo sapien
cactgcactcaatgtatagtttttt

SEQ ID NO: 4223721 - DNA, 25 bp, Homo sapien
tgaacagtgtacactgcactcaatg

SEQ ID NO: 4223722 - DNA, 25 bp, Homo sapien
cacactttccgtcaagtcctcaaag

SEQ ID NO: 4223723 - DNA, 25 bp, Homo sapien
tgatgggccggttccatatttgtgc

SEQ ID NO: 4223724 - DNA, 25 bp, Homo sapien
ccagaggtgctgacaacagggttca

SEQ ID NO: 4223725 - DNA, 25 bp, Homo sapien
tcctcctcggaatcatggctgccct

SEQ ID NO: 4223726 - DNA, 25 bp, Homo sapien
tacctacggaggtggcagtcatctc

SEQ ID NO: 4223727 - DNA, 25 bp, Homo sapien
gtgctgagatcgctcacagtttcct

SEQ ID NO: 4223728 - DNA, 25 bp, Homo sapien
ttggaaccgcaaaggccgctgggaa

SEQ ID NO: 4223729 - DNA, 25 bp, Homo sapien
gttggaaccgcaaaggccgctggga

SEQ ID NO: 4223730 - DNA, 25 bp, Homo sapien
tagaaagccccgttagagccgcgaa

SEQ ID NO: 4223731 - DNA, 25 bp, Homo sapien
gtagaaagccccgttagagccgcga

SEQ ID NO: 4223732 - DNA, 25 bp, Homo sapien
gagccgcgaacctccaccgtcagct

SEQ ID NO: 4223733 - DNA, 25 bp, Homo sapien
cgttagagccgcgaacctccaccgt

SEQ ID NO: 4223734 - DNA, 25 bp, Homo sapien
tatgcaagtggattatggctggaca

SEQ ID NO: 4223735 - DNA, 25 bp, Homo sapien
caagcgtacatgatttcagtgcaca

SEQ ID NO: 4223736 - DNA, 25 bp, Homo sapien
acaggtggctagtgtcctttccaac

SEQ ID NO: 4223737 - DNA, 25 bp, Homo sapien
gagttctgaagaccacagtttccac

SEQ ID NO: 4223738 - DNA, 25 bp, Homo sapien
tttcaagtcagcagtttaataggat

SEQ ID NO: 4223739 - DNA, 25 bp, Homo sapien
cacagaactacttcaagcccctcat

SEQ ID NO: 4223740 - DNA, 25 bp, Homo sapien
gataatggtaaggtgaagtacagac

SEQ ID NO: 4223741 - DNA, 25 bp, Homo sapien
gcccctcatgttagacagagagatt

SEQ ID NO: 4223742 - DNA, 25 bp, Homo sapien
tagtacatttcagctccatggctgg

SEQ ID NO: 4223743 - DNA, 25 bp, Homo sapien
gtctaaagcaaaggcatagctcaaa

SEQ ID NO: 4223744 - DNA, 25 bp, Homo sapien
tagcctcagtattctcaaatagtgg

SEQ ID NO: 4223745 - DNA, 25 bp, Homo sapien
tacagacctggattcacttagcctc

SEQ ID NO: 4223746 - DNA, 25 bp, Homo sapien
ggagcgcatccctttgccaacaata

SEQ ID NO: 4223747 - DNA, 25 bp, Homo sapien
gctattttactaatggagacctctg

SEQ ID NO: 4223748 - DNA, 25 bp, Homo sapien
tgaagaaatctcaacacgggagcgc

SEQ ID NO: 4223749 - DNA, 25 bp, Homo sapien
gaatggcaggcaagttaaatacact

SEQ ID NO: 4223750 - DNA, 25 bp, Homo sapien
tacaatttgttctgaacttcgcttt

SEQ ID NO: 4223751 - DNA, 25 bp, Homo sapien
gtagatcctaccttactatgaagat

SEQ ID NO: 4223752 - DNA, 25 bp, Homo sapien
gtgtcttgtagatcctaccttacta

SEQ ID NO: 4223753 - DNA, 25 bp, Homo sapien
tttgttctgaacttcgcttttctct

SEQ ID NO: 4223754 - DNA, 25 bp, Homo sapien
tcagctggccgcaacctccaactcc

SEQ ID NO: 4223755 - DNA, 25 bp, Homo sapien
ccaccttggcttcccaaagtgctgg

SEQ ID NO: 4223756 - DNA, 25 bp, Homo sapien
cctggttcaagcacttctcctgcct

SEQ ID NO: 4223757 - DNA, 25 bp, Homo sapien
ctcagctggccgcaacctccaactc

SEQ ID NO: 4223758 - DNA, 25 bp, Homo sapien
caagaaaggcggacaccttgagctc

SEQ ID NO: 4223759 - DNA, 25 bp, Homo sapien
aagaaaggcggacaccttgagctca

SEQ ID NO: 4223760 - DNA, 25 bp, Homo sapien
agcacttcgtaactctaaaaggttg

SEQ ID NO: 4223761 - DNA, 25 bp, Homo sapien
tcatctacctgggaattagcaaaag

SEQ ID NO: 4223762 - DNA, 25 bp, Homo sapien
gaacacaaggtttggaattaggcag

SEQ ID NO: 4223763 - DNA, 25 bp, Homo sapien
acacctcaggtattagttcagcaag

SEQ ID NO: 4223764 - DNA, 25 bp, Homo sapien
tgtaagggagtcttcatgaacatct

SEQ ID NO: 4223765 - DNA, 25 bp, Homo sapien
taagggagtcttcatgaacatcttt

SEQ ID NO: 4223766 - DNA, 25 bp, Homo sapien
gtaagggagtcttcatgaacatctt

SEQ ID NO: 4223767 - DNA, 25 bp, Homo sapien
tcaattaaacagtgctcttggagat

SEQ ID NO: 4223768 - DNA, 25 bp, Homo sapien
tcaccattactgtccaaatggcagc

SEQ ID NO: 4223769 - DNA, 25 bp, Homo sapien
tgtttctacatgaagcagctgttag

SEQ ID NO: 4223770 - DNA, 25 bp, Homo sapien
accattactgtccaaatggcagctg

SEQ ID NO: 4223771 - DNA, 25 bp, Homo sapien
acttcattaaatggaacctggcgtt

SEQ ID NO: 4223772 - DNA, 25 bp, Homo sapien
tctttttttatatcaggtggtggtg

SEQ ID NO: 4223773 - DNA, 25 bp, Homo sapien
taaatggaacctggcgttctggttg

SEQ ID NO: 4223774 - DNA, 25 bp, Homo sapien
ggtggtggtaatctaacttcattaa

SEQ ID NO: 4223775 - DNA, 25 bp, Homo sapien
tgagacttgacgctaccaattttaa

SEQ ID NO: 4223776 - DNA, 25 bp, Homo sapien
taatctgagacttgacgctaccaat

SEQ ID NO: 4223777 - DNA, 25 bp, Homo sapien
tctgagacttgacgctaccaatttt

SEQ ID NO: 4223778 - DNA, 25 bp, Homo sapien
gagacttgacgctaccaattttaag

SEQ ID NO: 4223779 - DNA, 25 bp, Homo sapien
aaaatgcaaggacttcctacaccaa

SEQ ID NO: 4223780 - DNA, 25 bp, Homo sapien
ggaattatactaccagacttgcata

SEQ ID NO: 4223781 - DNA, 25 bp, Homo sapien
gagaattcatgagacatcagtttcc

SEQ ID NO: 4223782 - DNA, 25 bp, Homo sapien
tgaaaaagatacctccagtgttaat

SEQ ID NO: 4223783 - DNA, 25 bp, Homo sapien
aattatttggtaaacgatcagtgat

SEQ ID NO: 4223784 - DNA, 25 bp, Homo sapien
tttcccaagtatactgagggttaca

SEQ ID NO: 4223785 - DNA, 25 bp, Homo sapien
tatactgagggttacaaaaagaata

SEQ ID NO: 4223786 - DNA, 25 bp, Homo sapien
gatcagtgatgactgttttcccaag

SEQ ID NO: 4223787 - DNA, 25 bp, Homo sapien
tttaagatgtttgtggtcaggcacg

SEQ ID NO: 4223788 - DNA, 25 bp, Homo sapien
aatgatggcatcacctagaggatac

SEQ ID NO: 4223789 - DNA, 25 bp, Homo sapien
tagctaccgttgaccagttgataat

SEQ ID NO: 4223790 - DNA, 25 bp, Homo sapien
gcatagcctgaggtatcacatctct

SEQ ID NO: 4223791 - DNA, 25 bp, Homo sapien
ggctcttggtcatttgctcttgaat

SEQ ID NO: 4223792 - DNA, 25 bp, Homo sapien
gctcttggtcatttgctcttgaata

SEQ ID NO: 4223793 - DNA, 25 bp, Homo sapien
gattgacaggccgaagtcgttcaaa

SEQ ID NO: 4223794 - DNA, 25 bp, Homo sapien
tgattgacaggccgaagtcgttcaa

SEQ ID NO: 4223795 - DNA, 25 bp, Homo sapien
ttgattgacaggccgaagtcgttca

SEQ ID NO: 4223796 - DNA, 25 bp, Homo sapien
ggatggtaaaaaattctgcatgctc

SEQ ID NO: 4223797 - DNA, 25 bp, Homo sapien
attctgcatgctcctactgctttct

SEQ ID NO: 4223798 - DNA, 25 bp, Homo sapien
cagtatcattagctgtgttgtttct

SEQ ID NO: 4223799 - DNA, 25 bp, Homo sapien
tttatgtgcattttcattagcacac

SEQ ID NO: 4223800 - DNA, 25 bp, Homo sapien
cgtacgaatacttcgcaaatgcatg

SEQ ID NO: 4223801 - DNA, 25 bp, Homo sapien
tttctggacataagcatcaacttcg

SEQ ID NO: 4223802 - DNA, 25 bp, Homo sapien
gcatcaacttcgtacgaatacttcg

SEQ ID NO: 4223803 - DNA, 25 bp, Homo sapien
gaatacttcgcaaatgcatgtcact

SEQ ID NO: 4223804 - DNA, 25 bp, Homo sapien
tttattgcaaatccatgttcatagc

SEQ ID NO: 4223805 - DNA, 25 bp, Homo sapien
ttcatagcattatttacgacagtaa

SEQ ID NO: 4223806 - DNA, 25 bp, Homo sapien
accacacgcggccacaaaatgtttt

SEQ ID NO: 4223807 - DNA, 25 bp, Homo sapien
acgacagtaaagaggtgaaagcaac

SEQ ID NO: 4223808 - DNA, 25 bp, Homo sapien
gccaggcccattaaatcttctctca

SEQ ID NO: 4223809 - DNA, 25 bp, Homo sapien
aggcccattaaatcttctctcacaa

SEQ ID NO: 4223810 - DNA, 25 bp, Homo sapien
tattgccaggcccattaaatcttct

SEQ ID NO: 4223811 - DNA, 25 bp, Homo sapien
tcctattgccaggcccattaaatct

SEQ ID NO: 4223812 - DNA, 25 bp, Homo sapien
gcagctgttcataagagctatgtat

SEQ ID NO: 4223813 - DNA, 25 bp, Homo sapien
cagttactctaatttgaaggatggt

SEQ ID NO: 4223814 - DNA, 25 bp, Homo sapien
ctttactatgtgaaagcagctgttc

SEQ ID NO: 4223815 - DNA, 25 bp, Homo sapien
gaagcttctagtcagctttactatg

SEQ ID NO: 4223816 - DNA, 25 bp, Homo sapien
cgagattcctaggaacctgaataaa

SEQ ID NO: 4223817 - DNA, 25 bp, Homo sapien
caacgagattcctaggaacctgaat

SEQ ID NO: 4223818 - DNA, 25 bp, Homo sapien
aacgagattcctaggaacctgaata

SEQ ID NO: 4223819 - DNA, 25 bp, Homo sapien
acgagattcctaggaacctgaataa

SEQ ID NO: 4223820 - DNA, 25 bp, Homo sapien
caagactagttttcaattaagtcgc

SEQ ID NO: 4223821 - DNA, 25 bp, Homo sapien
ccctgggccttattagtgagtcatc

SEQ ID NO: 4223822 - DNA, 25 bp, Homo sapien
aaatctacacataactggaataagg

SEQ ID NO: 4223823 - DNA, 25 bp, Homo sapien
gaataaggttatcagactacaagac

SEQ ID NO: 4223824 - DNA, 25 bp, Homo sapien
aattctcactcgaaccacaccagat

SEQ ID NO: 4223825 - DNA, 25 bp, Homo sapien
tcaattctcactcgaaccacaccag

SEQ ID NO: 4223826 - DNA, 25 bp, Homo sapien
ttctcactcgaaccacaccagattt

SEQ ID NO: 4223827 - DNA, 25 bp, Homo sapien
ctcactcgaaccacaccagatttgt

SEQ ID NO: 4223828 - DNA, 25 bp, Homo sapien
tcctttgtcagcacagttcacaatg

SEQ ID NO: 4223829 - DNA, 25 bp, Homo sapien
gcaacttggatggaggccattattc

SEQ ID NO: 4223830 - DNA, 25 bp, Homo sapien
tcaaccaatgggtggatacaaaaaa

SEQ ID NO: 4223831 - DNA, 25 bp, Homo sapien
cagattctataaaatagttaaggag

SEQ ID NO: 4223832 - DNA, 25 bp, Homo sapien
aatatgatactctagaagaacctgc

SEQ ID NO: 4223833 - DNA, 25 bp, Homo sapien
tatgatactctagaagaacctgcac

SEQ ID NO: 4223834 - DNA, 25 bp, Homo sapien
gcaatatgatactctagaagaacct

SEQ ID NO: 4223835 - DNA, 25 bp, Homo sapien
aggcaatatgatactctagaagaac

SEQ ID NO: 4223836 - DNA, 25 bp, Homo sapien
aatctgtcgcagctgttcatcaatc

SEQ ID NO: 4223837 - DNA, 25 bp, Homo sapien
atctgtcgcagctgttcatcaatct

SEQ ID NO: 4223838 - DNA, 25 bp, Homo sapien
gtacagaagagacggtactttcatc

SEQ ID NO: 4223839 - DNA, 25 bp, Homo sapien
ttcatcagtggcatatcctttctct

SEQ ID NO: 4223840 - DNA, 25 bp, Homo sapien
cttgtacagaagagacggtactttc

SEQ ID NO: 4223841 - DNA, 25 bp, Homo sapien
tcatcagtggcatatcctttctctt

SEQ ID NO: 4223842 - DNA, 25 bp, Homo sapien
ctctgcctcttccgctataagacct

SEQ ID NO: 4223843 - DNA, 25 bp, Homo sapien
gcctcttccgctataagacctagaa

SEQ ID NO: 4223844 - DNA, 25 bp, Homo sapien
cctcttccgctataagacctagaac

SEQ ID NO: 4223845 - DNA, 25 bp, Homo sapien
ctgcctcttccgctataagacctag

SEQ ID NO: 4223846 - DNA, 25 bp, Homo sapien
tacgctcagattccgtttcagaggg

SEQ ID NO: 4223847 - DNA, 25 bp, Homo sapien
cagctcgtctttacgctcagattcc

SEQ ID NO: 4223848 - DNA, 25 bp, Homo sapien
tcgtctttacgctcagattccgttt

SEQ ID NO: 4223849 - DNA, 25 bp, Homo sapien
tttacgctcagattccgtttcagag

SEQ ID NO: 4223850 - DNA, 25 bp, Homo sapien
gaactgatggaggatttgccaccac

SEQ ID NO: 4223851 - DNA, 25 bp, Homo sapien
agaactgatggaggatttgccacca

SEQ ID NO: 4223852 - DNA, 25 bp, Homo sapien
cagaactgatggaggatttgccacc

SEQ ID NO: 4223853 - DNA, 25 bp, Homo sapien
cctgatactgctatatggtccacta

SEQ ID NO: 4223854 - DNA, 25 bp, Homo sapien
gctgacagagtatagaaaagactac

SEQ ID NO: 4223855 - DNA, 25 bp, Homo sapien
acaatgagtagcaagagaaacttcc

SEQ ID NO: 4223856 - DNA, 25 bp, Homo sapien
aacactctacgagggcttttcctga

SEQ ID NO: 4223857 - DNA, 25 bp, Homo sapien
gcgagctttcatccccttaactgag

SEQ ID NO: 4223858 - DNA, 25 bp, Homo sapien
caaggtaatcctgcccagagactag

SEQ ID NO: 4223859 - DNA, 25 bp, Homo sapien
tcttggcttcctaacatttcctgtg

SEQ ID NO: 4223860 - DNA, 25 bp, Homo sapien
cagaaagtaagcagacatcttggct

SEQ ID NO: 4223861 - DNA, 25 bp, Homo sapien
taagagtactgcaattatgaatgtt

SEQ ID NO: 4223862 - DNA, 25 bp, Homo sapien
gtactgcaattatgaatgtttgatc

SEQ ID NO: 4223863 - DNA, 25 bp, Homo sapien
gtttaagagtactgcaattatgaat

SEQ ID NO: 4223864 - DNA, 25 bp, Homo sapien
gagtactgcaattatgaatgtttga

SEQ ID NO: 4223865 - DNA, 25 bp, Homo sapien
tggattgctgtctggatctttgagc

SEQ ID NO: 4223866 - DNA, 25 bp, Homo sapien
ggattgctgtctggatctttgagca

SEQ ID NO: 4223867 - DNA, 25 bp, Homo sapien
tatggattgctgtctggatctttga

SEQ ID NO: 4223868 - DNA, 25 bp, Homo sapien
ctgtatggattgctgtctggatctt

SEQ ID NO: 4223869 - DNA, 25 bp, Homo sapien
cgcctacgacggttagtactgtgat

SEQ ID NO: 4223870 - DNA, 25 bp, Homo sapien
ctacgagaccgcctacgacggttag

SEQ ID NO: 4223871 - DNA, 25 bp, Homo sapien
agaccgcctacgacggttagtactg

SEQ ID NO: 4223872 - DNA, 25 bp, Homo sapien
ttcgtctacgagaccgcctacgacg

SEQ ID NO: 4223873 - DNA, 25 bp, Homo sapien
taaaagcactaagtaccttgccagc

SEQ ID NO: 4223874 - DNA, 25 bp, Homo sapien
cagacttaaactgccatcattcagg

SEQ ID NO: 4223875 - DNA, 25 bp, Homo sapien
gacacagtcttcctctctagtacag

SEQ ID NO: 4223876 - DNA, 25 bp, Homo sapien
gatatatgtacctttaccagtgtca

SEQ ID NO: 4223877 - DNA, 25 bp, Homo sapien
tatcttctgcctgacccctgaagcg

SEQ ID NO: 4223878 - DNA, 25 bp, Homo sapien
cctgcggctacgattgcgtcgctgg

SEQ ID NO: 4223879 - DNA, 25 bp, Homo sapien
tgtctatcttctgcctgacccctga

SEQ ID NO: 4223880 - DNA, 25 bp, Homo sapien
ctgaagcgacgcctgcggctacgat

SEQ ID NO: 4223881 - DNA, 25 bp, Homo sapien
ggtgtccacaggtccactcaagtta

SEQ ID NO: 4223882 - DNA, 25 bp, Homo sapien
tacaactcccacaaaaatgaggtgc

SEQ ID NO: 4223883 - DNA, 25 bp, Homo sapien
acaacacagtccctcggatggcagg

SEQ ID NO: 4223884 - DNA, 25 bp, Homo sapien
tcagatatagtaagcaggcaccatg

SEQ ID NO: 4223885 - DNA, 25 bp, Homo sapien
aacacatgaaagaactggttttgga

SEQ ID NO: 4223886 - DNA, 25 bp, Homo sapien
ttaaaatagtaaagatgccagaatt

SEQ ID NO: 4223887 - DNA, 25 bp, Homo sapien
acatgaacttttagggatgggaact

SEQ ID NO: 4223888 - DNA, 25 bp, Homo sapien
aatgtctctacaaccactaaattta

SEQ ID NO: 4223889 - DNA, 25 bp, Homo sapien
tgtttccaagttcggccctcagtga

SEQ ID NO: 4223890 - DNA, 25 bp, Homo sapien
gaaacagtacgctcatcttgaagct

SEQ ID NO: 4223891 - DNA, 25 bp, Homo sapien
caagttaatcaactggacaccagtg

SEQ ID NO: 4223892 - DNA, 25 bp, Homo sapien
gaaaaagggctattgtcataatcca

SEQ ID NO: 4223893 - DNA, 25 bp, Homo sapien
ccaatcttggtagggacgatctgaa

SEQ ID NO: 4223894 - DNA, 25 bp, Homo sapien
taagctgggtatcacctccaaccaa

SEQ ID NO: 4223895 - DNA, 25 bp, Homo sapien
tacaaacgcagtgttctaagcccag

SEQ ID NO: 4223896 - DNA, 25 bp, Homo sapien
tacctgggcttttggtgctgaagaa

SEQ ID NO: 4223897 - DNA, 25 bp, Homo sapien
gctctagaaatataatctgcaactg

SEQ ID NO: 4223898 - DNA, 25 bp, Homo sapien
gagactcagctctagaaatataatc

SEQ ID NO: 4223899 - DNA, 25 bp, Homo sapien
agctctagaaatataatctgcaact

SEQ ID NO: 4223900 - DNA, 25 bp, Homo sapien
tgctctgagactcagctctagaaat

SEQ ID NO: 4223901 - DNA, 25 bp, Homo sapien
ccacagaaaacatctaaactaatga

SEQ ID NO: 4223902 - DNA, 25 bp, Homo sapien
aacaaataatcacctactttactca

SEQ ID NO: 4223903 - DNA, 25 bp, Homo sapien
tatctctagtacctagcagtgccca

SEQ ID NO: 4223904 - DNA, 25 bp, Homo sapien
taacaaagtattccactctatgggt

SEQ ID NO: 4223905 - DNA, 25 bp, Homo sapien
ttcaacttctttataaatgaaatct

SEQ ID NO: 4223906 - DNA, 25 bp, Homo sapien
acttctttataaatgaaatctatag

SEQ ID NO: 4223907 - DNA, 25 bp, Homo sapien
ctgccaaagggagacaactttttca

SEQ ID NO: 4223908 - DNA, 25 bp, Homo sapien
tgccaaagggagacaactttttcaa

SEQ ID NO: 4223909 - DNA, 25 bp, Homo sapien
catcgccagaagcactagttgggcc

SEQ ID NO: 4223910 - DNA, 25 bp, Homo sapien
tcgccagaagcactagttgggccgt

SEQ ID NO: 4223911 - DNA, 25 bp, Homo sapien
gaagcactagttgggccgtttattg

SEQ ID NO: 4223912 - DNA, 25 bp, Homo sapien
cagaagcactagttgggccgtttat

SEQ ID NO: 4223913 - DNA, 25 bp, Homo sapien
tctttggcaagcttgtacaagcact

SEQ ID NO: 4223914 - DNA, 25 bp, Homo sapien
aatgttacatatactattctcaagg

SEQ ID NO: 4223915 - DNA, 25 bp, Homo sapien
tttaatgttacatatactattctca

SEQ ID NO: 4223916 - DNA, 25 bp, Homo sapien
gaactgtaaactaggaacttcttca

SEQ ID NO: 4223917 - DNA, 25 bp, Homo sapien
cattctagttttcctcaggtgaaga

SEQ ID NO: 4223918 - DNA, 25 bp, Homo sapien
aagcctcaaggtagaacagtcactg

SEQ ID NO: 4223919 - DNA, 25 bp, Homo sapien
tccctgcagatgagagtttaacaaa

SEQ ID NO: 4223920 - DNA, 25 bp, Homo sapien
taaaacagaccagtttccagactaa

SEQ ID NO: 4223921 - DNA, 25 bp, Homo sapien
ggtgatgcctaaagcaagaatccta

SEQ ID NO: 4223922 - DNA, 25 bp, Homo sapien
gttgcaactgcacaagatcttccag

SEQ ID NO: 4223923 - DNA, 25 bp, Homo sapien
tcacctaactaggatagcagccaaa

SEQ ID NO: 4223924 - DNA, 25 bp, Homo sapien
gaaggcctcaggaaaaagcacgtaa

SEQ ID NO: 4223925 - DNA, 25 bp, Homo sapien
gggatccaaatcgtgtagcaaagac

SEQ ID NO: 4223926 - DNA, 25 bp, Homo sapien
ggttacaaaacgctagacacagcta

SEQ ID NO: 4223927 - DNA, 25 bp, Homo sapien
ggcaacagcccatgagaacactagt

SEQ ID NO: 4223928 - DNA, 25 bp, Homo sapien
catgggttatgagcaactacagtcc

SEQ ID NO: 4223929 - DNA, 25 bp, Homo sapien
agttgaaaatgtctgggatggatac

SEQ ID NO: 4223930 - DNA, 25 bp, Homo sapien
gtaagcaaccaagcaacaattaagt

SEQ ID NO: 4223931 - DNA, 25 bp, Homo sapien
tagctgaaaaaggaagcctagaggt

SEQ ID NO: 4223932 - DNA, 25 bp, Homo sapien
cagttaatccaattaagagggtaca

SEQ ID NO: 4223933 - DNA, 25 bp, Homo sapien
ttagtaaggttaagcagccaaggca

SEQ ID NO: 4223934 - DNA, 25 bp, Homo sapien
tctaaggtcccacggctagtgaaac

SEQ ID NO: 4223935 - DNA, 25 bp, Homo sapien
aagaaggcggcatgattaaacacac

SEQ ID NO: 4223936 - DNA, 25 bp, Homo sapien
gaagccaggtaaatctgagcctcga

SEQ ID NO: 4223937 - DNA, 25 bp, Homo sapien
tgccgacaggcaatgaagcattaac

SEQ ID NO: 4223938 - DNA, 25 bp, Homo sapien
cagtccattggacaaatcaaaaaat

SEQ ID NO: 4223939 - DNA, 25 bp, Homo sapien
tacttttgagggttcagtgcaaaca

SEQ ID NO: 4223940 - DNA, 25 bp, Homo sapien
gacagatagtgataatatgccgaca

SEQ ID NO: 4223941 - DNA, 25 bp, Homo sapien
tgtccgcacgggctctgcaggtgtt

SEQ ID NO: 4223942 - DNA, 25 bp, Homo sapien
tcgtctttctgcacggttctccagc

SEQ ID NO: 4223943 - DNA, 25 bp, Homo sapien
gctctgcaggtgttgcttgcctgga

SEQ ID NO: 4223944 - DNA, 25 bp, Homo sapien
aaccctgttggctcgctctcttggg

SEQ ID NO: 4223945 - DNA, 25 bp, Homo sapien
ggttgcgtcgctctctggtaaaggc

SEQ ID NO: 4223946 - DNA, 25 bp, Homo sapien
tcctgccgtgttgcgtagggcgcct

SEQ ID NO: 4223947 - DNA, 25 bp, Homo sapien
tgtccactgcttgagcgactttcct

SEQ ID NO: 4223948 - DNA, 25 bp, Homo sapien
ttttccggcctagtttgcggctgct

SEQ ID NO: 4223949 - DNA, 25 bp, Homo sapien
gcccttttcagttgtaggatcttga

SEQ ID NO: 4223950 - DNA, 25 bp, Homo sapien
gttgtaggatcttgacattccatgt

SEQ ID NO: 4223951 - DNA, 25 bp, Homo sapien
taaatagcccttttcagttgtagga

SEQ ID NO: 4223952 - DNA, 25 bp, Homo sapien
tcagttgtaggatcttgacattcca

SEQ ID NO: 4223953 - DNA, 25 bp, Homo sapien
gtttttctagttccattcagcggca

SEQ ID NO: 4223954 - DNA, 25 bp, Homo sapien
taaatatataagcaggagtccagcc

SEQ ID NO: 4223955 - DNA, 25 bp, Homo sapien
tacctgttccatgggctgatgactc

SEQ ID NO: 4223956 - DNA, 25 bp, Homo sapien
gcctattggacagcactacttggat

SEQ ID NO: 4223957 - DNA, 25 bp, Homo sapien
ctgctgcatataattggaacccagg

SEQ ID NO: 4223958 - DNA, 25 bp, Homo sapien
tcagcagggagagctcaatttattt

SEQ ID NO: 4223959 - DNA, 25 bp, Homo sapien
cagcagggagagctcaatttattta

SEQ ID NO: 4223960 - DNA, 25 bp, Homo sapien
ttatttaacacataaagctgctgca

SEQ ID NO: 4223961 - DNA, 25 bp, Homo sapien
tccagaggaagttacagacagcaat

SEQ ID NO: 4223962 - DNA, 25 bp, Homo sapien
cagaggaagttacagacagcaatct

SEQ ID NO: 4223963 - DNA, 25 bp, Homo sapien
gaagttacagacagcaatctttgct

SEQ ID NO: 4223964 - DNA, 25 bp, Homo sapien
gaggaagttacagacagcaatcttt

SEQ ID NO: 4223965 - DNA, 25 bp, Homo sapien
tctccactcacacgagtggaatctc

SEQ ID NO: 4223966 - DNA, 25 bp, Homo sapien
tccactcacacgagtggaatctcca

SEQ ID NO: 4223967 - DNA, 25 bp, Homo sapien
cctctccactcacacgagtggaatc

SEQ ID NO: 4223968 - DNA, 25 bp, Homo sapien
ccactcacacgagtggaatctccat

SEQ ID NO: 4223969 - DNA, 25 bp, Homo sapien
acaactgaaatatcgaagaaagtct

SEQ ID NO: 4223970 - DNA, 25 bp, Homo sapien
tatcgaagaaagtctagcaggaagg

SEQ ID NO: 4223971 - DNA, 25 bp, Homo sapien
cacagtcactaggtctagcatttag

SEQ ID NO: 4223972 - DNA, 25 bp, Homo sapien
cagtcactaggtctagcatttagac

SEQ ID NO: 4223973 - DNA, 25 bp, Homo sapien
cactcaggagcttgccctttttcct

SEQ ID NO: 4223974 - DNA, 25 bp, Homo sapien
cctgagagatccactcaggagcttg

SEQ ID NO: 4223975 - DNA, 25 bp, Homo sapien
tttctttttcgcacatgctcaggag

SEQ ID NO: 4223976 - DNA, 25 bp, Homo sapien
tctggtggctccctgagagatccac

SEQ ID NO: 4223977 - DNA, 25 bp, Homo sapien
aattgtagacaaaaggttactctgg

SEQ ID NO: 4223978 - DNA, 25 bp, Homo sapien
taattgtagacaaaaggttactctg

SEQ ID NO: 4223979 - DNA, 25 bp, Homo sapien
tctctctgcggctgaaagcaaatgc

SEQ ID NO: 4223980 - DNA, 25 bp, Homo sapien
cctgtggacagacagatgatgtgat

SEQ ID NO: 4223981 - DNA, 25 bp, Homo sapien
gctgcttgcactatcactgtgtgaa

SEQ ID NO: 4223982 - DNA, 25 bp, Homo sapien
aagcaaatgcattgagactcagtcg

SEQ ID NO: 4223983 - DNA, 25 bp, Homo sapien
tagtgtaccaacaaggaagcccaaa

SEQ ID NO: 4223984 - DNA, 25 bp, Homo sapien
gagaaaaatcaataagtagccccaa

SEQ ID NO: 4223985 - DNA, 25 bp, Homo sapien
taacaaaaggtcacccaaagcacag

SEQ ID NO: 4223986 - DNA, 25 bp, Homo sapien
caaagcacagcaatacgtctggcaa

SEQ ID NO: 4223987 - DNA, 25 bp, Homo sapien
agtaattccaataatttcagtaatg

SEQ ID NO: 4223988 - DNA, 25 bp, Homo sapien
ccaataatttcagtaatgtcaaaat

SEQ ID NO: 4223989 - DNA, 25 bp, Homo sapien
ttccaataatttcagtaatgtcaaa

SEQ ID NO: 4223990 - DNA, 25 bp, Homo sapien
tcaaagtaattccaataatttcagt

SEQ ID NO: 4223991 - DNA, 25 bp, Homo sapien
atattttctctgtctctcctttctt

SEQ ID NO: 4223992 - DNA, 25 bp, Homo sapien
ttctctgtctctcctttcttccctc

SEQ ID NO: 4223993 - DNA, 25 bp, Homo sapien
ttttctctgtctctcctttcttccc

SEQ ID NO: 4223994 - DNA, 25 bp, Homo sapien
attttctctgtctctcctttcttcc

SEQ ID NO: 4223995 - DNA, 25 bp, Homo sapien
caccttgacactccacgtcattttt

SEQ ID NO: 4223996 - DNA, 25 bp, Homo sapien
gattgttaggccttcttgtgggccc

SEQ ID NO: 4223997 - DNA, 25 bp, Homo sapien
cattggtcaatcaccaggaggccaa

SEQ ID NO: 4223998 - DNA, 25 bp, Homo sapien
tgtgggcccataattcagatgagga

SEQ ID NO: 4223999 - DNA, 25 bp, Homo sapien
gtccctggaacaccacgatagtgat

SEQ ID NO: 4224000 - DNA, 25 bp, Homo sapien
ggaccactagagcattaagtgtaga

SEQ ID NO: 4224001 - DNA, 25 bp, Homo sapien
tgtttggaccactagagcattaagt

SEQ ID NO: 4224002 - DNA, 25 bp, Homo sapien
ttaatacagtgtttggaccactaga

SEQ ID NO: 4224003 - DNA, 25 bp, Homo sapien
agagcattaagtgtagatgacctac

SEQ ID NO: 4224004 - DNA, 25 bp, Homo sapien
gctgatatggtccaattctatactc

SEQ ID NO: 4224005 - DNA, 25 bp, Homo sapien
gggctgatatggtccaattctatac

SEQ ID NO: 4224006 - DNA, 25 bp, Homo sapien
attgggctgatatggtccaattcta

SEQ ID NO: 4224007 - DNA, 25 bp, Homo sapien
tgggctgatatggtccaattctata

SEQ ID NO: 4224008 - DNA, 25 bp, Homo sapien
ttctgtctgcattcttctgccaatt

SEQ ID NO: 4224009 - DNA, 25 bp, Homo sapien
gctgctgcaatgagtattctttgca

SEQ ID NO: 4224010 - DNA, 25 bp, Homo sapien
gcattcttctgccaatttattcaga

SEQ ID NO: 4224011 - DNA, 25 bp, Homo sapien
tttgtataaaagaatgaacacagct

SEQ ID NO: 4224012 - DNA, 25 bp, Homo sapien
tcttagtggtgcaagttgtcttaag

SEQ ID NO: 4224013 - DNA, 25 bp, Homo sapien
taagtagcttaggaagtcaatctct

SEQ ID NO: 4224014 - DNA, 25 bp, Homo sapien
tgtcttaagtagcttaggaagtcaa

SEQ ID NO: 4224015 - DNA, 25 bp, Homo sapien
gttttgttctttattgaatggaata

SEQ ID NO: 4224016 - DNA, 25 bp, Homo sapien
cattgggaactggatgaaaagactt

SEQ ID NO: 4224017 - DNA, 25 bp, Homo sapien
ccattgggaactggatgaaaagact

SEQ ID NO: 4224018 - DNA, 25 bp, Homo sapien
tctcatgtaacagccattgggaact

SEQ ID NO: 4224019 - DNA, 25 bp, Homo sapien
atttctcatgtaacagccattggga

SEQ ID NO: 4224020 - DNA, 25 bp, Homo sapien
ttttcagatgtgtatgccatccttc

SEQ ID NO: 4224021 - DNA, 25 bp, Homo sapien
tgaagaggaatcacaaccatgagga

SEQ ID NO: 4224022 - DNA, 25 bp, Homo sapien
aaaagagtgaagaggaatcacaacc

SEQ ID NO: 4224023 - DNA, 25 bp, Homo sapien
tcagatgtgtatgccatccttccaa

SEQ ID NO: 4224024 - DNA, 25 bp, Homo sapien
gtgataaacagttaaatcacaccaa

SEQ ID NO: 4224025 - DNA, 25 bp, Homo sapien
aactcctccagtaatcaaatttcag

SEQ ID NO: 4224026 - DNA, 25 bp, Homo sapien
tcattatcacaacagtaattgtgtg

SEQ ID NO: 4224027 - DNA, 25 bp, Homo sapien
tcaaggcatgcatgatgatttcaaa

SEQ ID NO: 4224028 - DNA, 25 bp, Homo sapien
cctaaggacttaaacacaggtatct

SEQ ID NO: 4224029 - DNA, 25 bp, Homo sapien
caaaagacagcctctagcatcagcc

SEQ ID NO: 4224030 - DNA, 25 bp, Homo sapien
gacttaaacacaggtatctgcccca

SEQ ID NO: 4224031 - DNA, 25 bp, Homo sapien
acacaggtatctgccccattgctga

SEQ ID NO: 4224032 - DNA, 25 bp, Homo sapien
gctgagaactgacatcaaccagagg

SEQ ID NO: 4224033 - DNA, 25 bp, Homo sapien
cccagtagaggttcaggaaggtcac

SEQ ID NO: 4224034 - DNA, 25 bp, Homo sapien
catccaggaggccatttaggaaaac

SEQ ID NO: 4224035 - DNA, 25 bp, Homo sapien
catacatacgtaacttagggcaaag

SEQ ID NO: 4224036 - DNA, 25 bp, Homo sapien
aatgtctctacaaactccgtactgc

SEQ ID NO: 4224037 - DNA, 25 bp, Homo sapien
aaatatgctgctgatctaacctcag

SEQ ID NO: 4224038 - DNA, 25 bp, Homo sapien
tcctccgaggagtcatgcttactga

SEQ ID NO: 4224039 - DNA, 25 bp, Homo sapien
gaataaatgggatatcctctcaggc

SEQ ID NO: 4224040 - DNA, 25 bp, Homo sapien
ctctgacacatgccttaagccccat

SEQ ID NO: 4224041 - DNA, 25 bp, Homo sapien
acctctgacacatgccttaagcccc

SEQ ID NO: 4224042 - DNA, 25 bp, Homo sapien
cctctgacacatgccttaagcccca

SEQ ID NO: 4224043 - DNA, 25 bp, Homo sapien
gcttttccatggcttcccttggaca

SEQ ID NO: 4224044 - DNA, 25 bp, Homo sapien
tctgcttttccatggcttcccttgg

SEQ ID NO: 4224045 - DNA, 25 bp, Homo sapien
cttatttctgcttttccatggcttc

SEQ ID NO: 4224046 - DNA, 25 bp, Homo sapien
cttttccatggcttcccttggacat

SEQ ID NO: 4224047 - DNA, 25 bp, Homo sapien
ttctccaggaacctcctatatcttt

SEQ ID NO: 4224048 - DNA, 25 bp, Homo sapien
ctttcagtgcttagagagtcagggc

SEQ ID NO: 4224049 - DNA, 25 bp, Homo sapien
gaaacggctattaccctactgctct

SEQ ID NO: 4224050 - DNA, 25 bp, Homo sapien
cacaggcttccacgagaagtcagac

SEQ ID NO: 4224051 - DNA, 25 bp, Homo sapien
gtacatctgggccaccctgaatatt

SEQ ID NO: 4224052 - DNA, 25 bp, Homo sapien
ttttgtacatctgggccaccctgaa

SEQ ID NO: 4224053 - DNA, 25 bp, Homo sapien
cttttgtacatctgggccaccctga

SEQ ID NO: 4224054 - DNA, 25 bp, Homo sapien
catctgggccaccctgaatattcat

SEQ ID NO: 4224055 - DNA, 25 bp, Homo sapien
ggaagtccaggcgagagcatagctt

SEQ ID NO: 4224056 - DNA, 25 bp, Homo sapien
tcacatccatgagagaggtagcagg

SEQ ID NO: 4224057 - DNA, 25 bp, Homo sapien
taaacaccctagatctatcttcaca

SEQ ID NO: 4224058 - DNA, 25 bp, Homo sapien
tagagttctaaacaccctagatcta

SEQ ID NO: 4224059 - DNA, 25 bp, Homo sapien
cgtattcatttgaaaagttagccat

SEQ ID NO: 4224060 - DNA, 25 bp, Homo sapien
caattgtgatctgcggctgctaggg

SEQ ID NO: 4224061 - DNA, 25 bp, Homo sapien
tgccaccttattaagtacccaattg

SEQ ID NO: 4224062 - DNA, 25 bp, Homo sapien
tgaaatgttcccagtagggttgcca

SEQ ID NO: 4224063 - DNA, 25 bp, Homo sapien
gctgctagggactggctaacaacat

SEQ ID NO: 4224064 - DNA, 25 bp, Homo sapien
gtagaggagaccaactgtacagtga

SEQ ID NO: 4224065 - DNA, 25 bp, Homo sapien
ccaaaaagcagtttgcatcactgac

SEQ ID NO: 4224066 - DNA, 25 bp, Homo sapien
gcatcactgactggttctggaactg

SEQ ID NO: 4224067 - DNA, 25 bp, Homo sapien
tggctggtagaggagaccaactgta

SEQ ID NO: 4224068 - DNA, 25 bp, Homo sapien
aaaaagaacttgcatgctcagactg

SEQ ID NO: 4224069 - DNA, 25 bp, Homo sapien
aaaagaacttgcatgctcagactga

SEQ ID NO: 4224070 - DNA, 25 bp, Homo sapien
gcctggctttgaccagaaactcaaa

SEQ ID NO: 4224071 - DNA, 25 bp, Homo sapien
gaaactcaaaagcttcatatgcctc

SEQ ID NO: 4224072 - DNA, 25 bp, Homo sapien
ccataccttcatttccaattgcctg

SEQ ID NO: 4224073 - DNA, 25 bp, Homo sapien
ttcatatgcctctccctagctcatt

SEQ ID NO: 4224074 - DNA, 25 bp, Homo sapien
gagctttgcgatggaaattatcagc

SEQ ID NO: 4224075 - DNA, 25 bp, Homo sapien
cagaaatgggagctttgcgatggaa

SEQ ID NO: 4224076 - DNA, 25 bp, Homo sapien
tttgcgatggaaattatcagctcca

SEQ ID NO: 4224077 - DNA, 25 bp, Homo sapien
tgggagctttgcgatggaaattatc

SEQ ID NO: 4224078 - DNA, 25 bp, Homo sapien
ctcaccgttacttctgagaggaaat

SEQ ID NO: 4224079 - DNA, 25 bp, Homo sapien
aaatgctttgcaggacaaacaagcc

SEQ ID NO: 4224080 - DNA, 25 bp, Homo sapien
gagctgcttctcaccgttacttctg

SEQ ID NO: 4224081 - DNA, 25 bp, Homo sapien
tgagtgaacctgagctgcttctcac

SEQ ID NO: 4224082 - DNA, 25 bp, Homo sapien
gagagctccatcaggaggtctcctg

SEQ ID NO: 4224083 - DNA, 25 bp, Homo sapien
cccttgagcagatggttttgaacat

SEQ ID NO: 4224084 - DNA, 25 bp, Homo sapien
gatagagttaacacttgcccttgag

SEQ ID NO: 4224085 - DNA, 25 bp, Homo sapien
caggcctttctgcagcgggataata

SEQ ID NO: 4224086 - DNA, 25 bp, Homo sapien
aggatcagaaactgtcagatgagaa

SEQ ID NO: 4224087 - DNA, 25 bp, Homo sapien
caggatcagaaactgtcagatgaga

SEQ ID NO: 4224088 - DNA, 25 bp, Homo sapien
ggatcagaaactgtcagatgagaag

SEQ ID NO: 4224089 - DNA, 25 bp, Homo sapien
tcagatgagaagtcttgatggtcat

SEQ ID NO: 4224090 - DNA, 25 bp, Homo sapien
gtttagctgctggaatcatttcctc

SEQ ID NO: 4224091 - DNA, 25 bp, Homo sapien
aaatattctctctgcataaaagctg

SEQ ID NO: 4224092 - DNA, 25 bp, Homo sapien
gaatcatttcctcttgctgtccctg

SEQ ID NO: 4224093 - DNA, 25 bp, Homo sapien
gcataaaagctgtttagctgctgga

SEQ ID NO: 4224094 - DNA, 25 bp, Homo sapien
ggctcaatgcctcctacgtacgtgg

SEQ ID NO: 4224095 - DNA, 25 bp, Homo sapien
gttatacacataagatcctgttgtc

SEQ ID NO: 4224096 - DNA, 25 bp, Homo sapien
cgtggtcttgtaacatctggctaac

SEQ ID NO: 4224097 - DNA, 25 bp, Homo sapien
ttctgtctcaggctcaatgcctcct

SEQ ID NO: 4224098 - DNA, 25 bp, Homo sapien
gtcagggccttgaggacttcgccat

SEQ ID NO: 4224099 - DNA, 25 bp, Homo sapien
ccagagaaacaatcaaagcccacag

SEQ ID NO: 4224100 - DNA, 25 bp, Homo sapien
gacttcgccatctgggcagagtttc

SEQ ID NO: 4224101 - DNA, 25 bp, Homo sapien
tccgcaggcctcttgtgggtcaggg

SEQ ID NO: 4224102 - DNA, 25 bp, Homo sapien
caaaatgcgatgtccaaaacacaga

SEQ ID NO: 4224103 - DNA, 25 bp, Homo sapien
tatgaccacaaaatgcgatgtccaa

SEQ ID NO: 4224104 - DNA, 25 bp, Homo sapien
caggatcaaggtcattgtgctgaat

SEQ ID NO: 4224105 - DNA, 25 bp, Homo sapien
gaatacgtggccttacaatcacttc

SEQ ID NO: 4224106 - DNA, 25 bp, Homo sapien
tctagtttcattgcatcactgtcaa

SEQ ID NO: 4224107 - DNA, 25 bp, Homo sapien
acaaacatttttgatagagtattta

SEQ ID NO: 4224108 - DNA, 25 bp, Homo sapien
ctagtttcattgcatcactgtcaaa

SEQ ID NO: 4224109 - DNA, 25 bp, Homo sapien
ttctagtttcattgcatcactgtca

SEQ ID NO: 4224110 - DNA, 25 bp, Homo sapien
gtttacatatgtccagaatgtcggc

SEQ ID NO: 4224111 - DNA, 25 bp, Homo sapien
gatgttccattgagcactctgttta

SEQ ID NO: 4224112 - DNA, 25 bp, Homo sapien
tccattgagcactctgtttacatat

SEQ ID NO: 4224113 - DNA, 25 bp, Homo sapien
cagaatgtcggcaaaacttcaagca

SEQ ID NO: 4224114 - DNA, 25 bp, Homo sapien
tgatgtccacattgtacccatgctt

SEQ ID NO: 4224115 - DNA, 25 bp, Homo sapien
ccacattgtacccatgctttagcag

SEQ ID NO: 4224116 - DNA, 25 bp, Homo sapien
cacattgtacccatgctttagcagg

SEQ ID NO: 4224117 - DNA, 25 bp, Homo sapien
tgtccacattgtacccatgctttag

SEQ ID NO: 4224118 - DNA, 25 bp, Homo sapien
tgctacagccagaaatgagtctgtc

SEQ ID NO: 4224119 - DNA, 25 bp, Homo sapien
tcaaaaagtgctacagccagaaatg

SEQ ID NO: 4224120 - DNA, 25 bp, Homo sapien
caaggaccagactcaaaaagtgcta

SEQ ID NO: 4224121 - DNA, 25 bp, Homo sapien
cagactcaaaaagtgctacagccag

SEQ ID NO: 4224122 - DNA, 25 bp, Homo sapien
tgttcagtcgtctaataatccaggt

SEQ ID NO: 4224123 - DNA, 25 bp, Homo sapien
cacaatgagcattgtagaattgttc

SEQ ID NO: 4224124 - DNA, 25 bp, Homo sapien
ctaataatccaggttttgatgatga

SEQ ID NO: 4224125 - DNA, 25 bp, Homo sapien
gatgatttctactgttccgtattca

SEQ ID NO: 4224126 - DNA, 25 bp, Homo sapien
tcatttacccaccacgaggaggagg

SEQ ID NO: 4224127 - DNA, 25 bp, Homo sapien
cacagtaagggttgattaggtacaa

SEQ ID NO: 4224128 - DNA, 25 bp, Homo sapien
ggtacaaggtgcataaagctctcct

SEQ ID NO: 4224129 - DNA, 25 bp, Homo sapien
aaataattgtttgaactgaggattt

SEQ ID NO: 4224130 - DNA, 25 bp, Homo sapien
tctgaagactgctgaatttagggtc

SEQ ID NO: 4224131 - DNA, 25 bp, Homo sapien
gattttgctgtagatctttaggtcc

SEQ ID NO: 4224132 - DNA, 25 bp, Homo sapien
ctgccatttcttctgaaaggttttc

SEQ ID NO: 4224133 - DNA, 25 bp, Homo sapien
tgaaaggttttccttgattttgctg

SEQ ID NO: 4224134 - DNA, 25 bp, Homo sapien
ggtcctcccttctcttatggcacat

SEQ ID NO: 4224135 - DNA, 25 bp, Homo sapien
cagctgctgagtgaaaacggatgcc

SEQ ID NO: 4224136 - DNA, 25 bp, Homo sapien
tgctgagtgaaaacggatgccagga

SEQ ID NO: 4224137 - DNA, 25 bp, Homo sapien
gctgctgagtgaaaacggatgccag

SEQ ID NO: 4224138 - DNA, 25 bp, Homo sapien
gagtgaaaacggatgccaggaagaa

SEQ ID NO: 4224139 - DNA, 25 bp, Homo sapien
atgcttttccatagctccttgatga

SEQ ID NO: 4224140 - DNA, 25 bp, Homo sapien
gatgaagatgatcaactaaaggaaa

SEQ ID NO: 4224141 - DNA, 25 bp, Homo sapien
tgcttttccatagctccttgatgaa

SEQ ID NO: 4224142 - DNA, 25 bp, Homo sapien
cttgatgaagatgatcaactaaagg

SEQ ID NO: 4224143 - DNA, 25 bp, Homo sapien
ttctggcaacgttccataagcaaaa

SEQ ID NO: 4224144 - DNA, 25 bp, Homo sapien
gaaaattccagcagcgtgcaacttg

SEQ ID NO: 4224145 - DNA, 25 bp, Homo sapien
gcagcgtgcaacttgtctttggcaa

SEQ ID NO: 4224146 - DNA, 25 bp, Homo sapien
gcaaaacgtgctaagctgtaactgc

SEQ ID NO: 4224147 - DNA, 25 bp, Homo sapien
taataatcttggtcggtcatggtgg

SEQ ID NO: 4224148 - DNA, 25 bp, Homo sapien
tcaagcccagtggatttcatttgca

SEQ ID NO: 4224149 - DNA, 25 bp, Homo sapien
gaaactgcacaaacccacaagaaag

SEQ ID NO: 4224150 - DNA, 25 bp, Homo sapien
catcacagctatagataaggagaac

SEQ ID NO: 4224151 - DNA, 25 bp, Homo sapien
aaaagcttcccctatcgtggcctgt

SEQ ID NO: 4224152 - DNA, 25 bp, Homo sapien
atgggatgtctataccagttgacca

SEQ ID NO: 4224153 - DNA, 25 bp, Homo sapien
tgggatgtctataccagttgaccac

SEQ ID NO: 4224154 - DNA, 25 bp, Homo sapien
tctgtctttgagcaccagcttttcc

SEQ ID NO: 4224155 - DNA, 25 bp, Homo sapien
ttcctttgtcctgtggaccatctgt

SEQ ID NO: 4224156 - DNA, 25 bp, Homo sapien
aatggagatacaggtgttcccttcc

SEQ ID NO: 4224157 - DNA, 25 bp, Homo sapien
ccttccactgatcggggtaagagga

SEQ ID NO: 4224158 - DNA, 25 bp, Homo sapien
gatcaatgaagttgactggactcca

SEQ ID NO: 4224159 - DNA, 25 bp, Homo sapien
tttttctagcggcttctggcatgtc

SEQ ID NO: 4224160 - DNA, 25 bp, Homo sapien
ttgacagtccttggcgatcaatgaa

SEQ ID NO: 4224161 - DNA, 25 bp, Homo sapien
taccttgcagtccaatgaaggaagt

SEQ ID NO: 4224162 - DNA, 25 bp, Homo sapien
caggaaacttaactgtaaaggcagg

SEQ ID NO: 4224163 - DNA, 25 bp, Homo sapien
gaaagatattgtcctcagtggacca

SEQ ID NO: 4224164 - DNA, 25 bp, Homo sapien
cagtggaccaaggttgtagttagga

SEQ ID NO: 4224165 - DNA, 25 bp, Homo sapien
tgcacaaggaacatgaatagaggga

SEQ ID NO: 4224166 - DNA, 25 bp, Homo sapien
gagtctgagttagtcccgcctgtaa

SEQ ID NO: 4224167 - DNA, 25 bp, Homo sapien
tatacaaggcagttggcaggctttg

SEQ ID NO: 4224168 - DNA, 25 bp, Homo sapien
caaactgtgagctgttgaaaactgg

SEQ ID NO: 4224169 - DNA, 25 bp, Homo sapien
tctttatatgtccagcagagaccct

SEQ ID NO: 4224170 - DNA, 25 bp, Homo sapien
gaccagctgactgtatgaaaggaaa

SEQ ID NO: 4224171 - DNA, 25 bp, Homo sapien
tctacacctgagaagagggaccagc

SEQ ID NO: 4224172 - DNA, 25 bp, Homo sapien
gagcaaatgagtaaaatgtcttccc

SEQ ID NO: 4224173 - DNA, 25 bp, Homo sapien
tgtaagtgaggcctatcccagctga

SEQ ID NO: 4224174 - DNA, 25 bp, Homo sapien
atggccacttttccgaagaaacctg

SEQ ID NO: 4224175 - DNA, 25 bp, Homo sapien
ccacttttccgaagaaacctgtcag

SEQ ID NO: 4224176 - DNA, 25 bp, Homo sapien
gccacttttccgaagaaacctgtca

SEQ ID NO: 4224177 - DNA, 25 bp, Homo sapien
acaaaccagagtgggcataaggtcc

SEQ ID NO: 4224178 - DNA, 25 bp, Homo sapien
taacaaaccagagtgggcataaggt

SEQ ID NO: 4224179 - DNA, 25 bp, Homo sapien
tgcaggtaacaaaccagagtgggca

SEQ ID NO: 4224180 - DNA, 25 bp, Homo sapien
caggtaacaaaccagagtgggcata

SEQ ID NO: 4224181 - DNA, 25 bp, Homo sapien
tgagagtcactattgcagatggcat

SEQ ID NO: 4224182 - DNA, 25 bp, Homo sapien
gaaggaaagatgtacgcagctaact

SEQ ID NO: 4224183 - DNA, 25 bp, Homo sapien
caggcactgcgataggaatggagaa

SEQ ID NO: 4224184 - DNA, 25 bp, Homo sapien
gagacaggcaattgggaactagcga

SEQ ID NO: 4224185 - DNA, 25 bp, Homo sapien
gccaggcactgttgaagcatgcaca

SEQ ID NO: 4224186 - DNA, 25 bp, Homo sapien
ggtgtatttcctccagtagcagaaa

SEQ ID NO: 4224187 - DNA, 25 bp, Homo sapien
ggatttgatcgcagccaatttggct

SEQ ID NO: 4224188 - DNA, 25 bp, Homo sapien
caactgtatgagaacatggaggcca

SEQ ID NO: 4224189 - DNA, 25 bp, Homo sapien
taatggagtggtgcgcacatgactc

SEQ ID NO: 4224190 - DNA, 25 bp, Homo sapien
cttgatattgacattagagagtgaa

SEQ ID NO: 4224191 - DNA, 25 bp, Homo sapien
tactaattgcaattgttcagctgaa

SEQ ID NO: 4224192 - DNA, 25 bp, Homo sapien
tgcaccaaacgctagaattataggc

SEQ ID NO: 4224193 - DNA, 25 bp, Homo sapien
gaatcaactgtatgtgtaaaggcag

SEQ ID NO: 4224194 - DNA, 25 bp, Homo sapien
gatagtgtttttataatcccaaaga

SEQ ID NO: 4224195 - DNA, 25 bp, Homo sapien
caatataaagtcaacccacatgtgg

SEQ ID NO: 4224196 - DNA, 25 bp, Homo sapien
aagtcatgggtctttagtcaggaaa

SEQ ID NO: 4224197 - DNA, 25 bp, Homo sapien
tctagagccgaacacctgggtatgc

SEQ ID NO: 4224198 - DNA, 25 bp, Homo sapien
caaacccttatggtggcatcagaga

SEQ ID NO: 4224199 - DNA, 25 bp, Homo sapien
gaaaggttgtccttgggatcaccaa

SEQ ID NO: 4224200 - DNA, 25 bp, Homo sapien
gggagtcccaatgttgccaaatctc

SEQ ID NO: 4224201 - DNA, 25 bp, Homo sapien
aacactacgatgcttttgtgccact

SEQ ID NO: 4224202 - DNA, 25 bp, Homo sapien
ggtgaatgacaacactacgatgctt

SEQ ID NO: 4224203 - DNA, 25 bp, Homo sapien
tgacaacactacgatgcttttgtgc

SEQ ID NO: 4224204 - DNA, 25 bp, Homo sapien
catagtggtgaatgacaacactacg

SEQ ID NO: 4224205 - DNA, 25 bp, Homo sapien
caacaagaaaaatcgtttatggctt

SEQ ID NO: 4224206 - DNA, 25 bp, Homo sapien
tggcttaaaaccccaaatggctgat

SEQ ID NO: 4224207 - DNA, 25 bp, Homo sapien
gcaacaagaaaaatcgtttatggct

SEQ ID NO: 4224208 - DNA, 25 bp, Homo sapien
tgcaacaagaaaaatcgtttatggc

SEQ ID NO: 4224209 - DNA, 25 bp, Homo sapien
cttcacccacatcgccttacaccag

SEQ ID NO: 4224210 - DNA, 25 bp, Homo sapien
ccaaggcaccgtgaatccatttcgg

SEQ ID NO: 4224211 - DNA, 25 bp, Homo sapien
gtgaatccatttcggcttttcttcc

SEQ ID NO: 4224212 - DNA, 25 bp, Homo sapien
agcctccaagacctagcctagcttt

SEQ ID NO: 4224213 - DNA, 25 bp, Homo sapien
tcagggtgttgtcttgtagcagttt

SEQ ID NO: 4224214 - DNA, 25 bp, Homo sapien
aagcgaaagaacgtgagggctccct

SEQ ID NO: 4224215 - DNA, 25 bp, Homo sapien
ttgattggcaggtaaaaaagcgaaa

SEQ ID NO: 4224216 - DNA, 25 bp, Homo sapien
tcttgtcagcccaagcttgatcact

SEQ ID NO: 4224217 - DNA, 25 bp, Homo sapien
ccacacagggtgtatttccagatct

SEQ ID NO: 4224218 - DNA, 25 bp, Homo sapien
ttaaatgactgccacacagggtgta

SEQ ID NO: 4224219 - DNA, 25 bp, Homo sapien
gttaacgctttcagacttaaatcta

SEQ ID NO: 4224220 - DNA, 25 bp, Homo sapien
ttaaatctaccagtgttaaatgact

SEQ ID NO: 4224221 - DNA, 25 bp, Homo sapien
ctgtatttaaatagcgtgtctttaa

SEQ ID NO: 4224222 - DNA, 25 bp, Homo sapien
taaatagcgtgtctttaattacagc

SEQ ID NO: 4224223 - DNA, 25 bp, Homo sapien
cgtgtctttaattacagcagttggg

SEQ ID NO: 4224224 - DNA, 25 bp, Homo sapien
tagcgtgtctttaattacagcagtt

SEQ ID NO: 4224225 - DNA, 25 bp, Homo sapien
cagattattgacaagcaccgtgggc

SEQ ID NO: 4224226 - DNA, 25 bp, Homo sapien
tacttgtggtttcaacaccccgcag

SEQ ID NO: 4224227 - DNA, 25 bp, Homo sapien
aaagtgtacacccatcctgggcggg

SEQ ID NO: 4224228 - DNA, 25 bp, Homo sapien
caatggaattctcagatcgctggcc

SEQ ID NO: 4224229 - DNA, 25 bp, Homo sapien
aatcaccatcatccctaaacgaaac

SEQ ID NO: 4224230 - DNA, 25 bp, Homo sapien
tttcacctgtggcatgaaaagaagt

SEQ ID NO: 4224231 - DNA, 25 bp, Homo sapien
gagggctgatgtgtttggcacccaa

SEQ ID NO: 4224232 - DNA, 25 bp, Homo sapien
tacagttggactcaatacaaaccac

SEQ ID NO: 4224233 - DNA, 25 bp, Homo sapien
tcttatggaacatactgctactgtg

SEQ ID NO: 4224234 - DNA, 25 bp, Homo sapien
tactgctactgtgttatccacaagt

SEQ ID NO: 4224235 - DNA, 25 bp, Homo sapien
gacttccggaatgaccaaagcttga

SEQ ID NO: 4224236 - DNA, 25 bp, Homo sapien
caaggacaatttaccaagcagggaa

SEQ ID NO: 4224237 - DNA, 25 bp, Homo sapien
tagactgtgaaggatccctcatagg

SEQ ID NO: 4224238 - DNA, 25 bp, Homo sapien
ttggagcatgctacacgacttccgg

SEQ ID NO: 4224239 - DNA, 25 bp, Homo sapien
tagcagcaatcatactgcagtgaaa

SEQ ID NO: 4224240 - DNA, 25 bp, Homo sapien
taaatgtttaggacaatgctggtac

SEQ ID NO: 4224241 - DNA, 25 bp, Homo sapien
accagtagtctggtaagtgaaaaga

SEQ ID NO: 4224242 - DNA, 25 bp, Homo sapien
tctcctctaaaagtgaccatagcag

SEQ ID NO: 4224243 - DNA, 25 bp, Homo sapien
gaatagtatctaccagccacgttcc

SEQ ID NO: 4224244 - DNA, 25 bp, Homo sapien
ggcgctcttcaaaatacagcactgt

SEQ ID NO: 4224245 - DNA, 25 bp, Homo sapien
taaatatacccactggaaactcaga

SEQ ID NO: 4224246 - DNA, 25 bp, Homo sapien
aatgcatacatattcggcgctcttc

SEQ ID NO: 4224247 - DNA, 25 bp, Homo sapien
ggagtcaaacaaagcctcgtctaag

SEQ ID NO: 4224248 - DNA, 25 bp, Homo sapien
cacggagtcaaacaaagcctcgtct

SEQ ID NO: 4224249 - DNA, 25 bp, Homo sapien
tcaaacaaagcctcgtctaagtttc

SEQ ID NO: 4224250 - DNA, 25 bp, Homo sapien
ctacacggagtcaaacaaagcctcg

SEQ ID NO: 4224251 - DNA, 25 bp, Homo sapien
cagggctccgcgaggaaaatcaggc

SEQ ID NO: 4224252 - DNA, 25 bp, Homo sapien
tgccgccgccgatgattgttattat

SEQ ID NO: 4224253 - DNA, 25 bp, Homo sapien
tctctcagtcctagtcttaaagagg

SEQ ID NO: 4224254 - DNA, 25 bp, Homo sapien
ggcaaactggaatcaggatcaaaaa

SEQ ID NO: 4224255 - DNA, 25 bp, Homo sapien
gctccagccgttcatgtgcgcgtaa

SEQ ID NO: 4224256 - DNA, 25 bp, Homo sapien
ttcatgtaggtctgcgagctggtca

SEQ ID NO: 4224257 - DNA, 25 bp, Homo sapien
cctgctgcgagtaggacatgctgta

SEQ ID NO: 4224258 - DNA, 25 bp, Homo sapien
gccgggcagcgtgtacttatccttc

SEQ ID NO: 4224259 - DNA, 25 bp, Homo sapien
gggcagtgtgccgttaatggccgtg

SEQ ID NO: 4224260 - DNA, 25 bp, Homo sapien
tgccgttaatggccgtgccgggcac

SEQ ID NO: 4224261 - DNA, 25 bp, Homo sapien
cagtgtgccgttaatggccgtgccg

SEQ ID NO: 4224262 - DNA, 25 bp, Homo sapien
tgtgccgttaatggccgtgccgggc

SEQ ID NO: 4224263 - DNA, 25 bp, Homo sapien
gatggttcgccagtacttattctaa

SEQ ID NO: 4224264 - DNA, 25 bp, Homo sapien
taaacaagaccacagagatggttcg

SEQ ID NO: 4224265 - DNA, 25 bp, Homo sapien
tcaaaattcagcaagaagcctctcc

SEQ ID NO: 4224266 - DNA, 25 bp, Homo sapien
tgagcgtaccgggttttctccatgc

SEQ ID NO: 4224267 - DNA, 25 bp, Homo sapien
caacggtgtcaacctgcatggccat

SEQ ID NO: 4224268 - DNA, 25 bp, Homo sapien
caaactgtgcataatggagtaaaaa

SEQ ID NO: 4224269 - DNA, 25 bp, Homo sapien
tatatacatggattctcggcagact

SEQ ID NO: 4224270 - DNA, 25 bp, Homo sapien
caaaatggaaagttgggatcgaaca

SEQ ID NO: 4224271 - DNA, 25 bp, Homo sapien
tacagagccgaatcttttaaaatac

SEQ ID NO: 4224272 - DNA, 25 bp, Homo sapien
tctttaatatggctgttgcctggct

SEQ ID NO: 4224273 - DNA, 25 bp, Homo sapien
gattatccgatttggggctacaggc

SEQ ID NO: 4224274 - DNA, 25 bp, Homo sapien
aatatggctgttgcctggcttctct

SEQ ID NO: 4224275 - DNA, 25 bp, Homo sapien
ttatcagctgcagagattatccgat

SEQ ID NO: 4224276 - DNA, 25 bp, Homo sapien
aagcaaacccgtgctcttaaaagtg

SEQ ID NO: 4224277 - DNA, 25 bp, Homo sapien
gcaaacccgtgctcttaaaagtgcc

SEQ ID NO: 4224278 - DNA, 25 bp, Homo sapien
attgtgggaagcaaacccgtgctct

SEQ ID NO: 4224279 - DNA, 25 bp, Homo sapien
gtgggaagcaaacccgtgctcttaa

SEQ ID NO: 4224280 - DNA, 25 bp, Homo sapien
tactttactcaagggtggaagacgc

SEQ ID NO: 4224281 - DNA, 25 bp, Homo sapien
tctccaaagttgtagcaagttgaca

SEQ ID NO: 4224282 - DNA, 25 bp, Homo sapien
tgagaagatgcaaaccaacgggatg

SEQ ID NO: 4224283 - DNA, 25 bp, Homo sapien
taacttagtggctgcagcgggtact

SEQ ID NO: 4224284 - DNA, 25 bp, Homo sapien
agagaactcgagccccacacagcac

SEQ ID NO: 4224285 - DNA, 25 bp, Homo sapien
gagagaactcgagccccacacagca

SEQ ID NO: 4224286 - DNA, 25 bp, Homo sapien
cggtgcctgagggagagggaatgcg

SEQ ID NO: 4224287 - DNA, 25 bp, Homo sapien
gtgcctgagggagagggaatgcgac

SEQ ID NO: 4224288 - DNA, 25 bp, Homo sapien
gcgggtcggtgcctgagggagaggg

SEQ ID NO: 4224289 - DNA, 25 bp, Homo sapien
gtcggtgcctgagggagagggaatg

SEQ ID NO: 4224290 - DNA, 25 bp, Homo sapien
catccccttgggtagacaatctctg

SEQ ID NO: 4224291 - DNA, 25 bp, Homo sapien
caatcctcggcctctaatcgggaag

SEQ ID NO: 4224292 - DNA, 25 bp, Homo sapien
gaaccgagcgagatcactaatactg

SEQ ID NO: 4224293 - DNA, 25 bp, Homo sapien
cacgaggtcaacatggagagggctt

SEQ ID NO: 4224294 - DNA, 25 bp, Homo sapien
tctggaacactcaaacgaatcattt

SEQ ID NO: 4224295 - DNA, 25 bp, Homo sapien
aacgaatcatttcatccccggagcc

SEQ ID NO: 4224296 - DNA, 25 bp, Homo sapien
agcgttcggattgccctttctggaa

SEQ ID NO: 4224297 - DNA, 25 bp, Homo sapien
ggctgcactggcctcgccctgtaag

SEQ ID NO: 4224298 - DNA, 25 bp, Homo sapien
tggttatgttctggagacggggtct

SEQ ID NO: 4224299 - DNA, 25 bp, Homo sapien
atatgtggttatgttctggagacgg

SEQ ID NO: 4224300 - DNA, 25 bp, Homo sapien
ggttatgttctggagacggggtctg

SEQ ID NO: 4224301 - DNA, 25 bp, Homo sapien
ttgtatatgtggttatgttctggag

SEQ ID NO: 4224302 - DNA, 25 bp, Homo sapien
taaatcgccgctgaaacttgcaccg

SEQ ID NO: 4224303 - DNA, 25 bp, Homo sapien
ggcatttgtcgtaatttgtcgaccg

SEQ ID NO: 4224304 - DNA, 25 bp, Homo sapien
agctatggtgtgctttgtaaaggca

SEQ ID NO: 4224305 - DNA, 25 bp, Homo sapien
cgggttaaataaagctatggtgtgc

SEQ ID NO: 4224306 - DNA, 25 bp, Homo sapien
ggatgagggagtccctgccattcag

SEQ ID NO: 4224307 - DNA, 25 bp, Homo sapien
ttcaaacagaagacatctctgacag

SEQ ID NO: 4224308 - DNA, 25 bp, Homo sapien
tgccattcagcccatcgcagattgt

SEQ ID NO: 4224309 - DNA, 25 bp, Homo sapien
cactggatgagggagtccctgccat

SEQ ID NO: 4224310 - DNA, 25 bp, Homo sapien
gcacatcaaatcttctcgccctgcg

SEQ ID NO: 4224311 - DNA, 25 bp, Homo sapien
acatcaaatcttctcgccctgcgcc

SEQ ID NO: 4224312 - DNA, 25 bp, Homo sapien
cacatcaaatcttctcgccctgcgc

SEQ ID NO: 4224313 - DNA, 25 bp, Homo sapien
taaatttgtgcagccaaccacggaa

SEQ ID NO: 4224314 - DNA, 25 bp, Homo sapien
ttgagtcgccccatgggtacagaat

SEQ ID NO: 4224315 - DNA, 25 bp, Homo sapien
tattaggtttataactcgttgccca

SEQ ID NO: 4224316 - DNA, 25 bp, Homo sapien
atctaaataggtttgagtcgcccca

SEQ ID NO: 4224317 - DNA, 25 bp, Homo sapien
gcaaagtggtgattaacggctccag

SEQ ID NO: 4224318 - DNA, 25 bp, Homo sapien
taagctgttcatttacgggagccaa

SEQ ID NO: 4224319 - DNA, 25 bp, Homo sapien
gcttgtagaggcgaatagtacccac

SEQ ID NO: 4224320 - DNA, 25 bp, Homo sapien
tacagccgaactgggtgacagctac

SEQ ID NO: 4224321 - DNA, 25 bp, Homo sapien
gacagcggtccttcagtgacggcaa

SEQ ID NO: 4224322 - DNA, 25 bp, Homo sapien
attaatctttcattcgagcagcggg

SEQ ID NO: 4224323 - DNA, 25 bp, Homo sapien
ttgcaaaataatggctcaggtccct

SEQ ID NO: 4224324 - DNA, 25 bp, Homo sapien
gcaaaagccgcgatagagaccgtta

SEQ ID NO: 4224325 - DNA, 25 bp, Homo sapien
ctccatcccgtcctttctcccttgc

SEQ ID NO: 4224326 - DNA, 25 bp, Homo sapien
cccttgctgccaccgtcccggcttg

SEQ ID NO: 4224327 - DNA, 25 bp, Homo sapien
ctcctccatcccgtcctttctccct

SEQ ID NO: 4224328 - DNA, 25 bp, Homo sapien
gtcctttctcccttgctgccaccgt

SEQ ID NO: 4224329 - DNA, 25 bp, Homo sapien
caaacgatcgccagagtaatctaca

SEQ ID NO: 4224330 - DNA, 25 bp, Homo sapien
tggtgttacggcacacacctgcggg

SEQ ID NO: 4224331 - DNA, 25 bp, Homo sapien
aatctacattcaagtccggatgatg

SEQ ID NO: 4224332 - DNA, 25 bp, Homo sapien
tttcaaagggccgatcaaacgatcg

SEQ ID NO: 4224333 - DNA, 25 bp, Homo sapien
atccatcgaaatgtatggattcagc

SEQ ID NO: 4224334 - DNA, 25 bp, Homo sapien
caagtttctaccacagactatcgtt

SEQ ID NO: 4224335 - DNA, 25 bp, Homo sapien
ctatcgttaaggaatacgtgagcag

SEQ ID NO: 4224336 - DNA, 25 bp, Homo sapien
ccacactgaggcattaattaggctg

SEQ ID NO: 4224337 - DNA, 25 bp, Homo sapien
aatttgacttctatctaccctgcca

SEQ ID NO: 4224338 - DNA, 25 bp, Homo sapien
gattagccgcaactctgctgaggca

SEQ ID NO: 4224339 - DNA, 25 bp, Homo sapien
taccctgccatttgtggaggtacag

SEQ ID NO: 4224340 - DNA, 25 bp, Homo sapien
tcataggcaatacaagcacttttgg

SEQ ID NO: 4224341 - DNA, 25 bp, Homo sapien
gaactaggcacataatatccgggct

SEQ ID NO: 4224342 - DNA, 25 bp, Homo sapien
ttatccattatcgtagtccgcaggc

SEQ ID NO: 4224343 - DNA, 25 bp, Homo sapien
gaaattatgtcacgccaaagagccc

SEQ ID NO: 4224344 - DNA, 25 bp, Homo sapien
tcagtaggatctttgggctgaacca

SEQ ID NO: 4224345 - DNA, 25 bp, Homo sapien
gaccagtgtctacttgctgccaaag

SEQ ID NO: 4224346 - DNA, 25 bp, Homo sapien
caagggacggcctgctttttggcca

SEQ ID NO: 4224347 - DNA, 25 bp, Homo sapien
aataagggtgaggtacagcagctgc

SEQ ID NO: 4224348 - DNA, 25 bp, Homo sapien
ctattgtgagaagggcacagcctca

SEQ ID NO: 4224349 - DNA, 25 bp, Homo sapien
tgacattttgaagtgggcaaccagg

SEQ ID NO: 4224350 - DNA, 25 bp, Homo sapien
tgtgtgcgcgcacaaagaataaagc

SEQ ID NO: 4224351 - DNA, 25 bp, Homo sapien
aaggacctcctctaccatttgggtg

SEQ ID NO: 4224352 - DNA, 25 bp, Homo sapien
gatgaactcgaactgtccttcccag

SEQ ID NO: 4224353 - DNA, 25 bp, Homo sapien
acttgacgtttggagcagatactgc

SEQ ID NO: 4224354 - DNA, 25 bp, Homo sapien
ttagcctattagagaaaagatgctg

SEQ ID NO: 4224355 - DNA, 25 bp, Homo sapien
ggttatggccctaaattgtctatgc

SEQ ID NO: 4224356 - DNA, 25 bp, Homo sapien
caatagctggcaacaatgtgaacaa

SEQ ID NO: 4224357 - DNA, 25 bp, Homo sapien
atttatatcagagccagaatggtcc

SEQ ID NO: 4224358 - DNA, 25 bp, Homo sapien
gcatgctagaccgagctcagagaga

SEQ ID NO: 4224359 - DNA, 25 bp, Homo sapien
ttttggcagttaccacggtgactgg

SEQ ID NO: 4224360 - DNA, 25 bp, Homo sapien
cggtgactgggtactctaaaagctt

SEQ ID NO: 4224361 - DNA, 25 bp, Homo sapien
taacactcagtggaaagctgtcatt

SEQ ID NO: 4224362 - DNA, 25 bp, Homo sapien
tatgcctccgtgagacagggtcagg

SEQ ID NO: 4224363 - DNA, 25 bp, Homo sapien
ccttacttagggtggatgctatgcc

SEQ ID NO: 4224364 - DNA, 25 bp, Homo sapien
gctgtcattcctggctaaatcctta

SEQ ID NO: 4224365 - DNA, 25 bp, Homo sapien
gtacctattttgtagcaagtatgcc

SEQ ID NO: 4224366 - DNA, 25 bp, Homo sapien
tagaaactccttacctgttaatgtg

SEQ ID NO: 4224367 - DNA, 25 bp, Homo sapien
aactctacaaatcacaggaattctg

SEQ ID NO: 4224368 - DNA, 25 bp, Homo sapien
tgtgcttttaatgattgctagccct

SEQ ID NO: 4224369 - DNA, 25 bp, Homo sapien
caagtttatctttattccacactgt

SEQ ID NO: 4224370 - DNA, 25 bp, Homo sapien
tcttcagctctataagctgtaactc

SEQ ID NO: 4224371 - DNA, 25 bp, Homo sapien
cataaagttattcagagacactttt

SEQ ID NO: 4224372 - DNA, 25 bp, Homo sapien
tgtaccttgagtgcaacaagtttat

SEQ ID NO: 4224373 - DNA, 25 bp, Homo sapien
ttattagctcaatcacagtgtgcaa

SEQ ID NO: 4224374 - DNA, 25 bp, Homo sapien
gcctagtaccacttaggaatcatcg

SEQ ID NO: 4224375 - DNA, 25 bp, Homo sapien
gacttttgtatctaagcctagtacc

SEQ ID NO: 4224376 - DNA, 25 bp, Homo sapien
caggttaatcacttgaaacagaagc

SEQ ID NO: 4224377 - DNA, 25 bp, Homo sapien
tagataaccccttaacccaagctgc

SEQ ID NO: 4224378 - DNA, 25 bp, Homo sapien
tctttgcaacacaagaagctaacat

SEQ ID NO: 4224379 - DNA, 25 bp, Homo sapien
aaatgtttcattgttcagcacctca

SEQ ID NO: 4224380 - DNA, 25 bp, Homo sapien
ccatacttgagggttttctgacttg

SEQ ID NO: 4224381 - DNA, 25 bp, Homo sapien
cacagatttgactgatcaacagcag

SEQ ID NO: 4224382 - DNA, 25 bp, Homo sapien
ttgactgatcaacagcagggcaccg

SEQ ID NO: 4224383 - DNA, 25 bp, Homo sapien
aacagcagggcaccgccatcataat

SEQ ID NO: 4224384 - DNA, 25 bp, Homo sapien
cagggcaccgccatcataattcttc

SEQ ID NO: 4224385 - DNA, 25 bp, Homo sapien
caaatggtatcattcctacttgcaa

SEQ ID NO: 4224386 - DNA, 25 bp, Homo sapien
actttgtaagcataactggcaacac

SEQ ID NO: 4224387 - DNA, 25 bp, Homo sapien
ttgtgcttggccatcacattgcacc

SEQ ID NO: 4224388 - DNA, 25 bp, Homo sapien
ccaactcagacctctttaacaagat

SEQ ID NO: 4224389 - DNA, 25 bp, Homo sapien
aatcatttcttggatgggcacccag

SEQ ID NO: 4224390 - DNA, 25 bp, Homo sapien
gaatcatttcttggatgggcaccca

SEQ ID NO: 4224391 - DNA, 25 bp, Homo sapien
tattgaatcatttcttggatgggca

SEQ ID NO: 4224392 - DNA, 25 bp, Homo sapien
ttgaatcatttcttggatgggcacc

SEQ ID NO: 4224393 - DNA, 25 bp, Homo sapien
tgctctcggttcagtctccctccct

SEQ ID NO: 4224394 - DNA, 25 bp, Homo sapien
cctggactgcaggaacaatgatgat

SEQ ID NO: 4224395 - DNA, 25 bp, Homo sapien
gatgatcacacgtgaaagttcaacc

SEQ ID NO: 4224396 - DNA, 25 bp, Homo sapien
gactgcaggaacaatgatgatcaca

SEQ ID NO: 4224397 - DNA, 25 bp, Homo sapien
gaataaatcaccacattgctccgat

SEQ ID NO: 4224398 - DNA, 25 bp, Homo sapien
tccagctcctggttcaaaaagtaga

SEQ ID NO: 4224399 - DNA, 25 bp, Homo sapien
ctcctgtggcaaactataagtctca

SEQ ID NO: 4224400 - DNA, 25 bp, Homo sapien
tcaatgtacatggttgaaaatgacc

SEQ ID NO: 4224401 - DNA, 25 bp, Homo sapien
tcctctacactgctgtctaaaactc

SEQ ID NO: 4224402 - DNA, 25 bp, Homo sapien
tctctccctcctctacactgctgtc

SEQ ID NO: 4224403 - DNA, 25 bp, Homo sapien
ctccctcctctacactgctgtctaa

SEQ ID NO: 4224404 - DNA, 25 bp, Homo sapien
cctcctctacactgctgtctaaaac

SEQ ID NO: 4224405 - DNA, 25 bp, Homo sapien
tgcagacacccaacaggtatagtgc

SEQ ID NO: 4224406 - DNA, 25 bp, Homo sapien
cccaacaggtatagtgcactatagc

SEQ ID NO: 4224407 - DNA, 25 bp, Homo sapien
cacccaacaggtatagtgcactata

SEQ ID NO: 4224408 - DNA, 25 bp, Homo sapien
cagacacccaacaggtatagtgcac

SEQ ID NO: 4224409 - DNA, 25 bp, Homo sapien
ccacttgaacctgggaagtggcggt

SEQ ID NO: 4224410 - DNA, 25 bp, Homo sapien
aggaggctgaggcaggagaaccact

SEQ ID NO: 4224411 - DNA, 25 bp, Homo sapien
aaccacttgaacctgggaagtggcg

SEQ ID NO: 4224412 - DNA, 25 bp, Homo sapien
gcgggcgcctgtaatttcaggtact

SEQ ID NO: 4224413 - DNA, 25 bp, Homo sapien
acagggagatgtctgaacaggtgca

SEQ ID NO: 4224414 - DNA, 25 bp, Homo sapien
tgatgcccacaagcccaggtcatat

SEQ ID NO: 4224415 - DNA, 25 bp, Homo sapien
caagtgatccatattggtacaggga

SEQ ID NO: 4224416 - DNA, 25 bp, Homo sapien
taagagagcacaatgggccatcttc

SEQ ID NO: 4224417 - DNA, 25 bp, Homo sapien
gaggacagtgacacatgaaatttcc

SEQ ID NO: 4224418 - DNA, 25 bp, Homo sapien
ggacagtgccagaactcgtggctgc

SEQ ID NO: 4224419 - DNA, 25 bp, Homo sapien
cagtgccagaactcgtggctgcctc

SEQ ID NO: 4224420 - DNA, 25 bp, Homo sapien
cttggggacagtgccagaactcgtg

SEQ ID NO: 4224421 - DNA, 25 bp, Homo sapien
gtgccagaactcgtggctgcctcct

SEQ ID NO: 4224422 - DNA, 25 bp, Homo sapien
aaattttgaaccaggcgaaggatcg

SEQ ID NO: 4224423 - DNA, 25 bp, Homo sapien
tgtgctgctgaactattctcaggta

SEQ ID NO: 4224424 - DNA, 25 bp, Homo sapien
tctcaggtatttggaatattggcaa

SEQ ID NO: 4224425 - DNA, 25 bp, Homo sapien
cgaaggatcgttaatagcattgtcc

SEQ ID NO: 4224426 - DNA, 25 bp, Homo sapien
tgtttgtaaagcagtcccaggaggg

SEQ ID NO: 4224427 - DNA, 25 bp, Homo sapien
tcaatgatcagccagggtaaagcca

SEQ ID NO: 4224428 - DNA, 25 bp, Homo sapien
agtgccctgtcagaggccttctggt

SEQ ID NO: 4224429 - DNA, 25 bp, Homo sapien
tgaagcgaatcctcgagtgccctgt

SEQ ID NO: 4224430 - DNA, 25 bp, Homo sapien
agaataatgtagtgggaaaagcatc

SEQ ID NO: 4224431 - DNA, 25 bp, Homo sapien
gaataatgtagtgggaaaagcatca

SEQ ID NO: 4224432 - DNA, 25 bp, Homo sapien
ctgagaataatgtagtgggaaaagc

SEQ ID NO: 4224433 - DNA, 25 bp, Homo sapien
aaggctgagaataatgtagtgggaa

SEQ ID NO: 4224434 - DNA, 25 bp, Homo sapien
gaatgttgttaccacacaatgcagc

SEQ ID NO: 4224435 - DNA, 25 bp, Homo sapien
taccacacaatgcagcaggcagctt

SEQ ID NO: 4224436 - DNA, 25 bp, Homo sapien
ccggtgctgccggaattcccaaggt

SEQ ID NO: 4224437 - DNA, 25 bp, Homo sapien
ggtgctgccggaattcccaaggtga

SEQ ID NO: 4224438 - DNA, 25 bp, Homo sapien
gcctgttagtctagtaatgccgaag

SEQ ID NO: 4224439 - DNA, 25 bp, Homo sapien
gggcactagggactcctgcattcat

SEQ ID NO: 4224440 - DNA, 25 bp, Homo sapien
cttgctggctaatgtaaagagacca

SEQ ID NO: 4224441 - DNA, 25 bp, Homo sapien
caattacttggcttacgggcactag

SEQ ID NO: 4224442 - DNA, 25 bp, Homo sapien
tgcatgtggtaaatgttgatgggaa

SEQ ID NO: 4224443 - DNA, 25 bp, Homo sapien
ggtccaaatcaggtacatcgccagt

SEQ ID NO: 4224444 - DNA, 25 bp, Homo sapien
tccagtaaaactggtccaaatcagg

SEQ ID NO: 4224445 - DNA, 25 bp, Homo sapien
caggtacatcgccagtaaattcagt

SEQ ID NO: 4224446 - DNA, 25 bp, Homo sapien
cacttaggctcagggtagctaaccc

SEQ ID NO: 4224447 - DNA, 25 bp, Homo sapien
tagctaaccctgactgtgccacgat

SEQ ID NO: 4224448 - DNA, 25 bp, Homo sapien
tccagttggaacagcaaatctaagc

SEQ ID NO: 4224449 - DNA, 25 bp, Homo sapien
cgatgtccccaaggctatcactggc

SEQ ID NO: 4224450 - DNA, 25 bp, Homo sapien
gttgccccagcccagtctatcggtt

SEQ ID NO: 4224451 - DNA, 25 bp, Homo sapien
ttgcctttcatcagcgttgccccag

SEQ ID NO: 4224452 - DNA, 25 bp, Homo sapien
tcaggaatttgcctttcatcagcgt

SEQ ID NO: 4224453 - DNA, 25 bp, Homo sapien
agtctatcggttacaactgtcaagg

SEQ ID NO: 4224454 - DNA, 25 bp, Homo sapien
gatttctctcttccgtaaagcccag

SEQ ID NO: 4224455 - DNA, 25 bp, Homo sapien
taaagcccagttgatgattctcctc

SEQ ID NO: 4224456 - DNA, 25 bp, Homo sapien
gatcggcacggagcttctgtattac

SEQ ID NO: 4224457 - DNA, 25 bp, Homo sapien
taatgaggtagctgtgatcggcacg

SEQ ID NO: 4224458 - DNA, 25 bp, Homo sapien
tccaataccacccaagtaggcaggg

SEQ ID NO: 4224459 - DNA, 25 bp, Homo sapien
gataaacctaatggtgaccctgagg

SEQ ID NO: 4224460 - DNA, 25 bp, Homo sapien
tatgaggtaatgctgccacccttat

SEQ ID NO: 4224461 - DNA, 25 bp, Homo sapien
tgtatcagctggcagtttgatgtcc

SEQ ID NO: 4224462 - DNA, 25 bp, Homo sapien
gctttttgaggtagtaaatcgccta

SEQ ID NO: 4224463 - DNA, 25 bp, Homo sapien
tctgattgataagcctttacaaaag

SEQ ID NO: 4224464 - DNA, 25 bp, Homo sapien
aaatcaaatatctttcatagcaatg

SEQ ID NO: 4224465 - DNA, 25 bp, Homo sapien
tcgcctactgacatattctacacaa

SEQ ID NO: 4224466 - DNA, 25 bp, Homo sapien
caaaggaagctctaagcattgaggt

SEQ ID NO: 4224467 - DNA, 25 bp, Homo sapien
ctctgaagggacaagtcaacgttac

SEQ ID NO: 4224468 - DNA, 25 bp, Homo sapien
gaatacttgagcataatggaaggct

SEQ ID NO: 4224469 - DNA, 25 bp, Homo sapien
ccagccctgaaggttgatgaatact

SEQ ID NO: 4224470 - DNA, 25 bp, Homo sapien
tctccctttgagtggtaggttgaca

SEQ ID NO: 4224471 - DNA, 25 bp, Homo sapien
tgacatgaggaaagcctagccaagg

SEQ ID NO: 4224472 - DNA, 25 bp, Homo sapien
tctgggcacctctgatcaggaggtt

SEQ ID NO: 4224473 - DNA, 25 bp, Homo sapien
caaggcttccccagttatcctgagt

SEQ ID NO: 4224474 - DNA, 25 bp, Homo sapien
ctaggaattcggagcttggaaacca

SEQ ID NO: 4224475 - DNA, 25 bp, Homo sapien
gtcagaggtcacagacctcggccag

SEQ ID NO: 4224476 - DNA, 25 bp, Homo sapien
aattcggagcttggaaaccattcag

SEQ ID NO: 4224477 - DNA, 25 bp, Homo sapien
cagacctcggccagcattcaaaaat

SEQ ID NO: 4224478 - DNA, 25 bp, Homo sapien
tgattttatcctactgtttagattg

SEQ ID NO: 4224479 - DNA, 25 bp, Homo sapien
ctgatttggttcaaaggagcatcca

SEQ ID NO: 4224480 - DNA, 25 bp, Homo sapien
cacacagaactccattccaacatga

SEQ ID NO: 4224481 - DNA, 25 bp, Homo sapien
tagattgttttgcttacacgtaaat

SEQ ID NO: 4224482 - DNA, 25 bp, Homo sapien
tctgtgttaatctcgtcttctgtat

SEQ ID NO: 4224483 - DNA, 25 bp, Homo sapien
tgtgttaatctcgtcttctgtatcc

SEQ ID NO: 4224484 - DNA, 25 bp, Homo sapien
gatctgtgttaatctcgtcttctgt

SEQ ID NO: 4224485 - DNA, 25 bp, Homo sapien
tgttaatctcgtcttctgtatccac

SEQ ID NO: 4224486 - DNA, 25 bp, Homo sapien
ttggctgcccctgtatcatccagca

SEQ ID NO: 4224487 - DNA, 25 bp, Homo sapien
tgttggctgcccctgtatcatccag

SEQ ID NO: 4224488 - DNA, 25 bp, Homo sapien
cttgttggctgcccctgtatcatcc

SEQ ID NO: 4224489 - DNA, 25 bp, Homo sapien
tggctgcccctgtatcatccagcat

SEQ ID NO: 4224490 - DNA, 25 bp, Homo sapien
tcaggctctcatattgctactccca

SEQ ID NO: 4224491 - DNA, 25 bp, Homo sapien
attgctactcccaactgaacttctg

SEQ ID NO: 4224492 - DNA, 25 bp, Homo sapien
tccaggttgattcacatagtttgct

SEQ ID NO: 4224493 - DNA, 25 bp, Homo sapien
gattcacatagtttgcttgacataa

SEQ ID NO: 4224494 - DNA, 25 bp, Homo sapien
tgcagccacgctgtgatttcaccaa

SEQ ID NO: 4224495 - DNA, 25 bp, Homo sapien
aattgggcccatgtcagttctgcag

SEQ ID NO: 4224496 - DNA, 25 bp, Homo sapien
tacgagtggtaggacaattgggccc

SEQ ID NO: 4224497 - DNA, 25 bp, Homo sapien
tctggaccagtagccaaagctgtct

SEQ ID NO: 4224498 - DNA, 25 bp, Homo sapien
tttagccaatcagcttgggagctgc

SEQ ID NO: 4224499 - DNA, 25 bp, Homo sapien
agctgctgttgacctcacaaaggga

SEQ ID NO: 4224500 - DNA, 25 bp, Homo sapien
aattaacttcccatagttggtcagc

SEQ ID NO: 4224501 - DNA, 25 bp, Homo sapien
ccatagttggtcagcaggataatct

SEQ ID NO: 4224502 - DNA, 25 bp, Homo sapien
ccaagataagtatgattgccaccat

SEQ ID NO: 4224503 - DNA, 25 bp, Homo sapien
cctggcacaaatccttccaagataa

SEQ ID NO: 4224504 - DNA, 25 bp, Homo sapien
caaatccttccaagataagtatgat

SEQ ID NO: 4224505 - DNA, 25 bp, Homo sapien
tccttccaagataagtatgattgcc

SEQ ID NO: 4224506 - DNA, 25 bp, Homo sapien
gcaatccacggaaaaactcagaggg

SEQ ID NO: 4224507 - DNA, 25 bp, Homo sapien
tccagcaatccacggaaaaactcag

SEQ ID NO: 4224508 - DNA, 25 bp, Homo sapien
tcagaggggaaagcctcctcaggct

SEQ ID NO: 4224509 - DNA, 25 bp, Homo sapien
ctgcaagaggaatgagggcctcaga

SEQ ID NO: 4224510 - DNA, 25 bp, Homo sapien
gaattttagccctcctcttctcagt

SEQ ID NO: 4224511 - DNA, 25 bp, Homo sapien
gtgtggcattctgggagtctgcaac

SEQ ID NO: 4224512 - DNA, 25 bp, Homo sapien
cattctgcgtgaactagaaattcct

SEQ ID NO: 4224513 - DNA, 25 bp, Homo sapien
gggcgtcgtcctcacttatgtgatc

SEQ ID NO: 4224514 - DNA, 25 bp, Homo sapien
catttcttggcatgaaacaggagtg

SEQ ID NO: 4224515 - DNA, 25 bp, Homo sapien
aaatgtgtgttgagccagactcctg

SEQ ID NO: 4224516 - DNA, 25 bp, Homo sapien
tgctgtgttacacagtcccagattt

SEQ ID NO: 4224517 - DNA, 25 bp, Homo sapien
gaccccagctgacatactctgaggc

SEQ ID NO: 4224518 - DNA, 25 bp, Homo sapien
tgctgattgaagatacagacagttc

SEQ ID NO: 4224519 - DNA, 25 bp, Homo sapien
cagtggccacctactccatttgctg

SEQ ID NO: 4224520 - DNA, 25 bp, Homo sapien
tggagaatgctcaaagggctagact

SEQ ID NO: 4224521 - DNA, 25 bp, Homo sapien
tagacctcaaatgtcccatggagaa

SEQ ID NO: 4224522 - DNA, 25 bp, Homo sapien
gaggtaaatcagcaccagagcagta

SEQ ID NO: 4224523 - DNA, 25 bp, Homo sapien
caggaagcactgaactgccggaggt

SEQ ID NO: 4224524 - DNA, 25 bp, Homo sapien
cagagcagtagggatggctattcca

SEQ ID NO: 4224525 - DNA, 25 bp, Homo sapien
gaataaggacaccagactcaattgg

SEQ ID NO: 4224526 - DNA, 25 bp, Homo sapien
tctcatgactattcaccacaatcac

SEQ ID NO: 4224527 - DNA, 25 bp, Homo sapien
aaaagatgcatctccaagatagaca

SEQ ID NO: 4224528 - DNA, 25 bp, Homo sapien
gatgcatctccaagatagacagagc

SEQ ID NO: 4224529 - DNA, 25 bp, Homo sapien
tctccaagatagacagagcaggagc

SEQ ID NO: 4224530 - DNA, 25 bp, Homo sapien
taaagactcgggctgatgaggtcct

SEQ ID NO: 4224531 - DNA, 25 bp, Homo sapien
tatgacagtcaccacacctaatgtg

SEQ ID NO: 4224532 - DNA, 25 bp, Homo sapien
gagactacacgtgctcatagccatg

SEQ ID NO: 4224533 - DNA, 25 bp, Homo sapien
cgcttcccaaagaccaaatgtgagg

SEQ ID NO: 4224534 - DNA, 25 bp, Homo sapien
gattcccggcactcagatgaacact

SEQ ID NO: 4224535 - DNA, 25 bp, Homo sapien
catactggtcctgaattgagagtcc

SEQ ID NO: 4224536 - DNA, 25 bp, Homo sapien
gaatagtggcacctcgaactgtgga

SEQ ID NO: 4224537 - DNA, 25 bp, Homo sapien
tccaagatctgtaaccaatgaggtg

SEQ ID NO: 4224538 - DNA, 25 bp, Homo sapien
aaaaaggcatagacacagtccttgc

SEQ ID NO: 4224539 - DNA, 25 bp, Homo sapien
gtgcgtctccttaaaaaaggcatag

SEQ ID NO: 4224540 - DNA, 25 bp, Homo sapien
ttggttaagacaaactgtgcgtctc

SEQ ID NO: 4224541 - DNA, 25 bp, Homo sapien
caaactgtgcgtctccttaaaaaag

SEQ ID NO: 4224542 - DNA, 25 bp, Homo sapien
gagagggccctgagaatccattaca

SEQ ID NO: 4224543 - DNA, 25 bp, Homo sapien
aatggtaaggcatgacagggctccc

SEQ ID NO: 4224544 - DNA, 25 bp, Homo sapien
tgctggccgccataaaaataaggag

SEQ ID NO: 4224545 - DNA, 25 bp, Homo sapien
tgagaacccattgcgaagagtcctg

SEQ ID NO: 4224546 - DNA, 25 bp, Homo sapien
ccaagtcttgaacaaccactagaag

SEQ ID NO: 4224547 - DNA, 25 bp, Homo sapien
agtcttgaacaaccactagaagcca

SEQ ID NO: 4224548 - DNA, 25 bp, Homo sapien
aagtcttgaacaaccactagaagcc

SEQ ID NO: 4224549 - DNA, 25 bp, Homo sapien
gtcttgaacaaccactagaagccat

SEQ ID NO: 4224550 - DNA, 25 bp, Homo sapien
gccctttgactgtgaagccaagtcc

SEQ ID NO: 4224551 - DNA, 25 bp, Homo sapien
agccagtttcagactgagctggcat

SEQ ID NO: 4224552 - DNA, 25 bp, Homo sapien
cactttcggaaaagttattggtgat

SEQ ID NO: 4224553 - DNA, 25 bp, Homo sapien
tggtgatttgggacttaagccagtt

SEQ ID NO: 4224554 - DNA, 25 bp, Homo sapien
agaaaggtggtgctcccatttttct

SEQ ID NO: 4224555 - DNA, 25 bp, Homo sapien
tcaatggggatgtagcttttggctt

SEQ ID NO: 4224556 - DNA, 25 bp, Homo sapien
aactcttatgacatctaggtcaatg

SEQ ID NO: 4224557 - DNA, 25 bp, Homo sapien
ttgtaaagaaaggtggtgctcccat

SEQ ID NO: 4224558 - DNA, 25 bp, Homo sapien
cgatcctctgctggcccccatgaac

SEQ ID NO: 4224559 - DNA, 25 bp, Homo sapien
atcctctgctggcccccatgaacac

SEQ ID NO: 4224560 - DNA, 25 bp, Homo sapien
ccgatcctctgctggcccccatgaa

SEQ ID NO: 4224561 - DNA, 25 bp, Homo sapien
tccgatcctctgctggcccccatga

SEQ ID NO: 4224562 - DNA, 25 bp, Homo sapien
gagctgtcgacagacacaatattct

SEQ ID NO: 4224563 - DNA, 25 bp, Homo sapien
gatggtgaagatgacacatgtgtct

SEQ ID NO: 4224564 - DNA, 25 bp, Homo sapien
agtcagacacgccagctaattggag

SEQ ID NO: 4224565 - DNA, 25 bp, Homo sapien
gtcaacagctctagtaacagtttga

SEQ ID NO: 4224566 - DNA, 25 bp, Homo sapien
caagcacagggggtttaataaacat

SEQ ID NO: 4224567 - DNA, 25 bp, Homo sapien
ctggcaggccttccatagctggagg

SEQ ID NO: 4224568 - DNA, 25 bp, Homo sapien
gagggcccaggatgacactgtgtgc

SEQ ID NO: 4224569 - DNA, 25 bp, Homo sapien
tctggcaggccttccatagctggag

SEQ ID NO: 4224570 - DNA, 25 bp, Homo sapien
cattctacgttcctcagtgggtcca

SEQ ID NO: 4224571 - DNA, 25 bp, Homo sapien
tcaagtgatgaaaaggtaagccctg

SEQ ID NO: 4224572 - DNA, 25 bp, Homo sapien
gcatgatcacctgaaaagcgtggca

SEQ ID NO: 4224573 - DNA, 25 bp, Homo sapien
tgggtccaaatcacgtaaccactgg

SEQ ID NO: 4224574 - DNA, 25 bp, Homo sapien
gcagtctcttgtgggcactttagct

SEQ ID NO: 4224575 - DNA, 25 bp, Homo sapien
tcccctggtcatgctctctagtgtc

SEQ ID NO: 4224576 - DNA, 25 bp, Homo sapien
gaggataccgtcaagtttccacatt

SEQ ID NO: 4224577 - DNA, 25 bp, Homo sapien
gggcactttagctacacaggtataa

SEQ ID NO: 4224578 - DNA, 25 bp, Homo sapien
gatttcggccagcatttcttgcttg

SEQ ID NO: 4224579 - DNA, 25 bp, Homo sapien
cttgcttgtcgttcttcataactgt

SEQ ID NO: 4224580 - DNA, 25 bp, Homo sapien
tgtatgggttttctcatcgccaaga

SEQ ID NO: 4224581 - DNA, 25 bp, Homo sapien
tagctctgtggcgagtttgcagtaa

SEQ ID NO: 4224582 - DNA, 25 bp, Homo sapien
tgaattcgtatttgtgtcttgatcc

SEQ ID NO: 4224583 - DNA, 25 bp, Homo sapien
caacttctcaatgtttggagggcac

SEQ ID NO: 4224584 - DNA, 25 bp, Homo sapien
caaaactgtttgagatccaccaggg

SEQ ID NO: 4224585 - DNA, 25 bp, Homo sapien
tctattcatttccaaaactgtttga

SEQ ID NO: 4224586 - DNA, 25 bp, Homo sapien
gtacccattcttaccaaatgacgat

SEQ ID NO: 4224587 - DNA, 25 bp, Homo sapien
ttgtctattcccgttgtacccattc

SEQ ID NO: 4224588 - DNA, 25 bp, Homo sapien
tcttaccaaatgacgatatttgcag

SEQ ID NO: 4224589 - DNA, 25 bp, Homo sapien
cgttgtacccattcttaccaaatga

SEQ ID NO: 4224590 - DNA, 25 bp, Homo sapien
tgtgagagctcgtaagtgtaatcca

SEQ ID NO: 4224591 - DNA, 25 bp, Homo sapien
gacatctcgtagcattcagtgaccc

SEQ ID NO: 4224592 - DNA, 25 bp, Homo sapien
tacactttctagcttgaggcctttg

SEQ ID NO: 4224593 - DNA, 25 bp, Homo sapien
gaggcctttgcagaatccatacaag

SEQ ID NO: 4224594 - DNA, 25 bp, Homo sapien
agcctctttgttctgttagcaacat

SEQ ID NO: 4224595 - DNA, 25 bp, Homo sapien
tgtccttgccttatccacttccctt

SEQ ID NO: 4224596 - DNA, 25 bp, Homo sapien
tccattcctttattgtgtggcagga

SEQ ID NO: 4224597 - DNA, 25 bp, Homo sapien
acatttgggtaaattgcaaagcaca

SEQ ID NO: 4224598 - DNA, 25 bp, Homo sapien
ctcttggctccactgccttaaatcc

SEQ ID NO: 4224599 - DNA, 25 bp, Homo sapien
cttggctccactgccttaaatccat

SEQ ID NO: 4224600 - DNA, 25 bp, Homo sapien
tcttggctccactgccttaaatcca

SEQ ID NO: 4224601 - DNA, 25 bp, Homo sapien
tccctcttttgatcagcccaatttt

SEQ ID NO: 4224602 - DNA, 25 bp, Homo sapien
cagatgatgtttcggcatttgccac

SEQ ID NO: 4224603 - DNA, 25 bp, Homo sapien
ctcttttgatcagcccaattttgaa

SEQ ID NO: 4224604 - DNA, 25 bp, Homo sapien
gccactcacaagatcaatatcttcc

SEQ ID NO: 4224605 - DNA, 25 bp, Homo sapien
tcggcgtgccgatgcactgatgtaa

SEQ ID NO: 4224606 - DNA, 25 bp, Homo sapien
ttccacttcagtggactgagctttt

SEQ ID NO: 4224607 - DNA, 25 bp, Homo sapien
caaatgagcttgctcagaagggccc

SEQ ID NO: 4224608 - DNA, 25 bp, Homo sapien
tagctgggttgctaggatctggcca

SEQ ID NO: 4224609 - DNA, 25 bp, Homo sapien
gctggacaccctcaatgatgacctc

SEQ ID NO: 4224610 - DNA, 25 bp, Homo sapien
tgcagtaaggctgttacccacaatt

SEQ ID NO: 4224611 - DNA, 25 bp, Homo sapien
gagcagtaaactaggccagcttgca

SEQ ID NO: 4224612 - DNA, 25 bp, Homo sapien
tagagtcacagatgtttgctgcact

SEQ ID NO: 4224613 - DNA, 25 bp, Homo sapien
tgtgcaactcgatgtctagactcct

SEQ ID NO: 4224614 - DNA, 25 bp, Homo sapien
tgcagctttccctgatcatggcagc

SEQ ID NO: 4224615 - DNA, 25 bp, Homo sapien
cccattgtgcacactcagtcttgtg

SEQ ID NO: 4224616 - DNA, 25 bp, Homo sapien
atggcagcccatgccgttacttctc

SEQ ID NO: 4224617 - DNA, 25 bp, Homo sapien
cgaggggacgcggttcctgactcct

SEQ ID NO: 4224618 - DNA, 25 bp, Homo sapien
actcttgctgctgtaaacccgaggg

SEQ ID NO: 4224619 - DNA, 25 bp, Homo sapien
ggaaactcttgctgctgtaaacccg

SEQ ID NO: 4224620 - DNA, 25 bp, Homo sapien
gaaactcttgctgctgtaaacccga

SEQ ID NO: 4224621 - DNA, 25 bp, Homo sapien
agcagaaacaggctggccaagtgcc

SEQ ID NO: 4224622 - DNA, 25 bp, Homo sapien
agaaacaggctggccaagtgcccat

SEQ ID NO: 4224623 - DNA, 25 bp, Homo sapien
tgagcagaaacaggctggccaagtg

SEQ ID NO: 4224624 - DNA, 25 bp, Homo sapien
ctgagcagaaacaggctggccaagt

SEQ ID NO: 4224625 - DNA, 25 bp, Homo sapien
tcggtgttgaggacacagtgaagcc

SEQ ID NO: 4224626 - DNA, 25 bp, Homo sapien
ctcggtgttgaggacacagtgaagc

SEQ ID NO: 4224627 - DNA, 25 bp, Homo sapien
gatgtttgcgggcttgttagtgcca

SEQ ID NO: 4224628 - DNA, 25 bp, Homo sapien
gcctgaacccagtgctgagtcttaa

SEQ ID NO: 4224629 - DNA, 25 bp, Homo sapien
gagtcttaaccccatacacaatcga

SEQ ID NO: 4224630 - DNA, 25 bp, Homo sapien
catacacaatcgaggaggctcagag

SEQ ID NO: 4224631 - DNA, 25 bp, Homo sapien
gacggatagacgagaactgttccct

SEQ ID NO: 4224632 - DNA, 25 bp, Homo sapien
tgctctgggactctaatgtgatctg

SEQ ID NO: 4224633 - DNA, 25 bp, Homo sapien
ctgcctccttggtgacggatagacg

SEQ ID NO: 4224634 - DNA, 25 bp, Homo sapien
caggagtgtcctcctcatcaggtac

SEQ ID NO: 4224635 - DNA, 25 bp, Homo sapien
gacaggggagaccagaggacaggcc

SEQ ID NO: 4224636 - DNA, 25 bp, Homo sapien
ggacaggggagaccagaggacaggc

SEQ ID NO: 4224637 - DNA, 25 bp, Homo sapien
ccttcatgggacaggggagaccaga

SEQ ID NO: 4224638 - DNA, 25 bp, Homo sapien
cttccttcatgggacaggggagacc

SEQ ID NO: 4224639 - DNA, 25 bp, Homo sapien
tggagcctgctacgcggtgcccaaa

SEQ ID NO: 4224640 - DNA, 25 bp, Homo sapien
gctgtgataagaagtgccttcccca

SEQ ID NO: 4224641 - DNA, 25 bp, Homo sapien
ggttttgcagtgcaggcccctctgg

SEQ ID NO: 4224642 - DNA, 25 bp, Homo sapien
tatagtatactctgctgagagagga

SEQ ID NO: 4224643 - DNA, 25 bp, Homo sapien
ctggtccaagctgaggggagttggt

SEQ ID NO: 4224644 - DNA, 25 bp, Homo sapien
tggtccaagctgaggggagttggtt

SEQ ID NO: 4224645 - DNA, 25 bp, Homo sapien
agctgaggggagttggttggtacaa

SEQ ID NO: 4224646 - DNA, 25 bp, Homo sapien
gggagttggttggtacaaagcctga

SEQ ID NO: 4224647 - DNA, 25 bp, Homo sapien
ttgtggattctagttccctctcctc

SEQ ID NO: 4224648 - DNA, 25 bp, Homo sapien
gtgaaggaaggcagccagaactgaa

SEQ ID NO: 4224649 - DNA, 25 bp, Homo sapien
ctgaacaggtgaaggaaggcagcca

SEQ ID NO: 4224650 - DNA, 25 bp, Homo sapien
gccagaactgaatccttttgtggat

SEQ ID NO: 4224651 - DNA, 25 bp, Homo sapien
atcctttgagtacgtaagggtcaag

SEQ ID NO: 4224652 - DNA, 25 bp, Homo sapien
gaattgctcctttaccaaagatatg

SEQ ID NO: 4224653 - DNA, 25 bp, Homo sapien
taactctttagccttctccctgtac

SEQ ID NO: 4224654 - DNA, 25 bp, Homo sapien
caggtaactctttagccttctccct

SEQ ID NO: 4224655 - DNA, 25 bp, Homo sapien
gaaactgatgcagcaggacggtcta

SEQ ID NO: 4224656 - DNA, 25 bp, Homo sapien
gggatcaatgacttcaaaaatgcaa

SEQ ID NO: 4224657 - DNA, 25 bp, Homo sapien
ggacggtctacagtgtatccttgac

SEQ ID NO: 4224658 - DNA, 25 bp, Homo sapien
agtgtatccttgacccaagcatttc

SEQ ID NO: 4224659 - DNA, 25 bp, Homo sapien
gggcagtctgacttctgttggatgt

SEQ ID NO: 4224660 - DNA, 25 bp, Homo sapien
gacttctgttggatgtccactgtgg

SEQ ID NO: 4224661 - DNA, 25 bp, Homo sapien
ctactgtgacaagacaatatatgaa

SEQ ID NO: 4224662 - DNA, 25 bp, Homo sapien
cttcatctctttctactgtgacaag

SEQ ID NO: 4224663 - DNA, 25 bp, Homo sapien
tctttccccggacacactatgaaca

SEQ ID NO: 4224664 - DNA, 25 bp, Homo sapien
aacaaggtgggacttaagcgagaag

SEQ ID NO: 4224665 - DNA, 25 bp, Homo sapien
aaagagctcagttctgtatgctgca

SEQ ID NO: 4224666 - DNA, 25 bp, Homo sapien
ctcaacatagaagcgtaaaacaaga

SEQ ID NO: 4224667 - DNA, 25 bp, Homo sapien
tgctgataaggttgattgatgccaa

SEQ ID NO: 4224668 - DNA, 25 bp, Homo sapien
attgttctggcaaatagatcctgta

SEQ ID NO: 4224669 - DNA, 25 bp, Homo sapien
tgtcttgataaaagccccggtctct

SEQ ID NO: 4224670 - DNA, 25 bp, Homo sapien
aaaaattgttctggcaaatagatcc

SEQ ID NO: 4224671 - DNA, 25 bp, Homo sapien
cgaaatcctttgtagccccagcacc

SEQ ID NO: 4224672 - DNA, 25 bp, Homo sapien
tgtagaaaggcccattatctctctt

SEQ ID NO: 4224673 - DNA, 25 bp, Homo sapien
ttttccaccagaattgtagaaaggc

SEQ ID NO: 4224674 - DNA, 25 bp, Homo sapien
caccagaattgtagaaaggcccatt

SEQ ID NO: 4224675 - DNA, 25 bp, Homo sapien
cttttgttttccaccagaattgtag

SEQ ID NO: 4224676 - DNA, 25 bp, Homo sapien
ccagggcacacaagaatcatgcaaa

SEQ ID NO: 4224677 - DNA, 25 bp, Homo sapien
gtccagggcacacaagaatcatgca

SEQ ID NO: 4224678 - DNA, 25 bp, Homo sapien
aagtccagggcacacaagaatcatg

SEQ ID NO: 4224679 - DNA, 25 bp, Homo sapien
taagtccagggcacacaagaatcat

SEQ ID NO: 4224680 - DNA, 25 bp, Homo sapien
gacttaggacctcactagtactgtt

SEQ ID NO: 4224681 - DNA, 25 bp, Homo sapien
actgccaagacttaggacctcacta

SEQ ID NO: 4224682 - DNA, 25 bp, Homo sapien
tagtactgttgacaacctctttttc

SEQ ID NO: 4224683 - DNA, 25 bp, Homo sapien
tctgcttgactcatattgcaatcac

SEQ ID NO: 4224684 - DNA, 25 bp, Homo sapien
atgctccagggctgattgatgcggt

SEQ ID NO: 4224685 - DNA, 25 bp, Homo sapien
gattgatgcggtgacagcaccaggc

SEQ ID NO: 4224686 - DNA, 25 bp, Homo sapien
ttcctcctgttgtgattgcagtgtg

SEQ ID NO: 4224687 - DNA, 25 bp, Homo sapien
tgttgtgattgcagtgtggaatgac

SEQ ID NO: 4224688 - DNA, 25 bp, Homo sapien
ttttcaaggttacagggatcaagct

SEQ ID NO: 4224689 - DNA, 25 bp, Homo sapien
tttcaaggttacagggatcaagctg

SEQ ID NO: 4224690 - DNA, 25 bp, Homo sapien
ttcaaggttacagggatcaagctgc

SEQ ID NO: 4224691 - DNA, 25 bp, Homo sapien
cgggatcacataggaagtccaccaa

SEQ ID NO: 4224692 - DNA, 25 bp, Homo sapien
gatcacataggaagtccaccaacac

SEQ ID NO: 4224693 - DNA, 25 bp, Homo sapien
tcacataggaagtccaccaacacca

SEQ ID NO: 4224694 - DNA, 25 bp, Homo sapien
ctcgggatcacataggaagtccacc

SEQ ID NO: 4224695 - DNA, 25 bp, Homo sapien
ttttctctccaatcgcatgaagccg

SEQ ID NO: 4224696 - DNA, 25 bp, Homo sapien
gccgccagtcgtgcttcctaagtga

SEQ ID NO: 4224697 - DNA, 25 bp, Homo sapien
gtgaatgccgtctatggagcagagc

SEQ ID NO: 4224698 - DNA, 25 bp, Homo sapien
ggttgccaactcttacaccagctga

SEQ ID NO: 4224699 - DNA, 25 bp, Homo sapien
gccagccatggaagccctgtgactt

SEQ ID NO: 4224700 - DNA, 25 bp, Homo sapien
aacttggaattctgccgagggctcc

SEQ ID NO: 4224701 - DNA, 25 bp, Homo sapien
tcaactgaatttccggctcgacgct

SEQ ID NO: 4224702 - DNA, 25 bp, Homo sapien
gcccaagcctgattcttgtttccag

SEQ ID NO: 4224703 - DNA, 25 bp, Homo sapien
atgcagtggcttgatagcgcagaat

SEQ ID NO: 4224704 - DNA, 25 bp, Homo sapien
ttgatagcgcagaatgaaagcaatc

SEQ ID NO: 4224705 - DNA, 25 bp, Homo sapien
ttggcaacggaaggagttgctaatg

SEQ ID NO: 4224706 - DNA, 25 bp, Homo sapien
ggagttgctaatggattcatcattt

SEQ ID NO: 4224707 - DNA, 25 bp, Homo sapien
tgcttctacagaggtcctgggtaca

SEQ ID NO: 4224708 - DNA, 25 bp, Homo sapien
cttgtagttgctcattccaaactca

SEQ ID NO: 4224709 - DNA, 25 bp, Homo sapien
cctttccttgtagttgctcattcca

SEQ ID NO: 4224710 - DNA, 25 bp, Homo sapien
ggaacttttggtagcttgtacctgc

SEQ ID NO: 4224711 - DNA, 25 bp, Homo sapien
gtagcatcgtttttgagtaggactg

SEQ ID NO: 4224712 - DNA, 25 bp, Homo sapien
gcaatgcaataatagacctcaacgt

SEQ ID NO: 4224713 - DNA, 25 bp, Homo sapien
catgacctgttgcatgtagcatcgt

SEQ ID NO: 4224714 - DNA, 25 bp, Homo sapien
gaatcagtctcaagaaattattgcc

SEQ ID NO: 4224715 - DNA, 25 bp, Homo sapien
ttgctgtacatgacaaactgttggt

SEQ ID NO: 4224716 - DNA, 25 bp, Homo sapien
tcttgaaccccatccagttgctgta

SEQ ID NO: 4224717 - DNA, 25 bp, Homo sapien
agttgctgtacatgacaaactgttg

SEQ ID NO: 4224718 - DNA, 25 bp, Homo sapien
aatgactgaatcttgaaccccatcc

SEQ ID NO: 4224719 - DNA, 25 bp, Homo sapien
gccttttgtgtattccccaatcaaa

SEQ ID NO: 4224720 - DNA, 25 bp, Homo sapien
ctaaagaaatgacacccactggttc

SEQ ID NO: 4224721 - DNA, 25 bp, Homo sapien
ccactggttcgcctttatagatcat

SEQ ID NO: 4224722 - DNA, 25 bp, Homo sapien
acacccactggttcgcctttataga

SEQ ID NO: 4224723 - DNA, 25 bp, Homo sapien
tcagttcagcgagatgcctttttcc

SEQ ID NO: 4224724 - DNA, 25 bp, Homo sapien
cctctgccatgtgaatactcttgta

SEQ ID NO: 4224725 - DNA, 25 bp, Homo sapien
tgtgttcagtctgtatcctctgcca

SEQ ID NO: 4224726 - DNA, 25 bp, Homo sapien
ctccagttccctgctgtgatctgat

SEQ ID NO: 4224727 - DNA, 25 bp, Homo sapien
ttcgtgtccacaagagatgagcagc

SEQ ID NO: 4224728 - DNA, 25 bp, Homo sapien
catcttggagattgacaaggtcccc

SEQ ID NO: 4224729 - DNA, 25 bp, Homo sapien
gaaagaaagcacctcgctgagtggt

SEQ ID NO: 4224730 - DNA, 25 bp, Homo sapien
tgagcagcaataccattataggatt

SEQ ID NO: 4224731 - DNA, 25 bp, Homo sapien
agaaagtgaaatgccagtccttggg

SEQ ID NO: 4224732 - DNA, 25 bp, Homo sapien
gcaagaacagcaggtaatgttatca

SEQ ID NO: 4224733 - DNA, 25 bp, Homo sapien
atttgcatgtggataggcaagaaca

SEQ ID NO: 4224734 - DNA, 25 bp, Homo sapien
tggataggcaagaacagcaggtaat

SEQ ID NO: 4224735 - DNA, 25 bp, Homo sapien
attgtctttggcatttgcatgtgga

SEQ ID NO: 4224736 - DNA, 25 bp, Homo sapien
ttatctgagctaggatcaaagtccc

SEQ ID NO: 4224737 - DNA, 25 bp, Homo sapien
tgtactgcagaaaaacatcttccaa

SEQ ID NO: 4224738 - DNA, 25 bp, Homo sapien
ggcctgagggatagaacgaccagaa

SEQ ID NO: 4224739 - DNA, 25 bp, Homo sapien
gggatagcagctgttatctgagcta

SEQ ID NO: 4224740 - DNA, 25 bp, Homo sapien
ttcctcatcatttgcaacaattttt

SEQ ID NO: 4224741 - DNA, 25 bp, Homo sapien
cctcatcatttgcaacaatttttat

SEQ ID NO: 4224742 - DNA, 25 bp, Homo sapien
tgttcctcatcatttgcaacaattt

SEQ ID NO: 4224743 - DNA, 25 bp, Homo sapien
tcatcatttgcaacaatttttattt

SEQ ID NO: 4224744 - DNA, 25 bp, Homo sapien
tcttcgctgtgttgactgacatctc

SEQ ID NO: 4224745 - DNA, 25 bp, Homo sapien
caaagagcaactgtaaccggatcct

SEQ ID NO: 4224746 - DNA, 25 bp, Homo sapien
tatctattgttgaccgaggcagcag

SEQ ID NO: 4224747 - DNA, 25 bp, Homo sapien
cttgttgacagaaggtcgacgtggc

SEQ ID NO: 4224748 - DNA, 25 bp, Homo sapien
ttgccttcttcctgggtaaaataca

SEQ ID NO: 4224749 - DNA, 25 bp, Homo sapien
tgccttcttcctgggtaaaatacat

SEQ ID NO: 4224750 - DNA, 25 bp, Homo sapien
gagacctggatttggtgtcttttga

SEQ ID NO: 4224751 - DNA, 25 bp, Homo sapien
ctggagacctggatttggtgtcttt

SEQ ID NO: 4224752 - DNA, 25 bp, Homo sapien
aaataagtggtaccttctttatgct

SEQ ID NO: 4224753 - DNA, 25 bp, Homo sapien
cttctttatgctcgtattttctttc

SEQ ID NO: 4224754 - DNA, 25 bp, Homo sapien
tgctgggctactgtgtcacttaggt

SEQ ID NO: 4224755 - DNA, 25 bp, Homo sapien
tctacttgctgatgtttaaccagct

SEQ ID NO: 4224756 - DNA, 25 bp, Homo sapien
ccatggagtgcggagtatacagtga

SEQ ID NO: 4224757 - DNA, 25 bp, Homo sapien
ttaaagtccatggagtgcggagtat

SEQ ID NO: 4224758 - DNA, 25 bp, Homo sapien
tgtactaggtgctacggatataaca

SEQ ID NO: 4224759 - DNA, 25 bp, Homo sapien
gacacaagctaaaatcgtcataaat

SEQ ID NO: 4224760 - DNA, 25 bp, Homo sapien
gagatattgcactgtagatggtagc

SEQ ID NO: 4224761 - DNA, 25 bp, Homo sapien
gaggttttcctcgatgacattcaga

SEQ ID NO: 4224762 - DNA, 25 bp, Homo sapien
actcaggtgaaaaccaatcttgtta

SEQ ID NO: 4224763 - DNA, 25 bp, Homo sapien
tcaggtgaaaaccaatcttgttaaa

SEQ ID NO: 4224764 - DNA, 25 bp, Homo sapien
gagaaaactcaggtgaaaaccaatc

SEQ ID NO: 4224765 - DNA, 25 bp, Homo sapien
aaactcaggtgaaaaccaatcttgt

SEQ ID NO: 4224766 - DNA, 25 bp, Homo sapien
tcccacagattgatggctgaagcaa

SEQ ID NO: 4224767 - DNA, 25 bp, Homo sapien
catcgatggagctgaaatactctgc

SEQ ID NO: 4224768 - DNA, 25 bp, Homo sapien
tctcttgattgctacaggaggagct

SEQ ID NO: 4224769 - DNA, 25 bp, Homo sapien
gatagctgactcctctgcggctgct

SEQ ID NO: 4224770 - DNA, 25 bp, Homo sapien
aaagttattacaaactcatgcctac

SEQ ID NO: 4224771 - DNA, 25 bp, Homo sapien
ttacaaactcatgcctacacattag

SEQ ID NO: 4224772 - DNA, 25 bp, Homo sapien
tattgtgtgagtattagaaattact

SEQ ID NO: 4224773 - DNA, 25 bp, Homo sapien
aactcatgcctacacattagaaaga

SEQ ID NO: 4224774 - DNA, 25 bp, Homo sapien
tctttaggagattacacacctggaa

SEQ ID NO: 4224775 - DNA, 25 bp, Homo sapien
tcatatagtccccaacaggtttcag

SEQ ID NO: 4224776 - DNA, 25 bp, Homo sapien
gcagagagttttcctagccatacct

SEQ ID NO: 4224777 - DNA, 25 bp, Homo sapien
tctgccaagaattacagtgcacctg

SEQ ID NO: 4224778 - DNA, 25 bp, Homo sapien
aactcccaagggatgtagcactggc

SEQ ID NO: 4224779 - DNA, 25 bp, Homo sapien
tagagtctggcttggcactagaacc

SEQ ID NO: 4224780 - DNA, 25 bp, Homo sapien
ccatgggagaacgtcagtgctgcac

SEQ ID NO: 4224781 - DNA, 25 bp, Homo sapien
taggccggtttctgactaagcaagt

SEQ ID NO: 4224782 - DNA, 25 bp, Homo sapien
tgtcctgaggttgtgtctcgcgacc

SEQ ID NO: 4224783 - DNA, 25 bp, Homo sapien
gcttgtacatatgagctctccatga

SEQ ID NO: 4224784 - DNA, 25 bp, Homo sapien
tattgatgccagatcacaaggtgat

SEQ ID NO: 4224785 - DNA, 25 bp, Homo sapien
tgctggatcgtagcgcaccatctgg

SEQ ID NO: 4224786 - DNA, 25 bp, Homo sapien
ttccttagttgtagcccatttaaga

SEQ ID NO: 4224787 - DNA, 25 bp, Homo sapien
tgttccttagttgtagcccatttaa

SEQ ID NO: 4224788 - DNA, 25 bp, Homo sapien
cttgttccttagttgtagcccattt

SEQ ID NO: 4224789 - DNA, 25 bp, Homo sapien
gctgctccaaagggtcttgttcctt

SEQ ID NO: 4224790 - DNA, 25 bp, Homo sapien
gcagtaacctcgcagtgatctccag

SEQ ID NO: 4224791 - DNA, 25 bp, Homo sapien
aatggcaaaaatgcaggtcatcacc

SEQ ID NO: 4224792 - DNA, 25 bp, Homo sapien
tgatctccagggaccaatggcaaaa

SEQ ID NO: 4224793 - DNA, 25 bp, Homo sapien
catgatgaggaatctgaccaattga

SEQ ID NO: 4224794 - DNA, 25 bp, Homo sapien
aaggagttaagatgccggactgaaa

SEQ ID NO: 4224795 - DNA, 25 bp, Homo sapien
gatgccggactgaaatctgggaaga

SEQ ID NO: 4224796 - DNA, 25 bp, Homo sapien
acagagagctaatgaaggagttaag

SEQ ID NO: 4224797 - DNA, 25 bp, Homo sapien
aaacagagagctaatgaaggagtta

SEQ ID NO: 4224798 - DNA, 25 bp, Homo sapien
gaagaaggacgggacttgaaggcca

SEQ ID NO: 4224799 - DNA, 25 bp, Homo sapien
ccacgtgaagtagtttagagttgat

SEQ ID NO: 4224800 - DNA, 25 bp, Homo sapien
acgggacttgaaggccacgtgaagt

SEQ ID NO: 4224801 - DNA, 25 bp, Homo sapien
gaaggccacgtgaagtagtttagag

SEQ ID NO: 4224802 - DNA, 25 bp, Homo sapien
tcgtagattagtcaaataccgagca

SEQ ID NO: 4224803 - DNA, 25 bp, Homo sapien
gggtctagtcgtagattagtcaaat

SEQ ID NO: 4224804 - DNA, 25 bp, Homo sapien
gattagtcaaataccgagcatacca

SEQ ID NO: 4224805 - DNA, 25 bp, Homo sapien
gtcaaataccgagcataccaaagtt

SEQ ID NO: 4224806 - DNA, 25 bp, Homo sapien
cttctttgcggtggtttttggattg

SEQ ID NO: 4224807 - DNA, 25 bp, Homo sapien
tggaagaacatctttagttttatat

SEQ ID NO: 4224808 - DNA, 25 bp, Homo sapien
tccttcccatttccctctccatttc

SEQ ID NO: 4224809 - DNA, 25 bp, Homo sapien
ctatggaagaacatctttagtttta

SEQ ID NO: 4224810 - DNA, 25 bp, Homo sapien
atagctctttcacccttaccacgta

SEQ ID NO: 4224811 - DNA, 25 bp, Homo sapien
cacacacttgatctcccatgtcaga

SEQ ID NO: 4224812 - DNA, 25 bp, Homo sapien
cacacttgatctcccatgtcagaaa

SEQ ID NO: 4224813 - DNA, 25 bp, Homo sapien
tttggaaatcatccatagctctttc

SEQ ID NO: 4224814 - DNA, 25 bp, Homo sapien
tacctggcacatgttagtcctcaat

SEQ ID NO: 4224815 - DNA, 25 bp, Homo sapien
cttggttcagaagttccgagcggtg

SEQ ID NO: 4224816 - DNA, 25 bp, Homo sapien
actctgccgagttatcaattcccaa

SEQ ID NO: 4224817 - DNA, 25 bp, Homo sapien
tgtttattaacatgagggactaggg

SEQ ID NO: 4224818 - DNA, 25 bp, Homo sapien
ccggtcacctctccacttgtacagc

SEQ ID NO: 4224819 - DNA, 25 bp, Homo sapien
acagtgccataacctaatgccatta

SEQ ID NO: 4224820 - DNA, 25 bp, Homo sapien
caacagatgaaacagtgccataacc

SEQ ID NO: 4224821 - DNA, 25 bp, Homo sapien
tcttcagcaacagatgaaacagtgc

SEQ ID NO: 4224822 - DNA, 25 bp, Homo sapien
ctcttcttcttttccttcttgtact

SEQ ID NO: 4224823 - DNA, 25 bp, Homo sapien
ggcagtcgtatctacctactttctg

SEQ ID NO: 4224824 - DNA, 25 bp, Homo sapien
acaaaaggctgtagggatgccggca

SEQ ID NO: 4224825 - DNA, 25 bp, Homo sapien
gggatgccggcagtcgtatctacct

SEQ ID NO: 4224826 - DNA, 25 bp, Homo sapien
tactgtattaacaaaaggctgtagg

SEQ ID NO: 4224827 - DNA, 25 bp, Homo sapien
aacttagattagaaatctcataagg

SEQ ID NO: 4224828 - DNA, 25 bp, Homo sapien
cctgtgtttatccaggccaggtggg

SEQ ID NO: 4224829 - DNA, 25 bp, Homo sapien
actccaaacttagattagaaatctc

SEQ ID NO: 4224830 - DNA, 25 bp, Homo sapien
tggggatggggagcaattttggacc

SEQ ID NO: 4224831 - DNA, 25 bp, Homo sapien
aattagtaattctgacacaggtaaa

SEQ ID NO: 4224832 - DNA, 25 bp, Homo sapien
ttttatgcctcactggtccccggta

SEQ ID NO: 4224833 - DNA, 25 bp, Homo sapien
tccccggtaaccagatggcattgtt

SEQ ID NO: 4224834 - DNA, 25 bp, Homo sapien
ttaattagtaattctgacacaggta

SEQ ID NO: 4224835 - DNA, 25 bp, Homo sapien
gctgtgctagtttcagcagcacaaa

SEQ ID NO: 4224836 - DNA, 25 bp, Homo sapien
agtaagagctgtgctagtttcagca

SEQ ID NO: 4224837 - DNA, 25 bp, Homo sapien
tcatttatggctaaaggcaaatttg

SEQ ID NO: 4224838 - DNA, 25 bp, Homo sapien
taagagctgtgctagtttcagcagc

SEQ ID NO: 4224839 - DNA, 25 bp, Homo sapien
tcagtctgaactctctttgacaaca

SEQ ID NO: 4224840 - DNA, 25 bp, Homo sapien
agtctgaactctctttgacaacatt

SEQ ID NO: 4224841 - DNA, 25 bp, Homo sapien
ctctgacatgatcagcatcttctgc

SEQ ID NO: 4224842 - DNA, 25 bp, Homo sapien
tttgacaacattttctctgacatga

SEQ ID NO: 4224843 - DNA, 25 bp, Homo sapien
cagcaggaattgcaaagttttccca

SEQ ID NO: 4224844 - DNA, 25 bp, Homo sapien
cagccatcactgactggcagaactg

SEQ ID NO: 4224845 - DNA, 25 bp, Homo sapien
cagtctggatcctgcttgaaccaaa

SEQ ID NO: 4224846 - DNA, 25 bp, Homo sapien
ccagcaaaacattcgcaaagcagtt

SEQ ID NO: 4224847 - DNA, 25 bp, Homo sapien
gaatgtgttgtagctttatatgaag

SEQ ID NO: 4224848 - DNA, 25 bp, Homo sapien
gctaatggagcaaggcaatgctcaa

SEQ ID NO: 4224849 - DNA, 25 bp, Homo sapien
tagctttatatgaagctaatggagc

SEQ ID NO: 4224850 - DNA, 25 bp, Homo sapien
tcaaacgtcaaattaaactgcacag

SEQ ID NO: 4224851 - DNA, 25 bp, Homo sapien
caggcagtgaaagatatggcaaaac

SEQ ID NO: 4224852 - DNA, 25 bp, Homo sapien
tttctaaatttagacaccaaactga

SEQ ID NO: 4224853 - DNA, 25 bp, Homo sapien
gccaggcagtgaaagatatggcaaa

SEQ ID NO: 4224854 - DNA, 25 bp, Homo sapien
tagacaccaaactgatgtttttctc

SEQ ID NO: 4224855 - DNA, 25 bp, Homo sapien
aaagtgcctgctttgcctgggtggc

SEQ ID NO: 4224856 - DNA, 25 bp, Homo sapien
gatttttctttgctcttgctccgcc

SEQ ID NO: 4224857 - DNA, 25 bp, Homo sapien
ttgagggcttgataagccttcctct

SEQ ID NO: 4224858 - DNA, 25 bp, Homo sapien
gctccttctttgccaaaagtgcctg

SEQ ID NO: 4224859 - DNA, 25 bp, Homo sapien
catgtaggaataattgcagttgctt

SEQ ID NO: 4224860 - DNA, 25 bp, Homo sapien
cttgccatatttctgctgccaggaa

SEQ ID NO: 4224861 - DNA, 25 bp, Homo sapien
gaatcatgtaggaataattgcagtt

SEQ ID NO: 4224862 - DNA, 25 bp, Homo sapien
taggaataattgcagttgcttaaac

SEQ ID NO: 4224863 - DNA, 25 bp, Homo sapien
ctggcaattccaagtcatgaggttt

SEQ ID NO: 4224864 - DNA, 25 bp, Homo sapien
caattccaagtcatgaggtttcact

SEQ ID NO: 4224865 - DNA, 25 bp, Homo sapien
tttcgatgagtacaacaaaggccaa

SEQ ID NO: 4224866 - DNA, 25 bp, Homo sapien
ctttcgatgagtacaacaaaggcca

SEQ ID NO: 4224867 - DNA, 25 bp, Homo sapien
ggtcacacaaggttctattatatgc

SEQ ID NO: 4224868 - DNA, 25 bp, Homo sapien
ccccaggtcacacaaggttctatta

SEQ ID NO: 4224869 - DNA, 25 bp, Homo sapien
cacaaggttctattatatgcagcat

SEQ ID NO: 4224870 - DNA, 25 bp, Homo sapien
cacacaaggttctattatatgcagc

SEQ ID NO: 4224871 - DNA, 25 bp, Homo sapien
tctggccttctatgtccgctgctgg

SEQ ID NO: 4224872 - DNA, 25 bp, Homo sapien
aagtgcctgatggttgccactggca

SEQ ID NO: 4224873 - DNA, 25 bp, Homo sapien
tatgtccgctgctggctctgaggtt

SEQ ID NO: 4224874 - DNA, 25 bp, Homo sapien
tgttcccatttgtgaactccctgtt

SEQ ID NO: 4224875 - DNA, 25 bp, Homo sapien
atttgctgaccaacattatccaggt

SEQ ID NO: 4224876 - DNA, 25 bp, Homo sapien
gctgaccaacattatccaggtggtg

SEQ ID NO: 4224877 - DNA, 25 bp, Homo sapien
gaccaacattatccaggtggtggac

SEQ ID NO: 4224878 - DNA, 25 bp, Homo sapien
ttgctgaccaacattatccaggtgg

SEQ ID NO: 4224879 - DNA, 25 bp, Homo sapien
caggcttggctgatctagatccttc

SEQ ID NO: 4224880 - DNA, 25 bp, Homo sapien
gtgttggttttggaccttggcctca

SEQ ID NO: 4224881 - DNA, 25 bp, Homo sapien
tcagtctgggtttatgggtcaaggt

SEQ ID NO: 4224882 - DNA, 25 bp, Homo sapien
gatccttctactgaggctgatccag

SEQ ID NO: 4224883 - DNA, 25 bp, Homo sapien
cagtcactatagtccagtagtgtct

SEQ ID NO: 4224884 - DNA, 25 bp, Homo sapien
ctatagtccagtagtgtctctttca

SEQ ID NO: 4224885 - DNA, 25 bp, Homo sapien
tcactatagtccagtagtgtctctt

SEQ ID NO: 4224886 - DNA, 25 bp, Homo sapien
tagtccagtagtgtctctttcaggg

SEQ ID NO: 4224887 - DNA, 25 bp, Homo sapien
ttaaccaaccatccttgccctcctg

SEQ ID NO: 4224888 - DNA, 25 bp, Homo sapien
taaccaaccatccttgccctcctga

SEQ ID NO: 4224889 - DNA, 25 bp, Homo sapien
aaccaaccatccttgccctcctgac

SEQ ID NO: 4224890 - DNA, 25 bp, Homo sapien
tctacttttaaccaaccatccttgc

SEQ ID NO: 4224891 - DNA, 25 bp, Homo sapien
agttaaatattgtccattgcccacg

SEQ ID NO: 4224892 - DNA, 25 bp, Homo sapien
taaatattgtccattgcccacgggc

SEQ ID NO: 4224893 - DNA, 25 bp, Homo sapien
ttaacgtctgctggcagttaaatat

SEQ ID NO: 4224894 - DNA, 25 bp, Homo sapien
taacgtctgctggcagttaaatatt

SEQ ID NO: 4224895 - DNA, 25 bp, Homo sapien
tgcccacttagttctcttggtcctc

SEQ ID NO: 4224896 - DNA, 25 bp, Homo sapien
gggcatcttgcccacttagttctct

SEQ ID NO: 4224897 - DNA, 25 bp, Homo sapien
ctcttggtcctcgtgctcctcctgg

SEQ ID NO: 4224898 - DNA, 25 bp, Homo sapien
agagcattctggtccccggtcccca

SEQ ID NO: 4224899 - DNA, 25 bp, Homo sapien
ggagcttggtggtcacaatcccttc

SEQ ID NO: 4224900 - DNA, 25 bp, Homo sapien
gcttggtggtcacaatcccttctgt

SEQ ID NO: 4224901 - DNA, 25 bp, Homo sapien
gtcacaatcccttctgtattgctca

SEQ ID NO: 4224902 - DNA, 25 bp, Homo sapien
ggtggtcacaatcccttctgtattg

SEQ ID NO: 4224903 - DNA, 25 bp, Homo sapien
tctgagatttcccactagaactcat

SEQ ID NO: 4224904 - DNA, 25 bp, Homo sapien
ccactagaactcattgtgcacatta

SEQ ID NO: 4224905 - DNA, 25 bp, Homo sapien
gaactcattgtgcacattataaata

SEQ ID NO: 4224906 - DNA, 25 bp, Homo sapien
gatttcccactagaactcattgtgc

SEQ ID NO: 4224907 - DNA, 25 bp, Homo sapien
atgacatgagtctcttctcataggg

SEQ ID NO: 4224908 - DNA, 25 bp, Homo sapien
tgactttaaggtctgcagtagcatc

SEQ ID NO: 4224909 - DNA, 25 bp, Homo sapien
aaactgtatcctgactttaaggtct

SEQ ID NO: 4224910 - DNA, 25 bp, Homo sapien
tctcataggggatattggctttctg

SEQ ID NO: 4224911 - DNA, 25 bp, Homo sapien
gacggcattgctattgccttcatat

SEQ ID NO: 4224912 - DNA, 25 bp, Homo sapien
ggcagactcagtgacggcattgcta

SEQ ID NO: 4224913 - DNA, 25 bp, Homo sapien
actcagtgacggcattgctattgcc

SEQ ID NO: 4224914 - DNA, 25 bp, Homo sapien
gtttcaagatggtatactgatttcc

SEQ ID NO: 4224915 - DNA, 25 bp, Homo sapien
tggttgaagtgacaagttttgggga

SEQ ID NO: 4224916 - DNA, 25 bp, Homo sapien
ctggttttggttgaagtgacaagtt

SEQ ID NO: 4224917 - DNA, 25 bp, Homo sapien
tgtatgtatctccttccaactgaat

SEQ ID NO: 4224918 - DNA, 25 bp, Homo sapien
cttccaactgaatgtgtaattccct

SEQ ID NO: 4224919 - DNA, 25 bp, Homo sapien
tcactattatgaaagatatgaatag

SEQ ID NO: 4224920 - DNA, 25 bp, Homo sapien
tctgtatgtatctccttccaactga

SEQ ID NO: 4224921 - DNA, 25 bp, Homo sapien
ggctaaatggcttgcgaccaaacag

SEQ ID NO: 4224922 - DNA, 25 bp, Homo sapien
ccctagtgaatacaaaaagcctttg

SEQ ID NO: 4224923 - DNA, 25 bp, Homo sapien
cctttggagaccaaagggctggaat

SEQ ID NO: 4224924 - DNA, 25 bp, Homo sapien
aggagctcgggtcgctctccgctct

SEQ ID NO: 4224925 - DNA, 25 bp, Homo sapien
caagctcatcactgaaaccgtgcac

SEQ ID NO: 4224926 - DNA, 25 bp, Homo sapien
tcactgaaaccgtgcactgtgttgt

SEQ ID NO: 4224927 - DNA, 25 bp, Homo sapien
tccacagaggggcactccaagctca

SEQ ID NO: 4224928 - DNA, 25 bp, Homo sapien
tgagcggttgtagaaaaagaacttc

SEQ ID NO: 4224929 - DNA, 25 bp, Homo sapien
tcatcttttatcatcagttggaaag

SEQ ID NO: 4224930 - DNA, 25 bp, Homo sapien
cttgcatgaggaatgtaaacttgcc

SEQ ID NO: 4224931 - DNA, 25 bp, Homo sapien
gagactgacagcctttaaagcttta

SEQ ID NO: 4224932 - DNA, 25 bp, Homo sapien
acagtgttccttatagctccagttt

SEQ ID NO: 4224933 - DNA, 25 bp, Homo sapien
caagtcatgcatacaatttggcaga

SEQ ID NO: 4224934 - DNA, 25 bp, Homo sapien
tccagtcaatggcatcccggtgctg

SEQ ID NO: 4224935 - DNA, 25 bp, Homo sapien
gtcacacttgcacaagagcttttgg

SEQ ID NO: 4224936 - DNA, 25 bp, Homo sapien
cacttgcacaagagcttttggcatt

SEQ ID NO: 4224937 - DNA, 25 bp, Homo sapien
tctgctggtccagtcaatggcatcc

SEQ ID NO: 4224938 - DNA, 25 bp, Homo sapien
ggatatggctgttcctacagcccga

SEQ ID NO: 4224939 - DNA, 25 bp, Homo sapien
tacagcccgactcagaagtgatgac

SEQ ID NO: 4224940 - DNA, 25 bp, Homo sapien
gacagaaataatgacgataatagcc

SEQ ID NO: 4224941 - DNA, 25 bp, Homo sapien
taatgacgataatagccactttaaa

SEQ ID NO: 4224942 - DNA, 25 bp, Homo sapien
ctgtgtcaaagaaggagtcagagtc

SEQ ID NO: 4224943 - DNA, 25 bp, Homo sapien
tagggcttgagtcctgtacacccat

SEQ ID NO: 4224944 - DNA, 25 bp, Homo sapien
ccagacttgccatagtagggcttga

SEQ ID NO: 4224945 - DNA, 25 bp, Homo sapien
tcagagtctcgggaggccagacttg

SEQ ID NO: 4224946 - DNA, 25 bp, Homo sapien
gcagcacgttgctcaagtcttttgc

SEQ ID NO: 4224947 - DNA, 25 bp, Homo sapien
gggcagcagcacgttgctcaagtct

SEQ ID NO: 4224948 - DNA, 25 bp, Homo sapien
ctgggcagcagcacgttgctcaagt

SEQ ID NO: 4224949 - DNA, 25 bp, Homo sapien
gcagcagcacgttgctcaagtcttt

SEQ ID NO: 4224950 - DNA, 25 bp, Homo sapien
aggttgaaatcagggccttgattgt

SEQ ID NO: 4224951 - DNA, 25 bp, Homo sapien
tgaaatcagggccttgattgtttca

SEQ ID NO: 4224952 - DNA, 25 bp, Homo sapien
ccttgattgtttcaggagagtggct

SEQ ID NO: 4224953 - DNA, 25 bp, Homo sapien
attgtttcaggagagtggctgcttc

SEQ ID NO: 4224954 - DNA, 25 bp, Homo sapien
caggtgatctcaatcgaagcattgg

SEQ ID NO: 4224955 - DNA, 25 bp, Homo sapien
ctcaatcgaagcattgggtggcaga

SEQ ID NO: 4224956 - DNA, 25 bp, Homo sapien
tcaggtgacacaggtgatctcaatc

SEQ ID NO: 4224957 - DNA, 25 bp, Homo sapien
gtggcagagggtaacgacgtgccca

SEQ ID NO: 4224958 - DNA, 25 bp, Homo sapien
ctgcctggacattctggcatttgca

SEQ ID NO: 4224959 - DNA, 25 bp, Homo sapien
agcaaaagcagcaatgcctctgcag

SEQ ID NO: 4224960 - DNA, 25 bp, Homo sapien
tggcatttgcaaatagagccccagc

SEQ ID NO: 4224961 - DNA, 25 bp, Homo sapien
gcaaaagcagcaatgcctctgcaga

SEQ ID NO: 4224962 - DNA, 25 bp, Homo sapien
tagagtgcttactatcaactcactg

SEQ ID NO: 4224963 - DNA, 25 bp, Homo sapien
actacttggcaaccctattatggtc

SEQ ID NO: 4224964 - DNA, 25 bp, Homo sapien
gcttgtattgcctttgaaccatgag

SEQ ID NO: 4224965 - DNA, 25 bp, Homo sapien
ggttgttgcaagatctgaatactac

SEQ ID NO: 4224966 - DNA, 25 bp, Homo sapien
tgccctagaaatggagctgacattc

SEQ ID NO: 4224967 - DNA, 25 bp, Homo sapien
ctttgtactgctgaatcttcattgc

SEQ ID NO: 4224968 - DNA, 25 bp, Homo sapien
tgctggctgtcactgccctagaaat

SEQ ID NO: 4224969 - DNA, 25 bp, Homo sapien
cttcattgctggctgtcactgccct

SEQ ID NO: 4224970 - DNA, 25 bp, Homo sapien
tcctcgttcggtgtatacagcagaa

SEQ ID NO: 4224971 - DNA, 25 bp, Homo sapien
tcggtgtatacagcagaagccagaa

SEQ ID NO: 4224972 - DNA, 25 bp, Homo sapien
tcttttcctcgttcggtgtatacag

SEQ ID NO: 4224973 - DNA, 25 bp, Homo sapien
cgttcggtgtatacagcagaagcca

SEQ ID NO: 4224974 - DNA, 25 bp, Homo sapien
cctatacacattctcattcacaaaa

SEQ ID NO: 4224975 - DNA, 25 bp, Homo sapien
ctcattcacaaaattgtagccacag

SEQ ID NO: 4224976 - DNA, 25 bp, Homo sapien
catctccacattgaatctatgtgta

SEQ ID NO: 4224977 - DNA, 25 bp, Homo sapien
gaaggtttacagttaccatggttga

SEQ ID NO: 4224978 - DNA, 25 bp, Homo sapien
tacttcaaagaagtgtaagcgtaag

SEQ ID NO: 4224979 - DNA, 25 bp, Homo sapien
agtgtaagcgtaagggaactcgcca

SEQ ID NO: 4224980 - DNA, 25 bp, Homo sapien
ctcgccaaaaagtccaagctggtac

SEQ ID NO: 4224981 - DNA, 25 bp, Homo sapien
ggaactcgccaaaaagtccaagctg

SEQ ID NO: 4224982 - DNA, 25 bp, Homo sapien
tgctgcattaaacagcgtctgtgga

SEQ ID NO: 4224983 - DNA, 25 bp, Homo sapien
ttaaacagcgtctgtggatcaagtt

SEQ ID NO: 4224984 - DNA, 25 bp, Homo sapien
ctgtggatcaagttgcagtgcggat

SEQ ID NO: 4224985 - DNA, 25 bp, Homo sapien
gcagtgcggatgtccaaattgcttt

SEQ ID NO: 4224986 - DNA, 25 bp, Homo sapien
cactatcaggtacaagaagaacggg

SEQ ID NO: 4224987 - DNA, 25 bp, Homo sapien
gaaagttgagtttcagctctaatga

SEQ ID NO: 4224988 - DNA, 25 bp, Homo sapien
gttgagtttcagctctaatgagaga

SEQ ID NO: 4224989 - DNA, 25 bp, Homo sapien
aggtctgtttcttccacggaagaag

SEQ ID NO: 4224990 - DNA, 25 bp, Homo sapien
cgacaagacagaggcgggagcgggc

SEQ ID NO: 4224991 - DNA, 25 bp, Homo sapien
tgcaggtggaggccgacaagacaga

SEQ ID NO: 4224992 - DNA, 25 bp, Homo sapien
ccgcgtccccatcccgcggcgtcgg

SEQ ID NO: 4224993 - DNA, 25 bp, Homo sapien
ggcgtcggccccgagtcctacaggc

SEQ ID NO: 4224994 - DNA, 25 bp, Homo sapien
gctgctgccggatccagcgccacat

SEQ ID NO: 4224995 - DNA, 25 bp, Homo sapien
agctgctgccggatccagcgccaca

SEQ ID NO: 4224996 - DNA, 25 bp, Homo sapien
cagctgctgccggatccagcgccac

SEQ ID NO: 4224997 - DNA, 25 bp, Homo sapien
ccggctagaagcggccgcctccggc

SEQ ID NO: 4224998 - DNA, 25 bp, Homo sapien
gggcttggaggcgagacgagcccgg

SEQ ID NO: 4224999 - DNA, 25 bp, Homo sapien
cccgggcttggaggcgagacgagcc

SEQ ID NO: 4225000 - DNA, 25 bp, Homo sapien
gaggcgagacgagcccgggagccgc

SEQ ID NO: 4225001 - DNA, 25 bp, Homo sapien
caaacacgtcccaaattgttcgagg

SEQ ID NO: 4225002 - DNA, 25 bp, Homo sapien
attgttcgaggcaggaagagcacgc

SEQ ID NO: 4225003 - DNA, 25 bp, Homo sapien
tcgctcagctccctcgccctgtttc

SEQ ID NO: 4225004 - DNA, 25 bp, Homo sapien
tctccccaagacctactctcgctca

SEQ ID NO: 4225005 - DNA, 25 bp, Homo sapien
gcttccagaagtccgtgacgagtgg

SEQ ID NO: 4225006 - DNA, 25 bp, Homo sapien
aatacgtatcgtttccgaagctaga

SEQ ID NO: 4225007 - DNA, 25 bp, Homo sapien
acacagctctggatcgtgacacgct

SEQ ID NO: 4225008 - DNA, 25 bp, Homo sapien
ttccgaagctagaccggcagctggc

SEQ ID NO: 4225009 - DNA, 25 bp, Homo sapien
cagataaggttaggcttcttcagcc

SEQ ID NO: 4225010 - DNA, 25 bp, Homo sapien
gaatgatgcccgctgcaaaacgaag

SEQ ID NO: 4225011 - DNA, 25 bp, Homo sapien
caaactgccttgaggagaacgggaa

SEQ ID NO: 4225012 - DNA, 25 bp, Homo sapien
taaccatccctgttaagacggctgc

SEQ ID NO: 4225013 - DNA, 25 bp, Homo sapien
gctcaatgactataggcataactag

SEQ ID NO: 4225014 - DNA, 25 bp, Homo sapien
tggagctagacaaacactgtaagtg

SEQ ID NO: 4225015 - DNA, 25 bp, Homo sapien
tgtagattatgtatagagatgctca

SEQ ID NO: 4225016 - DNA, 25 bp, Homo sapien
gacagagcattatttgtgcaccaag

SEQ ID NO: 4225017 - DNA, 25 bp, Homo sapien
tataaaatatcactaaaaataaatg

SEQ ID NO: 4225018 - DNA, 25 bp, Homo sapien
cctgggacgcagaggttgcaagtga

SEQ ID NO: 4225019 - DNA, 25 bp, Homo sapien
aaatatcactaaaaataaatgtcag

SEQ ID NO: 4225020 - DNA, 25 bp, Homo sapien
gagcaaaactcgtctcaaaataaat

SEQ ID NO: 4225021 - DNA, 25 bp, Homo sapien
ctctggtagaaaagatttcacgggt

SEQ ID NO: 4225022 - DNA, 25 bp, Homo sapien
ccttcaagacactttaacattcggc

SEQ ID NO: 4225023 - DNA, 25 bp, Homo sapien
cactgaaactttattcttagaggac

SEQ ID NO: 4225024 - DNA, 25 bp, Homo sapien
ccacagttgcaagtgaaccttcaag

SEQ ID NO: 4225025 - DNA, 25 bp, Homo sapien
ggacaaattttctatccctactgca

SEQ ID NO: 4225026 - DNA, 25 bp, Homo sapien
gaagtcctgtgtagctacagcctaa

SEQ ID NO: 4225027 - DNA, 25 bp, Homo sapien
tctactcagtgatgtggaagtcctg

SEQ ID NO: 4225028 - DNA, 25 bp, Homo sapien
tcatatgggagacctatagaagtat

SEQ ID NO: 4225029 - DNA, 25 bp, Homo sapien
aggccattctgaggaaacctgttgg

SEQ ID NO: 4225030 - DNA, 25 bp, Homo sapien
taaatttctgaggtgtgtaaaggcc

SEQ ID NO: 4225031 - DNA, 25 bp, Homo sapien
tgtgtcactctgatgtggtgggtca

SEQ ID NO: 4225032 - DNA, 25 bp, Homo sapien
tacgtagatggttcttgtgtcactc

SEQ ID NO: 4225033 - DNA, 25 bp, Homo sapien
ttttggaacaaaattccacacagtg

SEQ ID NO: 4225034 - DNA, 25 bp, Homo sapien
aaataaaagtttgccactcttctga

SEQ ID NO: 4225035 - DNA, 25 bp, Homo sapien
tgccactcttctgaactgttcaaat

SEQ ID NO: 4225036 - DNA, 25 bp, Homo sapien
ttggaacaaaattccacacagtgta

SEQ ID NO: 4225037 - DNA, 25 bp, Homo sapien
gcagttactgttatcacaaagaata

SEQ ID NO: 4225038 - DNA, 25 bp, Homo sapien
tggcagttactgttatcacaaagaa

SEQ ID NO: 4225039 - DNA, 25 bp, Homo sapien
ttactgttatcacaaagaataatgg

SEQ ID NO: 4225040 - DNA, 25 bp, Homo sapien
gttatcacaaagaataatggaagtc

SEQ ID NO: 4225041 - DNA, 25 bp, Homo sapien
taatatttcctccatgagaattcat

SEQ ID NO: 4225042 - DNA, 25 bp, Homo sapien
cttcttcctcaactgtcattttacc

SEQ ID NO: 4225043 - DNA, 25 bp, Homo sapien
tgtcattttacccatattccaaaac

SEQ ID NO: 4225044 - DNA, 25 bp, Homo sapien
cctcaactgtcattttacccatatt

SEQ ID NO: 4225045 - DNA, 25 bp, Homo sapien
caacataaacaggagctccatttac

SEQ ID NO: 4225046 - DNA, 25 bp, Homo sapien
cattatctgagttatgccgtaacca

SEQ ID NO: 4225047 - DNA, 25 bp, Homo sapien
caaggccaccacttcgaacaacata

SEQ ID NO: 4225048 - DNA, 25 bp, Homo sapien
tttgatctagtttttacaaggccac

SEQ ID NO: 4225049 - DNA, 25 bp, Homo sapien
tagtttctccgtccaaactagcagt

SEQ ID NO: 4225050 - DNA, 25 bp, Homo sapien
tgtaacgtgacaggaaccatccagt

SEQ ID NO: 4225051 - DNA, 25 bp, Homo sapien
aaatttcatctttggctattcgaac

SEQ ID NO: 4225052 - DNA, 25 bp, Homo sapien
ccatccagtcgatctgaggacagaa

SEQ ID NO: 4225053 - DNA, 25 bp, Homo sapien
gcaatactcaaacatatgcaagcaa

SEQ ID NO: 4225054 - DNA, 25 bp, Homo sapien
caatactcaaacatatgcaagcaaa

SEQ ID NO: 4225055 - DNA, 25 bp, Homo sapien
aatactcaaacatatgcaagcaaac

SEQ ID NO: 4225056 - DNA, 25 bp, Homo sapien
cttaatctggtcaaactttactact

SEQ ID NO: 4225057 - DNA, 25 bp, Homo sapien
aagtataattataatccaaagacac

SEQ ID NO: 4225058 - DNA, 25 bp, Homo sapien
ataattataatccaaagacactttg

SEQ ID NO: 4225059 - DNA, 25 bp, Homo sapien
agttaagtataattataatccaaag

SEQ ID NO: 4225060 - DNA, 25 bp, Homo sapien
ctgtataagtctgcttctggttgct

SEQ ID NO: 4225061 - DNA, 25 bp, Homo sapien
tctggttgctggcattctattacag

SEQ ID NO: 4225062 - DNA, 25 bp, Homo sapien
gcattctattacagctactagagtg

SEQ ID NO: 4225063 - DNA, 25 bp, Homo sapien
ccaaattggcaactgtttgtaataa

SEQ ID NO: 4225064 - DNA, 25 bp, Homo sapien
aaagtgagcatgctagttcatagca

SEQ ID NO: 4225065 - DNA, 25 bp, Homo sapien
taaaaatgaggtctgtaaataggac

SEQ ID NO: 4225066 - DNA, 25 bp, Homo sapien
catagcaaaatagaaggtaatgtga

SEQ ID NO: 4225067 - DNA, 25 bp, Homo sapien
aaatacagtctccaattagctaaag

SEQ ID NO: 4225068 - DNA, 25 bp, Homo sapien
tcagtatgtacctatatcattcaat

SEQ ID NO: 4225069 - DNA, 25 bp, Homo sapien
cattttcctacttggacatataaaa

SEQ ID NO: 4225070 - DNA, 25 bp, Homo sapien
tgtttgcaatatttcacatgtaata

SEQ ID NO: 4225071 - DNA, 25 bp, Homo sapien
ggatcatatgagagccccaactttg

SEQ ID NO: 4225072 - DNA, 25 bp, Homo sapien
tggtactggctcagacaaaactagg

SEQ ID NO: 4225073 - DNA, 25 bp, Homo sapien
ccaggaggttgggtgagatcaccaa

SEQ ID NO: 4225074 - DNA, 25 bp, Homo sapien
gtgacatggtgagccactacagggt

SEQ ID NO: 4225075 - DNA, 25 bp, Homo sapien
taaaatagcagtaatccaggcagga

SEQ ID NO: 4225076 - DNA, 25 bp, Homo sapien
ttgggttatgatcattcgtcccatg

SEQ ID NO: 4225077 - DNA, 25 bp, Homo sapien
tgttgggttatgatcattcgtccca

SEQ ID NO: 4225078 - DNA, 25 bp, Homo sapien
tttgttgggttatgatcattcgtcc

SEQ ID NO: 4225079 - DNA, 25 bp, Homo sapien
ggttatgatcattcgtcccatgaat

SEQ ID NO: 4225080 - DNA, 25 bp, Homo sapien
atctggctccacgaagcaggagact

SEQ ID NO: 4225081 - DNA, 25 bp, Homo sapien
ttttaatctggctccacgaagcagg

SEQ ID NO: 4225082 - DNA, 25 bp, Homo sapien
tttaatctggctccacgaagcagga

SEQ ID NO: 4225083 - DNA, 25 bp, Homo sapien
taatctggctccacgaagcaggaga

SEQ ID NO: 4225084 - DNA, 25 bp, Homo sapien
gaaaagccctgaatgctggaatcgg

SEQ ID NO: 4225085 - DNA, 25 bp, Homo sapien
acaatggactatggccacagtgtga

SEQ ID NO: 4225086 - DNA, 25 bp, Homo sapien
tgagtccaattttgggaagccccag

SEQ ID NO: 4225087 - DNA, 25 bp, Homo sapien
aagcactttctgttaggttgggaca

SEQ ID NO: 4225088 - DNA, 25 bp, Homo sapien
ttttctactgcagatcgtttctgtg

SEQ ID NO: 4225089 - DNA, 25 bp, Homo sapien
ttccattccagtgtataccgcaaca

SEQ ID NO: 4225090 - DNA, 25 bp, Homo sapien
gatttgctcttgtaatttaatgcca

SEQ ID NO: 4225091 - DNA, 25 bp, Homo sapien
tctgtgatttgctcttgtaatttaa

SEQ ID NO: 4225092 - DNA, 25 bp, Homo sapien
taaaaaatgtagagttataattaca

SEQ ID NO: 4225093 - DNA, 25 bp, Homo sapien
tagaactgttatctgcgttagtgtg

SEQ ID NO: 4225094 - DNA, 25 bp, Homo sapien
gactttttgatgtcccaagcagcac

SEQ ID NO: 4225095 - DNA, 25 bp, Homo sapien
gccctcaggcaaaaagctatactct

SEQ ID NO: 4225096 - DNA, 25 bp, Homo sapien
tactacatgtccaatactgtgcaaa

SEQ ID NO: 4225097 - DNA, 25 bp, Homo sapien
tattcagtctggtgttgagacccac

SEQ ID NO: 4225098 - DNA, 25 bp, Homo sapien
gctgatcttggtagcgtaggctgaa

SEQ ID NO: 4225099 - DNA, 25 bp, Homo sapien
taaagttctcgtctgctaaatgcaa

SEQ ID NO: 4225100 - DNA, 25 bp, Homo sapien
gcttaatattatcccacatggctct

SEQ ID NO: 4225101 - DNA, 25 bp, Homo sapien
tgagttcatctagcatcacaagaag

SEQ ID NO: 4225102 - DNA, 25 bp, Homo sapien
tttttaatggaagctctagaggtca

SEQ ID NO: 4225103 - DNA, 25 bp, Homo sapien
cagaatatgcatctttaccttattg

SEQ ID NO: 4225104 - DNA, 25 bp, Homo sapien
gctctaacttattagctataaatct

SEQ ID NO: 4225105 - DNA, 25 bp, Homo sapien
gacttgttacttggttgaaaatcaa

SEQ ID NO: 4225106 - DNA, 25 bp, Homo sapien
tttgaatatccaattgctgcatcat

SEQ ID NO: 4225107 - DNA, 25 bp, Homo sapien
tttttggagtacagcataaggcaga

SEQ ID NO: 4225108 - DNA, 25 bp, Homo sapien
aacccacacatgaatggtctacttc

SEQ ID NO: 4225109 - DNA, 25 bp, Homo sapien
ctttaaatgtttagcctgatgagca

SEQ ID NO: 4225110 - DNA, 25 bp, Homo sapien
ccagtttgtaacgtgtatgttcatt

SEQ ID NO: 4225111 - DNA, 25 bp, Homo sapien
tactcaggatacaagtctttggtca

SEQ ID NO: 4225112 - DNA, 25 bp, Homo sapien
tagttttgagaaagtgtaatttatc

SEQ ID NO: 4225113 - DNA, 25 bp, Homo sapien
gatgacaaaaggtggttaccttcca

SEQ ID NO: 4225114 - DNA, 25 bp, Homo sapien
ctcttttcattgttgacttgtaggc

SEQ ID NO: 4225115 - DNA, 25 bp, Homo sapien
tctcttttcattgttgacttgtagg

SEQ ID NO: 4225116 - DNA, 25 bp, Homo sapien
catctttaccgtacgaatctttcaa

SEQ ID NO: 4225117 - DNA, 25 bp, Homo sapien
tttgggaaatctggcatctttaccg

SEQ ID NO: 4225118 - DNA, 25 bp, Homo sapien
gaaattgcattatacctattaatcg

SEQ ID NO: 4225119 - DNA, 25 bp, Homo sapien
tattaatcgatttgggaaatctggc

SEQ ID NO: 4225120 - DNA, 25 bp, Homo sapien
tctactaccttacctaatctatatg

SEQ ID NO: 4225121 - DNA, 25 bp, Homo sapien
taccttacctaatctatatgaaaac

SEQ ID NO: 4225122 - DNA, 25 bp, Homo sapien
cttacctaatctatatgaaaaccct

SEQ ID NO: 4225123 - DNA, 25 bp, Homo sapien
gtaatagctaaaaatagcatttgta

SEQ ID NO: 4225124 - DNA, 25 bp, Homo sapien
tcaagatagtgctgatgacagcttc

SEQ ID NO: 4225125 - DNA, 25 bp, Homo sapien
gacagcttcagatataagaattact

SEQ ID NO: 4225126 - DNA, 25 bp, Homo sapien
cttcagcttgccatgtatacttcaa

SEQ ID NO: 4225127 - DNA, 25 bp, Homo sapien
ataccaaggttcatcccatttttct

SEQ ID NO: 4225128 - DNA, 25 bp, Homo sapien
cgactgtcacatataatgaaattgg

SEQ ID NO: 4225129 - DNA, 25 bp, Homo sapien
tgtcacatataatgaaattggaatg

SEQ ID NO: 4225130 - DNA, 25 bp, Homo sapien
gactgtcacatataatgaaattgga

SEQ ID NO: 4225131 - DNA, 25 bp, Homo sapien
ttcgactgtcacatataatgaaatt

SEQ ID NO: 4225132 - DNA, 25 bp, Homo sapien
acagatcaagatcccagccaataaa

SEQ ID NO: 4225133 - DNA, 25 bp, Homo sapien
tcttcattcagatcggaagtattga

SEQ ID NO: 4225134 - DNA, 25 bp, Homo sapien
tcagatcggaagtattgacttgagc

SEQ ID NO: 4225135 - DNA, 25 bp, Homo sapien
tgatctgattcttcatgatacagat

SEQ ID NO: 4225136 - DNA, 25 bp, Homo sapien
tggtccttcgggtacaagtctacca

SEQ ID NO: 4225137 - DNA, 25 bp, Homo sapien
cttctgaagagtctggtgttggtcc

SEQ ID NO: 4225138 - DNA, 25 bp, Homo sapien
taattgaacattcccgaaactgcat

SEQ ID NO: 4225139 - DNA, 25 bp, Homo sapien
ttctgaaagaggaactggttgtaag

SEQ ID NO: 4225140 - DNA, 25 bp, Homo sapien
gtgacagagactgactgctttaaag

SEQ ID NO: 4225141 - DNA, 25 bp, Homo sapien
cagagactgactgctttaaagaaga

SEQ ID NO: 4225142 - DNA, 25 bp, Homo sapien
tacagtgtgacagagactgactgct

SEQ ID NO: 4225143 - DNA, 25 bp, Homo sapien
ctgtacagtgtgacagagactgact

SEQ ID NO: 4225144 - DNA, 25 bp, Homo sapien
agcttctactagagccttttcatct

SEQ ID NO: 4225145 - DNA, 25 bp, Homo sapien
tgccaggttggattgccagggacca

SEQ ID NO: 4225146 - DNA, 25 bp, Homo sapien
gggaccatcaccagtgcagtcagtt

SEQ ID NO: 4225147 - DNA, 25 bp, Homo sapien
tactccaactgcgatggtgccaggt

SEQ ID NO: 4225148 - DNA, 25 bp, Homo sapien
ttttaacctccatagtttcttcaga

SEQ ID NO: 4225149 - DNA, 25 bp, Homo sapien
cagaattgccaataaacacaatacc

SEQ ID NO: 4225150 - DNA, 25 bp, Homo sapien
tttaacctccatagtttcttcagaa

SEQ ID NO: 4225151 - DNA, 25 bp, Homo sapien
tttcttcagaattgccaataaacac

SEQ ID NO: 4225152 - DNA, 25 bp, Homo sapien
ttctcctacgatctgaatcaaattc

SEQ ID NO: 4225153 - DNA, 25 bp, Homo sapien
tcattctcctacgatctgaatcaaa

SEQ ID NO: 4225154 - DNA, 25 bp, Homo sapien
ttccagaatatgaagcagtttgtac

SEQ ID NO: 4225155 - DNA, 25 bp, Homo sapien
tacactcattctcctacgatctgaa

SEQ ID NO: 4225156 - DNA, 25 bp, Homo sapien
gcaaattcatctacatgaattctgg

SEQ ID NO: 4225157 - DNA, 25 bp, Homo sapien
tacatttagggagaattgatgactc

SEQ ID NO: 4225158 - DNA, 25 bp, Homo sapien
tcatctacatgaattctggtttttt

SEQ ID NO: 4225159 - DNA, 25 bp, Homo sapien
ttagggagaattgatgactcagctc

SEQ ID NO: 4225160 - DNA, 25 bp, Homo sapien
gcctatccacttgttagctggacat

SEQ ID NO: 4225161 - DNA, 25 bp, Homo sapien
aaaaggaatgtggagccaacacaca

SEQ ID NO: 4225162 - DNA, 25 bp, Homo sapien
gccccgactgtagagtaggtttgaa

SEQ ID NO: 4225163 - DNA, 25 bp, Homo sapien
aactgctgtgtcatatagtaactca

SEQ ID NO: 4225164 - DNA, 25 bp, Homo sapien
tatatgctatacacagagttcttag

SEQ ID NO: 4225165 - DNA, 25 bp, Homo sapien
gctatacacagagttcttagccctt

SEQ ID NO: 4225166 - DNA, 25 bp, Homo sapien
tatcaggtctttctctatgaactgg

SEQ ID NO: 4225167 - DNA, 25 bp, Homo sapien
tgtggctccaagtaatatcaggtct

SEQ ID NO: 4225168 - DNA, 25 bp, Homo sapien
acagctgtttcatgtttatccccag

SEQ ID NO: 4225169 - DNA, 25 bp, Homo sapien
gaaaatggccacatgataaactcac

SEQ ID NO: 4225170 - DNA, 25 bp, Homo sapien
caagctgcctcaattgttcagcaca

SEQ ID NO: 4225171 - DNA, 25 bp, Homo sapien
agcacactcgctgtctgatttctgg

SEQ ID NO: 4225172 - DNA, 25 bp, Homo sapien
taccagcccatgctgaatcacatga

SEQ ID NO: 4225173 - DNA, 25 bp, Homo sapien
tgctccctgagtgcaagagataggc

SEQ ID NO: 4225174 - DNA, 25 bp, Homo sapien
cagctgaacaatttctgcaaacttc

SEQ ID NO: 4225175 - DNA, 25 bp, Homo sapien
gctttctgcagtggagccatacgac

SEQ ID NO: 4225176 - DNA, 25 bp, Homo sapien
taggtttctcaggtgatatttttat

SEQ ID NO: 4225177 - DNA, 25 bp, Homo sapien
caatgttataggtttctcaggtgat

SEQ ID NO: 4225178 - DNA, 25 bp, Homo sapien
agccaatgttataggtttctcaggt

SEQ ID NO: 4225179 - DNA, 25 bp, Homo sapien
tataggtttctcaggtgatattttt

SEQ ID NO: 4225180 - DNA, 25 bp, Homo sapien
tgccaacatgggcttcttgtatcat

SEQ ID NO: 4225181 - DNA, 25 bp, Homo sapien
catgggcttcttgtatcatgcttac

SEQ ID NO: 4225182 - DNA, 25 bp, Homo sapien
caacatgggcttcttgtatcatgct

SEQ ID NO: 4225183 - DNA, 25 bp, Homo sapien
tatgccaacatgggcttcttgtatc

SEQ ID NO: 4225184 - DNA, 25 bp, Homo sapien
tagatgcacaaatacactgagtaac

SEQ ID NO: 4225185 - DNA, 25 bp, Homo sapien
tatcgcagtttagtacaatttcctg

SEQ ID NO: 4225186 - DNA, 25 bp, Homo sapien
tgcgctgtaggatctttagatgcac

SEQ ID NO: 4225187 - DNA, 25 bp, Homo sapien
ttataatgatctttaaaatgcgctg

SEQ ID NO: 4225188 - DNA, 25 bp, Homo sapien
ctataataaaagggacaaaagacat

SEQ ID NO: 4225189 - DNA, 25 bp, Homo sapien
aaaaatactgtacaagggtagctat

SEQ ID NO: 4225190 - DNA, 25 bp, Homo sapien
agcaatttggagaggaacttaaatc

SEQ ID NO: 4225191 - DNA, 25 bp, Homo sapien
tgcatagtcactgtttcttgcagcc

SEQ ID NO: 4225192 - DNA, 25 bp, Homo sapien
ctgtacaagggtagctattctaata

SEQ ID NO: 4225193 - DNA, 25 bp, Homo sapien
aacagtagaactgatataaaaactg

SEQ ID NO: 4225194 - DNA, 25 bp, Homo sapien
taaaaactggggtgtgataaagcac

SEQ ID NO: 4225195 - DNA, 25 bp, Homo sapien
ttgctgagaaaacaaacagtagaac

SEQ ID NO: 4225196 - DNA, 25 bp, Homo sapien
cagtagaactgatataaaaactggg

SEQ ID NO: 4225197 - DNA, 25 bp, Homo sapien
tcaggtacacgctgtcatacaatgt

SEQ ID NO: 4225198 - DNA, 25 bp, Homo sapien
tatatatcagaataggtagggaagt

SEQ ID NO: 4225199 - DNA, 25 bp, Homo sapien
gagggtctacatgctgttccaaaag

SEQ ID NO: 4225200 - DNA, 25 bp, Homo sapien
tattttgtaacacatgagggtctac

SEQ ID NO: 4225201 - DNA, 25 bp, Homo sapien
aagcccaggatggtccaataaagaa

SEQ ID NO: 4225202 - DNA, 25 bp, Homo sapien
tccctattagtaaataggatccaaa

SEQ ID NO: 4225203 - DNA, 25 bp, Homo sapien
caggatggtccaataaagaaatgtt

SEQ ID NO: 4225204 - DNA, 25 bp, Homo sapien
tatctttccctattagtaaatagga

SEQ ID NO: 4225205 - DNA, 25 bp, Homo sapien
caacatgctaggactataggtatga

SEQ ID NO: 4225206 - DNA, 25 bp, Homo sapien
tattttttacagagatgggctttca

SEQ ID NO: 4225207 - DNA, 25 bp, Homo sapien
ctcccaacatgctaggactataggt

SEQ ID NO: 4225208 - DNA, 25 bp, Homo sapien
cccaacatgctaggactataggtat

SEQ ID NO: 4225209 - DNA, 25 bp, Homo sapien
tcaacttagctctctcaggaggagt

SEQ ID NO: 4225210 - DNA, 25 bp, Homo sapien
aaataccgatgatcagtgggtctca

SEQ ID NO: 4225211 - DNA, 25 bp, Homo sapien
gaaatgacccagaaataccgatgat

SEQ ID NO: 4225212 - DNA, 25 bp, Homo sapien
tgggtctcaacttagctctctcagg

SEQ ID NO: 4225213 - DNA, 25 bp, Homo sapien
tactgtgactgtaataaccatgact

SEQ ID NO: 4225214 - DNA, 25 bp, Homo sapien
actgtgactgtaataaccatgactg

SEQ ID NO: 4225215 - DNA, 25 bp, Homo sapien
tttactgtgactgtaataaccatga

SEQ ID NO: 4225216 - DNA, 25 bp, Homo sapien
ttactgtgactgtaataaccatgac

SEQ ID NO: 4225217 - DNA, 25 bp, Homo sapien
tggttgatccaagtccaaaaatgag

SEQ ID NO: 4225218 - DNA, 25 bp, Homo sapien
caagtccaaaaatgagtttccagag

SEQ ID NO: 4225219 - DNA, 25 bp, Homo sapien
gtccaaaaatgagtttccagagcca

SEQ ID NO: 4225220 - DNA, 25 bp, Homo sapien
ggttgatccaagtccaaaaatgagt

SEQ ID NO: 4225221 - DNA, 25 bp, Homo sapien
cagagaatccctccataaaacaagg

SEQ ID NO: 4225222 - DNA, 25 bp, Homo sapien
agagaatccctccataaaacaagga

SEQ ID NO: 4225223 - DNA, 25 bp, Homo sapien
gagaatccctccataaaacaaggaa

SEQ ID NO: 4225224 - DNA, 25 bp, Homo sapien
aacttaccaggagtctgaaatctgt

SEQ ID NO: 4225225 - DNA, 25 bp, Homo sapien
tatgttcataatgtaacctatcaca

SEQ ID NO: 4225226 - DNA, 25 bp, Homo sapien
actgaagaagtaaacttaccaggag

SEQ ID NO: 4225227 - DNA, 25 bp, Homo sapien
gtttattatagttgaagcaatccaa

SEQ ID NO: 4225228 - DNA, 25 bp, Homo sapien
tatttaatggttctatgtgacttac

SEQ ID NO: 4225229 - DNA, 25 bp, Homo sapien
tctgagtagccagttgaatatctga

SEQ ID NO: 4225230 - DNA, 25 bp, Homo sapien
aagagagccctcagttgtccatcac

SEQ ID NO: 4225231 - DNA, 25 bp, Homo sapien
tgtccatcacttaccaaagaatctt

SEQ ID NO: 4225232 - DNA, 25 bp, Homo sapien
acaaccatgaggattatggcaaacc

SEQ ID NO: 4225233 - DNA, 25 bp, Homo sapien
tatggcaaaccaagcagaaccactt

SEQ ID NO: 4225234 - DNA, 25 bp, Homo sapien
tctttatgatatcaagaaatagaca

SEQ ID NO: 4225235 - DNA, 25 bp, Homo sapien
tggaggtgtcggtcaaagaccttct

SEQ ID NO: 4225236 - DNA, 25 bp, Homo sapien
acttaaagcaactgtgttggagtac

SEQ ID NO: 4225237 - DNA, 25 bp, Homo sapien
acaatggctgcagtgcgatgaactc

SEQ ID NO: 4225238 - DNA, 25 bp, Homo sapien
gattccttgccctcgacaatggctg

SEQ ID NO: 4225239 - DNA, 25 bp, Homo sapien
ctaagtttgctcagctgattccttg

SEQ ID NO: 4225240 - DNA, 25 bp, Homo sapien
aattgacctttagcatgcagaagag

SEQ ID NO: 4225241 - DNA, 25 bp, Homo sapien
aataaaggtcaaattattcagagac

SEQ ID NO: 4225242 - DNA, 25 bp, Homo sapien
tgcagaagagttaatgaggctctac

SEQ ID NO: 4225243 - DNA, 25 bp, Homo sapien
catgctaacaaaaatgccccgctct

SEQ ID NO: 4225244 - DNA, 25 bp, Homo sapien
tcatatgctgagctgactgaaccct

SEQ ID NO: 4225245 - DNA, 25 bp, Homo sapien
tgactgaacccttatcttcttccat

SEQ ID NO: 4225246 - DNA, 25 bp, Homo sapien
gctgactgaacccttatcttcttcc

SEQ ID NO: 4225247 - DNA, 25 bp, Homo sapien
aaattcatatgctgagctgactgaa

SEQ ID NO: 4225248 - DNA, 25 bp, Homo sapien
gcaagcctcagctagcaggtgccta

SEQ ID NO: 4225249 - DNA, 25 bp, Homo sapien
agtgcacgcaacaactgtcctgctg

SEQ ID NO: 4225250 - DNA, 25 bp, Homo sapien
tggctgcaagcctcagctagcaggt

SEQ ID NO: 4225251 - DNA, 25 bp, Homo sapien
ctagtgcacgcaacaactgtcctgc

SEQ ID NO: 4225252 - DNA, 25 bp, Homo sapien
cacacctagttaatttttgcttttg

SEQ ID NO: 4225253 - DNA, 25 bp, Homo sapien
gggccaggtgcggtggcttacttct

SEQ ID NO: 4225254 - DNA, 25 bp, Homo sapien
ccaggtgcggtggcttacttctgta

SEQ ID NO: 4225255 - DNA, 25 bp, Homo sapien
ctaagaatatgggccaggtgcggtg

SEQ ID NO: 4225256 - DNA, 25 bp, Homo sapien
caggtgcggtggcttacttctgtaa

SEQ ID NO: 4225257 - DNA, 25 bp, Homo sapien
gtgtttctgtaaagctatctataga

SEQ ID NO: 4225258 - DNA, 25 bp, Homo sapien
tgttctctagcaaacctccaagctc

SEQ ID NO: 4225259 - DNA, 25 bp, Homo sapien
gagtacctgtatagacatagttgcc

SEQ ID NO: 4225260 - DNA, 25 bp, Homo sapien
gaaaatgctatactgttctctagca

SEQ ID NO: 4225261 - DNA, 25 bp, Homo sapien
ggataaagccccacaccgcatgaag

SEQ ID NO: 4225262 - DNA, 25 bp, Homo sapien
ccttgtagcaacccagactccaggg

SEQ ID NO: 4225263 - DNA, 25 bp, Homo sapien
gtcagaatgctgacccctacatcag

SEQ ID NO: 4225264 - DNA, 25 bp, Homo sapien
gctcctacatgctcaaaggataaag

SEQ ID NO: 4225265 - DNA, 25 bp, Homo sapien
tgatgtgggttggactacatcttcc

SEQ ID NO: 4225266 - DNA, 25 bp, Homo sapien
tggagtccaagcacttgatacctgc

SEQ ID NO: 4225267 - DNA, 25 bp, Homo sapien
aacagatgcacacgctgcttctcct

SEQ ID NO: 4225268 - DNA, 25 bp, Homo sapien
ttctccttccgggaaacagcacatg

SEQ ID NO: 4225269 - DNA, 25 bp, Homo sapien
aaaggctacttagagagatttcaca

SEQ ID NO: 4225270 - DNA, 25 bp, Homo sapien
tgcagcaaaggctacttagagagat

SEQ ID NO: 4225271 - DNA, 25 bp, Homo sapien
gcagcaaaggctacttagagagatt

SEQ ID NO: 4225272 - DNA, 25 bp, Homo sapien
cagcaaaggctacttagagagattt

SEQ ID NO: 4225273 - DNA, 25 bp, Homo sapien
caggttcatcctgttccagatagga

SEQ ID NO: 4225274 - DNA, 25 bp, Homo sapien
taggtatctagagcggcaggttcat

SEQ ID NO: 4225275 - DNA, 25 bp, Homo sapien
gaaatctaccaccaaagagtgctaa

SEQ ID NO: 4225276 - DNA, 25 bp, Homo sapien
tcaaagcctcaaataaccaactgga

SEQ ID NO: 4225277 - DNA, 25 bp, Homo sapien
tccagtagataggagtagtgccttc

SEQ ID NO: 4225278 - DNA, 25 bp, Homo sapien
aaatttgctggcctaggtacatgac

SEQ ID NO: 4225279 - DNA, 25 bp, Homo sapien
tttcgttatggtgcacaacagcagg

SEQ ID NO: 4225280 - DNA, 25 bp, Homo sapien
tgcataccgtgtactgctgccctga

SEQ ID NO: 4225281 - DNA, 25 bp, Homo sapien
caattatccggagtcagatgtccaa

SEQ ID NO: 4225282 - DNA, 25 bp, Homo sapien
cagctctttagggtgcaacatggca

SEQ ID NO: 4225283 - DNA, 25 bp, Homo sapien
tcaagaccaaaagtagcctgccatg

SEQ ID NO: 4225284 - DNA, 25 bp, Homo sapien
gagatgagcgttaaaaaaggcccca

SEQ ID NO: 4225285 - DNA, 25 bp, Homo sapien
caaagacacctgtaggtcactagcg

SEQ ID NO: 4225286 - DNA, 25 bp, Homo sapien
taaagacttccgcataattagcttg

SEQ ID NO: 4225287 - DNA, 25 bp, Homo sapien
cactagcgttttcacttaataagga

SEQ ID NO: 4225288 - DNA, 25 bp, Homo sapien
taaggacaaacgatcctctactggt

SEQ ID NO: 4225289 - DNA, 25 bp, Homo sapien
ctagtatcgaatgcccaaactttct

SEQ ID NO: 4225290 - DNA, 25 bp, Homo sapien
caataagagaaaagtttggctcacc

SEQ ID NO: 4225291 - DNA, 25 bp, Homo sapien
gagaggttcttcatactagtatcga

SEQ ID NO: 4225292 - DNA, 25 bp, Homo sapien
ggctcaccaggacctatgttttaat

SEQ ID NO: 4225293 - DNA, 25 bp, Homo sapien
caagtagatgagtccattgtggaga

SEQ ID NO: 4225294 - DNA, 25 bp, Homo sapien
gatgctcctgtcgttggtatagaaa

SEQ ID NO: 4225295 - DNA, 25 bp, Homo sapien
tccattgtggagagagtcaagatgc

SEQ ID NO: 4225296 - DNA, 25 bp, Homo sapien
gaaaggatccgatgcactccatgat

SEQ ID NO: 4225297 - DNA, 25 bp, Homo sapien
tggccattaacagggtgatcacact

SEQ ID NO: 4225298 - DNA, 25 bp, Homo sapien
cattaggagtcccataagcacaagg

SEQ ID NO: 4225299 - DNA, 25 bp, Homo sapien
ttaatttcagagctagtgtggccat

SEQ ID NO: 4225300 - DNA, 25 bp, Homo sapien
gaggtgaactggctcccacaaagta

SEQ ID NO: 4225301 - DNA, 25 bp, Homo sapien
tggtactaaccgtagggcagaatgc

SEQ ID NO: 4225302 - DNA, 25 bp, Homo sapien
gaaatatgccttgtactgggacact

SEQ ID NO: 4225303 - DNA, 25 bp, Homo sapien
tcagacgaggcaaagggaggcaaat

SEQ ID NO: 4225304 - DNA, 25 bp, Homo sapien
gaagagcatgtctaagtcggctgca

SEQ ID NO: 4225305 - DNA, 25 bp, Homo sapien
taacttgcaaccgaggaagcagtgc

SEQ ID NO: 4225306 - DNA, 25 bp, Homo sapien
ctatcagagccttttccaggagttg

SEQ ID NO: 4225307 - DNA, 25 bp, Homo sapien
cagtagtcgccctaaagatagtcca

SEQ ID NO: 4225308 - DNA, 25 bp, Homo sapien
tgatatccctgtgctataatgaagg

SEQ ID NO: 4225309 - DNA, 25 bp, Homo sapien
gcacaacgtagatgagtgagtccca

SEQ ID NO: 4225310 - DNA, 25 bp, Homo sapien
ccttgaggaatgacggaagggttct

SEQ ID NO: 4225311 - DNA, 25 bp, Homo sapien
gaaaactatgggtcctggcacaacg

SEQ ID NO: 4225312 - DNA, 25 bp, Homo sapien
gagcaacaacgccagacacaaaggt

SEQ ID NO: 4225313 - DNA, 25 bp, Homo sapien
catctcaaatgtcctacccagtgga

SEQ ID NO: 4225314 - DNA, 25 bp, Homo sapien
aaatgtcctacccagtggatcccca

SEQ ID NO: 4225315 - DNA, 25 bp, Homo sapien
gaaaaaacaatgattgctttagcac

SEQ ID NO: 4225316 - DNA, 25 bp, Homo sapien
tgcatacatctcaaatgtcctaccc

SEQ ID NO: 4225317 - DNA, 25 bp, Homo sapien
cacacgccccttgaattgctttaac

SEQ ID NO: 4225318 - DNA, 25 bp, Homo sapien
ttaaaagtcatattggttcgtggcc

SEQ ID NO: 4225319 - DNA, 25 bp, Homo sapien
taactcctaagtgtttcagtcctca

SEQ ID NO: 4225320 - DNA, 25 bp, Homo sapien
cattccggtaaactccccatgctga

SEQ ID NO: 4225321 - DNA, 25 bp, Homo sapien
taaacatttccgtaaggcaggctag

SEQ ID NO: 4225322 - DNA, 25 bp, Homo sapien
tatccaggcactctctaaggtctag

SEQ ID NO: 4225323 - DNA, 25 bp, Homo sapien
tcatcgcactatggaacacaaatgg

SEQ ID NO: 4225324 - DNA, 25 bp, Homo sapien
aaaggttccacagaactagtctgcg

SEQ ID NO: 4225325 - DNA, 25 bp, Homo sapien
tctcataacgtgtagaccatgtgcc

SEQ ID NO: 4225326 - DNA, 25 bp, Homo sapien
cctcctgatggagtatgtcagcgct

SEQ ID NO: 4225327 - DNA, 25 bp, Homo sapien
gaggagaccctcaagtgaattaata

SEQ ID NO: 4225328 - DNA, 25 bp, Homo sapien
tgtcagcgctgtaaagaagttcttg

SEQ ID NO: 4225329 - DNA, 25 bp, Homo sapien
tctgttgtattgcttgtcttaaaaa

SEQ ID NO: 4225330 - DNA, 25 bp, Homo sapien
tagttaggttgtgagagaatgctta

SEQ ID NO: 4225331 - DNA, 25 bp, Homo sapien
taaaactatagattatagccatctg

SEQ ID NO: 4225332 - DNA, 25 bp, Homo sapien
gactgacaggactataaatacattt

SEQ ID NO: 4225333 - DNA, 25 bp, Homo sapien
gagctgtcaaggacaaacaccccag

SEQ ID NO: 4225334 - DNA, 25 bp, Homo sapien
tattcacggaatagacaggaaagcg

SEQ ID NO: 4225335 - DNA, 25 bp, Homo sapien
ttctctgcaattgaccggagctgtc

SEQ ID NO: 4225336 - DNA, 25 bp, Homo sapien
gaaagcggtgggtgattcaatacca

SEQ ID NO: 4225337 - DNA, 25 bp, Homo sapien
gcagaaatcacattgaacaggataa

SEQ ID NO: 4225338 - DNA, 25 bp, Homo sapien
taaaagtgtgacgtatcacgaaaga

SEQ ID NO: 4225339 - DNA, 25 bp, Homo sapien
catgttcagggtcaagcaaattaca

SEQ ID NO: 4225340 - DNA, 25 bp, Homo sapien
gtgccccacaaaaaacatctcgaaa

SEQ ID NO: 4225341 - DNA, 25 bp, Homo sapien
ttggttttataatatttgcacaaaa

SEQ ID NO: 4225342 - DNA, 25 bp, Homo sapien
tccctttctccaaactcttctctct

SEQ ID NO: 4225343 - DNA, 25 bp, Homo sapien
tataatatttgcacaaaaaccttcc

SEQ ID NO: 4225344 - DNA, 25 bp, Homo sapien
ttttggttttataatatttgcacaa

SEQ ID NO: 4225345 - DNA, 25 bp, Homo sapien
aggctaacctgaccctgatactaac

SEQ ID NO: 4225346 - DNA, 25 bp, Homo sapien
gcaggcttgacatggatcttcctgc

SEQ ID NO: 4225347 - DNA, 25 bp, Homo sapien
ttgacatggatcttcctgcctcctt

SEQ ID NO: 4225348 - DNA, 25 bp, Homo sapien
cttgacatggatcttcctgcctcct

SEQ ID NO: 4225349 - DNA, 25 bp, Homo sapien
gcttgacatggatcttcctgcctcc

SEQ ID NO: 4225350 - DNA, 25 bp, Homo sapien
gagtggttgatatagacaatgagca

SEQ ID NO: 4225351 - DNA, 25 bp, Homo sapien
caacatgagcgaggctgggcatgat

SEQ ID NO: 4225352 - DNA, 25 bp, Homo sapien
gatatagacaatgagcaaccactga

SEQ ID NO: 4225353 - DNA, 25 bp, Homo sapien
ccactgaaatctttttcgagccaga

SEQ ID NO: 4225354 - DNA, 25 bp, Homo sapien
gccctgcggttcttagaagcgtgta

SEQ ID NO: 4225355 - DNA, 25 bp, Homo sapien
catttcctccattgcctctatgcgg

SEQ ID NO: 4225356 - DNA, 25 bp, Homo sapien
tttaagatcccagcaagcctgcctc

SEQ ID NO: 4225357 - DNA, 25 bp, Homo sapien
ctctatgcgggtctcagtatctgcc

SEQ ID NO: 4225358 - DNA, 25 bp, Homo sapien
tgatttgaccagtgcatttggcaga

SEQ ID NO: 4225359 - DNA, 25 bp, Homo sapien
ctgatttgaccagtgcatttggcag

SEQ ID NO: 4225360 - DNA, 25 bp, Homo sapien
gacgagtacatttgggctgtaggcc

SEQ ID NO: 4225361 - DNA, 25 bp, Homo sapien
ttatttgacgagtacatttgggctg

SEQ ID NO: 4225362 - DNA, 25 bp, Homo sapien
tacatttgggctgtaggcctctgat

SEQ ID NO: 4225363 - DNA, 25 bp, Homo sapien
tttgacgagtacatttgggctgtag

SEQ ID NO: 4225364 - DNA, 25 bp, Homo sapien
gaccagtacatttgggctgtaggcc

SEQ ID NO: 4225365 - DNA, 25 bp, Homo sapien
ccagtgcatttgacctgtaggcctc

SEQ ID NO: 4225366 - DNA, 25 bp, Homo sapien
tgaccagtgcatttgacctgtaggc

SEQ ID NO: 4225367 - DNA, 25 bp, Homo sapien
gaccagtgcatttgacctgtaggcc

SEQ ID NO: 4225368 - DNA, 25 bp, Homo sapien
ccctttctaaaccttgctcattgga

SEQ ID NO: 4225369 - DNA, 25 bp, Homo sapien
ttgaaaaggtaatcacatgacatct

SEQ ID NO: 4225370 - DNA, 25 bp, Homo sapien
ggccccttagctcctatgactggaa

SEQ ID NO: 4225371 - DNA, 25 bp, Homo sapien
gagctcacaagaaactcagggcggc

SEQ ID NO: 4225372 - DNA, 25 bp, Homo sapien
ataggcgcgtaccactacactgggc

SEQ ID NO: 4225373 - DNA, 25 bp, Homo sapien
gactataggcgcgtaccactacact

SEQ ID NO: 4225374 - DNA, 25 bp, Homo sapien
ggactataggcgcgtaccactacac

SEQ ID NO: 4225375 - DNA, 25 bp, Homo sapien
ctataggcgcgtaccactacactgg

SEQ ID NO: 4225376 - DNA, 25 bp, Homo sapien
tgtgtgtgttaaagacagttcctag

SEQ ID NO: 4225377 - DNA, 25 bp, Homo sapien
taatgcaggaggattaataggctca

SEQ ID NO: 4225378 - DNA, 25 bp, Homo sapien
agtggctacttgttgtctacagtga

SEQ ID NO: 4225379 - DNA, 25 bp, Homo sapien
tgtgatgattcacgacatgatgtgt

SEQ ID NO: 4225380 - DNA, 25 bp, Homo sapien
aaacaggaagcttaagagaccaggc

SEQ ID NO: 4225381 - DNA, 25 bp, Homo sapien
gccaacatgattgctgttcactaca

SEQ ID NO: 4225382 - DNA, 25 bp, Homo sapien
gttcactacacccttttggcagtat

SEQ ID NO: 4225383 - DNA, 25 bp, Homo sapien
gatacatagctaagtctccaaaaaa

SEQ ID NO: 4225384 - DNA, 25 bp, Homo sapien
taaaccccggcagccactcatgttt

SEQ ID NO: 4225385 - DNA, 25 bp, Homo sapien
tatttcgttgtctcgatgtctcaga

SEQ ID NO: 4225386 - DNA, 25 bp, Homo sapien
tatctatttagctactgaaggacat

SEQ ID NO: 4225387 - DNA, 25 bp, Homo sapien
ttgggtgaatactaaggagcgtgct

SEQ ID NO: 4225388 - DNA, 25 bp, Homo sapien
agcacattgatcattccgcatttga

SEQ ID NO: 4225389 - DNA, 25 bp, Homo sapien
tcctctagcacattgatcattccgc

SEQ ID NO: 4225390 - DNA, 25 bp, Homo sapien
aattcttcgttgtctcctctagcac

SEQ ID NO: 4225391 - DNA, 25 bp, Homo sapien
ccttagaaattcttcgttgtctcct

SEQ ID NO: 4225392 - DNA, 25 bp, Homo sapien
ggaagaaacattaccaaggtcctca

SEQ ID NO: 4225393 - DNA, 25 bp, Homo sapien
caggaagaaacattaccaaggtcct

SEQ ID NO: 4225394 - DNA, 25 bp, Homo sapien
tctggcagtgaaaaaaccctcaggc

SEQ ID NO: 4225395 - DNA, 25 bp, Homo sapien
ttcttttgcttcatcgttatcatcc

SEQ ID NO: 4225396 - DNA, 25 bp, Homo sapien
aaaaccctcaggcttgtagatagct

SEQ ID NO: 4225397 - DNA, 25 bp, Homo sapien
tttggtggcaataactctggcagtg

SEQ ID NO: 4225398 - DNA, 25 bp, Homo sapien
cttggatcagcccaaaggtaggctc

SEQ ID NO: 4225399 - DNA, 25 bp, Homo sapien
gagaggaaccggtggcatcgtctcc

SEQ ID NO: 4225400 - DNA, 25 bp, Homo sapien
tcacgaggcttcgtagtggaggaac

SEQ ID NO: 4225401 - DNA, 25 bp, Homo sapien
ccaatcgtcgctactgaagccgggc

SEQ ID NO: 4225402 - DNA, 25 bp, Homo sapien
ccaggggacgcagaaacaaaggcca

SEQ ID NO: 4225403 - DNA, 25 bp, Homo sapien
caggggacgcagaaacaaaggccac

SEQ ID NO: 4225404 - DNA, 25 bp, Homo sapien
atggatcagtataactgcccttgcc

SEQ ID NO: 4225405 - DNA, 25 bp, Homo sapien
gagcaagtgcgaggatgatggatca

SEQ ID NO: 4225406 - DNA, 25 bp, Homo sapien
atcagtataactgcccttgccccag

SEQ ID NO: 4225407 - DNA, 25 bp, Homo sapien
ggctgttctacacttcggttggagc

SEQ ID NO: 4225408 - DNA, 25 bp, Homo sapien
tgcatgtatcactttatagtcttca

SEQ ID NO: 4225409 - DNA, 25 bp, Homo sapien
gcatgtatcactttatagtcttcaa

SEQ ID NO: 4225410 - DNA, 25 bp, Homo sapien
atgcatgtatcactttatagtcttc

SEQ ID NO: 4225411 - DNA, 25 bp, Homo sapien
ggtgcagccagtgcgcacgggtagg

SEQ ID NO: 4225412 - DNA, 25 bp, Homo sapien
caggtgcagccagtgcgcacgggta

SEQ ID NO: 4225413 - DNA, 25 bp, Homo sapien
agccagtgcgcacgggtaggggaac

SEQ ID NO: 4225414 - DNA, 25 bp, Homo sapien
ccagtgcgcacgggtaggggaacag

SEQ ID NO: 4225415 - DNA, 25 bp, Homo sapien
aacagcaggcgcagtcagtgcgcac

SEQ ID NO: 4225416 - DNA, 25 bp, Homo sapien
gggaacagcaggcgcagtcagtgcg

SEQ ID NO: 4225417 - DNA, 25 bp, Homo sapien
aggggaacagcaggcgcagtcagtg

SEQ ID NO: 4225418 - DNA, 25 bp, Homo sapien
ggcaggggaacagcaggcgcagtca

SEQ ID NO: 4225419 - DNA, 25 bp, Homo sapien
caagtgttggcaggcataaataaga

SEQ ID NO: 4225420 - DNA, 25 bp, Homo sapien
gaagaagaatctctgccaatgaaaa

SEQ ID NO: 4225421 - DNA, 25 bp, Homo sapien
tccctctgcccactaagtaaaagga

SEQ ID NO: 4225422 - DNA, 25 bp, Homo sapien
taagagatgtttaggccaggtgcca

SEQ ID NO: 4225423 - DNA, 25 bp, Homo sapien
tttcttgctttgtaaggtcctagat

SEQ ID NO: 4225424 - DNA, 25 bp, Homo sapien
tcttgctttgtaaggtcctagatcc

SEQ ID NO: 4225425 - DNA, 25 bp, Homo sapien
gatcccccctctggactcctgtttg

SEQ ID NO: 4225426 - DNA, 25 bp, Homo sapien
ttgctttgtaaggtcctagatcccc

SEQ ID NO: 4225427 - DNA, 25 bp, Homo sapien
ccttatgactcagtaagttggcaag

SEQ ID NO: 4225428 - DNA, 25 bp, Homo sapien
tcaagtcagcctagagaccatgttg

SEQ ID NO: 4225429 - DNA, 25 bp, Homo sapien
ccctagaattcttagtcaaggaata

SEQ ID NO: 4225430 - DNA, 25 bp, Homo sapien
ggcaaggtcctgactttagtcttaa

SEQ ID NO: 4225431 - DNA, 25 bp, Homo sapien
gctccagaatcgctagactaagaat

SEQ ID NO: 4225432 - DNA, 25 bp, Homo sapien
ggctacagatggtagaactaaacaa

SEQ ID NO: 4225433 - DNA, 25 bp, Homo sapien
ttaacaaagtgccagagtctaggct

SEQ ID NO: 4225434 - DNA, 25 bp, Homo sapien
gactaagaattaggtggctacagat

SEQ ID NO: 4225435 - DNA, 25 bp, Homo sapien
actacatgcccaaaaaggtttatag

SEQ ID NO: 4225436 - DNA, 25 bp, Homo sapien
cacatgatacttcacggagcttaag

SEQ ID NO: 4225437 - DNA, 25 bp, Homo sapien
tgcacgtgagtttgcacacatgcac

SEQ ID NO: 4225438 - DNA, 25 bp, Homo sapien
caagagagagtaaaagttgccctcc

SEQ ID NO: 4225439 - DNA, 25 bp, Homo sapien
gtccagtgttaagggcactcgaaag

SEQ ID NO: 4225440 - DNA, 25 bp, Homo sapien
cctgtgtccagtgttaagggcactc

SEQ ID NO: 4225441 - DNA, 25 bp, Homo sapien
ctcccctgtgtccagtgttaagggc

SEQ ID NO: 4225442 - DNA, 25 bp, Homo sapien
tgtgtccagtgttaagggcactcga

SEQ ID NO: 4225443 - DNA, 25 bp, Homo sapien
caaacagcggccacagtaaaaattc

SEQ ID NO: 4225444 - DNA, 25 bp, Homo sapien
tagcagcaagattcatggatggtca

SEQ ID NO: 4225445 - DNA, 25 bp, Homo sapien
gattattctcaacctactgcagcag

SEQ ID NO: 4225446 - DNA, 25 bp, Homo sapien
tgtccagcaaccagctaagcaagca

SEQ ID NO: 4225447 - DNA, 25 bp, Homo sapien
gacactgtccctcgcttccaaaagg

SEQ ID NO: 4225448 - DNA, 25 bp, Homo sapien
aagggttctggacaccttctcaggg

SEQ ID NO: 4225449 - DNA, 25 bp, Homo sapien
tcagggagagtttgtagaggtcact

SEQ ID NO: 4225450 - DNA, 25 bp, Homo sapien
gtgtggcgcgtccaagggcttccca

SEQ ID NO: 4225451 - DNA, 25 bp, Homo sapien
cagagacctgcttgtgggaatggca

SEQ ID NO: 4225452 - DNA, 25 bp, Homo sapien
cctgctgcttacacatctgtaggga

SEQ ID NO: 4225453 - DNA, 25 bp, Homo sapien
gggaatggcatgcagaagttctgca

SEQ ID NO: 4225454 - DNA, 25 bp, Homo sapien
gtgtccatcggaggtgagttgcccc

SEQ ID NO: 4225455 - DNA, 25 bp, Homo sapien
ccctggtgcttgacagatcctgctt

SEQ ID NO: 4225456 - DNA, 25 bp, Homo sapien
cctgcttcatttggtcctgcagcaa

SEQ ID NO: 4225457 - DNA, 25 bp, Homo sapien
gaggaggcactattaattgtacacg

SEQ ID NO: 4225458 - DNA, 25 bp, Homo sapien
tggatctcctgaccgggtttcgcca

SEQ ID NO: 4225459 - DNA, 25 bp, Homo sapien
gaagattttgactgcaagctcccag

SEQ ID NO: 4225460 - DNA, 25 bp, Homo sapien
gaaatatgaaggtggccctagggct

SEQ ID NO: 4225461 - DNA, 25 bp, Homo sapien
ttcttctcggaattgcagggcgacc

SEQ ID NO: 4225462 - DNA, 25 bp, Homo sapien
tgactttcttctcggaattgcaggg

SEQ ID NO: 4225463 - DNA, 25 bp, Homo sapien
gacagtcacgaaacctgttcctcca

SEQ ID NO: 4225464 - DNA, 25 bp, Homo sapien
tgggccacggcgtctctgactttct

SEQ ID NO: 4225465 - DNA, 25 bp, Homo sapien
ttgtcagggcctgcgctgacagtcc

SEQ ID NO: 4225466 - DNA, 25 bp, Homo sapien
gaatctggggttgacagcactggga

SEQ ID NO: 4225467 - DNA, 25 bp, Homo sapien
tttccacgttcaggcaaatcctcgc

SEQ ID NO: 4225468 - DNA, 25 bp, Homo sapien
cagcactgggaggatccttcctctt

SEQ ID NO: 4225469 - DNA, 25 bp, Homo sapien
tgtctccctcaggtactgtcccttg

SEQ ID NO: 4225470 - DNA, 25 bp, Homo sapien
ttgctgtgttccctagtggaagtgt

SEQ ID NO: 4225471 - DNA, 25 bp, Homo sapien
tgatgaccaggacccatttctcctt

SEQ ID NO: 4225472 - DNA, 25 bp, Homo sapien
tgaggagtacctccttctgatgacc

SEQ ID NO: 4225473 - DNA, 25 bp, Homo sapien
ggcttctatgagcagaggtaataaa

SEQ ID NO: 4225474 - DNA, 25 bp, Homo sapien
cacccacgctccatggctcatggct

SEQ ID NO: 4225475 - DNA, 25 bp, Homo sapien
tccagcttaaaaaggccacccacgc

SEQ ID NO: 4225476 - DNA, 25 bp, Homo sapien
catggctcatggcttctatgagcag

SEQ ID NO: 4225477 - DNA, 25 bp, Homo sapien
caggcatcattgaagctgagaggga

SEQ ID NO: 4225478 - DNA, 25 bp, Homo sapien
tctctccgggagattggcagatatg

SEQ ID NO: 4225479 - DNA, 25 bp, Homo sapien
cctgatagagcgagtgaagctggca

SEQ ID NO: 4225480 - DNA, 25 bp, Homo sapien
ggttgaacagcacgttgagtcctcc

SEQ ID NO: 4225481 - DNA, 25 bp, Homo sapien
tcagtggattggattggggtgggtt

SEQ ID NO: 4225482 - DNA, 25 bp, Homo sapien
cagtggattggattggggtgggttg

SEQ ID NO: 4225483 - DNA, 25 bp, Homo sapien
gccactctgagaacccggtttcttc

SEQ ID NO: 4225484 - DNA, 25 bp, Homo sapien
gcaggccactctgagaacccggttt

SEQ ID NO: 4225485 - DNA, 25 bp, Homo sapien
actctgagaacccggtttcttccat

SEQ ID NO: 4225486 - DNA, 25 bp, Homo sapien
ccgcaggccactctgagaacccggt

SEQ ID NO: 4225487 - DNA, 25 bp, Homo sapien
ccggtgttcattcaaggcctgggct

SEQ ID NO: 4225488 - DNA, 25 bp, Homo sapien
gttagaccagatttcctcacaggcc

SEQ ID NO: 4225489 - DNA, 25 bp, Homo sapien
catgtattctgaagcaggccggtgt

SEQ ID NO: 4225490 - DNA, 25 bp, Homo sapien
tgtagcagcagtatcaggcttgacc

SEQ ID NO: 4225491 - DNA, 25 bp, Homo sapien
tagagcgaaactcacgaagttcaag

SEQ ID NO: 4225492 - DNA, 25 bp, Homo sapien
tcatttcaagggcagtttagagcga

SEQ ID NO: 4225493 - DNA, 25 bp, Homo sapien
gctaaagtcgctggtctcaagaaca

SEQ ID NO: 4225494 - DNA, 25 bp, Homo sapien
taaatgtccaaatcggaggtcggct

SEQ ID NO: 4225495 - DNA, 25 bp, Homo sapien
tctaacgcaggctcaggcgggtctt

SEQ ID NO: 4225496 - DNA, 25 bp, Homo sapien
tttccgagcgggagctctaacgcag

SEQ ID NO: 4225497 - DNA, 25 bp, Homo sapien
tacagcaaactagggctgcactgcc

SEQ ID NO: 4225498 - DNA, 25 bp, Homo sapien
ggtttctggtcacaccacttatgcg

SEQ ID NO: 4225499 - DNA, 25 bp, Homo sapien
agaacgaaccatccgtggcctggag

SEQ ID NO: 4225500 - DNA, 25 bp, Homo sapien
ccatttagcgatccggaaaggaagc

SEQ ID NO: 4225501 - DNA, 25 bp, Homo sapien
cagcgccgcggattaggatggtctt

SEQ ID NO: 4225502 - DNA, 25 bp, Homo sapien
taactgaccacagactaactccgcg

SEQ ID NO: 4225503 - DNA, 25 bp, Homo sapien
ggaggggacgagcctccttctccgc

SEQ ID NO: 4225504 - DNA, 25 bp, Homo sapien
gccgcgctttcagagggcgggctgc

SEQ ID NO: 4225505 - DNA, 25 bp, Homo sapien
ccagccgctggccacccgcgcgggc

SEQ ID NO: 4225506 - DNA, 25 bp, Homo sapien
tccttctccgccgcgctttcagagg

SEQ ID NO: 4225507 - DNA, 25 bp, Homo sapien
cgaaagcgttctcaggttggcggtt

SEQ ID NO: 4225508 - DNA, 25 bp, Homo sapien
tttcgactcgaattcagccctccag

SEQ ID NO: 4225509 - DNA, 25 bp, Homo sapien
tttccagcccgacacgggctttcga

SEQ ID NO: 4225510 - DNA, 25 bp, Homo sapien
aattcagccctccagccggaggcgg

SEQ ID NO: 4225511 - DNA, 25 bp, Homo sapien
tgggcctttcctgtgataacactgg

SEQ ID NO: 4225512 - DNA, 25 bp, Homo sapien
tgggcagagcagttataagcatctc

SEQ ID NO: 4225513 - DNA, 25 bp, Homo sapien
gaaagttataacgtctgctgctgat

SEQ ID NO: 4225514 - DNA, 25 bp, Homo sapien
accttagagccttgcagggccggga

SEQ ID NO: 4225515 - DNA, 25 bp, Homo sapien
tagatattgcataccgtaaggaaag

SEQ ID NO: 4225516 - DNA, 25 bp, Homo sapien
gaagagacaatttccctctgaattt

SEQ ID NO: 4225517 - DNA, 25 bp, Homo sapien
tcacagagattcgatatcaaagggc

SEQ ID NO: 4225518 - DNA, 25 bp, Homo sapien
tggttacatcttcgctcacagagat

SEQ ID NO: 4225519 - DNA, 25 bp, Homo sapien
gccatgggcaggataggatgctaaa

SEQ ID NO: 4225520 - DNA, 25 bp, Homo sapien
cagagatgtttcaggtgtagctctt

SEQ ID NO: 4225521 - DNA, 25 bp, Homo sapien
tcaataaatattccagtgcaagctg

SEQ ID NO: 4225522 - DNA, 25 bp, Homo sapien
gtagctcttctatcaaagggtcaat

SEQ ID NO: 4225523 - DNA, 25 bp, Homo sapien
ggagatcagaaagtttagctgtggt

SEQ ID NO: 4225524 - DNA, 25 bp, Homo sapien
gagatcagaaagtttagctgtggtt

SEQ ID NO: 4225525 - DNA, 25 bp, Homo sapien
tttattaacgggactggtggcatgg

SEQ ID NO: 4225526 - DNA, 25 bp, Homo sapien
cactatggcaatcatggctttggga

SEQ ID NO: 4225527 - DNA, 25 bp, Homo sapien
tatagctaggaccaatcttcagaag

SEQ ID NO: 4225528 - DNA, 25 bp, Homo sapien
caaactgccttgttgagagagatca

SEQ ID NO: 4225529 - DNA, 25 bp, Homo sapien
tataaggctcctccggtgagtcaca

SEQ ID NO: 4225530 - DNA, 25 bp, Homo sapien
gaaacctacatagaaaacaagactg

SEQ ID NO: 4225531 - DNA, 25 bp, Homo sapien
ttggaatatccccatgcatcatgaa

SEQ ID NO: 4225532 - DNA, 25 bp, Homo sapien
tcctaaaacggttgtctgaaccatg

SEQ ID NO: 4225533 - DNA, 25 bp, Homo sapien
gaatattgccaacttccatggacat

SEQ ID NO: 4225534 - DNA, 25 bp, Homo sapien
cctgctgggggctgaatattgccaa

SEQ ID NO: 4225535 - DNA, 25 bp, Homo sapien
gctgaatattgccaacttccatgga

SEQ ID NO: 4225536 - DNA, 25 bp, Homo sapien
tgggggctgaatattgccaacttcc

SEQ ID NO: 4225537 - DNA, 25 bp, Homo sapien
tcctcctccccttctgggccgcctc

SEQ ID NO: 4225538 - DNA, 25 bp, Homo sapien
catcagctcctcctccccttctggg

SEQ ID NO: 4225539 - DNA, 25 bp, Homo sapien
ctccccttctgggccgcctcctcat

SEQ ID NO: 4225540 - DNA, 25 bp, Homo sapien
ctcctccccttctgggccgcctcct

SEQ ID NO: 4225541 - DNA, 25 bp, Homo sapien
gagcagttttcagtgctacgtgact

SEQ ID NO: 4225542 - DNA, 25 bp, Homo sapien
gtgctacgtgactgttcctgaactt

SEQ ID NO: 4225543 - DNA, 25 bp, Homo sapien
tttcccagtctcttcagcggccatg

SEQ ID NO: 4225544 - DNA, 25 bp, Homo sapien
cagcgtcaccacaaatggcactatc

SEQ ID NO: 4225545 - DNA, 25 bp, Homo sapien
aagcatagttcccacagacaacaat

SEQ ID NO: 4225546 - DNA, 25 bp, Homo sapien
gaaagcatagttcccacagacaaca

SEQ ID NO: 4225547 - DNA, 25 bp, Homo sapien
tgaaagcatagttcccacagacaac

SEQ ID NO: 4225548 - DNA, 25 bp, Homo sapien
gcatagttcccacagacaacaatgg

SEQ ID NO: 4225549 - DNA, 25 bp, Homo sapien
tcggcgtcttaaagcttctctaaag

SEQ ID NO: 4225550 - DNA, 25 bp, Homo sapien
cctgccgatctggtagaagaaaatg

SEQ ID NO: 4225551 - DNA, 25 bp, Homo sapien
aagcccaatgccgaatgcgcagctc

SEQ ID NO: 4225552 - DNA, 25 bp, Homo sapien
cagctttcctattcagagtgcaggg

SEQ ID NO: 4225553 - DNA, 25 bp, Homo sapien
tgtaagccggcagctggttcagaac

SEQ ID NO: 4225554 - DNA, 25 bp, Homo sapien
ttatatggctactgtaagccggcag

SEQ ID NO: 4225555 - DNA, 25 bp, Homo sapien
tatatggctactgtaagccggcagc

SEQ ID NO: 4225556 - DNA, 25 bp, Homo sapien
cttatatggctactgtaagccggca

SEQ ID NO: 4225557 - DNA, 25 bp, Homo sapien
atccagataacaaccatcctctgaa

SEQ ID NO: 4225558 - DNA, 25 bp, Homo sapien
tccacagtgctcatccagataacaa

SEQ ID NO: 4225559 - DNA, 25 bp, Homo sapien
cagataacaaccatcctctgaagcc

SEQ ID NO: 4225560 - DNA, 25 bp, Homo sapien
cagtgctcatccagataacaaccat

SEQ ID NO: 4225561 - DNA, 25 bp, Homo sapien
agtgtactgagagtagtaagagcaa

SEQ ID NO: 4225562 - DNA, 25 bp, Homo sapien
agagtgtactgagagtagtaagagc

SEQ ID NO: 4225563 - DNA, 25 bp, Homo sapien
gagtgtactgagagtagtaagagca

SEQ ID NO: 4225564 - DNA, 25 bp, Homo sapien
caaaggccaggtatgtaaaatgtcc

SEQ ID NO: 4225565 - DNA, 25 bp, Homo sapien
tgacccctgatagaaaaccaactgt

SEQ ID NO: 4225566 - DNA, 25 bp, Homo sapien
ctagagattagagccaagccccatt

SEQ ID NO: 4225567 - DNA, 25 bp, Homo sapien
tacacactgagtgccctgcagaatg

SEQ ID NO: 4225568 - DNA, 25 bp, Homo sapien
tacattagtttcctgggctttggac

SEQ ID NO: 4225569 - DNA, 25 bp, Homo sapien
tgtcccccgtgcttaccacaggtaa

SEQ ID NO: 4225570 - DNA, 25 bp, Homo sapien
tggaaaggtaggctctcttcctcgg

SEQ ID NO: 4225571 - DNA, 25 bp, Homo sapien
tcaagaattctgtcccccgtgctta

SEQ ID NO: 4225572 - DNA, 25 bp, Homo sapien
tcttgtaccatatcatgcgcagaaa

SEQ ID NO: 4225573 - DNA, 25 bp, Homo sapien
tgtgagccccagatttatacagcca

SEQ ID NO: 4225574 - DNA, 25 bp, Homo sapien
tagtcaggcaatttgaacaccaatg

SEQ ID NO: 4225575 - DNA, 25 bp, Homo sapien
tatttggaaatgcagcaggcgcctc

SEQ ID NO: 4225576 - DNA, 25 bp, Homo sapien
gttactaaggtgctggaaagaaaca

SEQ ID NO: 4225577 - DNA, 25 bp, Homo sapien
aaaccaaatgtaacctgccctgtct

SEQ ID NO: 4225578 - DNA, 25 bp, Homo sapien
accaaatgtaacctgccctgtctgc

SEQ ID NO: 4225579 - DNA, 25 bp, Homo sapien
aaaagaatcacaatcgcgtgggtta

SEQ ID NO: 4225580 - DNA, 25 bp, Homo sapien
gaacaccctgtagaacgaggacact

SEQ ID NO: 4225581 - DNA, 25 bp, Homo sapien
gattgcggaagaatggaacaccctg

SEQ ID NO: 4225582 - DNA, 25 bp, Homo sapien
tcagttttaaacaggcacgggcttc

SEQ ID NO: 4225583 - DNA, 25 bp, Homo sapien
tcgtgtttcgtagagtaggtgtcca

SEQ ID NO: 4225584 - DNA, 25 bp, Homo sapien
ttctgccactaaccaacattctcat

SEQ ID NO: 4225585 - DNA, 25 bp, Homo sapien
ttgactcttctgccactaaccaaca

SEQ ID NO: 4225586 - DNA, 25 bp, Homo sapien
taattaactgccattttttgactct

SEQ ID NO: 4225587 - DNA, 25 bp, Homo sapien
ataactgaataattaactgccattt

SEQ ID NO: 4225588 - DNA, 25 bp, Homo sapien
cacaatgtgattatcgattggttcc

SEQ ID NO: 4225589 - DNA, 25 bp, Homo sapien
tgtgattatcgattggttcccaaaa

SEQ ID NO: 4225590 - DNA, 25 bp, Homo sapien
tggctcacaatgtgattatcgattg

SEQ ID NO: 4225591 - DNA, 25 bp, Homo sapien
caatgtgattatcgattggttccca

SEQ ID NO: 4225592 - DNA, 25 bp, Homo sapien
ctatttatgaggtatctgtaagaat

SEQ ID NO: 4225593 - DNA, 25 bp, Homo sapien
gaggtatctgtaagaatatgacttc

SEQ ID NO: 4225594 - DNA, 25 bp, Homo sapien
tatgaggtatctgtaagaatatgac

SEQ ID NO: 4225595 - DNA, 25 bp, Homo sapien
ggtatctgtaagaatatgacttcat

SEQ ID NO: 4225596 - DNA, 25 bp, Homo sapien
actttggcagctacatcaccggaga

SEQ ID NO: 4225597 - DNA, 25 bp, Homo sapien
tcaccggagattacataggcagctc

SEQ ID NO: 4225598 - DNA, 25 bp, Homo sapien
cccgctgaggtgtgcttaagagaca

SEQ ID NO: 4225599 - DNA, 25 bp, Homo sapien
aatcaagtattggtagcgaggcccc

SEQ ID NO: 4225600 - DNA, 25 bp, Homo sapien
gattttccctaacaggtgcctctgc

SEQ ID NO: 4225601 - DNA, 25 bp, Homo sapien
tcatccaggtttgactcagtgacag

SEQ ID NO: 4225602 - DNA, 25 bp, Homo sapien
gagaaggaccctatgagcaaccagc

SEQ ID NO: 4225603 - DNA, 25 bp, Homo sapien
caaaggccttagagtgagttcagtc

SEQ ID NO: 4225604 - DNA, 25 bp, Homo sapien
cacaccagccatctgacacatgtca

SEQ ID NO: 4225605 - DNA, 25 bp, Homo sapien
ctccacaccagccatctgacacatg

SEQ ID NO: 4225606 - DNA, 25 bp, Homo sapien
tccacaccagccatctgacacatgt

SEQ ID NO: 4225607 - DNA, 25 bp, Homo sapien
acaccagccatctgacacatgtcag

SEQ ID NO: 4225608 - DNA, 25 bp, Homo sapien
tggagagcctgcgtgttggtaagcg

SEQ ID NO: 4225609 - DNA, 25 bp, Homo sapien
gcgtgttggtaagcgtcactttgaa

SEQ ID NO: 4225610 - DNA, 25 bp, Homo sapien
taagcgtcactttgaaactggagag

SEQ ID NO: 4225611 - DNA, 25 bp, Homo sapien
agagcctgcgtgttggtaagcgtca

SEQ ID NO: 4225612 - DNA, 25 bp, Homo sapien
tagctatggcaaaaagaggtgagca

SEQ ID NO: 4225613 - DNA, 25 bp, Homo sapien
gaggtgagcagaaatcatacccatt

SEQ ID NO: 4225614 - DNA, 25 bp, Homo sapien
cagtggtgagagcttactaatagct

SEQ ID NO: 4225615 - DNA, 25 bp, Homo sapien
agccgctggcagttgtcacagtcag

SEQ ID NO: 4225616 - DNA, 25 bp, Homo sapien
cagcctttttgtaagctggaaataa

SEQ ID NO: 4225617 - DNA, 25 bp, Homo sapien
gggaactgctttccccgggctgcca

SEQ ID NO: 4225618 - DNA, 25 bp, Homo sapien
cgggctgccaacatcacagcctttt

SEQ ID NO: 4225619 - DNA, 25 bp, Homo sapien
gctggaaataagtcagaggctgaca

SEQ ID NO: 4225620 - DNA, 25 bp, Homo sapien
cccaggaggtctgtggaatcattga

SEQ ID NO: 4225621 - DNA, 25 bp, Homo sapien
agcctatccatttctgcaccctgga

SEQ ID NO: 4225622 - DNA, 25 bp, Homo sapien
tcaaaagtgaacatcagcctatcca

SEQ ID NO: 4225623 - DNA, 25 bp, Homo sapien
tgatttaacacccaggaggtctgtg

SEQ ID NO: 4225624 - DNA, 25 bp, Homo sapien
tagcaatttttaaaaatagattcac

SEQ ID NO: 4225625 - DNA, 25 bp, Homo sapien
atagcaatttttaaaaatagattca

SEQ ID NO: 4225626 - DNA, 25 bp, Homo sapien
gtttagtcatcctgtattctgggca

SEQ ID NO: 4225627 - DNA, 25 bp, Homo sapien
catcaccatgttttctcaagttagg

SEQ ID NO: 4225628 - DNA, 25 bp, Homo sapien
taggacgtagccaccgctgtccata

SEQ ID NO: 4225629 - DNA, 25 bp, Homo sapien
gagaaagctgcgtccgtttgccaat

SEQ ID NO: 4225630 - DNA, 25 bp, Homo sapien
tgaaagagtccggaagaaagtgagt

SEQ ID NO: 4225631 - DNA, 25 bp, Homo sapien
cagaaacagagtgggaacgagggtt

SEQ ID NO: 4225632 - DNA, 25 bp, Homo sapien
aggcagaaacagagtgggaacgagg

SEQ ID NO: 4225633 - DNA, 25 bp, Homo sapien
aacagagtgggaacgagggttctca

SEQ ID NO: 4225634 - DNA, 25 bp, Homo sapien
caaagtatctgaatatgaaccccag

SEQ ID NO: 4225635 - DNA, 25 bp, Homo sapien
ccccaaagtatctgaatatgaaccc

SEQ ID NO: 4225636 - DNA, 25 bp, Homo sapien
atgatccatcatcaatccccaaagt

SEQ ID NO: 4225637 - DNA, 25 bp, Homo sapien
gatccatcatcaatccccaaagtat

SEQ ID NO: 4225638 - DNA, 25 bp, Homo sapien
cattgctatatgtacagatttgttg

SEQ ID NO: 4225639 - DNA, 25 bp, Homo sapien
aatgtttcatatggtgctgggtgtg

SEQ ID NO: 4225640 - DNA, 25 bp, Homo sapien
ccttcacctccaatttcatccagcc

SEQ ID NO: 4225641 - DNA, 25 bp, Homo sapien
gaaatgtcaagtccctggagtcaag

SEQ ID NO: 4225642 - DNA, 25 bp, Homo sapien
gctgaccgagtgacttccctgagaa

SEQ ID NO: 4225643 - DNA, 25 bp, Homo sapien
gaacgacattgcgacattcctgggc

SEQ ID NO: 4225644 - DNA, 25 bp, Homo sapien
tcttcaggtagcataagggctccct

SEQ ID NO: 4225645 - DNA, 25 bp, Homo sapien
gccagcagggttgtaggtagcacac

SEQ ID NO: 4225646 - DNA, 25 bp, Homo sapien
tcagcatgtggacaactctgggcca

SEQ ID NO: 4225647 - DNA, 25 bp, Homo sapien
tcatagacagctggacaaggtgagc

SEQ ID NO: 4225648 - DNA, 25 bp, Homo sapien
caaagccaccattatgcagcagatg

SEQ ID NO: 4225649 - DNA, 25 bp, Homo sapien
tccctttcaggtgtacagagaacca

SEQ ID NO: 4225650 - DNA, 25 bp, Homo sapien
ttgagttgtccaaatccaattttca

SEQ ID NO: 4225651 - DNA, 25 bp, Homo sapien
tgtttcaacttcagctcacccccca

SEQ ID NO: 4225652 - DNA, 25 bp, Homo sapien
ccactctcctcaaggacaggtgtca

SEQ ID NO: 4225653 - DNA, 25 bp, Homo sapien
ccagcctagacaagcatatttctta

SEQ ID NO: 4225654 - DNA, 25 bp, Homo sapien
ccccaggtgattgacttgtacgtta

SEQ ID NO: 4225655 - DNA, 25 bp, Homo sapien
taccaaggccacactgactctaaga

SEQ ID NO: 4225656 - DNA, 25 bp, Homo sapien
ctggaggcatgtttctcagacggca

SEQ ID NO: 4225657 - DNA, 25 bp, Homo sapien
tgtgtatccagatccccattcagga

SEQ ID NO: 4225658 - DNA, 25 bp, Homo sapien
gaaggtaagatcagccggagcacat

SEQ ID NO: 4225659 - DNA, 25 bp, Homo sapien
cccaccctaggattttgagggagag

SEQ ID NO: 4225660 - DNA, 25 bp, Homo sapien
tgtatatgacatgttcccaccctag

SEQ ID NO: 4225661 - DNA, 25 bp, Homo sapien
taacagtttagcttggagctgtgct

SEQ ID NO: 4225662 - DNA, 25 bp, Homo sapien
gaaaactttgccttgaccttgaaga

SEQ ID NO: 4225663 - DNA, 25 bp, Homo sapien
gagctgcccagaagcatgctatcca

SEQ ID NO: 4225664 - DNA, 25 bp, Homo sapien
tcatttggtcaactagtggcagcat

SEQ ID NO: 4225665 - DNA, 25 bp, Homo sapien
cagatgctgcagacgtttgggtcct

SEQ ID NO: 4225666 - DNA, 25 bp, Homo sapien
tgattttccaatataaccccagcat

SEQ ID NO: 4225667 - DNA, 25 bp, Homo sapien
tgtctcaggatctgaacctttaccg

SEQ ID NO: 4225668 - DNA, 25 bp, Homo sapien
ttgccgtgtcaatttaaggtgcctg

SEQ ID NO: 4225669 - DNA, 25 bp, Homo sapien
atagtgaatcttactggctgcagcg

SEQ ID NO: 4225670 - DNA, 25 bp, Homo sapien
tcaggagtcgttcaggaggcgctct

SEQ ID NO: 4225671 - DNA, 25 bp, Homo sapien
gactggagcgcctcagtcactgtct

SEQ ID NO: 4225672 - DNA, 25 bp, Homo sapien
ggaaaggtgcgcagcgttcccgacc

SEQ ID NO: 4225673 - DNA, 25 bp, Homo sapien
ggcgcgcgtctgatgatccggaccc

SEQ ID NO: 4225674 - DNA, 25 bp, Homo sapien
gttccgagtaaggaccggagctcca

SEQ ID NO: 4225675 - DNA, 25 bp, Homo sapien
gagaacatccgcctgggtggtcccg

SEQ ID NO: 4225676 - DNA, 25 bp, Homo sapien
gctgagaacatccgcctgggtggtc

SEQ ID NO: 4225677 - DNA, 25 bp, Homo sapien
ctgagaacatccgcctgggtggtcc

SEQ ID NO: 4225678 - DNA, 25 bp, Homo sapien
agaacatccgcctgggtggtcccgc

SEQ ID NO: 4225679 - DNA, 25 bp, Homo sapien
tttggttccttgaaaattcttgtga

SEQ ID NO: 4225680 - DNA, 25 bp, Homo sapien
catttggttccttgaaaattcttgt

SEQ ID NO: 4225681 - DNA, 25 bp, Homo sapien
tggttccttgaaaattcttgtgacc

SEQ ID NO: 4225682 - DNA, 25 bp, Homo sapien
ctcatttggttccttgaaaattctt

SEQ ID NO: 4225683 - DNA, 25 bp, Homo sapien
ggcaccagggttctgactactatca

SEQ ID NO: 4225684 - DNA, 25 bp, Homo sapien
acagttggctgtgactgggcaccag

SEQ ID NO: 4225685 - DNA, 25 bp, Homo sapien
cttctttactaggcgttggtttctg

SEQ ID NO: 4225686 - DNA, 25 bp, Homo sapien
gcgttggtttctgctgaccaaaact

SEQ ID NO: 4225687 - DNA, 25 bp, Homo sapien
gatgtgagtgattgttaattggttc

SEQ ID NO: 4225688 - DNA, 25 bp, Homo sapien
gtgattgttaattggttcactggag

SEQ ID NO: 4225689 - DNA, 25 bp, Homo sapien
tatcacaaccatagcggatgttcag

SEQ ID NO: 4225690 - DNA, 25 bp, Homo sapien
ctgacactgcctatcacaaccatag

SEQ ID NO: 4225691 - DNA, 25 bp, Homo sapien
tttgtcttatgactatgtatccttg

SEQ ID NO: 4225692 - DNA, 25 bp, Homo sapien
tctatatgtgggagatatccaggga

SEQ ID NO: 4225693 - DNA, 25 bp, Homo sapien
cgcctggcccattctattctataga

SEQ ID NO: 4225694 - DNA, 25 bp, Homo sapien
tagattgaaatgttgcctgattctg

SEQ ID NO: 4225695 - DNA, 25 bp, Homo sapien
actgacgctgcagaggttgccgcca

SEQ ID NO: 4225696 - DNA, 25 bp, Homo sapien
catcacctccgttcggtgtaaaagc

SEQ ID NO: 4225697 - DNA, 25 bp, Homo sapien
tgcgtctccgttgtcgtccacatca

SEQ ID NO: 4225698 - DNA, 25 bp, Homo sapien
gctcaggcagtgtcgccaccagttt

SEQ ID NO: 4225699 - DNA, 25 bp, Homo sapien
gatccaccgcggctttatgcctcgt

SEQ ID NO: 4225700 - DNA, 25 bp, Homo sapien
ccaccgcggctttatgcctcgtcac

SEQ ID NO: 4225701 - DNA, 25 bp, Homo sapien
cgatccaccgcggctttatgcctcg

SEQ ID NO: 4225702 - DNA, 25 bp, Homo sapien
tccaccgcggctttatgcctcgtca

SEQ ID NO: 4225703 - DNA, 25 bp, Homo sapien
gaatcccctgacaagcggtcgcggt

SEQ ID NO: 4225704 - DNA, 25 bp, Homo sapien
actggaagccgaatcccctgacaag

SEQ ID NO: 4225705 - DNA, 25 bp, Homo sapien
aagcggtcgcggtcctgtctttccg

SEQ ID NO: 4225706 - DNA, 25 bp, Homo sapien
tgtctttccgctcgagcttcgttct

SEQ ID NO: 4225707 - DNA, 25 bp, Homo sapien
tagaaccgagtgagacagagattgt

SEQ ID NO: 4225708 - DNA, 25 bp, Homo sapien
gggcaaggacaacatagcacttcac

SEQ ID NO: 4225709 - DNA, 25 bp, Homo sapien
gcacttcacagctatattgtaacaa

SEQ ID NO: 4225710 - DNA, 25 bp, Homo sapien
caagcgtccatgtcttactatagaa

SEQ ID NO: 4225711 - DNA, 25 bp, Homo sapien
ccaacatattaatattgaggcagaa

SEQ ID NO: 4225712 - DNA, 25 bp, Homo sapien
taactgaccagtctcagtggttcac

SEQ ID NO: 4225713 - DNA, 25 bp, Homo sapien
ctgattctttcaagggccaattctt

SEQ ID NO: 4225714 - DNA, 25 bp, Homo sapien
caacaaggcgaaaccaggtctgtac

SEQ ID NO: 4225715 - DNA, 25 bp, Homo sapien
gaaacgggtctgaactgggcaggac

SEQ ID NO: 4225716 - DNA, 25 bp, Homo sapien
gaccacttacacgtggcttttcttc

SEQ ID NO: 4225717 - DNA, 25 bp, Homo sapien
cttgaaggaaacgggtctgaactgg

SEQ ID NO: 4225718 - DNA, 25 bp, Homo sapien
aactgggcaggaccacttacacgtg

SEQ ID NO: 4225719 - DNA, 25 bp, Homo sapien
ccatggcagacagggcttgaaaggt

SEQ ID NO: 4225720 - DNA, 25 bp, Homo sapien
tgtatgagaccaaacatccctgctg

SEQ ID NO: 4225721 - DNA, 25 bp, Homo sapien
cctgctgctacagcaccatggcaga

SEQ ID NO: 4225722 - DNA, 25 bp, Homo sapien
gacaatgcagcacttcacagctaca

SEQ ID NO: 4225723 - DNA, 25 bp, Homo sapien
accaccaacccctaattctcaagag

SEQ ID NO: 4225724 - DNA, 25 bp, Homo sapien
gagtcatttgtcaagtcagtactta

SEQ ID NO: 4225725 - DNA, 25 bp, Homo sapien
gtcatttgtcaagtcagtacttaaa

SEQ ID NO: 4225726 - DNA, 25 bp, Homo sapien
caccaacccctaattctcaagagtc

SEQ ID NO: 4225727 - DNA, 25 bp, Homo sapien
gaattccctcctgataatgttttct

SEQ ID NO: 4225728 - DNA, 25 bp, Homo sapien
cacataagagtaatgaactatatat

SEQ ID NO: 4225729 - DNA, 25 bp, Homo sapien
tggagtgtgatctttatccccctac

SEQ ID NO: 4225730 - DNA, 25 bp, Homo sapien
tgtggagtgtgatctttatccccct

SEQ ID NO: 4225731 - DNA, 25 bp, Homo sapien
aacttcagctggcaaagtctactat

SEQ ID NO: 4225732 - DNA, 25 bp, Homo sapien
tcagcaagtactacgtgaaccactg

SEQ ID NO: 4225733 - DNA, 25 bp, Homo sapien
ctacgtgaaccactgaacaatctga

SEQ ID NO: 4225734 - DNA, 25 bp, Homo sapien
caagtactacgtgaaccactgaaca

SEQ ID NO: 4225735 - DNA, 25 bp, Homo sapien
tattcagcaagtactacgtgaacca

SEQ ID NO: 4225736 - DNA, 25 bp, Homo sapien
tcctccactgtggtactgcagaagg

SEQ ID NO: 4225737 - DNA, 25 bp, Homo sapien
taaatgaggccagttgtgtacactg

SEQ ID NO: 4225738 - DNA, 25 bp, Homo sapien
gcagaaggtctcagtgtcacaaaga

SEQ ID NO: 4225739 - DNA, 25 bp, Homo sapien
ttcccaagttgaccccgactgccag

SEQ ID NO: 4225740 - DNA, 25 bp, Homo sapien
agtgcatgctgtgatcgcctgctca

SEQ ID NO: 4225741 - DNA, 25 bp, Homo sapien
aaaaggctcgggttcacacctagcg

SEQ ID NO: 4225742 - DNA, 25 bp, Homo sapien
taactctaggacatgattgctgctg

SEQ ID NO: 4225743 - DNA, 25 bp, Homo sapien
tgttacgagtattcaggcaggattc

SEQ ID NO: 4225744 - DNA, 25 bp, Homo sapien
gcccaagcctgcgtgccttcatgtt

SEQ ID NO: 4225745 - DNA, 25 bp, Homo sapien
tgaagaatctccctccttagaacct

SEQ ID NO: 4225746 - DNA, 25 bp, Homo sapien
ttcatgttgcccctctcgggtaggg

SEQ ID NO: 4225747 - DNA, 25 bp, Homo sapien
tcgggtagggttccctgcttgttga

SEQ ID NO: 4225748 - DNA, 25 bp, Homo sapien
tgcagtccatggcacataatgggaa

SEQ ID NO: 4225749 - DNA, 25 bp, Homo sapien
cccagtggcaagaggaggcaattcg

SEQ ID NO: 4225750 - DNA, 25 bp, Homo sapien
gcaattcggagtccgtcagacctga

SEQ ID NO: 4225751 - DNA, 25 bp, Homo sapien
cagacctgagtgcagtcagacctga

SEQ ID NO: 4225752 - DNA, 25 bp, Homo sapien
caaatatcacgttcttatagctgta

SEQ ID NO: 4225753 - DNA, 25 bp, Homo sapien
tattctggtctcaatggcttcggga

SEQ ID NO: 4225754 - DNA, 25 bp, Homo sapien
tatagaagactatgaggtactgttg

SEQ ID NO: 4225755 - DNA, 25 bp, Homo sapien
actcaaagcaaactacgctctcagg

SEQ ID NO: 4225756 - DNA, 25 bp, Homo sapien
gaggttaagggactccagttgccaa

SEQ ID NO: 4225757 - DNA, 25 bp, Homo sapien
gctgggtctcctgtcctagagggaa

SEQ ID NO: 4225758 - DNA, 25 bp, Homo sapien
ggagcggaatctgtagatgaggtta

SEQ ID NO: 4225759 - DNA, 25 bp, Homo sapien
ccagagtctttggtggagcggaatc

SEQ ID NO: 4225760 - DNA, 25 bp, Homo sapien
ggcacaagttagagcaggcccagca

SEQ ID NO: 4225761 - DNA, 25 bp, Homo sapien
tcaggttccaaggatgcaggtctgg

SEQ ID NO: 4225762 - DNA, 25 bp, Homo sapien
catggcaggatgttctggcacagca

SEQ ID NO: 4225763 - DNA, 25 bp, Homo sapien
tggaaaatgatatcggaggccctgg

SEQ ID NO: 4225764 - DNA, 25 bp, Homo sapien
taagatggcccattttggaccggaa

SEQ ID NO: 4225765 - DNA, 25 bp, Homo sapien
tggaccggaactgtcattgccagac

SEQ ID NO: 4225766 - DNA, 25 bp, Homo sapien
gcgacagattctccttgatggtaca

SEQ ID NO: 4225767 - DNA, 25 bp, Homo sapien
gctggcctacacaggagcgacagat

SEQ ID NO: 4225768 - DNA, 25 bp, Homo sapien
ccatgctgcctatctcagagcagga

SEQ ID NO: 4225769 - DNA, 25 bp, Homo sapien
aacctggctcatttcttgtttcggc

SEQ ID NO: 4225770 - DNA, 25 bp, Homo sapien
aaatccaggtctttcatctccgaag

SEQ ID NO: 4225771 - DNA, 25 bp, Homo sapien
aagtctgctaaaagattcactcagc

SEQ ID NO: 4225772 - DNA, 25 bp, Homo sapien
gatcggaggctttgacggcttacag

SEQ ID NO: 4225773 - DNA, 25 bp, Homo sapien
taaaaagctttggaacgtgcctgcc

SEQ ID NO: 4225774 - DNA, 25 bp, Homo sapien
tcaacaatgtggagacctacgaccc

SEQ ID NO: 4225775 - DNA, 25 bp, Homo sapien
tatttaaacataggccgctggaggc

SEQ ID NO: 4225776 - DNA, 25 bp, Homo sapien
ccttggctgcacctataaaaattca

SEQ ID NO: 4225777 - DNA, 25 bp, Homo sapien
gaagctcagcttccctcatagtaag

SEQ ID NO: 4225778 - DNA, 25 bp, Homo sapien
gaggaaaagtcaaccaccacagctg

SEQ ID NO: 4225779 - DNA, 25 bp, Homo sapien
tggagacctctgaaaggtaccccac

SEQ ID NO: 4225780 - DNA, 25 bp, Homo sapien
ttctgctgtccataccgtcagggcc

SEQ ID NO: 4225781 - DNA, 25 bp, Homo sapien
ccattgcctaggctttgtccagcca

SEQ ID NO: 4225782 - DNA, 25 bp, Homo sapien
aagtttgtctttggtgccattgccc

SEQ ID NO: 4225783 - DNA, 25 bp, Homo sapien
ccttatcccggcactgttctgctgt

SEQ ID NO: 4225784 - DNA, 25 bp, Homo sapien
agtgttgggcaactggtatgctgct

SEQ ID NO: 4225785 - DNA, 25 bp, Homo sapien
taaaatgaggatcttcctagctacc

SEQ ID NO: 4225786 - DNA, 25 bp, Homo sapien
cgcccaagtgttgggcaactggtat

SEQ ID NO: 4225787 - DNA, 25 bp, Homo sapien
tgctgctgtgagattgtttctgctg

SEQ ID NO: 4225788 - DNA, 25 bp, Homo sapien
agaacgcacataggatcatctttgc

SEQ ID NO: 4225789 - DNA, 25 bp, Homo sapien
tagaacgcacataggatcatctttg

SEQ ID NO: 4225790 - DNA, 25 bp, Homo sapien
ctagaacgcacataggatcatcttt

SEQ ID NO: 4225791 - DNA, 25 bp, Homo sapien
gcactcctgcgtgtagcccaactgt

SEQ ID NO: 4225792 - DNA, 25 bp, Homo sapien
tttccctctggattctgtatcatga

SEQ ID NO: 4225793 - DNA, 25 bp, Homo sapien
tcatgaaagcccaagggacaggcct

SEQ ID NO: 4225794 - DNA, 25 bp, Homo sapien
cacgtctagattcataactgctccc

SEQ ID NO: 4225795 - DNA, 25 bp, Homo sapien
cttggcacttattctatcacctggg

SEQ ID NO: 4225796 - DNA, 25 bp, Homo sapien
tcttggcacttattctatcacctgg

SEQ ID NO: 4225797 - DNA, 25 bp, Homo sapien
gttcttggcacttattctatcacct

SEQ ID NO: 4225798 - DNA, 25 bp, Homo sapien
ttggcacttattctatcacctgggc

SEQ ID NO: 4225799 - DNA, 25 bp, Homo sapien
cagtcttagcggttattgcaacttc

SEQ ID NO: 4225800 - DNA, 25 bp, Homo sapien
gggtgtcatccaaccgctgaagttt

SEQ ID NO: 4225801 - DNA, 25 bp, Homo sapien
taaacagtcccctacggacagacat

SEQ ID NO: 4225802 - DNA, 25 bp, Homo sapien
cacggcatcaccaaaagagggtgtc

SEQ ID NO: 4225803 - DNA, 25 bp, Homo sapien
gaaccagaaagaggccacaagatgg

SEQ ID NO: 4225804 - DNA, 25 bp, Homo sapien
ccacaagatggcaggcaaagctggt

SEQ ID NO: 4225805 - DNA, 25 bp, Homo sapien
caagatggcaggcaaagctggtctt

SEQ ID NO: 4225806 - DNA, 25 bp, Homo sapien
ctggaaccagaaagaggccacaaga

SEQ ID NO: 4225807 - DNA, 25 bp, Homo sapien
aaccctgacctgaggtaaaagctgc

SEQ ID NO: 4225808 - DNA, 25 bp, Homo sapien
ccctgacctgaggtaaaagctgcag

SEQ ID NO: 4225809 - DNA, 25 bp, Homo sapien
gaggatactcagaggaaccctgacc

SEQ ID NO: 4225810 - DNA, 25 bp, Homo sapien
ggagctgaggatactcagaggaacc

SEQ ID NO: 4225811 - DNA, 25 bp, Homo sapien
tcagggtaacgcctagggaccaggc

SEQ ID NO: 4225812 - DNA, 25 bp, Homo sapien
tggctttcctaagttcaggtccgca

SEQ ID NO: 4225813 - DNA, 25 bp, Homo sapien
tttcctaagttcaggtccgcagcgg

SEQ ID NO: 4225814 - DNA, 25 bp, Homo sapien
ctaagttcaggtccgcagcggacat

SEQ ID NO: 4225815 - DNA, 25 bp, Homo sapien
tcctaagttcaggtccgcagcggac

SEQ ID NO: 4225816 - DNA, 25 bp, Homo sapien
ggtcaagaggcaaaccaggacacaa

SEQ ID NO: 4225817 - DNA, 25 bp, Homo sapien
ctggtcaagaggcaaaccaggacac

SEQ ID NO: 4225818 - DNA, 25 bp, Homo sapien
tggtcaagaggcaaaccaggacaca

SEQ ID NO: 4225819 - DNA, 25 bp, Homo sapien
tgttcctctaggactggagtcttgc

SEQ ID NO: 4225820 - DNA, 25 bp, Homo sapien
ggaaggctagctcccttagggctgc

SEQ ID NO: 4225821 - DNA, 25 bp, Homo sapien
cagaccccttaataacttgggcaag

SEQ ID NO: 4225822 - DNA, 25 bp, Homo sapien
tccatgaactccaaaccggaaggct

SEQ ID NO: 4225823 - DNA, 25 bp, Homo sapien
gcaaagtacactttagatttggata

SEQ ID NO: 4225824 - DNA, 25 bp, Homo sapien
cactggctgcagctatggtatctga

SEQ ID NO: 4225825 - DNA, 25 bp, Homo sapien
tgctgtttcccatttactccttgac

SEQ ID NO: 4225826 - DNA, 25 bp, Homo sapien
gatagcagacctgaattagcactgg

SEQ ID NO: 4225827 - DNA, 25 bp, Homo sapien
atgcccaaagtagaaacttggatgt

SEQ ID NO: 4225828 - DNA, 25 bp, Homo sapien
tgcccaaagtagaaacttggatgtt

SEQ ID NO: 4225829 - DNA, 25 bp, Homo sapien
tcatttaccgaatcccatcagctct

SEQ ID NO: 4225830 - DNA, 25 bp, Homo sapien
aggttgcatcatttaccgaatccca

SEQ ID NO: 4225831 - DNA, 25 bp, Homo sapien
ttccatttctgtactgccgagagct

SEQ ID NO: 4225832 - DNA, 25 bp, Homo sapien
aaaccgcacgactggagactgctca

SEQ ID NO: 4225833 - DNA, 25 bp, Homo sapien
cagggaggcgcagcgccttagtttc

SEQ ID NO: 4225834 - DNA, 25 bp, Homo sapien
ttctgtactgccgagagcttggtga

SEQ ID NO: 4225835 - DNA, 25 bp, Homo sapien
gccacagctgggacattacaaactg

SEQ ID NO: 4225836 - DNA, 25 bp, Homo sapien
tacaaactgcattaatatgccagaa

SEQ ID NO: 4225837 - DNA, 25 bp, Homo sapien
aaggctgaggcctcttctttcagca

SEQ ID NO: 4225838 - DNA, 25 bp, Homo sapien
gccctatggcatcagtcagctctcg

SEQ ID NO: 4225839 - DNA, 25 bp, Homo sapien
aaagctcgttccgaggagaggatgt

SEQ ID NO: 4225840 - DNA, 25 bp, Homo sapien
tttcctccaactgagtgagccgccg

SEQ ID NO: 4225841 - DNA, 25 bp, Homo sapien
ctttaaagctcgttccgaggagagg

SEQ ID NO: 4225842 - DNA, 25 bp, Homo sapien
gagaggatgttgcttgaaggtgtgg

SEQ ID NO: 4225843 - DNA, 25 bp, Homo sapien
tcttgggaagaacctcgagagaata

SEQ ID NO: 4225844 - DNA, 25 bp, Homo sapien
aaaagctgggctcccgtcagcccct

SEQ ID NO: 4225845 - DNA, 25 bp, Homo sapien
agatgtagatcagccctggagggat

SEQ ID NO: 4225846 - DNA, 25 bp, Homo sapien
ttctccggacaaagaaagagctcaa

SEQ ID NO: 4225847 - DNA, 25 bp, Homo sapien
cttttgctcattcagatactttttc

SEQ ID NO: 4225848 - DNA, 25 bp, Homo sapien
tttctggtgtttcttgatcaagctc

SEQ ID NO: 4225849 - DNA, 25 bp, Homo sapien
actttttctggtgtttcttgatcaa

SEQ ID NO: 4225850 - DNA, 25 bp, Homo sapien
caactgcttttgctcattcagatac

SEQ ID NO: 4225851 - DNA, 25 bp, Homo sapien
tcatccatccgctgaagctactgtg

SEQ ID NO: 4225852 - DNA, 25 bp, Homo sapien
gaatcctgagcacgtttctctggtt

SEQ ID NO: 4225853 - DNA, 25 bp, Homo sapien
aaagaatccatagaatcctgagcac

SEQ ID NO: 4225854 - DNA, 25 bp, Homo sapien
catccatccgctgaagctactgtga

SEQ ID NO: 4225855 - DNA, 25 bp, Homo sapien
tggttggtgggaactccaatctgag

SEQ ID NO: 4225856 - DNA, 25 bp, Homo sapien
tatagccaggaccagttcaaagtcc

SEQ ID NO: 4225857 - DNA, 25 bp, Homo sapien
tgttgatgccaccaccggtaataaa

SEQ ID NO: 4225858 - DNA, 25 bp, Homo sapien
taactgcttcctctggatcaccact

SEQ ID NO: 4225859 - DNA, 25 bp, Homo sapien
gcacccattcagaacaatgcaacca

SEQ ID NO: 4225860 - DNA, 25 bp, Homo sapien
catctgttaaggctgaaacaacaat

SEQ ID NO: 4225861 - DNA, 25 bp, Homo sapien
tcacctggggctatgctcatcagag

SEQ ID NO: 4225862 - DNA, 25 bp, Homo sapien
caatctctggcccaagaatgatcaa

SEQ ID NO: 4225863 - DNA, 25 bp, Homo sapien
ggttgatgaggtgccaggcgattgg

SEQ ID NO: 4225864 - DNA, 25 bp, Homo sapien
gatgaggtgccaggcgattggtgcc

SEQ ID NO: 4225865 - DNA, 25 bp, Homo sapien
ccaggcgattggtgcctcagtggcc

SEQ ID NO: 4225866 - DNA, 25 bp, Homo sapien
ctcagtggcctcatgattttgtgtg

SEQ ID NO: 4225867 - DNA, 25 bp, Homo sapien
cactgaaaccttgaacccctgtgct

SEQ ID NO: 4225868 - DNA, 25 bp, Homo sapien
tgccaccttgcttagctaattaaaa

SEQ ID NO: 4225869 - DNA, 25 bp, Homo sapien
tgaaaccttgaacccctgtgctcaa

SEQ ID NO: 4225870 - DNA, 25 bp, Homo sapien
gcatgccaccttgcttagctaatta

SEQ ID NO: 4225871 - DNA, 25 bp, Homo sapien
gctgatgttgtcacactttatcttg

SEQ ID NO: 4225872 - DNA, 25 bp, Homo sapien
ttggatgttgctgatgttgtcacac

SEQ ID NO: 4225873 - DNA, 25 bp, Homo sapien
tataggccagaagtttatagtcctc

SEQ ID NO: 4225874 - DNA, 25 bp, Homo sapien
atttcttcattgtgttataggccag

SEQ ID NO: 4225875 - DNA, 25 bp, Homo sapien
agcgcactctccagcgccggcgtct

SEQ ID NO: 4225876 - DNA, 25 bp, Homo sapien
agccagcagtggctaaccccgcggt

SEQ ID NO: 4225877 - DNA, 25 bp, Homo sapien
cgcggtccctcagcggcgggcggcg

SEQ ID NO: 4225878 - DNA, 25 bp, Homo sapien
tacctctcggcgaacactggaagca

SEQ ID NO: 4225879 - DNA, 25 bp, Homo sapien
cgccccgttcgcagcccatcggcaa

SEQ ID NO: 4225880 - DNA, 25 bp, Homo sapien
tgaaataaaaagcagcgccccgttc

SEQ ID NO: 4225881 - DNA, 25 bp, Homo sapien
ccgttcgcagcccatcggcaacaag

SEQ ID NO: 4225882 - DNA, 25 bp, Homo sapien
gttcgcagcccatcggcaacaagca

SEQ ID NO: 4225883 - DNA, 25 bp, Homo sapien
ttgaccccgtcattcctcccggaca

SEQ ID NO: 4225884 - DNA, 25 bp, Homo sapien
gtcgtcccaccaaacaagaaggctg

SEQ ID NO: 4225885 - DNA, 25 bp, Homo sapien
cattcctcccggacagaaccgacgg

SEQ ID NO: 4225886 - DNA, 25 bp, Homo sapien
ggctggatttgaggcggtcgcactc

SEQ ID NO: 4225887 - DNA, 25 bp, Homo sapien
catttcgcaatcgctttaatggggc

SEQ ID NO: 4225888 - DNA, 25 bp, Homo sapien
taatggggcttcacgggcccgcggc

SEQ ID NO: 4225889 - DNA, 25 bp, Homo sapien
ttcgcaatcgctttaatggggcttc

SEQ ID NO: 4225890 - DNA, 25 bp, Homo sapien
tgcatttcgcaatcgctttaatggg

SEQ ID NO: 4225891 - DNA, 25 bp, Homo sapien
cgggggtaacggtcaggtgacagtg

SEQ ID NO: 4225892 - DNA, 25 bp, Homo sapien
gtaacggtcaggtgacagtgccgag

SEQ ID NO: 4225893 - DNA, 25 bp, Homo sapien
ggtaacggtcaggtgacagtgccga

SEQ ID NO: 4225894 - DNA, 25 bp, Homo sapien
ggggtaacggtcaggtgacagtgcc

SEQ ID NO: 4225895 - DNA, 25 bp, Homo sapien
tacagaactggcaacaacgtgttcg

SEQ ID NO: 4225896 - DNA, 25 bp, Homo sapien
caacctcttagctggtggacccagt

SEQ ID NO: 4225897 - DNA, 25 bp, Homo sapien
gtagccgatctctgcgtgcccagaa

SEQ ID NO: 4225898 - DNA, 25 bp, Homo sapien
catccgagccgagtatggaagaatc

SEQ ID NO: 4225899 - DNA, 25 bp, Homo sapien
cctcagttaagagtaaagcccactt

SEQ ID NO: 4225900 - DNA, 25 bp, Homo sapien
tggaaacctcagttaagagtaaagc

SEQ ID NO: 4225901 - DNA, 25 bp, Homo sapien
acctcagttaagagtaaagcccact

SEQ ID NO: 4225902 - DNA, 25 bp, Homo sapien
ctcagttaagagtaaagcccacttt

SEQ ID NO: 4225903 - DNA, 25 bp, Homo sapien
tgtaatgtttaaagcccagccttca

SEQ ID NO: 4225904 - DNA, 25 bp, Homo sapien
cagatattttcaccctatagtctca

SEQ ID NO: 4225905 - DNA, 25 bp, Homo sapien
gaaccaccaagaccatatttaccca

SEQ ID NO: 4225906 - DNA, 25 bp, Homo sapien
attactctgcagcagtggttcctgg

SEQ ID NO: 4225907 - DNA, 25 bp, Homo sapien
gggatgcaggtcaattcatgaaaca

SEQ ID NO: 4225908 - DNA, 25 bp, Homo sapien
cactggctggcaaatactggattca

SEQ ID NO: 4225909 - DNA, 25 bp, Homo sapien
gcatggcccctaaaacttgtagtag

SEQ ID NO: 4225910 - DNA, 25 bp, Homo sapien
tacagcgtgagtgtactgaaacaag

SEQ ID NO: 4225911 - DNA, 25 bp, Homo sapien
aacacatatgtatacccagactgtg

SEQ ID NO: 4225912 - DNA, 25 bp, Homo sapien
taaacacaagtggttctggtttctg

SEQ ID NO: 4225913 - DNA, 25 bp, Homo sapien
gaaaataccagaaccttgagctgtg

SEQ ID NO: 4225914 - DNA, 25 bp, Homo sapien
tggtttctggcccagatatctttaa

SEQ ID NO: 4225915 - DNA, 25 bp, Homo sapien
gttgatcaaagccccagtcaaaata

SEQ ID NO: 4225916 - DNA, 25 bp, Homo sapien
aagccccagtcaaaatatgtgtgtt

SEQ ID NO: 4225917 - DNA, 25 bp, Homo sapien
tcaaagccccagtcaaaatatgtgt

SEQ ID NO: 4225918 - DNA, 25 bp, Homo sapien
tgatcaaagccccagtcaaaatatg

SEQ ID NO: 4225919 - DNA, 25 bp, Homo sapien
gacttttgggcatcttgacttcctc

SEQ ID NO: 4225920 - DNA, 25 bp, Homo sapien
ctctgtatgtaagagagactatctc

SEQ ID NO: 4225921 - DNA, 25 bp, Homo sapien
tgggaactctccaattactggtctc

SEQ ID NO: 4225922 - DNA, 25 bp, Homo sapien
ggtctccgtaactacaccaaatgta

SEQ ID NO: 4225923 - DNA, 25 bp, Homo sapien
ggctcccacacatgagcagtagcgt

SEQ ID NO: 4225924 - DNA, 25 bp, Homo sapien
gcagtagcgtatctatcaaatatgc

SEQ ID NO: 4225925 - DNA, 25 bp, Homo sapien
tcaagagagatcactactgtacctg

SEQ ID NO: 4225926 - DNA, 25 bp, Homo sapien
tgtttgcttcattatacgtcaccca

SEQ ID NO: 4225927 - DNA, 25 bp, Homo sapien
ctgtccaagcgggtgggactacagg

SEQ ID NO: 4225928 - DNA, 25 bp, Homo sapien
agctgtccaagcgggtgggactaca

SEQ ID NO: 4225929 - DNA, 25 bp, Homo sapien
gctgtccaagcgggtgggactacag

SEQ ID NO: 4225930 - DNA, 25 bp, Homo sapien
cagctgtccaagcgggtgggactac

SEQ ID NO: 4225931 - DNA, 25 bp, Homo sapien
catcttctggctagaacaaagtcta

SEQ ID NO: 4225932 - DNA, 25 bp, Homo sapien
tgtacattgtttgaccagcaagtcc

SEQ ID NO: 4225933 - DNA, 25 bp, Homo sapien
gggattggtcaaaccacagtacatc

SEQ ID NO: 4225934 - DNA, 25 bp, Homo sapien
tatgtcgacagatttatctatgcag

SEQ ID NO: 4225935 - DNA, 25 bp, Homo sapien
ttgagaaatgactattagggatctt

SEQ ID NO: 4225936 - DNA, 25 bp, Homo sapien
tgttgagaaatgactattagggatc

SEQ ID NO: 4225937 - DNA, 25 bp, Homo sapien
gttgagaaatgactattagggatct

SEQ ID NO: 4225938 - DNA, 25 bp, Homo sapien
attgttgagaaatgactattaggga

SEQ ID NO: 4225939 - DNA, 25 bp, Homo sapien
ggaatcacgcaccccaagatcctct

SEQ ID NO: 4225940 - DNA, 25 bp, Homo sapien
gaatcacgcaccccaagatcctctc

SEQ ID NO: 4225941 - DNA, 25 bp, Homo sapien
aatcacgcaccccaagatcctctct

SEQ ID NO: 4225942 - DNA, 25 bp, Homo sapien
tggcacatgcatcacggagaacact

SEQ ID NO: 4225943 - DNA, 25 bp, Homo sapien
ggatcaagttgctcctccaagaact

SEQ ID NO: 4225944 - DNA, 25 bp, Homo sapien
gagtgaatgggtatcagcaaagcgc

SEQ ID NO: 4225945 - DNA, 25 bp, Homo sapien
gaagtagctgctacaggctgagagc

SEQ ID NO: 4225946 - DNA, 25 bp, Homo sapien
agttcatcactacaaatataatcaa

SEQ ID NO: 4225947 - DNA, 25 bp, Homo sapien
aagttcatcactacaaatataatca

SEQ ID NO: 4225948 - DNA, 25 bp, Homo sapien
gttcatcactacaaatataatcaat

SEQ ID NO: 4225949 - DNA, 25 bp, Homo sapien
tcttctcagatcaacggcacgatag

SEQ ID NO: 4225950 - DNA, 25 bp, Homo sapien
tcaggagctcgtgtaacagtggtct

SEQ ID NO: 4225951 - DNA, 25 bp, Homo sapien
ggatgcaacagagggagtctcacat

SEQ ID NO: 4225952 - DNA, 25 bp, Homo sapien
cgatagacccaacgcatgacggctt

SEQ ID NO: 4225953 - DNA, 25 bp, Homo sapien
aatatgttgagatatgcacagttgc

SEQ ID NO: 4225954 - DNA, 25 bp, Homo sapien
tgacaacactgagattgcattcagg

SEQ ID NO: 4225955 - DNA, 25 bp, Homo sapien
tatacagccacaggtagacagtgca

SEQ ID NO: 4225956 - DNA, 25 bp, Homo sapien
aaagaccctttgctacactgtttga

SEQ ID NO: 4225957 - DNA, 25 bp, Homo sapien
cacgtgggtatatagggagaatttc

SEQ ID NO: 4225958 - DNA, 25 bp, Homo sapien
ctaagggtttacaactggcagggca

SEQ ID NO: 4225959 - DNA, 25 bp, Homo sapien
gcagggcagattatcaaagctttcg

SEQ ID NO: 4225960 - DNA, 25 bp, Homo sapien
tgagctctggacaatacttggcaca

SEQ ID NO: 4225961 - DNA, 25 bp, Homo sapien
gaatgtgaaacatcagtcagggacc

SEQ ID NO: 4225962 - DNA, 25 bp, Homo sapien
gaaccacactaccaagcaatcatga

SEQ ID NO: 4225963 - DNA, 25 bp, Homo sapien
cttgcccagtttagtgccatccttg

SEQ ID NO: 4225964 - DNA, 25 bp, Homo sapien
taggtgtactagagatcagaatcag

SEQ ID NO: 4225965 - DNA, 25 bp, Homo sapien
gatcaaaagacgcaaaatgccaact

SEQ ID NO: 4225966 - DNA, 25 bp, Homo sapien
ttagcctcctaacacgtggtttcga

SEQ ID NO: 4225967 - DNA, 25 bp, Homo sapien
caatttgtgtggtaaggctttccac

SEQ ID NO: 4225968 - DNA, 25 bp, Homo sapien
aaatggcaataggtaggactgcttc

SEQ ID NO: 4225969 - DNA, 25 bp, Homo sapien
tgcatgtgccaaacggtacagcctg

SEQ ID NO: 4225970 - DNA, 25 bp, Homo sapien
ttctaactgtaggaaaatggtgctc

SEQ ID NO: 4225971 - DNA, 25 bp, Homo sapien
gattcagatacgcataaccacacaa

SEQ ID NO: 4225972 - DNA, 25 bp, Homo sapien
tatctaacccaatcagaatcctggc

SEQ ID NO: 4225973 - DNA, 25 bp, Homo sapien
gattaaatcctccaactcgctcaca

SEQ ID NO: 4225974 - DNA, 25 bp, Homo sapien
tatcacctcagaatagccagtggac

SEQ ID NO: 4225975 - DNA, 25 bp, Homo sapien
gcacagactgcatactctgatttgg

SEQ ID NO: 4225976 - DNA, 25 bp, Homo sapien
tcctgttacaggatcgtagcactca

SEQ ID NO: 4225977 - DNA, 25 bp, Homo sapien
tatagctgtcaccaagagatctgtg

SEQ ID NO: 4225978 - DNA, 25 bp, Homo sapien
gcaaaacaatgcacacacgataatt

SEQ ID NO: 4225979 - DNA, 25 bp, Homo sapien
atagctgtcaccaagagatctgtgc

SEQ ID NO: 4225980 - DNA, 25 bp, Homo sapien
gataatttatcatgatatagctgtc

SEQ ID NO: 4225981 - DNA, 25 bp, Homo sapien
gagaggcaactctgatccaaatatt

SEQ ID NO: 4225982 - DNA, 25 bp, Homo sapien
taactgtgagttataaatccagaca

SEQ ID NO: 4225983 - DNA, 25 bp, Homo sapien
acatcacggctgttgattcttccac

SEQ ID NO: 4225984 - DNA, 25 bp, Homo sapien
gacgccatctgcctttattgagaga

SEQ ID NO: 4225985 - DNA, 25 bp, Homo sapien
ctttggaaaggtaccagcaatagta

SEQ ID NO: 4225986 - DNA, 25 bp, Homo sapien
gaaaggtaccagcaatagtaataaa

SEQ ID NO: 4225987 - DNA, 25 bp, Homo sapien
tggaaaggtaccagcaatagtaata

SEQ ID NO: 4225988 - DNA, 25 bp, Homo sapien
ttactttggaaaggtaccagcaata

SEQ ID NO: 4225989 - DNA, 25 bp, Homo sapien
agataaaatacatgactttggacaa

SEQ ID NO: 4225990 - DNA, 25 bp, Homo sapien
gataaaatacatgactttggacaaa

SEQ ID NO: 4225991 - DNA, 25 bp, Homo sapien
tggcctgttagtgagtttatcttaa

SEQ ID NO: 4225992 - DNA, 25 bp, Homo sapien
ggcctgttagtgagtttatcttaat

SEQ ID NO: 4225993 - DNA, 25 bp, Homo sapien
tatgagaacctaatgtgcgctgatc

SEQ ID NO: 4225994 - DNA, 25 bp, Homo sapien
tagtattctacgcagcagtccccaa

SEQ ID NO: 4225995 - DNA, 25 bp, Homo sapien
gattcctaacagaacgctgactgca

SEQ ID NO: 4225996 - DNA, 25 bp, Homo sapien
taaagctcgctcagtggctgctcac

SEQ ID NO: 4225997 - DNA, 25 bp, Homo sapien
tacgctgctaagtctgttttgccca

SEQ ID NO: 4225998 - DNA, 25 bp, Homo sapien
actgcaggagaactcacggcttcct

SEQ ID NO: 4225999 - DNA, 25 bp, Homo sapien
gagcaacttcagtccatcgatttga

SEQ ID NO: 4226000 - DNA, 25 bp, Homo sapien
ggtcctccaccaatcacaaacagtt

SEQ ID NO: 4226001 - DNA, 25 bp, Homo sapien
atttcccttcttgtacttaatattg

SEQ ID NO: 4226002 - DNA, 25 bp, Homo sapien
atttctttaaaagtgcatggcttac

SEQ ID NO: 4226003 - DNA, 25 bp, Homo sapien
ttgataagccttctgtatttccctt

SEQ ID NO: 4226004 - DNA, 25 bp, Homo sapien
tcttgtacttaatattggtaatttc

SEQ ID NO: 4226005 - DNA, 25 bp, Homo sapien
ggataactatgcctcacatctgaat

SEQ ID NO: 4226006 - DNA, 25 bp, Homo sapien
taacagtgctaaaccagctaggcat

SEQ ID NO: 4226007 - DNA, 25 bp, Homo sapien
tcaagcagaatagagtaccaaacac

SEQ ID NO: 4226008 - DNA, 25 bp, Homo sapien
aatggccaccaggtttgtccactaa

SEQ ID NO: 4226009 - DNA, 25 bp, Homo sapien
tagccaagaattggtttctggatca

SEQ ID NO: 4226010 - DNA, 25 bp, Homo sapien
tggtttctggatcataagattgaac

SEQ ID NO: 4226011 - DNA, 25 bp, Homo sapien
cacgaagtagccaagaattggtttc

SEQ ID NO: 4226012 - DNA, 25 bp, Homo sapien
ctgcacgaagtagccaagaattggt

SEQ ID NO: 4226013 - DNA, 25 bp, Homo sapien
gatacagctgttatacaccttttgg

SEQ ID NO: 4226014 - DNA, 25 bp, Homo sapien
tgtacgtgcatccagtaatcttcaa

SEQ ID NO: 4226015 - DNA, 25 bp, Homo sapien
cagtccaccggcaacatagatcagg

SEQ ID NO: 4226016 - DNA, 25 bp, Homo sapien
cgtaacagtatattgccttggtcag

SEQ ID NO: 4226017 - DNA, 25 bp, Homo sapien
taatgattatgtacttggtccctct

SEQ ID NO: 4226018 - DNA, 25 bp, Homo sapien
gattatgtacttggtccctcttaga

SEQ ID NO: 4226019 - DNA, 25 bp, Homo sapien
tgtacttggtccctcttagatttat

SEQ ID NO: 4226020 - DNA, 25 bp, Homo sapien
ataatgattatgtacttggtccctc

SEQ ID NO: 4226021 - DNA, 25 bp, Homo sapien
ctgttgtactgaagtggtccttgaa

SEQ ID NO: 4226022 - DNA, 25 bp, Homo sapien
gctgtatctctaatgtatcttgcaa

SEQ ID NO: 4226023 - DNA, 25 bp, Homo sapien
ttagagactacaaatgacagatact

SEQ ID NO: 4226024 - DNA, 25 bp, Homo sapien
caattgccataagaggtatgagtgc

SEQ ID NO: 4226025 - DNA, 25 bp, Homo sapien
ctggagaatggttttccaggggagg

SEQ ID NO: 4226026 - DNA, 25 bp, Homo sapien
tcaatacttgaccacatgaggattc

SEQ ID NO: 4226027 - DNA, 25 bp, Homo sapien
agggtacactgtcgcttctgtaggg

SEQ ID NO: 4226028 - DNA, 25 bp, Homo sapien
tgcaagtagggtacactgtcgcttc

SEQ ID NO: 4226029 - DNA, 25 bp, Homo sapien
gaggattctcatgcaagtagggtac

SEQ ID NO: 4226030 - DNA, 25 bp, Homo sapien
aagggagacatgataaaagctaagg

SEQ ID NO: 4226031 - DNA, 25 bp, Homo sapien
agctaaggtcctttggcccaactct

SEQ ID NO: 4226032 - DNA, 25 bp, Homo sapien
aaataatgctttagcacagtcaaaa

SEQ ID NO: 4226033 - DNA, 25 bp, Homo sapien
taagcgctggacaactttgcatgaa

SEQ ID NO: 4226034 - DNA, 25 bp, Homo sapien
gatacttgttgcaggatcataacag

SEQ ID NO: 4226035 - DNA, 25 bp, Homo sapien
ccgtcttccgcccaggatatatatt

SEQ ID NO: 4226036 - DNA, 25 bp, Homo sapien
aacagagaatagtgtctgtggcttc

SEQ ID NO: 4226037 - DNA, 25 bp, Homo sapien
tgggcattgcagctacccctgtgat

SEQ ID NO: 4226038 - DNA, 25 bp, Homo sapien
tgtatctatgaatagtcacacagcc

SEQ ID NO: 4226039 - DNA, 25 bp, Homo sapien
ttgtatctatgaatagtcacacagc

SEQ ID NO: 4226040 - DNA, 25 bp, Homo sapien
tcattgtatctatgaatagtcacac

SEQ ID NO: 4226041 - DNA, 25 bp, Homo sapien
tctcattgtatctatgaatagtcac

SEQ ID NO: 4226042 - DNA, 25 bp, Homo sapien
tagggtgccgtgtgcgttcatagct

SEQ ID NO: 4226043 - DNA, 25 bp, Homo sapien
tacaaaggtacactcttcaaaggcc

SEQ ID NO: 4226044 - DNA, 25 bp, Homo sapien
taccttaaagatgggaactactgct

SEQ ID NO: 4226045 - DNA, 25 bp, Homo sapien
gaggtcaaactctactgggctagga

SEQ ID NO: 4226046 - DNA, 25 bp, Homo sapien
caagtatccaaactgtacctacatt

SEQ ID NO: 4226047 - DNA, 25 bp, Homo sapien
tatcatttgtagaatcctcagcatt

SEQ ID NO: 4226048 - DNA, 25 bp, Homo sapien
aatggacatgatcttacaaatacac

SEQ ID NO: 4226049 - DNA, 25 bp, Homo sapien
cctcagaatgtagattctagctaag

SEQ ID NO: 4226050 - DNA, 25 bp, Homo sapien
tatcacagctgggtttagcaaactc

SEQ ID NO: 4226051 - DNA, 25 bp, Homo sapien
caatgttcaaccaccaccatgtgtg

SEQ ID NO: 4226052 - DNA, 25 bp, Homo sapien
tacctgtgcagtaaagtcagtggga

SEQ ID NO: 4226053 - DNA, 25 bp, Homo sapien
tattgccatatccagacaacaggag

SEQ ID NO: 4226054 - DNA, 25 bp, Homo sapien
tggcaccacaaaaacaccaagctct

SEQ ID NO: 4226055 - DNA, 25 bp, Homo sapien
ccacaaaaacaccaagctctcctct

SEQ ID NO: 4226056 - DNA, 25 bp, Homo sapien
ggcaccacaaaaacaccaagctctc

SEQ ID NO: 4226057 - DNA, 25 bp, Homo sapien
caccacaaaaacaccaagctctcct

SEQ ID NO: 4226058 - DNA, 25 bp, Homo sapien
gatagctagctagtcaaacctactg

SEQ ID NO: 4226059 - DNA, 25 bp, Homo sapien
tctgccaagcaaccacacgttggtg

SEQ ID NO: 4226060 - DNA, 25 bp, Homo sapien
taataaggccaaaactctgttgagg

SEQ ID NO: 4226061 - DNA, 25 bp, Homo sapien
tcctggctcaaatggtttctggtgc

SEQ ID NO: 4226062 - DNA, 25 bp, Homo sapien
gaaggctgtccaagtctgtgagaag

SEQ ID NO: 4226063 - DNA, 25 bp, Homo sapien
gcaatagtgctgctggagcgctgca

SEQ ID NO: 4226064 - DNA, 25 bp, Homo sapien
tgagaaggctcacacagtagggctt

SEQ ID NO: 4226065 - DNA, 25 bp, Homo sapien
ccttggtgtagcttggaaggctgtc

SEQ ID NO: 4226066 - DNA, 25 bp, Homo sapien
tatactttacatacatgttaccaaa

SEQ ID NO: 4226067 - DNA, 25 bp, Homo sapien
tatcaacgcataataaatataagtg

SEQ ID NO: 4226068 - DNA, 25 bp, Homo sapien
ttaatgtttttatcaacgcataata

SEQ ID NO: 4226069 - DNA, 25 bp, Homo sapien
caacgcataataaatataagtggtg

SEQ ID NO: 4226070 - DNA, 25 bp, Homo sapien
gagctgccccgccacaaggccccag

SEQ ID NO: 4226071 - DNA, 25 bp, Homo sapien
aacctgcggaagcacacggcgcggt

SEQ ID NO: 4226072 - DNA, 25 bp, Homo sapien
agagcacggcgaggtgagagagcgg

SEQ ID NO: 4226073 - DNA, 25 bp, Homo sapien
cggccgccgcgagagagcacggcga

SEQ ID NO: 4226074 - DNA, 25 bp, Homo sapien
caggctcccgcttctgcggctcccc

SEQ ID NO: 4226075 - DNA, 25 bp, Homo sapien
aattccaggctcccgcttctgcggc

SEQ ID NO: 4226076 - DNA, 25 bp, Homo sapien
ttccaggctcccgcttctgcggctc

SEQ ID NO: 4226077 - DNA, 25 bp, Homo sapien
ggctcccgcttctgcggctccccgg

SEQ ID NO: 4226078 - DNA, 25 bp, Homo sapien
agtttcatttcctcacatccggttc

SEQ ID NO: 4226079 - DNA, 25 bp, Homo sapien
tctaatttgcactcattagtttcat

SEQ ID NO: 4226080 - DNA, 25 bp, Homo sapien
ttccagaactatggacaggaagacc

SEQ ID NO: 4226081 - DNA, 25 bp, Homo sapien
caccatttttcatcgattaagttta

SEQ ID NO: 4226082 - DNA, 25 bp, Homo sapien
cagggtcggtttctttgatggttcg

SEQ ID NO: 4226083 - DNA, 25 bp, Homo sapien
tatgccgcttatttggaagggccac

SEQ ID NO: 4226084 - DNA, 25 bp, Homo sapien
cacagatacatcctcgtaatcaggg

SEQ ID NO: 4226085 - DNA, 25 bp, Homo sapien
tgatggttcgcttgattccagacat

SEQ ID NO: 4226086 - DNA, 25 bp, Homo sapien
tgttctttgataatagtctcaatct

SEQ ID NO: 4226087 - DNA, 25 bp, Homo sapien
aaactgttctttgataatagtctca

SEQ ID NO: 4226088 - DNA, 25 bp, Homo sapien
ctggtcaatgacttcaatttcatgt

SEQ ID NO: 4226089 - DNA, 25 bp, Homo sapien
tcttcatttcaagagcaaactgttc

SEQ ID NO: 4226090 - DNA, 25 bp, Homo sapien
catagtagtttgctacaatgcaggc

SEQ ID NO: 4226091 - DNA, 25 bp, Homo sapien
tcatccttcttgcttcaatcagtcg

SEQ ID NO: 4226092 - DNA, 25 bp, Homo sapien
tttgctacaatgcaggcacgcagtt

SEQ ID NO: 4226093 - DNA, 25 bp, Homo sapien
ggcacgcagtttatccatcatcctt

SEQ ID NO: 4226094 - DNA, 25 bp, Homo sapien
gagtctttcctctatatccatattg

SEQ ID NO: 4226095 - DNA, 25 bp, Homo sapien
ctccatgttgtttgagagtctttcc

SEQ ID NO: 4226096 - DNA, 25 bp, Homo sapien
tgtgctgagataaagaatcactttc

SEQ ID NO: 4226097 - DNA, 25 bp, Homo sapien
gatgacctagatggtgattccaaaa

SEQ ID NO: 4226098 - DNA, 25 bp, Homo sapien
atcaacatccattctcattttgaac

SEQ ID NO: 4226099 - DNA, 25 bp, Homo sapien
aaaatcataatcaacatccattctc

SEQ ID NO: 4226100 - DNA, 25 bp, Homo sapien
aaaaaatcataatcaacatccattc

SEQ ID NO: 4226101 - DNA, 25 bp, Homo sapien
gaaaaaaatcataatcaacatccat

SEQ ID NO: 4226102 - DNA, 25 bp, Homo sapien
ttacaaaaagtcgtgaagtctcatc

SEQ ID NO: 4226103 - DNA, 25 bp, Homo sapien
cattgcccactactattgttttctt

SEQ ID NO: 4226104 - DNA, 25 bp, Homo sapien
tatgggagccagtaattctagaagt

SEQ ID NO: 4226105 - DNA, 25 bp, Homo sapien
tcatctgtgagatcagcattccgct

SEQ ID NO: 4226106 - DNA, 25 bp, Homo sapien
ctacgggaccctcggacatatacca

SEQ ID NO: 4226107 - DNA, 25 bp, Homo sapien
catccacttatgagttgactggtca

SEQ ID NO: 4226108 - DNA, 25 bp, Homo sapien
aaatgattaatgctgggttctctac

SEQ ID NO: 4226109 - DNA, 25 bp, Homo sapien
aaggtcatttggtttatagctagga

SEQ ID NO: 4226110 - DNA, 25 bp, Homo sapien
taaatgtgatcaaggaagacatcca

SEQ ID NO: 4226111 - DNA, 25 bp, Homo sapien
ggtggtctggaagccataaatgtga

SEQ ID NO: 4226112 - DNA, 25 bp, Homo sapien
taatttccccagtcacccttggcag

SEQ ID NO: 4226113 - DNA, 25 bp, Homo sapien
aacagccaccatcgcttgaaagggt

SEQ ID NO: 4226114 - DNA, 25 bp, Homo sapien
agtttcaccccaatccaactattct

SEQ ID NO: 4226115 - DNA, 25 bp, Homo sapien
tcttgcccacaaaacttttcaccag

SEQ ID NO: 4226116 - DNA, 25 bp, Homo sapien
caactattctttgacttcacggaga

SEQ ID NO: 4226117 - DNA, 25 bp, Homo sapien
catcactgctcttatatacgtatat

SEQ ID NO: 4226118 - DNA, 25 bp, Homo sapien
aaagccaaggccccgtgctcatctt

SEQ ID NO: 4226119 - DNA, 25 bp, Homo sapien
catatctagtcaccactatcttgta

SEQ ID NO: 4226120 - DNA, 25 bp, Homo sapien
cacagtccctttatcacgccctgag

SEQ ID NO: 4226121 - DNA, 25 bp, Homo sapien
atcacgccctgagcctagcacatat

SEQ ID NO: 4226122 - DNA, 25 bp, Homo sapien
ctggcccgctccagtttcacacaca

SEQ ID NO: 4226123 - DNA, 25 bp, Homo sapien
gctggcccgctccagtttcacacac

SEQ ID NO: 4226124 - DNA, 25 bp, Homo sapien
tggcccgctccagtttcacacacac

SEQ ID NO: 4226125 - DNA, 25 bp, Homo sapien
gatacaggccatgaggtatgctccc

SEQ ID NO: 4226126 - DNA, 25 bp, Homo sapien
taattggcatttgacagatacaggc

SEQ ID NO: 4226127 - DNA, 25 bp, Homo sapien
tgaatgtcactagagagcgaggatc

SEQ ID NO: 4226128 - DNA, 25 bp, Homo sapien
tgtcattttcacagacgagggaact

SEQ ID NO: 4226129 - DNA, 25 bp, Homo sapien
cagcctcttctggtcaggtgaaaag

SEQ ID NO: 4226130 - DNA, 25 bp, Homo sapien
tgaacttgaactctgacgggaaact

SEQ ID NO: 4226131 - DNA, 25 bp, Homo sapien
tctggtcaggtgaaaaggaggctct

SEQ ID NO: 4226132 - DNA, 25 bp, Homo sapien
tctgacgggaaactcaccccagcct

SEQ ID NO: 4226133 - DNA, 25 bp, Homo sapien
tgtatgatatctatccgcttgttct

SEQ ID NO: 4226134 - DNA, 25 bp, Homo sapien
gtatgatatctatccgcttgttctg

SEQ ID NO: 4226135 - DNA, 25 bp, Homo sapien
tatgatatctatccgcttgttctgg

SEQ ID NO: 4226136 - DNA, 25 bp, Homo sapien
atgtatgatatctatccgcttgttc

SEQ ID NO: 4226137 - DNA, 25 bp, Homo sapien
gagacttcaaaactagggagcaatg

SEQ ID NO: 4226138 - DNA, 25 bp, Homo sapien
gatcaattgtagctggtaaaaagag

SEQ ID NO: 4226139 - DNA, 25 bp, Homo sapien
agggagcaatgttttgttacaatac

SEQ ID NO: 4226140 - DNA, 25 bp, Homo sapien
gtccttaaccgccatgctattcaag

SEQ ID NO: 4226141 - DNA, 25 bp, Homo sapien
gagttgtctgacagagggttgccac

SEQ ID NO: 4226142 - DNA, 25 bp, Homo sapien
tcttgcagaagacctaacactccca

SEQ ID NO: 4226143 - DNA, 25 bp, Homo sapien
tctccccgtggaaagacaacacttc

SEQ ID NO: 4226144 - DNA, 25 bp, Homo sapien
aatggctgcaccataaaccacatgg

SEQ ID NO: 4226145 - DNA, 25 bp, Homo sapien
cagatagttctaggtatgcggcgtt

SEQ ID NO: 4226146 - DNA, 25 bp, Homo sapien
atcagatagttctaggtatgcggcg

SEQ ID NO: 4226147 - DNA, 25 bp, Homo sapien
tagttctaggtatgcggcgttattt

SEQ ID NO: 4226148 - DNA, 25 bp, Homo sapien
agatcagatagttctaggtatgcgg

SEQ ID NO: 4226149 - DNA, 25 bp, Homo sapien
tctgagcccagtgcaacataaggta

SEQ ID NO: 4226150 - DNA, 25 bp, Homo sapien
gggtctcaaggccaatacacagcaa

SEQ ID NO: 4226151 - DNA, 25 bp, Homo sapien
caacacaggtgtttagggtctcaag

SEQ ID NO: 4226152 - DNA, 25 bp, Homo sapien
taccgtacaaagaaggatcacaagg

SEQ ID NO: 4226153 - DNA, 25 bp, Homo sapien
tcaatgtgttggcttgggaagtgct

SEQ ID NO: 4226154 - DNA, 25 bp, Homo sapien
aatgcaggatatagtaatttcacac

SEQ ID NO: 4226155 - DNA, 25 bp, Homo sapien
tgctgtgctctagggtaatgggtaa

SEQ ID NO: 4226156 - DNA, 25 bp, Homo sapien
aagatcacttcaggctttaacagcc

SEQ ID NO: 4226157 - DNA, 25 bp, Homo sapien
ccaagagtctgcaagccagtataag

SEQ ID NO: 4226158 - DNA, 25 bp, Homo sapien
aagagtctgcaagccagtataagtt

SEQ ID NO: 4226159 - DNA, 25 bp, Homo sapien
tccaagagtctgcaagccagtataa

SEQ ID NO: 4226160 - DNA, 25 bp, Homo sapien
caagagtctgcaagccagtataagt

SEQ ID NO: 4226161 - DNA, 25 bp, Homo sapien
tcagagatgtcagactccgaggact

SEQ ID NO: 4226162 - DNA, 25 bp, Homo sapien
gatagatacagtcttctccgagaga

SEQ ID NO: 4226163 - DNA, 25 bp, Homo sapien
tcgggtactggctcatgtgactgct

SEQ ID NO: 4226164 - DNA, 25 bp, Homo sapien
ctttctccacagaggtatcgggtac

SEQ ID NO: 4226165 - DNA, 25 bp, Homo sapien
atgaaagaggcaaacggcaagtcat

SEQ ID NO: 4226166 - DNA, 25 bp, Homo sapien
tgagatgaaagaggcaaacggcaag

SEQ ID NO: 4226167 - DNA, 25 bp, Homo sapien
cttgagatgaaagaggcaaacggca

SEQ ID NO: 4226168 - DNA, 25 bp, Homo sapien
agatgaaagaggcaaacggcaagtc

SEQ ID NO: 4226169 - DNA, 25 bp, Homo sapien
tggcaaagcataaaacggagtgtgt

SEQ ID NO: 4226170 - DNA, 25 bp, Homo sapien
cataaaacggagtgtgtcgttcagc

SEQ ID NO: 4226171 - DNA, 25 bp, Homo sapien
tctttccaatgaagatggcaaagca

SEQ ID NO: 4226172 - DNA, 25 bp, Homo sapien
ggagtgtgtcgttcagcttcagtgc

SEQ ID NO: 4226173 - DNA, 25 bp, Homo sapien
ctgacacaatcttgcagctcatggt

SEQ ID NO: 4226174 - DNA, 25 bp, Homo sapien
ggattaggaacctgactttgtggaa

SEQ ID NO: 4226175 - DNA, 25 bp, Homo sapien
acaatcttgcagctcatggtgatgg

SEQ ID NO: 4226176 - DNA, 25 bp, Homo sapien
tccaggtgactcaggattaggaacc

SEQ ID NO: 4226177 - DNA, 25 bp, Homo sapien
gggttcgaggcaatggtgatgggct

SEQ ID NO: 4226178 - DNA, 25 bp, Homo sapien
gtcggggttcgaggcaatggtgatg

SEQ ID NO: 4226179 - DNA, 25 bp, Homo sapien
tgatgggcttggagttgatattggg

SEQ ID NO: 4226180 - DNA, 25 bp, Homo sapien
gtggaagtcggggttcgaggcaatg

SEQ ID NO: 4226181 - DNA, 25 bp, Homo sapien
taacagagccggcagtgccttgctt

SEQ ID NO: 4226182 - DNA, 25 bp, Homo sapien
gcttgtccatgataacataaggatt

SEQ ID NO: 4226183 - DNA, 25 bp, Homo sapien
ggctgcttgtccatgataacataag

SEQ ID NO: 4226184 - DNA, 25 bp, Homo sapien
ttattaataacagagccggcagtgc

SEQ ID NO: 4226185 - DNA, 25 bp, Homo sapien
acctgagaagccgtggagatcttgt

SEQ ID NO: 4226186 - DNA, 25 bp, Homo sapien
gaagccgtggagatcttgtttgtag

SEQ ID NO: 4226187 - DNA, 25 bp, Homo sapien
gagacctgagaagccgtggagatct

SEQ ID NO: 4226188 - DNA, 25 bp, Homo sapien
ttgacagtagatgttacaaaactac

SEQ ID NO: 4226189 - DNA, 25 bp, Homo sapien
tatgttcagaaaccggcaaagtggc

SEQ ID NO: 4226190 - DNA, 25 bp, Homo sapien
ttcgatacagcctggttaatacggg

SEQ ID NO: 4226191 - DNA, 25 bp, Homo sapien
tgcctgtaaccgcagtaccctggca

SEQ ID NO: 4226192 - DNA, 25 bp, Homo sapien
gaaatttgcgtcatcaactgacaca

SEQ ID NO: 4226193 - DNA, 25 bp, Homo sapien
gctttgaaccttagggtgactccca

SEQ ID NO: 4226194 - DNA, 25 bp, Homo sapien
caaagaggtggcatagatgcaaaca

SEQ ID NO: 4226195 - DNA, 25 bp, Homo sapien
gaggtggcatagatgcaaacaaaga

SEQ ID NO: 4226196 - DNA, 25 bp, Homo sapien
tgactcccaattgggcaaagaggtg

SEQ ID NO: 4226197 - DNA, 25 bp, Homo sapien
tgtgaccccctttcacagtcacata

SEQ ID NO: 4226198 - DNA, 25 bp, Homo sapien
cagtcacatactgcgggagtggtga

SEQ ID NO: 4226199 - DNA, 25 bp, Homo sapien
gggcaatcccttctccaggagttat

SEQ ID NO: 4226200 - DNA, 25 bp, Homo sapien
gcacgtgaggggcttcaccaggttc

SEQ ID NO: 4226201 - DNA, 25 bp, Homo sapien
ggtaacagcccgaacatcagaggta

SEQ ID NO: 4226202 - DNA, 25 bp, Homo sapien
taaacaagtcaacagcggatccctt

SEQ ID NO: 4226203 - DNA, 25 bp, Homo sapien
cacaggttcttatgggatcatcaac

SEQ ID NO: 4226204 - DNA, 25 bp, Homo sapien
ggatcctttgcaatacataacgcgg

SEQ ID NO: 4226205 - DNA, 25 bp, Homo sapien
tagagtatacctgccaaaagttgag

SEQ ID NO: 4226206 - DNA, 25 bp, Homo sapien
aggaaactgtttaacctctgagcca

SEQ ID NO: 4226207 - DNA, 25 bp, Homo sapien
tgaggtaatttaaccctgatgctct

SEQ ID NO: 4226208 - DNA, 25 bp, Homo sapien
cataccaaggttagagacaaccact

SEQ ID NO: 4226209 - DNA, 25 bp, Homo sapien
acaggagcccgacaccatgtccacc

SEQ ID NO: 4226210 - DNA, 25 bp, Homo sapien
caggagcccgacaccatgtccacct

SEQ ID NO: 4226211 - DNA, 25 bp, Homo sapien
tacaggagcccgacaccatgtccac

SEQ ID NO: 4226212 - DNA, 25 bp, Homo sapien
gagttttaccatcaatcccctcatc

SEQ ID NO: 4226213 - DNA, 25 bp, Homo sapien
cagacagatctggttttccaggtta

SEQ ID NO: 4226214 - DNA, 25 bp, Homo sapien
gaaacagtgcaggtttcggtaagca

SEQ ID NO: 4226215 - DNA, 25 bp, Homo sapien
taaactatagcgtcacaaagaggaa

SEQ ID NO: 4226216 - DNA, 25 bp, Homo sapien
tgctttggcaactccttgggttaca

SEQ ID NO: 4226217 - DNA, 25 bp, Homo sapien
tgctttggcccaactgctttggaga

SEQ ID NO: 4226218 - DNA, 25 bp, Homo sapien
cttggttaaggtctgcactggctga

SEQ ID NO: 4226219 - DNA, 25 bp, Homo sapien
tgaaggtaaagcagacccaactggt

SEQ ID NO: 4226220 - DNA, 25 bp, Homo sapien
tcttctgaggaccagcggcagtaac

SEQ ID NO: 4226221 - DNA, 25 bp, Homo sapien
tccactcttctgaggaccagcggca

SEQ ID NO: 4226222 - DNA, 25 bp, Homo sapien
gatccactcttctgaggaccagcgg

SEQ ID NO: 4226223 - DNA, 25 bp, Homo sapien
cactcttctgaggaccagcggcagt

SEQ ID NO: 4226224 - DNA, 25 bp, Homo sapien
gctggtagctgcaacgttgccatta

SEQ ID NO: 4226225 - DNA, 25 bp, Homo sapien
caggaggcaaatttgccaagttggc

SEQ ID NO: 4226226 - DNA, 25 bp, Homo sapien
tagcattgttcgtagctcgcaggat

SEQ ID NO: 4226227 - DNA, 25 bp, Homo sapien
ccaagttggccaaattagtggctgg

SEQ ID NO: 4226228 - DNA, 25 bp, Homo sapien
gtgagagtggaactgacacatcatg

SEQ ID NO: 4226229 - DNA, 25 bp, Homo sapien
aaacaccaagtgagagtggaactga

SEQ ID NO: 4226230 - DNA, 25 bp, Homo sapien
gacacatcatggtcaatgaacgcaa

SEQ ID NO: 4226231 - DNA, 25 bp, Homo sapien
catggtcaatgaacgcaaggatgat

SEQ ID NO: 4226232 - DNA, 25 bp, Homo sapien
gagtttgcttgaggatgtaagatgt

SEQ ID NO: 4226233 - DNA, 25 bp, Homo sapien
gatgtaagatgtgtaagtcaggtgc

SEQ ID NO: 4226234 - DNA, 25 bp, Homo sapien
atgtaagatgtgtaagtcaggtgct

SEQ ID NO: 4226235 - DNA, 25 bp, Homo sapien
gtttgcttgaggatgtaagatgtgt

SEQ ID NO: 4226236 - DNA, 25 bp, Homo sapien
gacccagtggtgagttgttttccag

SEQ ID NO: 4226237 - DNA, 25 bp, Homo sapien
tgtccagagatgacttttagcgttt

SEQ ID NO: 4226238 - DNA, 25 bp, Homo sapien
tagcgtttgttgtccttgtgcagaa

SEQ ID NO: 4226239 - DNA, 25 bp, Homo sapien
tcccagtgttccttggaccactgac

SEQ ID NO: 4226240 - DNA, 25 bp, Homo sapien
gtggcagttgtgataacccctcctg

SEQ ID NO: 4226241 - DNA, 25 bp, Homo sapien
accgtttgctgagagggccacggca

SEQ ID NO: 4226242 - DNA, 25 bp, Homo sapien
tactctcagcattgtggttccaggc

SEQ ID NO: 4226243 - DNA, 25 bp, Homo sapien
cacagtcttcaaggtgctatcggat

SEQ ID NO: 4226244 - DNA, 25 bp, Homo sapien
catgtctcattaggattctctactg

SEQ ID NO: 4226245 - DNA, 25 bp, Homo sapien
tcatgtctcattaggattctctact

SEQ ID NO: 4226246 - DNA, 25 bp, Homo sapien
gattctctactgacatgctatttct

SEQ ID NO: 4226247 - DNA, 25 bp, Homo sapien
tctctactgacatgctatttctcac

SEQ ID NO: 4226248 - DNA, 25 bp, Homo sapien
caagtctgtgggcttccaagacgat

SEQ ID NO: 4226249 - DNA, 25 bp, Homo sapien
tgcaggagatgaagcttgagaagtc

SEQ ID NO: 4226250 - DNA, 25 bp, Homo sapien
taggcactttagaggaatcttccag

SEQ ID NO: 4226251 - DNA, 25 bp, Homo sapien
tgtatgttcaagaagctgcaaagca

SEQ ID NO: 4226252 - DNA, 25 bp, Homo sapien
ctaagtataatgatgctacggcaag

SEQ ID NO: 4226253 - DNA, 25 bp, Homo sapien
gcacaggcaaatgtcaccaacacaa

SEQ ID NO: 4226254 - DNA, 25 bp, Homo sapien
tgatgctacggcaagcacaggcaaa

SEQ ID NO: 4226255 - DNA, 25 bp, Homo sapien
gcaaatgtcaccaacacaaccaaga

SEQ ID NO: 4226256 - DNA, 25 bp, Homo sapien
aaacatctactacatggccggcata

SEQ ID NO: 4226257 - DNA, 25 bp, Homo sapien
tacatggccggcataatggttaagt

SEQ ID NO: 4226258 - DNA, 25 bp, Homo sapien
gaaaagcgaccaaggaaacagtcac

SEQ ID NO: 4226259 - DNA, 25 bp, Homo sapien
cataatggttaagtgctaaggctct

SEQ ID NO: 4226260 - DNA, 25 bp, Homo sapien
aaaactaggaggacatattctcaga

SEQ ID NO: 4226261 - DNA, 25 bp, Homo sapien
tattctcagaatatacacatggact

SEQ ID NO: 4226262 - DNA, 25 bp, Homo sapien
aactaggaggacatattctcagaat

SEQ ID NO: 4226263 - DNA, 25 bp, Homo sapien
aaaaactaggaggacatattctcag

SEQ ID NO: 4226264 - DNA, 25 bp, Homo sapien
gtgttaatgactacttagtaaatgc

SEQ ID NO: 4226265 - DNA, 25 bp, Homo sapien
aaatatcatctattaggtgttaatg

SEQ ID NO: 4226266 - DNA, 25 bp, Homo sapien
aaaagattacttctctagttcagtg

SEQ ID NO: 4226267 - DNA, 25 bp, Homo sapien
catctattaggtgttaatgactact

SEQ ID NO: 4226268 - DNA, 25 bp, Homo sapien
acggcggtgacggccacacagcaca

SEQ ID NO: 4226269 - DNA, 25 bp, Homo sapien
ggcggtgacggccacacagcacaca

SEQ ID NO: 4226270 - DNA, 25 bp, Homo sapien
tgacggcggtgacggccacacagca

SEQ ID NO: 4226271 - DNA, 25 bp, Homo sapien
ctgacggcggtgacggccacacagc

SEQ ID NO: 4226272 - DNA, 25 bp, Homo sapien
gggtccgaaacaacacagttcagga

SEQ ID NO: 4226273 - DNA, 25 bp, Homo sapien
gaagacacgggagccattccttcag

SEQ ID NO: 4226274 - DNA, 25 bp, Homo sapien
ttttcgttacagaactgaccgtaga

SEQ ID NO: 4226275 - DNA, 25 bp, Homo sapien
gaccgtagatgaagacacgggagcc

SEQ ID NO: 4226276 - DNA, 25 bp, Homo sapien
cagaactgaccgtagatgaagacac

SEQ ID NO: 4226277 - DNA, 25 bp, Homo sapien
gtaggcacgagggacgtggcgctga

SEQ ID NO: 4226278 - DNA, 25 bp, Homo sapien
gcagccttgcaggttcccacggtgg

SEQ ID NO: 4226279 - DNA, 25 bp, Homo sapien
gtttggtgtaggcacgagggacgtg

SEQ ID NO: 4226280 - DNA, 25 bp, Homo sapien
gccttgcaggttcccacggtggcct

SEQ ID NO: 4226281 - DNA, 25 bp, Homo sapien
tgcaggcacaaagacaccatagctc

SEQ ID NO: 4226282 - DNA, 25 bp, Homo sapien
tcaactaaggcaatgtggtctcagg

SEQ ID NO: 4226283 - DNA, 25 bp, Homo sapien
ggtacacttttctgaggccctctag

SEQ ID NO: 4226284 - DNA, 25 bp, Homo sapien
gcctgtggtccctgataatcaagag

SEQ ID NO: 4226285 - DNA, 25 bp, Homo sapien
gcctcttatccaaaggcagtaaggg

SEQ ID NO: 4226286 - DNA, 25 bp, Homo sapien
ccagccgtatgctggctggtatcaa

SEQ ID NO: 4226287 - DNA, 25 bp, Homo sapien
tactccctatactagaagttggtca

SEQ ID NO: 4226288 - DNA, 25 bp, Homo sapien
cagtttttccggtagaccagtgcca

SEQ ID NO: 4226289 - DNA, 25 bp, Homo sapien
cccagcccctagatggggtcttcag

SEQ ID NO: 4226290 - DNA, 25 bp, Homo sapien
tcaaagtcaaatctagccctagatg

SEQ ID NO: 4226291 - DNA, 25 bp, Homo sapien
tagatggggcccagaaaagggtata

SEQ ID NO: 4226292 - DNA, 25 bp, Homo sapien
gtgccccctttacggcacttatata

SEQ ID NO: 4226293 - DNA, 25 bp, Homo sapien
tgcttcgggaaagtctcttatcctc

SEQ ID NO: 4226294 - DNA, 25 bp, Homo sapien
tgctacccatattttgtcatggagg

SEQ ID NO: 4226295 - DNA, 25 bp, Homo sapien
caggtgcttcgggaaagtctcttat

SEQ ID NO: 4226296 - DNA, 25 bp, Homo sapien
tcctctgtgctacccatattttgtc

SEQ ID NO: 4226297 - DNA, 25 bp, Homo sapien
gtcaggacggcctgctgcggactgg

SEQ ID NO: 4226298 - DNA, 25 bp, Homo sapien
tgctgcggactggactgactggagt

SEQ ID NO: 4226299 - DNA, 25 bp, Homo sapien
ctgggaatcgtcaggacggcctgct

SEQ ID NO: 4226300 - DNA, 25 bp, Homo sapien
cggactggactgactggagtgaatc

SEQ ID NO: 4226301 - DNA, 25 bp, Homo sapien
aggatcgtctgcacccctccagatg

SEQ ID NO: 4226302 - DNA, 25 bp, Homo sapien
acccctccagatgtgtttacgctga

SEQ ID NO: 4226303 - DNA, 25 bp, Homo sapien
cctccagatgtgtttacgctgagtg

SEQ ID NO: 4226304 - DNA, 25 bp, Homo sapien
gtctgcacccctccagatgtgttta

SEQ ID NO: 4226305 - DNA, 25 bp, Homo sapien
tacaggcagaatggcaggtggcttg

SEQ ID NO: 4226306 - DNA, 25 bp, Homo sapien
cagctacaggcagaatggcaggtgg

SEQ ID NO: 4226307 - DNA, 25 bp, Homo sapien
gctacaggcagaatggcaggtggct

SEQ ID NO: 4226308 - DNA, 25 bp, Homo sapien
ctacaggcagaatggcaggtggctt

SEQ ID NO: 4226309 - DNA, 25 bp, Homo sapien
actcggtccaggtgtttctggttca

SEQ ID NO: 4226310 - DNA, 25 bp, Homo sapien
tcctgagagaggcaactcggtccag

SEQ ID NO: 4226311 - DNA, 25 bp, Homo sapien
tgagagaggcaactcggtccaggtg

SEQ ID NO: 4226312 - DNA, 25 bp, Homo sapien
catagtttcccagctcagaactttc

SEQ ID NO: 4226313 - DNA, 25 bp, Homo sapien
agtttcccagctcagaactttcttc

SEQ ID NO: 4226314 - DNA, 25 bp, Homo sapien
cccagctcagaactttcttctgttt

SEQ ID NO: 4226315 - DNA, 25 bp, Homo sapien
taatgacatagtttcccagctcaga

SEQ ID NO: 4226316 - DNA, 25 bp, Homo sapien
gtcaagactaagatcccaggaatgg

SEQ ID NO: 4226317 - DNA, 25 bp, Homo sapien
tcttagggttattacagttcacgcc

SEQ ID NO: 4226318 - DNA, 25 bp, Homo sapien
aaaattctgtatacccatcttaggg

SEQ ID NO: 4226319 - DNA, 25 bp, Homo sapien
taagtttctattgtccccagcagtc

SEQ ID NO: 4226320 - DNA, 25 bp, Homo sapien
taggagttgctggatagtttctaaa

SEQ ID NO: 4226321 - DNA, 25 bp, Homo sapien
tgctggatagtttctaaatggtcta

SEQ ID NO: 4226322 - DNA, 25 bp, Homo sapien
atcttctttactactgcagttagga

SEQ ID NO: 4226323 - DNA, 25 bp, Homo sapien
ttctttactactgcagttaggagtt

SEQ ID NO: 4226324 - DNA, 25 bp, Homo sapien
gatgacaccagctatcacacaggag

SEQ ID NO: 4226325 - DNA, 25 bp, Homo sapien
cagatgcagcctaacacaggagggc

SEQ ID NO: 4226326 - DNA, 25 bp, Homo sapien
tgagcatgctcctgtgtccgtaggc

SEQ ID NO: 4226327 - DNA, 25 bp, Homo sapien
ctaatgatgggcagtgacgcagcac

SEQ ID NO: 4226328 - DNA, 25 bp, Homo sapien
tgttccagccatagtactgctccac

SEQ ID NO: 4226329 - DNA, 25 bp, Homo sapien
caatgttccagccatagtactgctc

SEQ ID NO: 4226330 - DNA, 25 bp, Homo sapien
tccagccatagtactgctccacaga

SEQ ID NO: 4226331 - DNA, 25 bp, Homo sapien
agccatagtactgctccacagactt

SEQ ID NO: 4226332 - DNA, 25 bp, Homo sapien
ggcacgcctgaaagtcagctggata

SEQ ID NO: 4226333 - DNA, 25 bp, Homo sapien
ccactgtaaggactcaatactcgag

SEQ ID NO: 4226334 - DNA, 25 bp, Homo sapien
tacaataaaacagcaactcctaggt

SEQ ID NO: 4226335 - DNA, 25 bp, Homo sapien
aagacaaggtttctggaggcagcca

SEQ ID NO: 4226336 - DNA, 25 bp, Homo sapien
ggctcgctgtcgatctgggtcagca

SEQ ID NO: 4226337 - DNA, 25 bp, Homo sapien
caggtggtgaaatctcggattcttc

SEQ ID NO: 4226338 - DNA, 25 bp, Homo sapien
tgacagcggcaccagtgagcgatgt

SEQ ID NO: 4226339 - DNA, 25 bp, Homo sapien
tggagtccccgtcattcctcaggct

SEQ ID NO: 4226340 - DNA, 25 bp, Homo sapien
tgcctatatacctttaatcccttgc

SEQ ID NO: 4226341 - DNA, 25 bp, Homo sapien
aaatgcttcttctgcctatatacct

SEQ ID NO: 4226342 - DNA, 25 bp, Homo sapien
tcttctgcctatatacctttaatcc

SEQ ID NO: 4226343 - DNA, 25 bp, Homo sapien
cttgctcctacaccccatggccctg

SEQ ID NO: 4226344 - DNA, 25 bp, Homo sapien
agacaagccctcatgctgttgatat

SEQ ID NO: 4226345 - DNA, 25 bp, Homo sapien
gaagtcagacaagccctcatgctgt

SEQ ID NO: 4226346 - DNA, 25 bp, Homo sapien
gcgaagtcagacaagccctcatgct

SEQ ID NO: 4226347 - DNA, 25 bp, Homo sapien
acagcgaagtcagacaagccctcat

SEQ ID NO: 4226348 - DNA, 25 bp, Homo sapien
actttccgtctccaagagacccatg

SEQ ID NO: 4226349 - DNA, 25 bp, Homo sapien
caggcaagcagtgttacaacagctg

SEQ ID NO: 4226350 - DNA, 25 bp, Homo sapien
aatgacaggcaagcagtgttacaac

SEQ ID NO: 4226351 - DNA, 25 bp, Homo sapien
ctgtggggccaacggaagaggactt

SEQ ID NO: 4226352 - DNA, 25 bp, Homo sapien
ctccagtttgcggcagaggttgtca

SEQ ID NO: 4226353 - DNA, 25 bp, Homo sapien
tcctccagtttgcggcagaggttgt

SEQ ID NO: 4226354 - DNA, 25 bp, Homo sapien
cagtttgcggcagaggttgtcagca

SEQ ID NO: 4226355 - DNA, 25 bp, Homo sapien
tttgcggcagaggttgtcagcagag

SEQ ID NO: 4226356 - DNA, 25 bp, Homo sapien
tgatgtttatcttcactggctcgga

SEQ ID NO: 4226357 - DNA, 25 bp, Homo sapien
gtgtgacatccccaataaattcaga

SEQ ID NO: 4226358 - DNA, 25 bp, Homo sapien
tttatcttcactggctcggagaggc

SEQ ID NO: 4226359 - DNA, 25 bp, Homo sapien
tgacatccccaataaattcagaccc

SEQ ID NO: 4226360 - DNA, 25 bp, Homo sapien
agctggtctgctgcatgaactatta

SEQ ID NO: 4226361 - DNA, 25 bp, Homo sapien
tgaacgtctgaacatctagctctga

SEQ ID NO: 4226362 - DNA, 25 bp, Homo sapien
tctgggtctgtgaagctgaacgtct

SEQ ID NO: 4226363 - DNA, 25 bp, Homo sapien
tgaactattaacaccacaaccccta

SEQ ID NO: 4226364 - DNA, 25 bp, Homo sapien
agcagggtggataaatacctctctc

SEQ ID NO: 4226365 - DNA, 25 bp, Homo sapien
ggataaatacctctctcctgtatag

SEQ ID NO: 4226366 - DNA, 25 bp, Homo sapien
tgaagagctgttaggctccagcagg

SEQ ID NO: 4226367 - DNA, 25 bp, Homo sapien
tcctgtatagtaaggcaggtgcacg

SEQ ID NO: 4226368 - DNA, 25 bp, Homo sapien
catgcaaagcgatgcctggttggaa

SEQ ID NO: 4226369 - DNA, 25 bp, Homo sapien
tgcaaagcgatgcctggttggaagg

SEQ ID NO: 4226370 - DNA, 25 bp, Homo sapien
ctgacatgcaaagcgatgcctggtt

SEQ ID NO: 4226371 - DNA, 25 bp, Homo sapien
gacatgcaaagcgatgcctggttgg

SEQ ID NO: 4226372 - DNA, 25 bp, Homo sapien
cgtttgttcgtatcgctgctttaga

SEQ ID NO: 4226373 - DNA, 25 bp, Homo sapien
tatcgctgctttagaaacagcctct

SEQ ID NO: 4226374 - DNA, 25 bp, Homo sapien
gcctctctccaaacaagcatacctc

SEQ ID NO: 4226375 - DNA, 25 bp, Homo sapien
aaagcagaagaaagccgtttgttcg

SEQ ID NO: 4226376 - DNA, 25 bp, Homo sapien
gatcatgtcctccaccacggacgca

SEQ ID NO: 4226377 - DNA, 25 bp, Homo sapien
ccacggacgcatacacgttcctgtg

SEQ ID NO: 4226378 - DNA, 25 bp, Homo sapien
ttcctgtggagtgccacgggctgca

SEQ ID NO: 4226379 - DNA, 25 bp, Homo sapien
ccacgggctgcagggtgatcccaat

SEQ ID NO: 4226380 - DNA, 25 bp, Homo sapien
ctgttgtgagaagctgtctggtatc

SEQ ID NO: 4226381 - DNA, 25 bp, Homo sapien
gatatcattcaccagctgttctgta

SEQ ID NO: 4226382 - DNA, 25 bp, Homo sapien
aactgccaaagcctgtctcaggata

SEQ ID NO: 4226383 - DNA, 25 bp, Homo sapien
gctgtctggtatccaactgccaaag

SEQ ID NO: 4226384 - DNA, 25 bp, Homo sapien
ggattgatgtaagtataaaacacct

SEQ ID NO: 4226385 - DNA, 25 bp, Homo sapien
gaaagaggtgtaagcctcacaccac

SEQ ID NO: 4226386 - DNA, 25 bp, Homo sapien
catgggcaattcaactgttaggaaa

SEQ ID NO: 4226387 - DNA, 25 bp, Homo sapien
taaaacaccttcatgggcaattcaa

SEQ ID NO: 4226388 - DNA, 25 bp, Homo sapien
tataaacctctgagcaaagctgagt

SEQ ID NO: 4226389 - DNA, 25 bp, Homo sapien
ccaatgagacctgagtcggaagtcc

SEQ ID NO: 4226390 - DNA, 25 bp, Homo sapien
ctttcagggcctaggaacagactga

SEQ ID NO: 4226391 - DNA, 25 bp, Homo sapien
taatatatgcaacgcttggccctcg

SEQ ID NO: 4226392 - DNA, 25 bp, Homo sapien
gaaagctgagtcaaagcaccacaaa

SEQ ID NO: 4226393 - DNA, 25 bp, Homo sapien
gaccgaaagctgagtcaaagcacca

SEQ ID NO: 4226394 - DNA, 25 bp, Homo sapien
tcagcagaccgaaagctgagtcaaa

SEQ ID NO: 4226395 - DNA, 25 bp, Homo sapien
cagaccgaaagctgagtcaaagcac

SEQ ID NO: 4226396 - DNA, 25 bp, Homo sapien
catgtgtttgtttgtgaggaagtcc

SEQ ID NO: 4226397 - DNA, 25 bp, Homo sapien
tggcctggtgaatattactcactgt

SEQ ID NO: 4226398 - DNA, 25 bp, Homo sapien
aatggcctggtgaatattactcact

SEQ ID NO: 4226399 - DNA, 25 bp, Homo sapien
gcctggtgaatattactcactgtaa

SEQ ID NO: 4226400 - DNA, 25 bp, Homo sapien
cctgcttctccagggcacctcactc

SEQ ID NO: 4226401 - DNA, 25 bp, Homo sapien
gcttctccagggcacctcactccgc

SEQ ID NO: 4226402 - DNA, 25 bp, Homo sapien
gcctgcttctccagggcacctcact

SEQ ID NO: 4226403 - DNA, 25 bp, Homo sapien
cttcaaagcctgcttctccagggca

SEQ ID NO: 4226404 - DNA, 25 bp, Homo sapien
caatccacggataggacagacgacc

SEQ ID NO: 4226405 - DNA, 25 bp, Homo sapien
aaagactgcagaaacgctggccgac

SEQ ID NO: 4226406 - DNA, 25 bp, Homo sapien
gaacagatttctgactgggcatgca

SEQ ID NO: 4226407 - DNA, 25 bp, Homo sapien
tgggagagaaccacctgctgaaggc

SEQ ID NO: 4226408 - DNA, 25 bp, Homo sapien
taacacacgtggagactgctaaatc

SEQ ID NO: 4226409 - DNA, 25 bp, Homo sapien
tcgaccttgcttatagcagttcagg

SEQ ID NO: 4226410 - DNA, 25 bp, Homo sapien
agtgcgtgccctatgccctgctgag

SEQ ID NO: 4226411 - DNA, 25 bp, Homo sapien
atagattccttctgtacttgcagcc

SEQ ID NO: 4226412 - DNA, 25 bp, Homo sapien
aaaagatttattgtagacaattttg

SEQ ID NO: 4226413 - DNA, 25 bp, Homo sapien
attttgttacacaattatacacatt

SEQ ID NO: 4226414 - DNA, 25 bp, Homo sapien
ttttgttacacaattatacacatta

SEQ ID NO: 4226415 - DNA, 25 bp, Homo sapien
tcctttatcttatacggttgcaaca

SEQ ID NO: 4226416 - DNA, 25 bp, Homo sapien
taaacatatcaataagactctacac

SEQ ID NO: 4226417 - DNA, 25 bp, Homo sapien
ggagaaccctgcctgagtaccatgc

SEQ ID NO: 4226418 - DNA, 25 bp, Homo sapien
gcctgagtaccatgcttcaaactca

SEQ ID NO: 4226419 - DNA, 25 bp, Homo sapien
tcccgctaacataaggatgatgagc

SEQ ID NO: 4226420 - DNA, 25 bp, Homo sapien
ttatggccaagatgagcctcatgtt

SEQ ID NO: 4226421 - DNA, 25 bp, Homo sapien
cagttcttgggattgaatgactcac

SEQ ID NO: 4226422 - DNA, 25 bp, Homo sapien
gatgagcagggcactatcatacaca

SEQ ID NO: 4226423 - DNA, 25 bp, Homo sapien
gaaccgaattggtccatggaagctg

SEQ ID NO: 4226424 - DNA, 25 bp, Homo sapien
tgaggatcaagtcagttgggaaccg

SEQ ID NO: 4226425 - DNA, 25 bp, Homo sapien
aatcttgggccgtcacctgcatgac

SEQ ID NO: 4226426 - DNA, 25 bp, Homo sapien
gatttcccaggatgcgtgagcactt

SEQ ID NO: 4226427 - DNA, 25 bp, Homo sapien
tcccgtgtgggtgagcccttcagag

SEQ ID NO: 4226428 - DNA, 25 bp, Homo sapien
tggcctgccttcagccgagttggaa

SEQ ID NO: 4226429 - DNA, 25 bp, Homo sapien
tgaccacgtcgtacaggtatgggct

SEQ ID NO: 4226430 - DNA, 25 bp, Homo sapien
tccggtcactgcctagtgtgcgggc

SEQ ID NO: 4226431 - DNA, 25 bp, Homo sapien
cctcctgtggccgatcggactcagg

SEQ ID NO: 4226432 - DNA, 25 bp, Homo sapien
ccgatcggactcaggttgtgtgccg

SEQ ID NO: 4226433 - DNA, 25 bp, Homo sapien
taccaagtcttgcagctttgtcctg

SEQ ID NO: 4226434 - DNA, 25 bp, Homo sapien
cctgggaggatcgaaggccctgatt

SEQ ID NO: 4226435 - DNA, 25 bp, Homo sapien
tcaccgtgttggataggctgttctt

SEQ ID NO: 4226436 - DNA, 25 bp, Homo sapien
gatctgcctggctcggctggagtgc

SEQ ID NO: 4226437 - DNA, 25 bp, Homo sapien
ggtgatctgcctggctcggctggag

SEQ ID NO: 4226438 - DNA, 25 bp, Homo sapien
accgtgttggataggctgttcttga

SEQ ID NO: 4226439 - DNA, 25 bp, Homo sapien
gggagtataacgtggcattcttcaa

SEQ ID NO: 4226440 - DNA, 25 bp, Homo sapien
cctgttagttcaagagaatgctgac

SEQ ID NO: 4226441 - DNA, 25 bp, Homo sapien
gctttcagggttgtctttgaggcac

SEQ ID NO: 4226442 - DNA, 25 bp, Homo sapien
gagagatcgcaagaaaactgtgccg

SEQ ID NO: 4226443 - DNA, 25 bp, Homo sapien
aggtgtgctggtgtgtgcctggagt

SEQ ID NO: 4226444 - DNA, 25 bp, Homo sapien
gccaggtgtgctggtgtgtgcctgg

SEQ ID NO: 4226445 - DNA, 25 bp, Homo sapien
cccagctactcaggaggctgagaca

SEQ ID NO: 4226446 - DNA, 25 bp, Homo sapien
acaggagaattgcttgtacctggga

SEQ ID NO: 4226447 - DNA, 25 bp, Homo sapien
tctggcaaagtcgtaggagaggctt

SEQ ID NO: 4226448 - DNA, 25 bp, Homo sapien
cagtggaagatttcgtttccggttg

SEQ ID NO: 4226449 - DNA, 25 bp, Homo sapien
aactgccgaaccttccgagtagaag

SEQ ID NO: 4226450 - DNA, 25 bp, Homo sapien
gaagcgtatggttgatcagtattgc

SEQ ID NO: 4226451 - DNA, 25 bp, Homo sapien
ctgagggttcattgcgtgccacact

SEQ ID NO: 4226452 - DNA, 25 bp, Homo sapien
tacagctggcagaatggcggttttt

SEQ ID NO: 4226453 - DNA, 25 bp, Homo sapien
aatcgcgagtggaaactgttgagcc

SEQ ID NO: 4226454 - DNA, 25 bp, Homo sapien
tcccattgggaaggacgtgactgga

SEQ ID NO: 4226455 - DNA, 25 bp, Homo sapien
ccggaagtagttgcgcagctggggt

SEQ ID NO: 4226456 - DNA, 25 bp, Homo sapien
ctcgtgctctatggtgttgccttcg

SEQ ID NO: 4226457 - DNA, 25 bp, Homo sapien
gctcctcgtgctctatggtgttgcc

SEQ ID NO: 4226458 - DNA, 25 bp, Homo sapien
tggtgttgccttcgccccggaagta

SEQ ID NO: 4226459 - DNA, 25 bp, Homo sapien
tcagccgcgcgggggcgctctagac

SEQ ID NO: 4226460 - DNA, 25 bp, Homo sapien
atgtagacgccatcacttttcttct

SEQ ID NO: 4226461 - DNA, 25 bp, Homo sapien
tgtagacgccatcacttttcttctt

SEQ ID NO: 4226462 - DNA, 25 bp, Homo sapien
gtagacgccatcacttttcttctta

SEQ ID NO: 4226463 - DNA, 25 bp, Homo sapien
taaaggcagcgatggcacgagctgc

SEQ ID NO: 4226464 - DNA, 25 bp, Homo sapien
ctgacatcaacagggtttttaaagg

SEQ ID NO: 4226465 - DNA, 25 bp, Homo sapien
tttaaaggcagcgatggcacgagct

SEQ ID NO: 4226466 - DNA, 25 bp, Homo sapien
gtttttaaaggcagcgatggcacga

SEQ ID NO: 4226467 - DNA, 25 bp, Homo sapien
tccctgaaggctgcctgggtctggc

SEQ ID NO: 4226468 - DNA, 25 bp, Homo sapien
cggccaacaatttgagtggctccag

SEQ ID NO: 4226469 - DNA, 25 bp, Homo sapien
gagtgaagcggccaacaatttgagt

SEQ ID NO: 4226470 - DNA, 25 bp, Homo sapien
gaagcggccaacaatttgagtggct

SEQ ID NO: 4226471 - DNA, 25 bp, Homo sapien
caccagctcggacccactgagggag

SEQ ID NO: 4226472 - DNA, 25 bp, Homo sapien
catccaccagctcggacccactgag

SEQ ID NO: 4226473 - DNA, 25 bp, Homo sapien
tccaccagctcggacccactgaggg

SEQ ID NO: 4226474 - DNA, 25 bp, Homo sapien
agcatccaccagctcggacccactg

SEQ ID NO: 4226475 - DNA, 25 bp, Homo sapien
gtctccaacctcaggctgaatagcg

SEQ ID NO: 4226476 - DNA, 25 bp, Homo sapien
agcagcaacctgctcctcttttcca

SEQ ID NO: 4226477 - DNA, 25 bp, Homo sapien
ccaacctcaggctgaatagcggtga

SEQ ID NO: 4226478 - DNA, 25 bp, Homo sapien
gtcttttcagcagcaacctgctcct

SEQ ID NO: 4226479 - DNA, 25 bp, Homo sapien
ttatgtgccttaggcttggtctgca

SEQ ID NO: 4226480 - DNA, 25 bp, Homo sapien
gcataatgttccaccaaatggatgt

SEQ ID NO: 4226481 - DNA, 25 bp, Homo sapien
agcaaggttaagaaaacaagtgcca

SEQ ID NO: 4226482 - DNA, 25 bp, Homo sapien
caagtgccaaataaggagagaggaa

SEQ ID NO: 4226483 - DNA, 25 bp, Homo sapien
tccccgttgcggtgctgagtggctt

SEQ ID NO: 4226484 - DNA, 25 bp, Homo sapien
ggcccgatccccgttgcggtgctga

SEQ ID NO: 4226485 - DNA, 25 bp, Homo sapien
cggagcagttctccggcaggtccct

SEQ ID NO: 4226486 - DNA, 25 bp, Homo sapien
tccaactcggagcagttctccggca

SEQ ID NO: 4226487 - DNA, 25 bp, Homo sapien
tgcaaagcagggctatgtcctctag

SEQ ID NO: 4226488 - DNA, 25 bp, Homo sapien
cactgggacacattggacaagttaa

SEQ ID NO: 4226489 - DNA, 25 bp, Homo sapien
tggtcatagagtcacaccaagagtg

SEQ ID NO: 4226490 - DNA, 25 bp, Homo sapien
taaacacaaccgcaaggaatggaat

SEQ ID NO: 4226491 - DNA, 25 bp, Homo sapien
gaatggtcagcgttgcatgtcgtga

SEQ ID NO: 4226492 - DNA, 25 bp, Homo sapien
cactgctgtcatcaattgaatggtc

SEQ ID NO: 4226493 - DNA, 25 bp, Homo sapien
gtttgctgaacaccttgtggaagca

SEQ ID NO: 4226494 - DNA, 25 bp, Homo sapien
aactagacattctgtcgccttagca

SEQ ID NO: 4226495 - DNA, 25 bp, Homo sapien
gaatcagtctatccacagagagtcc

SEQ ID NO: 4226496 - DNA, 25 bp, Homo sapien
gacgtgtggcaatagtgggccctcc

SEQ ID NO: 4226497 - DNA, 25 bp, Homo sapien
agaccatgcagagcgccgtgagttc

SEQ ID NO: 4226498 - DNA, 25 bp, Homo sapien
tctagctggtggtttcacggtgcca

SEQ ID NO: 4226499 - DNA, 25 bp, Homo sapien
tgttcttaattgcactctaaaaggt

SEQ ID NO: 4226500 - DNA, 25 bp, Homo sapien
tccggattggcttgtgtgtttcact

SEQ ID NO: 4226501 - DNA, 25 bp, Homo sapien
tgtatcagaggcctataatgaagct

SEQ ID NO: 4226502 - DNA, 25 bp, Homo sapien
tgtttcacttttagggagagtcata

SEQ ID NO: 4226503 - DNA, 25 bp, Homo sapien
ccgtcggagaccagatgacctgtta

SEQ ID NO: 4226504 - DNA, 25 bp, Homo sapien
tgtgtcgttaaacaaccgtcggaga

SEQ ID NO: 4226505 - DNA, 25 bp, Homo sapien
gatggctagtcctgtataactcgac

SEQ ID NO: 4226506 - DNA, 25 bp, Homo sapien
tctgtcccgagcagaggtaattcct

SEQ ID NO: 4226507 - DNA, 25 bp, Homo sapien
taatctggcacgactttcaaactag

SEQ ID NO: 4226508 - DNA, 25 bp, Homo sapien
tgggattctgccctagagctgagaa

SEQ ID NO: 4226509 - DNA, 25 bp, Homo sapien
tctctgccgtttcagggaagagcac

SEQ ID NO: 4226510 - DNA, 25 bp, Homo sapien
gaagagcaccttaaggccagtgtta

SEQ ID NO: 4226511 - DNA, 25 bp, Homo sapien
tttgcgaataaagtgatcatgggct

SEQ ID NO: 4226512 - DNA, 25 bp, Homo sapien
gaagcagagaacactacttttctgg

SEQ ID NO: 4226513 - DNA, 25 bp, Homo sapien
ggtagcaccatatgcaggctttgcg

SEQ ID NO: 4226514 - DNA, 25 bp, Homo sapien
tcattgtttcactacagggctggtg

SEQ ID NO: 4226515 - DNA, 25 bp, Homo sapien
ctaggaggtggtgaaacatgacata

SEQ ID NO: 4226516 - DNA, 25 bp, Homo sapien
actgtcactaggcattttagaaatg

SEQ ID NO: 4226517 - DNA, 25 bp, Homo sapien
tggaatagtcttacagatcggaggc

SEQ ID NO: 4226518 - DNA, 25 bp, Homo sapien
taatgctaatatgccatgctcatgt

SEQ ID NO: 4226519 - DNA, 25 bp, Homo sapien
catattaccagtttgctctcctgaa

SEQ ID NO: 4226520 - DNA, 25 bp, Homo sapien
tatgtggcttacatttgcagcttgc

SEQ ID NO: 4226521 - DNA, 25 bp, Homo sapien
catttagatccctgtaagctgttgg

SEQ ID NO: 4226522 - DNA, 25 bp, Homo sapien
acagtgctgaactagagtgttgatc

SEQ ID NO: 4226523 - DNA, 25 bp, Homo sapien
gattgatactcggtgactcagcaga

SEQ ID NO: 4226524 - DNA, 25 bp, Homo sapien
tgtgagtcggcttgctgttaggaag

SEQ ID NO: 4226525 - DNA, 25 bp, Homo sapien
gagtcggcttgctgttaggaaggag

SEQ ID NO: 4226526 - DNA, 25 bp, Homo sapien
tgagtcggcttgctgttaggaagga

SEQ ID NO: 4226527 - DNA, 25 bp, Homo sapien
gtgagtcggcttgctgttaggaagg

SEQ ID NO: 4226528 - DNA, 25 bp, Homo sapien
ctacgaagtggagaagaacagcagg

SEQ ID NO: 4226529 - DNA, 25 bp, Homo sapien
tacgaagtggagaagaacagcaggt

SEQ ID NO: 4226530 - DNA, 25 bp, Homo sapien
agagttgacatcagggtttgcagtg

SEQ ID NO: 4226531 - DNA, 25 bp, Homo sapien
tagagttgacatcagggtttgcagt

SEQ ID NO: 4226532 - DNA, 25 bp, Homo sapien
gtagagttgacatcagggtttgcag

SEQ ID NO: 4226533 - DNA, 25 bp, Homo sapien
tgtgaaatttctggggatagggtcc

SEQ ID NO: 4226534 - DNA, 25 bp, Homo sapien
gattagtcttgaagcaatgcagaaa

SEQ ID NO: 4226535 - DNA, 25 bp, Homo sapien
ccctaatggctacgatgtttgagag

SEQ ID NO: 4226536 - DNA, 25 bp, Homo sapien
tgcagttccctaatggctacgatgt

SEQ ID NO: 4226537 - DNA, 25 bp, Homo sapien
tagccattcctatagatgtgcctgg

SEQ ID NO: 4226538 - DNA, 25 bp, Homo sapien
aatgctttgtgcagcgcgcttgcgc

SEQ ID NO: 4226539 - DNA, 25 bp, Homo sapien
gcgcttgcgcggtgtggcggccgat

SEQ ID NO: 4226540 - DNA, 25 bp, Homo sapien
tttgctgcagggctcatgctcggga

SEQ ID NO: 4226541 - DNA, 25 bp, Homo sapien
gccgatgccgctataaaggcttgtt

SEQ ID NO: 4226542 - DNA, 25 bp, Homo sapien
ctgtgctttaactgggcctgaatct

SEQ ID NO: 4226543 - DNA, 25 bp, Homo sapien
gtgctttaactgggcctgaatctag

SEQ ID NO: 4226544 - DNA, 25 bp, Homo sapien
tgtgctttaactgggcctgaatcta

SEQ ID NO: 4226545 - DNA, 25 bp, Homo sapien
cctgtgctttaactgggcctgaatc

SEQ ID NO: 4226546 - DNA, 25 bp, Homo sapien
ggatgaagccaaggaggaatccttt

SEQ ID NO: 4226547 - DNA, 25 bp, Homo sapien
gatgaagccaaggaggaatcctttc

SEQ ID NO: 4226548 - DNA, 25 bp, Homo sapien
tgaagccaaggaggaatcctttccc

SEQ ID NO: 4226549 - DNA, 25 bp, Homo sapien
aagccaaggaggaatcctttcccat

SEQ ID NO: 4226550 - DNA, 25 bp, Homo sapien
catgagtggcgacactgtagttggt

SEQ ID NO: 4226551 - DNA, 25 bp, Homo sapien
tcgccatttcctgtagtgagcagag

SEQ ID NO: 4226552 - DNA, 25 bp, Homo sapien
tagttggtgactggaccaatagcct

SEQ ID NO: 4226553 - DNA, 25 bp, Homo sapien
aagcctgggcaattgataatcaaag

SEQ ID NO: 4226554 - DNA, 25 bp, Homo sapien
cagttgaaggtgtgaatcctggaat

SEQ ID NO: 4226555 - DNA, 25 bp, Homo sapien
ttcatctagatgattaactccagga

SEQ ID NO: 4226556 - DNA, 25 bp, Homo sapien
catatttagccacaggaacgatgtc

SEQ ID NO: 4226557 - DNA, 25 bp, Homo sapien
gaacgatgtcaccagttgaaggtgt

SEQ ID NO: 4226558 - DNA, 25 bp, Homo sapien
aaccaatataatctgcaaagctgga

SEQ ID NO: 4226559 - DNA, 25 bp, Homo sapien
accaatataatctgcaaagctggac

SEQ ID NO: 4226560 - DNA, 25 bp, Homo sapien
ctgaaagccataggttctcagttgc

SEQ ID NO: 4226561 - DNA, 25 bp, Homo sapien
ctgcaggtgtctgatccacactgat

SEQ ID NO: 4226562 - DNA, 25 bp, Homo sapien
cctgcaggtgtctgatccacactga

SEQ ID NO: 4226563 - DNA, 25 bp, Homo sapien
aaatagaaggtgtccagtttgcaga

SEQ ID NO: 4226564 - DNA, 25 bp, Homo sapien
gggaaatagaaggtgtccagtttgc

SEQ ID NO: 4226565 - DNA, 25 bp, Homo sapien
gcttattgtgtttgatgtggccttc

SEQ ID NO: 4226566 - DNA, 25 bp, Homo sapien
cacccacattggcttattgtgtttg

SEQ ID NO: 4226567 - DNA, 25 bp, Homo sapien
gtgaaagggctgaaggagagcgttc

SEQ ID NO: 4226568 - DNA, 25 bp, Homo sapien
aagggctgaaggagagcgttcacct

SEQ ID NO: 4226569 - DNA, 25 bp, Homo sapien
gaaagggctgaaggagagcgttcac

SEQ ID NO: 4226570 - DNA, 25 bp, Homo sapien
ctgtgtaggtgaaagggctgaagga

SEQ ID NO: 4226571 - DNA, 25 bp, Homo sapien
ccactttccagtggcaggtagaaac

SEQ ID NO: 4226572 - DNA, 25 bp, Homo sapien
tcatgagcaggaagacgctgtagcc

SEQ ID NO: 4226573 - DNA, 25 bp, Homo sapien
tagcccagcagaacagtcatcttga

SEQ ID NO: 4226574 - DNA, 25 bp, Homo sapien
gctagtggctgggagcaagtcattc

SEQ ID NO: 4226575 - DNA, 25 bp, Homo sapien
gacaggcacagggcgaagtagacac

SEQ ID NO: 4226576 - DNA, 25 bp, Homo sapien
ggacaggcacagggcgaagtagaca

SEQ ID NO: 4226577 - DNA, 25 bp, Homo sapien
gggcgcagtgggacagcatctccct

SEQ ID NO: 4226578 - DNA, 25 bp, Homo sapien
ctggggcgcagtgggacagcatctc

SEQ ID NO: 4226579 - DNA, 25 bp, Homo sapien
gcagggagtggagccaccgaggcag

SEQ ID NO: 4226580 - DNA, 25 bp, Homo sapien
tatttcccttctggggcgcagtggg

SEQ ID NO: 4226581 - DNA, 25 bp, Homo sapien
ttgtccattctgagccccctgtcag

SEQ ID NO: 4226582 - DNA, 25 bp, Homo sapien
gcgtccatcgcgtggctgaactgca

SEQ ID NO: 4226583 - DNA, 25 bp, Homo sapien
tccagaggcatatgacggtgatgat

SEQ ID NO: 4226584 - DNA, 25 bp, Homo sapien
catctgccctgctgatacctctggc

SEQ ID NO: 4226585 - DNA, 25 bp, Homo sapien
aaaatgaggcggttgacagggccac

SEQ ID NO: 4226586 - DNA, 25 bp, Homo sapien
tgatggcatgcaggagcaaggaccc

SEQ ID NO: 4226587 - DNA, 25 bp, Homo sapien
tctggtctgaaactacacagaggac

SEQ ID NO: 4226588 - DNA, 25 bp, Homo sapien
caaggacccgacttttggagggcat

SEQ ID NO: 4226589 - DNA, 25 bp, Homo sapien
ttttagaaatctgtgagttgaggaa

SEQ ID NO: 4226590 - DNA, 25 bp, Homo sapien
cttttagaaatctgtgagttgagga

SEQ ID NO: 4226591 - DNA, 25 bp, Homo sapien
gaccacaccctggttgctggttttg

SEQ ID NO: 4226592 - DNA, 25 bp, Homo sapien
gggattcaccaggagctcccaaacc

SEQ ID NO: 4226593 - DNA, 25 bp, Homo sapien
gttgctggttttgaatactactcat

SEQ ID NO: 4226594 - DNA, 25 bp, Homo sapien
agcttaaaggagctcagaccacacc

SEQ ID NO: 4226595 - DNA, 25 bp, Homo sapien
ctctgccttgcaggccaccctcctt

SEQ ID NO: 4226596 - DNA, 25 bp, Homo sapien
agcagaagactgacagtgaggcaga

SEQ ID NO: 4226597 - DNA, 25 bp, Homo sapien
tgaagcagaagactgacagtgaggc

SEQ ID NO: 4226598 - DNA, 25 bp, Homo sapien
ggagggcactctgccttgcaggcca

SEQ ID NO: 4226599 - DNA, 25 bp, Homo sapien
tgttgacacgggtagggatgctgta

SEQ ID NO: 4226600 - DNA, 25 bp, Homo sapien
tggacggaaggcctttctgtcaaac

SEQ ID NO: 4226601 - DNA, 25 bp, Homo sapien
gacagcagggtcaaccccatgctgg

SEQ ID NO: 4226602 - DNA, 25 bp, Homo sapien
caattgatggtaaaagcgtcgcctc

SEQ ID NO: 4226603 - DNA, 25 bp, Homo sapien
acaggaatgatgtcagcagctggag

SEQ ID NO: 4226604 - DNA, 25 bp, Homo sapien
aggaatgatgtcagcagctggagct

SEQ ID NO: 4226605 - DNA, 25 bp, Homo sapien
aatccatccacaggaatgatgtcag

SEQ ID NO: 4226606 - DNA, 25 bp, Homo sapien
caaatccatccacaggaatgatgtc

SEQ ID NO: 4226607 - DNA, 25 bp, Homo sapien
ctgtgagtttattgatgccaacaca

SEQ ID NO: 4226608 - DNA, 25 bp, Homo sapien
tattgatgccaacacactcttttgg

SEQ ID NO: 4226609 - DNA, 25 bp, Homo sapien
aattaatgaaaggattgtcccatac

SEQ ID NO: 4226610 - DNA, 25 bp, Homo sapien
tgggttccaattaatgaaaggattg

SEQ ID NO: 4226611 - DNA, 25 bp, Homo sapien
gctgatataggcagtgagaccggaa

SEQ ID NO: 4226612 - DNA, 25 bp, Homo sapien
caggttacagatgctggtcaccctc

SEQ ID NO: 4226613 - DNA, 25 bp, Homo sapien
tacttaattcgaccttcactgctga

SEQ ID NO: 4226614 - DNA, 25 bp, Homo sapien
agaccggaaggcgtctgatccacat

SEQ ID NO: 4226615 - DNA, 25 bp, Homo sapien
tttggatgactttgcgagacgtgtc

SEQ ID NO: 4226616 - DNA, 25 bp, Homo sapien
gtggccttgttgatgcccaagagct

SEQ ID NO: 4226617 - DNA, 25 bp, Homo sapien
tcatataggttgttgcccatggaca

SEQ ID NO: 4226618 - DNA, 25 bp, Homo sapien
tcccactccccctgggtttggatga

SEQ ID NO: 4226619 - DNA, 25 bp, Homo sapien
gcaccagcaggtttatgatgtagag

SEQ ID NO: 4226620 - DNA, 25 bp, Homo sapien
ccagaaagctactgggcaccagcag

SEQ ID NO: 4226621 - DNA, 25 bp, Homo sapien
atgtagaggcttggcctgcgcctga

SEQ ID NO: 4226622 - DNA, 25 bp, Homo sapien
acgattctcgctctctgctggcagg

SEQ ID NO: 4226623 - DNA, 25 bp, Homo sapien
ttcagtggagcagcggccatttctc

SEQ ID NO: 4226624 - DNA, 25 bp, Homo sapien
gggcgcagtgggacagcatctccct

SEQ ID NO: 4226625 - DNA, 25 bp, Homo sapien
gcagggagtgaagccacctaggcat

SEQ ID NO: 4226626 - DNA, 25 bp, Homo sapien
gacaggcacagggcgaagtagacac

SEQ ID NO: 4226627 - DNA, 25 bp, Homo sapien
tatttcccttctggggcgcagtggg

SEQ ID NO: 4226628 - DNA, 25 bp, Homo sapien
ggcggaagagcagggtgtccatcgc

SEQ ID NO: 4226629 - DNA, 25 bp, Homo sapien
agagcagggtgtccatcgcgtggct

SEQ ID NO: 4226630 - DNA, 25 bp, Homo sapien
agagcaggtagaggcggaagagcag

SEQ ID NO: 4226631 - DNA, 25 bp, Homo sapien
cagggtgtccatcgcgtggctgaac

SEQ ID NO: 4226632 - DNA, 25 bp, Homo sapien
tccaagctgttgtttgccagagagg

SEQ ID NO: 4226633 - DNA, 25 bp, Homo sapien
taggaaaatgagtccggctggccca

SEQ ID NO: 4226634 - DNA, 25 bp, Homo sapien
ggtgatcaatcaaggagagactcca

SEQ ID NO: 4226635 - DNA, 25 bp, Homo sapien
ctgagcagcggtcgggaaatcgtcc

SEQ ID NO: 4226636 - DNA, 25 bp, Homo sapien
ttggagagggtgaggcggtagccac

SEQ ID NO: 4226637 - DNA, 25 bp, Homo sapien
cctcaaccctggaacatctgtttta

SEQ ID NO: 4226638 - DNA, 25 bp, Homo sapien
gaggaacttgaaatagcccctcaac

SEQ ID NO: 4226639 - DNA, 25 bp, Homo sapien
ttctggaaggcccatggattggaga

SEQ ID NO: 4226640 - DNA, 25 bp, Homo sapien
gctgggaccactttggttgctggtt

SEQ ID NO: 4226641 - DNA, 25 bp, Homo sapien
cagaaggctgatagtgaggcataac

SEQ ID NO: 4226642 - DNA, 25 bp, Homo sapien
gactcatcgggatccccccagatga

SEQ ID NO: 4226643 - DNA, 25 bp, Homo sapien
tctctcctgcgctcttgtctggaga

SEQ ID NO: 4226644 - DNA, 25 bp, Homo sapien
ccacctctggttattcctgtaacta

SEQ ID NO: 4226645 - DNA, 25 bp, Homo sapien
cctgtaactatagcccagcaagtcc

SEQ ID NO: 4226646 - DNA, 25 bp, Homo sapien
tgtctttccataccaggtgattcat

SEQ ID NO: 4226647 - DNA, 25 bp, Homo sapien
cactgtctttccataccaggtgatt

SEQ ID NO: 4226648 - DNA, 25 bp, Homo sapien
gtcactggacaaaatttccctaata

SEQ ID NO: 4226649 - DNA, 25 bp, Homo sapien
gtcaaagcctgagcagttaatggtg

SEQ ID NO: 4226650 - DNA, 25 bp, Homo sapien
cagttaatggtgaaagtatttgtcc

SEQ ID NO: 4226651 - DNA, 25 bp, Homo sapien
tgaaagtatttgtccttcctgtaga

SEQ ID NO: 4226652 - DNA, 25 bp, Homo sapien
tgtttgctaggtgagagaggtacca

SEQ ID NO: 4226653 - DNA, 25 bp, Homo sapien
tgactggacagaaggccttctggtt

SEQ ID NO: 4226654 - DNA, 25 bp, Homo sapien
agaaggccttctggttaaatatggc

SEQ ID NO: 4226655 - DNA, 25 bp, Homo sapien
ggacagaaggccttctggttaaata

SEQ ID NO: 4226656 - DNA, 25 bp, Homo sapien
gactggacagaaggccttctggtta

SEQ ID NO: 4226657 - DNA, 25 bp, Homo sapien
tggaaaccatgggttctcagctgtc

SEQ ID NO: 4226658 - DNA, 25 bp, Homo sapien
cacagtgagtttattgatatcacca

SEQ ID NO: 4226659 - DNA, 25 bp, Homo sapien
catgggttctcagctgtcacagtga

SEQ ID NO: 4226660 - DNA, 25 bp, Homo sapien
cagctgtcacagtgagtttattgat

SEQ ID NO: 4226661 - DNA, 25 bp, Homo sapien
ccaccaccagggacaggcaaagtag

SEQ ID NO: 4226662 - DNA, 25 bp, Homo sapien
agggacaggcaaagtagacacctgg

SEQ ID NO: 4226663 - DNA, 25 bp, Homo sapien
tgatgaagacggtctccagcaggct

SEQ ID NO: 4226664 - DNA, 25 bp, Homo sapien
tgggtgatgaagacggtctccagca

SEQ ID NO: 4226665 - DNA, 25 bp, Homo sapien
ggggcgcagtgggacagcatctccc

SEQ ID NO: 4226666 - DNA, 25 bp, Homo sapien
gggcgcagtgggacagcatctccct

SEQ ID NO: 4226667 - DNA, 25 bp, Homo sapien
ctggggcgcagtgggacagcatctc

SEQ ID NO: 4226668 - DNA, 25 bp, Homo sapien
tatttcccttctggggcgcagtggg

SEQ ID NO: 4226669 - DNA, 25 bp, Homo sapien
catctagctcagtctctccgggtct

SEQ ID NO: 4226670 - DNA, 25 bp, Homo sapien
gctccactagctgggcgtttgtcca

SEQ ID NO: 4226671 - DNA, 25 bp, Homo sapien
cacagctccactagctgggcgtttg

SEQ ID NO: 4226672 - DNA, 25 bp, Homo sapien
taggtgttcccgaggcggaagagca

SEQ ID NO: 4226673 - DNA, 25 bp, Homo sapien
ggacccaggaatgcccagattaaag

SEQ ID NO: 4226674 - DNA, 25 bp, Homo sapien
taatagcattggttgaccactgaca

SEQ ID NO: 4226675 - DNA, 25 bp, Homo sapien
tgggacccaggaatgcccagattaa

SEQ ID NO: 4226676 - DNA, 25 bp, Homo sapien
gagtctgactttgaatactaatagc

SEQ ID NO: 4226677 - DNA, 25 bp, Homo sapien
tttgtctaagttcttctctgaacat

SEQ ID NO: 4226678 - DNA, 25 bp, Homo sapien
gtctaagttcttctctgaacatgta

SEQ ID NO: 4226679 - DNA, 25 bp, Homo sapien
ttctttgtctaagttcttctctgaa

SEQ ID NO: 4226680 - DNA, 25 bp, Homo sapien
tgtctaagttcttctctgaacatgt

SEQ ID NO: 4226681 - DNA, 25 bp, Homo sapien
agcagaaaaccgagaaggaggtaga

SEQ ID NO: 4226682 - DNA, 25 bp, Homo sapien
gcagaaaaccgagaaggaggtagaa

SEQ ID NO: 4226683 - DNA, 25 bp, Homo sapien
aagcagaaaaccgagaaggaggtag

SEQ ID NO: 4226684 - DNA, 25 bp, Homo sapien
atcttttcctgtggaaccagcttcc

SEQ ID NO: 4226685 - DNA, 25 bp, Homo sapien
ctaaggtgcaataagaggaagtaac

SEQ ID NO: 4226686 - DNA, 25 bp, Homo sapien
taaaaggcagaagccggacttgttc

SEQ ID NO: 4226687 - DNA, 25 bp, Homo sapien
aatcccctatcaggtagatactgct

SEQ ID NO: 4226688 - DNA, 25 bp, Homo sapien
taataaacgagctaactaaggtgca

SEQ ID NO: 4226689 - DNA, 25 bp, Homo sapien
gacatcgaatgtgtgagatgaagga

SEQ ID NO: 4226690 - DNA, 25 bp, Homo sapien
gagatgaaggagagcaaccctgtgc

SEQ ID NO: 4226691 - DNA, 25 bp, Homo sapien
ctccctatatgagaggggccccaag

SEQ ID NO: 4226692 - DNA, 25 bp, Homo sapien
ctgtagtggacatcgaatgtgtgag

SEQ ID NO: 4226693 - DNA, 25 bp, Homo sapien
taaacactgaattcagagcagtggg

SEQ ID NO: 4226694 - DNA, 25 bp, Homo sapien
cactgaattcagagcagtgggatcc

SEQ ID NO: 4226695 - DNA, 25 bp, Homo sapien
tgggatccgccccgtgctggccaaa

SEQ ID NO: 4226696 - DNA, 25 bp, Homo sapien
gccaaaccctgagcaattgatggtg

SEQ ID NO: 4226697 - DNA, 25 bp, Homo sapien
gagatgttgacttgggtggggacgc

SEQ ID NO: 4226698 - DNA, 25 bp, Homo sapien
gtggggacgctgatgttggtgaccg

SEQ ID NO: 4226699 - DNA, 25 bp, Homo sapien
atgttggtgaccggacggaagggct

SEQ ID NO: 4226700 - DNA, 25 bp, Homo sapien
gatggcagacatcgcgaaggagatg

SEQ ID NO: 4226701 - DNA, 25 bp, Homo sapien
atgatgacaagaggtgcagctgttc

SEQ ID NO: 4226702 - DNA, 25 bp, Homo sapien
gaatgatgacaagaggtgcagctgt

SEQ ID NO: 4226703 - DNA, 25 bp, Homo sapien
gatgacaagaggtgcagctgttcat

SEQ ID NO: 4226704 - DNA, 25 bp, Homo sapien
aggaatgatgacaagaggtgcagct

SEQ ID NO: 4226705 - DNA, 25 bp, Homo sapien
tactcatcttcgtgatgccctcaca

SEQ ID NO: 4226706 - DNA, 25 bp, Homo sapien
ttcgtgatgccctcacattcctctg

SEQ ID NO: 4226707 - DNA, 25 bp, Homo sapien
ttggctgccatactcatcttcgtga

SEQ ID NO: 4226708 - DNA, 25 bp, Homo sapien
tgccatactcatcttcgtgatgccc

SEQ ID NO: 4226709 - DNA, 25 bp, Homo sapien
ggagatgggacttccctctgaccag

SEQ ID NO: 4226710 - DNA, 25 bp, Homo sapien
tggtaaactgtgatctctgtggcta

SEQ ID NO: 4226711 - DNA, 25 bp, Homo sapien
gtaaactgtgatctctgtggctacc

SEQ ID NO: 4226712 - DNA, 25 bp, Homo sapien
ctaccaggagatgggacttccctct

SEQ ID NO: 4226713 - DNA, 25 bp, Homo sapien
caccttcatgggtttcttatacctg

SEQ ID NO: 4226714 - DNA, 25 bp, Homo sapien
ttacagatactgtccaccttcatgg

SEQ ID NO: 4226715 - DNA, 25 bp, Homo sapien
cctgatgcgaccttcattacttaca

SEQ ID NO: 4226716 - DNA, 25 bp, Homo sapien
tacatatgctgtgaggccttttggg

SEQ ID NO: 4226717 - DNA, 25 bp, Homo sapien
tctccatgtccagcaacatgctgtc

SEQ ID NO: 4226718 - DNA, 25 bp, Homo sapien
tttctccatgtccagcaacatgctg

SEQ ID NO: 4226719 - DNA, 25 bp, Homo sapien
ttctttctccatgtccagcaacatg

SEQ ID NO: 4226720 - DNA, 25 bp, Homo sapien
tccatgtccagcaacatgctgtcca

SEQ ID NO: 4226721 - DNA, 25 bp, Homo sapien
ctccatgggtctgaaggatgttccg

SEQ ID NO: 4226722 - DNA, 25 bp, Homo sapien
cctggacaactttgcggtggccttg

SEQ ID NO: 4226723 - DNA, 25 bp, Homo sapien
tagaacacgatctgatcatacaggt

SEQ ID NO: 4226724 - DNA, 25 bp, Homo sapien
ccgggatgcgtctgttatttcccac

SEQ ID NO: 4226725 - DNA, 25 bp, Homo sapien
gtcagaggaaccctcaaatccagga

SEQ ID NO: 4226726 - DNA, 25 bp, Homo sapien
tagcagtgacaatttctgtctctgc

SEQ ID NO: 4226727 - DNA, 25 bp, Homo sapien
cctgatatcaccctgggatctggag

SEQ ID NO: 4226728 - DNA, 25 bp, Homo sapien
tttggcctgatatcaccctgggatc

SEQ ID NO: 4226729 - DNA, 25 bp, Homo sapien
caggagcgttatcttgaatgggaca

SEQ ID NO: 4226730 - DNA, 25 bp, Homo sapien
ttatgacatagagactgggcctgcg

SEQ ID NO: 4226731 - DNA, 25 bp, Homo sapien
cactgggcacgagaaggtttatgac

SEQ ID NO: 4226732 - DNA, 25 bp, Homo sapien
gattcccacttttcactggcaggta

SEQ ID NO: 4226733 - DNA, 25 bp, Homo sapien
cagtgggacagcatctccccgggct

SEQ ID NO: 4226734 - DNA, 25 bp, Homo sapien
gggcgcagtgggacagcatctcccc

SEQ ID NO: 4226735 - DNA, 25 bp, Homo sapien
catatgacggtgatgatagaggagg

SEQ ID NO: 4226736 - DNA, 25 bp, Homo sapien
ccagaggcatatgacggtgatgata

SEQ ID NO: 4226737 - DNA, 25 bp, Homo sapien
gtccatcgcgtggctgaactgcaac

SEQ ID NO: 4226738 - DNA, 25 bp, Homo sapien
agagcaggtagaggcggaagagcat

SEQ ID NO: 4226739 - DNA, 25 bp, Homo sapien
ctatgcagatgacgtaagagggacc

SEQ ID NO: 4226740 - DNA, 25 bp, Homo sapien
tcagcaggaccggattgggatacat

SEQ ID NO: 4226741 - DNA, 25 bp, Homo sapien
tcagcggacagaagaggtatagtct

SEQ ID NO: 4226742 - DNA, 25 bp, Homo sapien
tatttattgggcaagtcagcggaca

SEQ ID NO: 4226743 - DNA, 25 bp, Homo sapien
aaaggcaaacatctcaacctcttct

SEQ ID NO: 4226744 - DNA, 25 bp, Homo sapien
agcttggctaagggaccacagggct

SEQ ID NO: 4226745 - DNA, 25 bp, Homo sapien
ggcagcttggctaagggaccacagg

SEQ ID NO: 4226746 - DNA, 25 bp, Homo sapien
cagcttggctaagggaccacagggc

SEQ ID NO: 4226747 - DNA, 25 bp, Homo sapien
tgcttggcataagattaacgtggag

SEQ ID NO: 4226748 - DNA, 25 bp, Homo sapien
ttaacgtggagctctttcccagcgt

SEQ ID NO: 4226749 - DNA, 25 bp, Homo sapien
agggtttgatcttgtgtgcttggca

SEQ ID NO: 4226750 - DNA, 25 bp, Homo sapien
cagtatccataatagtaagggtttg

SEQ ID NO: 4226751 - DNA, 25 bp, Homo sapien
tcttcttcttcatcagaaccaacat

SEQ ID NO: 4226752 - DNA, 25 bp, Homo sapien
ttcttcttcttgtcagcatccttct

SEQ ID NO: 4226753 - DNA, 25 bp, Homo sapien
cttgatcaatgtacttttccttact

SEQ ID NO: 4226754 - DNA, 25 bp, Homo sapien
tcttcttcttcttgtcagcatcctt

SEQ ID NO: 4226755 - DNA, 25 bp, Homo sapien
tcgttagtaatagcgtcaggatttc

SEQ ID NO: 4226756 - DNA, 25 bp, Homo sapien
tgatggaactctccatactcctcgt

SEQ ID NO: 4226757 - DNA, 25 bp, Homo sapien
cagttattggtcaagctctgatgga

SEQ ID NO: 4226758 - DNA, 25 bp, Homo sapien
cccagttattggtcaagctctgatg

SEQ ID NO: 4226759 - DNA, 25 bp, Homo sapien
gcccttcaactgaaaagtgcttcac

SEQ ID NO: 4226760 - DNA, 25 bp, Homo sapien
tgcccttcaactgaaaagtgcttca

SEQ ID NO: 4226761 - DNA, 25 bp, Homo sapien
ctgagtccatcacccctctaatgaa

SEQ ID NO: 4226762 - DNA, 25 bp, Homo sapien
agcaaagagttctaagtatgttttg

SEQ ID NO: 4226763 - DNA, 25 bp, Homo sapien
cctctgagtccatcacccctctaat

SEQ ID NO: 4226764 - DNA, 25 bp, Homo sapien
caaagagttctaagtatgttttgac

SEQ ID NO: 4226765 - DNA, 25 bp, Homo sapien
tcaaagatttatgttttcagataac

SEQ ID NO: 4226766 - DNA, 25 bp, Homo sapien
agccatgcttctgaagacattccac

SEQ ID NO: 4226767 - DNA, 25 bp, Homo sapien
ccatgcttctgaagacattccacaa

SEQ ID NO: 4226768 - DNA, 25 bp, Homo sapien
gccatgcttctgaagacattccaca

SEQ ID NO: 4226769 - DNA, 25 bp, Homo sapien
cagtacttatcaatcaactcgatca

SEQ ID NO: 4226770 - DNA, 25 bp, Homo sapien
cagtcttactctcaagttccttcag

SEQ ID NO: 4226771 - DNA, 25 bp, Homo sapien
caatcaactcgatcatatagatcac

SEQ ID NO: 4226772 - DNA, 25 bp, Homo sapien
acagtcttactctcaagttccttca

SEQ ID NO: 4226773 - DNA, 25 bp, Homo sapien
atcttctggaagttccaaaccctct

SEQ ID NO: 4226774 - DNA, 25 bp, Homo sapien
ttccaaaccctctttggcaactgac

SEQ ID NO: 4226775 - DNA, 25 bp, Homo sapien
ttcatcttctggaagttccaaaccc

SEQ ID NO: 4226776 - DNA, 25 bp, Homo sapien
catgtctttcatgattttgcagagg

SEQ ID NO: 4226777 - DNA, 25 bp, Homo sapien
gcttgagctttcatgattctttcca

SEQ ID NO: 4226778 - DNA, 25 bp, Homo sapien
cttgagctttcatgattctttccat

SEQ ID NO: 4226779 - DNA, 25 bp, Homo sapien
cgggcttgagctttcatgattcttt

SEQ ID NO: 4226780 - DNA, 25 bp, Homo sapien
ggcttgagctttcatgattctttcc

SEQ ID NO: 4226781 - DNA, 25 bp, Homo sapien
gcggcattgatatcattagcagtag

SEQ ID NO: 4226782 - DNA, 25 bp, Homo sapien
catttctttagttatagcggcattg

SEQ ID NO: 4226783 - DNA, 25 bp, Homo sapien
gatcatcctatagatcttgttagta

SEQ ID NO: 4226784 - DNA, 25 bp, Homo sapien
tagcagtaggatcatattcatcaac

SEQ ID NO: 4226785 - DNA, 25 bp, Homo sapien
ttccattcacaagcctcgctctggg

SEQ ID NO: 4226786 - DNA, 25 bp, Homo sapien
aagcagaatgtgacttgggtactac

SEQ ID NO: 4226787 - DNA, 25 bp, Homo sapien
cagtttaacatatttccagaggaca

SEQ ID NO: 4226788 - DNA, 25 bp, Homo sapien
tacaatatgcctaggtaggcttata

SEQ ID NO: 4226789 - DNA, 25 bp, Homo sapien
ggtctgcaagtatcgtcggccttca

SEQ ID NO: 4226790 - DNA, 25 bp, Homo sapien
gggtcccatagatgtcagactcggt

SEQ ID NO: 4226791 - DNA, 25 bp, Homo sapien
tgataggacttgtggtcgccacgaa

SEQ ID NO: 4226792 - DNA, 25 bp, Homo sapien
tgtaggtgaacaagccgagattctt

SEQ ID NO: 4226793 - DNA, 25 bp, Homo sapien
gaagctatcggccaccagaactgct

SEQ ID NO: 4226794 - DNA, 25 bp, Homo sapien
gctgcgcttgttagcccgactaacc

SEQ ID NO: 4226795 - DNA, 25 bp, Homo sapien
gccgctgcgcttgttagcccgacta

SEQ ID NO: 4226796 - DNA, 25 bp, Homo sapien
ggaagaagcggcgatcgaagctatc

SEQ ID NO: 4226797 - DNA, 25 bp, Homo sapien
tggctgctcgcgtgcgcggcgctca

SEQ ID NO: 4226798 - DNA, 25 bp, Homo sapien
tctggctgctcgcgtgcgcggcgct

SEQ ID NO: 4226799 - DNA, 25 bp, Homo sapien
gccctctggctgctcgcgtgcgcgg

SEQ ID NO: 4226800 - DNA, 25 bp, Homo sapien
cctctggctgctcgcgtgcgcggcg

SEQ ID NO: 4226801 - DNA, 25 bp, Homo sapien
agtccctctgcatccggttttagga

SEQ ID NO: 4226802 - DNA, 25 bp, Homo sapien
gataacagcatagacgcaggtcctt

SEQ ID NO: 4226803 - DNA, 25 bp, Homo sapien
gttagccgaaatgagaacttgctcc

SEQ ID NO: 4226804 - DNA, 25 bp, Homo sapien
tcaagggcatgctgttgtagttagc

SEQ ID NO: 4226805 - DNA, 25 bp, Homo sapien
aatctgccggccactaacttggtca

SEQ ID NO: 4226806 - DNA, 25 bp, Homo sapien
tcggcaaggttaaaagcggcgcagc

SEQ ID NO: 4226807 - DNA, 25 bp, Homo sapien
cgaggtggacagcattacgaatgcc

SEQ ID NO: 4226808 - DNA, 25 bp, Homo sapien
tgaatccccgcgtgaaggcttctct

SEQ ID NO: 4226809 - DNA, 25 bp, Homo sapien
aaatacactgcctgagatctagccc

SEQ ID NO: 4226810 - DNA, 25 bp, Homo sapien
taaggcatattaccgccctttcaga

SEQ ID NO: 4226811 - DNA, 25 bp, Homo sapien
gatctagcccgctctttttaaggca

SEQ ID NO: 4226812 - DNA, 25 bp, Homo sapien
tattaccgccctttcagaggcaaaa

SEQ ID NO: 4226813 - DNA, 25 bp, Homo sapien
gggctgatggcaatcaaccactaaa

SEQ ID NO: 4226814 - DNA, 25 bp, Homo sapien
cccattttgtcctttcgacagatag

SEQ ID NO: 4226815 - DNA, 25 bp, Homo sapien
agatagcaccggctatcattagaac

SEQ ID NO: 4226816 - DNA, 25 bp, Homo sapien
cattgtctagacaactcgggggctg

SEQ ID NO: 4226817 - DNA, 25 bp, Homo sapien
tgggtaccccactgcaacaattttc

SEQ ID NO: 4226818 - DNA, 25 bp, Homo sapien
gaactgactgctgaacgacccagct

SEQ ID NO: 4226819 - DNA, 25 bp, Homo sapien
taagtgtcagaggttagccatctcc

SEQ ID NO: 4226820 - DNA, 25 bp, Homo sapien
cactgctggcaaaggataatactgg

SEQ ID NO: 4226821 - DNA, 25 bp, Homo sapien
tcaggaattccagagtgtagtcaat

SEQ ID NO: 4226822 - DNA, 25 bp, Homo sapien
tgatttgagcagctttccagcaaca

SEQ ID NO: 4226823 - DNA, 25 bp, Homo sapien
cagctttccagcaacaaaagacaaa

SEQ ID NO: 4226824 - DNA, 25 bp, Homo sapien
tagtcaattaatgccacattggcca

SEQ ID NO: 4226825 - DNA, 25 bp, Homo sapien
taatctttgtcacagaaaacccaag

SEQ ID NO: 4226826 - DNA, 25 bp, Homo sapien
ctggaaaaagatggcgaaacatgga

SEQ ID NO: 4226827 - DNA, 25 bp, Homo sapien
ccaagacagacagatacaaagtttc

SEQ ID NO: 4226828 - DNA, 25 bp, Homo sapien
gctcacctcctgataagtgtagaaa

SEQ ID NO: 4226829 - DNA, 25 bp, Homo sapien
ctagggtacacaaagtagcctggga

SEQ ID NO: 4226830 - DNA, 25 bp, Homo sapien
tgggaacacgcttcacgtcagcttt

SEQ ID NO: 4226831 - DNA, 25 bp, Homo sapien
taagtgctcactatatgcttgggac

SEQ ID NO: 4226832 - DNA, 25 bp, Homo sapien
cctggacttccataagcaatgcgat

SEQ ID NO: 4226833 - DNA, 25 bp, Homo sapien
cccttgtccctaaacatcaatttga

SEQ ID NO: 4226834 - DNA, 25 bp, Homo sapien
ccccttgtccctaaacatcaatttg

SEQ ID NO: 4226835 - DNA, 25 bp, Homo sapien
tgaccccttgtccctaaacatcaat

SEQ ID NO: 4226836 - DNA, 25 bp, Homo sapien
tatcaagcataaagatcatttgagc

SEQ ID NO: 4226837 - DNA, 25 bp, Homo sapien
gaaacatggttatttcctctccata

SEQ ID NO: 4226838 - DNA, 25 bp, Homo sapien
gcactcacagtccttctcgatggct

SEQ ID NO: 4226839 - DNA, 25 bp, Homo sapien
tcttgccagcgtcttcaacttcaaa

SEQ ID NO: 4226840 - DNA, 25 bp, Homo sapien
tctcccagtgatcgatagagctctg

SEQ ID NO: 4226841 - DNA, 25 bp, Homo sapien
aagccttggcatcaacatcacggag

SEQ ID NO: 4226842 - DNA, 25 bp, Homo sapien
cagaagaaagtcagagcgcaccaaa

SEQ ID NO: 4226843 - DNA, 25 bp, Homo sapien
cacattgagagatgtagggcggcac

SEQ ID NO: 4226844 - DNA, 25 bp, Homo sapien
tgcaaaaaagcagtctcagggctct

SEQ ID NO: 4226845 - DNA, 25 bp, Homo sapien
ggacagaactgcaaaaaagcagtct

SEQ ID NO: 4226846 - DNA, 25 bp, Homo sapien
gaactgcaaaaaagcagtctcaggg

SEQ ID NO: 4226847 - DNA, 25 bp, Homo sapien
aggagggacagaactgcaaaaaagc

SEQ ID NO: 4226848 - DNA, 25 bp, Homo sapien
gaggaaatgcaaaacgccggagacc

SEQ ID NO: 4226849 - DNA, 25 bp, Homo sapien
tgaaaatggagaaccctgtttgtgg

SEQ ID NO: 4226850 - DNA, 25 bp, Homo sapien
gaagatcatcgtcatcacagaaaca

SEQ ID NO: 4226851 - DNA, 25 bp, Homo sapien
taccacattgtcttcgtggcaacga

SEQ ID NO: 4226852 - DNA, 25 bp, Homo sapien
aaatcatatcgaacctccactccat

SEQ ID NO: 4226853 - DNA, 25 bp, Homo sapien
tgatatgacaatccagtaaatcata

SEQ ID NO: 4226854 - DNA, 25 bp, Homo sapien
tatgacaatccagtaaatcatatcg

SEQ ID NO: 4226855 - DNA, 25 bp, Homo sapien
tccagtaaatcatatcgaacctcca

SEQ ID NO: 4226856 - DNA, 25 bp, Homo sapien
gagttcgtgaccaggccggacaaca

SEQ ID NO: 4226857 - DNA, 25 bp, Homo sapien
tcgtgaccaggccggacaacatggc

SEQ ID NO: 4226858 - DNA, 25 bp, Homo sapien
gtgaccaggccggacaacatggcaa

SEQ ID NO: 4226859 - DNA, 25 bp, Homo sapien
aggagttcgtgaccaggccggacaa

SEQ ID NO: 4226860 - DNA, 25 bp, Homo sapien
tcgcacaaagtcatctcgagtttgg

SEQ ID NO: 4226861 - DNA, 25 bp, Homo sapien
ctcattcactaagagacctcgcaca

SEQ ID NO: 4226862 - DNA, 25 bp, Homo sapien
gagacctcgcacaaagtcatctcga

SEQ ID NO: 4226863 - DNA, 25 bp, Homo sapien
catctcgagtttggtagtcaaagtt

SEQ ID NO: 4226864 - DNA, 25 bp, Homo sapien
ctctcctaaagaggcattggaagac

SEQ ID NO: 4226865 - DNA, 25 bp, Homo sapien
ctctctcctaaagaggcattggaag

SEQ ID NO: 4226866 - DNA, 25 bp, Homo sapien
ctcctctctcctaaagaggcattgg

SEQ ID NO: 4226867 - DNA, 25 bp, Homo sapien
cctctctcctaaagaggcattggaa

SEQ ID NO: 4226868 - DNA, 25 bp, Homo sapien
aggaagaatgcccccaagtacaact

SEQ ID NO: 4226869 - DNA, 25 bp, Homo sapien
gggaggtcacctaagcaagaaagac

SEQ ID NO: 4226870 - DNA, 25 bp, Homo sapien
gaaagggaggtcacctaagcaagaa

SEQ ID NO: 4226871 - DNA, 25 bp, Homo sapien
gaggtcacctaagcaagaaagacag

SEQ ID NO: 4226872 - DNA, 25 bp, Homo sapien
tgctgtcagtgaagttcgcctctgg

SEQ ID NO: 4226873 - DNA, 25 bp, Homo sapien
tgttggtgataaagcaattgctgcc

SEQ ID NO: 4226874 - DNA, 25 bp, Homo sapien
taggttggagacacgggcaccatat

SEQ ID NO: 4226875 - DNA, 25 bp, Homo sapien
ctcaggccctcggtagatgttgtgc

SEQ ID NO: 4226876 - DNA, 25 bp, Homo sapien
gaaaggggcagtactattagacgca

SEQ ID NO: 4226877 - DNA, 25 bp, Homo sapien
cagtactattagacgcatcacactc

SEQ ID NO: 4226878 - DNA, 25 bp, Homo sapien
gggcagtactattagacgcatcaca

SEQ ID NO: 4226879 - DNA, 25 bp, Homo sapien
tggaaaggggcagtactattagacg

SEQ ID NO: 4226880 - DNA, 25 bp, Homo sapien
gacctctgggtaactcagggttcca

SEQ ID NO: 4226881 - DNA, 25 bp, Homo sapien
tatagactacacacagagcttaaga

SEQ ID NO: 4226882 - DNA, 25 bp, Homo sapien
gaatcatatccacgcctacaagcag

SEQ ID NO: 4226883 - DNA, 25 bp, Homo sapien
ctggctcaggatgggaagacctctg

SEQ ID NO: 4226884 - DNA, 25 bp, Homo sapien
caaagcagagactgatggatctgtg

SEQ ID NO: 4226885 - DNA, 25 bp, Homo sapien
acagagcgtggtttcagtgtcactc

SEQ ID NO: 4226886 - DNA, 25 bp, Homo sapien
agtgtcactcgttccttgacctcag

SEQ ID NO: 4226887 - DNA, 25 bp, Homo sapien
actcgaacaccctgccacaggtagg

SEQ ID NO: 4226888 - DNA, 25 bp, Homo sapien
tgtgcacagtatagatcaggtctca

SEQ ID NO: 4226889 - DNA, 25 bp, Homo sapien
ggaggaaaagtgcatcctgataatg

SEQ ID NO: 4226890 - DNA, 25 bp, Homo sapien
aaacacagaaccattagggtgtgga

SEQ ID NO: 4226891 - DNA, 25 bp, Homo sapien
gcatcctgataatgagagcaacttt

SEQ ID NO: 4226892 - DNA, 25 bp, Homo sapien
agcgtgatatttgggcccacgacca

SEQ ID NO: 4226893 - DNA, 25 bp, Homo sapien
gtgcaaagagatcaccgagccctca

SEQ ID NO: 4226894 - DNA, 25 bp, Homo sapien
tccttttcttggtcagccccagaat

SEQ ID NO: 4226895 - DNA, 25 bp, Homo sapien
cgagccctcaggcagcgtgatattt

SEQ ID NO: 4226896 - DNA, 25 bp, Homo sapien
gaggtagcccttgccagcagctcct

SEQ ID NO: 4226897 - DNA, 25 bp, Homo sapien
ttcctccatgttcatgcctgcagct

SEQ ID NO: 4226898 - DNA, 25 bp, Homo sapien
cctgcagctttccagaggtagccct

SEQ ID NO: 4226899 - DNA, 25 bp, Homo sapien
cacagattctgctgcagttcctcct

SEQ ID NO: 4226900 - DNA, 25 bp, Homo sapien
agggcaggcatcaggcctagctcac

SEQ ID NO: 4226901 - DNA, 25 bp, Homo sapien
caaaatattccgattcaggaggaga

SEQ ID NO: 4226902 - DNA, 25 bp, Homo sapien
aatattccgattcaggaggagaagg

SEQ ID NO: 4226903 - DNA, 25 bp, Homo sapien
ccttcaaaatattccgattcaggag

SEQ ID NO: 4226904 - DNA, 25 bp, Homo sapien
gatgtcatccatctgaggggagcct

SEQ ID NO: 4226905 - DNA, 25 bp, Homo sapien
cagaatccatactttgctcactttc

SEQ ID NO: 4226906 - DNA, 25 bp, Homo sapien
tgtcatccatctgaggggagcctcc

SEQ ID NO: 4226907 - DNA, 25 bp, Homo sapien
tcctcagaatccatactttgctcac

SEQ ID NO: 4226908 - DNA, 25 bp, Homo sapien
ccaggacgagattgtcacaagaaat

SEQ ID NO: 4226909 - DNA, 25 bp, Homo sapien
gagagagttgatttccaggacgaga

SEQ ID NO: 4226910 - DNA, 25 bp, Homo sapien
atgttctcctctttgccccgctgta

SEQ ID NO: 4226911 - DNA, 25 bp, Homo sapien
tgccccgctgtagtgttcctaaaac

SEQ ID NO: 4226912 - DNA, 25 bp, Homo sapien
gaataggttcctatttggagacaaa

SEQ ID NO: 4226913 - DNA, 25 bp, Homo sapien
gctccaaatactactggtctttcca

SEQ ID NO: 4226914 - DNA, 25 bp, Homo sapien
gaaggagaaagtctatgctgaggct

SEQ ID NO: 4226915 - DNA, 25 bp, Homo sapien
ggtctttccatttgggatgtcgaag

SEQ ID NO: 4226916 - DNA, 25 bp, Homo sapien
agcaggcttagaactatgactttga

SEQ ID NO: 4226917 - DNA, 25 bp, Homo sapien
gaactatgactttgatagacattgg

SEQ ID NO: 4226918 - DNA, 25 bp, Homo sapien
gcttagaactatgactttgatagac

SEQ ID NO: 4226919 - DNA, 25 bp, Homo sapien
tatgactttgatagacattggagag

SEQ ID NO: 4226920 - DNA, 25 bp, Homo sapien
ctttagacttatgttataggcatac

SEQ ID NO: 4226921 - DNA, 25 bp, Homo sapien
cctttagacttatgttataggcata

SEQ ID NO: 4226922 - DNA, 25 bp, Homo sapien
cctcctttagacttatgttataggc

SEQ ID NO: 4226923 - DNA, 25 bp, Homo sapien
cacctcctttagacttatgttatag

SEQ ID NO: 4226924 - DNA, 25 bp, Homo sapien
cagggcacagtagcggcttgagtca

SEQ ID NO: 4226925 - DNA, 25 bp, Homo sapien
gagtcaagcggggaatccatctgtt

SEQ ID NO: 4226926 - DNA, 25 bp, Homo sapien
ccatctgttgcagggggaactccag

SEQ ID NO: 4226927 - DNA, 25 bp, Homo sapien
cacagtagcggcttgagtcaagcgg

SEQ ID NO: 4226928 - DNA, 25 bp, Homo sapien
gatcagatgctataggctgcctcaa

SEQ ID NO: 4226929 - DNA, 25 bp, Homo sapien
tactgatgacatgggtggacaaaag

SEQ ID NO: 4226930 - DNA, 25 bp, Homo sapien
gaagggagctgcagtatattcctaa

SEQ ID NO: 4226931 - DNA, 25 bp, Homo sapien
catagagtctgaatgtccaggtcca

SEQ ID NO: 4226932 - DNA, 25 bp, Homo sapien
caagagcttcatgctctaggaagaa

SEQ ID NO: 4226933 - DNA, 25 bp, Homo sapien
gctgcgcgctttatgtagttcctaa

SEQ ID NO: 4226934 - DNA, 25 bp, Homo sapien
cttccaaatggtcggctgcgcgctt

SEQ ID NO: 4226935 - DNA, 25 bp, Homo sapien
aggaagaagtcctcaatggctgcta

SEQ ID NO: 4226936 - DNA, 25 bp, Homo sapien
tcctccaaaacggacaagagtgagc

SEQ ID NO: 4226937 - DNA, 25 bp, Homo sapien
gatccctctatgcactgagtagcct

SEQ ID NO: 4226938 - DNA, 25 bp, Homo sapien
cagatggctaccttattagtccggc

SEQ ID NO: 4226939 - DNA, 25 bp, Homo sapien
caaccctcgtttgaaagcaagtgca

SEQ ID NO: 4226940 - DNA, 25 bp, Homo sapien
cagttgtatctctttggctgaacca

SEQ ID NO: 4226941 - DNA, 25 bp, Homo sapien
tgctcccctcggcagataaacagct

SEQ ID NO: 4226942 - DNA, 25 bp, Homo sapien
caggacctgggaatgagataaccat

SEQ ID NO: 4226943 - DNA, 25 bp, Homo sapien
agaaaccaaccaccctagagtctag

SEQ ID NO: 4226944 - DNA, 25 bp, Homo sapien
ccatcttggcgagaggaggacagcc

SEQ ID NO: 4226945 - DNA, 25 bp, Homo sapien
cttctgcctcttttagccactggat

SEQ ID NO: 4226946 - DNA, 25 bp, Homo sapien
ttagccactggatgaacctctgcag

SEQ ID NO: 4226947 - DNA, 25 bp, Homo sapien
tcttcagatgactcctcttctgcct

SEQ ID NO: 4226948 - DNA, 25 bp, Homo sapien
catcttcagatgactcctcttctgc

SEQ ID NO: 4226949 - DNA, 25 bp, Homo sapien
tgcttagctcctccctaggcagaag

SEQ ID NO: 4226950 - DNA, 25 bp, Homo sapien
tctcagcctggatggtggtcactca

SEQ ID NO: 4226951 - DNA, 25 bp, Homo sapien
tccacagtcaggatgggaggcacat

SEQ ID NO: 4226952 - DNA, 25 bp, Homo sapien
tcaatcacacccaaaggagcaggca

SEQ ID NO: 4226953 - DNA, 25 bp, Homo sapien
cagcaaagtaacaagctccaggtca

SEQ ID NO: 4226954 - DNA, 25 bp, Homo sapien
tgaaacacaatacgctgaaggacag

SEQ ID NO: 4226955 - DNA, 25 bp, Homo sapien
tactagctagggaagctctgtgagc

SEQ ID NO: 4226956 - DNA, 25 bp, Homo sapien
gtaaacactctcaagggaaagcacc

SEQ ID NO: 4226957 - DNA, 25 bp, Homo sapien
tcctggttggtgtaacttgcatctc

SEQ ID NO: 4226958 - DNA, 25 bp, Homo sapien
tcatcagtgacaaacatcctcttct

SEQ ID NO: 4226959 - DNA, 25 bp, Homo sapien
gaaatttgcacagccatcttgccgc

SEQ ID NO: 4226960 - DNA, 25 bp, Homo sapien
tgtaacttgcatctcaactccagag

SEQ ID NO: 4226961 - DNA, 25 bp, Homo sapien
tagcagtcagttcccgaatccgtca

SEQ ID NO: 4226962 - DNA, 25 bp, Homo sapien
ctatagcagtcagttcccgaatccg

SEQ ID NO: 4226963 - DNA, 25 bp, Homo sapien
gttcccgaatccgtcagcccttctc

SEQ ID NO: 4226964 - DNA, 25 bp, Homo sapien
ttcccgaatccgtcagcccttctca

SEQ ID NO: 4226965 - DNA, 25 bp, Homo sapien
acctctagtggcaaccttttcagca

SEQ ID NO: 4226966 - DNA, 25 bp, Homo sapien
cacacagacctctagtggcaacctt

SEQ ID NO: 4226967 - DNA, 25 bp, Homo sapien
cctctagtggcaaccttttcagcat

SEQ ID NO: 4226968 - DNA, 25 bp, Homo sapien
gcaatggcacacagacctctagtgg

SEQ ID NO: 4226969 - DNA, 25 bp, Homo sapien
tctccactgtggatcgtcaggccat

SEQ ID NO: 4226970 - DNA, 25 bp, Homo sapien
tgtctgagcaacacgtggcacacag

SEQ ID NO: 4226971 - DNA, 25 bp, Homo sapien
tagtagttaatagggtctccactgt

SEQ ID NO: 4226972 - DNA, 25 bp, Homo sapien
cggagtttcccagacgccatgacct

SEQ ID NO: 4226973 - DNA, 25 bp, Homo sapien
tatgctgtagggactggctggggca

SEQ ID NO: 4226974 - DNA, 25 bp, Homo sapien
tagggccagtcttaccagttgggtc

SEQ ID NO: 4226975 - DNA, 25 bp, Homo sapien
ggcatggcagatggctctggcttcc

SEQ ID NO: 4226976 - DNA, 25 bp, Homo sapien
gccagtcttaccagttgggtcccag

SEQ ID NO: 4226977 - DNA, 25 bp, Homo sapien
actctcccgactggactggcgaccg

SEQ ID NO: 4226978 - DNA, 25 bp, Homo sapien
tggcgaccgcgactcttccggtggc

SEQ ID NO: 4226979 - DNA, 25 bp, Homo sapien
gactggactggcgaccgcgactctt

SEQ ID NO: 4226980 - DNA, 25 bp, Homo sapien
gctcccttgttctccggccgctacc

SEQ ID NO: 4226981 - DNA, 25 bp, Homo sapien
ccgcgcgcggcctgctcgggcggcc

SEQ ID NO: 4226982 - DNA, 25 bp, Homo sapien
gaaatcgtcgtccatagacttgaag

SEQ ID NO: 4226983 - DNA, 25 bp, Homo sapien
ttaaagtccgccaaggtgacgcgct

SEQ ID NO: 4226984 - DNA, 25 bp, Homo sapien
gaagaagaacttatagctgggtcgc

SEQ ID NO: 4226985 - DNA, 25 bp, Homo sapien
tgggtcgctgcaaaacgcccttaaa

SEQ ID NO: 4226986 - DNA, 25 bp, Homo sapien
aaggtgcttgcttcctagtgctagg

SEQ ID NO: 4226987 - DNA, 25 bp, Homo sapien
gaaggtgacagcaaaacatgccagg

SEQ ID NO: 4226988 - DNA, 25 bp, Homo sapien
catccaaccctgagttccagggcag

SEQ ID NO: 4226989 - DNA, 25 bp, Homo sapien
aggcccagcgcccagttagtgaggc

SEQ ID NO: 4226990 - DNA, 25 bp, Homo sapien
tatcttagtccctcaaggcatctgg

SEQ ID NO: 4226991 - DNA, 25 bp, Homo sapien
ggctgaaggcagacaatcattatca

SEQ ID NO: 4226992 - DNA, 25 bp, Homo sapien
tatgtggaggcagtagcttgatccc

SEQ ID NO: 4226993 - DNA, 25 bp, Homo sapien
caattagaggtgtctgtctctgggc

SEQ ID NO: 4226994 - DNA, 25 bp, Homo sapien
cacccggccattgaagcatggtagc

SEQ ID NO: 4226995 - DNA, 25 bp, Homo sapien
acaccacccggccattgaagcatgg

SEQ ID NO: 4226996 - DNA, 25 bp, Homo sapien
ccggccattgaagcatggtagcttg

SEQ ID NO: 4226997 - DNA, 25 bp, Homo sapien
cattgaagcatggtagcttggcatt

SEQ ID NO: 4226998 - DNA, 25 bp, Homo sapien
gtggcagctccgatgggttatcagc

SEQ ID NO: 4226999 - DNA, 25 bp, Homo sapien
tgcgctccataggtggtggcagctc

SEQ ID NO: 4227000 - DNA, 25 bp, Homo sapien
ggcagctccgatgggttatcagcac

SEQ ID NO: 4227001 - DNA, 25 bp, Homo sapien
ggagtccccgatgcctcccgtgcgc

SEQ ID NO: 4227002 - DNA, 25 bp, Homo sapien
ccggcgtggccgctctcgctgggca

SEQ ID NO: 4227003 - DNA, 25 bp, Homo sapien
gacaccaaagagtccgtctctgtgt

SEQ ID NO: 4227004 - DNA, 25 bp, Homo sapien
ctcgctgggcagacaccaaagagtc

SEQ ID NO: 4227005 - DNA, 25 bp, Homo sapien
gctctcgctgggcagacaccaaaga

SEQ ID NO: 4227006 - DNA, 25 bp, Homo sapien
atatcctgagctcgggaagtagggc

SEQ ID NO: 4227007 - DNA, 25 bp, Homo sapien
tggggccaggcatatcctgagctcg

SEQ ID NO: 4227008 - DNA, 25 bp, Homo sapien
ctggggccaggcatatcctgagctc

SEQ ID NO: 4227009 - DNA, 25 bp, Homo sapien
cccttcgcagttccatttagccggg

SEQ ID NO: 4227010 - DNA, 25 bp, Homo sapien
ttcgcagttccatttagccgggttg

SEQ ID NO: 4227011 - DNA, 25 bp, Homo sapien
ctcactgctcataagggtggatgag

SEQ ID NO: 4227012 - DNA, 25 bp, Homo sapien
gatgagctatcataaccccctggtt

SEQ ID NO: 4227013 - DNA, 25 bp, Homo sapien
cccacaatacccatgaaactcaagc

SEQ ID NO: 4227014 - DNA, 25 bp, Homo sapien
ctgccccacaatacccatgaaactc

SEQ ID NO: 4227015 - DNA, 25 bp, Homo sapien
cacaatacccatgaaactcaagccc

SEQ ID NO: 4227016 - DNA, 25 bp, Homo sapien
aatacccatgaaactcaagccccac

SEQ ID NO: 4227017 - DNA, 25 bp, Homo sapien
cacaaagcccataagcctcccaggg

SEQ ID NO: 4227018 - DNA, 25 bp, Homo sapien
ctgggtccccaacacaaagcccata

SEQ ID NO: 4227019 - DNA, 25 bp, Homo sapien
caaagcccataagcctcccaggggc

SEQ ID NO: 4227020 - DNA, 25 bp, Homo sapien
acacaaagcccataagcctcccagg

SEQ ID NO: 4227021 - DNA, 25 bp, Homo sapien
ctgtggggcccacagtcgttcccca

SEQ ID NO: 4227022 - DNA, 25 bp, Homo sapien
tgtggggcccacagtcgttccccac

SEQ ID NO: 4227023 - DNA, 25 bp, Homo sapien
aatccgagaaaccttctgcttccgc

SEQ ID NO: 4227024 - DNA, 25 bp, Homo sapien
ccgctcaatccgagaaaccttctgc

SEQ ID NO: 4227025 - DNA, 25 bp, Homo sapien
tcaatccgagaaaccttctgcttcc

SEQ ID NO: 4227026 - DNA, 25 bp, Homo sapien
gctcaatccgagaaaccttctgctt

SEQ ID NO: 4227027 - DNA, 25 bp, Homo sapien
ttgagtgacatggtggagtccgtga

SEQ ID NO: 4227028 - DNA, 25 bp, Homo sapien
ttgagagtgaccgtgatgatgttga

SEQ ID NO: 4227029 - DNA, 25 bp, Homo sapien
gaccgtgatgatgttgagtgacatg

SEQ ID NO: 4227030 - DNA, 25 bp, Homo sapien
ccatgttgagagtgaccgtgatgat

SEQ ID NO: 4227031 - DNA, 25 bp, Homo sapien
gccgtcaccacgctcgttgctttgg

SEQ ID NO: 4227032 - DNA, 25 bp, Homo sapien
tcctggctcgatgcgtccatcagca

SEQ ID NO: 4227033 - DNA, 25 bp, Homo sapien
catatctcctggctcgatgcgtcca

SEQ ID NO: 4227034 - DNA, 25 bp, Homo sapien
gccgccgtcaccacgctcgttgctt

SEQ ID NO: 4227035 - DNA, 25 bp, Homo sapien
cccggactgcatcgtcattactcat

SEQ ID NO: 4227036 - DNA, 25 bp, Homo sapien
tacccggactgcatcgtcattactc

SEQ ID NO: 4227037 - DNA, 25 bp, Homo sapien
gactgcatcgtcattactcatgttc

SEQ ID NO: 4227038 - DNA, 25 bp, Homo sapien
agtacccggactgcatcgtcattac

SEQ ID NO: 4227039 - DNA, 25 bp, Homo sapien
gcccagtgccccattccatccatac

SEQ ID NO: 4227040 - DNA, 25 bp, Homo sapien
aagccccttgcccagtgccccattc

SEQ ID NO: 4227041 - DNA, 25 bp, Homo sapien
ccccttgcccagtgccccattccat

SEQ ID NO: 4227042 - DNA, 25 bp, Homo sapien
ttgcccagtgccccattccatccat

SEQ ID NO: 4227043 - DNA, 25 bp, Homo sapien
ctagtgaaggcaggatgcgtatagg

SEQ ID NO: 4227044 - DNA, 25 bp, Homo sapien
tgaaggcaggatgcgtataggccag

SEQ ID NO: 4227045 - DNA, 25 bp, Homo sapien
aaggcaggatgcgtataggccagac

SEQ ID NO: 4227046 - DNA, 25 bp, Homo sapien
ctgaaaacaagggtgtcctagtgaa

SEQ ID NO: 4227047 - DNA, 25 bp, Homo sapien
ttgggtcccagcacttggctacagt

SEQ ID NO: 4227048 - DNA, 25 bp, Homo sapien
tcccagcacttggctacagtcaggg

SEQ ID NO: 4227049 - DNA, 25 bp, Homo sapien
cagcacttggctacagtcagggtga

SEQ ID NO: 4227050 - DNA, 25 bp, Homo sapien
tgggtcccagcacttggctacagtc

SEQ ID NO: 4227051 - DNA, 25 bp, Homo sapien
ggcaatgtgaagcaaccacgtggac

SEQ ID NO: 4227052 - DNA, 25 bp, Homo sapien
gggcaatgtgaagcaaccacgtgga

SEQ ID NO: 4227053 - DNA, 25 bp, Homo sapien
ctgggcccaacaggatagatatggg

SEQ ID NO: 4227054 - DNA, 25 bp, Homo sapien
tgctgggcccaacaggatagatatg

SEQ ID NO: 4227055 - DNA, 25 bp, Homo sapien
gcccaacaggatagatatgggggtt

SEQ ID NO: 4227056 - DNA, 25 bp, Homo sapien
actgctgggcccaacaggatagata

SEQ ID NO: 4227057 - DNA, 25 bp, Homo sapien
gtcatggctgcagtgtgggagaccc

SEQ ID NO: 4227058 - DNA, 25 bp, Homo sapien
gatggaactggtgatggaggagctg

SEQ ID NO: 4227059 - DNA, 25 bp, Homo sapien
cgcagggtcaatgggccggatgggc

SEQ ID NO: 4227060 - DNA, 25 bp, Homo sapien
cagggaggggctcatgccgtatgca

SEQ ID NO: 4227061 - DNA, 25 bp, Homo sapien
gatggacaagtggaagtcgtctagg

SEQ ID NO: 4227062 - DNA, 25 bp, Homo sapien
cgatgaaagcattagggatggtaat

SEQ ID NO: 4227063 - DNA, 25 bp, Homo sapien
acggacctccaaccctgattcaggg

SEQ ID NO: 4227064 - DNA, 25 bp, Homo sapien
ggaggccatggcttttacgatggca

SEQ ID NO: 4227065 - DNA, 25 bp, Homo sapien
gaggtcaccgaagatgtagtagcac

SEQ ID NO: 4227066 - DNA, 25 bp, Homo sapien
ctccggtccgtgaagccttccacat

SEQ ID NO: 4227067 - DNA, 25 bp, Homo sapien
tcagcaggttgctggcatacttgcg

SEQ ID NO: 4227068 - DNA, 25 bp, Homo sapien
tcttgttgacggtatggcggatgaa

SEQ ID NO: 4227069 - DNA, 25 bp, Homo sapien
tagctgagaccttgacgagtgagaa

SEQ ID NO: 4227070 - DNA, 25 bp, Homo sapien
caggtgaagaggctaaactggactc

SEQ ID NO: 4227071 - DNA, 25 bp, Homo sapien
ttaagcctacaacaccctagctgag

SEQ ID NO: 4227072 - DNA, 25 bp, Homo sapien
gcacttagaaaatgccaggcccaag

SEQ ID NO: 4227073 - DNA, 25 bp, Homo sapien
gaacagacgcgaagagtagcttact

SEQ ID NO: 4227074 - DNA, 25 bp, Homo sapien
ttcatgaggcacaatagcgaacact

SEQ ID NO: 4227075 - DNA, 25 bp, Homo sapien
tagacagccaccaggtatgtcgcac

SEQ ID NO: 4227076 - DNA, 25 bp, Homo sapien
tcactcagctggtgcaagactggag

SEQ ID NO: 4227077 - DNA, 25 bp, Homo sapien
tgtcctggtcagaggcgccactgga

SEQ ID NO: 4227078 - DNA, 25 bp, Homo sapien
cccgggtgcgggttgtatgggtgcg

SEQ ID NO: 4227079 - DNA, 25 bp, Homo sapien
tactggtacgggaaagccatgggcc

SEQ ID NO: 4227080 - DNA, 25 bp, Homo sapien
catcgtgatcgtggagagacaggtt

SEQ ID NO: 4227081 - DNA, 25 bp, Homo sapien
ctgcgtgtggtgtggtccgattcgc

SEQ ID NO: 4227082 - DNA, 25 bp, Homo sapien
tacggttggagccactgctccgact

SEQ ID NO: 4227083 - DNA, 25 bp, Homo sapien
ttcctccgatcgctgccgctacggt

SEQ ID NO: 4227084 - DNA, 25 bp, Homo sapien
tgtggtccgattcgctgccgctgcc

SEQ ID NO: 4227085 - DNA, 25 bp, Homo sapien
tcgctggccgccggccctgagcgct

SEQ ID NO: 4227086 - DNA, 25 bp, Homo sapien
gtggctgtgctcgctggccgccggc

SEQ ID NO: 4227087 - DNA, 25 bp, Homo sapien
ggccagggaatggtggctgcggtgg

SEQ ID NO: 4227088 - DNA, 25 bp, Homo sapien
tggccgccggccctgagcgctcgct

SEQ ID NO: 4227089 - DNA, 25 bp, Homo sapien
accgtagctcgggtgtgtgtggtgg

SEQ ID NO: 4227090 - DNA, 25 bp, Homo sapien
gcggcgggggcatcatcagcatggg

SEQ ID NO: 4227091 - DNA, 25 bp, Homo sapien
ctgaggccaggtcgcggcccggagg

SEQ ID NO: 4227092 - DNA, 25 bp, Homo sapien
gggcactccgggaggaccgtagctc

SEQ ID NO: 4227093 - DNA, 25 bp, Homo sapien
actgtctgctggcggtcagttccgg

SEQ ID NO: 4227094 - DNA, 25 bp, Homo sapien
tggccatgcggaaggactgtctgct

SEQ ID NO: 4227095 - DNA, 25 bp, Homo sapien
ggactgtctgctggcggtcagttcc

SEQ ID NO: 4227096 - DNA, 25 bp, Homo sapien
gaaggactgtctgctggcggtcagt

SEQ ID NO: 4227097 - DNA, 25 bp, Homo sapien
tcacatcacatccacaaagaactca

SEQ ID NO: 4227098 - DNA, 25 bp, Homo sapien
cacatcacatccacaaagaactcac

SEQ ID NO: 4227099 - DNA, 25 bp, Homo sapien
aaagacggacggatggagagaggaa

SEQ ID NO: 4227100 - DNA, 25 bp, Homo sapien
cggacggatggagagaggaacgcag

SEQ ID NO: 4227101 - DNA, 25 bp, Homo sapien
gacggacggatggagagaggaacgc

SEQ ID NO: 4227102 - DNA, 25 bp, Homo sapien
taaaaaagacggacggatggagaga

SEQ ID NO: 4227103 - DNA, 25 bp, Homo sapien
gtcaagaggtttgcacacgtgcctg

SEQ ID NO: 4227104 - DNA, 25 bp, Homo sapien
gagtgagcgtgccaccaaggtcatt

SEQ ID NO: 4227105 - DNA, 25 bp, Homo sapien
cgactacagctttaggttgcaggac

SEQ ID NO: 4227106 - DNA, 25 bp, Homo sapien
catggatggctattggaggcgacta

SEQ ID NO: 4227107 - DNA, 25 bp, Homo sapien
tacggaactgtccatagagatgtcc

SEQ ID NO: 4227108 - DNA, 25 bp, Homo sapien
tcaaagatggaacgatggaagcact

SEQ ID NO: 4227109 - DNA, 25 bp, Homo sapien
tctcatgcatgggtgaagttgggcc

SEQ ID NO: 4227110 - DNA, 25 bp, Homo sapien
cataaatgtttctagctggtgagcc

SEQ ID NO: 4227111 - DNA, 25 bp, Homo sapien
ccatgctccaatgaattaaagtaga

SEQ ID NO: 4227112 - DNA, 25 bp, Homo sapien
gctaggcacttttcgtacaatatct

SEQ ID NO: 4227113 - DNA, 25 bp, Homo sapien
catcattttacatacgagggaactg

SEQ ID NO: 4227114 - DNA, 25 bp, Homo sapien
ggttaaataactctatcacacaacc

SEQ ID NO: 4227115 - DNA, 25 bp, Homo sapien
ggatcccaagatgtccgcccgcccc

SEQ ID NO: 4227116 - DNA, 25 bp, Homo sapien
tgcccgctgcctcggctttcaccgc

SEQ ID NO: 4227117 - DNA, 25 bp, Homo sapien
ggccactctccggatcccaagatgt

SEQ ID NO: 4227118 - DNA, 25 bp, Homo sapien
tgcctcggctttcaccgcagtgccg

SEQ ID NO: 4227119 - DNA, 25 bp, Homo sapien
tgacagtggtgaataagggaaagct

SEQ ID NO: 4227120 - DNA, 25 bp, Homo sapien
gtagcgaagggcacccgagaaccag

SEQ ID NO: 4227121 - DNA, 25 bp, Homo sapien
caaactgggctggtggagtgaacgt

SEQ ID NO: 4227122 - DNA, 25 bp, Homo sapien
gggctgtcacaggtctaaggaagaa

SEQ ID NO: 4227123 - DNA, 25 bp, Homo sapien
taaaagaagacctcagaatcgctgc

SEQ ID NO: 4227124 - DNA, 25 bp, Homo sapien
gtaaaagaagacctcagaatcgctg

SEQ ID NO: 4227125 - DNA, 25 bp, Homo sapien
ggtaaaagaagacctcagaatcgct

SEQ ID NO: 4227126 - DNA, 25 bp, Homo sapien
gggtaaaagaagacctcagaatcgc

SEQ ID NO: 4227127 - DNA, 25 bp, Homo sapien
tctccgcggcccatcgctctgagaa

SEQ ID NO: 4227128 - DNA, 25 bp, Homo sapien
gtctccgcggcccatcgctctgaga

SEQ ID NO: 4227129 - DNA, 25 bp, Homo sapien
gcagatcagtctccgcggcccatcg

SEQ ID NO: 4227130 - DNA, 25 bp, Homo sapien
ggcggcagatcagtctccgcggccc

SEQ ID NO: 4227131 - DNA, 25 bp, Homo sapien
tagactcgggagatgagcacctccc

SEQ ID NO: 4227132 - DNA, 25 bp, Homo sapien
cctcccccttgtgattatagatgaa

SEQ ID NO: 4227133 - DNA, 25 bp, Homo sapien
tatagatgaataagcctccaatcat

SEQ ID NO: 4227134 - DNA, 25 bp, Homo sapien
ccgatgtcatctcggtagactcggg

SEQ ID NO: 4227135 - DNA, 25 bp, Homo sapien
ggaatgggccagaggaactgaagac

SEQ ID NO: 4227136 - DNA, 25 bp, Homo sapien
gggaatgggccagaggaactgaaga

SEQ ID NO: 4227137 - DNA, 25 bp, Homo sapien
agggaatgggccagaggaactgaag

SEQ ID NO: 4227138 - DNA, 25 bp, Homo sapien
gaatgggccagaggaactgaagaca

SEQ ID NO: 4227139 - DNA, 25 bp, Homo sapien
gataggtcccttcagtcgcaaagaa

SEQ ID NO: 4227140 - DNA, 25 bp, Homo sapien
gagcctactctttagcgcctcggag

SEQ ID NO: 4227141 - DNA, 25 bp, Homo sapien
tactgagagggtagcatggcttccc

SEQ ID NO: 4227142 - DNA, 25 bp, Homo sapien
tcgcaaagaacaagggcgtgcaagg

SEQ ID NO: 4227143 - DNA, 25 bp, Homo sapien
gaggaattcgaagaccatggcagcg

SEQ ID NO: 4227144 - DNA, 25 bp, Homo sapien
gctgccgggcatggataacattgac

SEQ ID NO: 4227145 - DNA, 25 bp, Homo sapien
catcacgtcacacatcttatagagg

SEQ ID NO: 4227146 - DNA, 25 bp, Homo sapien
taacattgacccgaaaggcatccac

SEQ ID NO: 4227147 - DNA, 25 bp, Homo sapien
tcaatagaagagtcacatggccagt

SEQ ID NO: 4227148 - DNA, 25 bp, Homo sapien
tgaactaaggtccaagccacaaagg

SEQ ID NO: 4227149 - DNA, 25 bp, Homo sapien
tagccccttggaagatcacctgctg

SEQ ID NO: 4227150 - DNA, 25 bp, Homo sapien
gataacagtgcaccccaagaggctt

SEQ ID NO: 4227151 - DNA, 25 bp, Homo sapien
gatgaaggttttcagcgcgcctgtc

SEQ ID NO: 4227152 - DNA, 25 bp, Homo sapien
tctgtgggtagccaaagtctagaat

SEQ ID NO: 4227153 - DNA, 25 bp, Homo sapien
tgtgggtagccaaagtctagaatct

SEQ ID NO: 4227154 - DNA, 25 bp, Homo sapien
agcgcgcctgtctcggaattctgtg

SEQ ID NO: 4227155 - DNA, 25 bp, Homo sapien
tcctcctgaggaataccaggcctca

SEQ ID NO: 4227156 - DNA, 25 bp, Homo sapien
agagggcccaagctcgctcctcctg

SEQ ID NO: 4227157 - DNA, 25 bp, Homo sapien
aaagctatgaggcttggatcctaga

SEQ ID NO: 4227158 - DNA, 25 bp, Homo sapien
tgaggaataccaggcctcaagacca

SEQ ID NO: 4227159 - DNA, 25 bp, Homo sapien
caaagcaaagctgcaagggtggaag

SEQ ID NO: 4227160 - DNA, 25 bp, Homo sapien
aacaaagcaaagctgcaagggtgga

SEQ ID NO: 4227161 - DNA, 25 bp, Homo sapien
tgtaatccattttcccctataagcc

SEQ ID NO: 4227162 - DNA, 25 bp, Homo sapien
aagcaaagctgcaagggtggaagct

SEQ ID NO: 4227163 - DNA, 25 bp, Homo sapien
ccccactccaccctcattccccatc

SEQ ID NO: 4227164 - DNA, 25 bp, Homo sapien
acaaacagcaatggcctcactcctc

SEQ ID NO: 4227165 - DNA, 25 bp, Homo sapien
tcatcctgtctctatccccactcca

SEQ ID NO: 4227166 - DNA, 25 bp, Homo sapien
caaacagcaatggcctcactcctct

SEQ ID NO: 4227167 - DNA, 25 bp, Homo sapien
tggctggtgatctgtgactgctctt

SEQ ID NO: 4227168 - DNA, 25 bp, Homo sapien
ggctggtgatctgtgactgctcttc

SEQ ID NO: 4227169 - DNA, 25 bp, Homo sapien
gacgatacttgataccctctcgccg

SEQ ID NO: 4227170 - DNA, 25 bp, Homo sapien
agcaggttcacactctccagcacat

SEQ ID NO: 4227171 - DNA, 25 bp, Homo sapien
aggaagagctcattccgacgatact

SEQ ID NO: 4227172 - DNA, 25 bp, Homo sapien
gggacatgagcaggttcacactctc

SEQ ID NO: 4227173 - DNA, 25 bp, Homo sapien
tggtgatggaacagataaatgggga

SEQ ID NO: 4227174 - DNA, 25 bp, Homo sapien
gggagcagcggagtcaggcaggcag

SEQ ID NO: 4227175 - DNA, 25 bp, Homo sapien
cctccaactttgtcgtgagagggac

SEQ ID NO: 4227176 - DNA, 25 bp, Homo sapien
cccctccaactttgtcgtgagaggg

SEQ ID NO: 4227177 - DNA, 25 bp, Homo sapien
gtcattcatcccaaacttgcattca

SEQ ID NO: 4227178 - DNA, 25 bp, Homo sapien
ccggcccgacacatgggcactcagc

SEQ ID NO: 4227179 - DNA, 25 bp, Homo sapien
cttttcaataacaatcttgtcattc

SEQ ID NO: 4227180 - DNA, 25 bp, Homo sapien
gcattcaggcatgccactcaggtag

SEQ ID NO: 4227181 - DNA, 25 bp, Homo sapien
tgcttgtttcatcagctgtgccttt

SEQ ID NO: 4227182 - DNA, 25 bp, Homo sapien
cttgcttgtttcatcagctgtgcct

SEQ ID NO: 4227183 - DNA, 25 bp, Homo sapien
gcttgtttcatcagctgtgcctttg

SEQ ID NO: 4227184 - DNA, 25 bp, Homo sapien
ctcttgcttgtttcatcagctgtgc

SEQ ID NO: 4227185 - DNA, 25 bp, Homo sapien
gctgatgctgcgttcagagtcaaac

SEQ ID NO: 4227186 - DNA, 25 bp, Homo sapien
tcaaactctccatctggcgggataa

SEQ ID NO: 4227187 - DNA, 25 bp, Homo sapien
aaacttgctgagtcgcacacactgg

SEQ ID NO: 4227188 - DNA, 25 bp, Homo sapien
ggaaggtgcagtcatcaatggcaat

SEQ ID NO: 4227189 - DNA, 25 bp, Homo sapien
gaagcaaggttaccaaagagctgac

SEQ ID NO: 4227190 - DNA, 25 bp, Homo sapien
cagtctgccagcagcactagctgcc

SEQ ID NO: 4227191 - DNA, 25 bp, Homo sapien
caaggttaccaaagagctgacccac

SEQ ID NO: 4227192 - DNA, 25 bp, Homo sapien
ggatgggaagcaaggttaccaaaga

SEQ ID NO: 4227193 - DNA, 25 bp, Homo sapien
cactagcgggatcacccggaaggga

SEQ ID NO: 4227194 - DNA, 25 bp, Homo sapien
gagccagcagtgagggtttaaagtt

SEQ ID NO: 4227195 - DNA, 25 bp, Homo sapien
gacctccagtttggtgcgtcccact

SEQ ID NO: 4227196 - DNA, 25 bp, Homo sapien
tggacttgatgaccaccttgacctc

SEQ ID NO: 4227197 - DNA, 25 bp, Homo sapien
ctgcaccccgcttgtgttcagtggg

SEQ ID NO: 4227198 - DNA, 25 bp, Homo sapien
tccccttcatgcagatcacctgcac

SEQ ID NO: 4227199 - DNA, 25 bp, Homo sapien
cacgatggcattctcgctggccttg

SEQ ID NO: 4227200 - DNA, 25 bp, Homo sapien
tccacacgatggcattctcgctggc

SEQ ID NO: 4227201 - DNA, 25 bp, Homo sapien
ctgtggcctaatgaaggaaagactc

SEQ ID NO: 4227202 - DNA, 25 bp, Homo sapien
gtggcctaatgaaggaaagactcac

SEQ ID NO: 4227203 - DNA, 25 bp, Homo sapien
tgctgtggcctaatgaaggaaagac

SEQ ID NO: 4227204 - DNA, 25 bp, Homo sapien
ctgctgtggcctaatgaaggaaaga

SEQ ID NO: 4227205 - DNA, 25 bp, Homo sapien
gacacttggacatgctatcgtttgc

SEQ ID NO: 4227206 - DNA, 25 bp, Homo sapien
ggcgtgtacatactcacatggaggt

SEQ ID NO: 4227207 - DNA, 25 bp, Homo sapien
catgaacccaaatgcaggcgtgtac

SEQ ID NO: 4227208 - DNA, 25 bp, Homo sapien
ttacaaagggaaatgccaaagcatc

SEQ ID NO: 4227209 - DNA, 25 bp, Homo sapien
tctgcgctgatctgcgattccttca

SEQ ID NO: 4227210 - DNA, 25 bp, Homo sapien
gaagctcaatctctgcgctgatctg

SEQ ID NO: 4227211 - DNA, 25 bp, Homo sapien
gtaggcagaagctcaatctctgcgc

SEQ ID NO: 4227212 - DNA, 25 bp, Homo sapien
catttcttcttgtcgttggtaggca

SEQ ID NO: 4227213 - DNA, 25 bp, Homo sapien
ggatctatgaattaaagccagttct

SEQ ID NO: 4227214 - DNA, 25 bp, Homo sapien
taaggtgcagcagtttatcggaatg

SEQ ID NO: 4227215 - DNA, 25 bp, Homo sapien
agtaatttctactaagaggcttgaa

SEQ ID NO: 4227216 - DNA, 25 bp, Homo sapien
tatcggaatgatctctaagaggtct

SEQ ID NO: 4227217 - DNA, 25 bp, Homo sapien
gaactgtgttaggacaagccgagag

SEQ ID NO: 4227218 - DNA, 25 bp, Homo sapien
aagaagaaagccctacctgtgacac

SEQ ID NO: 4227219 - DNA, 25 bp, Homo sapien
gctagttagaaatgtggccttcctc

SEQ ID NO: 4227220 - DNA, 25 bp, Homo sapien
tctaacatgcgcaaagcaaagtcag

SEQ ID NO: 4227221 - DNA, 25 bp, Homo sapien
tgaggccagagggcgcgaatggcac

SEQ ID NO: 4227222 - DNA, 25 bp, Homo sapien
cttgaggccagagggcgcgaatggc

SEQ ID NO: 4227223 - DNA, 25 bp, Homo sapien
ttgaggccagagggcgcgaatggca

SEQ ID NO: 4227224 - DNA, 25 bp, Homo sapien
cataaatgccactgcggccaatgta

SEQ ID NO: 4227225 - DNA, 25 bp, Homo sapien
ggttcaaacaccttcaagtagcgca

SEQ ID NO: 4227226 - DNA, 25 bp, Homo sapien
tgtagcgcacccatttgatgacatc

SEQ ID NO: 4227227 - DNA, 25 bp, Homo sapien
tgacatcatggtcgctgtagttcag

SEQ ID NO: 4227228 - DNA, 25 bp, Homo sapien
ccacttgtaatgtgcttggcccaga

SEQ ID NO: 4227229 - DNA, 25 bp, Homo sapien
cagacctagactcgggctggtgcaa

SEQ ID NO: 4227230 - DNA, 25 bp, Homo sapien
tgctccaccggtcccacttgtaatg

SEQ ID NO: 4227231 - DNA, 25 bp, Homo sapien
gagcggcacctggacctgtggagga

SEQ ID NO: 4227232 - DNA, 25 bp, Homo sapien
gacaggtggatgggagagcaggagc

SEQ ID NO: 4227233 - DNA, 25 bp, Homo sapien
ggacagacaggtggatgggagagca

SEQ ID NO: 4227234 - DNA, 25 bp, Homo sapien
cagacaggtggatgggagagcagga

SEQ ID NO: 4227235 - DNA, 25 bp, Homo sapien
gacagacaggtggatgggagagcag

SEQ ID NO: 4227236 - DNA, 25 bp, Homo sapien
gaacccacctggctttggtcacaga

SEQ ID NO: 4227237 - DNA, 25 bp, Homo sapien
tgaggtgaggggcaaccaaccctcc

SEQ ID NO: 4227238 - DNA, 25 bp, Homo sapien
gaactcagagcctggcattaggcca

SEQ ID NO: 4227239 - DNA, 25 bp, Homo sapien
agctctgaggtgaggggcaaccaac

SEQ ID NO: 4227240 - DNA, 25 bp, Homo sapien
tgaagctcacactatcccaaagcag

SEQ ID NO: 4227241 - DNA, 25 bp, Homo sapien
caaaatgaagctcacactatcccaa

SEQ ID NO: 4227242 - DNA, 25 bp, Homo sapien
tacaaaatgaagctcacactatccc

SEQ ID NO: 4227243 - DNA, 25 bp, Homo sapien
aaatgaagctcacactatcccaaag

SEQ ID NO: 4227244 - DNA, 25 bp, Homo sapien
gggtttgtaactggacgaagtcaca

SEQ ID NO: 4227245 - DNA, 25 bp, Homo sapien
tttgtaactggacgaagtcacacgt

SEQ ID NO: 4227246 - DNA, 25 bp, Homo sapien
gtttgtaactggacgaagtcacacg

SEQ ID NO: 4227247 - DNA, 25 bp, Homo sapien
ttgggtttgtaactggacgaagtca

SEQ ID NO: 4227248 - DNA, 25 bp, Homo sapien
ccttgcaaggcgcatgtgtagcggt

SEQ ID NO: 4227249 - DNA, 25 bp, Homo sapien
aggaacccgtccgcgcagtcgctgt

SEQ ID NO: 4227250 - DNA, 25 bp, Homo sapien
cgaaatctcgcccttccttgcaagg

SEQ ID NO: 4227251 - DNA, 25 bp, Homo sapien
acccgtccgcgcagtcgctgtgaga

SEQ ID NO: 4227252 - DNA, 25 bp, Homo sapien
cggtcacgtagtcgaagacttgtcc

SEQ ID NO: 4227253 - DNA, 25 bp, Homo sapien
gaactcgctccgcaggatttcggcg

SEQ ID NO: 4227254 - DNA, 25 bp, Homo sapien
tcgaagacttgtccgtcaatttcgg

SEQ ID NO: 4227255 - DNA, 25 bp, Homo sapien
tccgcaggatttcggcgcaagtcgc

SEQ ID NO: 4227256 - DNA, 25 bp, Homo sapien
tcttgcaatagttcccctacagctt

SEQ ID NO: 4227257 - DNA, 25 bp, Homo sapien
tccacagactcgaagtccgcgctgc

SEQ ID NO: 4227258 - DNA, 25 bp, Homo sapien
atgcgctggcacacggccctgatgc

SEQ ID NO: 4227259 - DNA, 25 bp, Homo sapien
ccctgatgcccgcgtcatccttgct

SEQ ID NO: 4227260 - DNA, 25 bp, Homo sapien
aagctctatggccatcagatcttcc

SEQ ID NO: 4227261 - DNA, 25 bp, Homo sapien
tcttgtctccggaccgttcgccgtc

SEQ ID NO: 4227262 - DNA, 25 bp, Homo sapien
ggtagggatagaaagcgcagagtta

SEQ ID NO: 4227263 - DNA, 25 bp, Homo sapien
cgcagagttaggagttgagggaaaa

SEQ ID NO: 4227264 - DNA, 25 bp, Homo sapien
tatctttgacaactggataggggcg

SEQ ID NO: 4227265 - DNA, 25 bp, Homo sapien
ctttgacaactggataggggcgtcc

SEQ ID NO: 4227266 - DNA, 25 bp, Homo sapien
ataggggcgtccagtagcacctggc

SEQ ID NO: 4227267 - DNA, 25 bp, Homo sapien
cgtagttctccgttatctttgacaa

SEQ ID NO: 4227268 - DNA, 25 bp, Homo sapien
tcacgtagaaggatacagaggcata

SEQ ID NO: 4227269 - DNA, 25 bp, Homo sapien
tatgcttcctatcctacccaagagc

SEQ ID NO: 4227270 - DNA, 25 bp, Homo sapien
tgccctcggtaaagacatcaactag

SEQ ID NO: 4227271 - DNA, 25 bp, Homo sapien
cctgtggaaaagacgtaggagccct

SEQ ID NO: 4227272 - DNA, 25 bp, Homo sapien
cgaggactgttccctctttagcagt

SEQ ID NO: 4227273 - DNA, 25 bp, Homo sapien
ctgttccctctttagcagtcctgga

SEQ ID NO: 4227274 - DNA, 25 bp, Homo sapien
actgttccctctttagcagtcctgg

SEQ ID NO: 4227275 - DNA, 25 bp, Homo sapien
ggactgttccctctttagcagtcct

SEQ ID NO: 4227276 - DNA, 25 bp, Homo sapien
tcactctcgggtgtaggctcagaaa

SEQ ID NO: 4227277 - DNA, 25 bp, Homo sapien
catgatgaacagactcaaaggctca

SEQ ID NO: 4227278 - DNA, 25 bp, Homo sapien
gagaacatctcgagtaaaccctctt

SEQ ID NO: 4227279 - DNA, 25 bp, Homo sapien
taagggtccaaacacatcgacttca

SEQ ID NO: 4227280 - DNA, 25 bp, Homo sapien
tgctttgccttaagtcgagcctcgg

SEQ ID NO: 4227281 - DNA, 25 bp, Homo sapien
taagtcgagcctcggccttctctaa

SEQ ID NO: 4227282 - DNA, 25 bp, Homo sapien
ggttgctggtcttgagcgtgtcctt

SEQ ID NO: 4227283 - DNA, 25 bp, Homo sapien
gagcgtgtccttctctgagcgcttc

SEQ ID NO: 4227284 - DNA, 25 bp, Homo sapien
ttgttcttgccagatgattccaacc

SEQ ID NO: 4227285 - DNA, 25 bp, Homo sapien
tcttgccagatgattccaaccgact

SEQ ID NO: 4227286 - DNA, 25 bp, Homo sapien
tgccagatgattccaaccgactctc

SEQ ID NO: 4227287 - DNA, 25 bp, Homo sapien
agatgattccaaccgactctccttt

SEQ ID NO: 4227288 - DNA, 25 bp, Homo sapien
aaagttctcaattcgcacatcatag

SEQ ID NO: 4227289 - DNA, 25 bp, Homo sapien
gttctcaattcgcacatcataggat

SEQ ID NO: 4227290 - DNA, 25 bp, Homo sapien
aagttctcaattcgcacatcatagg

SEQ ID NO: 4227291 - DNA, 25 bp, Homo sapien
aaagacacatcaaagttctcaattc

SEQ ID NO: 4227292 - DNA, 25 bp, Homo sapien
gccagcatcttcagtaacgttgtct

SEQ ID NO: 4227293 - DNA, 25 bp, Homo sapien
cgtagcaaatcctctcgcacactgt

SEQ ID NO: 4227294 - DNA, 25 bp, Homo sapien
gtgtcatctccagcaacctcttgct

SEQ ID NO: 4227295 - DNA, 25 bp, Homo sapien
aaatgtgggctggaacccgcagact

SEQ ID NO: 4227296 - DNA, 25 bp, Homo sapien
ctccagtttggcatagatttctgcc

SEQ ID NO: 4227297 - DNA, 25 bp, Homo sapien
tcctccagtttggcatagatttctg

SEQ ID NO: 4227298 - DNA, 25 bp, Homo sapien
aggtgccttgtcagcctcaatctcc

SEQ ID NO: 4227299 - DNA, 25 bp, Homo sapien
cctccagtttggcatagatttctgc

SEQ ID NO: 4227300 - DNA, 25 bp, Homo sapien
tagtagagaagaaatcgaagaactc

SEQ ID NO: 4227301 - DNA, 25 bp, Homo sapien
agtagagaagaaatcgaagaactca

SEQ ID NO: 4227302 - DNA, 25 bp, Homo sapien
ctagtagagaagaaatcgaagaact

SEQ ID NO: 4227303 - DNA, 25 bp, Homo sapien
aaagccaagcccagcgagaatgact

SEQ ID NO: 4227304 - DNA, 25 bp, Homo sapien
agccaagcccagcgagaatgactga

SEQ ID NO: 4227305 - DNA, 25 bp, Homo sapien
aagccaagcccagcgagaatgactg

SEQ ID NO: 4227306 - DNA, 25 bp, Homo sapien
aagccaagaatggcaagggtcactc

SEQ ID NO: 4227307 - DNA, 25 bp, Homo sapien
gctgagacaacagggttcaaagcca

SEQ ID NO: 4227308 - DNA, 25 bp, Homo sapien
agccaagaatggcaagggtcactca

SEQ ID NO: 4227309 - DNA, 25 bp, Homo sapien
ctagcaaagagggcccgggccaggg

SEQ ID NO: 4227310 - DNA, 25 bp, Homo sapien
agcctcatcctccagccacctgaga

SEQ ID NO: 4227311 - DNA, 25 bp, Homo sapien
catcctccagccacctgagaactcc

SEQ ID NO: 4227312 - DNA, 25 bp, Homo sapien
cctcatcctccagccacctgagaac

SEQ ID NO: 4227313 - DNA, 25 bp, Homo sapien
gaccaatcttccatagggcttcata

SEQ ID NO: 4227314 - DNA, 25 bp, Homo sapien
ggttttaggtcagcaactcatgcca

SEQ ID NO: 4227315 - DNA, 25 bp, Homo sapien
tgaaaaacaatacatggcctgaggt

SEQ ID NO: 4227316 - DNA, 25 bp, Homo sapien
acctcccaagagctaagaccaatct

SEQ ID NO: 4227317 - DNA, 25 bp, Homo sapien
gaacttggatgctaccacccctgcc

SEQ ID NO: 4227318 - DNA, 25 bp, Homo sapien
ccctgcccatcctaaagtcagggtg

SEQ ID NO: 4227319 - DNA, 25 bp, Homo sapien
gaagggctggagaactaggaacttg

SEQ ID NO: 4227320 - DNA, 25 bp, Homo sapien
cacacacttgggattgaagggctgg

SEQ ID NO: 4227321 - DNA, 25 bp, Homo sapien
ggatggccctgacatccagcatgtt

SEQ ID NO: 4227322 - DNA, 25 bp, Homo sapien
cacaggatggccctgacatccagca

SEQ ID NO: 4227323 - DNA, 25 bp, Homo sapien
ccctgacatccagcatgtttgtagg

SEQ ID NO: 4227324 - DNA, 25 bp, Homo sapien
ctgcaggtaattctccagccacagg

SEQ ID NO: 4227325 - DNA, 25 bp, Homo sapien
cattcaagaagttgcggtcgtggga

SEQ ID NO: 4227326 - DNA, 25 bp, Homo sapien
ggtggatgatgtctgtggcgatggc

SEQ ID NO: 4227327 - DNA, 25 bp, Homo sapien
ggtaaccatctagccgctggctgtg

SEQ ID NO: 4227328 - DNA, 25 bp, Homo sapien
tattcacgctgctggttgagcagcc

SEQ ID NO: 4227329 - DNA, 25 bp, Homo sapien
ccagcatcttgagtttactctgcac

SEQ ID NO: 4227330 - DNA, 25 bp, Homo sapien
gccctgttggcattgtagcgaaacc

SEQ ID NO: 4227331 - DNA, 25 bp, Homo sapien
attgtagcgaaaccggtcaatgaaa

SEQ ID NO: 4227332 - DNA, 25 bp, Homo sapien
catcttgagtttactctgcacttga

SEQ ID NO: 4227333 - DNA, 25 bp, Homo sapien
tcctgccagcacttatagaaagggc

SEQ ID NO: 4227334 - DNA, 25 bp, Homo sapien
gaaatgaagctctgacgcacgctac

SEQ ID NO: 4227335 - DNA, 25 bp, Homo sapien
gattagccctccaagaacagtgtgg

SEQ ID NO: 4227336 - DNA, 25 bp, Homo sapien
tgacgccaggtaaaagacaccaggc

SEQ ID NO: 4227337 - DNA, 25 bp, Homo sapien
ttcattacgacctctgattccttgt

SEQ ID NO: 4227338 - DNA, 25 bp, Homo sapien
ttacgacctctgattccttgtccac

SEQ ID NO: 4227339 - DNA, 25 bp, Homo sapien
acgacctctgattccttgtccacag

SEQ ID NO: 4227340 - DNA, 25 bp, Homo sapien
cattacgacctctgattccttgtcc

SEQ ID NO: 4227341 - DNA, 25 bp, Homo sapien
gacgtgcttcggatcgtagtagaaa

SEQ ID NO: 4227342 - DNA, 25 bp, Homo sapien
tcatctagctgcagaattggcggcg

SEQ ID NO: 4227343 - DNA, 25 bp, Homo sapien
gagactcgagatcagcagacacaga

SEQ ID NO: 4227344 - DNA, 25 bp, Homo sapien
gaggcgactgaagatgacgtgcttc

SEQ ID NO: 4227345 - DNA, 25 bp, Homo sapien
tatcaataaaaagagcaccgctgtg

SEQ ID NO: 4227346 - DNA, 25 bp, Homo sapien
tgcatggaagtatcactctgtaccc

SEQ ID NO: 4227347 - DNA, 25 bp, Homo sapien
gaaaatgtcatacagtgtgtgccag

SEQ ID NO: 4227348 - DNA, 25 bp, Homo sapien
tgcagggacgctacagttcacaatg

SEQ ID NO: 4227349 - DNA, 25 bp, Homo sapien
atggtagacttcccagccccattct

SEQ ID NO: 4227350 - DNA, 25 bp, Homo sapien
agacttcccagccccattctctcca

SEQ ID NO: 4227351 - DNA, 25 bp, Homo sapien
acttcccagccccattctctccaac

SEQ ID NO: 4227352 - DNA, 25 bp, Homo sapien
gtagacttcccagccccattctctc

SEQ ID NO: 4227353 - DNA, 25 bp, Homo sapien
tgagcgtgtctgatgccccgaacag

SEQ ID NO: 4227354 - DNA, 25 bp, Homo sapien
ctgtgagcgtgtctgatgccccgaa

SEQ ID NO: 4227355 - DNA, 25 bp, Homo sapien
tgtgagcgtgtctgatgccccgaac

SEQ ID NO: 4227356 - DNA, 25 bp, Homo sapien
agcgtgtctgatgccccgaacaggt

SEQ ID NO: 4227357 - DNA, 25 bp, Homo sapien
cctgcaaatgtgctcatgggggcag

SEQ ID NO: 4227358 - DNA, 25 bp, Homo sapien
cagaagccgaggtggaaaaacagac

SEQ ID NO: 4227359 - DNA, 25 bp, Homo sapien
aaggcaatggccacgaaggagcgca

SEQ ID NO: 4227360 - DNA, 25 bp, Homo sapien
gcagcatgggtgcctgcaaatgtgc

SEQ ID NO: 4227361 - DNA, 25 bp, Homo sapien
ctggctgaaatagccaatcttcaga

SEQ ID NO: 4227362 - DNA, 25 bp, Homo sapien
gctggctgaaatagccaatcttcag

SEQ ID NO: 4227363 - DNA, 25 bp, Homo sapien
tggctgaaatagccaatcttcagat

SEQ ID NO: 4227364 - DNA, 25 bp, Homo sapien
tgctggctgaaatagccaatcttca

SEQ ID NO: 4227365 - DNA, 25 bp, Homo sapien
tccacagcactgacgtttaggtcca

SEQ ID NO: 4227366 - DNA, 25 bp, Homo sapien
caggaaacttgcgtgccagcagttc

SEQ ID NO: 4227367 - DNA, 25 bp, Homo sapien
aaacttgcgtgccagcagttccaca

SEQ ID NO: 4227368 - DNA, 25 bp, Homo sapien
actgacgtttaggtccagctgctcc

SEQ ID NO: 4227369 - DNA, 25 bp, Homo sapien
cagttctccggagatgccataccga

SEQ ID NO: 4227370 - DNA, 25 bp, Homo sapien
agctggtgacggtactcctcctcag

SEQ ID NO: 4227371 - DNA, 25 bp, Homo sapien
atgccataccgacccagctggtgac

SEQ ID NO: 4227372 - DNA, 25 bp, Homo sapien
ctggcaagaggacgcatggccagtt

SEQ ID NO: 4227373 - DNA, 25 bp, Homo sapien
aagccttctgatacagttttctact

SEQ ID NO: 4227374 - DNA, 25 bp, Homo sapien
gaaggggtgcggtgagagaaaataa

SEQ ID NO: 4227375 - DNA, 25 bp, Homo sapien
ttctactgggcaagaaggggaaatg

SEQ ID NO: 4227376 - DNA, 25 bp, Homo sapien
tgaaggggtgcggtgagagaaaata

SEQ ID NO: 4227377 - DNA, 25 bp, Homo sapien
cctgaaattgttgagggcacggccc

SEQ ID NO: 4227378 - DNA, 25 bp, Homo sapien
tgaaattgttgagggcacggcccag

SEQ ID NO: 4227379 - DNA, 25 bp, Homo sapien
ccagagcctcaatggtctccatgtc

SEQ ID NO: 4227380 - DNA, 25 bp, Homo sapien
gcctcaatggtctccatgtccaggt

SEQ ID NO: 4227381 - DNA, 25 bp, Homo sapien
ggacacaagaggcaccgaggcctgg

SEQ ID NO: 4227382 - DNA, 25 bp, Homo sapien
ggcaggaggtgctcagggggacaca

SEQ ID NO: 4227383 - DNA, 25 bp, Homo sapien
acacaagaggcaccgaggcctggga

SEQ ID NO: 4227384 - DNA, 25 bp, Homo sapien
tgctcagggggacacaagaggcacc

SEQ ID NO: 4227385 - DNA, 25 bp, Homo sapien
cctgataaagcgctcatcgtgggac

SEQ ID NO: 4227386 - DNA, 25 bp, Homo sapien
tcatcgtgggacaccagaatcacac

SEQ ID NO: 4227387 - DNA, 25 bp, Homo sapien
gccttcgcggcggaactgttcctgg

SEQ ID NO: 4227388 - DNA, 25 bp, Homo sapien
gagggcgcggtactggtcaaatcct

SEQ ID NO: 4227389 - DNA, 25 bp, Homo sapien
cagtcctcaccaacccttggatggg

SEQ ID NO: 4227390 - DNA, 25 bp, Homo sapien
cagaagatgctccagtcaaaaggat

SEQ ID NO: 4227391 - DNA, 25 bp, Homo sapien
gggtctgagagaccagtccatgtcc

SEQ ID NO: 4227392 - DNA, 25 bp, Homo sapien
gagtggtggcctacatggtggccca

SEQ ID NO: 4227393 - DNA, 25 bp, Homo sapien
atagcagccacttggggtccagtca

SEQ ID NO: 4227394 - DNA, 25 bp, Homo sapien
catagcagccacttggggtccagtc

SEQ ID NO: 4227395 - DNA, 25 bp, Homo sapien
gatttaatttacatagcagccactt

SEQ ID NO: 4227396 - DNA, 25 bp, Homo sapien
ttaatttacatagcagccacttggg

SEQ ID NO: 4227397 - DNA, 25 bp, Homo sapien
gatacaagtgccataggaaaacgcc

SEQ ID NO: 4227398 - DNA, 25 bp, Homo sapien
tatgccttcctgttagaccctgtcc

SEQ ID NO: 4227399 - DNA, 25 bp, Homo sapien
tgctattgcttcctacacgtgaggg

SEQ ID NO: 4227400 - DNA, 25 bp, Homo sapien
gctagggctaacagcaccgcaatga

SEQ ID NO: 4227401 - DNA, 25 bp, Homo sapien
tgggctaatcccagtgcatgactct

SEQ ID NO: 4227402 - DNA, 25 bp, Homo sapien
ttgcctaagaccatcagctgtagag

SEQ ID NO: 4227403 - DNA, 25 bp, Homo sapien
tccaagagagatgcacttgcctaag

SEQ ID NO: 4227404 - DNA, 25 bp, Homo sapien
caggcaagacaaactgttacaccca

SEQ ID NO: 4227405 - DNA, 25 bp, Homo sapien
cagcttcatcctgaacgagggtccc

SEQ ID NO: 4227406 - DNA, 25 bp, Homo sapien
gcttcatcctgaacgagggtccctc

SEQ ID NO: 4227407 - DNA, 25 bp, Homo sapien
tcatcctgaacgagggtccctcttt

SEQ ID NO: 4227408 - DNA, 25 bp, Homo sapien
ctcagcttcatcctgaacgagggtc

SEQ ID NO: 4227409 - DNA, 25 bp, Homo sapien
ggcagtctcagcctcaccgtcgcgc

SEQ ID NO: 4227410 - DNA, 25 bp, Homo sapien
tctaggtgcccacgggatccgtgtg

SEQ ID NO: 4227411 - DNA, 25 bp, Homo sapien
ggatcgccccgctccctgtggcagt

SEQ ID NO: 4227412 - DNA, 25 bp, Homo sapien
gcgccctccgcggagttctaggtgc

SEQ ID NO: 4227413 - DNA, 25 bp, Homo sapien
gttaatgattaacgcgcgcttcggc

SEQ ID NO: 4227414 - DNA, 25 bp, Homo sapien
gaagaacgagctgggaaagcgaaaa

SEQ ID NO: 4227415 - DNA, 25 bp, Homo sapien
ctaccccggcagagctgatgtggga

SEQ ID NO: 4227416 - DNA, 25 bp, Homo sapien
cgtgggagccgccaggttaccgctc

SEQ ID NO: 4227417 - DNA, 25 bp, Homo sapien
tggaggggcagtacaggccgggcat

SEQ ID NO: 4227418 - DNA, 25 bp, Homo sapien
gcggtaggtgagccgggcccgcacg

SEQ ID NO: 4227419 - DNA, 25 bp, Homo sapien
gccgggcccgcacgctgaggcaggg

SEQ ID NO: 4227420 - DNA, 25 bp, Homo sapien
caggcccggacccaggagtccgtga

SEQ ID NO: 4227421 - DNA, 25 bp, Homo sapien
cggctgcgggttgcggtaggtgagc

SEQ ID NO: 4227422 - DNA, 25 bp, Homo sapien
gctggaaggagacgcgccgtccggc

SEQ ID NO: 4227423 - DNA, 25 bp, Homo sapien
gcagctggaaggagacgcgccgtcc

SEQ ID NO: 4227424 - DNA, 25 bp, Homo sapien
ctcggcctcggccagcgggtacacg

SEQ ID NO: 4227425 - DNA, 25 bp, Homo sapien
tcggcctcggccagcgggtacacga

SEQ ID NO: 4227426 - DNA, 25 bp, Homo sapien
tgctaaataccaggatgagccaatg

SEQ ID NO: 4227427 - DNA, 25 bp, Homo sapien
tacacttgattcactggcccacgcg

SEQ ID NO: 4227428 - DNA, 25 bp, Homo sapien
ccagcggcagcggtacctggtgtat

SEQ ID NO: 4227429 - DNA, 25 bp, Homo sapien
tgctaggcacaggagtctacacttg

SEQ ID NO: 4227430 - DNA, 25 bp, Homo sapien
gtgacaatgactccccctgtaagtg

SEQ ID NO: 4227431 - DNA, 25 bp, Homo sapien
tcagggagggtttccctaggaatga

SEQ ID NO: 4227432 - DNA, 25 bp, Homo sapien
gacgtttagtggatcttaaaggaca

SEQ ID NO: 4227433 - DNA, 25 bp, Homo sapien
ccgggcactcgctgggcctcatagt

SEQ ID NO: 4227434 - DNA, 25 bp, Homo sapien
aatgaccaattgttcatcctttcaa

SEQ ID NO: 4227435 - DNA, 25 bp, Homo sapien
gaccaattgttcatcctttcaataa

SEQ ID NO: 4227436 - DNA, 25 bp, Homo sapien
tgttcatcctttcaataaatacttg

SEQ ID NO: 4227437 - DNA, 25 bp, Homo sapien
caattgttcatcctttcaataaata

SEQ ID NO: 4227438 - DNA, 25 bp, Homo sapien
gactttgcgtgttggcactaggcta

SEQ ID NO: 4227439 - DNA, 25 bp, Homo sapien
taactgtgaacagatctggctgtca

SEQ ID NO: 4227440 - DNA, 25 bp, Homo sapien
catcccttgtggatagacatctccc

SEQ ID NO: 4227441 - DNA, 25 bp, Homo sapien
cactaggctaatgcattggtgacgc

SEQ ID NO: 4227442 - DNA, 25 bp, Homo sapien
ctgtgcagggtcaccgtcatggtgc

SEQ ID NO: 4227443 - DNA, 25 bp, Homo sapien
cctgggccagatccaagacaagatg

SEQ ID NO: 4227444 - DNA, 25 bp, Homo sapien
gtcatggtgccagccgcggcgataa

SEQ ID NO: 4227445 - DNA, 25 bp, Homo sapien
gccagccgcggcgataatgcctgtg

SEQ ID NO: 4227446 - DNA, 25 bp, Homo sapien
cagtgggcagggccacatgcagcac

SEQ ID NO: 4227447 - DNA, 25 bp, Homo sapien
tgtcgtcacagagccccggaggcct

SEQ ID NO: 4227448 - DNA, 25 bp, Homo sapien
agcacagtgggcagggccacatgca

SEQ ID NO: 4227449 - DNA, 25 bp, Homo sapien
ggggccagcggggtgagcacagtgg

SEQ ID NO: 4227450 - DNA, 25 bp, Homo sapien
gaagccgagggagggacgaagagaa

SEQ ID NO: 4227451 - DNA, 25 bp, Homo sapien
agccgagggagggacgaagagaatc

SEQ ID NO: 4227452 - DNA, 25 bp, Homo sapien
ccgagggagggacgaagagaatcac

SEQ ID NO: 4227453 - DNA, 25 bp, Homo sapien
gccgagggagggacgaagagaatca

SEQ ID NO: 4227454 - DNA, 25 bp, Homo sapien
tcccatccctgggtaccctgccagt

SEQ ID NO: 4227455 - DNA, 25 bp, Homo sapien
ccatccctgggtaccctgccagtgc

SEQ ID NO: 4227456 - DNA, 25 bp, Homo sapien
cttcccatccctgggtaccctgcca

SEQ ID NO: 4227457 - DNA, 25 bp, Homo sapien
tccctgggtaccctgccagtgcccc

SEQ ID NO: 4227458 - DNA, 25 bp, Homo sapien
taaaccctccggctgactggcccca

SEQ ID NO: 4227459 - DNA, 25 bp, Homo sapien
aaaccctccggctgactggccccag

SEQ ID NO: 4227460 - DNA, 25 bp, Homo sapien
tgcccaccccgaagcagctggtggg

SEQ ID NO: 4227461 - DNA, 25 bp, Homo sapien
ctgaaggctgcccaccccgaagcag

SEQ ID NO: 4227462 - DNA, 25 bp, Homo sapien
gctgcccaccccgaagcagctggtg

SEQ ID NO: 4227463 - DNA, 25 bp, Homo sapien
aaggctgcccaccccgaagcagctg

SEQ ID NO: 4227464 - DNA, 25 bp, Homo sapien
catctcgaaggagaaggtatatggg

SEQ ID NO: 4227465 - DNA, 25 bp, Homo sapien
cagcatctcgaaggagaaggtatat

SEQ ID NO: 4227466 - DNA, 25 bp, Homo sapien
accagcatctcgaaggagaaggtat

SEQ ID NO: 4227467 - DNA, 25 bp, Homo sapien
cagggcctgagaacacgtcccgagg

SEQ ID NO: 4227468 - DNA, 25 bp, Homo sapien
agggggggcatctgcccgcagagca

SEQ ID NO: 4227469 - DNA, 25 bp, Homo sapien
tgagggggggcatctgcccgcagag

SEQ ID NO: 4227470 - DNA, 25 bp, Homo sapien
gggcatctgcccgcagagcatgaga

SEQ ID NO: 4227471 - DNA, 25 bp, Homo sapien
catctgcccgcagagcatgagaggg

SEQ ID NO: 4227472 - DNA, 25 bp, Homo sapien
caattctgtcaaggaaggccctgcc

SEQ ID NO: 4227473 - DNA, 25 bp, Homo sapien
agaggagaggacacaattctgtcaa

SEQ ID NO: 4227474 - DNA, 25 bp, Homo sapien
tctggaccccaagtgcccagtttca

SEQ ID NO: 4227475 - DNA, 25 bp, Homo sapien
gcctctggaccccaagtgcccagtt

SEQ ID NO: 4227476 - DNA, 25 bp, Homo sapien
cagcatcaggtgtggctgatggggc

SEQ ID NO: 4227477 - DNA, 25 bp, Homo sapien
cctccagcatcaggtgtggctgatg

SEQ ID NO: 4227478 - DNA, 25 bp, Homo sapien
cctcatattctgctgagctcaggct

SEQ ID NO: 4227479 - DNA, 25 bp, Homo sapien
ccgggcctcatattctgctgagctc

SEQ ID NO: 4227480 - DNA, 25 bp, Homo sapien
ctctgaaaatctcggcgggccctca

SEQ ID NO: 4227481 - DNA, 25 bp, Homo sapien
gcctctgaaaatctcggcgggccct

SEQ ID NO: 4227482 - DNA, 25 bp, Homo sapien
cctctgaaaatctcggcgggccctc

SEQ ID NO: 4227483 - DNA, 25 bp, Homo sapien
tctgaaaatctcggcgggccctcac

SEQ ID NO: 4227484 - DNA, 25 bp, Homo sapien
gcacccattccaatgtaagcctgct

SEQ ID NO: 4227485 - DNA, 25 bp, Homo sapien
gagagattcacatcggccctccaat

SEQ ID NO: 4227486 - DNA, 25 bp, Homo sapien
ccaggccaggctcctatggcggtac

SEQ ID NO: 4227487 - DNA, 25 bp, Homo sapien
gatcttaccgagaaaagaggcctcc

SEQ ID NO: 4227488 - DNA, 25 bp, Homo sapien
tgccacgctgctgctatccaaaagg

SEQ ID NO: 4227489 - DNA, 25 bp, Homo sapien
aaaggaagagtagctcccgagtagc

SEQ ID NO: 4227490 - DNA, 25 bp, Homo sapien
aagctcagcgccagcacggggttca

SEQ ID NO: 4227491 - DNA, 25 bp, Homo sapien
ccaaaaggaagagtagctcccgagt

SEQ ID NO: 4227492 - DNA, 25 bp, Homo sapien
acggccaggttgataagcgtctggg

SEQ ID NO: 4227493 - DNA, 25 bp, Homo sapien
aggccggctctctgggaagagtggc

SEQ ID NO: 4227494 - DNA, 25 bp, Homo sapien
agtggctgcaccaacgtcccaaaca

SEQ ID NO: 4227495 - DNA, 25 bp, Homo sapien
caaggccggctctctgggaagagtg

SEQ ID NO: 4227496 - DNA, 25 bp, Homo sapien
ggcccactcggaacctgcagggtct

SEQ ID NO: 4227497 - DNA, 25 bp, Homo sapien
ctgccgagggtaggccctgtgctgg

SEQ ID NO: 4227498 - DNA, 25 bp, Homo sapien
tgcagggtctcaatgctctcgcaga

SEQ ID NO: 4227499 - DNA, 25 bp, Homo sapien
ggttcggtgggtagtggcggccatg

SEQ ID NO: 4227500 - DNA, 25 bp, Homo sapien
cctctgctgagggcagataaaccct

SEQ ID NO: 4227501 - DNA, 25 bp, Homo sapien
gcctctgctgagggcagataaaccc

SEQ ID NO: 4227502 - DNA, 25 bp, Homo sapien
gccatccaccctgaagagtgagcag

SEQ ID NO: 4227503 - DNA, 25 bp, Homo sapien
tgagcagtaaccgagcagctggtcc

SEQ ID NO: 4227504 - DNA, 25 bp, Homo sapien
ccagggtagagtgctgggatctccc

SEQ ID NO: 4227505 - DNA, 25 bp, Homo sapien
ggtcagcagtgcctccacagtgtcg

SEQ ID NO: 4227506 - DNA, 25 bp, Homo sapien
ctaccacaccccagcccaagcttac

SEQ ID NO: 4227507 - DNA, 25 bp, Homo sapien
gcccagtgtgatctctgtggagtcc

SEQ ID NO: 4227508 - DNA, 25 bp, Homo sapien
tcctaggggatagtagagaagcttg

SEQ ID NO: 4227509 - DNA, 25 bp, Homo sapien
gaagcttggtagagagaggcacaga

SEQ ID NO: 4227510 - DNA, 25 bp, Homo sapien
ggcccagtgtgatctctgtggagtc

SEQ ID NO: 4227511 - DNA, 25 bp, Homo sapien
aactgaggggtaacactttgcagga

SEQ ID NO: 4227512 - DNA, 25 bp, Homo sapien
ctggcagcagacggggcctcttctg

SEQ ID NO: 4227513 - DNA, 25 bp, Homo sapien
gcctcttctggggatggaaacacgg

SEQ ID NO: 4227514 - DNA, 25 bp, Homo sapien
atggaaacacggacccacccgagct

SEQ ID NO: 4227515 - DNA, 25 bp, Homo sapien
tctgaggtgccagtgggctcagtgc

SEQ ID NO: 4227516 - DNA, 25 bp, Homo sapien
tactgctcccgaatgtacgaggact

SEQ ID NO: 4227517 - DNA, 25 bp, Homo sapien
tacgaggactgaaagatgcggcgcc

SEQ ID NO: 4227518 - DNA, 25 bp, Homo sapien
gatgcggcgccatatggctgtgtca

SEQ ID NO: 4227519 - DNA, 25 bp, Homo sapien
tccaggatccgtgactgggtctgtc

SEQ ID NO: 4227520 - DNA, 25 bp, Homo sapien
ccagggccctgtgagcctggggact

SEQ ID NO: 4227521 - DNA, 25 bp, Homo sapien
agggccctgtgagcctggggactca

SEQ ID NO: 4227522 - DNA, 25 bp, Homo sapien
gggagccagggccctgtgagcctgg

SEQ ID NO: 4227523 - DNA, 25 bp, Homo sapien
cttcgggggagccagggccctgtga

SEQ ID NO: 4227524 - DNA, 25 bp, Homo sapien
gactgcggcagccctgctgagaagg

SEQ ID NO: 4227525 - DNA, 25 bp, Homo sapien
agactgcggcagccctgctgagaag

SEQ ID NO: 4227526 - DNA, 25 bp, Homo sapien
gtgctgacggcccagcacctcagta

SEQ ID NO: 4227527 - DNA, 25 bp, Homo sapien
atgagaggcttcggccagccagagc

SEQ ID NO: 4227528 - DNA, 25 bp, Homo sapien
ggatgagaggcttcggccagccaga

SEQ ID NO: 4227529 - DNA, 25 bp, Homo sapien
ccgctctgtgctgacggcccagcac

SEQ ID NO: 4227530 - DNA, 25 bp, Homo sapien
tagtattgcacccaaagagggtttc

SEQ ID NO: 4227531 - DNA, 25 bp, Homo sapien
ctagtattgcacccaaagagggttt

SEQ ID NO: 4227532 - DNA, 25 bp, Homo sapien
ttgtcccaactgttggcctggctca

SEQ ID NO: 4227533 - DNA, 25 bp, Homo sapien
ccttgtcccaactgttggcctggct

SEQ ID NO: 4227534 - DNA, 25 bp, Homo sapien
ctgagtcatccaggccttgtcccaa

SEQ ID NO: 4227535 - DNA, 25 bp, Homo sapien
tgagtcatccaggccttgtcccaac

SEQ ID NO: 4227536 - DNA, 25 bp, Homo sapien
ctccccactaggaggcacagccgtg

SEQ ID NO: 4227537 - DNA, 25 bp, Homo sapien
acagccgtgaataagaagggtggtt

SEQ ID NO: 4227538 - DNA, 25 bp, Homo sapien
cagcatgtcccagtccataggggct

SEQ ID NO: 4227539 - DNA, 25 bp, Homo sapien
gggccaactccccactaggaggcac

SEQ ID NO: 4227540 - DNA, 25 bp, Homo sapien
ccgatggagtgcttggtcccaagca

SEQ ID NO: 4227541 - DNA, 25 bp, Homo sapien
ggagggccagctgctcattgtcccg

SEQ ID NO: 4227542 - DNA, 25 bp, Homo sapien
ctgtcagccgatggagtgcttggtc

SEQ ID NO: 4227543 - DNA, 25 bp, Homo sapien
ctcggagggccagctgctcattgtc

SEQ ID NO: 4227544 - DNA, 25 bp, Homo sapien
aaaaaattgcagtgttctccccagc

SEQ ID NO: 4227545 - DNA, 25 bp, Homo sapien
ctttgacaagaagtgatcaggctga

SEQ ID NO: 4227546 - DNA, 25 bp, Homo sapien
acagagtagattgccttgctaggcc

SEQ ID NO: 4227547 - DNA, 25 bp, Homo sapien
gaatcttcaacccatagcagagcaa

SEQ ID NO: 4227548 - DNA, 25 bp, Homo sapien
ttgtctgaagggctcgaagccagca

SEQ ID NO: 4227549 - DNA, 25 bp, Homo sapien
tctgaagggctcgaagccagcacct

SEQ ID NO: 4227550 - DNA, 25 bp, Homo sapien
tgtctgaagggctcgaagccagcac

SEQ ID NO: 4227551 - DNA, 25 bp, Homo sapien
gaagggctcgaagccagcacctccg

SEQ ID NO: 4227552 - DNA, 25 bp, Homo sapien
agggcaagtgaagcaggagggggca

SEQ ID NO: 4227553 - DNA, 25 bp, Homo sapien
ggcaagtgaagcaggagggggcaga

SEQ ID NO: 4227554 - DNA, 25 bp, Homo sapien
acagggcaagtgaagcaggaggggg

SEQ ID NO: 4227555 - DNA, 25 bp, Homo sapien
ctacagggcaagtgaagcaggaggg

SEQ ID NO: 4227556 - DNA, 25 bp, Homo sapien
caggcaggacctccctagtagtagc

SEQ ID NO: 4227557 - DNA, 25 bp, Homo sapien
ggcaggacctccctagtagtagcat

SEQ ID NO: 4227558 - DNA, 25 bp, Homo sapien
acctccctagtagtagcatccacag

SEQ ID NO: 4227559 - DNA, 25 bp, Homo sapien
aggacctccctagtagtagcatcca

SEQ ID NO: 4227560 - DNA, 25 bp, Homo sapien
tttagagtagacaacagtgggcaga

SEQ ID NO: 4227561 - DNA, 25 bp, Homo sapien
tagagtagacaacagtgggcagagg

SEQ ID NO: 4227562 - DNA, 25 bp, Homo sapien
ctttagagtagacaacagtgggcag

SEQ ID NO: 4227563 - DNA, 25 bp, Homo sapien
gagtagacaacagtgggcagaggag

SEQ ID NO: 4227564 - DNA, 25 bp, Homo sapien
ggcgaggaccttccgtgggagtggc

SEQ ID NO: 4227565 - DNA, 25 bp, Homo sapien
aggtgggcggcgaggaccttccgtg

SEQ ID NO: 4227566 - DNA, 25 bp, Homo sapien
agttgccattttggtccgagtccca

SEQ ID NO: 4227567 - DNA, 25 bp, Homo sapien
tggagttgccattttggtccgagtc

SEQ ID NO: 4227568 - DNA, 25 bp, Homo sapien
ctacagagtttgtgacggcggccca

SEQ ID NO: 4227569 - DNA, 25 bp, Homo sapien
gctacagagtttgtgacggcggccc

SEQ ID NO: 4227570 - DNA, 25 bp, Homo sapien
acagagtttgtgacggcggcccatg

SEQ ID NO: 4227571 - DNA, 25 bp, Homo sapien
gggctacagagtttgtgacggcggc

SEQ ID NO: 4227572 - DNA, 25 bp, Homo sapien
caggtagtcatggtcgctgccttca

SEQ ID NO: 4227573 - DNA, 25 bp, Homo sapien
tagtcatggtcgctgccttcactgt

SEQ ID NO: 4227574 - DNA, 25 bp, Homo sapien
caagggcaggtagtcatggtcgctg

SEQ ID NO: 4227575 - DNA, 25 bp, Homo sapien
tggtcgctgccttcactgttgttgg

SEQ ID NO: 4227576 - DNA, 25 bp, Homo sapien
tgtcagttcccactcgtcgaaggca

SEQ ID NO: 4227577 - DNA, 25 bp, Homo sapien
cagaggcgctcctgcgagatgcgca

SEQ ID NO: 4227578 - DNA, 25 bp, Homo sapien
ttcgctgggctgtagcacagcaggt

SEQ ID NO: 4227579 - DNA, 25 bp, Homo sapien
cagcaatcagccttggccgctgtca

SEQ ID NO: 4227580 - DNA, 25 bp, Homo sapien
ccctgggcggcagtgacttgagtgt

SEQ ID NO: 4227581 - DNA, 25 bp, Homo sapien
actttattgcataggatttggggac

SEQ ID NO: 4227582 - DNA, 25 bp, Homo sapien
acactttcccagcaccaagaggcca

SEQ ID NO: 4227583 - DNA, 25 bp, Homo sapien
ttccactgtgttgcagggagctcag

SEQ ID NO: 4227584 - DNA, 25 bp, Homo sapien
gcagttgctcaacacaaacacgtgg

SEQ ID NO: 4227585 - DNA, 25 bp, Homo sapien
gctcttcgaagaatcctccggctgg

SEQ ID NO: 4227586 - DNA, 25 bp, Homo sapien
ggaaaactatcgtccagaccctgaa

SEQ ID NO: 4227587 - DNA, 25 bp, Homo sapien
cgtcctttactaagcgctcttcgaa

SEQ ID NO: 4227588 - DNA, 25 bp, Homo sapien
gctctcaaccgccgggcagccagag

SEQ ID NO: 4227589 - DNA, 25 bp, Homo sapien
ggtagcgctgatcccagtactcgac

SEQ ID NO: 4227590 - DNA, 25 bp, Homo sapien
tagcacaaggatacggtcctcgggc

SEQ ID NO: 4227591 - DNA, 25 bp, Homo sapien
gcagaatcggctgcgccttggtagc

SEQ ID NO: 4227592 - DNA, 25 bp, Homo sapien
agtactcgacttcgcggtacccgca

SEQ ID NO: 4227593 - DNA, 25 bp, Homo sapien
cagaacgggttcatgacttgtccta

SEQ ID NO: 4227594 - DNA, 25 bp, Homo sapien
ggaatcgtatcaccctgggcggcaa

SEQ ID NO: 4227595 - DNA, 25 bp, Homo sapien
gacaggactctctctaggtgactct

SEQ ID NO: 4227596 - DNA, 25 bp, Homo sapien
tagccttgactaaatacagccggga

SEQ ID NO: 4227597 - DNA, 25 bp, Homo sapien
gagctacgttagttttggttctcac

SEQ ID NO: 4227598 - DNA, 25 bp, Homo sapien
tgggtgcaaaccctggctctatcac

SEQ ID NO: 4227599 - DNA, 25 bp, Homo sapien
agcacaagccttggaatcgcacagg

SEQ ID NO: 4227600 - DNA, 25 bp, Homo sapien
cctctagtactgagaggaggtggca

SEQ ID NO: 4227601 - DNA, 25 bp, Homo sapien
ggcagccaccacgactgatgagtag

SEQ ID NO: 4227602 - DNA, 25 bp, Homo sapien
tagctcagggcactgttcccgcaac

SEQ ID NO: 4227603 - DNA, 25 bp, Homo sapien
cactggtcacattagggaagcctcc

SEQ ID NO: 4227604 - DNA, 25 bp, Homo sapien
ggaagcctccgaggaacagctcgta

SEQ ID NO: 4227605 - DNA, 25 bp, Homo sapien
tcagaggacacggtccagggatctc

SEQ ID NO: 4227606 - DNA, 25 bp, Homo sapien
gaagtccagcttccgcacatccatg

SEQ ID NO: 4227607 - DNA, 25 bp, Homo sapien
gcacatgggcatggcgagcctgcat

SEQ ID NO: 4227608 - DNA, 25 bp, Homo sapien
tcactcaacacctggtccacagtgt

SEQ ID NO: 4227609 - DNA, 25 bp, Homo sapien
tagggctatattctattcagggaag

SEQ ID NO: 4227610 - DNA, 25 bp, Homo sapien
gcctttgtgagcctgactactccag

SEQ ID NO: 4227611 - DNA, 25 bp, Homo sapien
cctggccattccttgggattagggc

SEQ ID NO: 4227612 - DNA, 25 bp, Homo sapien
tggcagtctctgtcacctgtcagga

SEQ ID NO: 4227613 - DNA, 25 bp, Homo sapien
tcccgcccttgtgcatgaggtagag

SEQ ID NO: 4227614 - DNA, 25 bp, Homo sapien
taggcttgggcatagtgtctggtcc

SEQ ID NO: 4227615 - DNA, 25 bp, Homo sapien
gagatggaagtggaaaccgctgcca

SEQ ID NO: 4227616 - DNA, 25 bp, Homo sapien
cattgagataaaccggcctccaggg

SEQ ID NO: 4227617 - DNA, 25 bp, Homo sapien
tagatgaggatcagtaacaggcccc

SEQ ID NO: 4227618 - DNA, 25 bp, Homo sapien
tattggttcatgtgggttcgctccc

SEQ ID NO: 4227619 - DNA, 25 bp, Homo sapien
gcccctgggatgtaagcaccttgga

SEQ ID NO: 4227620 - DNA, 25 bp, Homo sapien
gcagtctcctgtggataaatcaagg

SEQ ID NO: 4227621 - DNA, 25 bp, Homo sapien
tgcatgagctttccacccacttgag

SEQ ID NO: 4227622 - DNA, 25 bp, Homo sapien
gacggttgccaagtaagacagacag

SEQ ID NO: 4227623 - DNA, 25 bp, Homo sapien
caggtacttgggaatctcaggtgca

SEQ ID NO: 4227624 - DNA, 25 bp, Homo sapien
ggtagagatacaacccaggcgtgac

SEQ ID NO: 4227625 - DNA, 25 bp, Homo sapien
tcgggccaggcggtgattcagggct

SEQ ID NO: 4227626 - DNA, 25 bp, Homo sapien
gtggagtcgggccaggcggtgattc

SEQ ID NO: 4227627 - DNA, 25 bp, Homo sapien
agccatcacggccgccgcgcagcac

SEQ ID NO: 4227628 - DNA, 25 bp, Homo sapien
ggtgattcagggctcccggcagctg

SEQ ID NO: 4227629 - DNA, 25 bp, Homo sapien
cccagctcctgcagcgcgacgttca

SEQ ID NO: 4227630 - DNA, 25 bp, Homo sapien
ccagctcctgcagcgcgacgttcat

SEQ ID NO: 4227631 - DNA, 25 bp, Homo sapien
ggtctcgggtgcgtcttcatcccga

SEQ ID NO: 4227632 - DNA, 25 bp, Homo sapien
gcgtggcccgtttgtactccaccat

SEQ ID NO: 4227633 - DNA, 25 bp, Homo sapien
ggtgcgtcttcatcccgaagcgtgg

SEQ ID NO: 4227634 - DNA, 25 bp, Homo sapien
catcccgaagcgtggcccgtttgta

SEQ ID NO: 4227635 - DNA, 25 bp, Homo sapien
agaggccagagatggagcggaggtg

SEQ ID NO: 4227636 - DNA, 25 bp, Homo sapien
ctctgtggtactggacccctagggc

SEQ ID NO: 4227637 - DNA, 25 bp, Homo sapien
tagagaggcacctgctaagaccagc

SEQ ID NO: 4227638 - DNA, 25 bp, Homo sapien
tgtcttgtccccttctggaatccca

SEQ ID NO: 4227639 - DNA, 25 bp, Homo sapien
tgcgtgagcctaacagctgtcttgt

SEQ ID NO: 4227640 - DNA, 25 bp, Homo sapien
ggccggagggtaggagactgtcagt

SEQ ID NO: 4227641 - DNA, 25 bp, Homo sapien
ccggagggtaggagactgtcagtct

SEQ ID NO: 4227642 - DNA, 25 bp, Homo sapien
gagggtaggagactgtcagtctgtc

SEQ ID NO: 4227643 - DNA, 25 bp, Homo sapien
ggtaggagactgtcagtctgtctgt

SEQ ID NO: 4227644 - DNA, 25 bp, Homo sapien
tcagtatggcctggttttggtccca

SEQ ID NO: 4227645 - DNA, 25 bp, Homo sapien
gccactcgaatgcaggcctctgtaa

SEQ ID NO: 4227646 - DNA, 25 bp, Homo sapien
tgttgaaggtgttccagcgagaacg

SEQ ID NO: 4227647 - DNA, 25 bp, Homo sapien
caggagaactggtaaaagtcctcac

SEQ ID NO: 4227648 - DNA, 25 bp, Homo sapien
aatgcgctccacctgtaggcaagat

SEQ ID NO: 4227649 - DNA, 25 bp, Homo sapien
caagataggtagaagcgctgtgtct

SEQ ID NO: 4227650 - DNA, 25 bp, Homo sapien
tgcgctccacctgtaggcaagatag

SEQ ID NO: 4227651 - DNA, 25 bp, Homo sapien
ctcaatgcgctccacctgtaggcaa

SEQ ID NO: 4227652 - DNA, 25 bp, Homo sapien
gctactgccttcaacacctccataa

SEQ ID NO: 4227653 - DNA, 25 bp, Homo sapien
gctgttggaactcttagagtcggca

SEQ ID NO: 4227654 - DNA, 25 bp, Homo sapien
tagagtcggcactgatgtagacggt

SEQ ID NO: 4227655 - DNA, 25 bp, Homo sapien
gtggccctgtaggtccctgctactg

SEQ ID NO: 4227656 - DNA, 25 bp, Homo sapien
tagtaatcccgagagggcagaaaga

SEQ ID NO: 4227657 - DNA, 25 bp, Homo sapien
tttaagtagtaatcccgagagggca

SEQ ID NO: 4227658 - DNA, 25 bp, Homo sapien
cagttctgtttaagtagtaatcccg

SEQ ID NO: 4227659 - DNA, 25 bp, Homo sapien
tcattggcagttctgtttaagtagt

SEQ ID NO: 4227660 - DNA, 25 bp, Homo sapien
tcagctatctaggtccatgaaccca

SEQ ID NO: 4227661 - DNA, 25 bp, Homo sapien
cactaggtgacaggataggctcacc

SEQ ID NO: 4227662 - DNA, 25 bp, Homo sapien
gacactgaacgcttcctgtggcaat

SEQ ID NO: 4227663 - DNA, 25 bp, Homo sapien
ctgtggcaatggctcggaaacttat

SEQ ID NO: 4227664 - DNA, 25 bp, Homo sapien
aggtgggccgcccacccagcagcat

SEQ ID NO: 4227665 - DNA, 25 bp, Homo sapien
gtagatcttctcctcgtcgcgccgc

SEQ ID NO: 4227666 - DNA, 25 bp, Homo sapien
tgcagctccgaaatgctcatcttgt

SEQ ID NO: 4227667 - DNA, 25 bp, Homo sapien
tgctgcatctgctccctcgtggagg

SEQ ID NO: 4227668 - DNA, 25 bp, Homo sapien
tcaactccaatggtgacagcaagaa

SEQ ID NO: 4227669 - DNA, 25 bp, Homo sapien
acaggctcagagtcactcaactcca

SEQ ID NO: 4227670 - DNA, 25 bp, Homo sapien
tccgtgcggttgatgagctctgaca

SEQ ID NO: 4227671 - DNA, 25 bp, Homo sapien
aactcaagccagtccatggagggcg

SEQ ID NO: 4227672 - DNA, 25 bp, Homo sapien
ggttccagatcaggtaattgttcag

SEQ ID NO: 4227673 - DNA, 25 bp, Homo sapien
ggttgtcttttgcaccaggttccag

SEQ ID NO: 4227674 - DNA, 25 bp, Homo sapien
tctcttgtgcagactcaaagcgtcg

SEQ ID NO: 4227675 - DNA, 25 bp, Homo sapien
tcttagtgccatagagggtctccag

SEQ ID NO: 4227676 - DNA, 25 bp, Homo sapien
ccccaaagcaaagccaagggcgtca

SEQ ID NO: 4227677 - DNA, 25 bp, Homo sapien
gtggccttcacgaagagggacccca

SEQ ID NO: 4227678 - DNA, 25 bp, Homo sapien
caagggcgtcatccgtgttggagat

SEQ ID NO: 4227679 - DNA, 25 bp, Homo sapien
atttctttgctttgccggtcaaacg

SEQ ID NO: 4227680 - DNA, 25 bp, Homo sapien
cagtcaattttgagggcatagtgtt

SEQ ID NO: 4227681 - DNA, 25 bp, Homo sapien
aatgcggtccggatttcgctgatca

SEQ ID NO: 4227682 - DNA, 25 bp, Homo sapien
cctcaaatgcggtccggatttcgct

SEQ ID NO: 4227683 - DNA, 25 bp, Homo sapien
ctcatccatccaaaccagctgtccc

SEQ ID NO: 4227684 - DNA, 25 bp, Homo sapien
caaatgcggtccggatttcgctgat

SEQ ID NO: 4227685 - DNA, 25 bp, Homo sapien
aagtctgggaaaccaatcatatcat

SEQ ID NO: 4227686 - DNA, 25 bp, Homo sapien
tgggaaaccaatcatatcatagatg

SEQ ID NO: 4227687 - DNA, 25 bp, Homo sapien
gaaaccaatcatatcatagatggca

SEQ ID NO: 4227688 - DNA, 25 bp, Homo sapien
gtctgggaaaccaatcatatcatag

SEQ ID NO: 4227689 - DNA, 25 bp, Homo sapien
tggtctcggctgggaggcttgcgga

SEQ ID NO: 4227690 - DNA, 25 bp, Homo sapien
tctcggctgggaggcttgcggagct

SEQ ID NO: 4227691 - DNA, 25 bp, Homo sapien
gggaggcttgcggagctggtcagcc

SEQ ID NO: 4227692 - DNA, 25 bp, Homo sapien
tcggctgggaggcttgcggagctgg

SEQ ID NO: 4227693 - DNA, 25 bp, Homo sapien
gatgccagcggggaagacgatctca

SEQ ID NO: 4227694 - DNA, 25 bp, Homo sapien
gggaagacgatctcattcttagttg

SEQ ID NO: 4227695 - DNA, 25 bp, Homo sapien
tctcattcttagttggaaggtagta

SEQ ID NO: 4227696 - DNA, 25 bp, Homo sapien
cattcactgtctggggggtcatgct

SEQ ID NO: 4227697 - DNA, 25 bp, Homo sapien
tgaccacaccgatgccaccgaagtt

SEQ ID NO: 4227698 - DNA, 25 bp, Homo sapien
tcaaaggcatgcgtcaactcatggc

SEQ ID NO: 4227699 - DNA, 25 bp, Homo sapien
gcatgcgtcaactcatggcccatga

SEQ ID NO: 4227700 - DNA, 25 bp, Homo sapien
ggtcatcaaaggcatgcgtcaactc

SEQ ID NO: 4227701 - DNA, 25 bp, Homo sapien
ccatgcaggccgtgtggttccggaa

SEQ ID NO: 4227702 - DNA, 25 bp, Homo sapien
ggttcccttctttgtcatactcgcg

SEQ ID NO: 4227703 - DNA, 25 bp, Homo sapien
ccagggccgcaggttcccttctttg

SEQ ID NO: 4227704 - DNA, 25 bp, Homo sapien
cattgacctggtattgattgtactg

SEQ ID NO: 4227705 - DNA, 25 bp, Homo sapien
cgtctggcggccgttgagcctctcc

SEQ ID NO: 4227706 - DNA, 25 bp, Homo sapien
gttgtcagcaatgttctcccccagc

SEQ ID NO: 4227707 - DNA, 25 bp, Homo sapien
ccagcgtctggcggccgttgagcct

SEQ ID NO: 4227708 - DNA, 25 bp, Homo sapien
tgtcagcaatgttctcccccagcgt

SEQ ID NO: 4227709 - DNA, 25 bp, Homo sapien
caaatcccacgaagaagagctggtg

SEQ ID NO: 4227710 - DNA, 25 bp, Homo sapien
ctccccatgctttctcagccatgct

SEQ ID NO: 4227711 - DNA, 25 bp, Homo sapien
ctgggcaaatcccacgaagaagagc

SEQ ID NO: 4227712 - DNA, 25 bp, Homo sapien
agccccacggctggcagttgctgct

SEQ ID NO: 4227713 - DNA, 25 bp, Homo sapien
gagccgggccttagagtcagctaca

SEQ ID NO: 4227714 - DNA, 25 bp, Homo sapien
acagcgtgaggatgaacgtttgccc

SEQ ID NO: 4227715 - DNA, 25 bp, Homo sapien
tgaactatgcgaaatcctaccaagg

SEQ ID NO: 4227716 - DNA, 25 bp, Homo sapien
aaaactgccctggacatcgggttgc

SEQ ID NO: 4227717 - DNA, 25 bp, Homo sapien
acagggcagccgaagtgccgcagga

SEQ ID NO: 4227718 - DNA, 25 bp, Homo sapien
ggtcaccagcccctcgtgagagctc

SEQ ID NO: 4227719 - DNA, 25 bp, Homo sapien
tctggtgtgcggaccgagcaccaca

SEQ ID NO: 4227720 - DNA, 25 bp, Homo sapien
tcacgggagttggagagagtgccca

SEQ ID NO: 4227721 - DNA, 25 bp, Homo sapien
gctttgtcaggagagctgccccagg

SEQ ID NO: 4227722 - DNA, 25 bp, Homo sapien
ctttgtcaggagagctgccccaggt

SEQ ID NO: 4227723 - DNA, 25 bp, Homo sapien
agagctgagtccacccctaagtgcg

SEQ ID NO: 4227724 - DNA, 25 bp, Homo sapien
tccaggcagggtgacacggaaagat

SEQ ID NO: 4227725 - DNA, 25 bp, Homo sapien
gagaagtccaggaggtacaccaccc

SEQ ID NO: 4227726 - DNA, 25 bp, Homo sapien
cacaatgtggtgattgaggagggtc

SEQ ID NO: 4227727 - DNA, 25 bp, Homo sapien
taggagctgtcagtgaaggtcagca

SEQ ID NO: 4227728 - DNA, 25 bp, Homo sapien
ggagctgtcagtgaaggtcagcagc

SEQ ID NO: 4227729 - DNA, 25 bp, Homo sapien
agctgtcagtgaaggtcagcagcag

SEQ ID NO: 4227730 - DNA, 25 bp, Homo sapien
ctaggagctgtcagtgaaggtcagc

SEQ ID NO: 4227731 - DNA, 25 bp, Homo sapien
cctaagacacaggaaccagtacccg

SEQ ID NO: 4227732 - DNA, 25 bp, Homo sapien
cacagggtcctataagggccaagac

SEQ ID NO: 4227733 - DNA, 25 bp, Homo sapien
catgtctgtttattggcacagggtc

SEQ ID NO: 4227734 - DNA, 25 bp, Homo sapien
tgctaaggcttgtgccctaagacac

SEQ ID NO: 4227735 - DNA, 25 bp, Homo sapien
cactagtgagtaaatgagcactgac

SEQ ID NO: 4227736 - DNA, 25 bp, Homo sapien
ggatacatgaaaacaggactgaagg

SEQ ID NO: 4227737 - DNA, 25 bp, Homo sapien
tagttgctctatagacgctggtgga

SEQ ID NO: 4227738 - DNA, 25 bp, Homo sapien
tcagtcccctgtatccactagtgag

SEQ ID NO: 4227739 - DNA, 25 bp, Homo sapien
caagttgaccctggcccagtagtta

SEQ ID NO: 4227740 - DNA, 25 bp, Homo sapien
tagttacccacactcagtgtcaggc

SEQ ID NO: 4227741 - DNA, 25 bp, Homo sapien
ggcccagtagttacccacactcagt

SEQ ID NO: 4227742 - DNA, 25 bp, Homo sapien
tgtcaggcctggctgcacgcaccag

SEQ ID NO: 4227743 - DNA, 25 bp, Homo sapien
catttgtgtatcaccagtgcctgac

SEQ ID NO: 4227744 - DNA, 25 bp, Homo sapien
tgcctgacacattgttgataaagca

SEQ ID NO: 4227745 - DNA, 25 bp, Homo sapien
tcatttgtgtatcaccagtgcctga

SEQ ID NO: 4227746 - DNA, 25 bp, Homo sapien
gacacattgttgataaagcaatttt

SEQ ID NO: 4227747 - DNA, 25 bp, Homo sapien
ctagatttcttgacgtccaggacgc

SEQ ID NO: 4227748 - DNA, 25 bp, Homo sapien
gcgtggcgcgacagacaaactagat

SEQ ID NO: 4227749 - DNA, 25 bp, Homo sapien
ggacgcttgattgccgcctgtataa

SEQ ID NO: 4227750 - DNA, 25 bp, Homo sapien
tgggttcgctcactgctgtagatgg

SEQ ID NO: 4227751 - DNA, 25 bp, Homo sapien
ccctcggaggcaggtggagactaca

SEQ ID NO: 4227752 - DNA, 25 bp, Homo sapien
tgcgaccggaaacgccggggcgagc

SEQ ID NO: 4227753 - DNA, 25 bp, Homo sapien
cctcggaccccgccctcggaggcag

SEQ ID NO: 4227754 - DNA, 25 bp, Homo sapien
ggtggagactacaattcccagcctc

SEQ ID NO: 4227755 - DNA, 25 bp, Homo sapien
gcacccgctcgcaccgccctttttc

SEQ ID NO: 4227756 - DNA, 25 bp, Homo sapien
cctttttcccagaccaactcgcgcg

SEQ ID NO: 4227757 - DNA, 25 bp, Homo sapien
gcgcgtcggtcgcggcgcccctcct

SEQ ID NO: 4227758 - DNA, 25 bp, Homo sapien
cccagaccaactcgcgcgcgtcggt

SEQ ID NO: 4227759 - DNA, 25 bp, Homo sapien
cttgccgctcggcttctcgtccgtg

SEQ ID NO: 4227760 - DNA, 25 bp, Homo sapien
gccgctcggcttctcgtccgtgccg

SEQ ID NO: 4227761 - DNA, 25 bp, Homo sapien
tccttgccgctcggcttctcgtccg

SEQ ID NO: 4227762 - DNA, 25 bp, Homo sapien
tcggcttctcgtccgtgccgccggg

SEQ ID NO: 4227763 - DNA, 25 bp, Homo sapien
gagaggcaaggtgccgggagtcccg

SEQ ID NO: 4227764 - DNA, 25 bp, Homo sapien
gacagcgcggaacggagaatgagga

SEQ ID NO: 4227765 - DNA, 25 bp, Homo sapien
cgagtccacttcacgcggcggtggt

SEQ ID NO: 4227766 - DNA, 25 bp, Homo sapien
cgcagcctccttcgccgactctcgg

SEQ ID NO: 4227767 - DNA, 25 bp, Homo sapien
tacccggggcaggtgaagaataagc

SEQ ID NO: 4227768 - DNA, 25 bp, Homo sapien
gccaggtggacaaggaaaccgagtg

SEQ ID NO: 4227769 - DNA, 25 bp, Homo sapien
gaatcaggctctacttgaatgccac

SEQ ID NO: 4227770 - DNA, 25 bp, Homo sapien
tgaatgccactctaggaaacggagg

SEQ ID NO: 4227771 - DNA, 25 bp, Homo sapien
gaatcccaaagacgtcctcctccca

SEQ ID NO: 4227772 - DNA, 25 bp, Homo sapien
gcagctcatgaagagaaggaatccc

SEQ ID NO: 4227773 - DNA, 25 bp, Homo sapien
ctccagttcatcttgaagctgttta

SEQ ID NO: 4227774 - DNA, 25 bp, Homo sapien
cagttcatcttgaagctgtttatcc

SEQ ID NO: 4227775 - DNA, 25 bp, Homo sapien
gttcatcttgaagctgtttatcctc

SEQ ID NO: 4227776 - DNA, 25 bp, Homo sapien
tcatcttgaagctgtttatcctctt

SEQ ID NO: 4227777 - DNA, 25 bp, Homo sapien
aagtcatggaagttgtagaagaacg

SEQ ID NO: 4227778 - DNA, 25 bp, Homo sapien
ccagcgctggtcgatacagggatgt

SEQ ID NO: 4227779 - DNA, 25 bp, Homo sapien
cagtttgccatagtgtggacgcaga

SEQ ID NO: 4227780 - DNA, 25 bp, Homo sapien
tgtagaagaacgaatctgccttcgc

SEQ ID NO: 4227781 - DNA, 25 bp, Homo sapien
tcacgctccccactcatggtcatgg

SEQ ID NO: 4227782 - DNA, 25 bp, Homo sapien
tcatggccaaaacggagatgatgtc

SEQ ID NO: 4227783 - DNA, 25 bp, Homo sapien
tgggagcccactagccgatacttga

SEQ ID NO: 4227784 - DNA, 25 bp, Homo sapien
tcatgaccccatgatgccaattcct

SEQ ID NO: 4227785 - DNA, 25 bp, Homo sapien
tacagatagtcccagacgattaaga

SEQ ID NO: 4227786 - DNA, 25 bp, Homo sapien
gacgattaagagagcacagcttcag

SEQ ID NO: 4227787 - DNA, 25 bp, Homo sapien
tcccagacgattaagagagcacagc

SEQ ID NO: 4227788 - DNA, 25 bp, Homo sapien
gatagtcccagacgattaagagagc

SEQ ID NO: 4227789 - DNA, 25 bp, Homo sapien
aatttccataagcaggtcgcaagcc

SEQ ID NO: 4227790 - DNA, 25 bp, Homo sapien
ctgcattgtgggccatgttataggg

SEQ ID NO: 4227791 - DNA, 25 bp, Homo sapien
tccataagcaggtcgcaagcctcat

SEQ ID NO: 4227792 - DNA, 25 bp, Homo sapien
agcaggtcgcaagcctcatgctctg

SEQ ID NO: 4227793 - DNA, 25 bp, Homo sapien
cacacccagggcacaacgcagtagg

SEQ ID NO: 4227794 - DNA, 25 bp, Homo sapien
gtggagagagcccgtacatctgctc

SEQ ID NO: 4227795 - DNA, 25 bp, Homo sapien
gagagagcccgtacatctgctcatc

SEQ ID NO: 4227796 - DNA, 25 bp, Homo sapien
tggagagagcccgtacatctgctca

SEQ ID NO: 4227797 - DNA, 25 bp, Homo sapien
agagcccgtacatctgctcatcact

SEQ ID NO: 4227798 - DNA, 25 bp, Homo sapien
aggaacaccccatgccggcctagca

SEQ ID NO: 4227799 - DNA, 25 bp, Homo sapien
accccatgccggcctagcatgaatg

SEQ ID NO: 4227800 - DNA, 25 bp, Homo sapien
actcctcgacatcttcactcagctc

SEQ ID NO: 4227801 - DNA, 25 bp, Homo sapien
atgccggcctagcatgaatgccatc

SEQ ID NO: 4227802 - DNA, 25 bp, Homo sapien
gagctaaggccaagaagttgctgtt

SEQ ID NO: 4227803 - DNA, 25 bp, Homo sapien
ctcccgagctaaggccaagaagttg

SEQ ID NO: 4227804 - DNA, 25 bp, Homo sapien
tgctgttgagctgtacattggacat

SEQ ID NO: 4227805 - DNA, 25 bp, Homo sapien
tgagctgtacattggacatgatctc

SEQ ID NO: 4227806 - DNA, 25 bp, Homo sapien
ttgtagatgtcatcaggcaccttgg

SEQ ID NO: 4227807 - DNA, 25 bp, Homo sapien
tgtagatgtcatcaggcaccttggg

SEQ ID NO: 4227808 - DNA, 25 bp, Homo sapien
gtagatgtcatcaggcaccttgggc

SEQ ID NO: 4227809 - DNA, 25 bp, Homo sapien
tccttgttcttgtaaagccatttgt

SEQ ID NO: 4227810 - DNA, 25 bp, Homo sapien
gcagagtccacctgagagccactgc

SEQ ID NO: 4227811 - DNA, 25 bp, Homo sapien
aggccaggttcatgcgggcagagtc

SEQ ID NO: 4227812 - DNA, 25 bp, Homo sapien
ccttgttcttgtaaagccatttgtt

SEQ ID NO: 4227813 - DNA, 25 bp, Homo sapien
taaaatggccctatcctgaggatcc

SEQ ID NO: 4227814 - DNA, 25 bp, Homo sapien
gctctccaaagaactgcatggtgga

SEQ ID NO: 4227815 - DNA, 25 bp, Homo sapien
tgtcagataacttatgactccaaga

SEQ ID NO: 4227816 - DNA, 25 bp, Homo sapien
gaatctattagtcttaaaatggccc

SEQ ID NO: 4227817 - DNA, 25 bp, Homo sapien
gagtacaggtacttgtcaatctggg

SEQ ID NO: 4227818 - DNA, 25 bp, Homo sapien
gtacaggtacttgtcaatctgggtg

SEQ ID NO: 4227819 - DNA, 25 bp, Homo sapien
ggagtacaggtacttgtcaatctgg

SEQ ID NO: 4227820 - DNA, 25 bp, Homo sapien
acaggtacttgtcaatctgggtgag

SEQ ID NO: 4227821 - DNA, 25 bp, Homo sapien
gaagtccccatgagcaggctgtatg

SEQ ID NO: 4227822 - DNA, 25 bp, Homo sapien
tgctaggcactagaatatggaacgg

SEQ ID NO: 4227823 - DNA, 25 bp, Homo sapien
tccccatgagcaggctgtatgcaga

SEQ ID NO: 4227824 - DNA, 25 bp, Homo sapien
gctaggcactagaatatggaacggg

SEQ ID NO: 4227825 - DNA, 25 bp, Homo sapien
cccagagttcactatgccacaggca

SEQ ID NO: 4227826 - DNA, 25 bp, Homo sapien
gaaccaagtctcatggtgttgctgt

SEQ ID NO: 4227827 - DNA, 25 bp, Homo sapien
ccaaagatggaaccaagtctcatgg

SEQ ID NO: 4227828 - DNA, 25 bp, Homo sapien
gaccccagagttcactatgccacag

SEQ ID NO: 4227829 - DNA, 25 bp, Homo sapien
cacgatttgagccagcataagccaa

SEQ ID NO: 4227830 - DNA, 25 bp, Homo sapien
cttcacgatttgagccagcataagc

SEQ ID NO: 4227831 - DNA, 25 bp, Homo sapien
ttcacgatttgagccagcataagcc

SEQ ID NO: 4227832 - DNA, 25 bp, Homo sapien
tcacgatttgagccagcataagcca

SEQ ID NO: 4227833 - DNA, 25 bp, Homo sapien
gaaagtaagactcaaagcaccttcc

SEQ ID NO: 4227834 - DNA, 25 bp, Homo sapien
taaaaccaccagaggcttagaatcc

SEQ ID NO: 4227835 - DNA, 25 bp, Homo sapien
tacacaccaacaggcatgtacatgt

SEQ ID NO: 4227836 - DNA, 25 bp, Homo sapien
ggtttcactgaggtgacgcccctca

SEQ ID NO: 4227837 - DNA, 25 bp, Homo sapien
ataagtatccttgagctcagtctct

SEQ ID NO: 4227838 - DNA, 25 bp, Homo sapien
gcataagtatccttgagctcagtct

SEQ ID NO: 4227839 - DNA, 25 bp, Homo sapien
ctctttgcccaaatagaaacatccc

SEQ ID NO: 4227840 - DNA, 25 bp, Homo sapien
tgtcagctctttgcccaaatagaaa

SEQ ID NO: 4227841 - DNA, 25 bp, Homo sapien
ctttgcccaaatagaaacatcccct

SEQ ID NO: 4227842 - DNA, 25 bp, Homo sapien
ttgcccaaatagaaacatcccctca

SEQ ID NO: 4227843 - DNA, 25 bp, Homo sapien
tgttggcaaaactgcggaatggctc

SEQ ID NO: 4227844 - DNA, 25 bp, Homo sapien
gccaggattgcctcgatggcctcac

SEQ ID NO: 4227845 - DNA, 25 bp, Homo sapien
gttggcaaaactgcggaatggctct

SEQ ID NO: 4227846 - DNA, 25 bp, Homo sapien
agccaggattgcctcgatggcctca

SEQ ID NO: 4227847 - DNA, 25 bp, Homo sapien
tcgctacaaatgtggagcagctgct

SEQ ID NO: 4227848 - DNA, 25 bp, Homo sapien
ctttggagtcaaagtgttcgctaca

SEQ ID NO: 4227849 - DNA, 25 bp, Homo sapien
aaagtgttcgctacaaatgtggagc

SEQ ID NO: 4227850 - DNA, 25 bp, Homo sapien
gagtcaaagtgttcgctacaaatgt

SEQ ID NO: 4227851 - DNA, 25 bp, Homo sapien
agtggccaaaggttcgtaatgccat

SEQ ID NO: 4227852 - DNA, 25 bp, Homo sapien
gccaaaggttcgtaatgccatctct

SEQ ID NO: 4227853 - DNA, 25 bp, Homo sapien
tggccaaaggttcgtaatgccatct

SEQ ID NO: 4227854 - DNA, 25 bp, Homo sapien
caaaggttcgtaatgccatctctgc

SEQ ID NO: 4227855 - DNA, 25 bp, Homo sapien
ttgagtcgtggatttgaaacagaga

SEQ ID NO: 4227856 - DNA, 25 bp, Homo sapien
ccaggatgttgagtcgtggatttga

SEQ ID NO: 4227857 - DNA, 25 bp, Homo sapien
caggatgttgagtcgtggatttgaa

SEQ ID NO: 4227858 - DNA, 25 bp, Homo sapien
gatgttgagtcgtggatttgaaaca

SEQ ID NO: 4227859 - DNA, 25 bp, Homo sapien
gaaatgttaagcattacagaagtga

SEQ ID NO: 4227860 - DNA, 25 bp, Homo sapien
aaatgttaagcattacagaagtgaa

SEQ ID NO: 4227861 - DNA, 25 bp, Homo sapien
atgttaagcattacagaagtgaaaa

SEQ ID NO: 4227862 - DNA, 25 bp, Homo sapien
ggaaatgttaagcattacagaagtg

SEQ ID NO: 4227863 - DNA, 25 bp, Homo sapien
ggtccttggcatgatattgagctaa

SEQ ID NO: 4227864 - DNA, 25 bp, Homo sapien
gggtccttggcatgatattgagcta

SEQ ID NO: 4227865 - DNA, 25 bp, Homo sapien
cacctggctcataagctgccggtcg

SEQ ID NO: 4227866 - DNA, 25 bp, Homo sapien
ggccacctggctcataagctgccgg

SEQ ID NO: 4227867 - DNA, 25 bp, Homo sapien
acggccacctggctcataagctgcc

SEQ ID NO: 4227868 - DNA, 25 bp, Homo sapien
cctggctcataagctgccggtcgct

SEQ ID NO: 4227869 - DNA, 25 bp, Homo sapien
agctcctcatcaaacgtaaccagca

SEQ ID NO: 4227870 - DNA, 25 bp, Homo sapien
cccatacaatacatagtgtgatttg

SEQ ID NO: 4227871 - DNA, 25 bp, Homo sapien
ccatacaatacatagtgtgatttgc

SEQ ID NO: 4227872 - DNA, 25 bp, Homo sapien
tcatcaaacgtaaccagcattcggg

SEQ ID NO: 4227873 - DNA, 25 bp, Homo sapien
tggaaaagtagcgacaagccaccgc

SEQ ID NO: 4227874 - DNA, 25 bp, Homo sapien
caccgcccacgccagtttcagcaaa

SEQ ID NO: 4227875 - DNA, 25 bp, Homo sapien
gagagatggaaaagtagcgacaagc

SEQ ID NO: 4227876 - DNA, 25 bp, Homo sapien
gtatatgtacattctccagtttgag

SEQ ID NO: 4227877 - DNA, 25 bp, Homo sapien
gtctggaaccctgtgatagtcttcg

SEQ ID NO: 4227878 - DNA, 25 bp, Homo sapien
gatagtcttcggcttgccagcctgg

SEQ ID NO: 4227879 - DNA, 25 bp, Homo sapien
gttgtatgcgtctggaaccctgtga

SEQ ID NO: 4227880 - DNA, 25 bp, Homo sapien
aacactggggttgtatgcgtctgga

SEQ ID NO: 4227881 - DNA, 25 bp, Homo sapien
gatgcatggcctgctgataacatca

SEQ ID NO: 4227882 - DNA, 25 bp, Homo sapien
aggatgcatggcctgctgataacat

SEQ ID NO: 4227883 - DNA, 25 bp, Homo sapien
ggatgcatggcctgctgataacatc

SEQ ID NO: 4227884 - DNA, 25 bp, Homo sapien
gacgtagtccacaaccatttccggc

SEQ ID NO: 4227885 - DNA, 25 bp, Homo sapien
gggcgatctgcgccgccgagcacat

SEQ ID NO: 4227886 - DNA, 25 bp, Homo sapien
gcagccgcacagacgtagtccacaa

SEQ ID NO: 4227887 - DNA, 25 bp, Homo sapien
tccccgcacagatcccgctcggcgg

SEQ ID NO: 4227888 - DNA, 25 bp, Homo sapien
tcccggatcacgaacggagctagct

SEQ ID NO: 4227889 - DNA, 25 bp, Homo sapien
gtgagggtatcaacctggctccgcg

SEQ ID NO: 4227890 - DNA, 25 bp, Homo sapien
gagtcaggccctaaaaggccaggcg

SEQ ID NO: 4227891 - DNA, 25 bp, Homo sapien
gaccggaaattccaggtctcgctgg

SEQ ID NO: 4227892 - DNA, 25 bp, Homo sapien
cccctcgattaagaacaagtccacg

SEQ ID NO: 4227893 - DNA, 25 bp, Homo sapien
ttaagaacaagtccacggtgcggcc

SEQ ID NO: 4227894 - DNA, 25 bp, Homo sapien
ccacggtgcggcctacaggttctgg

SEQ ID NO: 4227895 - DNA, 25 bp, Homo sapien
tcgattaagaacaagtccacggtgc

SEQ ID NO: 4227896 - DNA, 25 bp, Homo sapien
tggtgccacatcagggtccccccag

SEQ ID NO: 4227897 - DNA, 25 bp, Homo sapien
tgccacatcagggtccccccagcac

SEQ ID NO: 4227898 - DNA, 25 bp, Homo sapien
tcatttggtgccacatcagggtccc

SEQ ID NO: 4227899 - DNA, 25 bp, Homo sapien
ttcatttggtgccacatcagggtcc

SEQ ID NO: 4227900 - DNA, 25 bp, Homo sapien
ggcctgtggactgtggagctttgtt

SEQ ID NO: 4227901 - DNA, 25 bp, Homo sapien
gcctgtggactgtggagctttgttc

SEQ ID NO: 4227902 - DNA, 25 bp, Homo sapien
cctgtggactgtggagctttgttca

SEQ ID NO: 4227903 - DNA, 25 bp, Homo sapien
gtctcaatttggcagcaggcggctg

SEQ ID NO: 4227904 - DNA, 25 bp, Homo sapien
tctcaatttggcagcaggcggctgc

SEQ ID NO: 4227905 - DNA, 25 bp, Homo sapien
tcaatttggcagcaggcggctgcac

SEQ ID NO: 4227906 - DNA, 25 bp, Homo sapien
ctgtctcaatttggcagcaggcggc

SEQ ID NO: 4227907 - DNA, 25 bp, Homo sapien
ctgaagaggggagaccagagttcag

SEQ ID NO: 4227908 - DNA, 25 bp, Homo sapien
tcagcaagaggggaagcccaggtgg

SEQ ID NO: 4227909 - DNA, 25 bp, Homo sapien
agcccaggtggggcagaaacccaag

SEQ ID NO: 4227910 - DNA, 25 bp, Homo sapien
gaggggagaccagagttcagcaaga

SEQ ID NO: 4227911 - DNA, 25 bp, Homo sapien
ttgtgtcgcttgtggcgtactgaac

SEQ ID NO: 4227912 - DNA, 25 bp, Homo sapien
gcttgtggcgtactgaacaccaccg

SEQ ID NO: 4227913 - DNA, 25 bp, Homo sapien
cttgtggcgtactgaacaccaccgg

SEQ ID NO: 4227914 - DNA, 25 bp, Homo sapien
gtcgcttgtggcgtactgaacacca

SEQ ID NO: 4227915 - DNA, 25 bp, Homo sapien
ggcggggctgagaaggcgtgttcat

SEQ ID NO: 4227916 - DNA, 25 bp, Homo sapien
ctggcggggctgagaaggcgtgttc

SEQ ID NO: 4227917 - DNA, 25 bp, Homo sapien
tggcggggctgagaaggcgtgttca

SEQ ID NO: 4227918 - DNA, 25 bp, Homo sapien
cgggaggctgcactgctcgggggct

SEQ ID NO: 4227919 - DNA, 25 bp, Homo sapien
gcaggggctgcactctgcactcggg

SEQ ID NO: 4227920 - DNA, 25 bp, Homo sapien
tcgggaggctgcactgctcgggggc

SEQ ID NO: 4227921 - DNA, 25 bp, Homo sapien
gggctgcactctgcactcgggaggc

SEQ ID NO: 4227922 - DNA, 25 bp, Homo sapien
gatccagcagggtagacatgggcag

SEQ ID NO: 4227923 - DNA, 25 bp, Homo sapien
cttgggatccagcagggtagacatg

SEQ ID NO: 4227924 - DNA, 25 bp, Homo sapien
tgggatccagcagggtagacatggg

SEQ ID NO: 4227925 - DNA, 25 bp, Homo sapien
ggatccagcagggtagacatgggca

SEQ ID NO: 4227926 - DNA, 25 bp, Homo sapien
tgggtaggagatctgggaagggatc

SEQ ID NO: 4227927 - DNA, 25 bp, Homo sapien
ctgggtaggagatctgggaagggat

SEQ ID NO: 4227928 - DNA, 25 bp, Homo sapien
taggagatctgggaagggatcatca

SEQ ID NO: 4227929 - DNA, 25 bp, Homo sapien
ggtaggagatctgggaagggatcat

SEQ ID NO: 4227930 - DNA, 25 bp, Homo sapien
cagggatgtagtaggccccctggga

SEQ ID NO: 4227931 - DNA, 25 bp, Homo sapien
agggatgtagtaggccccctgggag

SEQ ID NO: 4227932 - DNA, 25 bp, Homo sapien
tcgggacaacgtatgtggaacgccc

SEQ ID NO: 4227933 - DNA, 25 bp, Homo sapien
aggtcccaaattctgtagggcttgc

SEQ ID NO: 4227934 - DNA, 25 bp, Homo sapien
ctgtgtcgggacaacgtatgtggaa

SEQ ID NO: 4227935 - DNA, 25 bp, Homo sapien
tagggcttgcacctggatagaagcc

SEQ ID NO: 4227936 - DNA, 25 bp, Homo sapien
agaagaatggtggtagcgtcagggc

SEQ ID NO: 4227937 - DNA, 25 bp, Homo sapien
ggagaagaatggtggtagcgtcagg

SEQ ID NO: 4227938 - DNA, 25 bp, Homo sapien
gagaagaatggtggtagcgtcaggg

SEQ ID NO: 4227939 - DNA, 25 bp, Homo sapien
cccttgggctggatagtaggcgcca

SEQ ID NO: 4227940 - DNA, 25 bp, Homo sapien
tgctgcaccccttgggctggatagt

SEQ ID NO: 4227941 - DNA, 25 bp, Homo sapien
ccacgccagtgggaaactgctgcac

SEQ ID NO: 4227942 - DNA, 25 bp, Homo sapien
ggccacgccagtgggaaactgctgc

SEQ ID NO: 4227943 - DNA, 25 bp, Homo sapien
cgtcttacgctccctcttgggagca

SEQ ID NO: 4227944 - DNA, 25 bp, Homo sapien
gagcaatctggggtggctggttcat

SEQ ID NO: 4227945 - DNA, 25 bp, Homo sapien
tcttacgctccctcttgggagcaat

SEQ ID NO: 4227946 - DNA, 25 bp, Homo sapien
tacgctccctcttgggagcaatctg

SEQ ID NO: 4227947 - DNA, 25 bp, Homo sapien
atctggctgctctcgtagtccctgc

SEQ ID NO: 4227948 - DNA, 25 bp, Homo sapien
caagtcagtggctgcacaccctggg

SEQ ID NO: 4227949 - DNA, 25 bp, Homo sapien
taggtaggtgccagaaaccccttga

SEQ ID NO: 4227950 - DNA, 25 bp, Homo sapien
agagcagccctgtacatcacaatgc

SEQ ID NO: 4227951 - DNA, 25 bp, Homo sapien
gccccaatcttaagactctgggcca

SEQ ID NO: 4227952 - DNA, 25 bp, Homo sapien
ccaatcttaagactctgggccaact

SEQ ID NO: 4227953 - DNA, 25 bp, Homo sapien
ctgccccaatcttaagactctgggc

SEQ ID NO: 4227954 - DNA, 25 bp, Homo sapien
atcttaagactctgggccaactccc

SEQ ID NO: 4227955 - DNA, 25 bp, Homo sapien
atctcctctgtgatatcctttcctc

SEQ ID NO: 4227956 - DNA, 25 bp, Homo sapien
ctcctctgtgatatcctttcctcct

SEQ ID NO: 4227957 - DNA, 25 bp, Homo sapien
gatctcctctgtgatatcctttcct

SEQ ID NO: 4227958 - DNA, 25 bp, Homo sapien
tctcctctgtgatatcctttcctcc

SEQ ID NO: 4227959 - DNA, 25 bp, Homo sapien
gggtgtggaggcagtgcgggcccca

SEQ ID NO: 4227960 - DNA, 25 bp, Homo sapien
tgggtgtggaggcagtgcgggcccc

SEQ ID NO: 4227961 - DNA, 25 bp, Homo sapien
gacacaaagggttaccaagtttgca

SEQ ID NO: 4227962 - DNA, 25 bp, Homo sapien
caaagggttaccaagtttgcactga

SEQ ID NO: 4227963 - DNA, 25 bp, Homo sapien
tgaagagtcccacaacccttcttta

SEQ ID NO: 4227964 - DNA, 25 bp, Homo sapien
cttctttactagagccatttctact

SEQ ID NO: 4227965 - DNA, 25 bp, Homo sapien
cctggggcgtctccccattagcttg

SEQ ID NO: 4227966 - DNA, 25 bp, Homo sapien
ccccattagcttgaggctccagacc

SEQ ID NO: 4227967 - DNA, 25 bp, Homo sapien
gcaacctggggcgtctccccattag

SEQ ID NO: 4227968 - DNA, 25 bp, Homo sapien
ccattagcttgaggctccagaccgc

SEQ ID NO: 4227969 - DNA, 25 bp, Homo sapien
cagccctggccggtcagcaatgatt

SEQ ID NO: 4227970 - DNA, 25 bp, Homo sapien
gaaggcgacgaaggctgggattctg

SEQ ID NO: 4227971 - DNA, 25 bp, Homo sapien
tgggattctgaagggctatgctctg

SEQ ID NO: 4227972 - DNA, 25 bp, Homo sapien
aatgattgctccctgtgaccggtca

SEQ ID NO: 4227973 - DNA, 25 bp, Homo sapien
ctacagacatttgtatagttgtcat

SEQ ID NO: 4227974 - DNA, 25 bp, Homo sapien
tgtatagttgtcatagtgtccccag

SEQ ID NO: 4227975 - DNA, 25 bp, Homo sapien
aggaatagagaggactgcgagatta

SEQ ID NO: 4227976 - DNA, 25 bp, Homo sapien
gcgagattaggctcagaccccggtt

SEQ ID NO: 4227977 - DNA, 25 bp, Homo sapien
gatatggctccccagtttcacggga

SEQ ID NO: 4227978 - DNA, 25 bp, Homo sapien
ctggagaggactggaagaaaactca

SEQ ID NO: 4227979 - DNA, 25 bp, Homo sapien
tacttccagtatgggttcggcgaga

SEQ ID NO: 4227980 - DNA, 25 bp, Homo sapien
ttctggaaccggtttgctaagtgtc

SEQ ID NO: 4227981 - DNA, 25 bp, Homo sapien
cctcaggttgggcagttggagcaat

SEQ ID NO: 4227982 - DNA, 25 bp, Homo sapien
agctctgggcttgactccacctctg

SEQ ID NO: 4227983 - DNA, 25 bp, Homo sapien
gggggctccgttgagcagttcctca

SEQ ID NO: 4227984 - DNA, 25 bp, Homo sapien
tccagatcttcagatgggaccatgc

SEQ ID NO: 4227985 - DNA, 25 bp, Homo sapien
aaggagccgtagctggagtagcaga

SEQ ID NO: 4227986 - DNA, 25 bp, Homo sapien
tggggggcgccattgatgctgtcac

SEQ ID NO: 4227987 - DNA, 25 bp, Homo sapien
gggaagtagctgaaggagccgtagc

SEQ ID NO: 4227988 - DNA, 25 bp, Homo sapien
gtagctgaaggagccgtagctggag

SEQ ID NO: 4227989 - DNA, 25 bp, Homo sapien
aattctgagacaagttggctggaat

SEQ ID NO: 4227990 - DNA, 25 bp, Homo sapien
taggggtactctctggggggagcag

SEQ ID NO: 4227991 - DNA, 25 bp, Homo sapien
ataggggtactctctggggggagca

SEQ ID NO: 4227992 - DNA, 25 bp, Homo sapien
tctgagacaagttggctggaatagg

SEQ ID NO: 4227993 - DNA, 25 bp, Homo sapien
cttgaaggcatccagaaggtctcca

SEQ ID NO: 4227994 - DNA, 25 bp, Homo sapien
tccaacagcctccttcttatttagc

SEQ ID NO: 4227995 - DNA, 25 bp, Homo sapien
aaggcatccagaaggtctccaacag

SEQ ID NO: 4227996 - DNA, 25 bp, Homo sapien
cctccttcttatttagctccttaat

SEQ ID NO: 4227997 - DNA, 25 bp, Homo sapien
atattcatacttctgttccccgggc

SEQ ID NO: 4227998 - DNA, 25 bp, Homo sapien
ctgacttatattcatacttctgttc

SEQ ID NO: 4227999 - DNA, 25 bp, Homo sapien
tgcttcctcaggacgtgggggcaca

SEQ ID NO: 4228000 - DNA, 25 bp, Homo sapien
ttatattcatacttctgttccccgg

SEQ ID NO: 4228001 - DNA, 25 bp, Homo sapien
gatatgtggcaatccctctggcttc

SEQ ID NO: 4228002 - DNA, 25 bp, Homo sapien
cttgtccagcaccacgtcactgata

SEQ ID NO: 4228003 - DNA, 25 bp, Homo sapien
ggcttctgcatactggcaaagatga

SEQ ID NO: 4228004 - DNA, 25 bp, Homo sapien
tctcctctaggtttagaggcttcca

SEQ ID NO: 4228005 - DNA, 25 bp, Homo sapien
gatggagtgaagtctgggccacaat

SEQ ID NO: 4228006 - DNA, 25 bp, Homo sapien
tgtccggccaaggttggcaaaggat

SEQ ID NO: 4228007 - DNA, 25 bp, Homo sapien
tctagtgggatccagtggccgcagt

SEQ ID NO: 4228008 - DNA, 25 bp, Homo sapien
gggccacaatttatgccttgtagtc

SEQ ID NO: 4228009 - DNA, 25 bp, Homo sapien
tcttcggtcattaacactgtggcaa

SEQ ID NO: 4228010 - DNA, 25 bp, Homo sapien
ttcagttttatatcttcggtcatta

SEQ ID NO: 4228011 - DNA, 25 bp, Homo sapien
ttatcagccgccgtccgcttgctgc

SEQ ID NO: 4228012 - DNA, 25 bp, Homo sapien
atgatcttgcgtggttcttttcggg

SEQ ID NO: 4228013 - DNA, 25 bp, Homo sapien
cgttcctcggtgtcgatggccagct

SEQ ID NO: 4228014 - DNA, 25 bp, Homo sapien
ttattcaggatggagcgcaccctgc

SEQ ID NO: 4228015 - DNA, 25 bp, Homo sapien
tgaggtcaatgacccctttgaggcg

SEQ ID NO: 4228016 - DNA, 25 bp, Homo sapien
tgaggcagcggcacatgttggcata

SEQ ID NO: 4228017 - DNA, 25 bp, Homo sapien
ggtcagagagaatgtcacactcaag

SEQ ID NO: 4228018 - DNA, 25 bp, Homo sapien
gagagaatgtcacactcaagactag

SEQ ID NO: 4228019 - DNA, 25 bp, Homo sapien
gagaatgtcacactcaagactagtc

SEQ ID NO: 4228020 - DNA, 25 bp, Homo sapien
ctgtaggtcagagagaatgtcacac

SEQ ID NO: 4228021 - DNA, 25 bp, Homo sapien
aacaacagctttcggaagttcacag

SEQ ID NO: 4228022 - DNA, 25 bp, Homo sapien
ttcaacaacagctttcggaagttca

SEQ ID NO: 4228023 - DNA, 25 bp, Homo sapien
ctcaaactccttctgacatcgattc

SEQ ID NO: 4228024 - DNA, 25 bp, Homo sapien
tctgacatcgattcaacaacagctt

SEQ ID NO: 4228025 - DNA, 25 bp, Homo sapien
tcaaaaagataaccagccactcggc

SEQ ID NO: 4228026 - DNA, 25 bp, Homo sapien
caggacagggattgtgtcaaaaaga

SEQ ID NO: 4228027 - DNA, 25 bp, Homo sapien
ggatatccaaacctagcaataagca

SEQ ID NO: 4228028 - DNA, 25 bp, Homo sapien
actcagtcctgaggccggctggctg

SEQ ID NO: 4228029 - DNA, 25 bp, Homo sapien
atattccctaaagagcgccgccggg

SEQ ID NO: 4228030 - DNA, 25 bp, Homo sapien
ttcatcatggttcttaagcagtttg

SEQ ID NO: 4228031 - DNA, 25 bp, Homo sapien
cacacagtcatgcattattgcctct

SEQ ID NO: 4228032 - DNA, 25 bp, Homo sapien
gacgacaaaggcactcaagggactc

SEQ ID NO: 4228033 - DNA, 25 bp, Homo sapien
cagcacgtcctgcagcataaagcgg

SEQ ID NO: 4228034 - DNA, 25 bp, Homo sapien
cggatgcgggatgacgtcttctttt

SEQ ID NO: 4228035 - DNA, 25 bp, Homo sapien
cataaagcggatgcgggatgacgtc

SEQ ID NO: 4228036 - DNA, 25 bp, Homo sapien
tcctgcagcataaagcggatgcggg

SEQ ID NO: 4228037 - DNA, 25 bp, Homo sapien
tgatgtgctctcgatgttcttccat

SEQ ID NO: 4228038 - DNA, 25 bp, Homo sapien
tggaggaccgccccgacgcttgtca

SEQ ID NO: 4228039 - DNA, 25 bp, Homo sapien
atcccctcggcgtggcacccaattg

SEQ ID NO: 4228040 - DNA, 25 bp, Homo sapien
ctccttatggatctggtcaatggtc

SEQ ID NO: 4228041 - DNA, 25 bp, Homo sapien
tcttggtgagtcgtgaggtgtcaat

SEQ ID NO: 4228042 - DNA, 25 bp, Homo sapien
caatggggcggctacctttgctgat

SEQ ID NO: 4228043 - DNA, 25 bp, Homo sapien
ctttgctgatgggaactgtgttcca

SEQ ID NO: 4228044 - DNA, 25 bp, Homo sapien
gccaccatcatccacaaggggaagt

SEQ ID NO: 4228045 - DNA, 25 bp, Homo sapien
cttgccccagctcagtcgccctcca

SEQ ID NO: 4228046 - DNA, 25 bp, Homo sapien
agctggttgttagaatcgatggagc

SEQ ID NO: 4228047 - DNA, 25 bp, Homo sapien
tggttgttagaatcgatggagccag

SEQ ID NO: 4228048 - DNA, 25 bp, Homo sapien
gagggcttggctcctgagcctccgc

SEQ ID NO: 4228049 - DNA, 25 bp, Homo sapien
gattcaaagtactagtagctgggcg

SEQ ID NO: 4228050 - DNA, 25 bp, Homo sapien
gtactagtagctgggcgagcagctt

SEQ ID NO: 4228051 - DNA, 25 bp, Homo sapien
caaagtactagtagctgggcgagca

SEQ ID NO: 4228052 - DNA, 25 bp, Homo sapien
agcgattcaaagtactagtagctgg

SEQ ID NO: 4228053 - DNA, 25 bp, Homo sapien
ctctgcaccacacgtctattatctg

SEQ ID NO: 4228054 - DNA, 25 bp, Homo sapien
tgtgctttctgtgggtaccgcttgt

SEQ ID NO: 4228055 - DNA, 25 bp, Homo sapien
tttctgtgggtaccgcttgttgaag

SEQ ID NO: 4228056 - DNA, 25 bp, Homo sapien
ccacacgtctattatctgtgctttc

SEQ ID NO: 4228057 - DNA, 25 bp, Homo sapien
ggtgtccgcgcacgatcaagccggt

SEQ ID NO: 4228058 - DNA, 25 bp, Homo sapien
ctcaggctgggagggccgttctcta

SEQ ID NO: 4228059 - DNA, 25 bp, Homo sapien
aagctccgcttggtagcaggtgtcc

SEQ ID NO: 4228060 - DNA, 25 bp, Homo sapien
gatcctccgtgaggctagctgcctt

SEQ ID NO: 4228061 - DNA, 25 bp, Homo sapien
attcctcaatgatagccttggattt

SEQ ID NO: 4228062 - DNA, 25 bp, Homo sapien
tcctcaatgatagccttggatttct

SEQ ID NO: 4228063 - DNA, 25 bp, Homo sapien
ttcctcaatgatagccttggatttc

SEQ ID NO: 4228064 - DNA, 25 bp, Homo sapien
cctcaatgatagccttggatttctt

SEQ ID NO: 4228065 - DNA, 25 bp, Homo sapien
tgcctgccagcatgatccctccctg

SEQ ID NO: 4228066 - DNA, 25 bp, Homo sapien
cccagaccccggacccctatgcctg

SEQ ID NO: 4228067 - DNA, 25 bp, Homo sapien
tcctcaatcacacgccgctcccact

SEQ ID NO: 4228068 - DNA, 25 bp, Homo sapien
actcctcaatcacacgccgctccca

SEQ ID NO: 4228069 - DNA, 25 bp, Homo sapien
tatgctcacgagcaatggcactgcg

SEQ ID NO: 4228070 - DNA, 25 bp, Homo sapien
gctccagcgtagactcgacaccatg

SEQ ID NO: 4228071 - DNA, 25 bp, Homo sapien
ccatgccgtacaaagatgaagagca

SEQ ID NO: 4228072 - DNA, 25 bp, Homo sapien
tgagcagtagacagatgcccagcac

SEQ ID NO: 4228073 - DNA, 25 bp, Homo sapien
cacacgtgggggatgtcaatttcca

SEQ ID NO: 4228074 - DNA, 25 bp, Homo sapien
taccagttccgctaggtagagccac

SEQ ID NO: 4228075 - DNA, 25 bp, Homo sapien
ttccgctaggtagagccacacgtgg

SEQ ID NO: 4228076 - DNA, 25 bp, Homo sapien
gcagaatgggtgttaccagttccgc

SEQ ID NO: 4228077 - DNA, 25 bp, Homo sapien
tttgcccaacggtctcagaggcttt

SEQ ID NO: 4228078 - DNA, 25 bp, Homo sapien
ctttgcccaacggtctcagaggctt

SEQ ID NO: 4228079 - DNA, 25 bp, Homo sapien
agctttgcccaacggtctcagaggc

SEQ ID NO: 4228080 - DNA, 25 bp, Homo sapien
gctttgcccaacggtctcagaggct

SEQ ID NO: 4228081 - DNA, 25 bp, Homo sapien
cagtatttcctctcccaggtaccaa

SEQ ID NO: 4228082 - DNA, 25 bp, Homo sapien
cagccaaaaccacaccgtgggaggc

SEQ ID NO: 4228083 - DNA, 25 bp, Homo sapien
ggaccatgaagcttcagggccacag

SEQ ID NO: 4228084 - DNA, 25 bp, Homo sapien
aggtaccaacacaatcctgtcatca

SEQ ID NO: 4228085 - DNA, 25 bp, Homo sapien
tagaaattccttccagctaagcccg

SEQ ID NO: 4228086 - DNA, 25 bp, Homo sapien
aaattccttccagctaagcccggct

SEQ ID NO: 4228087 - DNA, 25 bp, Homo sapien
agcgacgaatgcaccaatgtcctgg

SEQ ID NO: 4228088 - DNA, 25 bp, Homo sapien
ctgttcagcgacgaatgcaccaatg

SEQ ID NO: 4228089 - DNA, 25 bp, Homo sapien
tgccaacaggagacaagaaagaaga

SEQ ID NO: 4228090 - DNA, 25 bp, Homo sapien
taagaggtaaggttgccaacaggag

SEQ ID NO: 4228091 - DNA, 25 bp, Homo sapien
tgctagaattaacccaactccatcc

SEQ ID NO: 4228092 - DNA, 25 bp, Homo sapien
caatggaaaaggcccgcagttaaga

SEQ ID NO: 4228093 - DNA, 25 bp, Homo sapien
tcagctcctcggaggggagtgccct

SEQ ID NO: 4228094 - DNA, 25 bp, Homo sapien
tccagtcgaacacccgctggttact

SEQ ID NO: 4228095 - DNA, 25 bp, Homo sapien
tctatccagtcgaacacccgctggt

SEQ ID NO: 4228096 - DNA, 25 bp, Homo sapien
tcgaacacccgctggttactgctgc

SEQ ID NO: 4228097 - DNA, 25 bp, Homo sapien
gggagaaacaaatgatccccagatt

SEQ ID NO: 4228098 - DNA, 25 bp, Homo sapien
ctgtatgggagaaacaaatgatccc

SEQ ID NO: 4228099 - DNA, 25 bp, Homo sapien
gtatgggagaaacaaatgatcccca

SEQ ID NO: 4228100 - DNA, 25 bp, Homo sapien
atgggagaaacaaatgatccccaga

SEQ ID NO: 4228101 - DNA, 25 bp, Homo sapien
ttggatactatctgctgctcactca

SEQ ID NO: 4228102 - DNA, 25 bp, Homo sapien
aactaacgtgttggatactatctgc

SEQ ID NO: 4228103 - DNA, 25 bp, Homo sapien
cagaatagcagacagccgtcatgag

SEQ ID NO: 4228104 - DNA, 25 bp, Homo sapien
tcatgagggctcgaactaacgtgtt

SEQ ID NO: 4228105 - DNA, 25 bp, Homo sapien
ttgtctgtcaggcccacccttgccc

SEQ ID NO: 4228106 - DNA, 25 bp, Homo sapien
cctccctccacttgtctgtcaggcc

SEQ ID NO: 4228107 - DNA, 25 bp, Homo sapien
gctcgcgctttcagcactgcaacgt

SEQ ID NO: 4228108 - DNA, 25 bp, Homo sapien
tatttctgcagcagcttcgctcgcg

SEQ ID NO: 4228109 - DNA, 25 bp, Homo sapien
tctaaggtcactacaagggcctgga

SEQ ID NO: 4228110 - DNA, 25 bp, Homo sapien
tagctccttctgctcgtcacacagg

SEQ ID NO: 4228111 - DNA, 25 bp, Homo sapien
tcaactcaagcatcacctgttcggg

SEQ ID NO: 4228112 - DNA, 25 bp, Homo sapien
tgtggatgctatatcctttgccgga

SEQ ID NO: 4228113 - DNA, 25 bp, Homo sapien
gggtagccttcccaagcaacgtgtc

SEQ ID NO: 4228114 - DNA, 25 bp, Homo sapien
gcaacgtgtcctataacccctgaaa

SEQ ID NO: 4228115 - DNA, 25 bp, Homo sapien
agttagaggtgactggccaccgcca

SEQ ID NO: 4228116 - DNA, 25 bp, Homo sapien
aacttgcttggcctcaccttggcag

SEQ ID NO: 4228117 - DNA, 25 bp, Homo sapien
gcctctgacaggatgctaatctcat

SEQ ID NO: 4228118 - DNA, 25 bp, Homo sapien
tcatgatctgagactgctgcacagc

SEQ ID NO: 4228119 - DNA, 25 bp, Homo sapien
catacagtgcgtcaaagaacatccg

SEQ ID NO: 4228120 - DNA, 25 bp, Homo sapien
ttcaccacgtcctcgtcatacagtg

SEQ ID NO: 4228121 - DNA, 25 bp, Homo sapien
gggtccttgctactctcccaactgt

SEQ ID NO: 4228122 - DNA, 25 bp, Homo sapien
gcgtcaaagaacatccgcagcaggt

SEQ ID NO: 4228123 - DNA, 25 bp, Homo sapien
aggctgtgacagatttaagggccac

SEQ ID NO: 4228124 - DNA, 25 bp, Homo sapien
tcagttgtggtcagactcctcctct

SEQ ID NO: 4228125 - DNA, 25 bp, Homo sapien
cagtccaggcggctagccgggccat

SEQ ID NO: 4228126 - DNA, 25 bp, Homo sapien
gttcagacacatcacactacaggca

SEQ ID NO: 4228127 - DNA, 25 bp, Homo sapien
agccactttattagttcagacacat

SEQ ID NO: 4228128 - DNA, 25 bp, Homo sapien
tccaggcggctagccgggccatctg

SEQ ID NO: 4228129 - DNA, 25 bp, Homo sapien
ccagcagcgaggacggcagtcccga

SEQ ID NO: 4228130 - DNA, 25 bp, Homo sapien
cggcagtcccgagagtgattttcag

SEQ ID NO: 4228131 - DNA, 25 bp, Homo sapien
tttaataattacaggcaccgtgccc

SEQ ID NO: 4228132 - DNA, 25 bp, Homo sapien
ccccaagacacaccaaatttcaaga

SEQ ID NO: 4228133 - DNA, 25 bp, Homo sapien
taggagagcagagcctagcaaggat

SEQ ID NO: 4228134 - DNA, 25 bp, Homo sapien
ggcacctatcaagcccatctgaggg

SEQ ID NO: 4228135 - DNA, 25 bp, Homo sapien
gagccgactgccacctgaaggcagg

SEQ ID NO: 4228136 - DNA, 25 bp, Homo sapien
gattctccagctataaacaacccga

SEQ ID NO: 4228137 - DNA, 25 bp, Homo sapien
cgcgggccatcgccttgcagagggt

SEQ ID NO: 4228138 - DNA, 25 bp, Homo sapien
ccaggcacgctagcctgcgctcggg

SEQ ID NO: 4228139 - DNA, 25 bp, Homo sapien
agagccgatacagcccatggccggg

SEQ ID NO: 4228140 - DNA, 25 bp, Homo sapien
ttgcagagggtagggtcgcggccac

SEQ ID NO: 4228141 - DNA, 25 bp, Homo sapien
ctttagctggagcagccgtctctat

SEQ ID NO: 4228142 - DNA, 25 bp, Homo sapien
ggccagctgttggtccccagaaatg

SEQ ID NO: 4228143 - DNA, 25 bp, Homo sapien
tggagcagccgtctctatccctgag

SEQ ID NO: 4228144 - DNA, 25 bp, Homo sapien
tcggccagctgttggtccccagaaa

SEQ ID NO: 4228145 - DNA, 25 bp, Homo sapien
ttttggctccggatgctgagccagt

SEQ ID NO: 4228146 - DNA, 25 bp, Homo sapien
tctattcctgttttggctccggatg

SEQ ID NO: 4228147 - DNA, 25 bp, Homo sapien
cccatttggaacctgtgcctagtca

SEQ ID NO: 4228148 - DNA, 25 bp, Homo sapien
gagaaccaaaagcccagaaccgctc

SEQ ID NO: 4228149 - DNA, 25 bp, Homo sapien
tctgcgacttgtctgacaagtccat

SEQ ID NO: 4228150 - DNA, 25 bp, Homo sapien
tctgacaagtccatcgtcctccagg

SEQ ID NO: 4228151 - DNA, 25 bp, Homo sapien
cccagcacagaaatcataggcatgc

SEQ ID NO: 4228152 - DNA, 25 bp, Homo sapien
ttcacgctgccacagaaacattttg

SEQ ID NO: 4228153 - DNA, 25 bp, Homo sapien
gaggaagttcgatccactccacagc

SEQ ID NO: 4228154 - DNA, 25 bp, Homo sapien
ggagggttcgagcagatcccaaaga

SEQ ID NO: 4228155 - DNA, 25 bp, Homo sapien
atcccaaagaggatagagagagacc

SEQ ID NO: 4228156 - DNA, 25 bp, Homo sapien
tgactgtccaccgaggaagggcggg

SEQ ID NO: 4228157 - DNA, 25 bp, Homo sapien
tatatggatgacgtcctccttcccc

SEQ ID NO: 4228158 - DNA, 25 bp, Homo sapien
tcccctttatatggatgacgtcctc

SEQ ID NO: 4228159 - DNA, 25 bp, Homo sapien
gctgcagatcccctttatatggatg

SEQ ID NO: 4228160 - DNA, 25 bp, Homo sapien
gcagatcccctttatatggatgacg

SEQ ID NO: 4228161 - DNA, 25 bp, Homo sapien
gtgtttcttagcttgctctccctcc

SEQ ID NO: 4228162 - DNA, 25 bp, Homo sapien
aaaaggtgtatgtctccctggcaac

SEQ ID NO: 4228163 - DNA, 25 bp, Homo sapien
agggtggcgccagtagcctccagcc

SEQ ID NO: 4228164 - DNA, 25 bp, Homo sapien
atacggcccgggatgcgctgacgtc

SEQ ID NO: 4228165 - DNA, 25 bp, Homo sapien
tgaagaaccacgagtgagacctctg

SEQ ID NO: 4228166 - DNA, 25 bp, Homo sapien
ggtgaattatgtcctcccagaaagc

SEQ ID NO: 4228167 - DNA, 25 bp, Homo sapien
taatgaagttggaggcacacatccc

SEQ ID NO: 4228168 - DNA, 25 bp, Homo sapien
gcttaggctacggtgcaagactcca

SEQ ID NO: 4228169 - DNA, 25 bp, Homo sapien
gcgatctcctggatagttagggctc

SEQ ID NO: 4228170 - DNA, 25 bp, Homo sapien
ctcctggatagttagggctcgccgg

SEQ ID NO: 4228171 - DNA, 25 bp, Homo sapien
gggctcgccgggacttgggcagcat

SEQ ID NO: 4228172 - DNA, 25 bp, Homo sapien
atctcctggatagttagggctcgcc

SEQ ID NO: 4228173 - DNA, 25 bp, Homo sapien
aagggtggcagtagttaggatccat

SEQ ID NO: 4228174 - DNA, 25 bp, Homo sapien
catgtactcacaggaaacagttcca

SEQ ID NO: 4228175 - DNA, 25 bp, Homo sapien
ggctgagattcacctgagcaaggga

SEQ ID NO: 4228176 - DNA, 25 bp, Homo sapien
tccatgtgaacctttgggtgggaga

SEQ ID NO: 4228177 - DNA, 25 bp, Homo sapien
aggtgagtcactcggcttgctccag

SEQ ID NO: 4228178 - DNA, 25 bp, Homo sapien
cactcaatgaggtgagccactcggc

SEQ ID NO: 4228179 - DNA, 25 bp, Homo sapien
taggcttggtcacgtggtccttcac

SEQ ID NO: 4228180 - DNA, 25 bp, Homo sapien
tgctgcaaagcgagcctcttgttcg

SEQ ID NO: 4228181 - DNA, 25 bp, Homo sapien
catgtcagacccgaggagataagaa

SEQ ID NO: 4228182 - DNA, 25 bp, Homo sapien
gcagccctgtgccaagagtgtagct

SEQ ID NO: 4228183 - DNA, 25 bp, Homo sapien
tgtcgcagggacagaatgcataagc

SEQ ID NO: 4228184 - DNA, 25 bp, Homo sapien
gagtgtagcttatcccctttctgcc

SEQ ID NO: 4228185 - DNA, 25 bp, Homo sapien
tggcttccgcgatggcaaactgctc

SEQ ID NO: 4228186 - DNA, 25 bp, Homo sapien
tccaccgaagaccatgctcggagct

SEQ ID NO: 4228187 - DNA, 25 bp, Homo sapien
tcatcataggagtcatcagtggagt

SEQ ID NO: 4228188 - DNA, 25 bp, Homo sapien
tggagtcctcgccatccaccgaaga

SEQ ID NO: 4228189 - DNA, 25 bp, Homo sapien
cacccatgagtgtggacagccttcc

SEQ ID NO: 4228190 - DNA, 25 bp, Homo sapien
ctctgaaagaatgccaaggtctatc

SEQ ID NO: 4228191 - DNA, 25 bp, Homo sapien
cctgtgggaaaggaacgaatccatt

SEQ ID NO: 4228192 - DNA, 25 bp, Homo sapien
tctatcaggtgggtccaccacagcc

SEQ ID NO: 4228193 - DNA, 25 bp, Homo sapien
cagtttggcgagaagcagctcatcg

SEQ ID NO: 4228194 - DNA, 25 bp, Homo sapien
tcccagctgcccgttagtggtgggc

SEQ ID NO: 4228195 - DNA, 25 bp, Homo sapien
caggctgcggaaggcactttcccgg

SEQ ID NO: 4228196 - DNA, 25 bp, Homo sapien
tccaggctgcacagactagagcaca

SEQ ID NO: 4228197 - DNA, 25 bp, Homo sapien
tatcaagcactgcacatggactcgg

SEQ ID NO: 4228198 - DNA, 25 bp, Homo sapien
tgtggccctctctagaagaacatga

SEQ ID NO: 4228199 - DNA, 25 bp, Homo sapien
tatatagaatgcttgtgcccgttgg

SEQ ID NO: 4228200 - DNA, 25 bp, Homo sapien
tacgtgggcattaacaccctggctg

SEQ ID NO: 4228201 - DNA, 25 bp, Homo sapien
tgtctgggccgctcgtctcttcgga

SEQ ID NO: 4228202 - DNA, 25 bp, Homo sapien
gaggcggctcctaacgggctgaccc

SEQ ID NO: 4228203 - DNA, 25 bp, Homo sapien
ccctacggagctcaggcgtctgcag

SEQ ID NO: 4228204 - DNA, 25 bp, Homo sapien
tgacccggaggagtccgatgtagac

SEQ ID NO: 4228205 - DNA, 25 bp, Homo sapien
tgccttctcctggacacggatcccc

SEQ ID NO: 4228206 - DNA, 25 bp, Homo sapien
tccagcttagtgctgcgcgttcccc

SEQ ID NO: 4228207 - DNA, 25 bp, Homo sapien
cctccagcttagtgctgcgcgttcc

SEQ ID NO: 4228208 - DNA, 25 bp, Homo sapien
cggatcccctccgtgccccttcagc

SEQ ID NO: 4228209 - DNA, 25 bp, Homo sapien
aagcaataggctgtagagcgggttc

SEQ ID NO: 4228210 - DNA, 25 bp, Homo sapien
gagccggatccgtccagtttgggaa

SEQ ID NO: 4228211 - DNA, 25 bp, Homo sapien
ctgctggacgtaacccgagccggat

SEQ ID NO: 4228212 - DNA, 25 bp, Homo sapien
ttcagaggccgggttccgaagactg

SEQ ID NO: 4228213 - DNA, 25 bp, Homo sapien
tagcgtggacaagaccggagagaac

SEQ ID NO: 4228214 - DNA, 25 bp, Homo sapien
gaccacagttgggagtacgtgcacc

SEQ ID NO: 4228215 - DNA, 25 bp, Homo sapien
tggcgcatgcgcacaaacaagcggt

SEQ ID NO: 4228216 - DNA, 25 bp, Homo sapien
agattgcttccgagaggcttcggca

SEQ ID NO: 4228217 - DNA, 25 bp, Homo sapien
atatcctcaaacaggatgcccgcca

SEQ ID NO: 4228218 - DNA, 25 bp, Homo sapien
tccttcacatcgaaaatatcctcaa

SEQ ID NO: 4228219 - DNA, 25 bp, Homo sapien
ttgccctccgggtcaatatccttca

SEQ ID NO: 4228220 - DNA, 25 bp, Homo sapien
tatcctcaaacaggatgcccgccat

SEQ ID NO: 4228221 - DNA, 25 bp, Homo sapien
gaaattcaggctcaatcagaaccag

SEQ ID NO: 4228222 - DNA, 25 bp, Homo sapien
ccaaggcagatcctacagtgtggga

SEQ ID NO: 4228223 - DNA, 25 bp, Homo sapien
tgtggcaagcgaacgtaatccccag

SEQ ID NO: 4228224 - DNA, 25 bp, Homo sapien
tgcctggatgactgagaacctgact

SEQ ID NO: 4228225 - DNA, 25 bp, Homo sapien
ttgaaagattcactctcacaatgca

SEQ ID NO: 4228226 - DNA, 25 bp, Homo sapien
caagtctacagggtaaatttgaatg

SEQ ID NO: 4228227 - DNA, 25 bp, Homo sapien
gattcactctcacaatgcagtcgag

SEQ ID NO: 4228228 - DNA, 25 bp, Homo sapien
tctaagattagatccatcttgaaag

SEQ ID NO: 4228229 - DNA, 25 bp, Homo sapien
agaagcagcaaaaagtctcttatta

SEQ ID NO: 4228230 - DNA, 25 bp, Homo sapien
caaggtactagctatgaccaaccga

SEQ ID NO: 4228231 - DNA, 25 bp, Homo sapien
ccagggtaccatcttcatacaaggt

SEQ ID NO: 4228232 - DNA, 25 bp, Homo sapien
catcagtggggttgtattcaccatc

SEQ ID NO: 4228233 - DNA, 25 bp, Homo sapien
tcaccatcatccagggtaccatctt

SEQ ID NO: 4228234 - DNA, 25 bp, Homo sapien
gaagagtctttctatatcacttatc

SEQ ID NO: 4228235 - DNA, 25 bp, Homo sapien
acttatctacttagtcctcaaggca

SEQ ID NO: 4228236 - DNA, 25 bp, Homo sapien
ccttaaggttactcagattctgctg

SEQ ID NO: 4228237 - DNA, 25 bp, Homo sapien
tttgtagcagtgaggtttcgctatg

SEQ ID NO: 4228238 - DNA, 25 bp, Homo sapien
ttcttaacagtaattaacaatataa

SEQ ID NO: 4228239 - DNA, 25 bp, Homo sapien
taacaatataaaagatcccatttaa

SEQ ID NO: 4228240 - DNA, 25 bp, Homo sapien
aaaatggttactggtcagccgggcg

SEQ ID NO: 4228241 - DNA, 25 bp, Homo sapien
gagcaatagcagcaaagttattctt

SEQ ID NO: 4228242 - DNA, 25 bp, Homo sapien
tcagtagaagtttcatctccctcaa

SEQ ID NO: 4228243 - DNA, 25 bp, Homo sapien
gtgttgctgcttcagtagaagtttc

SEQ ID NO: 4228244 - DNA, 25 bp, Homo sapien
aggcgtgttgctgcttcagtagaag

SEQ ID NO: 4228245 - DNA, 25 bp, Homo sapien
agtagaagtttcatctccctcaatc

SEQ ID NO: 4228246 - DNA, 25 bp, Homo sapien
ccaaaattctgacaaagatcaatgc

SEQ ID NO: 4228247 - DNA, 25 bp, Homo sapien
gatcaatgcacaggtatgtgcaagg

SEQ ID NO: 4228248 - DNA, 25 bp, Homo sapien
tactgttgtgtcactaggaaccaaa

SEQ ID NO: 4228249 - DNA, 25 bp, Homo sapien
actaggaaccaaaattctgacaaag

SEQ ID NO: 4228250 - DNA, 25 bp, Homo sapien
aaacagaaggccccatcccgtgatt

SEQ ID NO: 4228251 - DNA, 25 bp, Homo sapien
acagaaggccccatcccgtgattct

SEQ ID NO: 4228252 - DNA, 25 bp, Homo sapien
aacagaaggccccatcccgtgattc

SEQ ID NO: 4228253 - DNA, 25 bp, Homo sapien
tcccgtgattctggagcactgccac

SEQ ID NO: 4228254 - DNA, 25 bp, Homo sapien
gcccccataggacacgtacgcagag

SEQ ID NO: 4228255 - DNA, 25 bp, Homo sapien
caggagataaactctggagtccacc

SEQ ID NO: 4228256 - DNA, 25 bp, Homo sapien
ggagtccacctcgaatccatgcagg

SEQ ID NO: 4228257 - DNA, 25 bp, Homo sapien
aggttgttggcatccccctgcagcc

SEQ ID NO: 4228258 - DNA, 25 bp, Homo sapien
tcaacaggtgagcaagagcggctgc

SEQ ID NO: 4228259 - DNA, 25 bp, Homo sapien
cagtttcccattgagtggaggccag

SEQ ID NO: 4228260 - DNA, 25 bp, Homo sapien
gccagttaaagatgccgccacggtg

SEQ ID NO: 4228261 - DNA, 25 bp, Homo sapien
tctttcacaggcgagtcagtttccc

SEQ ID NO: 4228262 - DNA, 25 bp, Homo sapien
tggctggccctaaggaaaggggaca

SEQ ID NO: 4228263 - DNA, 25 bp, Homo sapien
gtggaatacagcacagccctggctg

SEQ ID NO: 4228264 - DNA, 25 bp, Homo sapien
ttggtggaatacagcacagccctgg

SEQ ID NO: 4228265 - DNA, 25 bp, Homo sapien
cacagccctggctggccctaaggaa

SEQ ID NO: 4228266 - DNA, 25 bp, Homo sapien
tcccacttcgaaagggggaatgaca

SEQ ID NO: 4228267 - DNA, 25 bp, Homo sapien
tgggcaatatccgtgttcccacttc

SEQ ID NO: 4228268 - DNA, 25 bp, Homo sapien
ggcaatatccgtgttcccacttcga

SEQ ID NO: 4228269 - DNA, 25 bp, Homo sapien
aatatccgtgttcccacttcgaaag

SEQ ID NO: 4228270 - DNA, 25 bp, Homo sapien
aacaccaacccataacaggagattt

SEQ ID NO: 4228271 - DNA, 25 bp, Homo sapien
tgacagtccactcaacccgtccaaa

SEQ ID NO: 4228272 - DNA, 25 bp, Homo sapien
ctgacagtccactcaacccgtccaa

SEQ ID NO: 4228273 - DNA, 25 bp, Homo sapien
ccataacaccaacccataacaggag

SEQ ID NO: 4228274 - DNA, 25 bp, Homo sapien
tgccgcgaggggctcgtcgggcggc

SEQ ID NO: 4228275 - DNA, 25 bp, Homo sapien
tcgtcgggcggccgcagagtcggcg

SEQ ID NO: 4228276 - DNA, 25 bp, Homo sapien
gtcgggcggccgcagagtcggcgcc

SEQ ID NO: 4228277 - DNA, 25 bp, Homo sapien
ccggggcagtgccgcgaggggctcg

SEQ ID NO: 4228278 - DNA, 25 bp, Homo sapien
ggctccttctcagaacggatgggca

SEQ ID NO: 4228279 - DNA, 25 bp, Homo sapien
cttctcagaacggatgggcagcacg

SEQ ID NO: 4228280 - DNA, 25 bp, Homo sapien
cagcggctccttctcagaacggatg

SEQ ID NO: 4228281 - DNA, 25 bp, Homo sapien
tccttctcagaacggatgggcagca

SEQ ID NO: 4228282 - DNA, 25 bp, Homo sapien
ctgcccagctcgcgccgtgtgccgc

SEQ ID NO: 4228283 - DNA, 25 bp, Homo sapien
ccagctcgcgccgtgtgccgccccg

SEQ ID NO: 4228284 - DNA, 25 bp, Homo sapien
cagctcgcgccgtgtgccgccccgg

SEQ ID NO: 4228285 - DNA, 25 bp, Homo sapien
gcccagctcgcgccgtgtgccgccc

SEQ ID NO: 4228286 - DNA, 25 bp, Homo sapien
ctgcggggacgggcttggctggagg

SEQ ID NO: 4228287 - DNA, 25 bp, Homo sapien
gcggggacgggcttggctggaggcc

SEQ ID NO: 4228288 - DNA, 25 bp, Homo sapien
cggggacgggcttggctggaggccg

SEQ ID NO: 4228289 - DNA, 25 bp, Homo sapien
tgcggggacgggcttggctggaggc

SEQ ID NO: 4228290 - DNA, 25 bp, Homo sapien
acgcagcgcatcaccccgaatggct

SEQ ID NO: 4228291 - DNA, 25 bp, Homo sapien
cgggtgccacgtctcgtccaaggca

SEQ ID NO: 4228292 - DNA, 25 bp, Homo sapien
aaggcatagaccttcccgccgaagg

SEQ ID NO: 4228293 - DNA, 25 bp, Homo sapien
gaatggctcccctaggtccgggtgc

SEQ ID NO: 4228294 - DNA, 25 bp, Homo sapien
tgccagggcccctggtacggcgacc

SEQ ID NO: 4228295 - DNA, 25 bp, Homo sapien
cactctggtttgatgttcttgcagc

SEQ ID NO: 4228296 - DNA, 25 bp, Homo sapien
ttcttgcagctgaccctgccagggc

SEQ ID NO: 4228297 - DNA, 25 bp, Homo sapien
cccacaggccggggttgggcactct

SEQ ID NO: 4228298 - DNA, 25 bp, Homo sapien
caggtctggcagcagtgtcccggca

SEQ ID NO: 4228299 - DNA, 25 bp, Homo sapien
tctggcagcagtgtcccggcagctg

SEQ ID NO: 4228300 - DNA, 25 bp, Homo sapien
agcagtgtcccggcagctggcgcgg

SEQ ID NO: 4228301 - DNA, 25 bp, Homo sapien
tggcagcagtgtcccggcagctggc

SEQ ID NO: 4228302 - DNA, 25 bp, Homo sapien
gcggatactcgaaggacaggccgct

SEQ ID NO: 4228303 - DNA, 25 bp, Homo sapien
aaggacaggccgctcggctgccgct

SEQ ID NO: 4228304 - DNA, 25 bp, Homo sapien
gctataactgcgatgctccgggtcc

SEQ ID NO: 4228305 - DNA, 25 bp, Homo sapien
tggctccccgcggtcgctataactg

SEQ ID NO: 4228306 - DNA, 25 bp, Homo sapien
agcagcgagactcgggctcgtgcca

SEQ ID NO: 4228307 - DNA, 25 bp, Homo sapien
tcgtgccaccgcctgcgacctcggc

SEQ ID NO: 4228308 - DNA, 25 bp, Homo sapien
aggctagagcgcagcagcgagactc

SEQ ID NO: 4228309 - DNA, 25 bp, Homo sapien
gcggaggctagagcgcagcagcgag

SEQ ID NO: 4228310 - DNA, 25 bp, Homo sapien
gacactgccattggagtctgagaag

SEQ ID NO: 4228311 - DNA, 25 bp, Homo sapien
acaggacactgccattggagtctga

SEQ ID NO: 4228312 - DNA, 25 bp, Homo sapien
cactgccattggagtctgagaagcg

SEQ ID NO: 4228313 - DNA, 25 bp, Homo sapien
gccattggagtctgagaagcggatc

SEQ ID NO: 4228314 - DNA, 25 bp, Homo sapien
caaatcacattatcctactgagcct

SEQ ID NO: 4228315 - DNA, 25 bp, Homo sapien
cattatcctactgagcctcagttcc

SEQ ID NO: 4228316 - DNA, 25 bp, Homo sapien
tcacattatcctactgagcctcagt

SEQ ID NO: 4228317 - DNA, 25 bp, Homo sapien
gaacaaatcacattatcctactgag

SEQ ID NO: 4228318 - DNA, 25 bp, Homo sapien
gcagagacaaccgaggcactgcccg

SEQ ID NO: 4228319 - DNA, 25 bp, Homo sapien
agctgttctgccctaaggagccgca

SEQ ID NO: 4228320 - DNA, 25 bp, Homo sapien
cagacctcccctgaagggtgagtga

SEQ ID NO: 4228321 - DNA, 25 bp, Homo sapien
gagtgtcacaagtgccacatgcagc

SEQ ID NO: 4228322 - DNA, 25 bp, Homo sapien
agcagggtgatgccccctacgccct

SEQ ID NO: 4228323 - DNA, 25 bp, Homo sapien
agcagccctcggaagagcagcaaaa

SEQ ID NO: 4228324 - DNA, 25 bp, Homo sapien
ggggccttctagagtcaggatggca

SEQ ID NO: 4228325 - DNA, 25 bp, Homo sapien
tgtggggggccttctagagtcagga

SEQ ID NO: 4228326 - DNA, 25 bp, Homo sapien
gcctttctgagacaggtgctctccc

SEQ ID NO: 4228327 - DNA, 25 bp, Homo sapien
tgggcctttctgagacaggtgctct

SEQ ID NO: 4228328 - DNA, 25 bp, Homo sapien
ccttctcacgtgttttgcccccatc

SEQ ID NO: 4228329 - DNA, 25 bp, Homo sapien
atgtgggcctttctgagacaggtgc

SEQ ID NO: 4228330 - DNA, 25 bp, Homo sapien
ctggagcctcaagggaacctgggtt

SEQ ID NO: 4228331 - DNA, 25 bp, Homo sapien
tggagcctcaagggaacctgggtta

SEQ ID NO: 4228332 - DNA, 25 bp, Homo sapien
ctcgcagtagctgcccctggtgtag

SEQ ID NO: 4228333 - DNA, 25 bp, Homo sapien
tgaagttctcgcagtagctgcccct

SEQ ID NO: 4228334 - DNA, 25 bp, Homo sapien
tggcctgaagttctcgcagtagctg

SEQ ID NO: 4228335 - DNA, 25 bp, Homo sapien
aagttctcgcagtagctgcccctgg

SEQ ID NO: 4228336 - DNA, 25 bp, Homo sapien
gccaagacaggtggcagcgagagcc

SEQ ID NO: 4228337 - DNA, 25 bp, Homo sapien
tgtgatgggcaatagcaagaggcca

SEQ ID NO: 4228338 - DNA, 25 bp, Homo sapien
aggtggcagcgagagccagatcccc

SEQ ID NO: 4228339 - DNA, 25 bp, Homo sapien
gggcaatagcaagaggccaagacag

SEQ ID NO: 4228340 - DNA, 25 bp, Homo sapien
ggcagcaatgtgtccactgatgcgc

SEQ ID NO: 4228341 - DNA, 25 bp, Homo sapien
cagcaatgtgtccactgatgcgcag

SEQ ID NO: 4228342 - DNA, 25 bp, Homo sapien
aatgtgtccactgatgcgcagccct

SEQ ID NO: 4228343 - DNA, 25 bp, Homo sapien
gcaatgtgtccactgatgcgcagcc

SEQ ID NO: 4228344 - DNA, 25 bp, Homo sapien
cagcacccgtctggactgggatcag

SEQ ID NO: 4228345 - DNA, 25 bp, Homo sapien
atcagggcatcagccccacaaagga

SEQ ID NO: 4228346 - DNA, 25 bp, Homo sapien
cagggagccatttcctagcagcgtg

SEQ ID NO: 4228347 - DNA, 25 bp, Homo sapien
tggctgagccggcagcacccgtctg

SEQ ID NO: 4228348 - DNA, 25 bp, Homo sapien
tgcgctgatccctccgctgaggctt

SEQ ID NO: 4228349 - DNA, 25 bp, Homo sapien
cactgcttgtccctaccacttgcac

SEQ ID NO: 4228350 - DNA, 25 bp, Homo sapien
ggcacaggacagtgcgctgatccct

SEQ ID NO: 4228351 - DNA, 25 bp, Homo sapien
tgatccctccgctgaggcttggtct

SEQ ID NO: 4228352 - DNA, 25 bp, Homo sapien
gcttcccacagcccatgcattgggc

SEQ ID NO: 4228353 - DNA, 25 bp, Homo sapien
atggcgggcgctatgcccacagtag

SEQ ID NO: 4228354 - DNA, 25 bp, Homo sapien
cgaagctctccgtctgggaagtcct

SEQ ID NO: 4228355 - DNA, 25 bp, Homo sapien
gcagcagcatatgagcccctcgggc

SEQ ID NO: 4228356 - DNA, 25 bp, Homo sapien
ttggtgcccacgttcaggaagagct

SEQ ID NO: 4228357 - DNA, 25 bp, Homo sapien
acaaagaaagacacaccaggctccg

SEQ ID NO: 4228358 - DNA, 25 bp, Homo sapien
gcaaccggagcttaggcacaaagaa

SEQ ID NO: 4228359 - DNA, 25 bp, Homo sapien
cttcagatggcaaccggagcttagg

SEQ ID NO: 4228360 - DNA, 25 bp, Homo sapien
ggctgtctgccaccatccctcaaat

SEQ ID NO: 4228361 - DNA, 25 bp, Homo sapien
tgacagtgggtatccaaggaaagcc

SEQ ID NO: 4228362 - DNA, 25 bp, Homo sapien
tggctcttcacagggggtagcacca

SEQ ID NO: 4228363 - DNA, 25 bp, Homo sapien
cagccagcagcacttcatagtgcag

SEQ ID NO: 4228364 - DNA, 25 bp, Homo sapien
ctctgagccatagaatcccttcagc

SEQ ID NO: 4228365 - DNA, 25 bp, Homo sapien
tctggggctacccttggtggtgatc

SEQ ID NO: 4228366 - DNA, 25 bp, Homo sapien
gccgcagcagttccggctccaggtc

SEQ ID NO: 4228367 - DNA, 25 bp, Homo sapien
ccctctggggctacccttggtggtg

SEQ ID NO: 4228368 - DNA, 25 bp, Homo sapien
agcagttccggctccaggtccttca

SEQ ID NO: 4228369 - DNA, 25 bp, Homo sapien
cgcctccaggcgcagtccgccaacc

SEQ ID NO: 4228370 - DNA, 25 bp, Homo sapien
gcctccaggcgcagtccgccaacct

SEQ ID NO: 4228371 - DNA, 25 bp, Homo sapien
caggcggcgcagcagaggctgtatc

SEQ ID NO: 4228372 - DNA, 25 bp, Homo sapien
agaccaggcaccacaggcggcgcag

SEQ ID NO: 4228373 - DNA, 25 bp, Homo sapien
gcagcagaggctgtatccggagccc

SEQ ID NO: 4228374 - DNA, 25 bp, Homo sapien
gagaccaggcaccacaggcggcgca

SEQ ID NO: 4228375 - DNA, 25 bp, Homo sapien
ctcggggccgcccaggaccaccagg

SEQ ID NO: 4228376 - DNA, 25 bp, Homo sapien
gccgcccaggaccaccaggtttggc

SEQ ID NO: 4228377 - DNA, 25 bp, Homo sapien
ccaggaccaccaggtttggcgggcg

SEQ ID NO: 4228378 - DNA, 25 bp, Homo sapien
cgcccaggaccaccaggtttggcgg

SEQ ID NO: 4228379 - DNA, 25 bp, Homo sapien
cgggtcgtagttgggcgcccagcga

SEQ ID NO: 4228380 - DNA, 25 bp, Homo sapien
agagcgggtcgtagttgggcgccca

SEQ ID NO: 4228381 - DNA, 25 bp, Homo sapien
tgagcagagcgggtcgtagttgggc

SEQ ID NO: 4228382 - DNA, 25 bp, Homo sapien
tgcagagtgagcagagcgggtcgta

SEQ ID NO: 4228383 - DNA, 25 bp, Homo sapien
cagcactggtcgggagcctgcaccg

SEQ ID NO: 4228384 - DNA, 25 bp, Homo sapien
ccgggtcacagatcaccgttcgtct

SEQ ID NO: 4228385 - DNA, 25 bp, Homo sapien
tggtcgggagcctgcaccgggtgtg

SEQ ID NO: 4228386 - DNA, 25 bp, Homo sapien
gcggtgggcacaccaccgggtcaca

SEQ ID NO: 4228387 - DNA, 25 bp, Homo sapien
tggcaagtctctgacatcttgtttc

SEQ ID NO: 4228388 - DNA, 25 bp, Homo sapien
ctggcaagtctctgacatcttgttt

SEQ ID NO: 4228389 - DNA, 25 bp, Homo sapien
ggcacaacggggtgccaccgcgtac

SEQ ID NO: 4228390 - DNA, 25 bp, Homo sapien
cagcacacttaattaagccaaaggg

SEQ ID NO: 4228391 - DNA, 25 bp, Homo sapien
caggtgcagacagcacacttaatta

SEQ ID NO: 4228392 - DNA, 25 bp, Homo sapien
cttgcaggtgcagacagcacactta

SEQ ID NO: 4228393 - DNA, 25 bp, Homo sapien
actgtttgcagcagtcggtggggtt

SEQ ID NO: 4228394 - DNA, 25 bp, Homo sapien
aggccagccggggacactgcacctt

SEQ ID NO: 4228395 - DNA, 25 bp, Homo sapien
ttctcacagtgcacctctccagtgc

SEQ ID NO: 4228396 - DNA, 25 bp, Homo sapien
gggttgacacgcacaggctgggcac

SEQ ID NO: 4228397 - DNA, 25 bp, Homo sapien
gctcatctctccaaaagggggcact

SEQ ID NO: 4228398 - DNA, 25 bp, Homo sapien
gccagctctgactctctgggaacca

SEQ ID NO: 4228399 - DNA, 25 bp, Homo sapien
gaaccactgcccagcaaaacggcag

SEQ ID NO: 4228400 - DNA, 25 bp, Homo sapien
tacagctcatctctccaaaaggggg

SEQ ID NO: 4228401 - DNA, 25 bp, Homo sapien
gccggtgggccgtgcagcgggaaca

SEQ ID NO: 4228402 - DNA, 25 bp, Homo sapien
agcgggaacagcatcgactctcctt

SEQ ID NO: 4228403 - DNA, 25 bp, Homo sapien
acaggacagtggcagtgaacagtca

SEQ ID NO: 4228404 - DNA, 25 bp, Homo sapien
cagtcatcccgctcacagtgaggca

SEQ ID NO: 4228405 - DNA, 25 bp, Homo sapien
agagccttcggcttctttctccagc

SEQ ID NO: 4228406 - DNA, 25 bp, Homo sapien
cagctctggatcagttctggtctct

SEQ ID NO: 4228407 - DNA, 25 bp, Homo sapien
tccagctctggatcagttctggtct

SEQ ID NO: 4228408 - DNA, 25 bp, Homo sapien
ctctggatcagttctggtctctggg

SEQ ID NO: 4228409 - DNA, 25 bp, Homo sapien
tggctgtgacctcggtctggcccag

SEQ ID NO: 4228410 - DNA, 25 bp, Homo sapien
aactctccaataatgactctgctca

SEQ ID NO: 4228411 - DNA, 25 bp, Homo sapien
cccttggtgctgagtgaagataaat

SEQ ID NO: 4228412 - DNA, 25 bp, Homo sapien
tgacattatgtacaggaggaaaggg

SEQ ID NO: 4228413 - DNA, 25 bp, Homo sapien
gatttggtctcaaggtaagcacagc

SEQ ID NO: 4228414 - DNA, 25 bp, Homo sapien
tggtccagaacacgagtttccagga

SEQ ID NO: 4228415 - DNA, 25 bp, Homo sapien
ccagcgatgtgggaaactaaacttg

SEQ ID NO: 4228416 - DNA, 25 bp, Homo sapien
tcctagagcttgtcaaaatgcctgg

SEQ ID NO: 4228417 - DNA, 25 bp, Homo sapien
cattgttatgtgatatggggacatc

SEQ ID NO: 4228418 - DNA, 25 bp, Homo sapien
tacatcaaagcttgactataaccat

SEQ ID NO: 4228419 - DNA, 25 bp, Homo sapien
tatgtctacatgtgggggactgaca

SEQ ID NO: 4228420 - DNA, 25 bp, Homo sapien
gactataaccatcataaaagcatac

SEQ ID NO: 4228421 - DNA, 25 bp, Homo sapien
cataagtgtggaaggtcacagccat

SEQ ID NO: 4228422 - DNA, 25 bp, Homo sapien
tctctcactcttaatcaggtagatt

SEQ ID NO: 4228423 - DNA, 25 bp, Homo sapien
tcttctctcactcttaatcaggtag

SEQ ID NO: 4228424 - DNA, 25 bp, Homo sapien
tctcactcttaatcaggtagattga

SEQ ID NO: 4228425 - DNA, 25 bp, Homo sapien
cactcttaatcaggtagattgacag

SEQ ID NO: 4228426 - DNA, 25 bp, Homo sapien
agttgacagcaattgccccagcaca

SEQ ID NO: 4228427 - DNA, 25 bp, Homo sapien
aggaggcgtgcctcactgtaaaagg

SEQ ID NO: 4228428 - DNA, 25 bp, Homo sapien
ggaatttgggactcaaacacaacca

SEQ ID NO: 4228429 - DNA, 25 bp, Homo sapien
ctctgggaatttgggactcaaacac

SEQ ID NO: 4228430 - DNA, 25 bp, Homo sapien
ttctctgggaatttgggactcaaac

SEQ ID NO: 4228431 - DNA, 25 bp, Homo sapien
agtggacacacccttctggacttgg

SEQ ID NO: 4228432 - DNA, 25 bp, Homo sapien
aacataagcggttgggcaagaagcc

SEQ ID NO: 4228433 - DNA, 25 bp, Homo sapien
tctagcatccaagccaaacactggg

SEQ ID NO: 4228434 - DNA, 25 bp, Homo sapien
taacttctgcgagctatggtagcaa

SEQ ID NO: 4228435 - DNA, 25 bp, Homo sapien
tgactcagctggtccctgcaagagg

SEQ ID NO: 4228436 - DNA, 25 bp, Homo sapien
gctgagagagttcatcactagacct

SEQ ID NO: 4228437 - DNA, 25 bp, Homo sapien
aaattaagcagatgagctgacaaca

SEQ ID NO: 4228438 - DNA, 25 bp, Homo sapien
gaaagtatgctaaatagccacacaa

SEQ ID NO: 4228439 - DNA, 25 bp, Homo sapien
aagactactatacctgacaaaactg

SEQ ID NO: 4228440 - DNA, 25 bp, Homo sapien
ctggaacccaacgagcaaataggac

SEQ ID NO: 4228441 - DNA, 25 bp, Homo sapien
gacgatgggccatacacagagccag

SEQ ID NO: 4228442 - DNA, 25 bp, Homo sapien
ccaggtgagttaacgagcacttgca

SEQ ID NO: 4228443 - DNA, 25 bp, Homo sapien
tgaaaacggagttggactactgtcc

SEQ ID NO: 4228444 - DNA, 25 bp, Homo sapien
ggacagccctggtgagcagtcagct

SEQ ID NO: 4228445 - DNA, 25 bp, Homo sapien
gggagcctcagtgatgtacgcccca

SEQ ID NO: 4228446 - DNA, 25 bp, Homo sapien
gcagtcagctacaagaacctggcct

SEQ ID NO: 4228447 - DNA, 25 bp, Homo sapien
gtgcctcgcacaccccagtggaaga

SEQ ID NO: 4228448 - DNA, 25 bp, Homo sapien
gccacaccatcagaagctgccggca

SEQ ID NO: 4228449 - DNA, 25 bp, Homo sapien
ctgccacaccatcagaagctgccgg

SEQ ID NO: 4228450 - DNA, 25 bp, Homo sapien
tgccacaccatcagaagctgccggc

SEQ ID NO: 4228451 - DNA, 25 bp, Homo sapien
ccacaccatcagaagctgccggcat

SEQ ID NO: 4228452 - DNA, 25 bp, Homo sapien
cacgagagtttcatgccctctattc

SEQ ID NO: 4228453 - DNA, 25 bp, Homo sapien
cgagagtttcatgccctctattctt

SEQ ID NO: 4228454 - DNA, 25 bp, Homo sapien
gagtttcatgccctctattcttaaa

SEQ ID NO: 4228455 - DNA, 25 bp, Homo sapien
ctacacgagagtttcatgccctcta

SEQ ID NO: 4228456 - DNA, 25 bp, Homo sapien
tcaaatagacgaagatcagtcctga

SEQ ID NO: 4228457 - DNA, 25 bp, Homo sapien
gaacctcagtatgctagataaaggg

SEQ ID NO: 4228458 - DNA, 25 bp, Homo sapien
tggaaacaccgagaacctcagtatg

SEQ ID NO: 4228459 - DNA, 25 bp, Homo sapien
tctgttctcttatgcattctggaaa

SEQ ID NO: 4228460 - DNA, 25 bp, Homo sapien
gcctgagggaaagaactagactccg

SEQ ID NO: 4228461 - DNA, 25 bp, Homo sapien
cctagatgggcggataatcaggtca

SEQ ID NO: 4228462 - DNA, 25 bp, Homo sapien
ggaggcctagatgggcggataatca

SEQ ID NO: 4228463 - DNA, 25 bp, Homo sapien
cctgagggaaagaactagactccgt

SEQ ID NO: 4228464 - DNA, 25 bp, Homo sapien
gcgtggggactgggagggagacttc

SEQ ID NO: 4228465 - DNA, 25 bp, Homo sapien
cgtggggactgggagggagacttca

SEQ ID NO: 4228466 - DNA, 25 bp, Homo sapien
gtggggactgggagggagacttcat

SEQ ID NO: 4228467 - DNA, 25 bp, Homo sapien
ccatctctgatagccgcagtgcgct

SEQ ID NO: 4228468 - DNA, 25 bp, Homo sapien
tccttccttgcgaaaccagttccta

SEQ ID NO: 4228469 - DNA, 25 bp, Homo sapien
caattctttgatgacgctgagctga

SEQ ID NO: 4228470 - DNA, 25 bp, Homo sapien
gtggaagtcgcagatccggagaccc

SEQ ID NO: 4228471 - DNA, 25 bp, Homo sapien
tagctgtgggtaaagctaagggttc

SEQ ID NO: 4228472 - DNA, 25 bp, Homo sapien
ccagattcctttagctgtgggtaaa

SEQ ID NO: 4228473 - DNA, 25 bp, Homo sapien
taaagctaagggttctccttcttca

SEQ ID NO: 4228474 - DNA, 25 bp, Homo sapien
agcacctgctggctgattccccaga

SEQ ID NO: 4228475 - DNA, 25 bp, Homo sapien
tcagattatgtgattgaatcaaacg

SEQ ID NO: 4228476 - DNA, 25 bp, Homo sapien
cttcatgagtcagattatgtgattg

SEQ ID NO: 4228477 - DNA, 25 bp, Homo sapien
catgagtcagattatgtgattgaat

SEQ ID NO: 4228478 - DNA, 25 bp, Homo sapien
ttatgtgattgaatcaaacgaagca

SEQ ID NO: 4228479 - DNA, 25 bp, Homo sapien
agtcaaaaatggagacggagacact

SEQ ID NO: 4228480 - DNA, 25 bp, Homo sapien
cttcagacctctctggaaagtcaaa

SEQ ID NO: 4228481 - DNA, 25 bp, Homo sapien
gtgtggaggtggcttcagacctctc

SEQ ID NO: 4228482 - DNA, 25 bp, Homo sapien
tgtgtggaggtggcttcagacctct

SEQ ID NO: 4228483 - DNA, 25 bp, Homo sapien
gtgtgtgttgatgcgtcccacccac

SEQ ID NO: 4228484 - DNA, 25 bp, Homo sapien
gtgtgttgatgcgtcccacccacca

SEQ ID NO: 4228485 - DNA, 25 bp, Homo sapien
tgtgtgttgatgcgtcccacccacc

SEQ ID NO: 4228486 - DNA, 25 bp, Homo sapien
ccgttgatgtaggtgttcgaggcac

SEQ ID NO: 4228487 - DNA, 25 bp, Homo sapien
gatggcctgttgatctatgtgcagc

SEQ ID NO: 4228488 - DNA, 25 bp, Homo sapien
accaaggcaactagcggtgcacgga

SEQ ID NO: 4228489 - DNA, 25 bp, Homo sapien
gcgtggagcggctgtgatccaccaa

SEQ ID NO: 4228490 - DNA, 25 bp, Homo sapien
ctaagaggcgtcagaatgtggatgc

SEQ ID NO: 4228491 - DNA, 25 bp, Homo sapien
gacttgtagttccaggccgcagagt

SEQ ID NO: 4228492 - DNA, 25 bp, Homo sapien
cgggcaccatggtcataatgatgat

SEQ ID NO: 4228493 - DNA, 25 bp, Homo sapien
ggcacacaccattcccatgtatcag

SEQ ID NO: 4228494 - DNA, 25 bp, Homo sapien
attcttgggccggtgagattccaga

SEQ ID NO: 4228495 - DNA, 25 bp, Homo sapien
gagtctccctcagcgcaggtgctga

SEQ ID NO: 4228496 - DNA, 25 bp, Homo sapien
agcagccacaaggactgattcttgg

SEQ ID NO: 4228497 - DNA, 25 bp, Homo sapien
gccggtgagattccagagtctccct

SEQ ID NO: 4228498 - DNA, 25 bp, Homo sapien
cggcccttccttggtagctcctctg

SEQ ID NO: 4228499 - DNA, 25 bp, Homo sapien
tggtcggcccttccttggtagctcc

SEQ ID NO: 4228500 - DNA, 25 bp, Homo sapien
cctggtcggcccttccttggtagct

SEQ ID NO: 4228501 - DNA, 25 bp, Homo sapien
gtcggcccttccttggtagctcctc

SEQ ID NO: 4228502 - DNA, 25 bp, Homo sapien
cacgcaagagcccaaccatagagga

SEQ ID NO: 4228503 - DNA, 25 bp, Homo sapien
gagcccaaccatagaggacagcggg

SEQ ID NO: 4228504 - DNA, 25 bp, Homo sapien
gcaagagcccaaccatagaggacag

SEQ ID NO: 4228505 - DNA, 25 bp, Homo sapien
aagagcccaaccatagaggacagcg

SEQ ID NO: 4228506 - DNA, 25 bp, Homo sapien
ggatctgccgaagcgccatccagga

SEQ ID NO: 4228507 - DNA, 25 bp, Homo sapien
cgaagcgccatccaggatctgccga

SEQ ID NO: 4228508 - DNA, 25 bp, Homo sapien
aagcgccatccaggatctgccgaag

SEQ ID NO: 4228509 - DNA, 25 bp, Homo sapien
gatctgccgaagcgccatccaggat

SEQ ID NO: 4228510 - DNA, 25 bp, Homo sapien
ggctgctggcgaaggaggtcgggcg

SEQ ID NO: 4228511 - DNA, 25 bp, Homo sapien
tccggcgtccgcgtagactggttct

SEQ ID NO: 4228512 - DNA, 25 bp, Homo sapien
cattggcgcgtttcccagaagacac

SEQ ID NO: 4228513 - DNA, 25 bp, Homo sapien
cgggagctttcgggctctccagcag

SEQ ID NO: 4228514 - DNA, 25 bp, Homo sapien
actttggtcctactactgtgcttga

SEQ ID NO: 4228515 - DNA, 25 bp, Homo sapien
tgtagccagtttcatgttgacccca

SEQ ID NO: 4228516 - DNA, 25 bp, Homo sapien
acgttgatagctgagaaactctagc

SEQ ID NO: 4228517 - DNA, 25 bp, Homo sapien
ccatcacagggcatgaatctcgctg

SEQ ID NO: 4228518 - DNA, 25 bp, Homo sapien
ggcagagactgctaacaatatcaaa

SEQ ID NO: 4228519 - DNA, 25 bp, Homo sapien
gagctcctagctagactacggttcc

SEQ ID NO: 4228520 - DNA, 25 bp, Homo sapien
tgaggtgtaaccacttgactaaact

SEQ ID NO: 4228521 - DNA, 25 bp, Homo sapien
actgtgccttggacaactccttgat

SEQ ID NO: 4228522 - DNA, 25 bp, Homo sapien
tgactaatgctgaactgaggggcta

SEQ ID NO: 4228523 - DNA, 25 bp, Homo sapien
gtaggttaaaaagcttgactaatgc

SEQ ID NO: 4228524 - DNA, 25 bp, Homo sapien
aaaacccattatattgtattagagt

SEQ ID NO: 4228525 - DNA, 25 bp, Homo sapien
ccttgttacagagtagagccatgga

SEQ ID NO: 4228526 - DNA, 25 bp, Homo sapien
ggagaaactccagcggagggaggac

SEQ ID NO: 4228527 - DNA, 25 bp, Homo sapien
aaactccagcggagggaggacgcat

SEQ ID NO: 4228528 - DNA, 25 bp, Homo sapien
gtggagaaactccagcggagggagg

SEQ ID NO: 4228529 - DNA, 25 bp, Homo sapien
agaaactccagcggagggaggacgc

SEQ ID NO: 4228530 - DNA, 25 bp, Homo sapien
ccagtgaagacagggcgccttgtaa

SEQ ID NO: 4228531 - DNA, 25 bp, Homo sapien
ggcggtggcagaacaggtacaacct

SEQ ID NO: 4228532 - DNA, 25 bp, Homo sapien
caacctgctcggatgccagtgaaga

SEQ ID NO: 4228533 - DNA, 25 bp, Homo sapien
ggcgccttgtaagagtcaccagcag

SEQ ID NO: 4228534 - DNA, 25 bp, Homo sapien
gtcaaggacaagcggaacctcaaac

SEQ ID NO: 4228535 - DNA, 25 bp, Homo sapien
tgtcaaggacaagcggaacctcaaa

SEQ ID NO: 4228536 - DNA, 25 bp, Homo sapien
ctgtcaaggacaagcggaacctcaa

SEQ ID NO: 4228537 - DNA, 25 bp, Homo sapien
tgtatcatcccctctactctattga

SEQ ID NO: 4228538 - DNA, 25 bp, Homo sapien
tcttccactccagtatgtatcatcc

SEQ ID NO: 4228539 - DNA, 25 bp, Homo sapien
tgaagccgttctgcggtcggtaccc

SEQ ID NO: 4228540 - DNA, 25 bp, Homo sapien
gcggtcggtaccctctctgacaaga

SEQ ID NO: 4228541 - DNA, 25 bp, Homo sapien
accgaggttgacgtgtctttttctg

SEQ ID NO: 4228542 - DNA, 25 bp, Homo sapien
ttggcataaaaggggaacatccgga

SEQ ID NO: 4228543 - DNA, 25 bp, Homo sapien
atccggaccgaggttgacgtgtctt

SEQ ID NO: 4228544 - DNA, 25 bp, Homo sapien
aacatccggaccgaggttgacgtgt

SEQ ID NO: 4228545 - DNA, 25 bp, Homo sapien
gagaagactggggtactggctataa

SEQ ID NO: 4228546 - DNA, 25 bp, Homo sapien
ctggctataacagcccagggcaaga

SEQ ID NO: 4228547 - DNA, 25 bp, Homo sapien
gggtactggctataacagcccaggg

SEQ ID NO: 4228548 - DNA, 25 bp, Homo sapien
gactggggtactggctataacagcc

SEQ ID NO: 4228549 - DNA, 25 bp, Homo sapien
actgtggttcccacgggaatgcttc

SEQ ID NO: 4228550 - DNA, 25 bp, Homo sapien
gcactgtggttcccacgggaatgct

SEQ ID NO: 4228551 - DNA, 25 bp, Homo sapien
ggcactgtggttcccacgggaatgc

SEQ ID NO: 4228552 - DNA, 25 bp, Homo sapien
cactgtggttcccacgggaatgctt

SEQ ID NO: 4228553 - DNA, 25 bp, Homo sapien
gggccagcaggtaacggagggcctg

SEQ ID NO: 4228554 - DNA, 25 bp, Homo sapien
gccagcaggtaacggagggcctgtc

SEQ ID NO: 4228555 - DNA, 25 bp, Homo sapien
cagcaggtaacggagggcctgtcct

SEQ ID NO: 4228556 - DNA, 25 bp, Homo sapien
gcaggtaacggagggcctgtcctca

SEQ ID NO: 4228557 - DNA, 25 bp, Homo sapien
aggcaccaagctcctttgttcttgg

SEQ ID NO: 4228558 - DNA, 25 bp, Homo sapien
gcaccaagctcctttgttcttgggt

SEQ ID NO: 4228559 - DNA, 25 bp, Homo sapien
ggcggcaggcaccaagctcctttgt

SEQ ID NO: 4228560 - DNA, 25 bp, Homo sapien
ggcaggcaccaagctcctttgttct

SEQ ID NO: 4228561 - DNA, 25 bp, Homo sapien
tgtgaagccgcacttctgtttgctc

SEQ ID NO: 4228562 - DNA, 25 bp, Homo sapien
tgtaaggcggatctgtgaagccgca

SEQ ID NO: 4228563 - DNA, 25 bp, Homo sapien
cgctcgttgtaaggcggatctgtga

SEQ ID NO: 4228564 - DNA, 25 bp, Homo sapien
ctaaagccccgctcgttgtaaggcg

SEQ ID NO: 4228565 - DNA, 25 bp, Homo sapien
ctcgcgtcgggtcccaggagatcca

SEQ ID NO: 4228566 - DNA, 25 bp, Homo sapien
gtccgagctgggatcttgctgcgcc

SEQ ID NO: 4228567 - DNA, 25 bp, Homo sapien
gagaggagggaatgcaatccaggcg

SEQ ID NO: 4228568 - DNA, 25 bp, Homo sapien
ttcgggatgcacagtaatctggcgg

SEQ ID NO: 4228569 - DNA, 25 bp, Homo sapien
gagggagcagcggcagaagccccgg

SEQ ID NO: 4228570 - DNA, 25 bp, Homo sapien
ggagggagcagcggcagaagccccg

SEQ ID NO: 4228571 - DNA, 25 bp, Homo sapien
gtgcgctcaatccgggtcggaccca

SEQ ID NO: 4228572 - DNA, 25 bp, Homo sapien
gcgctcaatccgggtcggacccacg

SEQ ID NO: 4228573 - DNA, 25 bp, Homo sapien
tgcgctcaatccgggtcggacccac

SEQ ID NO: 4228574 - DNA, 25 bp, Homo sapien
ccatggagagcagccacgtggcagc

SEQ ID NO: 4228575 - DNA, 25 bp, Homo sapien
tctttcaggtttccacagggccatg

SEQ ID NO: 4228576 - DNA, 25 bp, Homo sapien
cagccacgtggcagcagctgtgtgg

SEQ ID NO: 4228577 - DNA, 25 bp, Homo sapien
ctctttcaggtttccacagggccat

SEQ ID NO: 4228578 - DNA, 25 bp, Homo sapien
gatgagatgtccacgccaactcaga

SEQ ID NO: 4228579 - DNA, 25 bp, Homo sapien
tcagatgttacccattttgtgtcca

SEQ ID NO: 4228580 - DNA, 25 bp, Homo sapien
cacgccaactcagatgttacccatt

SEQ ID NO: 4228581 - DNA, 25 bp, Homo sapien
gatgtccacgccaactcagatgtta

SEQ ID NO: 4228582 - DNA, 25 bp, Homo sapien
gatggcacaggaagtgagggtgaca

SEQ ID NO: 4228583 - DNA, 25 bp, Homo sapien
catgaggtgcttcagagggtcacaa

SEQ ID NO: 4228584 - DNA, 25 bp, Homo sapien
tgcttcagagggtcacaagtgagga

SEQ ID NO: 4228585 - DNA, 25 bp, Homo sapien
tcagagggtcacaagtgaggatgat

SEQ ID NO: 4228586 - DNA, 25 bp, Homo sapien
tgtgcatggaccaatgaaaaagaca

SEQ ID NO: 4228587 - DNA, 25 bp, Homo sapien
ctgtgcatggaccaatgaaaaagac

SEQ ID NO: 4228588 - DNA, 25 bp, Homo sapien
ctcatcgtagccactcacctcttcc

SEQ ID NO: 4228589 - DNA, 25 bp, Homo sapien
catcgtagccactcacctcttccca

SEQ ID NO: 4228590 - DNA, 25 bp, Homo sapien
cctcatcgtagccactcacctcttc

SEQ ID NO: 4228591 - DNA, 25 bp, Homo sapien
ggcctcatcgtagccactcacctct

SEQ ID NO: 4228592 - DNA, 25 bp, Homo sapien
cctgcggtggtggatgcacacttct

SEQ ID NO: 4228593 - DNA, 25 bp, Homo sapien
cttcttgtagaaggcgcgcacggag

SEQ ID NO: 4228594 - DNA, 25 bp, Homo sapien
catcgccgttgcagtagagcttgag

SEQ ID NO: 4228595 - DNA, 25 bp, Homo sapien
tgaaccccgtgcgaagccagttgtt

SEQ ID NO: 4228596 - DNA, 25 bp, Homo sapien
caggccagcctggttgctatgggaa

SEQ ID NO: 4228597 - DNA, 25 bp, Homo sapien
gatattccaccctagctcttttgag

SEQ ID NO: 4228598 - DNA, 25 bp, Homo sapien
ggacagattcccatcgagaagtgga

SEQ ID NO: 4228599 - DNA, 25 bp, Homo sapien
tagggctgccataagagtcatcacc

SEQ ID NO: 4228600 - DNA, 25 bp, Homo sapien
gagatgccccacctctccccgaggc

SEQ ID NO: 4228601 - DNA, 25 bp, Homo sapien
accggtgggctagcagcacccggca

SEQ ID NO: 4228602 - DNA, 25 bp, Homo sapien
agagaccaccggtgggctagcagca

SEQ ID NO: 4228603 - DNA, 25 bp, Homo sapien
tgaagaagagaccaccggtgggcta

SEQ ID NO: 4228604 - DNA, 25 bp, Homo sapien
ccccatcacctggacagcctgggct

SEQ ID NO: 4228605 - DNA, 25 bp, Homo sapien
cctgggcttgttgaggcagggaaga

SEQ ID NO: 4228606 - DNA, 25 bp, Homo sapien
catcacctggacagcctgggcttgt

SEQ ID NO: 4228607 - DNA, 25 bp, Homo sapien
gcctgggcttgttgaggcagggaag

SEQ ID NO: 4228608 - DNA, 25 bp, Homo sapien
tgctgggattgcctaactccagctg

SEQ ID NO: 4228609 - DNA, 25 bp, Homo sapien
gctgcagctacaaaaggccctattg

SEQ ID NO: 4228610 - DNA, 25 bp, Homo sapien
catggaaaccccacgtcagcagatt

SEQ ID NO: 4228611 - DNA, 25 bp, Homo sapien
caaaaggccctattgccccatggaa

SEQ ID NO: 4228612 - DNA, 25 bp, Homo sapien
gagaagaggatgaatggggctcacc

SEQ ID NO: 4228613 - DNA, 25 bp, Homo sapien
aagaggatgaatggggctcacctcc

SEQ ID NO: 4228614 - DNA, 25 bp, Homo sapien
gatgaatggggctcacctcccttcc

SEQ ID NO: 4228615 - DNA, 25 bp, Homo sapien
tgggagagaagaggatgaatggggc

SEQ ID NO: 4228616 - DNA, 25 bp, Homo sapien
ctgcttcgccttgtagctcccaggg

SEQ ID NO: 4228617 - DNA, 25 bp, Homo sapien
tagaagttattgtggcaggtgcaga

SEQ ID NO: 4228618 - DNA, 25 bp, Homo sapien
cgagtctgcacggtagaagttattg

SEQ ID NO: 4228619 - DNA, 25 bp, Homo sapien
actgtccgcagagtccgagtctgca

SEQ ID NO: 4228620 - DNA, 25 bp, Homo sapien
tacatttcttcaccaggcagactcc

SEQ ID NO: 4228621 - DNA, 25 bp, Homo sapien
caggttgtgagctcctttaggacaa

SEQ ID NO: 4228622 - DNA, 25 bp, Homo sapien
tagcccagctcttagtacattacgg

SEQ ID NO: 4228623 - DNA, 25 bp, Homo sapien
gctttgataagcagaataacgttcc

SEQ ID NO: 4228624 - DNA, 25 bp, Homo sapien
tgccgaggcacaaactccacgttgt

SEQ ID NO: 4228625 - DNA, 25 bp, Homo sapien
tgtcatcacagcgtgagcaggctga

SEQ ID NO: 4228626 - DNA, 25 bp, Homo sapien
cacctcaaaggtgtagcgcgtgtgg

SEQ ID NO: 4228627 - DNA, 25 bp, Homo sapien
tattcacggccgcataacgaggcgg

SEQ ID NO: 4228628 - DNA, 25 bp, Homo sapien
tagtccaggatgactccgttgggcc

SEQ ID NO: 4228629 - DNA, 25 bp, Homo sapien
aaagtacttcatctcgtagtccagg

SEQ ID NO: 4228630 - DNA, 25 bp, Homo sapien
aggatgactccgttgggccgctctg

SEQ ID NO: 4228631 - DNA, 25 bp, Homo sapien
tgtgcaggcgtagtgtgggcacttc

SEQ ID NO: 4228632 - DNA, 25 bp, Homo sapien
ctgcaatgccaggagagagggggca

SEQ ID NO: 4228633 - DNA, 25 bp, Homo sapien
ttgtggtctcaaactcggcagggcg

SEQ ID NO: 4228634 - DNA, 25 bp, Homo sapien
agggcggctgtactgcccatagcca

SEQ ID NO: 4228635 - DNA, 25 bp, Homo sapien
catagccagctactgtgcgggcacg

SEQ ID NO: 4228636 - DNA, 25 bp, Homo sapien
agctgcacggagttcatctggctgg

SEQ ID NO: 4228637 - DNA, 25 bp, Homo sapien
cagctgtagcggagcccacgatgag

SEQ ID NO: 4228638 - DNA, 25 bp, Homo sapien
gacaagcccagctgtagcggagccc

SEQ ID NO: 4228639 - DNA, 25 bp, Homo sapien
ctgaggcagacgatagcgatgacca

SEQ ID NO: 4228640 - DNA, 25 bp, Homo sapien
atgaccacgacagccaccacgaaga

SEQ ID NO: 4228641 - DNA, 25 bp, Homo sapien
tgagggctctaggatgctaaagggc

SEQ ID NO: 4228642 - DNA, 25 bp, Homo sapien
aagtggtggcggctcatctctgtgg

SEQ ID NO: 4228643 - DNA, 25 bp, Homo sapien
cttctccagcaacggctggccccag

SEQ ID NO: 4228644 - DNA, 25 bp, Homo sapien
tcgaggcggcccatggagcaacagt

SEQ ID NO: 4228645 - DNA, 25 bp, Homo sapien
tccgtgtactccgaatcagagccgt

SEQ ID NO: 4228646 - DNA, 25 bp, Homo sapien
cgaatcagagccgtgtcgctgcttc

SEQ ID NO: 4228647 - DNA, 25 bp, Homo sapien
gcttctccgtgtactccgaatcaga

SEQ ID NO: 4228648 - DNA, 25 bp, Homo sapien
tactccgaatcagagccgtgtcgct

SEQ ID NO: 4228649 - DNA, 25 bp, Homo sapien
gatcacctcctcgatcttgacgcag

SEQ ID NO: 4228650 - DNA, 25 bp, Homo sapien
aaactcccgaacagcctcattaggg

SEQ ID NO: 4228651 - DNA, 25 bp, Homo sapien
gcaggacacgtcgatctccttggca

SEQ ID NO: 4228652 - DNA, 25 bp, Homo sapien
caatataaaccttcattccaggagc

SEQ ID NO: 4228653 - DNA, 25 bp, Homo sapien
catctctactgtgccccgggagact

SEQ ID NO: 4228654 - DNA, 25 bp, Homo sapien
ggcacagggcacaagctatgactca

SEQ ID NO: 4228655 - DNA, 25 bp, Homo sapien
agctatgactcactcctgtacccag

SEQ ID NO: 4228656 - DNA, 25 bp, Homo sapien
ttctcatctctactgtgccccggga

SEQ ID NO: 4228657 - DNA, 25 bp, Homo sapien
cagggcgcagttttccatgaactca

SEQ ID NO: 4228658 - DNA, 25 bp, Homo sapien
cataactggccgacttttggtgacc

SEQ ID NO: 4228659 - DNA, 25 bp, Homo sapien
ttgatggccacaaacacctctcggc

SEQ ID NO: 4228660 - DNA, 25 bp, Homo sapien
caggctgtttcagtcgaccacggca

SEQ ID NO: 4228661 - DNA, 25 bp, Homo sapien
ggagaggccaaagtctgagactttg

SEQ ID NO: 4228662 - DNA, 25 bp, Homo sapien
cagggaactggtgtaggtaggatcg

SEQ ID NO: 4228663 - DNA, 25 bp, Homo sapien
agcaatgccccgcaacatgcccacc

SEQ ID NO: 4228664 - DNA, 25 bp, Homo sapien
acttcatgccggcagcaatgccccg

SEQ ID NO: 4228665 - DNA, 25 bp, Homo sapien
tgccccccaggcccgagcccctggc

SEQ ID NO: 4228666 - DNA, 25 bp, Homo sapien
ccgagcccctggctgataggccccg

SEQ ID NO: 4228667 - DNA, 25 bp, Homo sapien
ccccagtctccctcccagcggcttc

SEQ ID NO: 4228668 - DNA, 25 bp, Homo sapien
agcccctggctgataggccccgccc

SEQ ID NO: 4228669 - DNA, 25 bp, Homo sapien
gacatcactagcagaagtgaacttc

SEQ ID NO: 4228670 - DNA, 25 bp, Homo sapien
acttccgataggctatggcctctgg

SEQ ID NO: 4228671 - DNA, 25 bp, Homo sapien
tagggtcgctctccatagctcatga

SEQ ID NO: 4228672 - DNA, 25 bp, Homo sapien
ccagtagggtcgctctccatagctc

SEQ ID NO: 4228673 - DNA, 25 bp, Homo sapien
tacccaaccactctggcgtagcctc

SEQ ID NO: 4228674 - DNA, 25 bp, Homo sapien
ccaaccactctggcgtagcctcact

SEQ ID NO: 4228675 - DNA, 25 bp, Homo sapien
acccaaccactctggcgtagcctca

SEQ ID NO: 4228676 - DNA, 25 bp, Homo sapien
ctacccaaccactctggcgtagcct

SEQ ID NO: 4228677 - DNA, 25 bp, Homo sapien
tgggccgaaggcagggaaaccctga

SEQ ID NO: 4228678 - DNA, 25 bp, Homo sapien
ctgggccgaaggcagggaaaccctg

SEQ ID NO: 4228679 - DNA, 25 bp, Homo sapien
aggcagggaaaccctgagtgagcca

SEQ ID NO: 4228680 - DNA, 25 bp, Homo sapien
ccgaaggcagggaaaccctgagtga

SEQ ID NO: 4228681 - DNA, 25 bp, Homo sapien
ggcagccggtaatcctgctccacgg

SEQ ID NO: 4228682 - DNA, 25 bp, Homo sapien
ttgtccagggtattgacaatctggg

SEQ ID NO: 4228683 - DNA, 25 bp, Homo sapien
tggcagcattgcggatgagcttgtc

SEQ ID NO: 4228684 - DNA, 25 bp, Homo sapien
tgggcctgaggttccggtcccgcac

SEQ ID NO: 4228685 - DNA, 25 bp, Homo sapien
taatctgggaccgtgcggtccagga

SEQ ID NO: 4228686 - DNA, 25 bp, Homo sapien
tcgtgaaggttgtgtaatctgggac

SEQ ID NO: 4228687 - DNA, 25 bp, Homo sapien
ccagccaatcaccaactgtcgtgaa

SEQ ID NO: 4228688 - DNA, 25 bp, Homo sapien
caatcaccaactgtcgtgaaggttg

SEQ ID NO: 4228689 - DNA, 25 bp, Homo sapien
ccagggtgaccccaatacggagcag

SEQ ID NO: 4228690 - DNA, 25 bp, Homo sapien
tcctggatactgctcaggatcttct

SEQ ID NO: 4228691 - DNA, 25 bp, Homo sapien
tgtcctggatactgctcaggatctt

SEQ ID NO: 4228692 - DNA, 25 bp, Homo sapien
ggtgaccccaatacggagcaggtct

SEQ ID NO: 4228693 - DNA, 25 bp, Homo sapien
cctgtgcaaactggaggtgcaagct

SEQ ID NO: 4228694 - DNA, 25 bp, Homo sapien
tccaagagtccgaaagtccagccgg

SEQ ID NO: 4228695 - DNA, 25 bp, Homo sapien
acagggccaagcttttacacgctca

SEQ ID NO: 4228696 - DNA, 25 bp, Homo sapien
taaggccaggcatccaaaagtccaa

SEQ ID NO: 4228697 - DNA, 25 bp, Homo sapien
tgttcaaagcagtgagggccaagca

SEQ ID NO: 4228698 - DNA, 25 bp, Homo sapien
gagttgcgaagggttggcagccagg

SEQ ID NO: 4228699 - DNA, 25 bp, Homo sapien
acttccaagaagtgcgttaggtgtt

SEQ ID NO: 4228700 - DNA, 25 bp, Homo sapien
cctggatgggcccagatctggtttc

SEQ ID NO: 4228701 - DNA, 25 bp, Homo sapien
agggcgatgtcacacctatgcgagt

SEQ ID NO: 4228702 - DNA, 25 bp, Homo sapien
ggacccagtagagggcgatgtcaca

SEQ ID NO: 4228703 - DNA, 25 bp, Homo sapien
ctaaacgaccacgatcttgccctcc

SEQ ID NO: 4228704 - DNA, 25 bp, Homo sapien
atcttgccctccctgcggacccagt

SEQ ID NO: 4228705 - DNA, 25 bp, Homo sapien
tcaagtgctcgttgttggcggcccc

SEQ ID NO: 4228706 - DNA, 25 bp, Homo sapien
agtggcagttcatgttcaagtgctc

SEQ ID NO: 4228707 - DNA, 25 bp, Homo sapien
ctttgtgggagcaaggacagcaggt

SEQ ID NO: 4228708 - DNA, 25 bp, Homo sapien
gttcaagtgctcgttgttggcggcc

SEQ ID NO: 4228709 - DNA, 25 bp, Homo sapien
ccagaacctgttgcgataaaggcag

SEQ ID NO: 4228710 - DNA, 25 bp, Homo sapien
tacagttttcataggctggaggtct

SEQ ID NO: 4228711 - DNA, 25 bp, Homo sapien
tgattttgaacccaaggccctctga

SEQ ID NO: 4228712 - DNA, 25 bp, Homo sapien
cacagccgacctcttgtgaaaggga

SEQ ID NO: 4228713 - DNA, 25 bp, Homo sapien
gaagttacatcagtaaggacactgt

SEQ ID NO: 4228714 - DNA, 25 bp, Homo sapien
gtaagtgtctaataacaaattggta

SEQ ID NO: 4228715 - DNA, 25 bp, Homo sapien
taagcagtgtgaaggaaagtaccca

SEQ ID NO: 4228716 - DNA, 25 bp, Homo sapien
gacactgtgtgtatgggatgattat

SEQ ID NO: 4228717 - DNA, 25 bp, Homo sapien
tctcaaaggcctcggcccctcgcgg

SEQ ID NO: 4228718 - DNA, 25 bp, Homo sapien
ctctcaaaggcctcggcccctcgcg

SEQ ID NO: 4228719 - DNA, 25 bp, Homo sapien
ctcaaaggcctcggcccctcgcggt

SEQ ID NO: 4228720 - DNA, 25 bp, Homo sapien
tcaaaggcctcggcccctcgcggtc

SEQ ID NO: 4228721 - DNA, 25 bp, Homo sapien
ttgaattgtcagacagaagggtgcc

SEQ ID NO: 4228722 - DNA, 25 bp, Homo sapien
ggccttgttcatctcctacccctag

SEQ ID NO: 4228723 - DNA, 25 bp, Homo sapien
ggtgccacgtttggcaccttcacca

SEQ ID NO: 4228724 - DNA, 25 bp, Homo sapien
tgctggacccccatagcctttatct

SEQ ID NO: 4228725 - DNA, 25 bp, Homo sapien
ctagctcaaagccagttctgctgca

SEQ ID NO: 4228726 - DNA, 25 bp, Homo sapien
cagttctgctgcaaagccccactgc

SEQ ID NO: 4228727 - DNA, 25 bp, Homo sapien
tctgctgcaaagccccactgcaccc

SEQ ID NO: 4228728 - DNA, 25 bp, Homo sapien
actgcacccagcaggcagaagtgac

SEQ ID NO: 4228729 - DNA, 25 bp, Homo sapien
gacacagtccattatagtgcagctg

SEQ ID NO: 4228730 - DNA, 25 bp, Homo sapien
ttctgggtgtcgagaatagtggaca

SEQ ID NO: 4228731 - DNA, 25 bp, Homo sapien
gaatagtggacacagtccattatag

SEQ ID NO: 4228732 - DNA, 25 bp, Homo sapien
cattatagtgcagctgacagactct

SEQ ID NO: 4228733 - DNA, 25 bp, Homo sapien
agtgccggctttggacaaggccttc

SEQ ID NO: 4228734 - DNA, 25 bp, Homo sapien
cggctttggacaaggccttccgcca

SEQ ID NO: 4228735 - DNA, 25 bp, Homo sapien
tcgttcgagcaccggtgctgcagtg

SEQ ID NO: 4228736 - DNA, 25 bp, Homo sapien
ccttccgccagcgcatctgctcctt

SEQ ID NO: 4228737 - DNA, 25 bp, Homo sapien
gtccctcatcgcgtcaccctctgct

SEQ ID NO: 4228738 - DNA, 25 bp, Homo sapien
agcgtccctctcaaggctccctcct

SEQ ID NO: 4228739 - DNA, 25 bp, Homo sapien
gccttgctccccggaggtgctacat

SEQ ID NO: 4228740 - DNA, 25 bp, Homo sapien
aggtgctacatccaacctctctcag

SEQ ID NO: 4228741 - DNA, 25 bp, Homo sapien
cgcagcattaagaggaagggttttg

SEQ ID NO: 4228742 - DNA, 25 bp, Homo sapien
ggagccacagatacgcagcattaag

SEQ ID NO: 4228743 - DNA, 25 bp, Homo sapien
gtgtggccagcacgaatctccaggc

SEQ ID NO: 4228744 - DNA, 25 bp, Homo sapien
tggtgtggccagcacgaatctccag

SEQ ID NO: 4228745 - DNA, 25 bp, Homo sapien
gggtacctcagctccccacactgta

SEQ ID NO: 4228746 - DNA, 25 bp, Homo sapien
catggggtacctcagctccccacac

SEQ ID NO: 4228747 - DNA, 25 bp, Homo sapien
tggggtacctcagctccccacactg

SEQ ID NO: 4228748 - DNA, 25 bp, Homo sapien
ctccccacactgtaccccacttcat

SEQ ID NO: 4228749 - DNA, 25 bp, Homo sapien
ctagggaaggaatcctgagcagcga

SEQ ID NO: 4228750 - DNA, 25 bp, Homo sapien
gggaaggaatcctgagcagcgatgt

SEQ ID NO: 4228751 - DNA, 25 bp, Homo sapien
tagggaaggaatcctgagcagcgat

SEQ ID NO: 4228752 - DNA, 25 bp, Homo sapien
agggaaggaatcctgagcagcgatg

SEQ ID NO: 4228753 - DNA, 25 bp, Homo sapien
ctcagggtcatgtctgtaggagagg

SEQ ID NO: 4228754 - DNA, 25 bp, Homo sapien
ctgtaggagaggtattttaggtcga

SEQ ID NO: 4228755 - DNA, 25 bp, Homo sapien
ggtcatgtctgtaggagaggtattt

SEQ ID NO: 4228756 - DNA, 25 bp, Homo sapien
catgtctgtaggagaggtattttag

SEQ ID NO: 4228757 - DNA, 25 bp, Homo sapien
gagctgctcctgaccccttgatgtg

SEQ ID NO: 4228758 - DNA, 25 bp, Homo sapien
cctaatgtccagaggaagagggaca

SEQ ID NO: 4228759 - DNA, 25 bp, Homo sapien
gaagatggtgatcatttgatttaaa

SEQ ID NO: 4228760 - DNA, 25 bp, Homo sapien
ccttgatgtgtcctttcctaatgtc

SEQ ID NO: 4228761 - DNA, 25 bp, Homo sapien
caccttctgcgtgagggtaaatcct

SEQ ID NO: 4228762 - DNA, 25 bp, Homo sapien
ccccttcatgttatccgtggagagt

SEQ ID NO: 4228763 - DNA, 25 bp, Homo sapien
gtcatctgtaaggagctctggcttc

SEQ ID NO: 4228764 - DNA, 25 bp, Homo sapien
tacaggagacttgtgaggtatccct

SEQ ID NO: 4228765 - DNA, 25 bp, Homo sapien
tcgtggccaaactgcataagaagga

SEQ ID NO: 4228766 - DNA, 25 bp, Homo sapien
tctgttcccggacatcatcgcaagg

SEQ ID NO: 4228767 - DNA, 25 bp, Homo sapien
aacatgttgcagacaccagagagca

SEQ ID NO: 4228768 - DNA, 25 bp, Homo sapien
gatatctcagttacaggcgggtgcc

SEQ ID NO: 4228769 - DNA, 25 bp, Homo sapien
ggtcctcaagaatcgctggtccagc

SEQ ID NO: 4228770 - DNA, 25 bp, Homo sapien
tacgaactacataagaactggctcc

SEQ ID NO: 4228771 - DNA, 25 bp, Homo sapien
gactaattgaggtgggctatctcca

SEQ ID NO: 4228772 - DNA, 25 bp, Homo sapien
tcttgaccataaggtgttggccacc

SEQ ID NO: 4228773 - DNA, 25 bp, Homo sapien
tgatgacccaaagtctagagctgcg

SEQ ID NO: 4228774 - DNA, 25 bp, Homo sapien
gaaagaattgagtacccatctggga

SEQ ID NO: 4228775 - DNA, 25 bp, Homo sapien
tagagctgcgttaccttcagtgtcc

SEQ ID NO: 4228776 - DNA, 25 bp, Homo sapien
gccacatctgcctgttaagctgata

SEQ ID NO: 4228777 - DNA, 25 bp, Homo sapien
tgtgcgcgcgagcaatggttctcag

SEQ ID NO: 4228778 - DNA, 25 bp, Homo sapien
ggttctcagccctgcgtgcacttta

SEQ ID NO: 4228779 - DNA, 25 bp, Homo sapien
ctcagtagtaaatgtggatctcaca

SEQ ID NO: 4228780 - DNA, 25 bp, Homo sapien
gcactttagaatcacccgcggagtt

SEQ ID NO: 4228781 - DNA, 25 bp, Homo sapien
cacagcagcagcctaaacatcgctg

SEQ ID NO: 4228782 - DNA, 25 bp, Homo sapien
gcagcagcctaaacatcgctgacac

SEQ ID NO: 4228783 - DNA, 25 bp, Homo sapien
cagcagcagcctaaacatcgctgac

SEQ ID NO: 4228784 - DNA, 25 bp, Homo sapien
agcagcctaaacatcgctgacacct

SEQ ID NO: 4228785 - DNA, 25 bp, Homo sapien
gctccatcttaaagagaaactgaca

SEQ ID NO: 4228786 - DNA, 25 bp, Homo sapien
tgaggaacgtgctcttacacagacc

SEQ ID NO: 4228787 - DNA, 25 bp, Homo sapien
actgacatcatctccgaaagccctg

SEQ ID NO: 4228788 - DNA, 25 bp, Homo sapien
tctcctcaggagtcaaagtcagcat

SEQ ID NO: 4228789 - DNA, 25 bp, Homo sapien
cagtggacagcggatgagatctctc

SEQ ID NO: 4228790 - DNA, 25 bp, Homo sapien
tcagcgttagggaactctatcagca

SEQ ID NO: 4228791 - DNA, 25 bp, Homo sapien
tctatcagcacttcacattccgact

SEQ ID NO: 4228792 - DNA, 25 bp, Homo sapien
ggccatagggcaaggccattcccca

SEQ ID NO: 4228793 - DNA, 25 bp, Homo sapien
cacacagcccatgctctgtcaccat

SEQ ID NO: 4228794 - DNA, 25 bp, Homo sapien
caagctcacacagcccatgctctgt

SEQ ID NO: 4228795 - DNA, 25 bp, Homo sapien
ccaagctcacacagcccatgctctg

SEQ ID NO: 4228796 - DNA, 25 bp, Homo sapien
gctcacacagcccatgctctgtcac

SEQ ID NO: 4228797 - DNA, 25 bp, Homo sapien
acatctgatggtggagacagcttgt

SEQ ID NO: 4228798 - DNA, 25 bp, Homo sapien
catctgatggtggagacagcttgtg

SEQ ID NO: 4228799 - DNA, 25 bp, Homo sapien
ctggatggaattgactcaggaacca

SEQ ID NO: 4228800 - DNA, 25 bp, Homo sapien
aattgactcaggaaccaggtaagcc

SEQ ID NO: 4228801 - DNA, 25 bp, Homo sapien
tactttctgataggattcctcctac

SEQ ID NO: 4228802 - DNA, 25 bp, Homo sapien
gaagcagatgcagccagagataagg

SEQ ID NO: 4228803 - DNA, 25 bp, Homo sapien
catactttctgataggattcctcct

SEQ ID NO: 4228804 - DNA, 25 bp, Homo sapien
acatactttctgataggattcctcc

SEQ ID NO: 4228805 - DNA, 25 bp, Homo sapien
cctctcacagcagggatactttctc

SEQ ID NO: 4228806 - DNA, 25 bp, Homo sapien
cagacctctcacagcagggatactt

SEQ ID NO: 4228807 - DNA, 25 bp, Homo sapien
tctgtactccagatcccagacctct

SEQ ID NO: 4228808 - DNA, 25 bp, Homo sapien
gacctctcacagcagggatactttc

SEQ ID NO: 4228809 - DNA, 25 bp, Homo sapien
ggattagagcaggtagcagcccaac

SEQ ID NO: 4228810 - DNA, 25 bp, Homo sapien
tggtggaaagaatcacacgaaaacc

SEQ ID NO: 4228811 - DNA, 25 bp, Homo sapien
gaaaacctctccacgcacatggcga

SEQ ID NO: 4228812 - DNA, 25 bp, Homo sapien
aaactgatttggctgccgcgtggcc

SEQ ID NO: 4228813 - DNA, 25 bp, Homo sapien
atcccaccactttgggaggccgaag

SEQ ID NO: 4228814 - DNA, 25 bp, Homo sapien
agaacatatagaggaggctgggcac

SEQ ID NO: 4228815 - DNA, 25 bp, Homo sapien
aggccgaagggggtggatcacaagg

SEQ ID NO: 4228816 - DNA, 25 bp, Homo sapien
ggtggctcatgcctgtaatcccacc

SEQ ID NO: 4228817 - DNA, 25 bp, Homo sapien
gtgactcctgtaacccctggatgga

SEQ ID NO: 4228818 - DNA, 25 bp, Homo sapien
acaacatcctccaaccaagaagcaa

SEQ ID NO: 4228819 - DNA, 25 bp, Homo sapien
tcctctgcgaccttgcaggaaaggt

SEQ ID NO: 4228820 - DNA, 25 bp, Homo sapien
ctcttcctctgcgaccttgcaggaa

SEQ ID NO: 4228821 - DNA, 25 bp, Homo sapien
ccaacaggaggaagacgcgtccttc

SEQ ID NO: 4228822 - DNA, 25 bp, Homo sapien
tcggtaaggatcctaaggcctctgc

SEQ ID NO: 4228823 - DNA, 25 bp, Homo sapien
caagtgacgctgtagtgaaatggga

SEQ ID NO: 4228824 - DNA, 25 bp, Homo sapien
gcttggtgccgttgcaagtgacgct

SEQ ID NO: 4228825 - DNA, 25 bp, Homo sapien
tgagttcagttgagagacccgagca

SEQ ID NO: 4228826 - DNA, 25 bp, Homo sapien
cctgacggagagaacagaagatgcc

SEQ ID NO: 4228827 - DNA, 25 bp, Homo sapien
tcagttaatcatccaaaagaggctt

SEQ ID NO: 4228828 - DNA, 25 bp, Homo sapien
tttggagcccgagaggcttgaagcc

SEQ ID NO: 4228829 - DNA, 25 bp, Homo sapien
tgccgggattcctccaccaaagagg

SEQ ID NO: 4228830 - DNA, 25 bp, Homo sapien
cagcagcccaacatcggcctgttgg

SEQ ID NO: 4228831 - DNA, 25 bp, Homo sapien
gcctgttgggacttgccggcctgcc

SEQ ID NO: 4228832 - DNA, 25 bp, Homo sapien
ctgccgggattcctccaccaaagag

SEQ ID NO: 4228833 - DNA, 25 bp, Homo sapien
ggaagccacacttggaaactctaga

SEQ ID NO: 4228834 - DNA, 25 bp, Homo sapien
tccacggctgctcaagatgaaaatg

SEQ ID NO: 4228835 - DNA, 25 bp, Homo sapien
gaagctgaaagcacatcgtcttgca

SEQ ID NO: 4228836 - DNA, 25 bp, Homo sapien
taaacgctgtgatcattgccatcgc

SEQ ID NO: 4228837 - DNA, 25 bp, Homo sapien
cagcagctctggaggtaaaatagcc

SEQ ID NO: 4228838 - DNA, 25 bp, Homo sapien
taaaacaagtactaggaacagtctc

SEQ ID NO: 4228839 - DNA, 25 bp, Homo sapien
tgcagtgtaacagagctgcgtcagg

SEQ ID NO: 4228840 - DNA, 25 bp, Homo sapien
tgctgttggtgtacggtaacctcca

SEQ ID NO: 4228841 - DNA, 25 bp, Homo sapien
gcctggaacaccatagcattccaga

SEQ ID NO: 4228842 - DNA, 25 bp, Homo sapien
ctggaacaccatagcattccagact

SEQ ID NO: 4228843 - DNA, 25 bp, Homo sapien
cctggaacaccatagcattccagac

SEQ ID NO: 4228844 - DNA, 25 bp, Homo sapien
agagctgcgcacaaggcactgcctg

SEQ ID NO: 4228845 - DNA, 25 bp, Homo sapien
aaggcactgcctgctcatccgttca

SEQ ID NO: 4228846 - DNA, 25 bp, Homo sapien
ggccagaagagctgcgcacaaggca

SEQ ID NO: 4228847 - DNA, 25 bp, Homo sapien
ctgtggccagaagagctgcgcacaa

SEQ ID NO: 4228848 - DNA, 25 bp, Homo sapien
tctgaagttgcatcaaggccagagt

SEQ ID NO: 4228849 - DNA, 25 bp, Homo sapien
cagcaaatcgacaaagcaggttcca

SEQ ID NO: 4228850 - DNA, 25 bp, Homo sapien
ccagtgcattactggagtaggagaa

SEQ ID NO: 4228851 - DNA, 25 bp, Homo sapien
taggtgtgtgcatcgagttcagcaa

SEQ ID NO: 4228852 - DNA, 25 bp, Homo sapien
atgatcacaggccctttgaagggag

SEQ ID NO: 4228853 - DNA, 25 bp, Homo sapien
tgatcacaggccctttgaagggagg

SEQ ID NO: 4228854 - DNA, 25 bp, Homo sapien
gatcacaggccctttgaagggaggg

SEQ ID NO: 4228855 - DNA, 25 bp, Homo sapien
tgcgcatccctaagctgctgtttct

SEQ ID NO: 4228856 - DNA, 25 bp, Homo sapien
ctgcgcatccctaagctgctgtttc

SEQ ID NO: 4228857 - DNA, 25 bp, Homo sapien
ctgtttctgactctcaacttgtctc

SEQ ID NO: 4228858 - DNA, 25 bp, Homo sapien
tttctgactctcaacttgtctcttc

SEQ ID NO: 4228859 - DNA, 25 bp, Homo sapien
gaacatccgctgagctgaggattct

SEQ ID NO: 4228860 - DNA, 25 bp, Homo sapien
tcggaacatccgctgagctgaggat

SEQ ID NO: 4228861 - DNA, 25 bp, Homo sapien
ctctttcggaacatccgctgagctg

SEQ ID NO: 4228862 - DNA, 25 bp, Homo sapien
catccgctgagctgaggattctctc

SEQ ID NO: 4228863 - DNA, 25 bp, Homo sapien
ctcctcttagcgtagaagctgcttc

SEQ ID NO: 4228864 - DNA, 25 bp, Homo sapien
ctcttagcgtagaagctgcttcctc

SEQ ID NO: 4228865 - DNA, 25 bp, Homo sapien
tcctcttagcgtagaagctgcttcc

SEQ ID NO: 4228866 - DNA, 25 bp, Homo sapien
ctccacaacacttccgttcccgttg

SEQ ID NO: 4228867 - DNA, 25 bp, Homo sapien
ggcctggggaagagcagctgggcca

SEQ ID NO: 4228868 - DNA, 25 bp, Homo sapien
cagctgggccaggaaccagtgatgc

SEQ ID NO: 4228869 - DNA, 25 bp, Homo sapien
gtgggcctggggaagagcagctggg

SEQ ID NO: 4228870 - DNA, 25 bp, Homo sapien
cagctgtgagaacccgtgggcctgg

SEQ ID NO: 4228871 - DNA, 25 bp, Homo sapien
gccccctcatcgtgtccccatctct

SEQ ID NO: 4228872 - DNA, 25 bp, Homo sapien
agcagccccctcatcgtgtccccat

SEQ ID NO: 4228873 - DNA, 25 bp, Homo sapien
tctgagctcgtccatcaccctgacc

SEQ ID NO: 4228874 - DNA, 25 bp, Homo sapien
tttgactctgagctcgtccatcacc

SEQ ID NO: 4228875 - DNA, 25 bp, Homo sapien
ccagctcaggacctggtgctcagct

SEQ ID NO: 4228876 - DNA, 25 bp, Homo sapien
cagctctcagtgtcatctgctctgc

SEQ ID NO: 4228877 - DNA, 25 bp, Homo sapien
ctcaggacctggtgctcagctgagc

SEQ ID NO: 4228878 - DNA, 25 bp, Homo sapien
ctctgctcttctgtgggtgccagct

SEQ ID NO: 4228879 - DNA, 25 bp, Homo sapien
ttagccagaaggtttggggctggag

SEQ ID NO: 4228880 - DNA, 25 bp, Homo sapien
agccagaaggtttggggctggagtt

SEQ ID NO: 4228881 - DNA, 25 bp, Homo sapien
tagccagaaggtttggggctggagt

SEQ ID NO: 4228882 - DNA, 25 bp, Homo sapien
cttgggggctatgcagcccaggctc

SEQ ID NO: 4228883 - DNA, 25 bp, Homo sapien
caggctcttccggagggacagagaa

SEQ ID NO: 4228884 - DNA, 25 bp, Homo sapien
gcccaggctcttccggagggacaga

SEQ ID NO: 4228885 - DNA, 25 bp, Homo sapien
tatgcagcccaggctcttccggagg

SEQ ID NO: 4228886 - DNA, 25 bp, Homo sapien
tgtaatgttcagtgggcatgcgctg

SEQ ID NO: 4228887 - DNA, 25 bp, Homo sapien
agcatgcggcactcagggagaacca

SEQ ID NO: 4228888 - DNA, 25 bp, Homo sapien
gaaccacaaccttgtcctctagggc

SEQ ID NO: 4228889 - DNA, 25 bp, Homo sapien
catgcgctggtgcagcatactgcca

SEQ ID NO: 4228890 - DNA, 25 bp, Homo sapien
cttgagagttgtagccatgggatgc

SEQ ID NO: 4228891 - DNA, 25 bp, Homo sapien
agttgtagccatgggatgctccttc

SEQ ID NO: 4228892 - DNA, 25 bp, Homo sapien
aggttccatttcgatgcttgagagt

SEQ ID NO: 4228893 - DNA, 25 bp, Homo sapien
tcgatgcttgagagttgtagccatg

SEQ ID NO: 4228894 - DNA, 25 bp, Homo sapien
tctcgctcccctaagtttggtggaa

SEQ ID NO: 4228895 - DNA, 25 bp, Homo sapien
ctcgctcccctaagtttggtggaag

SEQ ID NO: 4228896 - DNA, 25 bp, Homo sapien
ttctcgctcccctaagtttggtgga

SEQ ID NO: 4228897 - DNA, 25 bp, Homo sapien
ctttctcgctcccctaagtttggtg

SEQ ID NO: 4228898 - DNA, 25 bp, Homo sapien
cactgcttctcattaaatagttgca

SEQ ID NO: 4228899 - DNA, 25 bp, Homo sapien
tcaagcccacctcggtgctttgtcg

SEQ ID NO: 4228900 - DNA, 25 bp, Homo sapien
ccccactcttatgagatgtctatac

SEQ ID NO: 4228901 - DNA, 25 bp, Homo sapien
ggttctgggaagcacggacactaaa

SEQ ID NO: 4228902 - DNA, 25 bp, Homo sapien
tgctttgtcgcatccgggcttgcca

SEQ ID NO: 4228903 - DNA, 25 bp, Homo sapien
tagatggctgtaaagaccaagggac

SEQ ID NO: 4228904 - DNA, 25 bp, Homo sapien
aaggaggatagatggctgtaaagac

SEQ ID NO: 4228905 - DNA, 25 bp, Homo sapien
gctgtaaagaccaagggacatccag

SEQ ID NO: 4228906 - DNA, 25 bp, Homo sapien
atagcaagttgcaattcgaggtggg

SEQ ID NO: 4228907 - DNA, 25 bp, Homo sapien
gcctcctttgatccggcaccaccat

SEQ ID NO: 4228908 - DNA, 25 bp, Homo sapien
tgtgtccctccgcaaaagccttcta

SEQ ID NO: 4228909 - DNA, 25 bp, Homo sapien
caaaagccttctacgcccaggggct

SEQ ID NO: 4228910 - DNA, 25 bp, Homo sapien
cgcaaaagccttctacgcccagggg

SEQ ID NO: 4228911 - DNA, 25 bp, Homo sapien
tccgcaaaagccttctacgcccagg

SEQ ID NO: 4228912 - DNA, 25 bp, Homo sapien
tgcattaatcacactcagctgtgcc

SEQ ID NO: 4228913 - DNA, 25 bp, Homo sapien
gatcccagcgtctcatgtttcctgc

SEQ ID NO: 4228914 - DNA, 25 bp, Homo sapien
ctaacagagtctgggttcgttgcca

SEQ ID NO: 4228915 - DNA, 25 bp, Homo sapien
aatgccagatcccagcgtctcatgt

SEQ ID NO: 4228916 - DNA, 25 bp, Homo sapien
ggcactgtgccagcgggtggtccgt

SEQ ID NO: 4228917 - DNA, 25 bp, Homo sapien
tccaggaggattaagaacggtggta

SEQ ID NO: 4228918 - DNA, 25 bp, Homo sapien
gaacggtggtaccacttacaggcat

SEQ ID NO: 4228919 - DNA, 25 bp, Homo sapien
gcgggtggtccgtgtggtccaggag

SEQ ID NO: 4228920 - DNA, 25 bp, Homo sapien
aaggaagatggggtcatgatctcag

SEQ ID NO: 4228921 - DNA, 25 bp, Homo sapien
actggggtctccaaagcattaggcc

SEQ ID NO: 4228922 - DNA, 25 bp, Homo sapien
aagatggggtcatgatctcagggta

SEQ ID NO: 4228923 - DNA, 25 bp, Homo sapien
aacttcagaactgatcttcactggg

SEQ ID NO: 4228924 - DNA, 25 bp, Homo sapien
tgcactggagaccagtgtccagacc

SEQ ID NO: 4228925 - DNA, 25 bp, Homo sapien
agtgtcttcttgttcgtaggctcgc

SEQ ID NO: 4228926 - DNA, 25 bp, Homo sapien
tcttcttgttcgtaggctcgccaac

SEQ ID NO: 4228927 - DNA, 25 bp, Homo sapien
cgtaggctcgccaacatttaacagc

SEQ ID NO: 4228928 - DNA, 25 bp, Homo sapien
gccgtggaccgccggcccacgtgac

SEQ ID NO: 4228929 - DNA, 25 bp, Homo sapien
cggccgtggaccgccggcccacgtg

SEQ ID NO: 4228930 - DNA, 25 bp, Homo sapien
ggaccgccggcccacgtgaccgcac

SEQ ID NO: 4228931 - DNA, 25 bp, Homo sapien
cgtggaccgccggcccacgtgaccg

SEQ ID NO: 4228932 - DNA, 25 bp, Homo sapien
tgaatacggcccctcaatcctgtct

SEQ ID NO: 4228933 - DNA, 25 bp, Homo sapien
ctccttccacgggcccgctctctgg

SEQ ID NO: 4228934 - DNA, 25 bp, Homo sapien
cctgaatacggcccctcaatcctgt

SEQ ID NO: 4228935 - DNA, 25 bp, Homo sapien
ggcccgctctctggaaactcgttac

SEQ ID NO: 4228936 - DNA, 25 bp, Homo sapien
gctgctctgttcgctccccgaggtc

SEQ ID NO: 4228937 - DNA, 25 bp, Homo sapien
ctgctctgttcgctccccgaggtcc

SEQ ID NO: 4228938 - DNA, 25 bp, Homo sapien
taattgccgcacgactgtaacagga

SEQ ID NO: 4228939 - DNA, 25 bp, Homo sapien
ggatttagtgatacctcagcccctt

SEQ ID NO: 4228940 - DNA, 25 bp, Homo sapien
tatagtcgcaaagtagatagggaac

SEQ ID NO: 4228941 - DNA, 25 bp, Homo sapien
aatacatcaccggagtcactggatt

SEQ ID NO: 4228942 - DNA, 25 bp, Homo sapien
tgaccatataaagcccagtagttca

SEQ ID NO: 4228943 - DNA, 25 bp, Homo sapien
aatgcctctttgaccatataaagcc

SEQ ID NO: 4228944 - DNA, 25 bp, Homo sapien
acaatggtccagatacgaagcaaat

SEQ ID NO: 4228945 - DNA, 25 bp, Homo sapien
caacatattactctgttagagctct

SEQ ID NO: 4228946 - DNA, 25 bp, Homo sapien
gctaagaatcaccaacatgtcccaa

SEQ ID NO: 4228947 - DNA, 25 bp, Homo sapien
acataactgacattttgtgtcacac

SEQ ID NO: 4228948 - DNA, 25 bp, Homo sapien
tgtcaatggaatagtgagatacagc

SEQ ID NO: 4228949 - DNA, 25 bp, Homo sapien
caaaagatcttacttctcattcaca

SEQ ID NO: 4228950 - DNA, 25 bp, Homo sapien
cttggatggcataacacaggagtca

SEQ ID NO: 4228951 - DNA, 25 bp, Homo sapien
tgatgtaaacagacctaccgcactg

SEQ ID NO: 4228952 - DNA, 25 bp, Homo sapien
tagcggagcagaagagtaggcacat

SEQ ID NO: 4228953 - DNA, 25 bp, Homo sapien
gtaccgatgacacctacagctgtgg

SEQ ID NO: 4228954 - DNA, 25 bp, Homo sapien
cctcctaaaaagcacaagggccttg

SEQ ID NO: 4228955 - DNA, 25 bp, Homo sapien
ccacttaggtaaaggctgagtagat

SEQ ID NO: 4228956 - DNA, 25 bp, Homo sapien
aagggccttgtgtacgctgaaatat

SEQ ID NO: 4228957 - DNA, 25 bp, Homo sapien
gaagtaactggaagcgtcttgctga

SEQ ID NO: 4228958 - DNA, 25 bp, Homo sapien
aagaaggcacatttaggtaattgta

SEQ ID NO: 4228959 - DNA, 25 bp, Homo sapien
agaactgccacgacgaaaaagccca

SEQ ID NO: 4228960 - DNA, 25 bp, Homo sapien
ggtaattgtagctcacagtgccaga

SEQ ID NO: 4228961 - DNA, 25 bp, Homo sapien
acagtgccagaactgccacgacgaa

SEQ ID NO: 4228962 - DNA, 25 bp, Homo sapien
caagttccattctttgcatctagga

SEQ ID NO: 4228963 - DNA, 25 bp, Homo sapien
gcttagaggccaagatgaatacagt

SEQ ID NO: 4228964 - DNA, 25 bp, Homo sapien
tattatcttcagcaacgggaaggag

SEQ ID NO: 4228965 - DNA, 25 bp, Homo sapien
gcagttctggtcacgtaatacaaag

SEQ ID NO: 4228966 - DNA, 25 bp, Homo sapien
tctgggcaccgttcaaactggatct

SEQ ID NO: 4228967 - DNA, 25 bp, Homo sapien
tcaagcttgtcaaccactgcaggtc

SEQ ID NO: 4228968 - DNA, 25 bp, Homo sapien
acatcactgggcttactggcttgca

SEQ ID NO: 4228969 - DNA, 25 bp, Homo sapien
gctgtttcctgttagtatgcaccca

SEQ ID NO: 4228970 - DNA, 25 bp, Homo sapien
aagctgcaattaatgccttctttac

SEQ ID NO: 4228971 - DNA, 25 bp, Homo sapien
cataagggtaaatcggtgccaaaag

SEQ ID NO: 4228972 - DNA, 25 bp, Homo sapien
ctaacagcataagggtaaatcggtg

SEQ ID NO: 4228973 - DNA, 25 bp, Homo sapien
gctgcaattaatgccttctttacat

SEQ ID NO: 4228974 - DNA, 25 bp, Homo sapien
tccaaagacttacttggtcagattt

SEQ ID NO: 4228975 - DNA, 25 bp, Homo sapien
tttcctccttgtcaattggacattc

SEQ ID NO: 4228976 - DNA, 25 bp, Homo sapien
gacttacttggtcagatttcaccta

SEQ ID NO: 4228977 - DNA, 25 bp, Homo sapien
cattccaaagacttacttggtcaga

SEQ ID NO: 4228978 - DNA, 25 bp, Homo sapien
aataacagtattcagtccatcaaag

SEQ ID NO: 4228979 - DNA, 25 bp, Homo sapien
cagtattcagtccatcaaagcaagt

SEQ ID NO: 4228980 - DNA, 25 bp, Homo sapien
agctcacgaagacctgaatgattat

SEQ ID NO: 4228981 - DNA, 25 bp, Homo sapien
gctcacgaagacctgaatgattatc

SEQ ID NO: 4228982 - DNA, 25 bp, Homo sapien
gacttattcagctcttcttcgctcg

SEQ ID NO: 4228983 - DNA, 25 bp, Homo sapien
ttcgctcgtcttggcacagaggctc

SEQ ID NO: 4228984 - DNA, 25 bp, Homo sapien
ccatatctatgtaagagaattttga

SEQ ID NO: 4228985 - DNA, 25 bp, Homo sapien
aagtgaagcttctagattgaaagac

SEQ ID NO: 4228986 - DNA, 25 bp, Homo sapien
ttgaggaatatcaaactccttgtca

SEQ ID NO: 4228987 - DNA, 25 bp, Homo sapien
tatcaacttgaggaatatcaaactc

SEQ ID NO: 4228988 - DNA, 25 bp, Homo sapien
ccagtgttggaggagtatcaacttg

SEQ ID NO: 4228989 - DNA, 25 bp, Homo sapien
gaggagtatcaacttgaggaatatc

SEQ ID NO: 4228990 - DNA, 25 bp, Homo sapien
cagatgaagtatcataggagtgaga

SEQ ID NO: 4228991 - DNA, 25 bp, Homo sapien
tgtttaacaatgtaggatcctcaag

SEQ ID NO: 4228992 - DNA, 25 bp, Homo sapien
tttaagttggtcctgtcaccactat

SEQ ID NO: 4228993 - DNA, 25 bp, Homo sapien
tcaatagtatcaatgtttaacaatg

SEQ ID NO: 4228994 - DNA, 25 bp, Homo sapien
ggcgcataactgatccatgaagtga

SEQ ID NO: 4228995 - DNA, 25 bp, Homo sapien
agctgcagacactatctgggcagaa

SEQ ID NO: 4228996 - DNA, 25 bp, Homo sapien
cactatctgggcagaaattcccttc

SEQ ID NO: 4228997 - DNA, 25 bp, Homo sapien
attcccttcaaaagtgaatggcgca

SEQ ID NO: 4228998 - DNA, 25 bp, Homo sapien
aatttctgtcaagacgtgtagccat

SEQ ID NO: 4228999 - DNA, 25 bp, Homo sapien
ccattgcaggttacaaagttgaggg

SEQ ID NO: 4229000 - DNA, 25 bp, Homo sapien
cctcgggccaagagaagtgctgtat

SEQ ID NO: 4229001 - DNA, 25 bp, Homo sapien
cgtgtagccatgtctcataagtcaa

SEQ ID NO: 4229002 - DNA, 25 bp, Homo sapien
gatagtgtcaaacgaaaagttctgc

SEQ ID NO: 4229003 - DNA, 25 bp, Homo sapien
caatagaggcactacacttgaagcc

SEQ ID NO: 4229004 - DNA, 25 bp, Homo sapien
gctacctcctaacagaatgatctaa

SEQ ID NO: 4229005 - DNA, 25 bp, Homo sapien
tatcgtttacattaacccagtgctc

SEQ ID NO: 4229006 - DNA, 25 bp, Homo sapien
cctcaacaggtggttcccattctag

SEQ ID NO: 4229007 - DNA, 25 bp, Homo sapien
ttaaattcagaaaacgtcatggaaa

SEQ ID NO: 4229008 - DNA, 25 bp, Homo sapien
atcctcaacaggtggttcccattct

SEQ ID NO: 4229009 - DNA, 25 bp, Homo sapien
catggaaatgtaatcctcaacaggt

SEQ ID NO: 4229010 - DNA, 25 bp, Homo sapien
ggtcaaatgactgttctggttcatc

SEQ ID NO: 4229011 - DNA, 25 bp, Homo sapien
gggtcaaatgactgttctggttcat

SEQ ID NO: 4229012 - DNA, 25 bp, Homo sapien
aggtgggtcaaatgactgttctggt

SEQ ID NO: 4229013 - DNA, 25 bp, Homo sapien
attgctgtaggcaagccagcatcta

SEQ ID NO: 4229014 - DNA, 25 bp, Homo sapien
aattgctgtaggcaagccagcatct

SEQ ID NO: 4229015 - DNA, 25 bp, Homo sapien
ttgctgtaggcaagccagcatctac

SEQ ID NO: 4229016 - DNA, 25 bp, Homo sapien
tgctgtaggcaagccagcatctact

SEQ ID NO: 4229017 - DNA, 25 bp, Homo sapien
caagaagagagagtaccagcgtgct

SEQ ID NO: 4229018 - DNA, 25 bp, Homo sapien
cctagagcttcctacgaggcatggg

SEQ ID NO: 4229019 - DNA, 25 bp, Homo sapien
gcaacagagttctatttggcaagcc

SEQ ID NO: 4229020 - DNA, 25 bp, Homo sapien
ggatccaggcaaagtaagaggcact

SEQ ID NO: 4229021 - DNA, 25 bp, Homo sapien
atattaaagccaatccatgagatgt

SEQ ID NO: 4229022 - DNA, 25 bp, Homo sapien
gatgtacccactgctatcagactgg

SEQ ID NO: 4229023 - DNA, 25 bp, Homo sapien
ccactgctatcagactggatactgc

SEQ ID NO: 4229024 - DNA, 25 bp, Homo sapien
tgagatgtacccactgctatcagac

SEQ ID NO: 4229025 - DNA, 25 bp, Homo sapien
gagaaagcctgttttcctgaagatc

SEQ ID NO: 4229026 - DNA, 25 bp, Homo sapien
gcttattgtcagtgagagctcctga

SEQ ID NO: 4229027 - DNA, 25 bp, Homo sapien
accaacaaccggaggcagacaagat

SEQ ID NO: 4229028 - DNA, 25 bp, Homo sapien
tacccattactggaaggtgattcag

SEQ ID NO: 4229029 - DNA, 25 bp, Homo sapien
ctctcaggatagcagaattgcttag

SEQ ID NO: 4229030 - DNA, 25 bp, Homo sapien
tacacttatacaggattcagcattc

SEQ ID NO: 4229031 - DNA, 25 bp, Homo sapien
gaagtgagtactggtaaatgggaac

SEQ ID NO: 4229032 - DNA, 25 bp, Homo sapien
tataacattgacaagaaagggatgt

SEQ ID NO: 4229033 - DNA, 25 bp, Homo sapien
tctttcttaatgacctgggcctctg

SEQ ID NO: 4229034 - DNA, 25 bp, Homo sapien
tgcctataattacttaagaagaggc

SEQ ID NO: 4229035 - DNA, 25 bp, Homo sapien
caagtatagctcttcttgctacact

SEQ ID NO: 4229036 - DNA, 25 bp, Homo sapien
taagactctgtataaggtaagtacc

SEQ ID NO: 4229037 - DNA, 25 bp, Homo sapien
caagcctgttcatgccattgtaatg

SEQ ID NO: 4229038 - DNA, 25 bp, Homo sapien
cccaagcctgttcatgccattgtaa

SEQ ID NO: 4229039 - DNA, 25 bp, Homo sapien
gagtcagctgtattcattcccaagc

SEQ ID NO: 4229040 - DNA, 25 bp, Homo sapien
ttttccagaatgcttatgcttacta

SEQ ID NO: 4229041 - DNA, 25 bp, Homo sapien
aaggcttactgactgaagccagggc

SEQ ID NO: 4229042 - DNA, 25 bp, Homo sapien
tctgtaaggcttactgactgaagcc

SEQ ID NO: 4229043 - DNA, 25 bp, Homo sapien
ttccctctgtaaggcttactgactg

SEQ ID NO: 4229044 - DNA, 25 bp, Homo sapien
cagcaaaccaactcacagaattcaa

SEQ ID NO: 4229045 - DNA, 25 bp, Homo sapien
caggaaacatttttcatcgatgatc

SEQ ID NO: 4229046 - DNA, 25 bp, Homo sapien
gaaaagatctaatcaggaaacattt

SEQ ID NO: 4229047 - DNA, 25 bp, Homo sapien
tcatcgatgatcataaaacaacaga

SEQ ID NO: 4229048 - DNA, 25 bp, Homo sapien
aaaatattctctaggaccgagggag

SEQ ID NO: 4229049 - DNA, 25 bp, Homo sapien
tcatatgtcctatccttatagtacc

SEQ ID NO: 4229050 - DNA, 25 bp, Homo sapien
ccatgttaacaaacttgctgttata

SEQ ID NO: 4229051 - DNA, 25 bp, Homo sapien
ggccactcctcttcatatgtcctat

SEQ ID NO: 4229052 - DNA, 25 bp, Homo sapien
ccttatagtaccatgttaacaaact

SEQ ID NO: 4229053 - DNA, 25 bp, Homo sapien
tacccagacagagtcgcaaagcttg

SEQ ID NO: 4229054 - DNA, 25 bp, Homo sapien
cagacagagtcgcaaagcttgattc

SEQ ID NO: 4229055 - DNA, 25 bp, Homo sapien
gtgctacccagacagagtcgcaaag

SEQ ID NO: 4229056 - DNA, 25 bp, Homo sapien
gacctccaacactagtgctacccag

SEQ ID NO: 4229057 - DNA, 25 bp, Homo sapien
atactgagggcagagatagcgccat

SEQ ID NO: 4229058 - DNA, 25 bp, Homo sapien
gatactgagggcagagatagcgcca

SEQ ID NO: 4229059 - DNA, 25 bp, Homo sapien
tcctttagcaaagccacaaagaagt

SEQ ID NO: 4229060 - DNA, 25 bp, Homo sapien
ctgtcctttagcaaagccacaaaga

SEQ ID NO: 4229061 - DNA, 25 bp, Homo sapien
agcaaagccacaaagaagtcttgag

SEQ ID NO: 4229062 - DNA, 25 bp, Homo sapien
ccacaaagaagtcttgagcaatcat

SEQ ID NO: 4229063 - DNA, 25 bp, Homo sapien
aatgcaaaaatcgttatccaggaac

SEQ ID NO: 4229064 - DNA, 25 bp, Homo sapien
tctaatgccagtttcagaagaagaa

SEQ ID NO: 4229065 - DNA, 25 bp, Homo sapien
aaagtatcggaaaggcttactgcca

SEQ ID NO: 4229066 - DNA, 25 bp, Homo sapien
gcatagagcctttattcgatcttca

SEQ ID NO: 4229067 - DNA, 25 bp, Homo sapien
gagcatctgttattgatcttagaag

SEQ ID NO: 4229068 - DNA, 25 bp, Homo sapien
ggaggatgagcatctgttattgatc

SEQ ID NO: 4229069 - DNA, 25 bp, Homo sapien
tgatatgcaatattgctgttcctgg

SEQ ID NO: 4229070 - DNA, 25 bp, Homo sapien
tgcaatattgctgttcctggaggat

SEQ ID NO: 4229071 - DNA, 25 bp, Homo sapien
ccagtgttattatctacatgtacca

SEQ ID NO: 4229072 - DNA, 25 bp, Homo sapien
cttaagtttggagaacaacgtgtag

SEQ ID NO: 4229073 - DNA, 25 bp, Homo sapien
caatcctatgtgtcttactccagtg

SEQ ID NO: 4229074 - DNA, 25 bp, Homo sapien
caacgtgtaggagtattaaaatgca

SEQ ID NO: 4229075 - DNA, 25 bp, Homo sapien
gagcctccgctgtcgttgcaaattg

SEQ ID NO: 4229076 - DNA, 25 bp, Homo sapien
tccgctgtcgttgcaaattgcaaga

SEQ ID NO: 4229077 - DNA, 25 bp, Homo sapien
acagagcctccgctgtcgttgcaaa

SEQ ID NO: 4229078 - DNA, 25 bp, Homo sapien
gcctccgctgtcgttgcaaattgca

SEQ ID NO: 4229079 - DNA, 25 bp, Homo sapien
tgcagaggctcaatacagcagactt

SEQ ID NO: 4229080 - DNA, 25 bp, Homo sapien
gatgggatgatctttcaactcaggc

SEQ ID NO: 4229081 - DNA, 25 bp, Homo sapien
caactcaggcttagaatgcagaggc

SEQ ID NO: 4229082 - DNA, 25 bp, Homo sapien
ccatggccaataatgaaaactgtgt

SEQ ID NO: 4229083 - DNA, 25 bp, Homo sapien
aagtcatccatactttcaaggatgg

SEQ ID NO: 4229084 - DNA, 25 bp, Homo sapien
agtcatccatactttcaaggatggt

SEQ ID NO: 4229085 - DNA, 25 bp, Homo sapien
ggatggtttcaatccaatgaccagt

SEQ ID NO: 4229086 - DNA, 25 bp, Homo sapien
atggtttcaatccaatgaccagtat

SEQ ID NO: 4229087 - DNA, 25 bp, Homo sapien
gcatgggattcacgtaattttgtac

SEQ ID NO: 4229088 - DNA, 25 bp, Homo sapien
catgggattcacgtaattttgtact

SEQ ID NO: 4229089 - DNA, 25 bp, Homo sapien
tgggattcacgtaattttgtactgc

SEQ ID NO: 4229090 - DNA, 25 bp, Homo sapien
caagcatgggattcacgtaattttg

SEQ ID NO: 4229091 - DNA, 25 bp, Homo sapien
atagtataggtgaagatgcttttgc

SEQ ID NO: 4229092 - DNA, 25 bp, Homo sapien
ggtcatagtataggtgaagatgctt

SEQ ID NO: 4229093 - DNA, 25 bp, Homo sapien
gatgaggtcatagtataggtgaaga

SEQ ID NO: 4229094 - DNA, 25 bp, Homo sapien
gaggtcatagtataggtgaagatgc

SEQ ID NO: 4229095 - DNA, 25 bp, Homo sapien
catgcaacttctctacgctgtctaa

SEQ ID NO: 4229096 - DNA, 25 bp, Homo sapien
gtgtttgccgatcaatcacatgcaa

SEQ ID NO: 4229097 - DNA, 25 bp, Homo sapien
gaaatggctgctattgtagaccagc

SEQ ID NO: 4229098 - DNA, 25 bp, Homo sapien
ccagtggctagtgatttgaaatggc

SEQ ID NO: 4229099 - DNA, 25 bp, Homo sapien
tactgatggattgataacaagcctt

SEQ ID NO: 4229100 - DNA, 25 bp, Homo sapien
actgatggattgataacaagccttc

SEQ ID NO: 4229101 - DNA, 25 bp, Homo sapien
tttgtccccaaataaaagatctgac

SEQ ID NO: 4229102 - DNA, 25 bp, Homo sapien
ttttgtccccaaataaaagatctga

SEQ ID NO: 4229103 - DNA, 25 bp, Homo sapien
tctctccagctcctcagcatcatca

SEQ ID NO: 4229104 - DNA, 25 bp, Homo sapien
tccagctcctcagcatcatcacata

SEQ ID NO: 4229105 - DNA, 25 bp, Homo sapien
ctctctccagctcctcagcatcatc

SEQ ID NO: 4229106 - DNA, 25 bp, Homo sapien
gctcctcagcatcatcacataaaca

SEQ ID NO: 4229107 - DNA, 25 bp, Homo sapien
cagttctagcaaatcaagtacctaa

SEQ ID NO: 4229108 - DNA, 25 bp, Homo sapien
gaagctaccaattcagtaactctga

SEQ ID NO: 4229109 - DNA, 25 bp, Homo sapien
tacctaacagctataatggttttct

SEQ ID NO: 4229110 - DNA, 25 bp, Homo sapien
ttaagaagcttaccaaataatcttc

SEQ ID NO: 4229111 - DNA, 25 bp, Homo sapien
gagccaacgcttctgtaagacaatc

SEQ ID NO: 4229112 - DNA, 25 bp, Homo sapien
aaagaccacgcaagagccaacgctt

SEQ ID NO: 4229113 - DNA, 25 bp, Homo sapien
tccttcatggaaagaccacgcaaga

SEQ ID NO: 4229114 - DNA, 25 bp, Homo sapien
cacgcaagagccaacgcttctgtaa

SEQ ID NO: 4229115 - DNA, 25 bp, Homo sapien
aacaatagcctttcgcttactggca

SEQ ID NO: 4229116 - DNA, 25 bp, Homo sapien
ctttcgcttactggcatcccctgat

SEQ ID NO: 4229117 - DNA, 25 bp, Homo sapien
ccggtctgcaacaatagcctttcgc

SEQ ID NO: 4229118 - DNA, 25 bp, Homo sapien
tcgcttactggcatcccctgataat

SEQ ID NO: 4229119 - DNA, 25 bp, Homo sapien
ttcagagctcgatctgcataatgga

SEQ ID NO: 4229120 - DNA, 25 bp, Homo sapien
actttttcagagctcgatctgcata

SEQ ID NO: 4229121 - DNA, 25 bp, Homo sapien
tttcagagctcgatctgcataatgg

SEQ ID NO: 4229122 - DNA, 25 bp, Homo sapien
ctttttcagagctcgatctgcataa

SEQ ID NO: 4229123 - DNA, 25 bp, Homo sapien
agtaatcaactatgacaggcaccat

SEQ ID NO: 4229124 - DNA, 25 bp, Homo sapien
aggcagtaatcaactatgacaggca

SEQ ID NO: 4229125 - DNA, 25 bp, Homo sapien
cagtaatcaactatgacaggcacca

SEQ ID NO: 4229126 - DNA, 25 bp, Homo sapien
gcagtaatcaactatgacaggcacc

SEQ ID NO: 4229127 - DNA, 25 bp, Homo sapien
caatgagcgcttccacattttccat

SEQ ID NO: 4229128 - DNA, 25 bp, Homo sapien
gggtgtgattcccaccaatttatca

SEQ ID NO: 4229129 - DNA, 25 bp, Homo sapien
tgatatccatatgtacaatgagcgc

SEQ ID NO: 4229130 - DNA, 25 bp, Homo sapien
cttaaaatatatggctcaaggcact

SEQ ID NO: 4229131 - DNA, 25 bp, Homo sapien
gttgtagacatagatcatagcatca

SEQ ID NO: 4229132 - DNA, 25 bp, Homo sapien
catagcatcatataaacgattttcc

SEQ ID NO: 4229133 - DNA, 25 bp, Homo sapien
tccattggactaataaattcattca

SEQ ID NO: 4229134 - DNA, 25 bp, Homo sapien
catataaacgattttcccaacacat

SEQ ID NO: 4229135 - DNA, 25 bp, Homo sapien
tttttcctgcattcagaggaggagc

SEQ ID NO: 4229136 - DNA, 25 bp, Homo sapien
gaggagcaatgactctgaaaagttt

SEQ ID NO: 4229137 - DNA, 25 bp, Homo sapien
tgttagtgtttttcctgcattcaga

SEQ ID NO: 4229138 - DNA, 25 bp, Homo sapien
cctgcattcagaggaggagcaatga

SEQ ID NO: 4229139 - DNA, 25 bp, Homo sapien
tggtggtgttacatgactgtacatg

SEQ ID NO: 4229140 - DNA, 25 bp, Homo sapien
tagtgtgagaagctatggctccttc

SEQ ID NO: 4229141 - DNA, 25 bp, Homo sapien
gcttcatccacgtaaagtgaaagaa

SEQ ID NO: 4229142 - DNA, 25 bp, Homo sapien
ccatttacatgaagtatagtgacag

SEQ ID NO: 4229143 - DNA, 25 bp, Homo sapien
ggctgttacactggccttttgcctt

SEQ ID NO: 4229144 - DNA, 25 bp, Homo sapien
ccatcaggctatggatggtaaaact

SEQ ID NO: 4229145 - DNA, 25 bp, Homo sapien
ccgagtgtgggtacctagaaaggct

SEQ ID NO: 4229146 - DNA, 25 bp, Homo sapien
gagctgctaacatgctgccgtccat

SEQ ID NO: 4229147 - DNA, 25 bp, Homo sapien
aggagcttattgcccataacaactt

SEQ ID NO: 4229148 - DNA, 25 bp, Homo sapien
aaggagcttattgcccataacaact

SEQ ID NO: 4229149 - DNA, 25 bp, Homo sapien
ctaatatatacaaggagcttattgc

SEQ ID NO: 4229150 - DNA, 25 bp, Homo sapien
tgtcaccaaggggataggcacgacc

SEQ ID NO: 4229151 - DNA, 25 bp, Homo sapien
gggataggcacgacctgctagacaa

SEQ ID NO: 4229152 - DNA, 25 bp, Homo sapien
caaggggataggcacgacctgctag

SEQ ID NO: 4229153 - DNA, 25 bp, Homo sapien
ataggcacgacctgctagacaacag

SEQ ID NO: 4229154 - DNA, 25 bp, Homo sapien
gagaagcctctgctgaatgcaggcg

SEQ ID NO: 4229155 - DNA, 25 bp, Homo sapien
gcaaagtccgaatgtaaggatagat

SEQ ID NO: 4229156 - DNA, 25 bp, Homo sapien
gaaattctcttgtgtcaaaatgtag

SEQ ID NO: 4229157 - DNA, 25 bp, Homo sapien
gaatgcaggcgaattagaaattcaa

SEQ ID NO: 4229158 - DNA, 25 bp, Homo sapien
aaatatccacaattcgctgttgata

SEQ ID NO: 4229159 - DNA, 25 bp, Homo sapien
ctgttgatattccacagcttgcttg

SEQ ID NO: 4229160 - DNA, 25 bp, Homo sapien
tccacaattcgctgttgatattcca

SEQ ID NO: 4229161 - DNA, 25 bp, Homo sapien
caattcgctgttgatattccacagc

SEQ ID NO: 4229162 - DNA, 25 bp, Homo sapien
tttatctgacatctactgggttaca

SEQ ID NO: 4229163 - DNA, 25 bp, Homo sapien
ttatctgacatctactgggttacag

SEQ ID NO: 4229164 - DNA, 25 bp, Homo sapien
atttatctgacatctactgggttac

SEQ ID NO: 4229165 - DNA, 25 bp, Homo sapien
aggcattgtgctggatctgttctag

SEQ ID NO: 4229166 - DNA, 25 bp, Homo sapien
gggcaactctacaacaaatcagggt

SEQ ID NO: 4229167 - DNA, 25 bp, Homo sapien
tatgtactgttttgggcgagctgaa

SEQ ID NO: 4229168 - DNA, 25 bp, Homo sapien
tgtaggagggaagactatgtactgt

SEQ ID NO: 4229169 - DNA, 25 bp, Homo sapien
cattttttgagcctgattggcaggt

SEQ ID NO: 4229170 - DNA, 25 bp, Homo sapien
tacaaacaaggtgttgtcaggcttt

SEQ ID NO: 4229171 - DNA, 25 bp, Homo sapien
caggctttgcaagctgccgagcaag

SEQ ID NO: 4229172 - DNA, 25 bp, Homo sapien
tgtgagggggtaaagtctgaattct

SEQ ID NO: 4229173 - DNA, 25 bp, Homo sapien
taaagagacatcctacttgtgaggg

SEQ ID NO: 4229174 - DNA, 25 bp, Homo sapien
tgtcgggagtcatcgtcaggactac

SEQ ID NO: 4229175 - DNA, 25 bp, Homo sapien
ctgtctttcagagtgtcgggagtca

SEQ ID NO: 4229176 - DNA, 25 bp, Homo sapien
catcgtcaggactacaaaggaattc

SEQ ID NO: 4229177 - DNA, 25 bp, Homo sapien
tcagagtgtcgggagtcatcgtcag

SEQ ID NO: 4229178 - DNA, 25 bp, Homo sapien
tatgattaccacagtgccataaagc

SEQ ID NO: 4229179 - DNA, 25 bp, Homo sapien
caacttcccagctgcgtatgattac

SEQ ID NO: 4229180 - DNA, 25 bp, Homo sapien
caatgtgaataccactgatgtatac

SEQ ID NO: 4229181 - DNA, 25 bp, Homo sapien
tgctatccgatagtctcaacttccc

SEQ ID NO: 4229182 - DNA, 25 bp, Homo sapien
tggcttgctgtcacatatggaaggg

SEQ ID NO: 4229183 - DNA, 25 bp, Homo sapien
gccctattagacattgagctgactc

SEQ ID NO: 4229184 - DNA, 25 bp, Homo sapien
tgactctctgctaagctaaaatgtc

SEQ ID NO: 4229185 - DNA, 25 bp, Homo sapien
tgtctatccacagctggtatccatg

SEQ ID NO: 4229186 - DNA, 25 bp, Homo sapien
aaattgaactatgcctccagcctgc

SEQ ID NO: 4229187 - DNA, 25 bp, Homo sapien
ctttttctgccatccggatgagtcg

SEQ ID NO: 4229188 - DNA, 25 bp, Homo sapien
gatgagtcgactctcttcaaattga

SEQ ID NO: 4229189 - DNA, 25 bp, Homo sapien
tcttcaaattgaactatgcctccag

SEQ ID NO: 4229190 - DNA, 25 bp, Homo sapien
cagagggtcacgtaagtagcaatca

SEQ ID NO: 4229191 - DNA, 25 bp, Homo sapien
ctctcgcagagggtcacgtaagtag

SEQ ID NO: 4229192 - DNA, 25 bp, Homo sapien
ggtcacgtaagtagcaatcaataat

SEQ ID NO: 4229193 - DNA, 25 bp, Homo sapien
tcatattggtgttctctttcataca

SEQ ID NO: 4229194 - DNA, 25 bp, Homo sapien
ttctgccatacagactgcttctcct

SEQ ID NO: 4229195 - DNA, 25 bp, Homo sapien
caatatgatccattgctttctgcca

SEQ ID NO: 4229196 - DNA, 25 bp, Homo sapien
tggataagatattgtgaatgtaatt

SEQ ID NO: 4229197 - DNA, 25 bp, Homo sapien
ctctgcactgtgtccgggaatggat

SEQ ID NO: 4229198 - DNA, 25 bp, Homo sapien
agtgtgaagttttgcgcatcagtac

SEQ ID NO: 4229199 - DNA, 25 bp, Homo sapien
aagtgtgaagttttgcgcatcagta

SEQ ID NO: 4229200 - DNA, 25 bp, Homo sapien
gcagctttacaaggcttcagggaca

SEQ ID NO: 4229201 - DNA, 25 bp, Homo sapien
ttcaatatgtccagaaaagtgggtg

SEQ ID NO: 4229202 - DNA, 25 bp, Homo sapien
gtggcaaccagctccgcagctttac

SEQ ID NO: 4229203 - DNA, 25 bp, Homo sapien
ttaatgaccgtttcaatatgtccag

SEQ ID NO: 4229204 - DNA, 25 bp, Homo sapien
ggcatatttcttgccatcaaaagta

SEQ ID NO: 4229205 - DNA, 25 bp, Homo sapien
ggtactttgtaagatctatgtggga

SEQ ID NO: 4229206 - DNA, 25 bp, Homo sapien
tcttgcacaatttataaagctatgc

SEQ ID NO: 4229207 - DNA, 25 bp, Homo sapien
tctgaaaacaattggtcagaggcat

SEQ ID NO: 4229208 - DNA, 25 bp, Homo sapien
cttgggtcaagaagactcctcaaaa

SEQ ID NO: 4229209 - DNA, 25 bp, Homo sapien
ttgggtcaagaagactcctcaaaaa

SEQ ID NO: 4229210 - DNA, 25 bp, Homo sapien
acatcaggagaactcctgtgagaat

SEQ ID NO: 4229211 - DNA, 25 bp, Homo sapien
gcagctgggtgtaagcacatcagga

SEQ ID NO: 4229212 - DNA, 25 bp, Homo sapien
ggtagagtcgggctttacgtagcag

SEQ ID NO: 4229213 - DNA, 25 bp, Homo sapien
ttcatggccagcagcaatgcaccca

SEQ ID NO: 4229214 - DNA, 25 bp, Homo sapien
tgagtcaccatgtctagcccacatt

SEQ ID NO: 4229215 - DNA, 25 bp, Homo sapien
gagactataggtgtggggcactacg

SEQ ID NO: 4229216 - DNA, 25 bp, Homo sapien
tcaccatgtctagcccacattaaaa

SEQ ID NO: 4229217 - DNA, 25 bp, Homo sapien
gtgtggggcactacgctggctaatt

SEQ ID NO: 4229218 - DNA, 25 bp, Homo sapien
ccgcagagatagagaaggcagcata

SEQ ID NO: 4229219 - DNA, 25 bp, Homo sapien
gacacggcagttctctatgtgggaa

SEQ ID NO: 4229220 - DNA, 25 bp, Homo sapien
catgataaatctagggacacggcag

SEQ ID NO: 4229221 - DNA, 25 bp, Homo sapien
cccttttaggtagccaccgcagaga

SEQ ID NO: 4229222 - DNA, 25 bp, Homo sapien
aagagctgagacagtctgcaggcac

SEQ ID NO: 4229223 - DNA, 25 bp, Homo sapien
aagggactctggttgtcccaagagc

SEQ ID NO: 4229224 - DNA, 25 bp, Homo sapien
gagacagtctgcaggcacacttgta

SEQ ID NO: 4229225 - DNA, 25 bp, Homo sapien
gggactctggttgtcccaagagctg

SEQ ID NO: 4229226 - DNA, 25 bp, Homo sapien
tggaagtagagtattaactgcatca

SEQ ID NO: 4229227 - DNA, 25 bp, Homo sapien
ggaagtagagtattaactgcatcat

SEQ ID NO: 4229228 - DNA, 25 bp, Homo sapien
cacaatgcctacacaaaagttttgg

SEQ ID NO: 4229229 - DNA, 25 bp, Homo sapien
atagcccgctattcacaatgcctac

SEQ ID NO: 4229230 - DNA, 25 bp, Homo sapien
ctgtgatacaaggagatatttgcag

SEQ ID NO: 4229231 - DNA, 25 bp, Homo sapien
ttcttgatttacatgaataccttcc

SEQ ID NO: 4229232 - DNA, 25 bp, Homo sapien
tgcagtaattcttgatttacatgaa

SEQ ID NO: 4229233 - DNA, 25 bp, Homo sapien
tgatacaaggagatatttgcagtaa

SEQ ID NO: 4229234 - DNA, 25 bp, Homo sapien
tagtttcttccagacggtagcactc

SEQ ID NO: 4229235 - DNA, 25 bp, Homo sapien
tctctataacttgggttgggttgaa

SEQ ID NO: 4229236 - DNA, 25 bp, Homo sapien
caaggacttgcagagtctctataac

SEQ ID NO: 4229237 - DNA, 25 bp, Homo sapien
ggttgggttgaactgacacaacagc

SEQ ID NO: 4229238 - DNA, 25 bp, Homo sapien
ctttcttttccaatagataagcggt

SEQ ID NO: 4229239 - DNA, 25 bp, Homo sapien
catgaagttgatacttctgagtaat

SEQ ID NO: 4229240 - DNA, 25 bp, Homo sapien
ttaggaaggcaccatgaatatctcc

SEQ ID NO: 4229241 - DNA, 25 bp, Homo sapien
tagataagcggtgacttcatgaagt

SEQ ID NO: 4229242 - DNA, 25 bp, Homo sapien
caccttgatgtgttacctcttgaag

SEQ ID NO: 4229243 - DNA, 25 bp, Homo sapien
tttcaccttgatgtgttacctcttg

SEQ ID NO: 4229244 - DNA, 25 bp, Homo sapien
ccttgatgtgttacctcttgaagtt

SEQ ID NO: 4229245 - DNA, 25 bp, Homo sapien
tcaccttgatgtgttacctcttgaa

SEQ ID NO: 4229246 - DNA, 25 bp, Homo sapien
tctctggcaaagagcaatggtctcc

SEQ ID NO: 4229247 - DNA, 25 bp, Homo sapien
ggtctccaccatagtatcttcaaca

SEQ ID NO: 4229248 - DNA, 25 bp, Homo sapien
tgctgctggttcaaattatgtgaat

SEQ ID NO: 4229249 - DNA, 25 bp, Homo sapien
ttcaacatccttcaatgagggatcc

SEQ ID NO: 4229250 - DNA, 25 bp, Homo sapien
tggctgaactggacagcttctgagg

SEQ ID NO: 4229251 - DNA, 25 bp, Homo sapien
aatggctgaactggacagcttctga

SEQ ID NO: 4229252 - DNA, 25 bp, Homo sapien
gaatggctgaactggacagcttctg

SEQ ID NO: 4229253 - DNA, 25 bp, Homo sapien
aggaatggctgaactggacagcttc

SEQ ID NO: 4229254 - DNA, 25 bp, Homo sapien
acttgcatggtcaaagacttcagag

SEQ ID NO: 4229255 - DNA, 25 bp, Homo sapien
gctatttaaaacttgcatggtcaaa

SEQ ID NO: 4229256 - DNA, 25 bp, Homo sapien
tttaaaacttgcatggtcaaagact

SEQ ID NO: 4229257 - DNA, 25 bp, Homo sapien
taaatgctgccatgctatttaaaac

SEQ ID NO: 4229258 - DNA, 25 bp, Homo sapien
taagattctttgcaagattgatgga

SEQ ID NO: 4229259 - DNA, 25 bp, Homo sapien
gattctttgcaagattgatggaagg

SEQ ID NO: 4229260 - DNA, 25 bp, Homo sapien
ctttgcaagattgatggaagggcaa

SEQ ID NO: 4229261 - DNA, 25 bp, Homo sapien
ctgtaagattctttgcaagattgat

SEQ ID NO: 4229262 - DNA, 25 bp, Homo sapien
aaggtatctaacattcccaagataa

SEQ ID NO: 4229263 - DNA, 25 bp, Homo sapien
taacattcccaagataagtccctgg

SEQ ID NO: 4229264 - DNA, 25 bp, Homo sapien
ggtatctaacattcccaagataagt

SEQ ID NO: 4229265 - DNA, 25 bp, Homo sapien
atctaacattcccaagataagtccc

SEQ ID NO: 4229266 - DNA, 25 bp, Homo sapien
catttcttggcgtctcttgtactgc

SEQ ID NO: 4229267 - DNA, 25 bp, Homo sapien
caatggagatcttggtttagaaggc

SEQ ID NO: 4229268 - DNA, 25 bp, Homo sapien
cgaagctctcaggttacacaatgac

SEQ ID NO: 4229269 - DNA, 25 bp, Homo sapien
ttgtttgggattcagtcctctggtg

SEQ ID NO: 4229270 - DNA, 25 bp, Homo sapien
actttgttacttgaactgcatttgt

SEQ ID NO: 4229271 - DNA, 25 bp, Homo sapien
gttttgtaggcagaatgagtgatac

SEQ ID NO: 4229272 - DNA, 25 bp, Homo sapien
gaactgcatttgtagcatgtccatc

SEQ ID NO: 4229273 - DNA, 25 bp, Homo sapien
ttgtagcatgtccatcttgtttggc

SEQ ID NO: 4229274 - DNA, 25 bp, Homo sapien
taatctaaagtaggtttccctcatg

SEQ ID NO: 4229275 - DNA, 25 bp, Homo sapien
tctggctatccattttctacagctg

SEQ ID NO: 4229276 - DNA, 25 bp, Homo sapien
gctggtaccgccttagccttcaggt

SEQ ID NO: 4229277 - DNA, 25 bp, Homo sapien
tctttaaggctaaccaggccctgtc

SEQ ID NO: 4229278 - DNA, 25 bp, Homo sapien
gggtcactatctttcactgcctggt

SEQ ID NO: 4229279 - DNA, 25 bp, Homo sapien
ttgacccggagagactaagctctgc

SEQ ID NO: 4229280 - DNA, 25 bp, Homo sapien
taccttctgcagatctatggagccc

SEQ ID NO: 4229281 - DNA, 25 bp, Homo sapien
catatctggccaaagtgacttagac

SEQ ID NO: 4229282 - DNA, 25 bp, Homo sapien
tggactgatgatacgatggagacat

SEQ ID NO: 4229283 - DNA, 25 bp, Homo sapien
ggatcccctttggactgatgatacg

SEQ ID NO: 4229284 - DNA, 25 bp, Homo sapien
cctttggactgatgatacgatggag

SEQ ID NO: 4229285 - DNA, 25 bp, Homo sapien
ctttttagcagtgggatcccctttg

SEQ ID NO: 4229286 - DNA, 25 bp, Homo sapien
caatggagagtcccactgtttccca

SEQ ID NO: 4229287 - DNA, 25 bp, Homo sapien
tcccttctgctttagccaatggaga

SEQ ID NO: 4229288 - DNA, 25 bp, Homo sapien
ttctgctttagccaatggagagtcc

SEQ ID NO: 4229289 - DNA, 25 bp, Homo sapien
tagccaatggagagtcccactgttt

SEQ ID NO: 4229290 - DNA, 25 bp, Homo sapien
gcaaacctggagtcttgccacgtgg

SEQ ID NO: 4229291 - DNA, 25 bp, Homo sapien
tgctgccacccacaatgtaacggag

SEQ ID NO: 4229292 - DNA, 25 bp, Homo sapien
gaacgaatgtagctccttggtcaaa

SEQ ID NO: 4229293 - DNA, 25 bp, Homo sapien
taaaaaatcactgccggatgctgcc

SEQ ID NO: 4229294 - DNA, 25 bp, Homo sapien
tgttagtgacaaacataaggtgctc

SEQ ID NO: 4229295 - DNA, 25 bp, Homo sapien
tctggccttctgctagctgcgtttg

SEQ ID NO: 4229296 - DNA, 25 bp, Homo sapien
tatacggtttcatgggctgctcgcg

SEQ ID NO: 4229297 - DNA, 25 bp, Homo sapien
tgataacaggtctaaccctaaagcc

SEQ ID NO: 4229298 - DNA, 25 bp, Homo sapien
caaggctctttcttgtgagggaagg

SEQ ID NO: 4229299 - DNA, 25 bp, Homo sapien
aaggctctttcttgtgagggaaggg

SEQ ID NO: 4229300 - DNA, 25 bp, Homo sapien
cttacaaggctctttcttgtgaggg

SEQ ID NO: 4229301 - DNA, 25 bp, Homo sapien
tacaaggctctttcttgtgagggaa

SEQ ID NO: 4229302 - DNA, 25 bp, Homo sapien
tagaccaaagcccagtgttaagaac

SEQ ID NO: 4229303 - DNA, 25 bp, Homo sapien
catgacagttttgggtacacactag

SEQ ID NO: 4229304 - DNA, 25 bp, Homo sapien
taggcgttcacgaatgccttctgcc

SEQ ID NO: 4229305 - DNA, 25 bp, Homo sapien
tatccctcatatcagttgtctcaac

SEQ ID NO: 4229306 - DNA, 25 bp, Homo sapien
catgagattaacaggcatttagggc

SEQ ID NO: 4229307 - DNA, 25 bp, Homo sapien
caattgatcaaagggcaatgccacc

SEQ ID NO: 4229308 - DNA, 25 bp, Homo sapien
tgtttactgagcctaatcatggctt

SEQ ID NO: 4229309 - DNA, 25 bp, Homo sapien
taacagtttccgtctacagatgcca

SEQ ID NO: 4229310 - DNA, 25 bp, Homo sapien
tcatgtggccctcgtcctgatgtgg

SEQ ID NO: 4229311 - DNA, 25 bp, Homo sapien
gagccagtctccaagaagcaacatc

SEQ ID NO: 4229312 - DNA, 25 bp, Homo sapien
caggaaggcccgcaggtactgcgca

SEQ ID NO: 4229313 - DNA, 25 bp, Homo sapien
caggtactgcgcacagagccagtct

SEQ ID NO: 4229314 - DNA, 25 bp, Homo sapien
gcttggatttgctgtggatccagaa

SEQ ID NO: 4229315 - DNA, 25 bp, Homo sapien
aagctgatcaaatgcttggatttgc

SEQ ID NO: 4229316 - DNA, 25 bp, Homo sapien
atgcttggatttgctgtggatccag

SEQ ID NO: 4229317 - DNA, 25 bp, Homo sapien
gagacggcaaagctgatcaaatgct

SEQ ID NO: 4229318 - DNA, 25 bp, Homo sapien
catatcctaagcaaagccctcctgg

SEQ ID NO: 4229319 - DNA, 25 bp, Homo sapien
tagggcttcggacagattgggcacc

SEQ ID NO: 4229320 - DNA, 25 bp, Homo sapien
ctaattcaaccagtgcagatgccca

SEQ ID NO: 4229321 - DNA, 25 bp, Homo sapien
cctgggatcaaccttctggcctgct

SEQ ID NO: 4229322 - DNA, 25 bp, Homo sapien
gcagtttgcacaagctcgagacaag

SEQ ID NO: 4229323 - DNA, 25 bp, Homo sapien
gttttagaaagggtagccaggcagc

SEQ ID NO: 4229324 - DNA, 25 bp, Homo sapien
tagccaatcagaagacctgcagtgg

SEQ ID NO: 4229325 - DNA, 25 bp, Homo sapien
caagctcaggaacaaatgggaccac

SEQ ID NO: 4229326 - DNA, 25 bp, Homo sapien
gctgttgaaagcaggagcactctgc

SEQ ID NO: 4229327 - DNA, 25 bp, Homo sapien
ccactgaatggcctatagctctcgc

SEQ ID NO: 4229328 - DNA, 25 bp, Homo sapien
tcgctgctgcgattctgggagagtt

SEQ ID NO: 4229329 - DNA, 25 bp, Homo sapien
tgggagagttccgtgaggagagcca

SEQ ID NO: 4229330 - DNA, 25 bp, Homo sapien
tcagtcacaggtggaggaatgagct

SEQ ID NO: 4229331 - DNA, 25 bp, Homo sapien
aatcctcagtcacaggtggaggaat

SEQ ID NO: 4229332 - DNA, 25 bp, Homo sapien
tcctcagtcacaggtggaggaatga

SEQ ID NO: 4229333 - DNA, 25 bp, Homo sapien
tcaatcctcagtcacaggtggagga

SEQ ID NO: 4229334 - DNA, 25 bp, Homo sapien
tcaatgagtctggtgaactgacgcc

SEQ ID NO: 4229335 - DNA, 25 bp, Homo sapien
gctggacagaggtatgtgacattcc

SEQ ID NO: 4229336 - DNA, 25 bp, Homo sapien
ctacactgggaatggtgctgtggac

SEQ ID NO: 4229337 - DNA, 25 bp, Homo sapien
taaatggaaaaagtcgcaataggcg

SEQ ID NO: 4229338 - DNA, 25 bp, Homo sapien
tctccaaggcatgcttcagttatac

SEQ ID NO: 4229339 - DNA, 25 bp, Homo sapien
acatgaacacattaaagggagatgg

SEQ ID NO: 4229340 - DNA, 25 bp, Homo sapien
aggcatgcttcagttatactgcagc

SEQ ID NO: 4229341 - DNA, 25 bp, Homo sapien
atgaacacattaaagggagatggcc

SEQ ID NO: 4229342 - DNA, 25 bp, Homo sapien
aaacacggagcatttattgttagaa

SEQ ID NO: 4229343 - DNA, 25 bp, Homo sapien
acaacagggctcgaaatgtcctcca

SEQ ID NO: 4229344 - DNA, 25 bp, Homo sapien
tgatatacgaagtcccatggccaaa

SEQ ID NO: 4229345 - DNA, 25 bp, Homo sapien
tgagagcctgacgattccattgcac

SEQ ID NO: 4229346 - DNA, 25 bp, Homo sapien
aattaaggagggttgtcacaggcag

SEQ ID NO: 4229347 - DNA, 25 bp, Homo sapien
cacacttaaacacatcttgtaagaa

SEQ ID NO: 4229348 - DNA, 25 bp, Homo sapien
acacttaaacacatcttgtaagaac

SEQ ID NO: 4229349 - DNA, 25 bp, Homo sapien
ggtctatttgaaccatcacaagtat

SEQ ID NO: 4229350 - DNA, 25 bp, Homo sapien
ggccggctttacttctaatcctcca

SEQ ID NO: 4229351 - DNA, 25 bp, Homo sapien
cacaagtattttgggaccgataaca

SEQ ID NO: 4229352 - DNA, 25 bp, Homo sapien
tacttctaatcctccacttcttggt

SEQ ID NO: 4229353 - DNA, 25 bp, Homo sapien
gaaggaattctctgtaacgctgata

SEQ ID NO: 4229354 - DNA, 25 bp, Homo sapien
taaaaactcgctaagcttcacttgc

SEQ ID NO: 4229355 - DNA, 25 bp, Homo sapien
tcagtcacatgaagtggttaacact

SEQ ID NO: 4229356 - DNA, 25 bp, Homo sapien
ggttaacacttgcacactgactgac

SEQ ID NO: 4229357 - DNA, 25 bp, Homo sapien
gctggtctcagggttaagctgccca

SEQ ID NO: 4229358 - DNA, 25 bp, Homo sapien
cctggagcagtgtagcttgtagaca

SEQ ID NO: 4229359 - DNA, 25 bp, Homo sapien
gcccatacttgagggtgtcagagtg

SEQ ID NO: 4229360 - DNA, 25 bp, Homo sapien
ggctcctgccctgtacaggttgctt

SEQ ID NO: 4229361 - DNA, 25 bp, Homo sapien
ccagcacggctgttccaggatgact

SEQ ID NO: 4229362 - DNA, 25 bp, Homo sapien
aatggcgaggacattcgctgtgtgc

SEQ ID NO: 4229363 - DNA, 25 bp, Homo sapien
cctcaagcacactgagttctgagag

SEQ ID NO: 4229364 - DNA, 25 bp, Homo sapien
caggatgactcttctctttgaatag

SEQ ID NO: 4229365 - DNA, 25 bp, Homo sapien
acaaccaaaagacagatccacatac

SEQ ID NO: 4229366 - DNA, 25 bp, Homo sapien
cacaaccaaaagacagatccacata

SEQ ID NO: 4229367 - DNA, 25 bp, Homo sapien
ccacaaccaaaagacagatccacat

SEQ ID NO: 4229368 - DNA, 25 bp, Homo sapien
gtcctggatgtactgtgacttttgt

SEQ ID NO: 4229369 - DNA, 25 bp, Homo sapien
agtcctggatgtactgtgacttttg

SEQ ID NO: 4229370 - DNA, 25 bp, Homo sapien
gaagccgcattaacttctgctgctg

SEQ ID NO: 4229371 - DNA, 25 bp, Homo sapien
cagtgaagccgcattaacttctgct

SEQ ID NO: 4229372 - DNA, 25 bp, Homo sapien
ccttcagctgtggatgactgctgag

SEQ ID NO: 4229373 - DNA, 25 bp, Homo sapien
gagatagtggttgaaacaaattcta

SEQ ID NO: 4229374 - DNA, 25 bp, Homo sapien
ttacatcgcatgatgtgccttctct

SEQ ID NO: 4229375 - DNA, 25 bp, Homo sapien
gatagtggttgaaacaaattctaac

SEQ ID NO: 4229376 - DNA, 25 bp, Homo sapien
gacattacggttgaagctaattgct

SEQ ID NO: 4229377 - DNA, 25 bp, Homo sapien
cggttgaagctaattgctttgatgg

SEQ ID NO: 4229378 - DNA, 25 bp, Homo sapien
ccattgacatcattgacattacggt

SEQ ID NO: 4229379 - DNA, 25 bp, Homo sapien
gtaaagaacctagcaccattgacat

SEQ ID NO: 4229380 - DNA, 25 bp, Homo sapien
taccttgtcccttaatagcctctca

SEQ ID NO: 4229381 - DNA, 25 bp, Homo sapien
aactataacacaggcggtgttccgg

SEQ ID NO: 4229382 - DNA, 25 bp, Homo sapien
catttcaaacccagatgaatttcca

SEQ ID NO: 4229383 - DNA, 25 bp, Homo sapien
ggtgttccgggtgattatagcttcc

SEQ ID NO: 4229384 - DNA, 25 bp, Homo sapien
aacacaggccacgagattgtctctg

SEQ ID NO: 4229385 - DNA, 25 bp, Homo sapien
gaaacacaggccacgagattgtctc

SEQ ID NO: 4229386 - DNA, 25 bp, Homo sapien
cacaggccacgagattgtctctggg

SEQ ID NO: 4229387 - DNA, 25 bp, Homo sapien
gggaaacacaggccacgagattgtc

SEQ ID NO: 4229388 - DNA, 25 bp, Homo sapien
tcagaagagcgtggacagcagacat

SEQ ID NO: 4229389 - DNA, 25 bp, Homo sapien
agcgtggacagcagacatctgggct

SEQ ID NO: 4229390 - DNA, 25 bp, Homo sapien
tggacagcagacatctgggcttgag

SEQ ID NO: 4229391 - DNA, 25 bp, Homo sapien
agacatctgggcttgagggcgctgg

SEQ ID NO: 4229392 - DNA, 25 bp, Homo sapien
ggaaggcgccatttacataatcact

SEQ ID NO: 4229393 - DNA, 25 bp, Homo sapien
ggaaccttgccgtgaaataggcatt

SEQ ID NO: 4229394 - DNA, 25 bp, Homo sapien
aatcacttggctaatcatgtacatt

SEQ ID NO: 4229395 - DNA, 25 bp, Homo sapien
ccagaattgggacgagaaaaggaag

SEQ ID NO: 4229396 - DNA, 25 bp, Homo sapien
ttgcttgaacccaggaggtggaggt

SEQ ID NO: 4229397 - DNA, 25 bp, Homo sapien
taaaaaaaaatctcatagtcccagc

SEQ ID NO: 4229398 - DNA, 25 bp, Homo sapien
tactcaggaggctgaggcaggagaa

SEQ ID NO: 4229399 - DNA, 25 bp, Homo sapien
aaaaaaatctcatagtcccagctac

SEQ ID NO: 4229400 - DNA, 25 bp, Homo sapien
tcctattcttccagattctgtcacc

SEQ ID NO: 4229401 - DNA, 25 bp, Homo sapien
ctcagctgatgtccttgcttctttc

SEQ ID NO: 4229402 - DNA, 25 bp, Homo sapien
ctcctattcttccagattctgtcac

SEQ ID NO: 4229403 - DNA, 25 bp, Homo sapien
atcctccttctcagctgatgtcctt

SEQ ID NO: 4229404 - DNA, 25 bp, Homo sapien
cgtggactcttttcattgtatggca

SEQ ID NO: 4229405 - DNA, 25 bp, Homo sapien
gcattagcatgtcctctagtctcaa

SEQ ID NO: 4229406 - DNA, 25 bp, Homo sapien
gggtcttcaagagggtctctaataa

SEQ ID NO: 4229407 - DNA, 25 bp, Homo sapien
tgtatggcatctaatctgatgtctg

SEQ ID NO: 4229408 - DNA, 25 bp, Homo sapien
gagcttcttcatatgctgccaagga

SEQ ID NO: 4229409 - DNA, 25 bp, Homo sapien
cacgccaggtggtatcagtactcca

SEQ ID NO: 4229410 - DNA, 25 bp, Homo sapien
ccacttactacgagggatgatgtcc

SEQ ID NO: 4229411 - DNA, 25 bp, Homo sapien
ctgtgactacaggagatgagcttct

SEQ ID NO: 4229412 - DNA, 25 bp, Homo sapien
caatattatgtgaggtcttgtacca

SEQ ID NO: 4229413 - DNA, 25 bp, Homo sapien
tgaggtcttgtaccactgattcaga

SEQ ID NO: 4229414 - DNA, 25 bp, Homo sapien
ttttccctgatgcaatattatgtga

SEQ ID NO: 4229415 - DNA, 25 bp, Homo sapien
ccactgattcagattctaagtcctt

SEQ ID NO: 4229416 - DNA, 25 bp, Homo sapien
gagctcctggtgggtcacgttgatt

SEQ ID NO: 4229417 - DNA, 25 bp, Homo sapien
tagagctcctggtgggtcacgttga

SEQ ID NO: 4229418 - DNA, 25 bp, Homo sapien
agagctcctggtgggtcacgttgat

SEQ ID NO: 4229419 - DNA, 25 bp, Homo sapien
ctagagctcctggtgggtcacgttg

SEQ ID NO: 4229420 - DNA, 25 bp, Homo sapien
ctgtttatggagaaataatagaaag

SEQ ID NO: 4229421 - DNA, 25 bp, Homo sapien
ttatggagaaataatagaaagtagt

SEQ ID NO: 4229422 - DNA, 25 bp, Homo sapien
agaaataatagaaagtagtaagtcg

SEQ ID NO: 4229423 - DNA, 25 bp, Homo sapien
tggagaaataatagaaagtagtaag

SEQ ID NO: 4229424 - DNA, 25 bp, Homo sapien
gaacttaggttagtgtggcaagcct

SEQ ID NO: 4229425 - DNA, 25 bp, Homo sapien
catggatatggatggccaaggcaca

SEQ ID NO: 4229426 - DNA, 25 bp, Homo sapien
gaaccctgatattccccaactggag

SEQ ID NO: 4229427 - DNA, 25 bp, Homo sapien
tgaaccacgtaccattagccaggat

SEQ ID NO: 4229428 - DNA, 25 bp, Homo sapien
catttcagccactctcgggccaaag

SEQ ID NO: 4229429 - DNA, 25 bp, Homo sapien
tttgctgaacactttagtacctggc

SEQ ID NO: 4229430 - DNA, 25 bp, Homo sapien
tggttgtcctcatcgtctctatgga

SEQ ID NO: 4229431 - DNA, 25 bp, Homo sapien
cgggccaaagtctccaaactccatg

SEQ ID NO: 4229432 - DNA, 25 bp, Homo sapien
ttccctctggttgcggagactttga

SEQ ID NO: 4229433 - DNA, 25 bp, Homo sapien
agtcagcgtgcagtgtagcccacac

SEQ ID NO: 4229434 - DNA, 25 bp, Homo sapien
cacgtttgagatcgtatgagtcagc

SEQ ID NO: 4229435 - DNA, 25 bp, Homo sapien
ggtccttcgctgagtgcccttaggg

SEQ ID NO: 4229436 - DNA, 25 bp, Homo sapien
tctggaaagtagagtgattacaaca

SEQ ID NO: 4229437 - DNA, 25 bp, Homo sapien
gtggctaaccctttctgatcttctg

SEQ ID NO: 4229438 - DNA, 25 bp, Homo sapien
gaaatccataagacaggtaattctg

SEQ ID NO: 4229439 - DNA, 25 bp, Homo sapien
tgtgaaagttgaagattccctactg

SEQ ID NO: 4229440 - DNA, 25 bp, Homo sapien
ctgtcggggatcctaggctcccagc

SEQ ID NO: 4229441 - DNA, 25 bp, Homo sapien
ggggatcctaggctcccagcgcatc

SEQ ID NO: 4229442 - DNA, 25 bp, Homo sapien
tccgccccacccatggcgtcaccct

SEQ ID NO: 4229443 - DNA, 25 bp, Homo sapien
gacgctccgccccacccatggcgtc

SEQ ID NO: 4229444 - DNA, 25 bp, Homo sapien
ggccccgagcgatctaggccatcaa

SEQ ID NO: 4229445 - DNA, 25 bp, Homo sapien
gcgatctaggccatcaactccagct

SEQ ID NO: 4229446 - DNA, 25 bp, Homo sapien
ttagggccccgagcgatctaggcca

SEQ ID NO: 4229447 - DNA, 25 bp, Homo sapien
cgcgcttagggccccgagcgatcta

SEQ ID NO: 4229448 - DNA, 25 bp, Homo sapien
ttctgccgggaagccagaaacaggt

SEQ ID NO: 4229449 - DNA, 25 bp, Homo sapien
taaagcatgcctacttgtcgcaagg

SEQ ID NO: 4229450 - DNA, 25 bp, Homo sapien
taagcgccagtgatcggaaacccat

SEQ ID NO: 4229451 - DNA, 25 bp, Homo sapien
tctgtatttcctcgacgacttcggg

SEQ ID NO: 4229452 - DNA, 25 bp, Homo sapien
tgtcaatgtacagacctaaggtacc

SEQ ID NO: 4229453 - DNA, 25 bp, Homo sapien
ggtaccactgagataccaactcatt

SEQ ID NO: 4229454 - DNA, 25 bp, Homo sapien
gaataaaagttatactacacagaca

SEQ ID NO: 4229455 - DNA, 25 bp, Homo sapien
gataccaactcattatgaataaaag

SEQ ID NO: 4229456 - DNA, 25 bp, Homo sapien
tgaagtccattttagagtccataga

SEQ ID NO: 4229457 - DNA, 25 bp, Homo sapien
tgtccattaatggtccgtgggtttc

SEQ ID NO: 4229458 - DNA, 25 bp, Homo sapien
gctaggatttgaatgccacaataca

SEQ ID NO: 4229459 - DNA, 25 bp, Homo sapien
tacatattgactcatgtttttgtcc

SEQ ID NO: 4229460 - DNA, 25 bp, Homo sapien
gtactgcctgctatagaattaaaca

SEQ ID NO: 4229461 - DNA, 25 bp, Homo sapien
cttttcttgcttaaacctgaggcac

SEQ ID NO: 4229462 - DNA, 25 bp, Homo sapien
tactattacacagcgaaacttggat

SEQ ID NO: 4229463 - DNA, 25 bp, Homo sapien
aggagaccagcaaaaacctgtaagt

SEQ ID NO: 4229464 - DNA, 25 bp, Homo sapien
aatcatgactcaacccctagttagc

SEQ ID NO: 4229465 - DNA, 25 bp, Homo sapien
tacttatctattactactactccaa

SEQ ID NO: 4229466 - DNA, 25 bp, Homo sapien
ccctagttagcagccttcattatta

SEQ ID NO: 4229467 - DNA, 25 bp, Homo sapien
taaagcctattctcaagcaagtttc

SEQ ID NO: 4229468 - DNA, 25 bp, Homo sapien
gccttcctgtcatttcgactctgtg

SEQ ID NO: 4229469 - DNA, 25 bp, Homo sapien
ttttctcacttaggcttaggtctgc

SEQ ID NO: 4229470 - DNA, 25 bp, Homo sapien
gatcataaacaattggaatgctagg

SEQ ID NO: 4229471 - DNA, 25 bp, Homo sapien
gcccagctctaaggccttaatgcac

SEQ ID NO: 4229472 - DNA, 25 bp, Homo sapien
tagataccatgctgaaagaacaaaa

SEQ ID NO: 4229473 - DNA, 25 bp, Homo sapien
atggctgaatatgttcattggctta

SEQ ID NO: 4229474 - DNA, 25 bp, Homo sapien
ggctgaatatgttcattggcttatc

SEQ ID NO: 4229475 - DNA, 25 bp, Homo sapien
taatcagattactagataccatgct

SEQ ID NO: 4229476 - DNA, 25 bp, Homo sapien
gtcttgatgaggttattcaaactca

SEQ ID NO: 4229477 - DNA, 25 bp, Homo sapien
catggtcttcaaaaacgtggtactt

SEQ ID NO: 4229478 - DNA, 25 bp, Homo sapien
tcttgaatgcataatgatgataggc

SEQ ID NO: 4229479 - DNA, 25 bp, Homo sapien
tggagagctttaatgcagatgagac

SEQ ID NO: 4229480 - DNA, 25 bp, Homo sapien
catatacctagtacgaagcagacag

SEQ ID NO: 4229481 - DNA, 25 bp, Homo sapien
tatgaaggaccctagaggccaagga

SEQ ID NO: 4229482 - DNA, 25 bp, Homo sapien
tcctaggcccaaaatctgagggaat

SEQ ID NO: 4229483 - DNA, 25 bp, Homo sapien
tatccaacctggacatggtacatgc

SEQ ID NO: 4229484 - DNA, 25 bp, Homo sapien
ttatttaatgaccaagtacacacac

SEQ ID NO: 4229485 - DNA, 25 bp, Homo sapien
ttaatgaccaagtacacacacgttc

SEQ ID NO: 4229486 - DNA, 25 bp, Homo sapien
tatttaatgaccaagtacacacacg

SEQ ID NO: 4229487 - DNA, 25 bp, Homo sapien
aatgaccaagtacacacacgttcac

SEQ ID NO: 4229488 - DNA, 25 bp, Homo sapien
cagtggtggaagttattgtaggttc

SEQ ID NO: 4229489 - DNA, 25 bp, Homo sapien
atctttttatgagcagtggtggaag

SEQ ID NO: 4229490 - DNA, 25 bp, Homo sapien
attgtaggttcagttatgtacccct

SEQ ID NO: 4229491 - DNA, 25 bp, Homo sapien
cagttatgtacccctaaaagataag

SEQ ID NO: 4229492 - DNA, 25 bp, Homo sapien
tcttaagttccaccatagagcctgg

SEQ ID NO: 4229493 - DNA, 25 bp, Homo sapien
gaataacttctatggatctgccttc

SEQ ID NO: 4229494 - DNA, 25 bp, Homo sapien
ctggaatgtgagtacgacctttgct

SEQ ID NO: 4229495 - DNA, 25 bp, Homo sapien
tagcatagtggcaggtattgactcc

SEQ ID NO: 4229496 - DNA, 25 bp, Homo sapien
gacatcagggaaccttgatgagcct

SEQ ID NO: 4229497 - DNA, 25 bp, Homo sapien
tgtgcctaagtatctgcccactttg

SEQ ID NO: 4229498 - DNA, 25 bp, Homo sapien
cccaggctgccaagaaaataagtaa

SEQ ID NO: 4229499 - DNA, 25 bp, Homo sapien
cacaggattaactacgaaaggagga

SEQ ID NO: 4229500 - DNA, 25 bp, Homo sapien
tgaacagacagcatggaactaccag

SEQ ID NO: 4229501 - DNA, 25 bp, Homo sapien
taggctatacctcttaaagggagga

SEQ ID NO: 4229502 - DNA, 25 bp, Homo sapien
tagtttcccgggcatatttcaacaa

SEQ ID NO: 4229503 - DNA, 25 bp, Homo sapien
gacatgccttaaaatcactaccaca

SEQ ID NO: 4229504 - DNA, 25 bp, Homo sapien
tataaaataggcagtcagcctgtgg

SEQ ID NO: 4229505 - DNA, 25 bp, Homo sapien
aacaacgaagaattcctacacatgc

SEQ ID NO: 4229506 - DNA, 25 bp, Homo sapien
ttaggattccgcacagacttcgctg

SEQ ID NO: 4229507 - DNA, 25 bp, Homo sapien
cagagtaggcccagccaataggctt

SEQ ID NO: 4229508 - DNA, 25 bp, Homo sapien
gcaaaggagcccaaaggcttgctga

SEQ ID NO: 4229509 - DNA, 25 bp, Homo sapien
tagaacctgctctgtcttgcgggcc

SEQ ID NO: 4229510 - DNA, 25 bp, Homo sapien
cacggtgtcgccctcaataatatca

SEQ ID NO: 4229511 - DNA, 25 bp, Homo sapien
gaacaactgggtacatgctgcagac

SEQ ID NO: 4229512 - DNA, 25 bp, Homo sapien
ccaagcaggcatccgaggtaacgtg

SEQ ID NO: 4229513 - DNA, 25 bp, Homo sapien
ctgccctctgacaggattcagtatg

SEQ ID NO: 4229514 - DNA, 25 bp, Homo sapien
tgacaggattcagtatgtgttgttc

SEQ ID NO: 4229515 - DNA, 25 bp, Homo sapien
cctctgacaggattcagtatgtgtt

SEQ ID NO: 4229516 - DNA, 25 bp, Homo sapien
cctgccctctgacaggattcagtat

SEQ ID NO: 4229517 - DNA, 25 bp, Homo sapien
tttgcttgattgctcaggctaggac

SEQ ID NO: 4229518 - DNA, 25 bp, Homo sapien
gggaagccaacttgtgcagagatca

SEQ ID NO: 4229519 - DNA, 25 bp, Homo sapien
tgagaactcactgatccgaaaggaa

SEQ ID NO: 4229520 - DNA, 25 bp, Homo sapien
ggtgatcatatggtgtcttagtcca

SEQ ID NO: 4229521 - DNA, 25 bp, Homo sapien
caagacagaaaggttgccagttccc

SEQ ID NO: 4229522 - DNA, 25 bp, Homo sapien
tcttactggcatatgggcaggctcc

SEQ ID NO: 4229523 - DNA, 25 bp, Homo sapien
ggcattagggctactggctcacaga

SEQ ID NO: 4229524 - DNA, 25 bp, Homo sapien
gggtgaccctaaagcttccagcaag

SEQ ID NO: 4229525 - DNA, 25 bp, Homo sapien
catatgcaaagaccatgcgccggaa

SEQ ID NO: 4229526 - DNA, 25 bp, Homo sapien
catcgcagagtcctaaagaagaacc

SEQ ID NO: 4229527 - DNA, 25 bp, Homo sapien
catgttgaagctaaacccatatgca

SEQ ID NO: 4229528 - DNA, 25 bp, Homo sapien
ggaacaccattcttcgccaggccag

SEQ ID NO: 4229529 - DNA, 25 bp, Homo sapien
tgtatggcacttggcgtaaagccgc

SEQ ID NO: 4229530 - DNA, 25 bp, Homo sapien
tgtgggacgtttctgcatttggact

SEQ ID NO: 4229531 - DNA, 25 bp, Homo sapien
tgaaagtgctttccggaagttagat

SEQ ID NO: 4229532 - DNA, 25 bp, Homo sapien
gaagaccaaggaagctgttttgctc

SEQ ID NO: 4229533 - DNA, 25 bp, Homo sapien
cgtgtgctcgcccaatgatatcggt

SEQ ID NO: 4229534 - DNA, 25 bp, Homo sapien
tcgtggaggccgaaggtttgcacca

SEQ ID NO: 4229535 - DNA, 25 bp, Homo sapien
aaacctggcgccgttggcatcgtag

SEQ ID NO: 4229536 - DNA, 25 bp, Homo sapien
tggcagagctatggctcgaattccc

SEQ ID NO: 4229537 - DNA, 25 bp, Homo sapien
cagagttctgacttaagagagggct

SEQ ID NO: 4229538 - DNA, 25 bp, Homo sapien
cgtgccatgagtataaccaaagtcc

SEQ ID NO: 4229539 - DNA, 25 bp, Homo sapien
gatgacactcagaagatttttggga

SEQ ID NO: 4229540 - DNA, 25 bp, Homo sapien
taaccaaagtcctgagatgacactc

SEQ ID NO: 4229541 - DNA, 25 bp, Homo sapien
accgtgttgctgttcccctgagaca

SEQ ID NO: 4229542 - DNA, 25 bp, Homo sapien
tggaatcctcacttacgctcgtcaa

SEQ ID NO: 4229543 - DNA, 25 bp, Homo sapien
tgtgcacgctctcgattagctctgt

SEQ ID NO: 4229544 - DNA, 25 bp, Homo sapien
gacaccgccgtctctgattcatcgt

SEQ ID NO: 4229545 - DNA, 25 bp, Homo sapien
taagcatccaaatagtccttcaaga

SEQ ID NO: 4229546 - DNA, 25 bp, Homo sapien
cccaatgatattccatacaggcctt

SEQ ID NO: 4229547 - DNA, 25 bp, Homo sapien
gctgctgcaatttgtaatcagtgga

SEQ ID NO: 4229548 - DNA, 25 bp, Homo sapien
taatcagtggaatatgccttcccaa

SEQ ID NO: 4229549 - DNA, 25 bp, Homo sapien
tcctcaaaatgtaagctttctatgc

SEQ ID NO: 4229550 - DNA, 25 bp, Homo sapien
tgcttctcaagattggttagatatt

SEQ ID NO: 4229551 - DNA, 25 bp, Homo sapien
aatctaagccctacaatcttcaggg

SEQ ID NO: 4229552 - DNA, 25 bp, Homo sapien
aaagctgtgtgatctagaaataata

SEQ ID NO: 4229553 - DNA, 25 bp, Homo sapien
gcctgctgaactgtgggtccattaa

SEQ ID NO: 4229554 - DNA, 25 bp, Homo sapien
tcttgaggtttcctagccatgcttc

SEQ ID NO: 4229555 - DNA, 25 bp, Homo sapien
tgtgaacatggattaatacagtatg

SEQ ID NO: 4229556 - DNA, 25 bp, Homo sapien
acacatacacaaatagactaaccta

SEQ ID NO: 4229557 - DNA, 25 bp, Homo sapien
tatcaaagagctaagagccccacgg

SEQ ID NO: 4229558 - DNA, 25 bp, Homo sapien
ttgcaccagaaatttaagaagggtc

SEQ ID NO: 4229559 - DNA, 25 bp, Homo sapien
aaaaatgatgccagtgtgaaaggtc

SEQ ID NO: 4229560 - DNA, 25 bp, Homo sapien
gattctcctcagatcactcaaaagc

SEQ ID NO: 4229561 - DNA, 25 bp, Homo sapien
aacttcctcaaatgcttgatatccg

SEQ ID NO: 4229562 - DNA, 25 bp, Homo sapien
tgagatctcctcaaatggcacttcc

SEQ ID NO: 4229563 - DNA, 25 bp, Homo sapien
ggaacttgcccaagaagaccgctcc

SEQ ID NO: 4229564 - DNA, 25 bp, Homo sapien
tgatgttagggtgcttcaacttcct

SEQ ID NO: 4229565 - DNA, 25 bp, Homo sapien
cattaggaacagtcaggttgagttt

SEQ ID NO: 4229566 - DNA, 25 bp, Homo sapien
attccattaggaacagtcaggttga

SEQ ID NO: 4229567 - DNA, 25 bp, Homo sapien
attaggaacagtcaggttgagtttt

SEQ ID NO: 4229568 - DNA, 25 bp, Homo sapien
cagctctataatcacttctaattgc

SEQ ID NO: 4229569 - DNA, 25 bp, Homo sapien
ttagtagctataaataacagctcta

SEQ ID NO: 4229570 - DNA, 25 bp, Homo sapien
gctataaataacagctctataatca

SEQ ID NO: 4229571 - DNA, 25 bp, Homo sapien
gctctataatcacttctaattgcta

SEQ ID NO: 4229572 - DNA, 25 bp, Homo sapien
tgagtgggaacacccagtcatgctt

SEQ ID NO: 4229573 - DNA, 25 bp, Homo sapien
cagacaggtaatgtggtgacgtcgt

SEQ ID NO: 4229574 - DNA, 25 bp, Homo sapien
aggcacatctcacccgtgagtggga

SEQ ID NO: 4229575 - DNA, 25 bp, Homo sapien
caggtaatgtggtgacgtcgtaaca

SEQ ID NO: 4229576 - DNA, 25 bp, Homo sapien
caatcgaggtgtgatcttcctgcca

SEQ ID NO: 4229577 - DNA, 25 bp, Homo sapien
acctcgtagagttgtccatgggcac

SEQ ID NO: 4229578 - DNA, 25 bp, Homo sapien
tggaccagtctactagcaatcgagg

SEQ ID NO: 4229579 - DNA, 25 bp, Homo sapien
ctgccagctcgtaagacctcgtaga

SEQ ID NO: 4229580 - DNA, 25 bp, Homo sapien
gctgaaacattagccccagaactca

SEQ ID NO: 4229581 - DNA, 25 bp, Homo sapien
ctgaaacattagccccagaactcac

SEQ ID NO: 4229582 - DNA, 25 bp, Homo sapien
tagctgaaacattagccccagaact

SEQ ID NO: 4229583 - DNA, 25 bp, Homo sapien
aatagctgaaacattagccccagaa

SEQ ID NO: 4229584 - DNA, 25 bp, Homo sapien
aatttttaccgcatctgtgtgggtc

SEQ ID NO: 4229585 - DNA, 25 bp, Homo sapien
cactgagttccttagatgtaccaaa

SEQ ID NO: 4229586 - DNA, 25 bp, Homo sapien
ggttcattccgtatcacctctggcg

SEQ ID NO: 4229587 - DNA, 25 bp, Homo sapien
atccatgcgaccgtgccagcaaatg

SEQ ID NO: 4229588 - DNA, 25 bp, Homo sapien
aatccatcagggcaagtggaaggaa

SEQ ID NO: 4229589 - DNA, 25 bp, Homo sapien
tccatcagggcaagtggaaggaact

SEQ ID NO: 4229590 - DNA, 25 bp, Homo sapien
acatctttgtaagggatctctcctg

SEQ ID NO: 4229591 - DNA, 25 bp, Homo sapien
ggctgaagaatctacatctttgtaa

SEQ ID NO: 4229592 - DNA, 25 bp, Homo sapien
gacagtttgtgcatttcagaagttg

SEQ ID NO: 4229593 - DNA, 25 bp, Homo sapien
tatctgagtaaaaccagctgtactc

SEQ ID NO: 4229594 - DNA, 25 bp, Homo sapien
caaaatggctatatctgagtaaaac

SEQ ID NO: 4229595 - DNA, 25 bp, Homo sapien
cattatatcaggatagcataactga

SEQ ID NO: 4229596 - DNA, 25 bp, Homo sapien
ggcaatgtctaaatgcatgagtgtc

SEQ ID NO: 4229597 - DNA, 25 bp, Homo sapien
agtgtctgccgaaaagaaggtcggt

SEQ ID NO: 4229598 - DNA, 25 bp, Homo sapien
tgtctaaatgcatgagtgtctgccg

SEQ ID NO: 4229599 - DNA, 25 bp, Homo sapien
ttgtggggtggcaagtacatctgca

SEQ ID NO: 4229600 - DNA, 25 bp, Homo sapien
cacaatgaatggagttatataacta

SEQ ID NO: 4229601 - DNA, 25 bp, Homo sapien
gagagttctctatctgtttagtagc

SEQ ID NO: 4229602 - DNA, 25 bp, Homo sapien
gtagcacctggtaggaagtttccca

SEQ ID NO: 4229603 - DNA, 25 bp, Homo sapien
caatgggcccttctaagagttactc

SEQ ID NO: 4229604 - DNA, 25 bp, Homo sapien
catgatctcggctgaacactacctc

SEQ ID NO: 4229605 - DNA, 25 bp, Homo sapien
tgatctcggctgaacactacctccg

SEQ ID NO: 4229606 - DNA, 25 bp, Homo sapien
aaagtgcacccggccaacacgtgtt

SEQ ID NO: 4229607 - DNA, 25 bp, Homo sapien
agtgcacccggccaacacgtgtttt

SEQ ID NO: 4229608 - DNA, 25 bp, Homo sapien
tatgtatcatatatatatctcatat

SEQ ID NO: 4229609 - DNA, 25 bp, Homo sapien
tatatctcatatatatgtatcatat

SEQ ID NO: 4229610 - DNA, 25 bp, Homo sapien
tatatatctcatatatgtatcatat

SEQ ID NO: 4229611 - DNA, 25 bp, Homo sapien
tgatatatatctcatatatgtatca

SEQ ID NO: 4229612 - DNA, 25 bp, Homo sapien
gaaatcggttgctttgttcatctgc

SEQ ID NO: 4229613 - DNA, 25 bp, Homo sapien
gattgtctagcaatgaagctatagc

SEQ ID NO: 4229614 - DNA, 25 bp, Homo sapien
gtaattgcctatttggagaaatggg

SEQ ID NO: 4229615 - DNA, 25 bp, Homo sapien
tcatctgctccatataggctacatc

SEQ ID NO: 4229616 - DNA, 25 bp, Homo sapien
gtgtctccgcaactcccagtccctg

SEQ ID NO: 4229617 - DNA, 25 bp, Homo sapien
ccctgcatttctgggcggtcacaat

SEQ ID NO: 4229618 - DNA, 25 bp, Homo sapien
ggtcacaatggcactcaagagaaca

SEQ ID NO: 4229619 - DNA, 25 bp, Homo sapien
catttctgggcggtcacaatggcac

SEQ ID NO: 4229620 - DNA, 25 bp, Homo sapien
tccttcacttttgatcttctcaaaa

SEQ ID NO: 4229621 - DNA, 25 bp, Homo sapien
tgagctcttctctgcgccttcgaat

SEQ ID NO: 4229622 - DNA, 25 bp, Homo sapien
taaccggtgtatacaagttccttca

SEQ ID NO: 4229623 - DNA, 25 bp, Homo sapien
cagttcttcatctaaccggtgtata

SEQ ID NO: 4229624 - DNA, 25 bp, Homo sapien
gcatgatggcactcaattccatgta

SEQ ID NO: 4229625 - DNA, 25 bp, Homo sapien
ccgcatttctagctgcagcatgatg

SEQ ID NO: 4229626 - DNA, 25 bp, Homo sapien
gtgttcacgaatatccagcgcatgc

SEQ ID NO: 4229627 - DNA, 25 bp, Homo sapien
tgtataaattattcgcccgctcaag

SEQ ID NO: 4229628 - DNA, 25 bp, Homo sapien
ccagatttgtgaggcactcctttcc

SEQ ID NO: 4229629 - DNA, 25 bp, Homo sapien
tgataggacgaacagggtgtcgttt

SEQ ID NO: 4229630 - DNA, 25 bp, Homo sapien
tcgtttgtaggtcccaggatacttc

SEQ ID NO: 4229631 - DNA, 25 bp, Homo sapien
cattgggatggatgataggacgaac

SEQ ID NO: 4229632 - DNA, 25 bp, Homo sapien
gggtcataagcgtcagcctggcaac

SEQ ID NO: 4229633 - DNA, 25 bp, Homo sapien
gacttggaaaggtcagggctcctcc

SEQ ID NO: 4229634 - DNA, 25 bp, Homo sapien
tggacattttgggacttccggacaa

SEQ ID NO: 4229635 - DNA, 25 bp, Homo sapien
tgctgctgggccgaaatacctcagg

SEQ ID NO: 4229636 - DNA, 25 bp, Homo sapien
tctgtcttcgtggaaattcaacttc

SEQ ID NO: 4229637 - DNA, 25 bp, Homo sapien
tgtcttcgtggaaattcaacttcac

SEQ ID NO: 4229638 - DNA, 25 bp, Homo sapien
ctctgtcttcgtggaaattcaactt

SEQ ID NO: 4229639 - DNA, 25 bp, Homo sapien
gtcttcgtggaaattcaacttcact

SEQ ID NO: 4229640 - DNA, 25 bp, Homo sapien
aatgggaatctctggcgtctgggac

SEQ ID NO: 4229641 - DNA, 25 bp, Homo sapien
gcacggcacactccttgtcagagag

SEQ ID NO: 4229642 - DNA, 25 bp, Homo sapien
cagagagcccatccgagtgtgagga

SEQ ID NO: 4229643 - DNA, 25 bp, Homo sapien
taaaggttgaatatgactggcagct

SEQ ID NO: 4229644 - DNA, 25 bp, Homo sapien
gtttattggtcctaactgtggcatc

SEQ ID NO: 4229645 - DNA, 25 bp, Homo sapien
agtccgattcttcaaactgcatggg

SEQ ID NO: 4229646 - DNA, 25 bp, Homo sapien
tgaagagtcacagtccgattcttca

SEQ ID NO: 4229647 - DNA, 25 bp, Homo sapien
taactgtggcatcagaacactcccc

SEQ ID NO: 4229648 - DNA, 25 bp, Homo sapien
agagatttgcgaagtctcatgttcc

SEQ ID NO: 4229649 - DNA, 25 bp, Homo sapien
tatatagttcactctttgcagtaca

SEQ ID NO: 4229650 - DNA, 25 bp, Homo sapien
tcaataaaatagatccctgccattc

SEQ ID NO: 4229651 - DNA, 25 bp, Homo sapien
gatctgaaatgccagtatagtcacg

SEQ ID NO: 4229652 - DNA, 25 bp, Homo sapien
agacctggtcccctgttcaagcagc

SEQ ID NO: 4229653 - DNA, 25 bp, Homo sapien
ccaaggatgttgctcttaaattcca

SEQ ID NO: 4229654 - DNA, 25 bp, Homo sapien
tcaagcagcaataatacctcccggc

SEQ ID NO: 4229655 - DNA, 25 bp, Homo sapien
tcccaaggatgttgctcttaaattc

SEQ ID NO: 4229656 - DNA, 25 bp, Homo sapien
gtcatttccgtaagccacctggaca

SEQ ID NO: 4229657 - DNA, 25 bp, Homo sapien
gaggaagcacatgcccttgaagaca

SEQ ID NO: 4229658 - DNA, 25 bp, Homo sapien
cacctggacaagctggttgaagtga

SEQ ID NO: 4229659 - DNA, 25 bp, Homo sapien
gtaaacctcactaccaactgctgct

SEQ ID NO: 4229660 - DNA, 25 bp, Homo sapien
tttgttcctacaggaagtggtcagc

SEQ ID NO: 4229661 - DNA, 25 bp, Homo sapien
tcctcgtagctgaactgagtgatcc

SEQ ID NO: 4229662 - DNA, 25 bp, Homo sapien
gacacacatacatcctagctgcctt

SEQ ID NO: 4229663 - DNA, 25 bp, Homo sapien
caaagtctgttctcctgcttgaatc

SEQ ID NO: 4229664 - DNA, 25 bp, Homo sapien
gtaaaacccagaggagcggcaacat

SEQ ID NO: 4229665 - DNA, 25 bp, Homo sapien
cagggacaggtactaggtcaacacc

SEQ ID NO: 4229666 - DNA, 25 bp, Homo sapien
ggcagaacatgcgtcctcagatgat

SEQ ID NO: 4229667 - DNA, 25 bp, Homo sapien
tcctaacgtccaacatgatgcagtg

SEQ ID NO: 4229668 - DNA, 25 bp, Homo sapien
tcctctcaggacattaaatcattct

SEQ ID NO: 4229669 - DNA, 25 bp, Homo sapien
aaacgaatccatgagccctgtgcgg

SEQ ID NO: 4229670 - DNA, 25 bp, Homo sapien
gcaggaaggagattgcaaactatgt

SEQ ID NO: 4229671 - DNA, 25 bp, Homo sapien
tgtgcggaaaccctctaggtctgtt

SEQ ID NO: 4229672 - DNA, 25 bp, Homo sapien
ttttttagtctccctgctactctcc

SEQ ID NO: 4229673 - DNA, 25 bp, Homo sapien
gacgctaacggaacatggacattca

SEQ ID NO: 4229674 - DNA, 25 bp, Homo sapien
tctctgttgccactaaaggtgggca

SEQ ID NO: 4229675 - DNA, 25 bp, Homo sapien
gaggttcctggaagcactgttgtaa

SEQ ID NO: 4229676 - DNA, 25 bp, Homo sapien
caagtagctagatgaagacgccagt

SEQ ID NO: 4229677 - DNA, 25 bp, Homo sapien
gcgagcctgtcgttctgccattggg

SEQ ID NO: 4229678 - DNA, 25 bp, Homo sapien
cacaggtggacactagtgcgagcct

SEQ ID NO: 4229679 - DNA, 25 bp, Homo sapien
tcaagcggcaattgttgctccaagt

SEQ ID NO: 4229680 - DNA, 25 bp, Homo sapien
aaatggcaattccaatcaagcggca

SEQ ID NO: 4229681 - DNA, 25 bp, Homo sapien
gagaaattcattcgctccaagtcga

SEQ ID NO: 4229682 - DNA, 25 bp, Homo sapien
gatgctgccgggagcttccttacag

SEQ ID NO: 4229683 - DNA, 25 bp, Homo sapien
tgtaataaagcgtcaaagagggtct

SEQ ID NO: 4229684 - DNA, 25 bp, Homo sapien
gactgacagtacaggagaccagagg

SEQ ID NO: 4229685 - DNA, 25 bp, Homo sapien
cattcttgttcccattgccgttcaa

SEQ ID NO: 4229686 - DNA, 25 bp, Homo sapien
agagggagccggcatcagaaaacaa

SEQ ID NO: 4229687 - DNA, 25 bp, Homo sapien
agggagccggcatcagaaaacaaca

SEQ ID NO: 4229688 - DNA, 25 bp, Homo sapien
cattgccgttcaatacagagaggga

SEQ ID NO: 4229689 - DNA, 25 bp, Homo sapien
gaattactcacgttccataggaaga

SEQ ID NO: 4229690 - DNA, 25 bp, Homo sapien
catcaggacttaccagactgctgct

SEQ ID NO: 4229691 - DNA, 25 bp, Homo sapien
ggaccttggcacctaaactgaccag

SEQ ID NO: 4229692 - DNA, 25 bp, Homo sapien
tatggtatgatcctttcacaccgag

SEQ ID NO: 4229693 - DNA, 25 bp, Homo sapien
ggagcaaacgctgtatgtcatggat

SEQ ID NO: 4229694 - DNA, 25 bp, Homo sapien
tccttatgatcgcatgtcctgacag

SEQ ID NO: 4229695 - DNA, 25 bp, Homo sapien
tgcaggaatccgttctgtgtcatgc

SEQ ID NO: 4229696 - DNA, 25 bp, Homo sapien
ctaggacttccacgtgttgctcaca

SEQ ID NO: 4229697 - DNA, 25 bp, Homo sapien
gaaaggtgctccctatttggcccaa

SEQ ID NO: 4229698 - DNA, 25 bp, Homo sapien
gaatagttaacctagccagtcacca

SEQ ID NO: 4229699 - DNA, 25 bp, Homo sapien
tatctggtgaccacactgtatcagg

SEQ ID NO: 4229700 - DNA, 25 bp, Homo sapien
caatgtcgggaaagtaactgcaacc

SEQ ID NO: 4229701 - DNA, 25 bp, Homo sapien
gagttcctactttagaccgggcatg

SEQ ID NO: 4229702 - DNA, 25 bp, Homo sapien
tgactaacacgatgaaatgctggct

SEQ ID NO: 4229703 - DNA, 25 bp, Homo sapien
tctgctgtttgcgaggtgtgtgacc

SEQ ID NO: 4229704 - DNA, 25 bp, Homo sapien
caaaagggtagtgcatggtaagaca

SEQ ID NO: 4229705 - DNA, 25 bp, Homo sapien
ggcctgtgctgtaaatgagtggcct

SEQ ID NO: 4229706 - DNA, 25 bp, Homo sapien
aggactgcagttgacagaggattgc

SEQ ID NO: 4229707 - DNA, 25 bp, Homo sapien
cctgggaaaggactgcagttgacag

SEQ ID NO: 4229708 - DNA, 25 bp, Homo sapien
tgctgtaaatgagtggcctcgatgg

SEQ ID NO: 4229709 - DNA, 25 bp, Homo sapien
tttattggtctgtgttttgatcagc

SEQ ID NO: 4229710 - DNA, 25 bp, Homo sapien
ctgtgttttgatcagcacagtcact

SEQ ID NO: 4229711 - DNA, 25 bp, Homo sapien
atcgtacccggcagccctggtttct

SEQ ID NO: 4229712 - DNA, 25 bp, Homo sapien
tgagccatcgtacccggcagccctg

SEQ ID NO: 4229713 - DNA, 25 bp, Homo sapien
acatgaaccggtttgcttttggaga

SEQ ID NO: 4229714 - DNA, 25 bp, Homo sapien
caaaacatgaaccggtttgcttttg

SEQ ID NO: 4229715 - DNA, 25 bp, Homo sapien
catgaaccggtttgcttttggagaa

SEQ ID NO: 4229716 - DNA, 25 bp, Homo sapien
aacatgaaccggtttgcttttggag

SEQ ID NO: 4229717 - DNA, 25 bp, Homo sapien
gacagtaacatccattgccaagcat

SEQ ID NO: 4229718 - DNA, 25 bp, Homo sapien
ttttggcatcaacggcatcaacgtg

SEQ ID NO: 4229719 - DNA, 25 bp, Homo sapien
caacgtgtaatgagcttgtatccca

SEQ ID NO: 4229720 - DNA, 25 bp, Homo sapien
tctaatacgaggaaggcaaagtttc

SEQ ID NO: 4229721 - DNA, 25 bp, Homo sapien
cattccacttccttcggtgaactta

SEQ ID NO: 4229722 - DNA, 25 bp, Homo sapien
aggaaaaagatataggaagcctgta

SEQ ID NO: 4229723 - DNA, 25 bp, Homo sapien
gatataggaagcctgtatcatttcc

SEQ ID NO: 4229724 - DNA, 25 bp, Homo sapien
ggaagcctgtatcatttccttaaca

SEQ ID NO: 4229725 - DNA, 25 bp, Homo sapien
tcaggtggagattcaccgaaaattg

SEQ ID NO: 4229726 - DNA, 25 bp, Homo sapien
gagattcaccgaaaattgatgagct

SEQ ID NO: 4229727 - DNA, 25 bp, Homo sapien
cctgataggagtcaggaatctctcc

SEQ ID NO: 4229728 - DNA, 25 bp, Homo sapien
tcacacgtaactttaaggcgatcat

SEQ ID NO: 4229729 - DNA, 25 bp, Homo sapien
gagataatgggccgtctaaccgcga

SEQ ID NO: 4229730 - DNA, 25 bp, Homo sapien
ggagataatgggccgtctaaccgcg

SEQ ID NO: 4229731 - DNA, 25 bp, Homo sapien
agataatgggccgtctaaccgcgat

SEQ ID NO: 4229732 - DNA, 25 bp, Homo sapien
gtggagataatgggccgtctaaccg

SEQ ID NO: 4229733 - DNA, 25 bp, Homo sapien
agagaggagcactgccccgcccccg

SEQ ID NO: 4229734 - DNA, 25 bp, Homo sapien
gagagaggagcactgccccgccccc

SEQ ID NO: 4229735 - DNA, 25 bp, Homo sapien
gaactgtcccttgggcggcctctag

SEQ ID NO: 4229736 - DNA, 25 bp, Homo sapien
ttatctaagaactgtcccttgggcg

SEQ ID NO: 4229737 - DNA, 25 bp, Homo sapien
gctccggtcgccttatccttactag

SEQ ID NO: 4229738 - DNA, 25 bp, Homo sapien
aacgcaggtcccttgaagggtggag

SEQ ID NO: 4229739 - DNA, 25 bp, Homo sapien
tttaatagcctgccacttgttgctg

SEQ ID NO: 4229740 - DNA, 25 bp, Homo sapien
ttttaatagcctgccacttgttgct

SEQ ID NO: 4229741 - DNA, 25 bp, Homo sapien
tttttaatagcctgccacttgttgc

SEQ ID NO: 4229742 - DNA, 25 bp, Homo sapien
gcaacgttggcatccctttatgaga

SEQ ID NO: 4229743 - DNA, 25 bp, Homo sapien
gagattgttcctcgcttaaaggtag

SEQ ID NO: 4229744 - DNA, 25 bp, Homo sapien
tggtggcatgaagtaaaaggctcag

SEQ ID NO: 4229745 - DNA, 25 bp, Homo sapien
tatcctgacagctggacgcaacgtt

SEQ ID NO: 4229746 - DNA, 25 bp, Homo sapien
cttgccacactatagctgctttttc

SEQ ID NO: 4229747 - DNA, 25 bp, Homo sapien
tgccacactatagctgctttttcca

SEQ ID NO: 4229748 - DNA, 25 bp, Homo sapien
gccacactatagctgctttttccat

SEQ ID NO: 4229749 - DNA, 25 bp, Homo sapien
ttgccacactatagctgctttttcc

SEQ ID NO: 4229750 - DNA, 25 bp, Homo sapien
gagtagcagctcgagtgttcccttc

SEQ ID NO: 4229751 - DNA, 25 bp, Homo sapien
gaggagctcttgcaccacaagaaac

SEQ ID NO: 4229752 - DNA, 25 bp, Homo sapien
tagtaatgcccttcacatgtgcaag

SEQ ID NO: 4229753 - DNA, 25 bp, Homo sapien
ccaggtagcccagaatagaatgaca

SEQ ID NO: 4229754 - DNA, 25 bp, Homo sapien
ggtaatgtcaggtgcttccgaatca

SEQ ID NO: 4229755 - DNA, 25 bp, Homo sapien
ccatcattatcagtttgttctccaa

SEQ ID NO: 4229756 - DNA, 25 bp, Homo sapien
ccatggctgcaagccgaatagatgc

SEQ ID NO: 4229757 - DNA, 25 bp, Homo sapien
aatgtcaggtgcttccgaatcatca

SEQ ID NO: 4229758 - DNA, 25 bp, Homo sapien
attagagaccttgataagattagtg

SEQ ID NO: 4229759 - DNA, 25 bp, Homo sapien
tgtctccacggcaaccactggatgg

SEQ ID NO: 4229760 - DNA, 25 bp, Homo sapien
cagaggcccttgacacggtgtaggc

SEQ ID NO: 4229761 - DNA, 25 bp, Homo sapien
tggagggactcctaagtctaatagc

SEQ ID NO: 4229762 - DNA, 25 bp, Homo sapien
cctaagtctaatagcctgatttgca

SEQ ID NO: 4229763 - DNA, 25 bp, Homo sapien
tagcagcgctttactggagggccat

SEQ ID NO: 4229764 - DNA, 25 bp, Homo sapien
tcccaaggccatatggagtaacaag

SEQ ID NO: 4229765 - DNA, 25 bp, Homo sapien
tccacagtagagacatgggtgactg

SEQ ID NO: 4229766 - DNA, 25 bp, Homo sapien
gtgactgtccatccactggccaagg

SEQ ID NO: 4229767 - DNA, 25 bp, Homo sapien
ttgtctgccagttggtgccttcgct

SEQ ID NO: 4229768 - DNA, 25 bp, Homo sapien
gacttgtctgccagttggtgccttc

SEQ ID NO: 4229769 - DNA, 25 bp, Homo sapien
gtctgccagttggtgccttcgctgt

SEQ ID NO: 4229770 - DNA, 25 bp, Homo sapien
ctgggacttgtctgccagttggtgc

SEQ ID NO: 4229771 - DNA, 25 bp, Homo sapien
caatccggagccggcccgtgggaca

SEQ ID NO: 4229772 - DNA, 25 bp, Homo sapien
ttctcttcggcggagccaatccgga

SEQ ID NO: 4229773 - DNA, 25 bp, Homo sapien
aggccacatgtgaggctgctccact

SEQ ID NO: 4229774 - DNA, 25 bp, Homo sapien
aagggctgtcggcagggttttctct

SEQ ID NO: 4229775 - DNA, 25 bp, Homo sapien
gcccacagatacagcgtccccaggg

SEQ ID NO: 4229776 - DNA, 25 bp, Homo sapien
gagttcggtcgctgatttgtgacgc

SEQ ID NO: 4229777 - DNA, 25 bp, Homo sapien
accaccgccagagttcggtcgctga

SEQ ID NO: 4229778 - DNA, 25 bp, Homo sapien
ttgtgacgcgattcaagagcccaca

SEQ ID NO: 4229779 - DNA, 25 bp, Homo sapien
gcggccgacacaccccgagacgcaa

SEQ ID NO: 4229780 - DNA, 25 bp, Homo sapien
gcagcggcggccgacacaccccgag

SEQ ID NO: 4229781 - DNA, 25 bp, Homo sapien
accccgagacgcaaaccccagagct

SEQ ID NO: 4229782 - DNA, 25 bp, Homo sapien
gagacgcaaaccccagagctgtcgc

SEQ ID NO: 4229783 - DNA, 25 bp, Homo sapien
cagggggcaccgaccggtcgcagaa

SEQ ID NO: 4229784 - DNA, 25 bp, Homo sapien
ggcaccgaccggtcgcagaaacgga

SEQ ID NO: 4229785 - DNA, 25 bp, Homo sapien
gcaccgaccggtcgcagaaacggaa

SEQ ID NO: 4229786 - DNA, 25 bp, Homo sapien
cgaccggtcgcagaaacggaaaatg

SEQ ID NO: 4229787 - DNA, 25 bp, Homo sapien
ctggtatttcatcagtgtccactgt

SEQ ID NO: 4229788 - DNA, 25 bp, Homo sapien
tatttcatcagtgtccactgtagaa

SEQ ID NO: 4229789 - DNA, 25 bp, Homo sapien
tttggctggtatttcatcagtgtcc

SEQ ID NO: 4229790 - DNA, 25 bp, Homo sapien
tggtcttttggctggtatttcatca

SEQ ID NO: 4229791 - DNA, 25 bp, Homo sapien
tgcatatatttttcctatttaaaaa

SEQ ID NO: 4229792 - DNA, 25 bp, Homo sapien
cttttgaattttgttccatgcatat

SEQ ID NO: 4229793 - DNA, 25 bp, Homo sapien
ttgaattttgttccatgcatatatt

SEQ ID NO: 4229794 - DNA, 25 bp, Homo sapien
ttttgaattttgttccatgcatata

SEQ ID NO: 4229795 - DNA, 25 bp, Homo sapien
ctgcaaggattagacaagtccctgg

SEQ ID NO: 4229796 - DNA, 25 bp, Homo sapien
catctggaggtagacccaaatttat

SEQ ID NO: 4229797 - DNA, 25 bp, Homo sapien
cacagtgatacccttgcctcttaca

SEQ ID NO: 4229798 - DNA, 25 bp, Homo sapien
aacacattggttagcactgagacat

SEQ ID NO: 4229799 - DNA, 25 bp, Homo sapien
taagtactcactgaatttaaacgaa

SEQ ID NO: 4229800 - DNA, 25 bp, Homo sapien
gggccacattccgtgttccattaca

SEQ ID NO: 4229801 - DNA, 25 bp, Homo sapien
ttgtagagactgtttttcacttggt

SEQ ID NO: 4229802 - DNA, 25 bp, Homo sapien
ctttgtggtcagctggaatgggaat

SEQ ID NO: 4229803 - DNA, 25 bp, Homo sapien
attacaagcagaagttaccatgggc

SEQ ID NO: 4229804 - DNA, 25 bp, Homo sapien
gagataccatcaataagacctaagg

SEQ ID NO: 4229805 - DNA, 25 bp, Homo sapien
tagcatctaaattttgtcacctaaa

SEQ ID NO: 4229806 - DNA, 25 bp, Homo sapien
tgtacatccttaaataagaaagcat

SEQ ID NO: 4229807 - DNA, 25 bp, Homo sapien
ttaggtagctcacagaagagatacc

SEQ ID NO: 4229808 - DNA, 25 bp, Homo sapien
ttcacaagatgaagagttcgaaaat

SEQ ID NO: 4229809 - DNA, 25 bp, Homo sapien
agttcacaagatgaagagttcgaaa

SEQ ID NO: 4229810 - DNA, 25 bp, Homo sapien
ctgtcagttcacaagatgaagagtt

SEQ ID NO: 4229811 - DNA, 25 bp, Homo sapien
cacaagatgaagagttcgaaaatac

SEQ ID NO: 4229812 - DNA, 25 bp, Homo sapien
gaacggtagaaagaatgtctttctc

SEQ ID NO: 4229813 - DNA, 25 bp, Homo sapien
gcagaaggaggtagcgggaaacaga

SEQ ID NO: 4229814 - DNA, 25 bp, Homo sapien
tagaacggtagaaagaatgtctttc

SEQ ID NO: 4229815 - DNA, 25 bp, Homo sapien
aggaggtagcgggaaacagaaatat

SEQ ID NO: 4229816 - DNA, 25 bp, Homo sapien
gtttttaggaactagcttctcagac

SEQ ID NO: 4229817 - DNA, 25 bp, Homo sapien
cagacacaggggtatgtatttattc

SEQ ID NO: 4229818 - DNA, 25 bp, Homo sapien
agctggagccgagatcgccctattg

SEQ ID NO: 4229819 - DNA, 25 bp, Homo sapien
tcttctctactcctagaggtacttt

SEQ ID NO: 4229820 - DNA, 25 bp, Homo sapien
tcactctgatctttggatagtcact

SEQ ID NO: 4229821 - DNA, 25 bp, Homo sapien
gatagtcacttattccattaggaga

SEQ ID NO: 4229822 - DNA, 25 bp, Homo sapien
aaggcaggactctgcgtggctgatc

SEQ ID NO: 4229823 - DNA, 25 bp, Homo sapien
gatctcgggtaactgtcactctgat

SEQ ID NO: 4229824 - DNA, 25 bp, Homo sapien
taagcagtgcttacagggaaacagc

SEQ ID NO: 4229825 - DNA, 25 bp, Homo sapien
tgtcccatctaaaatctaatccagg

SEQ ID NO: 4229826 - DNA, 25 bp, Homo sapien
tgtggacaatgcacctaagcagtgc

SEQ ID NO: 4229827 - DNA, 25 bp, Homo sapien
taagttcacccctgactaactgtgt

SEQ ID NO: 4229828 - DNA, 25 bp, Homo sapien
gtttccacattaaagaactctctgg

SEQ ID NO: 4229829 - DNA, 25 bp, Homo sapien
tggtcttctattacagccttctgag

SEQ ID NO: 4229830 - DNA, 25 bp, Homo sapien
tctgttacagcctgttcctgaggtt

SEQ ID NO: 4229831 - DNA, 25 bp, Homo sapien
tctggattacctttgctatggcgac

SEQ ID NO: 4229832 - DNA, 25 bp, Homo sapien
caatggggacgcctcagacccttgc

SEQ ID NO: 4229833 - DNA, 25 bp, Homo sapien
aatggggacgcctcagacccttgcc

SEQ ID NO: 4229834 - DNA, 25 bp, Homo sapien
tgggtttaagacagcctcattttgt

SEQ ID NO: 4229835 - DNA, 25 bp, Homo sapien
taggccttgctaatgtgatctggac

SEQ ID NO: 4229836 - DNA, 25 bp, Homo sapien
actgagcacacgtggccgctatagg

SEQ ID NO: 4229837 - DNA, 25 bp, Homo sapien
tacaatggtatgtcaaacgttgaac

SEQ ID NO: 4229838 - DNA, 25 bp, Homo sapien
tccaataactttcggtacttctctc

SEQ ID NO: 4229839 - DNA, 25 bp, Homo sapien
ttctctctttcctctttttgaacac

SEQ ID NO: 4229840 - DNA, 25 bp, Homo sapien
caataactttcggtacttctctctt

SEQ ID NO: 4229841 - DNA, 25 bp, Homo sapien
tctctctttcctctttttgaacacc

SEQ ID NO: 4229842 - DNA, 25 bp, Homo sapien
gataatttgaagttacaggacagac

SEQ ID NO: 4229843 - DNA, 25 bp, Homo sapien
tgataatttgaagttacaggacaga

SEQ ID NO: 4229844 - DNA, 25 bp, Homo sapien
taatttgaagttacaggacagacag

SEQ ID NO: 4229845 - DNA, 25 bp, Homo sapien
ataatttgaagttacaggacagaca

SEQ ID NO: 4229846 - DNA, 25 bp, Homo sapien
tgttttgactccgtgattttgctct

SEQ ID NO: 4229847 - DNA, 25 bp, Homo sapien
agttgttttgactccgtgattttgc

SEQ ID NO: 4229848 - DNA, 25 bp, Homo sapien
tgactccgtgattttgctcttcccc

SEQ ID NO: 4229849 - DNA, 25 bp, Homo sapien
aaactgagttgttttgactccgtga

SEQ ID NO: 4229850 - DNA, 25 bp, Homo sapien
tctggtaagctgtcatttagtggac

SEQ ID NO: 4229851 - DNA, 25 bp, Homo sapien
tagcagcttaggaataataatccag

SEQ ID NO: 4229852 - DNA, 25 bp, Homo sapien
aaatgctacagtgaattccaaagac

SEQ ID NO: 4229853 - DNA, 25 bp, Homo sapien
gaatttcagcttacagagtttccac

SEQ ID NO: 4229854 - DNA, 25 bp, Homo sapien
gaacatagaggtccccttgtttcaa

SEQ ID NO: 4229855 - DNA, 25 bp, Homo sapien
atagaggtccccttgtttcaacaag

SEQ ID NO: 4229856 - DNA, 25 bp, Homo sapien
cttctcaatgaacatagaggtcccc

SEQ ID NO: 4229857 - DNA, 25 bp, Homo sapien
ctcaatgaacatagaggtccccttg

SEQ ID NO: 4229858 - DNA, 25 bp, Homo sapien
ttcaaatctgattccgaccatcgtc

SEQ ID NO: 4229859 - DNA, 25 bp, Homo sapien
cgtctctgtatcagtaattttcccc

SEQ ID NO: 4229860 - DNA, 25 bp, Homo sapien
gattccgaccatcgtctctgtatca

SEQ ID NO: 4229861 - DNA, 25 bp, Homo sapien
aatctgattccgaccatcgtctctg

SEQ ID NO: 4229862 - DNA, 25 bp, Homo sapien
ggtatggaggcagattggtctctca

SEQ ID NO: 4229863 - DNA, 25 bp, Homo sapien
tggtctctcataaacaaaggtggct

SEQ ID NO: 4229864 - DNA, 25 bp, Homo sapien
cccaagtgagtagatttaccctatc

SEQ ID NO: 4229865 - DNA, 25 bp, Homo sapien
gcttttcatgggcaccaaaacataa

SEQ ID NO: 4229866 - DNA, 25 bp, Homo sapien
tttcctcctgagtaagccattgctt

SEQ ID NO: 4229867 - DNA, 25 bp, Homo sapien
tctgtaagttcaaggagatcgtccg

SEQ ID NO: 4229868 - DNA, 25 bp, Homo sapien
tcttctgataggtcaggctccagtt

SEQ ID NO: 4229869 - DNA, 25 bp, Homo sapien
cccaggcggagtcgggccgacactt

SEQ ID NO: 4229870 - DNA, 25 bp, Homo sapien
gtgatagttctttaatgtctgaata

SEQ ID NO: 4229871 - DNA, 25 bp, Homo sapien
caatttgaaagcactacttaggatt

SEQ ID NO: 4229872 - DNA, 25 bp, Homo sapien
aatgtctgaatatctcctcgagtaa

SEQ ID NO: 4229873 - DNA, 25 bp, Homo sapien
tggcctagggcattactgatttcct

SEQ ID NO: 4229874 - DNA, 25 bp, Homo sapien
cttccgatgaataggcaccagaata

SEQ ID NO: 4229875 - DNA, 25 bp, Homo sapien
catgaagtgctggatagccttgctt

SEQ ID NO: 4229876 - DNA, 25 bp, Homo sapien
catcgtttcactgcttggtaacccc

SEQ ID NO: 4229877 - DNA, 25 bp, Homo sapien
agagatttacccctttggtccatcg

SEQ ID NO: 4229878 - DNA, 25 bp, Homo sapien
caggtgcggcatctcacccatcatt

SEQ ID NO: 4229879 - DNA, 25 bp, Homo sapien
ggacttcgtcctgtagccttctaaa

SEQ ID NO: 4229880 - DNA, 25 bp, Homo sapien
gctcctcaagtacaaggacttcgtc

SEQ ID NO: 4229881 - DNA, 25 bp, Homo sapien
tgaggccaggcgttggataccaacc

SEQ ID NO: 4229882 - DNA, 25 bp, Homo sapien
aaaattagtggtcctctcagagtga

SEQ ID NO: 4229883 - DNA, 25 bp, Homo sapien
aaattagtggtcctctcagagtgat

SEQ ID NO: 4229884 - DNA, 25 bp, Homo sapien
aattagtggtcctctcagagtgatg

SEQ ID NO: 4229885 - DNA, 25 bp, Homo sapien
ctctcagagtgatgagacttttttt

SEQ ID NO: 4229886 - DNA, 25 bp, Homo sapien
cttttgtcccatagaatccagatat

SEQ ID NO: 4229887 - DNA, 25 bp, Homo sapien
agacacttttttcttaggtcaatca

SEQ ID NO: 4229888 - DNA, 25 bp, Homo sapien
gcccttttgtcccatagaatccaga

SEQ ID NO: 4229889 - DNA, 25 bp, Homo sapien
gacacttttttcttaggtcaatcac

SEQ ID NO: 4229890 - DNA, 25 bp, Homo sapien
tccactctaaaagattcagatcact

SEQ ID NO: 4229891 - DNA, 25 bp, Homo sapien
ctaaaagattcagatcactatttct

SEQ ID NO: 4229892 - DNA, 25 bp, Homo sapien
gctgtgatgggtccactctaaaaga

SEQ ID NO: 4229893 - DNA, 25 bp, Homo sapien
cactctaaaagattcagatcactat

SEQ ID NO: 4229894 - DNA, 25 bp, Homo sapien
aatgtgataggtttgtccctagaaa

SEQ ID NO: 4229895 - DNA, 25 bp, Homo sapien
tgataggtttgtccctagaaatata

SEQ ID NO: 4229896 - DNA, 25 bp, Homo sapien
gagtaaatgtgataggtttgtccct

SEQ ID NO: 4229897 - DNA, 25 bp, Homo sapien
ctgagtaaatgtgataggtttgtcc

SEQ ID NO: 4229898 - DNA, 25 bp, Homo sapien
cacgcctggccagctactactattg

SEQ ID NO: 4229899 - DNA, 25 bp, Homo sapien
cagctactactattgagagctgaat

SEQ ID NO: 4229900 - DNA, 25 bp, Homo sapien
caagtgccttatcttgcttagtaac

SEQ ID NO: 4229901 - DNA, 25 bp, Homo sapien
gtaaatggatgaagagggtcttcac

SEQ ID NO: 4229902 - DNA, 25 bp, Homo sapien
aaagccatggagaattaaacaaaag

SEQ ID NO: 4229903 - DNA, 25 bp, Homo sapien
cagttgtaaaaaggttgagaatcca

SEQ ID NO: 4229904 - DNA, 25 bp, Homo sapien
gaattcccaacatacttgagtttcc

SEQ ID NO: 4229905 - DNA, 25 bp, Homo sapien
taaaaaggttgagaatccactgtta

SEQ ID NO: 4229906 - DNA, 25 bp, Homo sapien
acaacgcccgcattacatattaatg

SEQ ID NO: 4229907 - DNA, 25 bp, Homo sapien
tgcatggcagcacaaccttcaggtg

SEQ ID NO: 4229908 - DNA, 25 bp, Homo sapien
acatattaatgtgcatggcagcaca

SEQ ID NO: 4229909 - DNA, 25 bp, Homo sapien
agaaccccataaacaacgcccgcat

SEQ ID NO: 4229910 - DNA, 25 bp, Homo sapien
tcccacaccatcttcttccggaaga

SEQ ID NO: 4229911 - DNA, 25 bp, Homo sapien
tcttccggaagagaggcatctggtg

SEQ ID NO: 4229912 - DNA, 25 bp, Homo sapien
agcaactgctgatgaaggatttccc

SEQ ID NO: 4229913 - DNA, 25 bp, Homo sapien
acagcaactgctgatgaaggatttc

SEQ ID NO: 4229914 - DNA, 25 bp, Homo sapien
tgaaaggcaacaggagccctatccc

SEQ ID NO: 4229915 - DNA, 25 bp, Homo sapien
gaggccttcatgcacttttgacagc

SEQ ID NO: 4229916 - DNA, 25 bp, Homo sapien
ggttgaacagtccaaagctctgagc

SEQ ID NO: 4229917 - DNA, 25 bp, Homo sapien
gacagctcagtacctgtgagaacag

SEQ ID NO: 4229918 - DNA, 25 bp, Homo sapien
cttggataatcagagtcccttgggc

SEQ ID NO: 4229919 - DNA, 25 bp, Homo sapien
gcactgtgccaacgctgtagtgtca

SEQ ID NO: 4229920 - DNA, 25 bp, Homo sapien
gaagtctctttaaggtgaccacaac

SEQ ID NO: 4229921 - DNA, 25 bp, Homo sapien
agttccactgttcacggcactgtgc

SEQ ID NO: 4229922 - DNA, 25 bp, Homo sapien
cagaaaagcaacactaggcactaga

SEQ ID NO: 4229923 - DNA, 25 bp, Homo sapien
tttgaaataaacagctcaggccagc

SEQ ID NO: 4229924 - DNA, 25 bp, Homo sapien
gatcttgcaaaatatgttctgacca

SEQ ID NO: 4229925 - DNA, 25 bp, Homo sapien
caggccagcccctacaattctgagg

SEQ ID NO: 4229926 - DNA, 25 bp, Homo sapien
gaagtatggcctgtggtctcccaca

SEQ ID NO: 4229927 - DNA, 25 bp, Homo sapien
ggaagacatccgctatcagacatgg

SEQ ID NO: 4229928 - DNA, 25 bp, Homo sapien
tcagggtcaagcagaaggccatgct

SEQ ID NO: 4229929 - DNA, 25 bp, Homo sapien
tgcaagttttaagagccgtccggaa

SEQ ID NO: 4229930 - DNA, 25 bp, Homo sapien
gaaatgcccatctgagaacctaaag

SEQ ID NO: 4229931 - DNA, 25 bp, Homo sapien
taaacatcatttgcctcgcggtcag

SEQ ID NO: 4229932 - DNA, 25 bp, Homo sapien
tcgcggtcaggtcacttagagcagt

SEQ ID NO: 4229933 - DNA, 25 bp, Homo sapien
ggtacacatattcattggcccacag

SEQ ID NO: 4229934 - DNA, 25 bp, Homo sapien
gagacgcaatcatcccatgctggaa

SEQ ID NO: 4229935 - DNA, 25 bp, Homo sapien
ctgttccattttgcctaagtcttga

SEQ ID NO: 4229936 - DNA, 25 bp, Homo sapien
taaatcccctcaaatgaactgaagg

SEQ ID NO: 4229937 - DNA, 25 bp, Homo sapien
gaactgaaggcctacacatgaaaaa

SEQ ID NO: 4229938 - DNA, 25 bp, Homo sapien
gtcacgccgccacgctccagcacag

SEQ ID NO: 4229939 - DNA, 25 bp, Homo sapien
agtgacctgaagtcacgccgccacg

SEQ ID NO: 4229940 - DNA, 25 bp, Homo sapien
tgcagtgacctgaagtcacgccgcc

SEQ ID NO: 4229941 - DNA, 25 bp, Homo sapien
gctgcagtgacctgaagtcacgccg

SEQ ID NO: 4229942 - DNA, 25 bp, Homo sapien
gaatctcgctgtcactggggatgga

SEQ ID NO: 4229943 - DNA, 25 bp, Homo sapien
gcatcccatacaggttaattttctg

SEQ ID NO: 4229944 - DNA, 25 bp, Homo sapien
gaagatgcatcccatacaggttaat

SEQ ID NO: 4229945 - DNA, 25 bp, Homo sapien
aacagaaattgaagatgcatcccat

SEQ ID NO: 4229946 - DNA, 25 bp, Homo sapien
aaattccccggatggtcactgtcaa

SEQ ID NO: 4229947 - DNA, 25 bp, Homo sapien
caaattccccggatggtcactgtca

SEQ ID NO: 4229948 - DNA, 25 bp, Homo sapien
cctgctggagactttttgacctact

SEQ ID NO: 4229949 - DNA, 25 bp, Homo sapien
actaccacgacgactaacaacactg

SEQ ID NO: 4229950 - DNA, 25 bp, Homo sapien
ttttgacctactaccacgacgacta

SEQ ID NO: 4229951 - DNA, 25 bp, Homo sapien
gagactttttgacctactaccacga

SEQ ID NO: 4229952 - DNA, 25 bp, Homo sapien
ccggcctagaacagcagatctttga

SEQ ID NO: 4229953 - DNA, 25 bp, Homo sapien
tctgacttgccctggtacaaagcac

SEQ ID NO: 4229954 - DNA, 25 bp, Homo sapien
cctgtattacaggtggcagaattcc

SEQ ID NO: 4229955 - DNA, 25 bp, Homo sapien
caaagcacccataaagtgtctgggc

SEQ ID NO: 4229956 - DNA, 25 bp, Homo sapien
ggtgtttttacctcagcaccttgct

SEQ ID NO: 4229957 - DNA, 25 bp, Homo sapien
cagaagaagctacctcaggtgtttt

SEQ ID NO: 4229958 - DNA, 25 bp, Homo sapien
cctctactgcaaacagtgttctgtg

SEQ ID NO: 4229959 - DNA, 25 bp, Homo sapien
ttggcccagggcgttaaattcacag

SEQ ID NO: 4229960 - DNA, 25 bp, Homo sapien
aaatctcgtcggaaggacactcacg

SEQ ID NO: 4229961 - DNA, 25 bp, Homo sapien
gtagagaggagctttgaggccaccc

SEQ ID NO: 4229962 - DNA, 25 bp, Homo sapien
tatgtcaacagaagggataccgtct

SEQ ID NO: 4229963 - DNA, 25 bp, Homo sapien
gaaactctgtcactcctcatgcctg

SEQ ID NO: 4229964 - DNA, 25 bp, Homo sapien
gcagactgcgtgcatttgaatttct

SEQ ID NO: 4229965 - DNA, 25 bp, Homo sapien
tctctctctcgaacaaatgaacttt

SEQ ID NO: 4229966 - DNA, 25 bp, Homo sapien
ggctgctaaccacttgtcatgttgt

SEQ ID NO: 4229967 - DNA, 25 bp, Homo sapien
caggtctgggattaataatagtacc

SEQ ID NO: 4229968 - DNA, 25 bp, Homo sapien
tcaaagtcgcaataacaagtggagt

SEQ ID NO: 4229969 - DNA, 25 bp, Homo sapien
tgtgccatgccttaagttttcctca

SEQ ID NO: 4229970 - DNA, 25 bp, Homo sapien
acaagtggagtatccctatattact

SEQ ID NO: 4229971 - DNA, 25 bp, Homo sapien
gctttacagagctgtttagatcaaa

SEQ ID NO: 4229972 - DNA, 25 bp, Homo sapien
ggatctggaaagggccttagacagt

SEQ ID NO: 4229973 - DNA, 25 bp, Homo sapien
ggccttagacagttatctagtggtg

SEQ ID NO: 4229974 - DNA, 25 bp, Homo sapien
ttagacagttatctagtggtgttgc

SEQ ID NO: 4229975 - DNA, 25 bp, Homo sapien
agacagttatctagtggtgttgcca

SEQ ID NO: 4229976 - DNA, 25 bp, Homo sapien
gcagagacataagaagagacctctg

SEQ ID NO: 4229977 - DNA, 25 bp, Homo sapien
ggacgtgagtctggtggccagccca

SEQ ID NO: 4229978 - DNA, 25 bp, Homo sapien
tgaaatgttaaccaggcatgacctg

SEQ ID NO: 4229979 - DNA, 25 bp, Homo sapien
caccatggccctgagtaaatacact

SEQ ID NO: 4229980 - DNA, 25 bp, Homo sapien
tcagggagcccaagacagctgaggg

SEQ ID NO: 4229981 - DNA, 25 bp, Homo sapien
ccagcgctgacagggttggcttcct

SEQ ID NO: 4229982 - DNA, 25 bp, Homo sapien
aacatgagctgaattgagaggccca

SEQ ID NO: 4229983 - DNA, 25 bp, Homo sapien
tgtggcctcccaataaatagaccgg

SEQ ID NO: 4229984 - DNA, 25 bp, Homo sapien
tgttcgttagtacagcccatgcaag

SEQ ID NO: 4229985 - DNA, 25 bp, Homo sapien
tattaatgtgcactcctgacaccgg

SEQ ID NO: 4229986 - DNA, 25 bp, Homo sapien
tagaaggcaatgctgtagtaaagcg

SEQ ID NO: 4229987 - DNA, 25 bp, Homo sapien
catctcccagttggctggtggagga

SEQ ID NO: 4229988 - DNA, 25 bp, Homo sapien
gcagtggcatatcctgatggtgatt

SEQ ID NO: 4229989 - DNA, 25 bp, Homo sapien
catcttatatctctctgcagtggca

SEQ ID NO: 4229990 - DNA, 25 bp, Homo sapien
tgggctttgaactcggaacctttga

SEQ ID NO: 4229991 - DNA, 25 bp, Homo sapien
tcaggaaagttaaagcaacttcgct

SEQ ID NO: 4229992 - DNA, 25 bp, Homo sapien
acttctgggctatatcgtctccacc

SEQ ID NO: 4229993 - DNA, 25 bp, Homo sapien
aagggtcattcagttaataagtagc

SEQ ID NO: 4229994 - DNA, 25 bp, Homo sapien
cagtcacaaactatcactgtcacca

SEQ ID NO: 4229995 - DNA, 25 bp, Homo sapien
tcagcagtcacaaactatcactgtc

SEQ ID NO: 4229996 - DNA, 25 bp, Homo sapien
ctaagaaaggcatgctatgatctgg

SEQ ID NO: 4229997 - DNA, 25 bp, Homo sapien
gctatgatctggtttcagcagtcac

SEQ ID NO: 4229998 - DNA, 25 bp, Homo sapien
catccttggcgatttgatgcggcct

SEQ ID NO: 4229999 - DNA, 25 bp, Homo sapien
tggcgatttgatgcggcctgtcagc

SEQ ID NO: 4230000 - DNA, 25 bp, Homo sapien
tccttggcgatttgatgcggcctgt

SEQ ID NO: 4230001 - DNA, 25 bp, Homo sapien
cacatccttggcgatttgatgcggc

SEQ ID NO: 4230002 - DNA, 25 bp, Homo sapien
ccttgctgttcttaacgatctccat

SEQ ID NO: 4230003 - DNA, 25 bp, Homo sapien
gggctctgcgtctcccttgctgttc

SEQ ID NO: 4230004 - DNA, 25 bp, Homo sapien
cagcaagggtctggcgccgtgggaa

SEQ ID NO: 4230005 - DNA, 25 bp, Homo sapien
gagagcgcctgatgaagggagcaag

SEQ ID NO: 4230006 - DNA, 25 bp, Homo sapien
tggaggagcggagagcgcctgatga

SEQ ID NO: 4230007 - DNA, 25 bp, Homo sapien
cacccgagtcaaggcgctgatgggc

SEQ ID NO: 4230008 - DNA, 25 bp, Homo sapien
caggatgaatgagacgtccaccatt

SEQ ID NO: 4230009 - DNA, 25 bp, Homo sapien
tgcctgcgtttgaatcctgctcctg

SEQ ID NO: 4230010 - DNA, 25 bp, Homo sapien
caagggtgtgcaggtcacgctttga

SEQ ID NO: 4230011 - DNA, 25 bp, Homo sapien
aactcgtggcgtagtggttaagagc

SEQ ID NO: 4230012 - DNA, 25 bp, Homo sapien
tattggaccttttcgtgactgtgta

SEQ ID NO: 4230013 - DNA, 25 bp, Homo sapien
tactacaacaaaatttgacaagcag

SEQ ID NO: 4230014 - DNA, 25 bp, Homo sapien
ttaaaggttagttgccatgtagtat

SEQ ID NO: 4230015 - DNA, 25 bp, Homo sapien
acaaaatttgacaagcagtagtttc

SEQ ID NO: 4230016 - DNA, 25 bp, Homo sapien
aatttgacaagcagtagtttcttaa

SEQ ID NO: 4230017 - DNA, 25 bp, Homo sapien
ttaatccaacagatcttttctgagt

SEQ ID NO: 4230018 - DNA, 25 bp, Homo sapien
tctgagtttcgctctgcatgccaag

SEQ ID NO: 4230019 - DNA, 25 bp, Homo sapien
gctgctgaaagattggttggtgcat

SEQ ID NO: 4230020 - DNA, 25 bp, Homo sapien
tcccagctggtcaacatagtcttcc

SEQ ID NO: 4230021 - DNA, 25 bp, Homo sapien
ggatttgggaactagacaacgtgag

SEQ ID NO: 4230022 - DNA, 25 bp, Homo sapien
gatgctcattactgccatggctagg

SEQ ID NO: 4230023 - DNA, 25 bp, Homo sapien
cctatgtaactatgtgcagatgctc

SEQ ID NO: 4230024 - DNA, 25 bp, Homo sapien
tgtgcaccctcttgtggcgaagtaa

SEQ ID NO: 4230025 - DNA, 25 bp, Homo sapien
caccatgtttgggacattctcagtc

SEQ ID NO: 4230026 - DNA, 25 bp, Homo sapien
tataaaatcgtgataggaaggcacc

SEQ ID NO: 4230027 - DNA, 25 bp, Homo sapien
tggagtagagtagagtagaataaaa

SEQ ID NO: 4230028 - DNA, 25 bp, Homo sapien
tcagtctactaaagaaaccaaatag

SEQ ID NO: 4230029 - DNA, 25 bp, Homo sapien
tagatggacctttctcaattctcct

SEQ ID NO: 4230030 - DNA, 25 bp, Homo sapien
tagagtgtgatgtaggtacactggc

SEQ ID NO: 4230031 - DNA, 25 bp, Homo sapien
ggtctacactcccttggtcctcgag

SEQ ID NO: 4230032 - DNA, 25 bp, Homo sapien
cttctgcgtgcctttcatgtattaa

SEQ ID NO: 4230033 - DNA, 25 bp, Homo sapien
tagatcacagaattgtcggacaggc

SEQ ID NO: 4230034 - DNA, 25 bp, Homo sapien
aagagagctgttgcctatgccacca

SEQ ID NO: 4230035 - DNA, 25 bp, Homo sapien
gcctctgccagattgggaagccact

SEQ ID NO: 4230036 - DNA, 25 bp, Homo sapien
cagttgtgtgtctctatcctagcag

SEQ ID NO: 4230037 - DNA, 25 bp, Homo sapien
caaatacccgcagtttgctgaagat

SEQ ID NO: 4230038 - DNA, 25 bp, Homo sapien
tctgtgccagtgtaccaaatacccg

SEQ ID NO: 4230039 - DNA, 25 bp, Homo sapien
gaagacctttttaaatagcgcagaa

SEQ ID NO: 4230040 - DNA, 25 bp, Homo sapien
tagcgcagaatatacgcagtagcag

SEQ ID NO: 4230041 - DNA, 25 bp, Homo sapien
gaggcctgacaggttctacgaacat

SEQ ID NO: 4230042 - DNA, 25 bp, Homo sapien
tcttagctgttgtaatgacttgcag

SEQ ID NO: 4230043 - DNA, 25 bp, Homo sapien
gcagtacatcaacagatacatagtt

SEQ ID NO: 4230044 - DNA, 25 bp, Homo sapien
cagcctttcaaagggacgcagtaca

SEQ ID NO: 4230045 - DNA, 25 bp, Homo sapien
ctccggggttcgaacaattctctgc

SEQ ID NO: 4230046 - DNA, 25 bp, Homo sapien
ttacagttgcccgtcaccaggcccg

SEQ ID NO: 4230047 - DNA, 25 bp, Homo sapien
ttgttctcttgtacaggctggagta

SEQ ID NO: 4230048 - DNA, 25 bp, Homo sapien
gggattacagttgcccgtcaccagg

SEQ ID NO: 4230049 - DNA, 25 bp, Homo sapien
gaaagatctggatagcctaagtctc

SEQ ID NO: 4230050 - DNA, 25 bp, Homo sapien
catgaatgggaccaataatgtgtca

SEQ ID NO: 4230051 - DNA, 25 bp, Homo sapien
gcaaatggtgttttcccacaggaaa

SEQ ID NO: 4230052 - DNA, 25 bp, Homo sapien
tgggtgttaacgtcctgatcaaggc

SEQ ID NO: 4230053 - DNA, 25 bp, Homo sapien
ttggcagagccattagagtcaactg

SEQ ID NO: 4230054 - DNA, 25 bp, Homo sapien
gctgcatgccagactactaaatcta

SEQ ID NO: 4230055 - DNA, 25 bp, Homo sapien
acaacatagaatgcgtgcccttcag

SEQ ID NO: 4230056 - DNA, 25 bp, Homo sapien
cagtgattgcgctctggctcttggc

SEQ ID NO: 4230057 - DNA, 25 bp, Homo sapien
ttatggactgtttatggtgctggtg

SEQ ID NO: 4230058 - DNA, 25 bp, Homo sapien
ggtgagtgttaatagggatagtatc

SEQ ID NO: 4230059 - DNA, 25 bp, Homo sapien
cctgcatttatcttcgtttccttta

SEQ ID NO: 4230060 - DNA, 25 bp, Homo sapien
gggatagtatccataaagttctgag

SEQ ID NO: 4230061 - DNA, 25 bp, Homo sapien
tacgtgtttccctggtaggaactgc

SEQ ID NO: 4230062 - DNA, 25 bp, Homo sapien
gacagcctgttgcaaaggtcagggc

SEQ ID NO: 4230063 - DNA, 25 bp, Homo sapien
gaggtggtatctttctctacgtcac

SEQ ID NO: 4230064 - DNA, 25 bp, Homo sapien
tacgtcactttctgtactgaataag

SEQ ID NO: 4230065 - DNA, 25 bp, Homo sapien
ctgtgcttgcccacagacagaagtg

SEQ ID NO: 4230066 - DNA, 25 bp, Homo sapien
taaaggtagcattgcacgtcttccc

SEQ ID NO: 4230067 - DNA, 25 bp, Homo sapien
ggaatatacctaagcaggttgtggg

SEQ ID NO: 4230068 - DNA, 25 bp, Homo sapien
tcggcagttgtgttcctgacataac

SEQ ID NO: 4230069 - DNA, 25 bp, Homo sapien
ctgtcacaaaagattctgtgaaggc

SEQ ID NO: 4230070 - DNA, 25 bp, Homo sapien
ccctgtcacaaaagattctgtgaag

SEQ ID NO: 4230071 - DNA, 25 bp, Homo sapien
tgtcacaaaagattctgtgaaggct

SEQ ID NO: 4230072 - DNA, 25 bp, Homo sapien
gtcacaaaagattctgtgaaggctt

SEQ ID NO: 4230073 - DNA, 25 bp, Homo sapien
caaagggaatccagtgcagtgatat

SEQ ID NO: 4230074 - DNA, 25 bp, Homo sapien
agtgatatttgccttgagtgatgaa

SEQ ID NO: 4230075 - DNA, 25 bp, Homo sapien
taggtggttaaccttgtgaaagcca

SEQ ID NO: 4230076 - DNA, 25 bp, Homo sapien
gacaaggctcaagaaagttgcttgg

SEQ ID NO: 4230077 - DNA, 25 bp, Homo sapien
tctctgaattttttgtccgatttta

SEQ ID NO: 4230078 - DNA, 25 bp, Homo sapien
gaggtgccctgtctcaactcggtgg

SEQ ID NO: 4230079 - DNA, 25 bp, Homo sapien
attttattgagaagaactcggggct

SEQ ID NO: 4230080 - DNA, 25 bp, Homo sapien
aagcacctttttacgaggtgccctg

SEQ ID NO: 4230081 - DNA, 25 bp, Homo sapien
aatcacctgggagtacttgcggaaa

SEQ ID NO: 4230082 - DNA, 25 bp, Homo sapien
ggtcacgttgtttcctccgcttgga

SEQ ID NO: 4230083 - DNA, 25 bp, Homo sapien
caacagtgtttaccagaccagaatc

SEQ ID NO: 4230084 - DNA, 25 bp, Homo sapien
tactacttcacgacccagtcaggag

SEQ ID NO: 4230085 - DNA, 25 bp, Homo sapien
tgtcttgcccaaaagaatcgctggg

SEQ ID NO: 4230086 - DNA, 25 bp, Homo sapien
gactttgcacttggaggctgtcccc

SEQ ID NO: 4230087 - DNA, 25 bp, Homo sapien
gagacactggttatactgactacat

SEQ ID NO: 4230088 - DNA, 25 bp, Homo sapien
ggaactcgagagaaaacaggtagaa

SEQ ID NO: 4230089 - DNA, 25 bp, Homo sapien
tataagatctctttatgcagcttgg

SEQ ID NO: 4230090 - DNA, 25 bp, Homo sapien
cattttcactgttgagcctatgacc

SEQ ID NO: 4230091 - DNA, 25 bp, Homo sapien
tacactttgctcgtttttccaatgg

SEQ ID NO: 4230092 - DNA, 25 bp, Homo sapien
tgctcctttcttgtatgaccacgta

SEQ ID NO: 4230093 - DNA, 25 bp, Homo sapien
tgtttgctttgggtatagattctta

SEQ ID NO: 4230094 - DNA, 25 bp, Homo sapien
gtttgctttgggtatagattcttat

SEQ ID NO: 4230095 - DNA, 25 bp, Homo sapien
tttgctttgggtatagattcttatt

SEQ ID NO: 4230096 - DNA, 25 bp, Homo sapien
tgctttgggtatagattcttatttt

SEQ ID NO: 4230097 - DNA, 25 bp, Homo sapien
tccacgcacagtgcaggtggaagtg

SEQ ID NO: 4230098 - DNA, 25 bp, Homo sapien
caagatgacagactgcaacagccag

SEQ ID NO: 4230099 - DNA, 25 bp, Homo sapien
gtgcaggcaccgcaggagactgggc

SEQ ID NO: 4230100 - DNA, 25 bp, Homo sapien
agccagtctgtccacgcacagtgca

SEQ ID NO: 4230101 - DNA, 25 bp, Homo sapien
cctctgcaggctccatgtattggtg

SEQ ID NO: 4230102 - DNA, 25 bp, Homo sapien
gctccatgtattggtgggtagtcat

SEQ ID NO: 4230103 - DNA, 25 bp, Homo sapien
tatctgccaagtggcaggctcgggc

SEQ ID NO: 4230104 - DNA, 25 bp, Homo sapien
tgtttagtggccctatctgccaagt

SEQ ID NO: 4230105 - DNA, 25 bp, Homo sapien
tgcccaggaaccacttcagtctcta

SEQ ID NO: 4230106 - DNA, 25 bp, Homo sapien
ctgcccaggaaccacttcagtctct

SEQ ID NO: 4230107 - DNA, 25 bp, Homo sapien
cactgcccaggaaccacttcagtct

SEQ ID NO: 4230108 - DNA, 25 bp, Homo sapien
gcccaggaaccacttcagtctctac

SEQ ID NO: 4230109 - DNA, 25 bp, Homo sapien
tgcagaaacataagataggtttgtg

SEQ ID NO: 4230110 - DNA, 25 bp, Homo sapien
gcagaaacataagataggtttgtgg

SEQ ID NO: 4230111 - DNA, 25 bp, Homo sapien
gattttctggtattcaggaatacca

SEQ ID NO: 4230112 - DNA, 25 bp, Homo sapien
tggtattcaggaataccaccccaaa

SEQ ID NO: 4230113 - DNA, 25 bp, Homo sapien
tcagcagattttctggtattcagga

SEQ ID NO: 4230114 - DNA, 25 bp, Homo sapien
ttctggtattcaggaataccacccc

SEQ ID NO: 4230115 - DNA, 25 bp, Homo sapien
tagcaggaaatacgaagagttacac

SEQ ID NO: 4230116 - DNA, 25 bp, Homo sapien
taagggaacactatacctgtcatgg

SEQ ID NO: 4230117 - DNA, 25 bp, Homo sapien
aaaaccgggtgcttcaaagtacatg

SEQ ID NO: 4230118 - DNA, 25 bp, Homo sapien
ccagggtattctgaagatcgaagcc

SEQ ID NO: 4230119 - DNA, 25 bp, Homo sapien
tgttttaacccaacagcagccagat

SEQ ID NO: 4230120 - DNA, 25 bp, Homo sapien
gcctgggcgtaaacactagcttgaa

SEQ ID NO: 4230121 - DNA, 25 bp, Homo sapien
tcaggtttcagtcataggatctcag

SEQ ID NO: 4230122 - DNA, 25 bp, Homo sapien
aatctctagtgccagaaactgcctg

SEQ ID NO: 4230123 - DNA, 25 bp, Homo sapien
cattttcaaaggaatgtcaccagga

SEQ ID NO: 4230124 - DNA, 25 bp, Homo sapien
gaaatctgtgagcatttgggcccta

SEQ ID NO: 4230125 - DNA, 25 bp, Homo sapien
ggttacctggtatcccttgcactta

SEQ ID NO: 4230126 - DNA, 25 bp, Homo sapien
tcaccaggatggttatggaaccaaa

SEQ ID NO: 4230127 - DNA, 25 bp, Homo sapien
tatatacagggtaaagaagtgcctt

SEQ ID NO: 4230128 - DNA, 25 bp, Homo sapien
gaagtcccacttgtagaatattgag

SEQ ID NO: 4230129 - DNA, 25 bp, Homo sapien
gaatgcatgctaattatcagaccag

SEQ ID NO: 4230130 - DNA, 25 bp, Homo sapien
gaagaaggaaaatgcggaagtcgtc

SEQ ID NO: 4230131 - DNA, 25 bp, Homo sapien
aaacacgtgtctaggcttccaaagc

SEQ ID NO: 4230132 - DNA, 25 bp, Homo sapien
gagactcggctcaagagaaatttga

SEQ ID NO: 4230133 - DNA, 25 bp, Homo sapien
gagctctcgattgaatacacgtgaa

SEQ ID NO: 4230134 - DNA, 25 bp, Homo sapien
gactggcttctgactagagctctcg

SEQ ID NO: 4230135 - DNA, 25 bp, Homo sapien
cgattgaagcacatcgaccggcgac

SEQ ID NO: 4230136 - DNA, 25 bp, Homo sapien
cctttgtggatagtgccttagtgcc

SEQ ID NO: 4230137 - DNA, 25 bp, Homo sapien
cagaactacggcgagcgggtacgta

SEQ ID NO: 4230138 - DNA, 25 bp, Homo sapien
cccggcgggtttatgtggcttctgc

SEQ ID NO: 4230139 - DNA, 25 bp, Homo sapien
tactggatccatatcccacatggcc

SEQ ID NO: 4230140 - DNA, 25 bp, Homo sapien
cctcatatttacagtactggatcca

SEQ ID NO: 4230141 - DNA, 25 bp, Homo sapien
tgcctcatatttacagtactggatc

SEQ ID NO: 4230142 - DNA, 25 bp, Homo sapien
tttacagtactggatccatatccca

SEQ ID NO: 4230143 - DNA, 25 bp, Homo sapien
aaacactgtaattactttcttgctg

SEQ ID NO: 4230144 - DNA, 25 bp, Homo sapien
ctgtaattactttcttgctggccat

SEQ ID NO: 4230145 - DNA, 25 bp, Homo sapien
acactgtaattactttcttgctggc

SEQ ID NO: 4230146 - DNA, 25 bp, Homo sapien
tgttgctccaaacactgtaattact

SEQ ID NO: 4230147 - DNA, 25 bp, Homo sapien
ggtcagaaatctcataattcagagt

SEQ ID NO: 4230148 - DNA, 25 bp, Homo sapien
tagagctgctgcagtacctactgca

SEQ ID NO: 4230149 - DNA, 25 bp, Homo sapien
tactgcagggggtgctacatggccc

SEQ ID NO: 4230150 - DNA, 25 bp, Homo sapien
gggtgctacatggcccttcacatat

SEQ ID NO: 4230151 - DNA, 25 bp, Homo sapien
agaagaagaaacacaggaaggatca

SEQ ID NO: 4230152 - DNA, 25 bp, Homo sapien
gaagaaacacaggaaggatcaggaa

SEQ ID NO: 4230153 - DNA, 25 bp, Homo sapien
aagaagaaacacaggaaggatcagg

SEQ ID NO: 4230154 - DNA, 25 bp, Homo sapien
ctgcagggtcaagagaagaagaaac

SEQ ID NO: 4230155 - DNA, 25 bp, Homo sapien
ttttttgctctccaaaattgccctg

SEQ ID NO: 4230156 - DNA, 25 bp, Homo sapien
tctccaaaattgccctggccacaga

SEQ ID NO: 4230157 - DNA, 25 bp, Homo sapien
tgcaaattttttgctctccaaaatt

SEQ ID NO: 4230158 - DNA, 25 bp, Homo sapien
tgctctccaaaattgccctggccac

SEQ ID NO: 4230159 - DNA, 25 bp, Homo sapien
gcactgtccaccgatgctttatcat

SEQ ID NO: 4230160 - DNA, 25 bp, Homo sapien
atcattcaggtcacctttgaccacc

SEQ ID NO: 4230161 - DNA, 25 bp, Homo sapien
caccgatgctttatcattcaggtca

SEQ ID NO: 4230162 - DNA, 25 bp, Homo sapien
agacaccttttaaggcactgtccac

SEQ ID NO: 4230163 - DNA, 25 bp, Homo sapien
ccaaggtgtagtaatctccatcaga

SEQ ID NO: 4230164 - DNA, 25 bp, Homo sapien
ccttgctgtcaaagtgcggcacctc

SEQ ID NO: 4230165 - DNA, 25 bp, Homo sapien
gccacgccgcgagaaagttttcaaa

SEQ ID NO: 4230166 - DNA, 25 bp, Homo sapien
tccatcagaggctttcacgggccgc

SEQ ID NO: 4230167 - DNA, 25 bp, Homo sapien
tcagcaacagagataccatccattg

SEQ ID NO: 4230168 - DNA, 25 bp, Homo sapien
cggccttgcctaaaaattcctctgg

SEQ ID NO: 4230169 - DNA, 25 bp, Homo sapien
cattggtacatctcccatcggtaca

SEQ ID NO: 4230170 - DNA, 25 bp, Homo sapien
gagacggctgctccaatatcagcaa

SEQ ID NO: 4230171 - DNA, 25 bp, Homo sapien
aaggaccaactcaagcccacgtctt

SEQ ID NO: 4230172 - DNA, 25 bp, Homo sapien
cactgttttctggtcatctatagca

SEQ ID NO: 4230173 - DNA, 25 bp, Homo sapien
tctggtcatctatagcacagatagt

SEQ ID NO: 4230174 - DNA, 25 bp, Homo sapien
actcaagcccacgtcttccatgaaa

SEQ ID NO: 4230175 - DNA, 25 bp, Homo sapien
tcttgggttcaggagtaacaatctc

SEQ ID NO: 4230176 - DNA, 25 bp, Homo sapien
tgtactcaggtgcaaggaaccttgc

SEQ ID NO: 4230177 - DNA, 25 bp, Homo sapien
tatgacccaaatgcaaatggcctgg

SEQ ID NO: 4230178 - DNA, 25 bp, Homo sapien
tacccgaggctgaattgggaatcta

SEQ ID NO: 4230179 - DNA, 25 bp, Homo sapien
gcctccatgcggcatcaagatcccc

SEQ ID NO: 4230180 - DNA, 25 bp, Homo sapien
cctctgaaaccgtccacccacctgg

SEQ ID NO: 4230181 - DNA, 25 bp, Homo sapien
tggctgatggcccatccatcctcgc

SEQ ID NO: 4230182 - DNA, 25 bp, Homo sapien
catcctcgctccctttcttggttag

SEQ ID NO: 4230183 - DNA, 25 bp, Homo sapien
cagccaggtccacaattctttagcc

SEQ ID NO: 4230184 - DNA, 25 bp, Homo sapien
aagctgaattgtttctggccccaag

SEQ ID NO: 4230185 - DNA, 25 bp, Homo sapien
taccagccttcatgtgaatagcacc

SEQ ID NO: 4230186 - DNA, 25 bp, Homo sapien
gcaaacctgatctaactatgtgaag

SEQ ID NO: 4230187 - DNA, 25 bp, Homo sapien
tgacttgaacccaaccacagactgg

SEQ ID NO: 4230188 - DNA, 25 bp, Homo sapien
aaaggagcctttcgagagtggatca

SEQ ID NO: 4230189 - DNA, 25 bp, Homo sapien
ggcttgaaattactcacccaggaga

SEQ ID NO: 4230190 - DNA, 25 bp, Homo sapien
cccattagtggtaggagagaagctc

SEQ ID NO: 4230191 - DNA, 25 bp, Homo sapien
aaggtcaggcgacactgggaaccgc

SEQ ID NO: 4230192 - DNA, 25 bp, Homo sapien
agaattttgggaggcatatgaagga

SEQ ID NO: 4230193 - DNA, 25 bp, Homo sapien
agagcaagatgaacctgcagtccag

SEQ ID NO: 4230194 - DNA, 25 bp, Homo sapien
gctggagcgatcctttcttatgctg

SEQ ID NO: 4230195 - DNA, 25 bp, Homo sapien
tggacagtgcctgagggccgttcaa

SEQ ID NO: 4230196 - DNA, 25 bp, Homo sapien
ttcagagttgcaaaggtcccttggg

SEQ ID NO: 4230197 - DNA, 25 bp, Homo sapien
tgtctctgccccttgtgtagtcttg

SEQ ID NO: 4230198 - DNA, 25 bp, Homo sapien
tcaatacgcacttcctaacagtgcc

SEQ ID NO: 4230199 - DNA, 25 bp, Homo sapien
tcaggactacattgccagagtgttc

SEQ ID NO: 4230200 - DNA, 25 bp, Homo sapien
tacattgccagagtgttctgctctg

SEQ ID NO: 4230201 - DNA, 25 bp, Homo sapien
gtccaagtcaggactacattgccag

SEQ ID NO: 4230202 - DNA, 25 bp, Homo sapien
tcctatgaggagtccaagtcaggac

SEQ ID NO: 4230203 - DNA, 25 bp, Homo sapien
gttagccacgcagatccacggcctt

SEQ ID NO: 4230204 - DNA, 25 bp, Homo sapien
ggtctcctgtcggtacagtcgccac

SEQ ID NO: 4230205 - DNA, 25 bp, Homo sapien
tgagggctctctcgatttccacgca

SEQ ID NO: 4230206 - DNA, 25 bp, Homo sapien
ttgccggtagcctgaggacaccgtg

SEQ ID NO: 4230207 - DNA, 25 bp, Homo sapien
taataacacagataggagtgaggcc

SEQ ID NO: 4230208 - DNA, 25 bp, Homo sapien
tgggtgctccttcccctcgtgatca

SEQ ID NO: 4230209 - DNA, 25 bp, Homo sapien
ggccagtcactcacgatacctacag

SEQ ID NO: 4230210 - DNA, 25 bp, Homo sapien
cttccacaaaatcagagggttcagg

SEQ ID NO: 4230211 - DNA, 25 bp, Homo sapien
tggtggctcatgtggatgacacagt

SEQ ID NO: 4230212 - DNA, 25 bp, Homo sapien
tttcagctgaacaagcactccgagg

SEQ ID NO: 4230213 - DNA, 25 bp, Homo sapien
cacagagtgctgttttgctcgaaaa

SEQ ID NO: 4230214 - DNA, 25 bp, Homo sapien
gaaaaatgttctgctgcttcggaac

SEQ ID NO: 4230215 - DNA, 25 bp, Homo sapien
gagccaagcctgttcggcatcccga

SEQ ID NO: 4230216 - DNA, 25 bp, Homo sapien
gaggacggcgcatggcttgagagat

SEQ ID NO: 4230217 - DNA, 25 bp, Homo sapien
gagaggacggcgcatggcttgagag

SEQ ID NO: 4230218 - DNA, 25 bp, Homo sapien
cggcatcccgaatccttccagcact

SEQ ID NO: 4230219 - DNA, 25 bp, Homo sapien
tttcaatatcaatttcggtgtatgc

SEQ ID NO: 4230220 - DNA, 25 bp, Homo sapien
aaatacaggttgtattcatctctta

SEQ ID NO: 4230221 - DNA, 25 bp, Homo sapien
taatatacgtatcaatataaaagca

SEQ ID NO: 4230222 - DNA, 25 bp, Homo sapien
tttgaagcctctagcggaggatctg

SEQ ID NO: 4230223 - DNA, 25 bp, Homo sapien
gaaaggcttgaacctgccagctgat

SEQ ID NO: 4230224 - DNA, 25 bp, Homo sapien
ccagagtgtggaaagtctacagtgc

SEQ ID NO: 4230225 - DNA, 25 bp, Homo sapien
taggacagcggcatcacggttgcat

SEQ ID NO: 4230226 - DNA, 25 bp, Homo sapien
tgccaagctgcgttatattctgtac

SEQ ID NO: 4230227 - DNA, 25 bp, Homo sapien
tcccctgctgtaacttacgtgacct

SEQ ID NO: 4230228 - DNA, 25 bp, Homo sapien
gctgtaacttacgtgacctgtgctg

SEQ ID NO: 4230229 - DNA, 25 bp, Homo sapien
tcttagcaatatgacaataatcctc

SEQ ID NO: 4230230 - DNA, 25 bp, Homo sapien
taatcctctgtagcttgagctaccc

SEQ ID NO: 4230231 - DNA, 25 bp, Homo sapien
tgtgagacacgtgctttgaactgct

SEQ ID NO: 4230232 - DNA, 25 bp, Homo sapien
cacatttgtgaagaggttcgcaggg

SEQ ID NO: 4230233 - DNA, 25 bp, Homo sapien
gaatgactacactgttcctcgtatg

SEQ ID NO: 4230234 - DNA, 25 bp, Homo sapien
agaattctgtgctccccgtgacact

SEQ ID NO: 4230235 - DNA, 25 bp, Homo sapien
taagaagttgtccattttgtgtgag

SEQ ID NO: 4230236 - DNA, 25 bp, Homo sapien
aaatctctatagcatctgtagttgt

SEQ ID NO: 4230237 - DNA, 25 bp, Homo sapien
attgacataaagttattcatggtgc

SEQ ID NO: 4230238 - DNA, 25 bp, Homo sapien
tagtcttggcagacaatattgtctt

SEQ ID NO: 4230239 - DNA, 25 bp, Homo sapien
gcgccatctgggtgcatagctggaa

SEQ ID NO: 4230240 - DNA, 25 bp, Homo sapien
catctgggtgcatagctggaattat

SEQ ID NO: 4230241 - DNA, 25 bp, Homo sapien
gtggcgccatctgggtgcatagctg

SEQ ID NO: 4230242 - DNA, 25 bp, Homo sapien
cgccatctgggtgcatagctggaat

SEQ ID NO: 4230243 - DNA, 25 bp, Homo sapien
gagagtgggagcagctttcagcctc

SEQ ID NO: 4230244 - DNA, 25 bp, Homo sapien
ctttggagagtgggagcagctttca

SEQ ID NO: 4230245 - DNA, 25 bp, Homo sapien
tggagagtgggagcagctttcagcc

SEQ ID NO: 4230246 - DNA, 25 bp, Homo sapien
agagtgggagcagctttcagcctca

SEQ ID NO: 4230247 - DNA, 25 bp, Homo sapien
tccaaaggcccgcaacaggtccatt

SEQ ID NO: 4230248 - DNA, 25 bp, Homo sapien
gcccgcaacaggtccattgccttga

SEQ ID NO: 4230249 - DNA, 25 bp, Homo sapien
ggtccattgccttgagctcttccct

SEQ ID NO: 4230250 - DNA, 25 bp, Homo sapien
tcttttactccaaaggcccgcaaca

SEQ ID NO: 4230251 - DNA, 25 bp, Homo sapien
aacttgctagtgccccataggtcac

SEQ ID NO: 4230252 - DNA, 25 bp, Homo sapien
aaacttgctagtgccccataggtca

SEQ ID NO: 4230253 - DNA, 25 bp, Homo sapien
caaacttgctagtgccccataggtc

SEQ ID NO: 4230254 - DNA, 25 bp, Homo sapien
tgatttagtactttacacccgtgga

SEQ ID NO: 4230255 - DNA, 25 bp, Homo sapien
cattgctgatttagtactttacacc

SEQ ID NO: 4230256 - DNA, 25 bp, Homo sapien
gaatcaggacattgctgatttagta

SEQ ID NO: 4230257 - DNA, 25 bp, Homo sapien
ttacacccgtggacggaaggctctc

SEQ ID NO: 4230258 - DNA, 25 bp, Homo sapien
gctgcccaaggaaagtagtaaaaca

SEQ ID NO: 4230259 - DNA, 25 bp, Homo sapien
cctgattgcgtgatccagtgtgagc

SEQ ID NO: 4230260 - DNA, 25 bp, Homo sapien
taaggtcacagtagaggaagccgcc

SEQ ID NO: 4230261 - DNA, 25 bp, Homo sapien
aattctttgaagagctaagctgccc

SEQ ID NO: 4230262 - DNA, 25 bp, Homo sapien
taacccttaaactgccgggctgatg

SEQ ID NO: 4230263 - DNA, 25 bp, Homo sapien
gattaattggccaagcgggtgtgct

SEQ ID NO: 4230264 - DNA, 25 bp, Homo sapien
caggttttaagggtgcacgtgcctc

SEQ ID NO: 4230265 - DNA, 25 bp, Homo sapien
caaacttctggtactgagcaatggg

SEQ ID NO: 4230266 - DNA, 25 bp, Homo sapien
ctgaatggagcattccaaattggtt

SEQ ID NO: 4230267 - DNA, 25 bp, Homo sapien
tttttcaatgaataaccagacccca

SEQ ID NO: 4230268 - DNA, 25 bp, Homo sapien
gggcggggctcacttgcagactttt

SEQ ID NO: 4230269 - DNA, 25 bp, Homo sapien
gcattccaaattggttgtgaatgga

SEQ ID NO: 4230270 - DNA, 25 bp, Homo sapien
tacttctagcggacttttgcacagc

SEQ ID NO: 4230271 - DNA, 25 bp, Homo sapien
gaagtctgtttctctccgctggtag

SEQ ID NO: 4230272 - DNA, 25 bp, Homo sapien
gcactattaggtctgccccagctag

SEQ ID NO: 4230273 - DNA, 25 bp, Homo sapien
taaacacagcgtactgagcgagcaa

SEQ ID NO: 4230274 - DNA, 25 bp, Homo sapien
gagaaatgcttccagtggcactgag

SEQ ID NO: 4230275 - DNA, 25 bp, Homo sapien
cagagaaatgcttccagtggcactg

SEQ ID NO: 4230276 - DNA, 25 bp, Homo sapien
aatgcttccagtggcactgagttcg

SEQ ID NO: 4230277 - DNA, 25 bp, Homo sapien
gaaatgcttccagtggcactgagtt

SEQ ID NO: 4230278 - DNA, 25 bp, Homo sapien
tggagagggtacatcattttggtct

SEQ ID NO: 4230279 - DNA, 25 bp, Homo sapien
tattaatgtgtgagtttagtacagt

SEQ ID NO: 4230280 - DNA, 25 bp, Homo sapien
tttagtacagtagaggcagtgcctt

SEQ ID NO: 4230281 - DNA, 25 bp, Homo sapien
tcacgatgagattattcagctggat

SEQ ID NO: 4230282 - DNA, 25 bp, Homo sapien
taaagcatggagactctgaaaggtc

SEQ ID NO: 4230283 - DNA, 25 bp, Homo sapien
ccttggtcctaagaagtaactctga

SEQ ID NO: 4230284 - DNA, 25 bp, Homo sapien
tagaattgggtttcctgcccatagg

SEQ ID NO: 4230285 - DNA, 25 bp, Homo sapien
catagggattctaccagtggacctc

SEQ ID NO: 4230286 - DNA, 25 bp, Homo sapien
ggatgaactcgagcctttccttcag

SEQ ID NO: 4230287 - DNA, 25 bp, Homo sapien
ggaagtggtttaaactcctggatga

SEQ ID NO: 4230288 - DNA, 25 bp, Homo sapien
gctgcgctgtgctaaagttttcctg

SEQ ID NO: 4230289 - DNA, 25 bp, Homo sapien
ctcttccgggtgaagtatttcatca

SEQ ID NO: 4230290 - DNA, 25 bp, Homo sapien
ctgatgtggcggccgcggctcgctc

SEQ ID NO: 4230291 - DNA, 25 bp, Homo sapien
ggcggccgcggctcgctctcccatt

SEQ ID NO: 4230292 - DNA, 25 bp, Homo sapien
ggccgcggctcgctctcccattcat

SEQ ID NO: 4230293 - DNA, 25 bp, Homo sapien
tgatgtggcggccgcggctcgctct

SEQ ID NO: 4230294 - DNA, 25 bp, Homo sapien
cagcaattgcagttagtgccctatc

SEQ ID NO: 4230295 - DNA, 25 bp, Homo sapien
ccagctgcacgggatctaattcgca

SEQ ID NO: 4230296 - DNA, 25 bp, Homo sapien
gcaaatacaccatcttgcattcaat

SEQ ID NO: 4230297 - DNA, 25 bp, Homo sapien
tgccctatcgtttggcaagcagagc

SEQ ID NO: 4230298 - DNA, 25 bp, Homo sapien
tctttggaaatcagtgaggaagaga

SEQ ID NO: 4230299 - DNA, 25 bp, Homo sapien
atccaacagaatccctttcgtttct

SEQ ID NO: 4230300 - DNA, 25 bp, Homo sapien
agatccaacagaatccctttcgttt

SEQ ID NO: 4230301 - DNA, 25 bp, Homo sapien
gatccaacagaatccctttcgtttc

SEQ ID NO: 4230302 - DNA, 25 bp, Homo sapien
gttcttcttatgatctccatgaccc

SEQ ID NO: 4230303 - DNA, 25 bp, Homo sapien
gaatacttgggcattctgcaaggtc

SEQ ID NO: 4230304 - DNA, 25 bp, Homo sapien
cgttcttcttatgatctccatgacc

SEQ ID NO: 4230305 - DNA, 25 bp, Homo sapien
tacttgggcattctgcaaggtccca

SEQ ID NO: 4230306 - DNA, 25 bp, Homo sapien
gaagagtgttgatagcccagacagc

SEQ ID NO: 4230307 - DNA, 25 bp, Homo sapien
acatgctgggttgattccaagacac

SEQ ID NO: 4230308 - DNA, 25 bp, Homo sapien
aggacatgctgggttgattccaaga

SEQ ID NO: 4230309 - DNA, 25 bp, Homo sapien
gcaggacatgctgggttgattccaa

SEQ ID NO: 4230310 - DNA, 25 bp, Homo sapien
aggaatgtaaaactctgttcttcct

SEQ ID NO: 4230311 - DNA, 25 bp, Homo sapien
gaatgtaaaactctgttcttcctac

SEQ ID NO: 4230312 - DNA, 25 bp, Homo sapien
gaaggaatgtaaaactctgttcttc

SEQ ID NO: 4230313 - DNA, 25 bp, Homo sapien
tgaaggaatgtaaaactctgttctt

SEQ ID NO: 4230314 - DNA, 25 bp, Homo sapien
tcagccctgatgaacaaatccctgg

SEQ ID NO: 4230315 - DNA, 25 bp, Homo sapien
gccctgatgaacaaatccctggtgt

SEQ ID NO: 4230316 - DNA, 25 bp, Homo sapien
cctgatgaacaaatccctggtgtgc

SEQ ID NO: 4230317 - DNA, 25 bp, Homo sapien
agccctgatgaacaaatccctggtg

SEQ ID NO: 4230318 - DNA, 25 bp, Homo sapien
tatgtggaaccaattgtgcaggcgc

SEQ ID NO: 4230319 - DNA, 25 bp, Homo sapien
attgtgcaggcgctgagcaggccca

SEQ ID NO: 4230320 - DNA, 25 bp, Homo sapien
ggtctcattccaagggaaatatttg

SEQ ID NO: 4230321 - DNA, 25 bp, Homo sapien
cactgcctcggtctcattccaaggg

SEQ ID NO: 4230322 - DNA, 25 bp, Homo sapien
taccatcactcatgaggagaaagtg

SEQ ID NO: 4230323 - DNA, 25 bp, Homo sapien
gcagaaattcatcaggacattacca

SEQ ID NO: 4230324 - DNA, 25 bp, Homo sapien
tgaaggttgtgtgtatcgtccgcat

SEQ ID NO: 4230325 - DNA, 25 bp, Homo sapien
ggtgttgtgcatatgagctctgtca

SEQ ID NO: 4230326 - DNA, 25 bp, Homo sapien
tcccttttcaacagagctggagtgg

SEQ ID NO: 4230327 - DNA, 25 bp, Homo sapien
cagagctggagtggaaatagcattc

SEQ ID NO: 4230328 - DNA, 25 bp, Homo sapien
tagcattcacatgtctagaagtggg

SEQ ID NO: 4230329 - DNA, 25 bp, Homo sapien
gctggagtggaaatagcattcacat

SEQ ID NO: 4230330 - DNA, 25 bp, Homo sapien
ccttcttagaggcatggagtataac

SEQ ID NO: 4230331 - DNA, 25 bp, Homo sapien
gatccccaagattgaggctattgag

SEQ ID NO: 4230332 - DNA, 25 bp, Homo sapien
gagacatggcactatcaacaggtga

SEQ ID NO: 4230333 - DNA, 25 bp, Homo sapien
gcagtgcagaaaatggcccttacct

SEQ ID NO: 4230334 - DNA, 25 bp, Homo sapien
acagaagttcgtgcatgtgtttcag

SEQ ID NO: 4230335 - DNA, 25 bp, Homo sapien
caagctccagaattactacaggtac

SEQ ID NO: 4230336 - DNA, 25 bp, Homo sapien
ggtattcttggtgatgggaccaaca

SEQ ID NO: 4230337 - DNA, 25 bp, Homo sapien
tactacaggtactatcttggaagcc

SEQ ID NO: 4230338 - DNA, 25 bp, Homo sapien
aatggcacttaactgtgaaggacca

SEQ ID NO: 4230339 - DNA, 25 bp, Homo sapien
gggaatattaagattgtgtgtacaa

SEQ ID NO: 4230340 - DNA, 25 bp, Homo sapien
tggaccattctgctcaacctaacag

SEQ ID NO: 4230341 - DNA, 25 bp, Homo sapien
cacctaggagcaagatcttggacca

SEQ ID NO: 4230342 - DNA, 25 bp, Homo sapien
gaaacttggacccacttgatatcgt

SEQ ID NO: 4230343 - DNA, 25 bp, Homo sapien
tgagctgcctctaatcttgcattgg

SEQ ID NO: 4230344 - DNA, 25 bp, Homo sapien
ctctgagatttatcagtggaaactt

SEQ ID NO: 4230345 - DNA, 25 bp, Homo sapien
cttgatatcgttccactgagctgcc

SEQ ID NO: 4230346 - DNA, 25 bp, Homo sapien
tgggtacacccctaacagagccagt

SEQ ID NO: 4230347 - DNA, 25 bp, Homo sapien
tgtacagagacaaaacggcctccgg

SEQ ID NO: 4230348 - DNA, 25 bp, Homo sapien
tacatgtttgcttagaggcggctcc

SEQ ID NO: 4230349 - DNA, 25 bp, Homo sapien
aagtttcctcatggacgctcgcgag

SEQ ID NO: 4230350 - DNA, 25 bp, Homo sapien
tcacaagaaccaagcgcccatgatg

SEQ ID NO: 4230351 - DNA, 25 bp, Homo sapien
cagcttcttctcgttgagaaggaag

SEQ ID NO: 4230352 - DNA, 25 bp, Homo sapien
tcttctcgttgagaaggaagagccg

SEQ ID NO: 4230353 - DNA, 25 bp, Homo sapien
ttgagaaggaagagccgttcaaaag

SEQ ID NO: 4230354 - DNA, 25 bp, Homo sapien
ggccttgtccatttacattcgaagg

SEQ ID NO: 4230355 - DNA, 25 bp, Homo sapien
ttgtccatttacattcgaaggcctc

SEQ ID NO: 4230356 - DNA, 25 bp, Homo sapien
tccatttacattcgaaggcctctga

SEQ ID NO: 4230357 - DNA, 25 bp, Homo sapien
tggccttgtccatttacattcgaag

SEQ ID NO: 4230358 - DNA, 25 bp, Homo sapien
ggccgttaagatgcctccagcaaag

SEQ ID NO: 4230359 - DNA, 25 bp, Homo sapien
cgatgacgtcatggaacagttggag

SEQ ID NO: 4230360 - DNA, 25 bp, Homo sapien
ggaaatcagtgcacgatcgcgaggc

SEQ ID NO: 4230361 - DNA, 25 bp, Homo sapien
tggaggatttagctcgggaacccgc

SEQ ID NO: 4230362 - DNA, 25 bp, Homo sapien
ccaaaccaaatctgtggcacggtga

SEQ ID NO: 4230363 - DNA, 25 bp, Homo sapien
ccttttgaggtcacggcgcaggaga

SEQ ID NO: 4230364 - DNA, 25 bp, Homo sapien
gtggcaggcctataaacagaaccgt

SEQ ID NO: 4230365 - DNA, 25 bp, Homo sapien
tgagagcagacaaagccgagtggca

SEQ ID NO: 4230366 - DNA, 25 bp, Homo sapien
agtgtgatccctcaaaaagccccat

SEQ ID NO: 4230367 - DNA, 25 bp, Homo sapien
tgtctgcaggaaagtgtgatccctc

SEQ ID NO: 4230368 - DNA, 25 bp, Homo sapien
tgctttgtctgcaggaaagtgtgat

SEQ ID NO: 4230369 - DNA, 25 bp, Homo sapien
gcaggaaagtgtgatccctcaaaaa

SEQ ID NO: 4230370 - DNA, 25 bp, Homo sapien
gtgcactgactacgagtttccttca

SEQ ID NO: 4230371 - DNA, 25 bp, Homo sapien
cagtcgtgcactgactacgagtttc

SEQ ID NO: 4230372 - DNA, 25 bp, Homo sapien
cactgactacgagtttccttcacta

SEQ ID NO: 4230373 - DNA, 25 bp, Homo sapien
ctttcagtcgtgcactgactacgag

SEQ ID NO: 4230374 - DNA, 25 bp, Homo sapien
tggtctctcctgatatgatctgaac

SEQ ID NO: 4230375 - DNA, 25 bp, Homo sapien
tcttctcagctaccacaggtagagc

SEQ ID NO: 4230376 - DNA, 25 bp, Homo sapien
ccttcttctcagctaccacaggtag

SEQ ID NO: 4230377 - DNA, 25 bp, Homo sapien
tctcctgatatgatctgaaccttct

SEQ ID NO: 4230378 - DNA, 25 bp, Homo sapien
ttttatggggaagcaagctgaggca

SEQ ID NO: 4230379 - DNA, 25 bp, Homo sapien
gaggcacagagatttagaagggtaa

SEQ ID NO: 4230380 - DNA, 25 bp, Homo sapien
tccccattttatggggaagcaagct

SEQ ID NO: 4230381 - DNA, 25 bp, Homo sapien
aggcacagagatttagaagggtaaa

SEQ ID NO: 4230382 - DNA, 25 bp, Homo sapien
ccaggccagcaaataaccccactga

SEQ ID NO: 4230383 - DNA, 25 bp, Homo sapien
ccccaggccagcaaataaccccact

SEQ ID NO: 4230384 - DNA, 25 bp, Homo sapien
gccccaggccagcaaataaccccac

SEQ ID NO: 4230385 - DNA, 25 bp, Homo sapien
cccaggccagcaaataaccccactg

SEQ ID NO: 4230386 - DNA, 25 bp, Homo sapien
tatgctaagggaccttctaaacgtg

SEQ ID NO: 4230387 - DNA, 25 bp, Homo sapien
gctggtaagagcagctatgctaagg

SEQ ID NO: 4230388 - DNA, 25 bp, Homo sapien
taaacgtggttgctgcagacaacag

SEQ ID NO: 4230389 - DNA, 25 bp, Homo sapien
cctttgagaaccagcacacgaccca

SEQ ID NO: 4230390 - DNA, 25 bp, Homo sapien
agcgtgtcatgtgatgggcagcttc

SEQ ID NO: 4230391 - DNA, 25 bp, Homo sapien
ttctgtatccagagaatagcggtga

SEQ ID NO: 4230392 - DNA, 25 bp, Homo sapien
gggactaagagagacggacagggcg

SEQ ID NO: 4230393 - DNA, 25 bp, Homo sapien
gtcctgtgccttgtgatctagaggg

SEQ ID NO: 4230394 - DNA, 25 bp, Homo sapien
ggtgaggtctctttaaatataccac

SEQ ID NO: 4230395 - DNA, 25 bp, Homo sapien
tgcaggcgcacagcgactgcttgtt

SEQ ID NO: 4230396 - DNA, 25 bp, Homo sapien
ttggcacagccgtctggtgaggtct

SEQ ID NO: 4230397 - DNA, 25 bp, Homo sapien
accgagtgtggctaacagggatatg

SEQ ID NO: 4230398 - DNA, 25 bp, Homo sapien
tcggttgctgggttaccaacgccag

SEQ ID NO: 4230399 - DNA, 25 bp, Homo sapien
ccagaggttctgtgcggctgcattt

SEQ ID NO: 4230400 - DNA, 25 bp, Homo sapien
tgggaggcgccgatctggctaatcc

SEQ ID NO: 4230401 - DNA, 25 bp, Homo sapien
tcctctcttgacgtgtgaacgcagt

SEQ ID NO: 4230402 - DNA, 25 bp, Homo sapien
tctaagcccgcactgcagtccagtg

SEQ ID NO: 4230403 - DNA, 25 bp, Homo sapien
ttggcctctaagcccgcactgcagt

SEQ ID NO: 4230404 - DNA, 25 bp, Homo sapien
caccagcttggcctctaagcccgca

SEQ ID NO: 4230405 - DNA, 25 bp, Homo sapien
cagcttggcctctaagcccgcactg

SEQ ID NO: 4230406 - DNA, 25 bp, Homo sapien
aacacctccatacgctcactcagaa

SEQ ID NO: 4230407 - DNA, 25 bp, Homo sapien
cacctccatacgctcactcagaagg

SEQ ID NO: 4230408 - DNA, 25 bp, Homo sapien
cctccatacgctcactcagaaggct

SEQ ID NO: 4230409 - DNA, 25 bp, Homo sapien
caaaacacctccatacgctcactca

SEQ ID NO: 4230410 - DNA, 25 bp, Homo sapien
tttgaatttggcacctcggagactt

SEQ ID NO: 4230411 - DNA, 25 bp, Homo sapien
tcggagacttttgcagcgacctgca

SEQ ID NO: 4230412 - DNA, 25 bp, Homo sapien
cacattgagttggaggtaagttccc

SEQ ID NO: 4230413 - DNA, 25 bp, Homo sapien
taagaggtgacccagagcgtagtct

SEQ ID NO: 4230414 - DNA, 25 bp, Homo sapien
gagcatttcaagtatggaatattga

SEQ ID NO: 4230415 - DNA, 25 bp, Homo sapien
tttcaagtatggaatattgagacat

SEQ ID NO: 4230416 - DNA, 25 bp, Homo sapien
atttcaagtatggaatattgagaca

SEQ ID NO: 4230417 - DNA, 25 bp, Homo sapien
agctttgcagtcactagctctggtg

SEQ ID NO: 4230418 - DNA, 25 bp, Homo sapien
cagtcactagctctggtgacttcgg

SEQ ID NO: 4230419 - DNA, 25 bp, Homo sapien
gctttgcagtcactagctctggtga

SEQ ID NO: 4230420 - DNA, 25 bp, Homo sapien
tagctctggtgacttcggttgactt

SEQ ID NO: 4230421 - DNA, 25 bp, Homo sapien
tcagataccagttcccagggctgat

SEQ ID NO: 4230422 - DNA, 25 bp, Homo sapien
cccaccgccttcagataccagttcc

SEQ ID NO: 4230423 - DNA, 25 bp, Homo sapien
cttcagataccagttcccagggctg

SEQ ID NO: 4230424 - DNA, 25 bp, Homo sapien
cgccttcagataccagttcccaggg

SEQ ID NO: 4230425 - DNA, 25 bp, Homo sapien
acttacagactctttctcctgtctg

SEQ ID NO: 4230426 - DNA, 25 bp, Homo sapien
tataacttacagactctttctcctg

SEQ ID NO: 4230427 - DNA, 25 bp, Homo sapien
taacttacagactctttctcctgtc

SEQ ID NO: 4230428 - DNA, 25 bp, Homo sapien
actcatataacttacagactctttc

SEQ ID NO: 4230429 - DNA, 25 bp, Homo sapien
aaagcccctgcattcgagtgcacat

SEQ ID NO: 4230430 - DNA, 25 bp, Homo sapien
aatattttaccgaattcattggtga

SEQ ID NO: 4230431 - DNA, 25 bp, Homo sapien
agcctcttgagaccaatattttacc

SEQ ID NO: 4230432 - DNA, 25 bp, Homo sapien
gagaccaatattttaccgaattcat

SEQ ID NO: 4230433 - DNA, 25 bp, Homo sapien
gacatgtattaggactcataaccaa

SEQ ID NO: 4230434 - DNA, 25 bp, Homo sapien
agctggtcagcccttgaaatcagac

SEQ ID NO: 4230435 - DNA, 25 bp, Homo sapien
atcagacatgtattaggactcataa

SEQ ID NO: 4230436 - DNA, 25 bp, Homo sapien
tgcagctggtcagcccttgaaatca

SEQ ID NO: 4230437 - DNA, 25 bp, Homo sapien
aatcacggtttctgtatatgcaggg

SEQ ID NO: 4230438 - DNA, 25 bp, Homo sapien
tggagataacaccacgggatgccct

SEQ ID NO: 4230439 - DNA, 25 bp, Homo sapien
ggatgccctctgatttgagctgacg

SEQ ID NO: 4230440 - DNA, 25 bp, Homo sapien
gaagcggctgctcataatcacggtt

SEQ ID NO: 4230441 - DNA, 25 bp, Homo sapien
gctcctagaaacactgggactttaa

SEQ ID NO: 4230442 - DNA, 25 bp, Homo sapien
gagcaaaaatttcagggctcctaga

SEQ ID NO: 4230443 - DNA, 25 bp, Homo sapien
agggctcctagaaacactgggactt

SEQ ID NO: 4230444 - DNA, 25 bp, Homo sapien
agcaaaaatttcagggctcctagaa

SEQ ID NO: 4230445 - DNA, 25 bp, Homo sapien
gacaggcccacggatttgcacgtaa

SEQ ID NO: 4230446 - DNA, 25 bp, Homo sapien
gaggtcaaggtagcatggatgacat

SEQ ID NO: 4230447 - DNA, 25 bp, Homo sapien
gatgacatggtgacaggcccacgga

SEQ ID NO: 4230448 - DNA, 25 bp, Homo sapien
tttgcacgtaaacctgcgtgctcgc

SEQ ID NO: 4230449 - DNA, 25 bp, Homo sapien
gaaacttggcgcaggctaactgcct

SEQ ID NO: 4230450 - DNA, 25 bp, Homo sapien
tgtcagaaacttggcgcaggctaac

SEQ ID NO: 4230451 - DNA, 25 bp, Homo sapien
aaaaaagtgtcagaaacttggcgca

SEQ ID NO: 4230452 - DNA, 25 bp, Homo sapien
ttggcgcaggctaactgcctgtcct

SEQ ID NO: 4230453 - DNA, 25 bp, Homo sapien
ctgccacttgccggaaggagggttt

SEQ ID NO: 4230454 - DNA, 25 bp, Homo sapien
tgccacttgccggaaggagggtttc

SEQ ID NO: 4230455 - DNA, 25 bp, Homo sapien
cacttgccggaaggagggtttccat

SEQ ID NO: 4230456 - DNA, 25 bp, Homo sapien
aattcaacagcaggtaagctgcagg

SEQ ID NO: 4230457 - DNA, 25 bp, Homo sapien
aaaaattcaacagcaggtaagctgc

SEQ ID NO: 4230458 - DNA, 25 bp, Homo sapien
ttcaacagcaggtaagctgcaggcc

SEQ ID NO: 4230459 - DNA, 25 bp, Homo sapien
tgcaggcccggctgcgctgccaccc

SEQ ID NO: 4230460 - DNA, 25 bp, Homo sapien
cacacagattccatgtgatgagaga

SEQ ID NO: 4230461 - DNA, 25 bp, Homo sapien
tttcactttcaggacgcttccattg

SEQ ID NO: 4230462 - DNA, 25 bp, Homo sapien
tgcacacagattccatgtgatgaga

SEQ ID NO: 4230463 - DNA, 25 bp, Homo sapien
tcactttcaggacgcttccattgca

SEQ ID NO: 4230464 - DNA, 25 bp, Homo sapien
ggaaaatgagaccattgtcgagggt

SEQ ID NO: 4230465 - DNA, 25 bp, Homo sapien
tcaggtttgaggcttagggttggct

SEQ ID NO: 4230466 - DNA, 25 bp, Homo sapien
agacaagttccgtttcaggtttgag

SEQ ID NO: 4230467 - DNA, 25 bp, Homo sapien
gtggaagaccgagtttgaggaggaa

SEQ ID NO: 4230468 - DNA, 25 bp, Homo sapien
ccttcatcttgtagagctctcagct

SEQ ID NO: 4230469 - DNA, 25 bp, Homo sapien
ggcccttcatcttgtagagctctca

SEQ ID NO: 4230470 - DNA, 25 bp, Homo sapien
gcccttcatcttgtagagctctcag

SEQ ID NO: 4230471 - DNA, 25 bp, Homo sapien
gaggcccttcatcttgtagagctct

SEQ ID NO: 4230472 - DNA, 25 bp, Homo sapien
tctcctgaaaggcttacatcgcaaa

SEQ ID NO: 4230473 - DNA, 25 bp, Homo sapien
tgctcccagaagtctcctgaaaggc

SEQ ID NO: 4230474 - DNA, 25 bp, Homo sapien
gatgttgcctaaggaatagcagaga

SEQ ID NO: 4230475 - DNA, 25 bp, Homo sapien
tgctgtatacacttgagtgctccca

SEQ ID NO: 4230476 - DNA, 25 bp, Homo sapien
accaccagccagacaactgtcgttg

SEQ ID NO: 4230477 - DNA, 25 bp, Homo sapien
cagccagacaactgtcgttgtgccc

SEQ ID NO: 4230478 - DNA, 25 bp, Homo sapien
gacaactgtcgttgtgccctcttca

SEQ ID NO: 4230479 - DNA, 25 bp, Homo sapien
gtcgttgtgccctcttcagacctct

SEQ ID NO: 4230480 - DNA, 25 bp, Homo sapien
aatcttacctgttctatgccttctc

SEQ ID NO: 4230481 - DNA, 25 bp, Homo sapien
aaatgttatagaaggagtatgaaaa

SEQ ID NO: 4230482 - DNA, 25 bp, Homo sapien
gggagaacacaagcgcttcatgaag

SEQ ID NO: 4230483 - DNA, 25 bp, Homo sapien
gatagtagaccctcagtaagcggct

SEQ ID NO: 4230484 - DNA, 25 bp, Homo sapien
aataggagatcaggcgttggcagaa

SEQ ID NO: 4230485 - DNA, 25 bp, Homo sapien
aagctgagcgtggttttacacaccg

SEQ ID NO: 4230486 - DNA, 25 bp, Homo sapien
ccattaggacactgctggttggtgg

SEQ ID NO: 4230487 - DNA, 25 bp, Homo sapien
ggaagaggcacctggctacccagag

SEQ ID NO: 4230488 - DNA, 25 bp, Homo sapien
cattactacataatcgcccattagg

SEQ ID NO: 4230489 - DNA, 25 bp, Homo sapien
tgttgtccacagtgccgaatcatta

SEQ ID NO: 4230490 - DNA, 25 bp, Homo sapien
gagttgttatgaagagtcaaccagc

SEQ ID NO: 4230491 - DNA, 25 bp, Homo sapien
tcaaactgggttctagacacctctg

SEQ ID NO: 4230492 - DNA, 25 bp, Homo sapien
aggccatccagggacatattgtctg

SEQ ID NO: 4230493 - DNA, 25 bp, Homo sapien
tttgtgcaagttgtttaggaccatc

SEQ ID NO: 4230494 - DNA, 25 bp, Homo sapien
aaataattgaagcttgtggttttcg

SEQ ID NO: 4230495 - DNA, 25 bp, Homo sapien
aagcttgtggttttcggtagtctca

SEQ ID NO: 4230496 - DNA, 25 bp, Homo sapien
tggttttcggtagtctcatgtgcag

SEQ ID NO: 4230497 - DNA, 25 bp, Homo sapien
tcggtagtctcatgtgcagaacaga

SEQ ID NO: 4230498 - DNA, 25 bp, Homo sapien
tgtgcatgcatgagcctctgcgagg

SEQ ID NO: 4230499 - DNA, 25 bp, Homo sapien
ctcccctctcctactgatgggagtt

SEQ ID NO: 4230500 - DNA, 25 bp, Homo sapien
gctgtgcatgcatgagcctctgcga

SEQ ID NO: 4230501 - DNA, 25 bp, Homo sapien
agttggtggatgctggccccatctc

SEQ ID NO: 4230502 - DNA, 25 bp, Homo sapien
tgtttatttgtaccaagtatcagaa

SEQ ID NO: 4230503 - DNA, 25 bp, Homo sapien
cactttataagtaacagagtttgtc

SEQ ID NO: 4230504 - DNA, 25 bp, Homo sapien
caaccatagtgagagctgatgtcac

SEQ ID NO: 4230505 - DNA, 25 bp, Homo sapien
tttgtaccaagtatcagaattccac

SEQ ID NO: 4230506 - DNA, 25 bp, Homo sapien
atgacctctctgtggggaggagggc

SEQ ID NO: 4230507 - DNA, 25 bp, Homo sapien
gatgacctctctgtggggaggaggg

SEQ ID NO: 4230508 - DNA, 25 bp, Homo sapien
tgaactccgagcacagggtgaagac

SEQ ID NO: 4230509 - DNA, 25 bp, Homo sapien
cttgatatccagttcgcgctccagg

SEQ ID NO: 4230510 - DNA, 25 bp, Homo sapien
gcttttcctaatgtctggccgccaa

SEQ ID NO: 4230511 - DNA, 25 bp, Homo sapien
tcaagcctcaaagctgtgcgggtgg

SEQ ID NO: 4230512 - DNA, 25 bp, Homo sapien
gcgcctccacactctgcggaaagct

SEQ ID NO: 4230513 - DNA, 25 bp, Homo sapien
agggctgtttgacattcgtgtttga

SEQ ID NO: 4230514 - DNA, 25 bp, Homo sapien
tgacattcgtgtttgaggcttcttc

SEQ ID NO: 4230515 - DNA, 25 bp, Homo sapien
agtgctggcccggggaccttcactg

SEQ ID NO: 4230516 - DNA, 25 bp, Homo sapien
gcagatagcctagtatggacaccac

SEQ ID NO: 4230517 - DNA, 25 bp, Homo sapien
cctgcagatagcctagtatggacac

SEQ ID NO: 4230518 - DNA, 25 bp, Homo sapien
tgcagatagcctagtatggacacca

SEQ ID NO: 4230519 - DNA, 25 bp, Homo sapien
cagatagcctagtatggacaccacc

SEQ ID NO: 4230520 - DNA, 25 bp, Homo sapien
tgactcagccctcgctttgccttgg

SEQ ID NO: 4230521 - DNA, 25 bp, Homo sapien
ttgccttggcagtggagatcaggca

SEQ ID NO: 4230522 - DNA, 25 bp, Homo sapien
cagtggagatcaggcatcagctgct

SEQ ID NO: 4230523 - DNA, 25 bp, Homo sapien
ctgctggcttggatgatgtgttccc

SEQ ID NO: 4230524 - DNA, 25 bp, Homo sapien
tcaatggaagtacgggagagagaat

SEQ ID NO: 4230525 - DNA, 25 bp, Homo sapien
gataaattgctgttccatggattgg

SEQ ID NO: 4230526 - DNA, 25 bp, Homo sapien
tggacaacgggtatgaagcatatac

SEQ ID NO: 4230527 - DNA, 25 bp, Homo sapien
caagtaatcataatacaaggcagtc

SEQ ID NO: 4230528 - DNA, 25 bp, Homo sapien
tcttgtagatcacttgtgaggccat

SEQ ID NO: 4230529 - DNA, 25 bp, Homo sapien
tcctctcttgtagatcacttgtgag

SEQ ID NO: 4230530 - DNA, 25 bp, Homo sapien
tgctcctctcttgtagatcacttgt

SEQ ID NO: 4230531 - DNA, 25 bp, Homo sapien
tctcttgtagatcacttgtgaggcc

SEQ ID NO: 4230532 - DNA, 25 bp, Homo sapien
tgttgcagatatgctttttctgtac

SEQ ID NO: 4230533 - DNA, 25 bp, Homo sapien
tctgtactggtttcgggtatggaag

SEQ ID NO: 4230534 - DNA, 25 bp, Homo sapien
cctccaggtatgtctgttgcagata

SEQ ID NO: 4230535 - DNA, 25 bp, Homo sapien
ttctgtactggtttcgggtatggaa

SEQ ID NO: 4230536 - DNA, 25 bp, Homo sapien
ctggaggactccacgaagtacacca

SEQ ID NO: 4230537 - DNA, 25 bp, Homo sapien
tgagtcgcaatgtttccacctcctc

SEQ ID NO: 4230538 - DNA, 25 bp, Homo sapien
acgaagtacaccaggctcccctatt

SEQ ID NO: 4230539 - DNA, 25 bp, Homo sapien
agggctttctgagtcgcaatgtttc

SEQ ID NO: 4230540 - DNA, 25 bp, Homo sapien
ttcttactacaactacctccaccac

SEQ ID NO: 4230541 - DNA, 25 bp, Homo sapien
tcctggcacgtgaagattttccagt

SEQ ID NO: 4230542 - DNA, 25 bp, Homo sapien
ttcctggcacgtgaagattttccag

SEQ ID NO: 4230543 - DNA, 25 bp, Homo sapien
tttcttactacaactacctccacca

SEQ ID NO: 4230544 - DNA, 25 bp, Homo sapien
accactgcgtttgggcaatttaatg

SEQ ID NO: 4230545 - DNA, 25 bp, Homo sapien
gctcaccactgcgtttgggcaattt

SEQ ID NO: 4230546 - DNA, 25 bp, Homo sapien
caatttaatggggttgccatgggaa

SEQ ID NO: 4230547 - DNA, 25 bp, Homo sapien
cctgctcaccactgcgtttgggcaa

SEQ ID NO: 4230548 - DNA, 25 bp, Homo sapien
gagggttggagggattgatgctcac

SEQ ID NO: 4230549 - DNA, 25 bp, Homo sapien
gcccaaagaccatgaggcttctggg

SEQ ID NO: 4230550 - DNA, 25 bp, Homo sapien
tgcccaaagaccatgaggcttctgg

SEQ ID NO: 4230551 - DNA, 25 bp, Homo sapien
agagggttggagggattgatgctca

SEQ ID NO: 4230552 - DNA, 25 bp, Homo sapien
caggcctccggcaactcagtatctt

SEQ ID NO: 4230553 - DNA, 25 bp, Homo sapien
cctggcgtatggcaaaggctcctgg

SEQ ID NO: 4230554 - DNA, 25 bp, Homo sapien
tagtgacagcctgccgtcagttctg

SEQ ID NO: 4230555 - DNA, 25 bp, Homo sapien
ttttccagagagtaatcccctggcg

SEQ ID NO: 4230556 - DNA, 25 bp, Homo sapien
tctgacaagcatctggtcagctgcc

SEQ ID NO: 4230557 - DNA, 25 bp, Homo sapien
ttcgatccacctgtctaaggagaga

SEQ ID NO: 4230558 - DNA, 25 bp, Homo sapien
ctggtcagctgccaagctctcaaga

SEQ ID NO: 4230559 - DNA, 25 bp, Homo sapien
aagctctcaagaccctttcgatcca

SEQ ID NO: 4230560 - DNA, 25 bp, Homo sapien
cgcgcccagggatcgatgaactaaa

SEQ ID NO: 4230561 - DNA, 25 bp, Homo sapien
ttcttagcccttcacagtcgtggca

SEQ ID NO: 4230562 - DNA, 25 bp, Homo sapien
tacaacttgtcctgttccgggacgc

SEQ ID NO: 4230563 - DNA, 25 bp, Homo sapien
tgaactaaaaatagccgaggcttgt

SEQ ID NO: 4230564 - DNA, 25 bp, Homo sapien
tgtgtgcaggacatcttggagccaa

SEQ ID NO: 4230565 - DNA, 25 bp, Homo sapien
agggaggagaccctttggcaggcac

SEQ ID NO: 4230566 - DNA, 25 bp, Homo sapien
gctgtgtgcaggacatcttggagcc

SEQ ID NO: 4230567 - DNA, 25 bp, Homo sapien
gtgtgcaggacatcttggagccaag

SEQ ID NO: 4230568 - DNA, 25 bp, Homo sapien
gaaggggctgtcttgagcatttcca

SEQ ID NO: 4230569 - DNA, 25 bp, Homo sapien
gacccttgagagtgactgcttggga

SEQ ID NO: 4230570 - DNA, 25 bp, Homo sapien
agacttgtgacccttgagagtgact

SEQ ID NO: 4230571 - DNA, 25 bp, Homo sapien
acttgtgacccttgagagtgactgc

SEQ ID NO: 4230572 - DNA, 25 bp, Homo sapien
ccctcttataggtggatgactcaga

SEQ ID NO: 4230573 - DNA, 25 bp, Homo sapien
atccagcaggccgatccttcaccaa

SEQ ID NO: 4230574 - DNA, 25 bp, Homo sapien
ggcttgagagcagcgaccaatgtgt

SEQ ID NO: 4230575 - DNA, 25 bp, Homo sapien
gaccaatgtgtggtgttgtccctct

SEQ ID NO: 4230576 - DNA, 25 bp, Homo sapien
tctgttgggcaaggaattgactctg

SEQ ID NO: 4230577 - DNA, 25 bp, Homo sapien
tgtctacagccaatgttacagccct

SEQ ID NO: 4230578 - DNA, 25 bp, Homo sapien
tgagttgcccaccaaggatgaggct

SEQ ID NO: 4230579 - DNA, 25 bp, Homo sapien
tccaggtaagggtaagtaggctgct

SEQ ID NO: 4230580 - DNA, 25 bp, Homo sapien
ctgatgacctcaccccaaatgatga

SEQ ID NO: 4230581 - DNA, 25 bp, Homo sapien
tgaagactccatgtatccttggccc

SEQ ID NO: 4230582 - DNA, 25 bp, Homo sapien
tagcaggttggcatgaatctcttcc

SEQ ID NO: 4230583 - DNA, 25 bp, Homo sapien
ggctaaacaccatgccctagcaggt

SEQ ID NO: 4230584 - DNA, 25 bp, Homo sapien
ctggaatggtacttgaggaggagct

SEQ ID NO: 4230585 - DNA, 25 bp, Homo sapien
ttctccaagagaaatgaccaaccga

SEQ ID NO: 4230586 - DNA, 25 bp, Homo sapien
tttgcaacctctatatgagctgcat

SEQ ID NO: 4230587 - DNA, 25 bp, Homo sapien
cacccgtggacaaggggatctggaa

SEQ ID NO: 4230588 - DNA, 25 bp, Homo sapien
tctttgtcggagacacaaacccaga

SEQ ID NO: 4230589 - DNA, 25 bp, Homo sapien
gagttagcaatctcatgagcccgta

SEQ ID NO: 4230590 - DNA, 25 bp, Homo sapien
aaacccagacctgtagctgatagca

SEQ ID NO: 4230591 - DNA, 25 bp, Homo sapien
tataagtatttctgttccaccggat

SEQ ID NO: 4230592 - DNA, 25 bp, Homo sapien
tcttagaccctcgaaatcctctcat

SEQ ID NO: 4230593 - DNA, 25 bp, Homo sapien
cttgcttctaatcttagaccctcga

SEQ ID NO: 4230594 - DNA, 25 bp, Homo sapien
taatcttagaccctcgaaatcctct

SEQ ID NO: 4230595 - DNA, 25 bp, Homo sapien
gcttctaatcttagaccctcgaaat

SEQ ID NO: 4230596 - DNA, 25 bp, Homo sapien
cacttaattccattttaggacaggg

SEQ ID NO: 4230597 - DNA, 25 bp, Homo sapien
tcaccaggcgtgctgccgaaaattt

SEQ ID NO: 4230598 - DNA, 25 bp, Homo sapien
gatcatctctaaggtgcctccaaga

SEQ ID NO: 4230599 - DNA, 25 bp, Homo sapien
gcgctgacacggtaaaggccacttt

SEQ ID NO: 4230600 - DNA, 25 bp, Homo sapien
tcataacaacaggatagcccttcct

SEQ ID NO: 4230601 - DNA, 25 bp, Homo sapien
atcagcaagtcggatggcagtggaa

SEQ ID NO: 4230602 - DNA, 25 bp, Homo sapien
gatgctgccgtgcactgcagatgtc

SEQ ID NO: 4230603 - DNA, 25 bp, Homo sapien
tgggcatcagcaagtcggatggcag

SEQ ID NO: 4230604 - DNA, 25 bp, Homo sapien
tttcctgtctgaaggaccatcagag

SEQ ID NO: 4230605 - DNA, 25 bp, Homo sapien
ctttcctgtctgaaggaccatcaga

SEQ ID NO: 4230606 - DNA, 25 bp, Homo sapien
tctttcctgtctgaaggaccatcag

SEQ ID NO: 4230607 - DNA, 25 bp, Homo sapien
ttcctgtctgaaggaccatcagagc

SEQ ID NO: 4230608 - DNA, 25 bp, Homo sapien
gggcctttaagtgctcaacaccaag

SEQ ID NO: 4230609 - DNA, 25 bp, Homo sapien
catgctgccgaccttcatagaaccg

SEQ ID NO: 4230610 - DNA, 25 bp, Homo sapien
gaggtcaggatgctgccatagctgc

SEQ ID NO: 4230611 - DNA, 25 bp, Homo sapien
catagaaccggtccatcttgggcct

SEQ ID NO: 4230612 - DNA, 25 bp, Homo sapien
gatgaaagcttcaaaggtaggcacc

SEQ ID NO: 4230613 - DNA, 25 bp, Homo sapien
ggcccagggatccaatgatgactct

SEQ ID NO: 4230614 - DNA, 25 bp, Homo sapien
gattggatcaggagtcgggctcacc

SEQ ID NO: 4230615 - DNA, 25 bp, Homo sapien
tcatcctgtctgagtcgtgacacca

SEQ ID NO: 4230616 - DNA, 25 bp, Homo sapien
agttgctacctgaccaatgtgagag

SEQ ID NO: 4230617 - DNA, 25 bp, Homo sapien
taagcaatttgtccctaagcctgtc

SEQ ID NO: 4230618 - DNA, 25 bp, Homo sapien
gccatgagtcaggtaaacacagtaa

SEQ ID NO: 4230619 - DNA, 25 bp, Homo sapien
aatggttggctctcgtctttactgc

SEQ ID NO: 4230620 - DNA, 25 bp, Homo sapien
taacagacctaaatatatgtagcct

SEQ ID NO: 4230621 - DNA, 25 bp, Homo sapien
tgtgagttgtctgtcaagtaccaac

SEQ ID NO: 4230622 - DNA, 25 bp, Homo sapien
taggtatgtgcttcctcgtaataca

SEQ ID NO: 4230623 - DNA, 25 bp, Homo sapien
cattctgtagcagatcagcaaattt

SEQ ID NO: 4230624 - DNA, 25 bp, Homo sapien
gccactacgctcagtttgtatgttg

SEQ ID NO: 4230625 - DNA, 25 bp, Homo sapien
ttttatcagtgttttagtggagtct

SEQ ID NO: 4230626 - DNA, 25 bp, Homo sapien
tttatcagtgttttagtggagtctt

SEQ ID NO: 4230627 - DNA, 25 bp, Homo sapien
ctacgctcagtttgtatgttgattt

SEQ ID NO: 4230628 - DNA, 25 bp, Homo sapien
catgtctctttatctgcaccaactc

SEQ ID NO: 4230629 - DNA, 25 bp, Homo sapien
atgtctctttatctgcaccaactct

SEQ ID NO: 4230630 - DNA, 25 bp, Homo sapien
tgtctctttatctgcaccaactctc

SEQ ID NO: 4230631 - DNA, 25 bp, Homo sapien
ggtctctgcatgatcaatcccagcg

SEQ ID NO: 4230632 - DNA, 25 bp, Homo sapien
agcgcccagaacaccgatatcaagg

SEQ ID NO: 4230633 - DNA, 25 bp, Homo sapien
ccagatggttttctattgcaggagt

SEQ ID NO: 4230634 - DNA, 25 bp, Homo sapien
gaggaaatggtccctgtttaggtgc

SEQ ID NO: 4230635 - DNA, 25 bp, Homo sapien
cacagacttccagggaatagtagtt

SEQ ID NO: 4230636 - DNA, 25 bp, Homo sapien
taagagagttcaaaagtaccacaga

SEQ ID NO: 4230637 - DNA, 25 bp, Homo sapien
tatgactggcgctccttggaagcag

SEQ ID NO: 4230638 - DNA, 25 bp, Homo sapien
ctatttcagaaggtagagaccacaa

SEQ ID NO: 4230639 - DNA, 25 bp, Homo sapien
aatatggaaagttcccgagtgagcg

SEQ ID NO: 4230640 - DNA, 25 bp, Homo sapien
tgagcgttaggggagatgtactggg

SEQ ID NO: 4230641 - DNA, 25 bp, Homo sapien
gcaaatatggaaagttcccgagtga

SEQ ID NO: 4230642 - DNA, 25 bp, Homo sapien
tggaaagttcccgagtgagcgttag

SEQ ID NO: 4230643 - DNA, 25 bp, Homo sapien
gatgtcctatctgagttctctgtag

SEQ ID NO: 4230644 - DNA, 25 bp, Homo sapien
tcacttgtcctgatgtcctatctga

SEQ ID NO: 4230645 - DNA, 25 bp, Homo sapien
tgtcctgatgtcctatctgagttct

SEQ ID NO: 4230646 - DNA, 25 bp, Homo sapien
tcctatctgagttctctgtaggcat

SEQ ID NO: 4230647 - DNA, 25 bp, Homo sapien
atgcacctccctgtgaatgctggcg

SEQ ID NO: 4230648 - DNA, 25 bp, Homo sapien
cctccctgtgaatgctggcgtgctc

SEQ ID NO: 4230649 - DNA, 25 bp, Homo sapien
accactgccgctgatgccgacggtg

SEQ ID NO: 4230650 - DNA, 25 bp, Homo sapien
gccgacggtgcttttcacctgtgcc

SEQ ID NO: 4230651 - DNA, 25 bp, Homo sapien
tgttccatttctcctagtctccata

SEQ ID NO: 4230652 - DNA, 25 bp, Homo sapien
agtgattttcttgccggctagtaaa

SEQ ID NO: 4230653 - DNA, 25 bp, Homo sapien
tctcctagtctccatacaaatccag

SEQ ID NO: 4230654 - DNA, 25 bp, Homo sapien
ctcctaaagtggcaccagcttcttc

SEQ ID NO: 4230655 - DNA, 25 bp, Homo sapien
acagcagccccttgtaaaaactgca

SEQ ID NO: 4230656 - DNA, 25 bp, Homo sapien
agacagcagccccttgtaaaaactg

SEQ ID NO: 4230657 - DNA, 25 bp, Homo sapien
tgtaaaaactgcagcctctgagaga

SEQ ID NO: 4230658 - DNA, 25 bp, Homo sapien
tcagacagcagccccttgtaaaaac

SEQ ID NO: 4230659 - DNA, 25 bp, Homo sapien
ccttctggtcgagtcaggctgtgtc

SEQ ID NO: 4230660 - DNA, 25 bp, Homo sapien
gttccttctggtcgagtcaggctgt

SEQ ID NO: 4230661 - DNA, 25 bp, Homo sapien
tccttctggtcgagtcaggctgtgt

SEQ ID NO: 4230662 - DNA, 25 bp, Homo sapien
ttctggtcgagtcaggctgtgtccc

SEQ ID NO: 4230663 - DNA, 25 bp, Homo sapien
taggccaaagtagctgttctcgtcg

SEQ ID NO: 4230664 - DNA, 25 bp, Homo sapien
aacggtgagtcacacaaagcggcct

SEQ ID NO: 4230665 - DNA, 25 bp, Homo sapien
tcgtcgtttctaatggaagcctcca

SEQ ID NO: 4230666 - DNA, 25 bp, Homo sapien
agcctaggaccagctccggtgtccg

SEQ ID NO: 4230667 - DNA, 25 bp, Homo sapien
ggagcgggcagagaagactcataca

SEQ ID NO: 4230668 - DNA, 25 bp, Homo sapien
ggaacccctggagctgaagcatgag

SEQ ID NO: 4230669 - DNA, 25 bp, Homo sapien
gcatgagaatgagtaagtctgccac

SEQ ID NO: 4230670 - DNA, 25 bp, Homo sapien
gcgggcagagaagactcatacaggg

SEQ ID NO: 4230671 - DNA, 25 bp, Homo sapien
gctgctgctgattacggcggcaatc

SEQ ID NO: 4230672 - DNA, 25 bp, Homo sapien
tgctgctgctgattacggcggcaat

SEQ ID NO: 4230673 - DNA, 25 bp, Homo sapien
tgctgctgattacggcggcaatcat

SEQ ID NO: 4230674 - DNA, 25 bp, Homo sapien
ttgctgctgctgattacggcggcaa

SEQ ID NO: 4230675 - DNA, 25 bp, Homo sapien
caaagagtgatggtcacttccaacc

SEQ ID NO: 4230676 - DNA, 25 bp, Homo sapien
caattctaggcactctgaggtttcc

SEQ ID NO: 4230677 - DNA, 25 bp, Homo sapien
tgtggctgcctatctgccttgagag

SEQ ID NO: 4230678 - DNA, 25 bp, Homo sapien
cagggagttgggaagtatgctcctc

SEQ ID NO: 4230679 - DNA, 25 bp, Homo sapien
gctgatggactcaagcttctagctg

SEQ ID NO: 4230680 - DNA, 25 bp, Homo sapien
ctactgctgatggactcaagcttct

SEQ ID NO: 4230681 - DNA, 25 bp, Homo sapien
gatggactcaagcttctagctgtca

SEQ ID NO: 4230682 - DNA, 25 bp, Homo sapien
gactcaagcttctagctgtcagaca

SEQ ID NO: 4230683 - DNA, 25 bp, Homo sapien
ttctggaattgattagctttcaggg

SEQ ID NO: 4230684 - DNA, 25 bp, Homo sapien
gggaaatactgccagcactttgcct

SEQ ID NO: 4230685 - DNA, 25 bp, Homo sapien
gagtggttctggaattgattagctt

SEQ ID NO: 4230686 - DNA, 25 bp, Homo sapien
cagcaccagtgtgcccctttgtgag

SEQ ID NO: 4230687 - DNA, 25 bp, Homo sapien
caactcactcataatcaccaaaggg

SEQ ID NO: 4230688 - DNA, 25 bp, Homo sapien
tacttattgtccctataatgggcca

SEQ ID NO: 4230689 - DNA, 25 bp, Homo sapien
gcagccatccgtttctaggcacaca

SEQ ID NO: 4230690 - DNA, 25 bp, Homo sapien
gatcctctcaagacagtatccggct

SEQ ID NO: 4230691 - DNA, 25 bp, Homo sapien
gcacatcgcttgtgggaagctgcag

SEQ ID NO: 4230692 - DNA, 25 bp, Homo sapien
tatccacctatgtgcaaatccgggc

SEQ ID NO: 4230693 - DNA, 25 bp, Homo sapien
tttatagtgggtgccttgcaggtcc

SEQ ID NO: 4230694 - DNA, 25 bp, Homo sapien
gacctggcgtggctttacttcgaaa

SEQ ID NO: 4230695 - DNA, 25 bp, Homo sapien
aaattttcatcagtcatataattga

SEQ ID NO: 4230696 - DNA, 25 bp, Homo sapien
aaaattttcatcagtcatataattg

SEQ ID NO: 4230697 - DNA, 25 bp, Homo sapien
ttgaaaggcgcgacaccagaaagcg

SEQ ID NO: 4230698 - DNA, 25 bp, Homo sapien
ttagctgaccacagttatgcggagc

SEQ ID NO: 4230699 - DNA, 25 bp, Homo sapien
cagcctagattttctcagacgcttg

SEQ ID NO: 4230700 - DNA, 25 bp, Homo sapien
cgcaatctgccgctctagcaacggg

SEQ ID NO: 4230701 - DNA, 25 bp, Homo sapien
gagtgatggcttctgcccggtaatc

SEQ ID NO: 4230702 - DNA, 25 bp, Homo sapien
cagggagtgccagtcttgcttcaga

SEQ ID NO: 4230703 - DNA, 25 bp, Homo sapien
gctttcaggaagatacccagtaggg

SEQ ID NO: 4230704 - DNA, 25 bp, Homo sapien
tggaaacacggcaggaaagctaaca

SEQ ID NO: 4230705 - DNA, 25 bp, Homo sapien
tggaagccaatcagcgcagtacact

SEQ ID NO: 4230706 - DNA, 25 bp, Homo sapien
tccttggtccgcagagacagctagc

SEQ ID NO: 4230707 - DNA, 25 bp, Homo sapien
tcttgaccaattagaagcggagacg

SEQ ID NO: 4230708 - DNA, 25 bp, Homo sapien
cacgggcaaccagttaggcttcaga

SEQ ID NO: 4230709 - DNA, 25 bp, Homo sapien
ccccgatgaggtatagcagcaacag

SEQ ID NO: 4230710 - DNA, 25 bp, Homo sapien
tgaggtatagcagcaacaggcaaaa

SEQ ID NO: 4230711 - DNA, 25 bp, Homo sapien
aatcaccgccccgatgaggtatagc

SEQ ID NO: 4230712 - DNA, 25 bp, Homo sapien
ccgccccgatgaggtatagcagcaa

SEQ ID NO: 4230713 - DNA, 25 bp, Homo sapien
gcatagagcatcgtccgcttctcca

SEQ ID NO: 4230714 - DNA, 25 bp, Homo sapien
ccagaatggctcttcgaaggcttgg

SEQ ID NO: 4230715 - DNA, 25 bp, Homo sapien
gcggggcacagcaactcacctcttt

SEQ ID NO: 4230716 - DNA, 25 bp, Homo sapien
tggctcttcgaaggcttggcataga

SEQ ID NO: 4230717 - DNA, 25 bp, Homo sapien
gaagtagagggagagaatacttcat

SEQ ID NO: 4230718 - DNA, 25 bp, Homo sapien
ggaagtagagggagagaatacttca

SEQ ID NO: 4230719 - DNA, 25 bp, Homo sapien
ctgggaagtagagggagagaatact

SEQ ID NO: 4230720 - DNA, 25 bp, Homo sapien
gggaagtagagggagagaatacttc

SEQ ID NO: 4230721 - DNA, 25 bp, Homo sapien
atcatcagggttccggtcgggatga

SEQ ID NO: 4230722 - DNA, 25 bp, Homo sapien
gatgaagctgcagggctagtttcct

SEQ ID NO: 4230723 - DNA, 25 bp, Homo sapien
tttatagaggcacttcgaggcaccc

SEQ ID NO: 4230724 - DNA, 25 bp, Homo sapien
tcataagcagcacccagatcctgga

SEQ ID NO: 4230725 - DNA, 25 bp, Homo sapien
ttcttcaccataagtatcgtactgt

SEQ ID NO: 4230726 - DNA, 25 bp, Homo sapien
aaaaatgtctccatgggagctctga

SEQ ID NO: 4230727 - DNA, 25 bp, Homo sapien
agtatcgtactgtttccgtttctca

SEQ ID NO: 4230728 - DNA, 25 bp, Homo sapien
tccgtttctcactatctgacagaac

SEQ ID NO: 4230729 - DNA, 25 bp, Homo sapien
cttctagatctacaataatatcact

SEQ ID NO: 4230730 - DNA, 25 bp, Homo sapien
atttcctgcatatacttcttccaaa

SEQ ID NO: 4230731 - DNA, 25 bp, Homo sapien
tctgtcttgctgacgaggggttcct

SEQ ID NO: 4230732 - DNA, 25 bp, Homo sapien
tccaaagtgacttctagatctacaa

SEQ ID NO: 4230733 - DNA, 25 bp, Homo sapien
gctgtgtaaagcataacccctgagg

SEQ ID NO: 4230734 - DNA, 25 bp, Homo sapien
tatgaaaggcccaggtcaacagagt

SEQ ID NO: 4230735 - DNA, 25 bp, Homo sapien
tgaggtacctcccagaaggaagcag

SEQ ID NO: 4230736 - DNA, 25 bp, Homo sapien
aacatgggcgctaattaggctcacc

SEQ ID NO: 4230737 - DNA, 25 bp, Homo sapien
tgccttgccacaggtttgtttctaa

SEQ ID NO: 4230738 - DNA, 25 bp, Homo sapien
acattagggcattcgtcgcagacca

SEQ ID NO: 4230739 - DNA, 25 bp, Homo sapien
gcccagctgggtggtccgcatctct

SEQ ID NO: 4230740 - DNA, 25 bp, Homo sapien
tctcttgccgacaattgcacttccg

SEQ ID NO: 4230741 - DNA, 25 bp, Homo sapien
cagcgttcgttcttcattcactagt

SEQ ID NO: 4230742 - DNA, 25 bp, Homo sapien
aaggggtactccatgccgtctctca

SEQ ID NO: 4230743 - DNA, 25 bp, Homo sapien
tctacttccagcgttcgttcttcat

SEQ ID NO: 4230744 - DNA, 25 bp, Homo sapien
ttctccaataaaggggtactccatg

SEQ ID NO: 4230745 - DNA, 25 bp, Homo sapien
tttgattcggaaccgtaaatctcca

SEQ ID NO: 4230746 - DNA, 25 bp, Homo sapien
tgattcggaaccgtaaatctccagg

SEQ ID NO: 4230747 - DNA, 25 bp, Homo sapien
tcggaaccgtaaatctccaggctcc

SEQ ID NO: 4230748 - DNA, 25 bp, Homo sapien
gattcggaaccgtaaatctccaggc

SEQ ID NO: 4230749 - DNA, 25 bp, Homo sapien
tgtgaccatccaagtgagtaatatc

SEQ ID NO: 4230750 - DNA, 25 bp, Homo sapien
catttgtgtacaaatcatctcctct

SEQ ID NO: 4230751 - DNA, 25 bp, Homo sapien
catctcaaagccaaccagtgactca

SEQ ID NO: 4230752 - DNA, 25 bp, Homo sapien
tgactcaactaatgagattgtcaca

SEQ ID NO: 4230753 - DNA, 25 bp, Homo sapien
tggtgatcttatcccgggaaatatg

SEQ ID NO: 4230754 - DNA, 25 bp, Homo sapien
gctcctggcctggtgatcttatccc

SEQ ID NO: 4230755 - DNA, 25 bp, Homo sapien
aaagtgattatcaaagagcccttga

SEQ ID NO: 4230756 - DNA, 25 bp, Homo sapien
tctcgcttcctctgttaactgttct

SEQ ID NO: 4230757 - DNA, 25 bp, Homo sapien
gcactgacccttgtttcagtagctg

SEQ ID NO: 4230758 - DNA, 25 bp, Homo sapien
cttctgcactgacccttgtttcagt

SEQ ID NO: 4230759 - DNA, 25 bp, Homo sapien
tctgcactgacccttgtttcagtag

SEQ ID NO: 4230760 - DNA, 25 bp, Homo sapien
tgcactgacccttgtttcagtagct

SEQ ID NO: 4230761 - DNA, 25 bp, Homo sapien
aatatccttgcagtccattgtatac

SEQ ID NO: 4230762 - DNA, 25 bp, Homo sapien
caatatccttgcagtccattgtata

SEQ ID NO: 4230763 - DNA, 25 bp, Homo sapien
tcaatatccttgcagtccattgtat

SEQ ID NO: 4230764 - DNA, 25 bp, Homo sapien
ggaggacaacccaaatagctcacag

SEQ ID NO: 4230765 - DNA, 25 bp, Homo sapien
tatcactcttttgcatgcgtgtgca

SEQ ID NO: 4230766 - DNA, 25 bp, Homo sapien
taattcttgaaactcaggcggcagc

SEQ ID NO: 4230767 - DNA, 25 bp, Homo sapien
tgtgtaaccttcattcatggacccc

SEQ ID NO: 4230768 - DNA, 25 bp, Homo sapien
tcttctcttgcttatctttcagagc

SEQ ID NO: 4230769 - DNA, 25 bp, Homo sapien
cttctcttgcttatctttcagagcc

SEQ ID NO: 4230770 - DNA, 25 bp, Homo sapien
catcaacagactgggcttgtgaggc

SEQ ID NO: 4230771 - DNA, 25 bp, Homo sapien
gggacatagctttaaccacttgctc

SEQ ID NO: 4230772 - DNA, 25 bp, Homo sapien
aaaggcaatggccacacatgaaggg

SEQ ID NO: 4230773 - DNA, 25 bp, Homo sapien
caatgtcttcaaaatgccccctaca

SEQ ID NO: 4230774 - DNA, 25 bp, Homo sapien
catctaagtggatcaaaaatcgagg

SEQ ID NO: 4230775 - DNA, 25 bp, Homo sapien
gtggatcaaaaatcgaggaatcctt

SEQ ID NO: 4230776 - DNA, 25 bp, Homo sapien
taagtggatcaaaaatcgaggaatc

SEQ ID NO: 4230777 - DNA, 25 bp, Homo sapien
gatcaaaaatcgaggaatcctttac

SEQ ID NO: 4230778 - DNA, 25 bp, Homo sapien
tgccaagagtacagagagcccctcc

SEQ ID NO: 4230779 - DNA, 25 bp, Homo sapien
caaatgaaagctttcacgagtgagc

SEQ ID NO: 4230780 - DNA, 25 bp, Homo sapien
tctacaccagagatcatgggctttt

SEQ ID NO: 4230781 - DNA, 25 bp, Homo sapien
ctccttttgatgtaattgtgcccac

SEQ ID NO: 4230782 - DNA, 25 bp, Homo sapien
gctttcacgagtgagctctccctct

SEQ ID NO: 4230783 - DNA, 25 bp, Homo sapien
tgggcgtcgcgaaggagcttctcct

SEQ ID NO: 4230784 - DNA, 25 bp, Homo sapien
cctgattggaaacccagaacatagc

SEQ ID NO: 4230785 - DNA, 25 bp, Homo sapien
tcctcaaaccactcggcctgattgg

SEQ ID NO: 4230786 - DNA, 25 bp, Homo sapien
ccgcttccgtaacctctctttgaat

SEQ ID NO: 4230787 - DNA, 25 bp, Homo sapien
aggggctaggactcccacttggagg

SEQ ID NO: 4230788 - DNA, 25 bp, Homo sapien
atatgtatatttcatcaggggaggg

SEQ ID NO: 4230789 - DNA, 25 bp, Homo sapien
gaataacaaggaactgagtatatgt

SEQ ID NO: 4230790 - DNA, 25 bp, Homo sapien
ggaggggctaggactcccacttgga

SEQ ID NO: 4230791 - DNA, 25 bp, Homo sapien
ctggcaggcgtgcaggtggttggag

SEQ ID NO: 4230792 - DNA, 25 bp, Homo sapien
tgctgggaaaggtagacccatggag

SEQ ID NO: 4230793 - DNA, 25 bp, Homo sapien
tggagcctgccggaagaattgcata

SEQ ID NO: 4230794 - DNA, 25 bp, Homo sapien
aggcttcgggaccaacccaggtgct

SEQ ID NO: 4230795 - DNA, 25 bp, Homo sapien
agttcggttgtctataaatcagccc

SEQ ID NO: 4230796 - DNA, 25 bp, Homo sapien
aggtgtgtttgtatccccaaggaag

SEQ ID NO: 4230797 - DNA, 25 bp, Homo sapien
tttctggatcatcgcagttcggttg

SEQ ID NO: 4230798 - DNA, 25 bp, Homo sapien
gatgtagtctatagccaccagagct

SEQ ID NO: 4230799 - DNA, 25 bp, Homo sapien
ttcagctgcctcacgctgcatcttg

SEQ ID NO: 4230800 - DNA, 25 bp, Homo sapien
gggtgtctatttcaatctcaaacag

SEQ ID NO: 4230801 - DNA, 25 bp, Homo sapien
tggtttccagggtgtctatttcaat

SEQ ID NO: 4230802 - DNA, 25 bp, Homo sapien
caatctcaaacagctctccggaggg

SEQ ID NO: 4230803 - DNA, 25 bp, Homo sapien
ggaaatcacagtctccttcgacagc

SEQ ID NO: 4230804 - DNA, 25 bp, Homo sapien
gaatcacattttgcgtataccacgg

SEQ ID NO: 4230805 - DNA, 25 bp, Homo sapien
taccacggaaaacttgccatctagt

SEQ ID NO: 4230806 - DNA, 25 bp, Homo sapien
acttgccatctagtttcaacagctg

SEQ ID NO: 4230807 - DNA, 25 bp, Homo sapien
aagctgctagaactacttaagttga

SEQ ID NO: 4230808 - DNA, 25 bp, Homo sapien
gctgctagaactacttaagttgaaa

SEQ ID NO: 4230809 - DNA, 25 bp, Homo sapien
tgctagaactacttaagttgaaaat

SEQ ID NO: 4230810 - DNA, 25 bp, Homo sapien
tccttttcctcaccgacaaagctgc

SEQ ID NO: 4230811 - DNA, 25 bp, Homo sapien
agaggaaaccaggatgtgggcagcc

SEQ ID NO: 4230812 - DNA, 25 bp, Homo sapien
ctcggagagaggaaaccaggatgtg

SEQ ID NO: 4230813 - DNA, 25 bp, Homo sapien
aggaaaccaggatgtgggcagccat

SEQ ID NO: 4230814 - DNA, 25 bp, Homo sapien
aaaccaggatgtgggcagccattct

SEQ ID NO: 4230815 - DNA, 25 bp, Homo sapien
tggagccgttgttctgagcgttgaa

SEQ ID NO: 4230816 - DNA, 25 bp, Homo sapien
cctccagctgaaaattggagccgtt

SEQ ID NO: 4230817 - DNA, 25 bp, Homo sapien
agctgagcccgggaaatttcctcca

SEQ ID NO: 4230818 - DNA, 25 bp, Homo sapien
agtcttggcacaccttgcgcacgtc

SEQ ID NO: 4230819 - DNA, 25 bp, Homo sapien
ctgtcaaaagaatctcagtctttac

SEQ ID NO: 4230820 - DNA, 25 bp, Homo sapien
acattcccgaagtgccaccgaactg

SEQ ID NO: 4230821 - DNA, 25 bp, Homo sapien
tacagtacattcccgaagtgccacc

SEQ ID NO: 4230822 - DNA, 25 bp, Homo sapien
tacattcccgaagtgccaccgaact

SEQ ID NO: 4230823 - DNA, 25 bp, Homo sapien
agtacattcccgaagtgccaccgaa

SEQ ID NO: 4230824 - DNA, 25 bp, Homo sapien
tggacgttacagtggctcagcatgg

SEQ ID NO: 4230825 - DNA, 25 bp, Homo sapien
gttggggtcctcatgacactcagga

SEQ ID NO: 4230826 - DNA, 25 bp, Homo sapien
tcaggagcctcatacccccttagga

SEQ ID NO: 4230827 - DNA, 25 bp, Homo sapien
catacccccttaggatgctttcttc

SEQ ID NO: 4230828 - DNA, 25 bp, Homo sapien
gggagtggggatgtacctgccggca

SEQ ID NO: 4230829 - DNA, 25 bp, Homo sapien
agtggggatgtacctgccggcagct

SEQ ID NO: 4230830 - DNA, 25 bp, Homo sapien
aacggagggagtggggatgtacctg

SEQ ID NO: 4230831 - DNA, 25 bp, Homo sapien
gggatgtacctgccggcagctgtgg

SEQ ID NO: 4230832 - DNA, 25 bp, Homo sapien
aatttacagtgagtgcttctggccg

SEQ ID NO: 4230833 - DNA, 25 bp, Homo sapien
tgggcaactctaccagctgacactg

SEQ ID NO: 4230834 - DNA, 25 bp, Homo sapien
gcttctggccgacgtgggcaactct

SEQ ID NO: 4230835 - DNA, 25 bp, Homo sapien
tctgtggcagatgttcagcggagat

SEQ ID NO: 4230836 - DNA, 25 bp, Homo sapien
tctccagtgactcgaaaggcatttt

SEQ ID NO: 4230837 - DNA, 25 bp, Homo sapien
cattcatgcagaccatgcgtcggcc

SEQ ID NO: 4230838 - DNA, 25 bp, Homo sapien
cattagactgataggagtgggaacc

SEQ ID NO: 4230839 - DNA, 25 bp, Homo sapien
gataggaaaccggaatcagaaggcc

SEQ ID NO: 4230840 - DNA, 25 bp, Homo sapien
gccagcaggttacacttggctgcct

SEQ ID NO: 4230841 - DNA, 25 bp, Homo sapien
cagacactgtaaactccacataggt

SEQ ID NO: 4230842 - DNA, 25 bp, Homo sapien
aactccacataggtagaaggtggga

SEQ ID NO: 4230843 - DNA, 25 bp, Homo sapien
ttctgccagcaggttacacttggct

SEQ ID NO: 4230844 - DNA, 25 bp, Homo sapien
aaggcttgccgtgatccacagggag

SEQ ID NO: 4230845 - DNA, 25 bp, Homo sapien
tgggcgtgacttggcttcattagca

SEQ ID NO: 4230846 - DNA, 25 bp, Homo sapien
caaacagctctgtccgagtggtaac

SEQ ID NO: 4230847 - DNA, 25 bp, Homo sapien
ggtgacaccctaaaagaaggcttgc

SEQ ID NO: 4230848 - DNA, 25 bp, Homo sapien
tcattgacgcgccaaccttaaatta

SEQ ID NO: 4230849 - DNA, 25 bp, Homo sapien
attgacgcgccaaccttaaattagt

SEQ ID NO: 4230850 - DNA, 25 bp, Homo sapien
ccccaatttcattgacgcgccaacc

SEQ ID NO: 4230851 - DNA, 25 bp, Homo sapien
caatttcattgacgcgccaacctta

SEQ ID NO: 4230852 - DNA, 25 bp, Homo sapien
gtgtttggaacaccatgcaggtcac

SEQ ID NO: 4230853 - DNA, 25 bp, Homo sapien
ctgtgtttggaacaccatgcaggtc

SEQ ID NO: 4230854 - DNA, 25 bp, Homo sapien
gtgttgccttacaaaagccatattg

SEQ ID NO: 4230855 - DNA, 25 bp, Homo sapien
ccaccaagcttctcactgagtgttg

SEQ ID NO: 4230856 - DNA, 25 bp, Homo sapien
ggtggctttgtcaactacacagtaa

SEQ ID NO: 4230857 - DNA, 25 bp, Homo sapien
taggcaagaatattcacggagctgt

SEQ ID NO: 4230858 - DNA, 25 bp, Homo sapien
gatgattccgcataccccagtgtta

SEQ ID NO: 4230859 - DNA, 25 bp, Homo sapien
cagccactgggagctaacaggtaga

SEQ ID NO: 4230860 - DNA, 25 bp, Homo sapien
ccatgaaggtgtggcgcaggtcgta

SEQ ID NO: 4230861 - DNA, 25 bp, Homo sapien
tagtgcgcccggtgcaactggtgtc

SEQ ID NO: 4230862 - DNA, 25 bp, Homo sapien
catctgggtccaccacgggtgtggg

SEQ ID NO: 4230863 - DNA, 25 bp, Homo sapien
gggagtccaggtgcgccaagtggag

SEQ ID NO: 4230864 - DNA, 25 bp, Homo sapien
ctccccggacatggaggaaccactg

SEQ ID NO: 4230865 - DNA, 25 bp, Homo sapien
ttgaagtgtctgatcctccccggac

SEQ ID NO: 4230866 - DNA, 25 bp, Homo sapien
tgcaccactgtgcgtgttttccggg

SEQ ID NO: 4230867 - DNA, 25 bp, Homo sapien
agcaccaacactaggctgcaccact

SEQ ID NO: 4230868 - DNA, 25 bp, Homo sapien
gtgacacttgcgtggccagcagaca

SEQ ID NO: 4230869 - DNA, 25 bp, Homo sapien
cttgatattaatgtagatcgcatgt

SEQ ID NO: 4230870 - DNA, 25 bp, Homo sapien
agtagggagtcaagacttgatatta

SEQ ID NO: 4230871 - DNA, 25 bp, Homo sapien
ctgtgccaaacctcctcatctctgc

SEQ ID NO: 4230872 - DNA, 25 bp, Homo sapien
tcaacctaatgccttctgtcaaaca

SEQ ID NO: 4230873 - DNA, 25 bp, Homo sapien
gccttctgtcaaacataaccaccac

SEQ ID NO: 4230874 - DNA, 25 bp, Homo sapien
catgacaagttgtcaacctaatgcc

SEQ ID NO: 4230875 - DNA, 25 bp, Homo sapien
caagttgtcaacctaatgccttctg

SEQ ID NO: 4230876 - DNA, 25 bp, Homo sapien
cagaggcagagaacacaatcatggt

SEQ ID NO: 4230877 - DNA, 25 bp, Homo sapien
ttttgtaaggtcaaccagaggcaga

SEQ ID NO: 4230878 - DNA, 25 bp, Homo sapien
cacatataagcttagcaagagcacc

SEQ ID NO: 4230879 - DNA, 25 bp, Homo sapien
ggtctttcaggcactttcattaaca

SEQ ID NO: 4230880 - DNA, 25 bp, Homo sapien
ttcactttgattttgattagggaca

SEQ ID NO: 4230881 - DNA, 25 bp, Homo sapien
gggtaaaaggctatgcatgtgaggg

SEQ ID NO: 4230882 - DNA, 25 bp, Homo sapien
tatctggcaatacagcaggtttttg

SEQ ID NO: 4230883 - DNA, 25 bp, Homo sapien
tgattttgattagggacactgtgtt

SEQ ID NO: 4230884 - DNA, 25 bp, Homo sapien
cagaaacgctgtggaggtagagaag

SEQ ID NO: 4230885 - DNA, 25 bp, Homo sapien
ccatgagggtgtgactgagggaacc

SEQ ID NO: 4230886 - DNA, 25 bp, Homo sapien
gccatcagcagggtcgttgaaggtg

SEQ ID NO: 4230887 - DNA, 25 bp, Homo sapien
cagatgttggatgggtgggccatca

SEQ ID NO: 4230888 - DNA, 25 bp, Homo sapien
gaaccgcaggatgggaacaggaaca

SEQ ID NO: 4230889 - DNA, 25 bp, Homo sapien
gagttgggccccgataaggcatgtg

SEQ ID NO: 4230890 - DNA, 25 bp, Homo sapien
gagcccttcagtgagaaccgcagga

SEQ ID NO: 4230891 - DNA, 25 bp, Homo sapien
tcagggcatcaaaagccacgctccg

SEQ ID NO: 4230892 - DNA, 25 bp, Homo sapien
tagcatgggtgtcatctgagagtgt

SEQ ID NO: 4230893 - DNA, 25 bp, Homo sapien
tgacgctggtgtaggtggaagggat

SEQ ID NO: 4230894 - DNA, 25 bp, Homo sapien
catctgagagtgtggtcagtggaaa

SEQ ID NO: 4230895 - DNA, 25 bp, Homo sapien
aaagggtgacgctggtgtaggtgga

SEQ ID NO: 4230896 - DNA, 25 bp, Homo sapien
tgagtatactgaccctatgcatagg

SEQ ID NO: 4230897 - DNA, 25 bp, Homo sapien
tgaggacccagagttgttcaggcct

SEQ ID NO: 4230898 - DNA, 25 bp, Homo sapien
tgtcaaggatgctgtaggcgcagtc

SEQ ID NO: 4230899 - DNA, 25 bp, Homo sapien
tgatacataagccagcagccggttt

SEQ ID NO: 4230900 - DNA, 25 bp, Homo sapien
actggctggcttgtaaggctcttta

SEQ ID NO: 4230901 - DNA, 25 bp, Homo sapien
ctctttaaggcagacttgagcggtt

SEQ ID NO: 4230902 - DNA, 25 bp, Homo sapien
tggctggcttgtaaggctctttaag

SEQ ID NO: 4230903 - DNA, 25 bp, Homo sapien
cagacttgagcggttttgttacaac

SEQ ID NO: 4230904 - DNA, 25 bp, Homo sapien
cagcacaggactaggatgcagagtg

SEQ ID NO: 4230905 - DNA, 25 bp, Homo sapien
ggagacattgctccgcagcacagga

SEQ ID NO: 4230906 - DNA, 25 bp, Homo sapien
cacaggactaggatgcagagtgcca

SEQ ID NO: 4230907 - DNA, 25 bp, Homo sapien
gggtggagacattgctccgcagcac

SEQ ID NO: 4230908 - DNA, 25 bp, Homo sapien
cagcacatctgagtcattgcagccc

SEQ ID NO: 4230909 - DNA, 25 bp, Homo sapien
tgcaactgccagcacatctgagtca

SEQ ID NO: 4230910 - DNA, 25 bp, Homo sapien
acatctgagtcattgcagccccggg

SEQ ID NO: 4230911 - DNA, 25 bp, Homo sapien
tgccagcacatctgagtcattgcag

SEQ ID NO: 4230912 - DNA, 25 bp, Homo sapien
tctttgttaatatcccgcagggcaa

SEQ ID NO: 4230913 - DNA, 25 bp, Homo sapien
gtctcagcacatagccatcctttct

SEQ ID NO: 4230914 - DNA, 25 bp, Homo sapien
ctttgttaatatcccgcagggcaaa

SEQ ID NO: 4230915 - DNA, 25 bp, Homo sapien
cagcacatagccatcctttctgtct

SEQ ID NO: 4230916 - DNA, 25 bp, Homo sapien
cgtctgtattcctgggcgtcgttca

SEQ ID NO: 4230917 - DNA, 25 bp, Homo sapien
ccgtctgtattcctgggcgtcgttc

SEQ ID NO: 4230918 - DNA, 25 bp, Homo sapien
gtctgtattcctgggcgtcgttcac

SEQ ID NO: 4230919 - DNA, 25 bp, Homo sapien
gccccagagtgggaactgtccctac

SEQ ID NO: 4230920 - DNA, 25 bp, Homo sapien
atccctgccccagagtgggaactgt

SEQ ID NO: 4230921 - DNA, 25 bp, Homo sapien
ctgccccagagtgggaactgtccct

SEQ ID NO: 4230922 - DNA, 25 bp, Homo sapien
gtctctccagcttgcccacatccct

SEQ ID NO: 4230923 - DNA, 25 bp, Homo sapien
ctgtgggaaggggtagagaaatgca

SEQ ID NO: 4230924 - DNA, 25 bp, Homo sapien
agagaaatgcaatacatttcacagg

SEQ ID NO: 4230925 - DNA, 25 bp, Homo sapien
gtagagaaatgcaatacatttcaca

SEQ ID NO: 4230926 - DNA, 25 bp, Homo sapien
gaaggggtagagaaatgcaatacat

SEQ ID NO: 4230927 - DNA, 25 bp, Homo sapien
gcacatggcagtcagtctctagcac

SEQ ID NO: 4230928 - DNA, 25 bp, Homo sapien
cagtgtaagatagaacagagatccc

SEQ ID NO: 4230929 - DNA, 25 bp, Homo sapien
aaatatcctcattccacagtcttgc

SEQ ID NO: 4230930 - DNA, 25 bp, Homo sapien
cagtctctagcacatccagtgtaag

SEQ ID NO: 4230931 - DNA, 25 bp, Homo sapien
tccagatctggctcataagggtctc

SEQ ID NO: 4230932 - DNA, 25 bp, Homo sapien
taaccatggaagtcgtgagctgagg

SEQ ID NO: 4230933 - DNA, 25 bp, Homo sapien
tgaggtgtaaccatttccagatctg

SEQ ID NO: 4230934 - DNA, 25 bp, Homo sapien
taattgagttctaaccacaggaagg

SEQ ID NO: 4230935 - DNA, 25 bp, Homo sapien
cgaagagtacagttataagcagcta

SEQ ID NO: 4230936 - DNA, 25 bp, Homo sapien
ctgggcgaagagtacagttataagc

SEQ ID NO: 4230937 - DNA, 25 bp, Homo sapien
gcagctaaatagagaactctacttg

SEQ ID NO: 4230938 - DNA, 25 bp, Homo sapien
aaatattgctttgcattgaccataa

SEQ ID NO: 4230939 - DNA, 25 bp, Homo sapien
attggaagagtcagtgggtatggag

SEQ ID NO: 4230940 - DNA, 25 bp, Homo sapien
ggtgattggaagagtcagtgggtat

SEQ ID NO: 4230941 - DNA, 25 bp, Homo sapien
cttggtgattggaagagtcagtggg

SEQ ID NO: 4230942 - DNA, 25 bp, Homo sapien
tgattggaagagtcagtgggtatgg

SEQ ID NO: 4230943 - DNA, 25 bp, Homo sapien
gagagaatactgcttggatgtgttc

SEQ ID NO: 4230944 - DNA, 25 bp, Homo sapien
gttgtatttcgcaagagactcggtg

SEQ ID NO: 4230945 - DNA, 25 bp, Homo sapien
tgttctcattgttgtatttcgcaag

SEQ ID NO: 4230946 - DNA, 25 bp, Homo sapien
cattgttgtatttcgcaagagactc

SEQ ID NO: 4230947 - DNA, 25 bp, Homo sapien
cggaggactgaagtgaacagctgct

SEQ ID NO: 4230948 - DNA, 25 bp, Homo sapien
ggatttagtacatggtgattcttta

SEQ ID NO: 4230949 - DNA, 25 bp, Homo sapien
taattaagtattccacaaagtaaga

SEQ ID NO: 4230950 - DNA, 25 bp, Homo sapien
acagagtcggaggactgaagtgaac

SEQ ID NO: 4230951 - DNA, 25 bp, Homo sapien
tcacaagtcacagagacaaactttt

SEQ ID NO: 4230952 - DNA, 25 bp, Homo sapien
gtgtgttcgagtcagagaacctttg

SEQ ID NO: 4230953 - DNA, 25 bp, Homo sapien
tttcccagtgtgttcgagtcagaga

SEQ ID NO: 4230954 - DNA, 25 bp, Homo sapien
gagaacctttgcaaagaccaacagg

SEQ ID NO: 4230955 - DNA, 25 bp, Homo sapien
ggttaacagcagagttttcacttcc

SEQ ID NO: 4230956 - DNA, 25 bp, Homo sapien
gctgggattcttccaccttgggaag

SEQ ID NO: 4230957 - DNA, 25 bp, Homo sapien
gtttgtaggtttctggttaacagca

SEQ ID NO: 4230958 - DNA, 25 bp, Homo sapien
cagagttttcacttccagtggctgg

SEQ ID NO: 4230959 - DNA, 25 bp, Homo sapien
tcaggaagatattggacagatcctc

SEQ ID NO: 4230960 - DNA, 25 bp, Homo sapien
gtcaggaagatattggacagatcct

SEQ ID NO: 4230961 - DNA, 25 bp, Homo sapien
agtcaggaagatattggacagatcc

SEQ ID NO: 4230962 - DNA, 25 bp, Homo sapien
cgtggttaggtccagatgcacagga

SEQ ID NO: 4230963 - DNA, 25 bp, Homo sapien
taggtccagatgcacaggaaaggcc

SEQ ID NO: 4230964 - DNA, 25 bp, Homo sapien
ggttaggtccagatgcacaggaaag

SEQ ID NO: 4230965 - DNA, 25 bp, Homo sapien
ggattcgtggttaggtccagatgca

SEQ ID NO: 4230966 - DNA, 25 bp, Homo sapien
gcagtgcgtgctttttctttgggga

SEQ ID NO: 4230967 - DNA, 25 bp, Homo sapien
cagcagtgcgtgctttttctttggg

SEQ ID NO: 4230968 - DNA, 25 bp, Homo sapien
cagtgcgtgctttttctttggggaa

SEQ ID NO: 4230969 - DNA, 25 bp, Homo sapien
tcagcagtgcgtgctttttctttgg

SEQ ID NO: 4230970 - DNA, 25 bp, Homo sapien
aggacaagagggctggcattctggg

SEQ ID NO: 4230971 - DNA, 25 bp, Homo sapien
gagggctggcattctgggctggccc

SEQ ID NO: 4230972 - DNA, 25 bp, Homo sapien
gacaagagggctggcattctgggct

SEQ ID NO: 4230973 - DNA, 25 bp, Homo sapien
gcggaaggacaagagggctggcatt

SEQ ID NO: 4230974 - DNA, 25 bp, Homo sapien
gagaggcatctctccatggtatgag

SEQ ID NO: 4230975 - DNA, 25 bp, Homo sapien
tgtacagggtagagtgcagcccaag

SEQ ID NO: 4230976 - DNA, 25 bp, Homo sapien
tcagtttaggaggtgatgcagctca

SEQ ID NO: 4230977 - DNA, 25 bp, Homo sapien
ttccaatcccagtcaacatgctgag

SEQ ID NO: 4230978 - DNA, 25 bp, Homo sapien
gatagaggacaatagctgcatctgc

SEQ ID NO: 4230979 - DNA, 25 bp, Homo sapien
gaagtctttttagttgagccacctg

SEQ ID NO: 4230980 - DNA, 25 bp, Homo sapien
tctaacagccaccaagatagaggac

SEQ ID NO: 4230981 - DNA, 25 bp, Homo sapien
caacacggtgtaagaccccacatga

SEQ ID NO: 4230982 - DNA, 25 bp, Homo sapien
cattgagttcaaagagccattggga

SEQ ID NO: 4230983 - DNA, 25 bp, Homo sapien
gagaaacaaagtctgaggcccttcc

SEQ ID NO: 4230984 - DNA, 25 bp, Homo sapien
cacaggatagttccaacagagcggg

SEQ ID NO: 4230985 - DNA, 25 bp, Homo sapien
gctggctccagggaattgaataacc

SEQ ID NO: 4230986 - DNA, 25 bp, Homo sapien
atcccttgctatgatctgccactgc

SEQ ID NO: 4230987 - DNA, 25 bp, Homo sapien
catcccttgctatgatctgccactg

SEQ ID NO: 4230988 - DNA, 25 bp, Homo sapien
gcaattggaaaaggtagccatcccg

SEQ ID NO: 4230989 - DNA, 25 bp, Homo sapien
ggcatcagcaatccgcagcaattgg

SEQ ID NO: 4230990 - DNA, 25 bp, Homo sapien
caatgtgatcaaaagcagtgctgca

SEQ ID NO: 4230991 - DNA, 25 bp, Homo sapien
gggactcacggcacacgaatactgc

SEQ ID NO: 4230992 - DNA, 25 bp, Homo sapien
gcacatctaagactaagtaatatac

SEQ ID NO: 4230993 - DNA, 25 bp, Homo sapien
taggaccgaacagtccgattcttgc

SEQ ID NO: 4230994 - DNA, 25 bp, Homo sapien
tccagtatttcctggataggaccga

SEQ ID NO: 4230995 - DNA, 25 bp, Homo sapien
cgattcttgcacatctaagactaag

SEQ ID NO: 4230996 - DNA, 25 bp, Homo sapien
gtggtgcagttaaagtcaatcactc

SEQ ID NO: 4230997 - DNA, 25 bp, Homo sapien
ttgtggtgcagttaaagtcaatcac

SEQ ID NO: 4230998 - DNA, 25 bp, Homo sapien
ggtgcagttaaagtcaatcactctg

SEQ ID NO: 4230999 - DNA, 25 bp, Homo sapien
tgcagttaaagtcaatcactctgag

SEQ ID NO: 4231000 - DNA, 25 bp, Homo sapien
tcttgcaactctctcgattcggtcc

SEQ ID NO: 4231001 - DNA, 25 bp, Homo sapien
tcaaagaaatctatgaggaccggac

SEQ ID NO: 4231002 - DNA, 25 bp, Homo sapien
gattcggtccactctgaaagaggca

SEQ ID NO: 4231003 - DNA, 25 bp, Homo sapien
tgtagcgctcagtatcctcaaagaa

SEQ ID NO: 4231004 - DNA, 25 bp, Homo sapien
gggcagttccgcacagagaagtcca

SEQ ID NO: 4231005 - DNA, 25 bp, Homo sapien
tggggaaatggtgtctggggcagtt

SEQ ID NO: 4231006 - DNA, 25 bp, Homo sapien
gtctggggcagttccgcacagagaa

SEQ ID NO: 4231007 - DNA, 25 bp, Homo sapien
ggaaatggtgtctggggcagttccg

SEQ ID NO: 4231008 - DNA, 25 bp, Homo sapien
aagtccaaggcttctacatcataga

SEQ ID NO: 4231009 - DNA, 25 bp, Homo sapien
cgaagacttcacagtttatgacaag

SEQ ID NO: 4231010 - DNA, 25 bp, Homo sapien
gacttcacagtttatgacaaggttt

SEQ ID NO: 4231011 - DNA, 25 bp, Homo sapien
catcatagaacaaatctgctctgca

SEQ ID NO: 4231012 - DNA, 25 bp, Homo sapien
gagtgatctctttcatctggaggag

SEQ ID NO: 4231013 - DNA, 25 bp, Homo sapien
ttggtggtagaagaacgctcatgcc

SEQ ID NO: 4231014 - DNA, 25 bp, Homo sapien
caccccagtggaagggatgtcccaa

SEQ ID NO: 4231015 - DNA, 25 bp, Homo sapien
gatgtcccaaatgaggcggtacacc

SEQ ID NO: 4231016 - DNA, 25 bp, Homo sapien
catttgtgccaaaagtggcatgttg

SEQ ID NO: 4231017 - DNA, 25 bp, Homo sapien
ttgggccccatttgtgccaaaagtg

SEQ ID NO: 4231018 - DNA, 25 bp, Homo sapien
tgtgccaaaagtggcatgttgacaa

SEQ ID NO: 4231019 - DNA, 25 bp, Homo sapien
ggccccatttgtgccaaaagtggca

SEQ ID NO: 4231020 - DNA, 25 bp, Homo sapien
tatgggtatcatgttcatgaggatg

SEQ ID NO: 4231021 - DNA, 25 bp, Homo sapien
gggatgctgtctatgggtatcatgt

SEQ ID NO: 4231022 - DNA, 25 bp, Homo sapien
gcaacagtgaccttggttatggggt

SEQ ID NO: 4231023 - DNA, 25 bp, Homo sapien
gtgggtcacaaggtccatagtcttg

SEQ ID NO: 4231024 - DNA, 25 bp, Homo sapien
tttcttagaggagggagtcggtaca

SEQ ID NO: 4231025 - DNA, 25 bp, Homo sapien
gtcggtacacagatccaatttgtct

SEQ ID NO: 4231026 - DNA, 25 bp, Homo sapien
tctgcaatggaagggacggggtcct

SEQ ID NO: 4231027 - DNA, 25 bp, Homo sapien
ggagggagtcggtacacagatccaa

SEQ ID NO: 4231028 - DNA, 25 bp, Homo sapien
aggaaagggctgattgtctggcttt

SEQ ID NO: 4231029 - DNA, 25 bp, Homo sapien
ttcagagactgattgaggaaagggc

SEQ ID NO: 4231030 - DNA, 25 bp, Homo sapien
tctggctttagaggatgtttgtggt

SEQ ID NO: 4231031 - DNA, 25 bp, Homo sapien
acatgattcagagactgattgagga

SEQ ID NO: 4231032 - DNA, 25 bp, Homo sapien
gtttctaattcaatgtattattcat

SEQ ID NO: 4231033 - DNA, 25 bp, Homo sapien
atgtttctaattcaatgtattattc

SEQ ID NO: 4231034 - DNA, 25 bp, Homo sapien
ttttcctcttcaaaggaatcacatt

SEQ ID NO: 4231035 - DNA, 25 bp, Homo sapien
tcattttcctcttcaaaggaatcac

SEQ ID NO: 4231036 - DNA, 25 bp, Homo sapien
tctcaggccatctcttttcccattc

SEQ ID NO: 4231037 - DNA, 25 bp, Homo sapien
agaaggagattctgagtggcataga

SEQ ID NO: 4231038 - DNA, 25 bp, Homo sapien
tcttcagtatgaaagtaggttgaaa

SEQ ID NO: 4231039 - DNA, 25 bp, Homo sapien
tctcctttccatttgatctctcttc

SEQ ID NO: 4231040 - DNA, 25 bp, Homo sapien
ctacagaagtagcagataaatcaga

SEQ ID NO: 4231041 - DNA, 25 bp, Homo sapien
gtccatggctagtgtacagacattc

SEQ ID NO: 4231042 - DNA, 25 bp, Homo sapien
ggcagtcatgtccatggctagtgta

SEQ ID NO: 4231043 - DNA, 25 bp, Homo sapien
tagtgtacagacattcctgcacccc

SEQ ID NO: 4231044 - DNA, 25 bp, Homo sapien
acagacattcctgcacccccagttt

SEQ ID NO: 4231045 - DNA, 25 bp, Homo sapien
ctgagactagcaagagagtcgttag

SEQ ID NO: 4231046 - DNA, 25 bp, Homo sapien
atgcctccaggaggaatgtgattct

SEQ ID NO: 4231047 - DNA, 25 bp, Homo sapien
catgcctccaggaggaatgtgattc

SEQ ID NO: 4231048 - DNA, 25 bp, Homo sapien
gacctggtgtccatgcctccaggag

SEQ ID NO: 4231049 - DNA, 25 bp, Homo sapien
tgacctggtgtccatgcctccagga

SEQ ID NO: 4231050 - DNA, 25 bp, Homo sapien
tctaacttgccaactgattctccct

SEQ ID NO: 4231051 - DNA, 25 bp, Homo sapien
taaaagattgaagttctgttgctgt

SEQ ID NO: 4231052 - DNA, 25 bp, Homo sapien
aatctaacttgccaactgattctcc

SEQ ID NO: 4231053 - DNA, 25 bp, Homo sapien
ttgctgttaggatctcttgccaatc

SEQ ID NO: 4231054 - DNA, 25 bp, Homo sapien
tgtttcctggataggacccggcagt

SEQ ID NO: 4231055 - DNA, 25 bp, Homo sapien
cagattcttgaacatctaaggctaa

SEQ ID NO: 4231056 - DNA, 25 bp, Homo sapien
ttagcatatcagatgaacgcctgga

SEQ ID NO: 4231057 - DNA, 25 bp, Homo sapien
tcagatgaacgcctggaaacagcag

SEQ ID NO: 4231058 - DNA, 25 bp, Homo sapien
gcaatgaaacgctcttcctcagtgt

SEQ ID NO: 4231059 - DNA, 25 bp, Homo sapien
gtcctcacgtgtcccctcataattt

SEQ ID NO: 4231060 - DNA, 25 bp, Homo sapien
agaagcagacccgagtcctcacgtg

SEQ ID NO: 4231061 - DNA, 25 bp, Homo sapien
ttgcaacatgtcgctttgaccattc

SEQ ID NO: 4231062 - DNA, 25 bp, Homo sapien
ttgtggtgcagttaaagtcaatcat

SEQ ID NO: 4231063 - DNA, 25 bp, Homo sapien
tgtggtgcagttaaagtcaatcatt

SEQ ID NO: 4231064 - DNA, 25 bp, Homo sapien
gggaatctaagaggacgggactatc

SEQ ID NO: 4231065 - DNA, 25 bp, Homo sapien
gctcggtatccttgagggaatctaa

SEQ ID NO: 4231066 - DNA, 25 bp, Homo sapien
aagagggaaagtcatcattctctcc

SEQ ID NO: 4231067 - DNA, 25 bp, Homo sapien
cttcacaagggctttgttggcttgt

SEQ ID NO: 4231068 - DNA, 25 bp, Homo sapien
ggagactcaacactcttgcagttct

SEQ ID NO: 4231069 - DNA, 25 bp, Homo sapien
ttagtggagactcaacactcttgca

SEQ ID NO: 4231070 - DNA, 25 bp, Homo sapien
gactcaacactcttgcagttctctg

SEQ ID NO: 4231071 - DNA, 25 bp, Homo sapien
agtggagactcaacactcttgcagt

SEQ ID NO: 4231072 - DNA, 25 bp, Homo sapien
ccaaatgctacaatgggggcctcag

SEQ ID NO: 4231073 - DNA, 25 bp, Homo sapien
aaatgctacaatgggggcctcagat

SEQ ID NO: 4231074 - DNA, 25 bp, Homo sapien
gtggagagggggtgtcgttcagttc

SEQ ID NO: 4231075 - DNA, 25 bp, Homo sapien
ggggtgtcgttcagttcctgctgcc

SEQ ID NO: 4231076 - DNA, 25 bp, Homo sapien
taaaaaattgcgggagagcagttct

SEQ ID NO: 4231077 - DNA, 25 bp, Homo sapien
cagatacacactgccccgacatcct

SEQ ID NO: 4231078 - DNA, 25 bp, Homo sapien
aaaaattgcgggagagcagttcttc

SEQ ID NO: 4231079 - DNA, 25 bp, Homo sapien
ttccttcctctctaacagatacaca

SEQ ID NO: 4231080 - DNA, 25 bp, Homo sapien
ccaggatggagcggataggtcaaat

SEQ ID NO: 4231081 - DNA, 25 bp, Homo sapien
gaggcttggcaatcggagaatgttc

SEQ ID NO: 4231082 - DNA, 25 bp, Homo sapien
gaatgttcacgcccaccaggatgga

SEQ ID NO: 4231083 - DNA, 25 bp, Homo sapien
gggttgcacgcaattcatgatcgta

SEQ ID NO: 4231084 - DNA, 25 bp, Homo sapien
gacctgaccgagatagaccagggcg

SEQ ID NO: 4231085 - DNA, 25 bp, Homo sapien
cgccctggtctatctcggtcaggtc

SEQ ID NO: 4231086 - DNA, 25 bp, Homo sapien
tgacgatgatctctggatccttggg

SEQ ID NO: 4231087 - DNA, 25 bp, Homo sapien
ccccttgaagtggttaatgtctgag

SEQ ID NO: 4231088 - DNA, 25 bp, Homo sapien
ctggaagtgggcatcgtgttcatgt

SEQ ID NO: 4231089 - DNA, 25 bp, Homo sapien
gggcatcgtgttcatgtggcttctc

SEQ ID NO: 4231090 - DNA, 25 bp, Homo sapien
taccttgacctcgtccttctgagtg

SEQ ID NO: 4231091 - DNA, 25 bp, Homo sapien
tacagggtccatcgtcaaagcaatc

SEQ ID NO: 4231092 - DNA, 25 bp, Homo sapien
tggtgtgcataggaacagggtcctt

SEQ ID NO: 4231093 - DNA, 25 bp, Homo sapien
gggagtccgtacacagatgcagttt

SEQ ID NO: 4231094 - DNA, 25 bp, Homo sapien
aaagccttgaatgcttctggaaact

SEQ ID NO: 4231095 - DNA, 25 bp, Homo sapien
gagggttgttatcatgcagcaatgg

SEQ ID NO: 4231096 - DNA, 25 bp, Homo sapien
cagaatgtctggctttagagggttg

SEQ ID NO: 4231097 - DNA, 25 bp, Homo sapien
acatgattcagaggcagattgaggg

SEQ ID NO: 4231098 - DNA, 25 bp, Homo sapien
cacccccatccatattttgcttcat

SEQ ID NO: 4231099 - DNA, 25 bp, Homo sapien
tggcccaactgtggaaagtagcagg

SEQ ID NO: 4231100 - DNA, 25 bp, Homo sapien
tgtggcccaactgtggaaagtagca

SEQ ID NO: 4231101 - DNA, 25 bp, Homo sapien
gtggcccaactgtggaaagtagcag

SEQ ID NO: 4231102 - DNA, 25 bp, Homo sapien
tgttgtttctggtctgattggtcag

SEQ ID NO: 4231103 - DNA, 25 bp, Homo sapien
tgcttgtttcacattggttatgcaa

SEQ ID NO: 4231104 - DNA, 25 bp, Homo sapien
gttgtttatggatggcggctgttct

SEQ ID NO: 4231105 - DNA, 25 bp, Homo sapien
atggcggctgttctgatcggttgtt

SEQ ID NO: 4231106 - DNA, 25 bp, Homo sapien
atgcctccaggaggaatgtgattct

SEQ ID NO: 4231107 - DNA, 25 bp, Homo sapien
gacctggtgtccatgcctccaggag

SEQ ID NO: 4231108 - DNA, 25 bp, Homo sapien
tgacctggtgtccatgcctccagga

SEQ ID NO: 4231109 - DNA, 25 bp, Homo sapien
catgcctccaggaggaatgtgattc

SEQ ID NO: 4231110 - DNA, 25 bp, Homo sapien
tttctccccaggactcacctttctc

SEQ ID NO: 4231111 - DNA, 25 bp, Homo sapien
ttctccccaggactcacctttctct

SEQ ID NO: 4231112 - DNA, 25 bp, Homo sapien
cccaggactcacctttctctcttcc

SEQ ID NO: 4231113 - DNA, 25 bp, Homo sapien
ctccccaggactcacctttctctct

SEQ ID NO: 4231114 - DNA, 25 bp, Homo sapien
aaaccctcttcctcagtgtatgtgc

SEQ ID NO: 4231115 - DNA, 25 bp, Homo sapien
gtgcaaggcacagaaggagacccga

SEQ ID NO: 4231116 - DNA, 25 bp, Homo sapien
taattcgcaacatatccctttggcc

SEQ ID NO: 4231117 - DNA, 25 bp, Homo sapien
aaggagacccgagccctcacatgtc

SEQ ID NO: 4231118 - DNA, 25 bp, Homo sapien
agggtcagtaatgaagtccatgagg

SEQ ID NO: 4231119 - DNA, 25 bp, Homo sapien
tctggagggtcagtaatgaagtcca

SEQ ID NO: 4231120 - DNA, 25 bp, Homo sapien
ggagggtcagtaatgaagtccatga

SEQ ID NO: 4231121 - DNA, 25 bp, Homo sapien
tctctggagggtcagtaatgaagtc

SEQ ID NO: 4231122 - DNA, 25 bp, Homo sapien
tgaattcctttagaggaaggtgtac

SEQ ID NO: 4231123 - DNA, 25 bp, Homo sapien
ttaagccttgaattcctttagagga

SEQ ID NO: 4231124 - DNA, 25 bp, Homo sapien
agccttgaattcctttagaggaagg

SEQ ID NO: 4231125 - DNA, 25 bp, Homo sapien
ccttgaattcctttagaggaaggtg

SEQ ID NO: 4231126 - DNA, 25 bp, Homo sapien
gctcggtatccttgagggaatctaa

SEQ ID NO: 4231127 - DNA, 25 bp, Homo sapien
cttcacaagggctttgttggcttgt

SEQ ID NO: 4231128 - DNA, 25 bp, Homo sapien
aagagggaaagtcatcattctctcc

SEQ ID NO: 4231129 - DNA, 25 bp, Homo sapien
gggaatctaagaggacgggactatc

SEQ ID NO: 4231130 - DNA, 25 bp, Homo sapien
cttgcagttctctggacttggtcca

SEQ ID NO: 4231131 - DNA, 25 bp, Homo sapien
ttgcagttctctggacttggtccac

SEQ ID NO: 4231132 - DNA, 25 bp, Homo sapien
tcttgcagttctctggacttggtcc

SEQ ID NO: 4231133 - DNA, 25 bp, Homo sapien
gcatcgtaggacaaatatactctgc

SEQ ID NO: 4231134 - DNA, 25 bp, Homo sapien
aagtccaaggctcctgcatcgtagg

SEQ ID NO: 4231135 - DNA, 25 bp, Homo sapien
ggttgaagactttgcagattacgac

SEQ ID NO: 4231136 - DNA, 25 bp, Homo sapien
gacaagatcttttgggcttttcaag

SEQ ID NO: 4231137 - DNA, 25 bp, Homo sapien
gggcaattgtgaaggagctcttttg

SEQ ID NO: 4231138 - DNA, 25 bp, Homo sapien
tgaagtggaggtctgtccgagtgat

SEQ ID NO: 4231139 - DNA, 25 bp, Homo sapien
tgtgaaggagctcttttgttgaagt

SEQ ID NO: 4231140 - DNA, 25 bp, Homo sapien
ggataatggtgatctcgggacccgt

SEQ ID NO: 4231141 - DNA, 25 bp, Homo sapien
tcctgtttgtgccagaaggggtgtg

SEQ ID NO: 4231142 - DNA, 25 bp, Homo sapien
agtcatgagggtgattttgggtcct

SEQ ID NO: 4231143 - DNA, 25 bp, Homo sapien
ggtatgcccagatgtagcccaagca

SEQ ID NO: 4231144 - DNA, 25 bp, Homo sapien
taatagagactgtagaattagagtc

SEQ ID NO: 4231145 - DNA, 25 bp, Homo sapien
ctgtgaaagtctacagagtatttgc

SEQ ID NO: 4231146 - DNA, 25 bp, Homo sapien
gtgaaagtctacagagtatttgcaa

SEQ ID NO: 4231147 - DNA, 25 bp, Homo sapien
caaagattcatagcctttttagcca

SEQ ID NO: 4231148 - DNA, 25 bp, Homo sapien
tatttgcaaagattcatagcctttt

SEQ ID NO: 4231149 - DNA, 25 bp, Homo sapien
actgctcataacaaagcctacttag

SEQ ID NO: 4231150 - DNA, 25 bp, Homo sapien
ccaaagacactatgtgtgtgcaaat

SEQ ID NO: 4231151 - DNA, 25 bp, Homo sapien
tgaagacttcacagtttatgacatc

SEQ ID NO: 4231152 - DNA, 25 bp, Homo sapien
gtgtgcaaataccacttagtctggt

SEQ ID NO: 4231153 - DNA, 25 bp, Homo sapien
cagacgctagttgccttgttcccaa

SEQ ID NO: 4231154 - DNA, 25 bp, Homo sapien
taggagctgagggatggtttcacca

SEQ ID NO: 4231155 - DNA, 25 bp, Homo sapien
aaatggctctgctgggttatccaaa

SEQ ID NO: 4231156 - DNA, 25 bp, Homo sapien
gaatcaagagccaactgggatactg

SEQ ID NO: 4231157 - DNA, 25 bp, Homo sapien
tggagcagaggaaaaggatggtaat

SEQ ID NO: 4231158 - DNA, 25 bp, Homo sapien
gcagaggaaaaggatggtaattagt

SEQ ID NO: 4231159 - DNA, 25 bp, Homo sapien
gagcagaggaaaaggatggtaatta

SEQ ID NO: 4231160 - DNA, 25 bp, Homo sapien
cagaggaaaaggatggtaattagtt

SEQ ID NO: 4231161 - DNA, 25 bp, Homo sapien
tgcagtcaatttcctcggactgtga

SEQ ID NO: 4231162 - DNA, 25 bp, Homo sapien
taaataaatccttgtcattgcagtc

SEQ ID NO: 4231163 - DNA, 25 bp, Homo sapien
ttcctgggttaaacttagtagcagc

SEQ ID NO: 4231164 - DNA, 25 bp, Homo sapien
tttgactgttatatttcttcagagc

SEQ ID NO: 4231165 - DNA, 25 bp, Homo sapien
cttagtggcttcagttatgcggtac

SEQ ID NO: 4231166 - DNA, 25 bp, Homo sapien
cgtcttagtggcttcagttatgcgg

SEQ ID NO: 4231167 - DNA, 25 bp, Homo sapien
ggcttcagttatgcggtacaataca

SEQ ID NO: 4231168 - DNA, 25 bp, Homo sapien
tagtggcttcagttatgcggtacaa

SEQ ID NO: 4231169 - DNA, 25 bp, Homo sapien
gaaggaataaaacgtgtcagagcca

SEQ ID NO: 4231170 - DNA, 25 bp, Homo sapien
gcttttgcagcatccttgtactcac

SEQ ID NO: 4231171 - DNA, 25 bp, Homo sapien
tgcttttgcagcatccttgtactca

SEQ ID NO: 4231172 - DNA, 25 bp, Homo sapien
tgatttcgtacttgaaggaataaaa

SEQ ID NO: 4231173 - DNA, 25 bp, Homo sapien
gcagagtcaagatttgcacttaacg

SEQ ID NO: 4231174 - DNA, 25 bp, Homo sapien
ttaacgttgtgcaatggaagcaccc

SEQ ID NO: 4231175 - DNA, 25 bp, Homo sapien
tggcagggtcaacggagaaaacaga

SEQ ID NO: 4231176 - DNA, 25 bp, Homo sapien
tggagtctgagccacatgttctggc

SEQ ID NO: 4231177 - DNA, 25 bp, Homo sapien
gaggtctagaaccagcctgctaaac

SEQ ID NO: 4231178 - DNA, 25 bp, Homo sapien
tctaaccaagatggacgcagaggtc

SEQ ID NO: 4231179 - DNA, 25 bp, Homo sapien
tggagtctcagtttacccgtcttgt

SEQ ID NO: 4231180 - DNA, 25 bp, Homo sapien
tagctgttaactctgtcatgtcccc

SEQ ID NO: 4231181 - DNA, 25 bp, Homo sapien
cacggttgccgtgcattctccagtg

SEQ ID NO: 4231182 - DNA, 25 bp, Homo sapien
tagccacggagaatttcgtactgct

SEQ ID NO: 4231183 - DNA, 25 bp, Homo sapien
cttccccacggttgccgtgcattct

SEQ ID NO: 4231184 - DNA, 25 bp, Homo sapien
ggagaatttcgtactgctcctcttc

SEQ ID NO: 4231185 - DNA, 25 bp, Homo sapien
gcagtgccagaggataaaccagcca

SEQ ID NO: 4231186 - DNA, 25 bp, Homo sapien
cagggcagtgccagaggataaacca

SEQ ID NO: 4231187 - DNA, 25 bp, Homo sapien
gggcagtgccagaggataaaccagc

SEQ ID NO: 4231188 - DNA, 25 bp, Homo sapien
cagtgccagaggataaaccagccac

SEQ ID NO: 4231189 - DNA, 25 bp, Homo sapien
atataggatgcacacagccgaggca

SEQ ID NO: 4231190 - DNA, 25 bp, Homo sapien
ctctgcgttgatataggatgcacac

SEQ ID NO: 4231191 - DNA, 25 bp, Homo sapien
gcgttgatataggatgcacacagcc

SEQ ID NO: 4231192 - DNA, 25 bp, Homo sapien
acacagccgaggcagtcgtactggg

SEQ ID NO: 4231193 - DNA, 25 bp, Homo sapien
cttcattaagcatgaagagggagga

SEQ ID NO: 4231194 - DNA, 25 bp, Homo sapien
gaggaatgttgagtgttgttgttaa

SEQ ID NO: 4231195 - DNA, 25 bp, Homo sapien
tgttgttgttaaagtactgaatgcc

SEQ ID NO: 4231196 - DNA, 25 bp, Homo sapien
ctgaatgccgtgtctcagaatgggc

SEQ ID NO: 4231197 - DNA, 25 bp, Homo sapien
tctctttggaacaattcgtttgcac

SEQ ID NO: 4231198 - DNA, 25 bp, Homo sapien
cattccaaagggacttgcagtctgg

SEQ ID NO: 4231199 - DNA, 25 bp, Homo sapien
ggacttgcagtctggagttaagaac

SEQ ID NO: 4231200 - DNA, 25 bp, Homo sapien
ggtaattcgaaagttcaatccagcc

SEQ ID NO: 4231201 - DNA, 25 bp, Homo sapien
gagaaggaagcaattcgtagctgaa

SEQ ID NO: 4231202 - DNA, 25 bp, Homo sapien
cgtagctgaatatcgatgtatgcat

SEQ ID NO: 4231203 - DNA, 25 bp, Homo sapien
gaagcaattcgtagctgaatatcga

SEQ ID NO: 4231204 - DNA, 25 bp, Homo sapien
caattcgtagctgaatatcgatgta

SEQ ID NO: 4231205 - DNA, 25 bp, Homo sapien
ctgcattaagctttgtgatggtgtg

SEQ ID NO: 4231206 - DNA, 25 bp, Homo sapien
tagaaagttgcgttattctctgcat

SEQ ID NO: 4231207 - DNA, 25 bp, Homo sapien
ggcagcccacgcaaatcttggtagg

SEQ ID NO: 4231208 - DNA, 25 bp, Homo sapien
ctgggctgttggtgggtatatctct

SEQ ID NO: 4231209 - DNA, 25 bp, Homo sapien
ggtttccctggccacgaagtcaata

SEQ ID NO: 4231210 - DNA, 25 bp, Homo sapien
tactttccttggaacatgtggtttc

SEQ ID NO: 4231211 - DNA, 25 bp, Homo sapien
cctggccacgaagtcaataaaatat

SEQ ID NO: 4231212 - DNA, 25 bp, Homo sapien
gaacatgtggtttccctggccacga

SEQ ID NO: 4231213 - DNA, 25 bp, Homo sapien
ggtaccacataaacttcagcgttgc

SEQ ID NO: 4231214 - DNA, 25 bp, Homo sapien
cccagggtaccacataaacttcagc

SEQ ID NO: 4231215 - DNA, 25 bp, Homo sapien
cttcagcgttgcaatctaggctttg

SEQ ID NO: 4231216 - DNA, 25 bp, Homo sapien
cacataaacttcagcgttgcaatct

SEQ ID NO: 4231217 - DNA, 25 bp, Homo sapien
ctgtaaaataagctggagtgttttt

SEQ ID NO: 4231218 - DNA, 25 bp, Homo sapien
tattcgtgatgatcggaaaggtgaa

SEQ ID NO: 4231219 - DNA, 25 bp, Homo sapien
tatttcccctattcgtgatgatcgg

SEQ ID NO: 4231220 - DNA, 25 bp, Homo sapien
ttatttcccctattcgtgatgatcg

SEQ ID NO: 4231221 - DNA, 25 bp, Homo sapien
tcccctattcgtgatgatcggaaag

SEQ ID NO: 4231222 - DNA, 25 bp, Homo sapien
gatatcagggatccaatcgtcatca

SEQ ID NO: 4231223 - DNA, 25 bp, Homo sapien
gaccaagaccatgctgttgttcgtg

SEQ ID NO: 4231224 - DNA, 25 bp, Homo sapien
ttgttcgtgtccatggccaaggcca

SEQ ID NO: 4231225 - DNA, 25 bp, Homo sapien
aaggccatgtcctctttggtgccca

SEQ ID NO: 4231226 - DNA, 25 bp, Homo sapien
tatcagagaagccaattgcagcagg

SEQ ID NO: 4231227 - DNA, 25 bp, Homo sapien
caattttatgcagtccgtggagact

SEQ ID NO: 4231228 - DNA, 25 bp, Homo sapien
tgcagcaggccatacggcacattag

SEQ ID NO: 4231229 - DNA, 25 bp, Homo sapien
ttagactgttccgaagctgcatggt

SEQ ID NO: 4231230 - DNA, 25 bp, Homo sapien
gaagcagcagtgacatatacatcca

SEQ ID NO: 4231231 - DNA, 25 bp, Homo sapien
gagaaacactctcactcagaaaggg

SEQ ID NO: 4231232 - DNA, 25 bp, Homo sapien
gaattactcaatctaggctcagcaa

SEQ ID NO: 4231233 - DNA, 25 bp, Homo sapien
agctcggagcttctgtaaactaaga

SEQ ID NO: 4231234 - DNA, 25 bp, Homo sapien
taaaaagtggagcaaccagttgaca

SEQ ID NO: 4231235 - DNA, 25 bp, Homo sapien
ctgtaagtatagtaaaacgcagtta

SEQ ID NO: 4231236 - DNA, 25 bp, Homo sapien
taaaacgcagttaatatgatgttat

SEQ ID NO: 4231237 - DNA, 25 bp, Homo sapien
ttaaaaagtggagcaaccagttgac

SEQ ID NO: 4231238 - DNA, 25 bp, Homo sapien
gggtcgacccttgtactcgcaggac

SEQ ID NO: 4231239 - DNA, 25 bp, Homo sapien
tgggggtcgacccttgtactcgcag

SEQ ID NO: 4231240 - DNA, 25 bp, Homo sapien
tgtactcgcaggaccttaggtgact

SEQ ID NO: 4231241 - DNA, 25 bp, Homo sapien
gacccttgtactcgcaggaccttag

SEQ ID NO: 4231242 - DNA, 25 bp, Homo sapien
aagactgatctttatttcacccaga

SEQ ID NO: 4231243 - DNA, 25 bp, Homo sapien
ggctatgtgcctggagtgaagattc

SEQ ID NO: 4231244 - DNA, 25 bp, Homo sapien
tcttctctatttaaattctatccca

SEQ ID NO: 4231245 - DNA, 25 bp, Homo sapien
catcaagactgatctttatttcacc

SEQ ID NO: 4231246 - DNA, 25 bp, Homo sapien
tctgccttggctagggaatgttcca

SEQ ID NO: 4231247 - DNA, 25 bp, Homo sapien
tccagtgttgggttatgagcctcca

SEQ ID NO: 4231248 - DNA, 25 bp, Homo sapien
gcactgactctctgaccagctggaa

SEQ ID NO: 4231249 - DNA, 25 bp, Homo sapien
aatttgctgcagaatgggtagggct

SEQ ID NO: 4231250 - DNA, 25 bp, Homo sapien
tactcttagctaaggcttggaaatc

SEQ ID NO: 4231251 - DNA, 25 bp, Homo sapien
taactggaccataagaaaacaatac

SEQ ID NO: 4231252 - DNA, 25 bp, Homo sapien
ctttacctggatcagaaagataatt

SEQ ID NO: 4231253 - DNA, 25 bp, Homo sapien
gagaagttggtagacattctattaa

SEQ ID NO: 4231254 - DNA, 25 bp, Homo sapien
catcaggcttcctagatagtgtcaa

SEQ ID NO: 4231255 - DNA, 25 bp, Homo sapien
tctaggcaataagacatcagactcc

SEQ ID NO: 4231256 - DNA, 25 bp, Homo sapien
taccatggttgcctaagtggctacc

SEQ ID NO: 4231257 - DNA, 25 bp, Homo sapien
cagatgcagtcgcattgccgggcct

SEQ ID NO: 4231258 - DNA, 25 bp, Homo sapien
ccactgcagttttccggcagtgcat

SEQ ID NO: 4231259 - DNA, 25 bp, Homo sapien
ttatcctctgggaggcagcagttcc

SEQ ID NO: 4231260 - DNA, 25 bp, Homo sapien
catttatcctctgggaggcagcagt

SEQ ID NO: 4231261 - DNA, 25 bp, Homo sapien
ctgcgcatttatcctctgggaggca

SEQ ID NO: 4231262 - DNA, 25 bp, Homo sapien
tgcgcatttatcctctgggaggcag

SEQ ID NO: 4231263 - DNA, 25 bp, Homo sapien
ctagacaggaatttatcggccagaa

SEQ ID NO: 4231264 - DNA, 25 bp, Homo sapien
catgcccagtgcaatgcagttctgc

SEQ ID NO: 4231265 - DNA, 25 bp, Homo sapien
tctactagacaggaatttatcggcc

SEQ ID NO: 4231266 - DNA, 25 bp, Homo sapien
agttctgctgttctagtcagttcta

SEQ ID NO: 4231267 - DNA, 25 bp, Homo sapien
ccagcggaagccacagtatgaagag

SEQ ID NO: 4231268 - DNA, 25 bp, Homo sapien
taacttgacaacaatctcattcctg

SEQ ID NO: 4231269 - DNA, 25 bp, Homo sapien
gaccaacctgtatcgcctttgtcac

SEQ ID NO: 4231270 - DNA, 25 bp, Homo sapien
tagcctcacaatggtcctcagcatg

SEQ ID NO: 4231271 - DNA, 25 bp, Homo sapien
ctcatcacaggctaagtgtagagga

SEQ ID NO: 4231272 - DNA, 25 bp, Homo sapien
tcaatgtgaatacttgctccttggg

SEQ ID NO: 4231273 - DNA, 25 bp, Homo sapien
gctccttgggacacttgctccttct

SEQ ID NO: 4231274 - DNA, 25 bp, Homo sapien
caggctaagtgtagaggagtgttac

SEQ ID NO: 4231275 - DNA, 25 bp, Homo sapien
atttgttccttcggtctcctctggt

SEQ ID NO: 4231276 - DNA, 25 bp, Homo sapien
aggtcaggtcgctctgctcctttcg

SEQ ID NO: 4231277 - DNA, 25 bp, Homo sapien
aagcgagtccccacgtgaataatcg

SEQ ID NO: 4231278 - DNA, 25 bp, Homo sapien
tccccacgtgaataatcgggctccg

SEQ ID NO: 4231279 - DNA, 25 bp, Homo sapien
cacgtgaataatcgggctccgccgg

SEQ ID NO: 4231280 - DNA, 25 bp, Homo sapien
aggaggaagcgagtccccacgtgaa

SEQ ID NO: 4231281 - DNA, 25 bp, Homo sapien
tggggtccctgcaaaagccgccgct

SEQ ID NO: 4231282 - DNA, 25 bp, Homo sapien
tgctatgacaatgcccgggcgatcg

SEQ ID NO: 4231283 - DNA, 25 bp, Homo sapien
cggacttccgggtcgtaagcacgtg

SEQ ID NO: 4231284 - DNA, 25 bp, Homo sapien
ctgggtcagctgctatgacaatgcc

SEQ ID NO: 4231285 - DNA, 25 bp, Homo sapien
cataggctagctatgtgggcccata

SEQ ID NO: 4231286 - DNA, 25 bp, Homo sapien
ttgtggctgggacatgaatgcaccc

SEQ ID NO: 4231287 - DNA, 25 bp, Homo sapien
tgagctgccgactagggccataggc

SEQ ID NO: 4231288 - DNA, 25 bp, Homo sapien
aacctagacgttcctgctggctgca

SEQ ID NO: 4231289 - DNA, 25 bp, Homo sapien
tctatactaccctcttcatgtgaca

SEQ ID NO: 4231290 - DNA, 25 bp, Homo sapien
gggctctatactaccctcttcatgt

SEQ ID NO: 4231291 - DNA, 25 bp, Homo sapien
tcatgtgacacaaccaactcatctt

SEQ ID NO: 4231292 - DNA, 25 bp, Homo sapien
cttcatgtgacacaaccaactcatc

SEQ ID NO: 4231293 - DNA, 25 bp, Homo sapien
ctaaaaatatcctgagatctaagaa

SEQ ID NO: 4231294 - DNA, 25 bp, Homo sapien
tgaccaaccgtttggtttcacttga

SEQ ID NO: 4231295 - DNA, 25 bp, Homo sapien
caattaacacttaatcgttggttgt

SEQ ID NO: 4231296 - DNA, 25 bp, Homo sapien
gggtgataccaatcaacaattaaca

SEQ ID NO: 4231297 - DNA, 25 bp, Homo sapien
tccctctgtaatgttcgaaatccag

SEQ ID NO: 4231298 - DNA, 25 bp, Homo sapien
agtggtactgctcctcattcatccc

SEQ ID NO: 4231299 - DNA, 25 bp, Homo sapien
cgaaatccagatttgaggtgatgcc

SEQ ID NO: 4231300 - DNA, 25 bp, Homo sapien
caggccctcagtccagtggtactgc

SEQ ID NO: 4231301 - DNA, 25 bp, Homo sapien
ttatcgtgccaggaactaggacaaa

SEQ ID NO: 4231302 - DNA, 25 bp, Homo sapien
aattcttatcgtgccaggaactagg

SEQ ID NO: 4231303 - DNA, 25 bp, Homo sapien
atttgaaaattcttatcgtgccagg

SEQ ID NO: 4231304 - DNA, 25 bp, Homo sapien
gaaaattcttatcgtgccaggaact

SEQ ID NO: 4231305 - DNA, 25 bp, Homo sapien
cggtttaccggtacattttgcagcg

SEQ ID NO: 4231306 - DNA, 25 bp, Homo sapien
tctcatatcatttccggtctctcgc

SEQ ID NO: 4231307 - DNA, 25 bp, Homo sapien
ctagggaaaatgtcggccacccagc

SEQ ID NO: 4231308 - DNA, 25 bp, Homo sapien
ttgcagcgcgagaaggaaaaatgga

SEQ ID NO: 4231309 - DNA, 25 bp, Homo sapien
gctgcggagttagttaaacctcgct

SEQ ID NO: 4231310 - DNA, 25 bp, Homo sapien
gaagaatatagctgcggagttagtt

SEQ ID NO: 4231311 - DNA, 25 bp, Homo sapien
gggtttccgcgtccctgacgcagag

SEQ ID NO: 4231312 - DNA, 25 bp, Homo sapien
aatatagctgcggagttagttaaac

SEQ ID NO: 4231313 - DNA, 25 bp, Homo sapien
aattgtgatcctggggtcgttacct

SEQ ID NO: 4231314 - DNA, 25 bp, Homo sapien
gatcctggggtcgttacctcggata

SEQ ID NO: 4231315 - DNA, 25 bp, Homo sapien
ttgtgatcctggggtcgttacctcg

SEQ ID NO: 4231316 - DNA, 25 bp, Homo sapien
gtgatcctggggtcgttacctcgga

SEQ ID NO: 4231317 - DNA, 25 bp, Homo sapien
gaaaaaccactcagcgcccgactga

SEQ ID NO: 4231318 - DNA, 25 bp, Homo sapien
aattttctcgccgtgcttcggtcag

SEQ ID NO: 4231319 - DNA, 25 bp, Homo sapien
cactcagcgcccgactgaaaagaca

SEQ ID NO: 4231320 - DNA, 25 bp, Homo sapien
cgtttcttgcggaggaattttctcg

SEQ ID NO: 4231321 - DNA, 25 bp, Homo sapien
tggcgccctatgaccttcactacag

SEQ ID NO: 4231322 - DNA, 25 bp, Homo sapien
tgggaaggaaagcagccgaagtttc

SEQ ID NO: 4231323 - DNA, 25 bp, Homo sapien
gtgctgtaccctaagaaaacgtcca

SEQ ID NO: 4231324 - DNA, 25 bp, Homo sapien
ctacccatcatggaagcttctggaa

SEQ ID NO: 4231325 - DNA, 25 bp, Homo sapien
aaagcttcgggtcctggttacagtg

SEQ ID NO: 4231326 - DNA, 25 bp, Homo sapien
ccccaactcgtgtggatgaccgaaa

SEQ ID NO: 4231327 - DNA, 25 bp, Homo sapien
tcggactgcgccacggctttttact

SEQ ID NO: 4231328 - DNA, 25 bp, Homo sapien
tacagtgtaccgaactcggactgcg

SEQ ID NO: 4231329 - DNA, 25 bp, Homo sapien
ccgggtgattgacgcgggcggagcg

SEQ ID NO: 4231330 - DNA, 25 bp, Homo sapien
aactgcggagcgtctcgcgagagct

SEQ ID NO: 4231331 - DNA, 25 bp, Homo sapien
cgagagctcggagcgccgaactccg

SEQ ID NO: 4231332 - DNA, 25 bp, Homo sapien
ccaacaatgcgcaagccgggtgatt

SEQ ID NO: 4231333 - DNA, 25 bp, Homo sapien
tttgcaacccgtctcagcacgttag

SEQ ID NO: 4231334 - DNA, 25 bp, Homo sapien
actgtgcgccttccctaaaggttgg

SEQ ID NO: 4231335 - DNA, 25 bp, Homo sapien
tcagggcgaatatccacactgtgcg

SEQ ID NO: 4231336 - DNA, 25 bp, Homo sapien
tcccctgcacaagctaaagcagcag

SEQ ID NO: 4231337 - DNA, 25 bp, Homo sapien
gacaccatcggggtccattccctct

SEQ ID NO: 4231338 - DNA, 25 bp, Homo sapien
accatcggggtccattccctctggg

SEQ ID NO: 4231339 - DNA, 25 bp, Homo sapien
atcggggtccattccctctgggccg

SEQ ID NO: 4231340 - DNA, 25 bp, Homo sapien
ctcgatgacaccatcggggtccatt

SEQ ID NO: 4231341 - DNA, 25 bp, Homo sapien
agcttcaagatccacaaccgtttct

SEQ ID NO: 4231342 - DNA, 25 bp, Homo sapien
gcttcaagatccacaaccgtttctt

SEQ ID NO: 4231343 - DNA, 25 bp, Homo sapien
aagcttcaagatccacaaccgtttc

SEQ ID NO: 4231344 - DNA, 25 bp, Homo sapien
ttcaagatccacaaccgtttcttac

SEQ ID NO: 4231345 - DNA, 25 bp, Homo sapien
taatgcacgcataaatgagatgaac

SEQ ID NO: 4231346 - DNA, 25 bp, Homo sapien
tgcacgcataaatgagatgaacaca

SEQ ID NO: 4231347 - DNA, 25 bp, Homo sapien
gaaaaaataatgcacgcataaatga

SEQ ID NO: 4231348 - DNA, 25 bp, Homo sapien
aaataatgcacgcataaatgagatg

SEQ ID NO: 4231349 - DNA, 25 bp, Homo sapien
gatgccacgaaggagagactccttt

SEQ ID NO: 4231350 - DNA, 25 bp, Homo sapien
catagatgccacgaaggagagactc

SEQ ID NO: 4231351 - DNA, 25 bp, Homo sapien
gccacgaaggagagactcctttaaa

SEQ ID NO: 4231352 - DNA, 25 bp, Homo sapien
aagcatagatgccacgaaggagaga

SEQ ID NO: 4231353 - DNA, 25 bp, Homo sapien
tcagtcccgaaagatgattgccatc

SEQ ID NO: 4231354 - DNA, 25 bp, Homo sapien
aaagtaggatacacatttaccgatc

SEQ ID NO: 4231355 - DNA, 25 bp, Homo sapien
tctcttcatttcaggtcagtcccga

SEQ ID NO: 4231356 - DNA, 25 bp, Homo sapien
tatgcccaaataatcaagtgatcag

SEQ ID NO: 4231357 - DNA, 25 bp, Homo sapien
tgtggctgtcttgccagtacctgac

SEQ ID NO: 4231358 - DNA, 25 bp, Homo sapien
aatagcaaatgtggctgtcttgcca

SEQ ID NO: 4231359 - DNA, 25 bp, Homo sapien
ccagtacctgactgagcttgagcaa

SEQ ID NO: 4231360 - DNA, 25 bp, Homo sapien
tctccaactgttgcaggatggaaat

SEQ ID NO: 4231361 - DNA, 25 bp, Homo sapien
tatgcaacacgcaagcagttttttt

SEQ ID NO: 4231362 - DNA, 25 bp, Homo sapien
ctatgcaacacgcaagcagtttttt

SEQ ID NO: 4231363 - DNA, 25 bp, Homo sapien
gatctggtaggaccaatttatacta

SEQ ID NO: 4231364 - DNA, 25 bp, Homo sapien
agggatctggtaggaccaatttata

SEQ ID NO: 4231365 - DNA, 25 bp, Homo sapien
tcttcacagttgtgaaacctgaaac

SEQ ID NO: 4231366 - DNA, 25 bp, Homo sapien
ctggtaggaccaatttatactaagt

SEQ ID NO: 4231367 - DNA, 25 bp, Homo sapien
ctgcatacccagttcttttaaaact

SEQ ID NO: 4231368 - DNA, 25 bp, Homo sapien
cactgcagttttcatgttgcacaac

SEQ ID NO: 4231369 - DNA, 25 bp, Homo sapien
gggacagatctagtacatccaagag

SEQ ID NO: 4231370 - DNA, 25 bp, Homo sapien
caaatggtaacatgtcactgcagtt

SEQ ID NO: 4231371 - DNA, 25 bp, Homo sapien
gagcgcttcggattctcaatctatt

SEQ ID NO: 4231372 - DNA, 25 bp, Homo sapien
gaaggtttacttcaaagccaatata

SEQ ID NO: 4231373 - DNA, 25 bp, Homo sapien
caataaagcctacagctttattagg

SEQ ID NO: 4231374 - DNA, 25 bp, Homo sapien
tttgaaaacatagcatgcaacagat

SEQ ID NO: 4231375 - DNA, 25 bp, Homo sapien
caatatagcagtgagctttgaaaac

SEQ ID NO: 4231376 - DNA, 25 bp, Homo sapien
cacgcatcagctagacaatccaaga

SEQ ID NO: 4231377 - DNA, 25 bp, Homo sapien
ccccagagggtattgtgccttatat

SEQ ID NO: 4231378 - DNA, 25 bp, Homo sapien
gcagacgacctaactgctgcaaggt

SEQ ID NO: 4231379 - DNA, 25 bp, Homo sapien
tacttccaagcttaaaatgcagacg

SEQ ID NO: 4231380 - DNA, 25 bp, Homo sapien
cgggtgtaccaacaacaatatgtgg

SEQ ID NO: 4231381 - DNA, 25 bp, Homo sapien
tccaccaatgcaggcatgacaagtg

SEQ ID NO: 4231382 - DNA, 25 bp, Homo sapien
ggcatgacaagtggctcccatatag

SEQ ID NO: 4231383 - DNA, 25 bp, Homo sapien
taacatatcaaacactctcccgggt

SEQ ID NO: 4231384 - DNA, 25 bp, Homo sapien
tctagatctactcagtgatacaatt

SEQ ID NO: 4231385 - DNA, 25 bp, Homo sapien
ctgtcatttctagatctactcagtg

SEQ ID NO: 4231386 - DNA, 25 bp, Homo sapien
tgtcatttctagatctactcagtga

SEQ ID NO: 4231387 - DNA, 25 bp, Homo sapien
catttctagatctactcagtgatac

SEQ ID NO: 4231388 - DNA, 25 bp, Homo sapien
gatccttaaaaccacggctcaacat

SEQ ID NO: 4231389 - DNA, 25 bp, Homo sapien
ttgatccttaaaaccacggctcaac

SEQ ID NO: 4231390 - DNA, 25 bp, Homo sapien
tttgatccttaaaaccacggctcaa

SEQ ID NO: 4231391 - DNA, 25 bp, Homo sapien
tgatccttaaaaccacggctcaaca

SEQ ID NO: 4231392 - DNA, 25 bp, Homo sapien
taagaggggggtgaagtaatgctta

SEQ ID NO: 4231393 - DNA, 25 bp, Homo sapien
aaacacatcagttgtattgtaacag

SEQ ID NO: 4231394 - DNA, 25 bp, Homo sapien
tagacagagttatgcatcaagtgct

SEQ ID NO: 4231395 - DNA, 25 bp, Homo sapien
aatgtctgaagccaagcgtctctgt

SEQ ID NO: 4231396 - DNA, 25 bp, Homo sapien
tctgtcttactacggaatgaaggta

SEQ ID NO: 4231397 - DNA, 25 bp, Homo sapien
tgtagcacaacttacacattaatac

SEQ ID NO: 4231398 - DNA, 25 bp, Homo sapien
tagcacaacttacacattaataccc

SEQ ID NO: 4231399 - DNA, 25 bp, Homo sapien
gtagcacaacttacacattaatacc

SEQ ID NO: 4231400 - DNA, 25 bp, Homo sapien
aacacatcagttggcattgtggcag

SEQ ID NO: 4231401 - DNA, 25 bp, Homo sapien
ttccaacacatcagttggcattgtg

SEQ ID NO: 4231402 - DNA, 25 bp, Homo sapien
cacttccaacacatcagttggcatt

SEQ ID NO: 4231403 - DNA, 25 bp, Homo sapien
ccaacacatcagttggcattgtggc

SEQ ID NO: 4231404 - DNA, 25 bp, Homo sapien
tgtttgattccttcaagggtcaatt

SEQ ID NO: 4231405 - DNA, 25 bp, Homo sapien
ctgtttgattccttcaagggtcaat

SEQ ID NO: 4231406 - DNA, 25 bp, Homo sapien
acttagagcccagagttccaaccag

SEQ ID NO: 4231407 - DNA, 25 bp, Homo sapien
gacattaagaaagaggtccacccca

SEQ ID NO: 4231408 - DNA, 25 bp, Homo sapien
ctttgggatcctagcacttagagcc

SEQ ID NO: 4231409 - DNA, 25 bp, Homo sapien
ccagaccagggtttcaagaaagtga

SEQ ID NO: 4231410 - DNA, 25 bp, Homo sapien
gtgtaatggtcagtgtctcgtacaa

SEQ ID NO: 4231411 - DNA, 25 bp, Homo sapien
accttgcgcctcgtattgagaaaaa

SEQ ID NO: 4231412 - DNA, 25 bp, Homo sapien
agccagtccaccttgcgcctcgtat

SEQ ID NO: 4231413 - DNA, 25 bp, Homo sapien
tgtaatggtcagtgtctcgtacaag

SEQ ID NO: 4231414 - DNA, 25 bp, Homo sapien
tccagacattttagaacacctctta

SEQ ID NO: 4231415 - DNA, 25 bp, Homo sapien
gtggaaatccagacattttagaaca

SEQ ID NO: 4231416 - DNA, 25 bp, Homo sapien
aaatccagacattttagaacacctc

SEQ ID NO: 4231417 - DNA, 25 bp, Homo sapien
ccagacattttagaacacctcttac

SEQ ID NO: 4231418 - DNA, 25 bp, Homo sapien
gctacaggagaatagcagacaggta

SEQ ID NO: 4231419 - DNA, 25 bp, Homo sapien
atcaccagtcaggtcggtatttaat

SEQ ID NO: 4231420 - DNA, 25 bp, Homo sapien
caccagtcaggtcggtatttaattt

SEQ ID NO: 4231421 - DNA, 25 bp, Homo sapien
tcaccagtcaggtcggtatttaatt

SEQ ID NO: 4231422 - DNA, 25 bp, Homo sapien
tcagaacacgacttgaccctgaccg

SEQ ID NO: 4231423 - DNA, 25 bp, Homo sapien
agaacacgacttgaccctgaccgga

SEQ ID NO: 4231424 - DNA, 25 bp, Homo sapien
aacacgacttgaccctgaccggaat

SEQ ID NO: 4231425 - DNA, 25 bp, Homo sapien
cacgacttgaccctgaccggaattc

SEQ ID NO: 4231426 - DNA, 25 bp, Homo sapien
tagcgaactatactaagtggtatag

SEQ ID NO: 4231427 - DNA, 25 bp, Homo sapien
catgtaggccacaaaatagtagcga

SEQ ID NO: 4231428 - DNA, 25 bp, Homo sapien
atagcccaagttggcaaaggttact

SEQ ID NO: 4231429 - DNA, 25 bp, Homo sapien
actcttccaaatagcccaagttggc

SEQ ID NO: 4231430 - DNA, 25 bp, Homo sapien
ctgaaacacaatggcatgttttaaa

SEQ ID NO: 4231431 - DNA, 25 bp, Homo sapien
attgattcaaaaaaacttgacacct

SEQ ID NO: 4231432 - DNA, 25 bp, Homo sapien
tgattcaaaaaaacttgacacctgt

SEQ ID NO: 4231433 - DNA, 25 bp, Homo sapien
gcatgttttaaaaattgattcaaaa

SEQ ID NO: 4231434 - DNA, 25 bp, Homo sapien
cacgattggtaggtagatcataatt

SEQ ID NO: 4231435 - DNA, 25 bp, Homo sapien
tttcacgattggtaggtagatcata

SEQ ID NO: 4231436 - DNA, 25 bp, Homo sapien
cgattggtaggtagatcataattta

SEQ ID NO: 4231437 - DNA, 25 bp, Homo sapien
tcacgattggtaggtagatcataat

SEQ ID NO: 4231438 - DNA, 25 bp, Homo sapien
taaaccagggttcactcaaattgct

SEQ ID NO: 4231439 - DNA, 25 bp, Homo sapien
tggacacaagaacatcactaaaagc

SEQ ID NO: 4231440 - DNA, 25 bp, Homo sapien
aaattgctaccaggcgacaccaaga

SEQ ID NO: 4231441 - DNA, 25 bp, Homo sapien
cataaggtaagaccaacaattgtgg

SEQ ID NO: 4231442 - DNA, 25 bp, Homo sapien
gtttcgcttatgattccacgtccta

SEQ ID NO: 4231443 - DNA, 25 bp, Homo sapien
tgagtgccatctcgtcaccaactgc

SEQ ID NO: 4231444 - DNA, 25 bp, Homo sapien
cacgtcctaaattacgtcaacgccg

SEQ ID NO: 4231445 - DNA, 25 bp, Homo sapien
ttattcaaacagtgtgctgtttcgc

SEQ ID NO: 4231446 - DNA, 25 bp, Homo sapien
taactggagcactagctgctaatgc

SEQ ID NO: 4231447 - DNA, 25 bp, Homo sapien
tatagttcgtgcttctaactggagc

SEQ ID NO: 4231448 - DNA, 25 bp, Homo sapien
tgacgatccacttgttaaccaccag

SEQ ID NO: 4231449 - DNA, 25 bp, Homo sapien
tatggtaacccaaacttatcactgc

SEQ ID NO: 4231450 - DNA, 25 bp, Homo sapien
ttcctcccaaatcgaccccctctgc

SEQ ID NO: 4231451 - DNA, 25 bp, Homo sapien
tctcctccactgtagtattgtagaa

SEQ ID NO: 4231452 - DNA, 25 bp, Homo sapien
cagtaacaaagtttatagccacacc

SEQ ID NO: 4231453 - DNA, 25 bp, Homo sapien
aaagtctcaatgtcacgaagaatcc

SEQ ID NO: 4231454 - DNA, 25 bp, Homo sapien
aaagaagcacaatgcacgttgtgat

SEQ ID NO: 4231455 - DNA, 25 bp, Homo sapien
cgactaacgtcgctttgctatcaaa

SEQ ID NO: 4231456 - DNA, 25 bp, Homo sapien
atgatagagaacatctaatacaacc

SEQ ID NO: 4231457 - DNA, 25 bp, Homo sapien
gcacgttgtgatcgcctattcagca

SEQ ID NO: 4231458 - DNA, 25 bp, Homo sapien
aaaggcagatatgctagtttaacat

SEQ ID NO: 4231459 - DNA, 25 bp, Homo sapien
tactcaggctaatgacaaacacaat

SEQ ID NO: 4231460 - DNA, 25 bp, Homo sapien
tttctactcaggctaatgacaaaca

SEQ ID NO: 4231461 - DNA, 25 bp, Homo sapien
tctactcaggctaatgacaaacaca

SEQ ID NO: 4231462 - DNA, 25 bp, Homo sapien
cattaagacatgtgcaatatggcaa

SEQ ID NO: 4231463 - DNA, 25 bp, Homo sapien
ggattgcttgctggggcttagcaac

SEQ ID NO: 4231464 - DNA, 25 bp, Homo sapien
ttaaaccctacctaggattgcttgc

SEQ ID NO: 4231465 - DNA, 25 bp, Homo sapien
ttcaaacttcattaagacatgtgca

SEQ ID NO: 4231466 - DNA, 25 bp, Homo sapien
tgacaaatgcctagcagatggtgct

SEQ ID NO: 4231467 - DNA, 25 bp, Homo sapien
gctcgtcaatcaactccatgatgtg

SEQ ID NO: 4231468 - DNA, 25 bp, Homo sapien
cacagaaaaacttgccgtaagtagg

SEQ ID NO: 4231469 - DNA, 25 bp, Homo sapien
gaacatttgcaactcatcagccttt

SEQ ID NO: 4231470 - DNA, 25 bp, Homo sapien
taacttatggaggaatgctttgttc

SEQ ID NO: 4231471 - DNA, 25 bp, Homo sapien
taaattatctctctaaccagtactg

SEQ ID NO: 4231472 - DNA, 25 bp, Homo sapien
accaaggatcgaggagtagctgcca

SEQ ID NO: 4231473 - DNA, 25 bp, Homo sapien
cagggtgaagtaccatgcaagcatt

SEQ ID NO: 4231474 - DNA, 25 bp, Homo sapien
cctgctgaattcttagagccctcgc

SEQ ID NO: 4231475 - DNA, 25 bp, Homo sapien
gtagatccctgctgaattcttagag

SEQ ID NO: 4231476 - DNA, 25 bp, Homo sapien
catccactgtagatccctgctgaat

SEQ ID NO: 4231477 - DNA, 25 bp, Homo sapien
tagagccctcgctgtttgcatcact

SEQ ID NO: 4231478 - DNA, 25 bp, Homo sapien
gggtaaaatgactgcctggagctgg

SEQ ID NO: 4231479 - DNA, 25 bp, Homo sapien
ggtaaaatgactgcctggagctggc

SEQ ID NO: 4231480 - DNA, 25 bp, Homo sapien
ggagctggcagctgctttctctgct

SEQ ID NO: 4231481 - DNA, 25 bp, Homo sapien
ctggggtaaaatgactgcctggagc

SEQ ID NO: 4231482 - DNA, 25 bp, Homo sapien
cttcatcctccagacgggacttggg

SEQ ID NO: 4231483 - DNA, 25 bp, Homo sapien
ctggggtccccttatgccgggagca

SEQ ID NO: 4231484 - DNA, 25 bp, Homo sapien
gagggagctacgaccttgaccatcc

SEQ ID NO: 4231485 - DNA, 25 bp, Homo sapien
attcctctttagggaagtcatccag

SEQ ID NO: 4231486 - DNA, 25 bp, Homo sapien
tggagctaaactccctgctggagca

SEQ ID NO: 4231487 - DNA, 25 bp, Homo sapien
catggagctaaactccctgctggag

SEQ ID NO: 4231488 - DNA, 25 bp, Homo sapien
gtccatggagctaaactccctgctg

SEQ ID NO: 4231489 - DNA, 25 bp, Homo sapien
tccatggagctaaactccctgctgg

SEQ ID NO: 4231490 - DNA, 25 bp, Homo sapien
gagccactttgaggactagtgacct

SEQ ID NO: 4231491 - DNA, 25 bp, Homo sapien
gactagtgacctcggttccctggct

SEQ ID NO: 4231492 - DNA, 25 bp, Homo sapien
acatgccgggctagcagggtcagag

SEQ ID NO: 4231493 - DNA, 25 bp, Homo sapien
tttgaggactagtgacctcggttcc

SEQ ID NO: 4231494 - DNA, 25 bp, Homo sapien
atttggaggaacaggtttcgtgact

SEQ ID NO: 4231495 - DNA, 25 bp, Homo sapien
ttggaggaacaggtttcgtgactgt

SEQ ID NO: 4231496 - DNA, 25 bp, Homo sapien
tggaggaacaggtttcgtgactgtc

SEQ ID NO: 4231497 - DNA, 25 bp, Homo sapien
tttggaggaacaggtttcgtgactg

SEQ ID NO: 4231498 - DNA, 25 bp, Homo sapien
cgggaatgcgggcgctctggagccg

SEQ ID NO: 4231499 - DNA, 25 bp, Homo sapien
ctgctttctgcgtagctgggcaggg

SEQ ID NO: 4231500 - DNA, 25 bp, Homo sapien
ccggctgctttctgcgtagctgggc

SEQ ID NO: 4231501 - DNA, 25 bp, Homo sapien
tgctttctgcgtagctgggcagggc

SEQ ID NO: 4231502 - DNA, 25 bp, Homo sapien
ctctggtatggaatcagaaccacag

SEQ ID NO: 4231503 - DNA, 25 bp, Homo sapien
cctctggtatggaatcagaaccaca

SEQ ID NO: 4231504 - DNA, 25 bp, Homo sapien
ccgggcagagctaatagcagtagaa

SEQ ID NO: 4231505 - DNA, 25 bp, Homo sapien
gtcatgaccgggcagagctaatagc

SEQ ID NO: 4231506 - DNA, 25 bp, Homo sapien
taatagcagtagaacagctcccagc

SEQ ID NO: 4231507 - DNA, 25 bp, Homo sapien
cagagctaatagcagtagaacagct

SEQ ID NO: 4231508 - DNA, 25 bp, Homo sapien
tccaacctgtgcaggcccccttggg

SEQ ID NO: 4231509 - DNA, 25 bp, Homo sapien
tgggatgcccgccatccaacctgtg

SEQ ID NO: 4231510 - DNA, 25 bp, Homo sapien
gggccccattatggcccggatgccc

SEQ ID NO: 4231511 - DNA, 25 bp, Homo sapien
accaggggtgccatctctgccatca

SEQ ID NO: 4231512 - DNA, 25 bp, Homo sapien
tgctgagcggtatacataggcacct

SEQ ID NO: 4231513 - DNA, 25 bp, Homo sapien
tgatcataggtgaagagcatagcct

SEQ ID NO: 4231514 - DNA, 25 bp, Homo sapien
tagtacagcccaggaatgttgcagt

SEQ ID NO: 4231515 - DNA, 25 bp, Homo sapien
ggtttcaccgatgtctcccttagga

SEQ ID NO: 4231516 - DNA, 25 bp, Homo sapien
gatggagttggctttccccgttgga

SEQ ID NO: 4231517 - DNA, 25 bp, Homo sapien
tcatgtttgtgaagctccccaggac

SEQ ID NO: 4231518 - DNA, 25 bp, Homo sapien
gacaggacgtcatcatagaaccact

SEQ ID NO: 4231519 - DNA, 25 bp, Homo sapien
gggccattgagtagtagtccttcca

SEQ ID NO: 4231520 - DNA, 25 bp, Homo sapien
aataataaattcaggaggcccagtc

SEQ ID NO: 4231521 - DNA, 25 bp, Homo sapien
ttagaggtgacggaagcacagtcct

SEQ ID NO: 4231522 - DNA, 25 bp, Homo sapien
gaactatactgtgtagcacctgagg

SEQ ID NO: 4231523 - DNA, 25 bp, Homo sapien
aaagcgtgttctgtaaggagcccac

SEQ ID NO: 4231524 - DNA, 25 bp, Homo sapien
ttctacactgcagggcagaaggacc

SEQ ID NO: 4231525 - DNA, 25 bp, Homo sapien
aaaagggtgtaatgacaagtcacag

SEQ ID NO: 4231526 - DNA, 25 bp, Homo sapien
taagaaaagggtgtaatgacaagtc

SEQ ID NO: 4231527 - DNA, 25 bp, Homo sapien
agaaaagggtgtaatgacaagtcac

SEQ ID NO: 4231528 - DNA, 25 bp, Homo sapien
attaagaaaagggtgtaatgacaag

SEQ ID NO: 4231529 - DNA, 25 bp, Homo sapien
ttgagacctccacaaccttgcgctg

SEQ ID NO: 4231530 - DNA, 25 bp, Homo sapien
gggcacccaacttcagcactgtcat

SEQ ID NO: 4231531 - DNA, 25 bp, Homo sapien
gagctttgagacctccacaaccttg

SEQ ID NO: 4231532 - DNA, 25 bp, Homo sapien
agggcacccaacttcagcactgtca

SEQ ID NO: 4231533 - DNA, 25 bp, Homo sapien
tatatacacattgccaacaagtctc

SEQ ID NO: 4231534 - DNA, 25 bp, Homo sapien
cagttggctcagagtggagatgtcc

SEQ ID NO: 4231535 - DNA, 25 bp, Homo sapien
ttcatgagtctgtgaggcattctct

SEQ ID NO: 4231536 - DNA, 25 bp, Homo sapien
aaggcgggccaaacaatagatgttc

SEQ ID NO: 4231537 - DNA, 25 bp, Homo sapien
gaattcacgttcatacacagccgca

SEQ ID NO: 4231538 - DNA, 25 bp, Homo sapien
gcccataactgggttagaattcacg

SEQ ID NO: 4231539 - DNA, 25 bp, Homo sapien
catctgactggaagagataagggtc

SEQ ID NO: 4231540 - DNA, 25 bp, Homo sapien
cacagccgcaatgatataaatagaa

SEQ ID NO: 4231541 - DNA, 25 bp, Homo sapien
gctgcgcggcttcatgaccgacttg

SEQ ID NO: 4231542 - DNA, 25 bp, Homo sapien
tcaggagcaggagcatgcggaccag

SEQ ID NO: 4231543 - DNA, 25 bp, Homo sapien
gcggcgagagcgaacagcggtgagt

SEQ ID NO: 4231544 - DNA, 25 bp, Homo sapien
gaccgacttgttcctcggcggcgag

SEQ ID NO: 4231545 - DNA, 25 bp, Homo sapien
ttccaaggattttacgctgcggctt

SEQ ID NO: 4231546 - DNA, 25 bp, Homo sapien
ttttccaaggattttacgctgcggc

SEQ ID NO: 4231547 - DNA, 25 bp, Homo sapien
ttgcttttgcgcctctgatcaagtc

SEQ ID NO: 4231548 - DNA, 25 bp, Homo sapien
ccaaggattttacgctgcggcttgt

SEQ ID NO: 4231549 - DNA, 25 bp, Homo sapien
aagtcaaagagtcgcttgtgaattc

SEQ ID NO: 4231550 - DNA, 25 bp, Homo sapien
actgtgcaagtcaaagagtcgcttg

SEQ ID NO: 4231551 - DNA, 25 bp, Homo sapien
gcaagtcaaagagtcgcttgtgaat

SEQ ID NO: 4231552 - DNA, 25 bp, Homo sapien
gtgcaagtcaaagagtcgcttgtga

SEQ ID NO: 4231553 - DNA, 25 bp, Homo sapien
taatcaatttattaaaatagttgac

SEQ ID NO: 4231554 - DNA, 25 bp, Homo sapien
gtaatcaatttattaaaatagttga

SEQ ID NO: 4231555 - DNA, 25 bp, Homo sapien
gaccccactagggagtctcgaaaga

SEQ ID NO: 4231556 - DNA, 25 bp, Homo sapien
aggtgactccagaaaacgcgctcgg

SEQ ID NO: 4231557 - DNA, 25 bp, Homo sapien
aaatagagttgcgaagactgggtcg

SEQ ID NO: 4231558 - DNA, 25 bp, Homo sapien
gagtcgcctccgtatgcaaatagag

SEQ ID NO: 4231559 - DNA, 25 bp, Homo sapien
cggtgccgtggagaaatccgtgttc

SEQ ID NO: 4231560 - DNA, 25 bp, Homo sapien
caccccatactgacggtgccgtgga

SEQ ID NO: 4231561 - DNA, 25 bp, Homo sapien
ctgccgcgggcctcaatttgtcgat

SEQ ID NO: 4231562 - DNA, 25 bp, Homo sapien
tttgtcgatccgtaaacccagactc

SEQ ID NO: 4231563 - DNA, 25 bp, Homo sapien
gcagggcggcccctaagggtatgca

SEQ ID NO: 4231564 - DNA, 25 bp, Homo sapien
cggcccctaagggtatgcagtgcgt

SEQ ID NO: 4231565 - DNA, 25 bp, Homo sapien
taagggtatgcagtgcgtccagctc

SEQ ID NO: 4231566 - DNA, 25 bp, Homo sapien
cccctaagggtatgcagtgcgtcca

SEQ ID NO: 4231567 - DNA, 25 bp, Homo sapien
ggagaaccctcactgtacaaagaag

SEQ ID NO: 4231568 - DNA, 25 bp, Homo sapien
gtgaaacacgctggaaactctaagg

SEQ ID NO: 4231569 - DNA, 25 bp, Homo sapien
gaagttccttacagggtcagcgtcc

SEQ ID NO: 4231570 - DNA, 25 bp, Homo sapien
tattatagcttgtacccgcgttcgg

SEQ ID NO: 4231571 - DNA, 25 bp, Homo sapien
ggccttgctttacacctctttgtga

SEQ ID NO: 4231572 - DNA, 25 bp, Homo sapien
cactttaaaagctggtctcacacca

SEQ ID NO: 4231573 - DNA, 25 bp, Homo sapien
aaagcctcccttgatagtttggcag

SEQ ID NO: 4231574 - DNA, 25 bp, Homo sapien
tgagcacatgagcttaccctacggg

SEQ ID NO: 4231575 - DNA, 25 bp, Homo sapien
agtgtgcggcttgtgaaaacctcag

SEQ ID NO: 4231576 - DNA, 25 bp, Homo sapien
actgagcctttcacccacgatttca

SEQ ID NO: 4231577 - DNA, 25 bp, Homo sapien
taatcaccctatgagataaggtctg

SEQ ID NO: 4231578 - DNA, 25 bp, Homo sapien
actgaatgcttcttgtatacctggc

SEQ ID NO: 4231579 - DNA, 25 bp, Homo sapien
gatggactaggttcatttaacccac

SEQ ID NO: 4231580 - DNA, 25 bp, Homo sapien
ccagaacttgatggactaggttcat

SEQ ID NO: 4231581 - DNA, 25 bp, Homo sapien
cctttccagaacttgatggactagg

SEQ ID NO: 4231582 - DNA, 25 bp, Homo sapien
cttgatggactaggttcatttaacc

SEQ ID NO: 4231583 - DNA, 25 bp, Homo sapien
ttcctgagagcccttcaattcagct

SEQ ID NO: 4231584 - DNA, 25 bp, Homo sapien
gagcccttcaattcagctttccaga

SEQ ID NO: 4231585 - DNA, 25 bp, Homo sapien
tgcaaacagcctcttggtagcttcc

SEQ ID NO: 4231586 - DNA, 25 bp, Homo sapien
aacagcctcttggtagcttcctgag

SEQ ID NO: 4231587 - DNA, 25 bp, Homo sapien
tcctcctgggacatgcagttctttt

SEQ ID NO: 4231588 - DNA, 25 bp, Homo sapien
agtgtacgtaaggtatttattcctg

SEQ ID NO: 4231589 - DNA, 25 bp, Homo sapien
tgatcatctaaagtgtacgtaaggt

SEQ ID NO: 4231590 - DNA, 25 bp, Homo sapien
aaccatcctcctgggacatgcagtt

SEQ ID NO: 4231591 - DNA, 25 bp, Homo sapien
ggaacaatcgtcttagccagcaagc

SEQ ID NO: 4231592 - DNA, 25 bp, Homo sapien
cactcacggtctgactttgagcaag

SEQ ID NO: 4231593 - DNA, 25 bp, Homo sapien
gcaagcaggcctatgttcaagacca

SEQ ID NO: 4231594 - DNA, 25 bp, Homo sapien
ttgggtaacaccatgaggcaggttg

SEQ ID NO: 4231595 - DNA, 25 bp, Homo sapien
tcttcacacgtggttgggcacataa

SEQ ID NO: 4231596 - DNA, 25 bp, Homo sapien
caaactaaaggattcgcaggcacta

SEQ ID NO: 4231597 - DNA, 25 bp, Homo sapien
tacctgggctcacaaataaacctgg

SEQ ID NO: 4231598 - DNA, 25 bp, Homo sapien
gacttctggattactgattggctgg

SEQ ID NO: 4231599 - DNA, 25 bp, Homo sapien
gtgagacaataattttgctcatatg

SEQ ID NO: 4231600 - DNA, 25 bp, Homo sapien
aaagatgtcccattcaccattaagt

SEQ ID NO: 4231601 - DNA, 25 bp, Homo sapien
tgctcatatgttatgccctccacct

SEQ ID NO: 4231602 - DNA, 25 bp, Homo sapien
aactctaacccaggaattatcttgg

SEQ ID NO: 4231603 - DNA, 25 bp, Homo sapien
tgtctgagaccaacatgacttccct

SEQ ID NO: 4231604 - DNA, 25 bp, Homo sapien
cagagttacttacagccaggtgtgt

SEQ ID NO: 4231605 - DNA, 25 bp, Homo sapien
gatactagttgatcccaatatccag

SEQ ID NO: 4231606 - DNA, 25 bp, Homo sapien
tcacctggcctctgtaaacctgttc

SEQ ID NO: 4231607 - DNA, 25 bp, Homo sapien
caagtgggtttcctgagaaggcctc

SEQ ID NO: 4231608 - DNA, 25 bp, Homo sapien
gaaggcctcttcagtgctagattcc

SEQ ID NO: 4231609 - DNA, 25 bp, Homo sapien
cggattaagagttcaccaattgacc

SEQ ID NO: 4231610 - DNA, 25 bp, Homo sapien
tgcccagccggaaaaggtacacttc

SEQ ID NO: 4231611 - DNA, 25 bp, Homo sapien
ggaagagaaaatcaaacaccatatg

SEQ ID NO: 4231612 - DNA, 25 bp, Homo sapien
cccaaacgtccatcagtgatacact

SEQ ID NO: 4231613 - DNA, 25 bp, Homo sapien
aacgtccatcagtgatacactggat

SEQ ID NO: 4231614 - DNA, 25 bp, Homo sapien
gaagagaaaatcaaacaccatatgt

SEQ ID NO: 4231615 - DNA, 25 bp, Homo sapien
gttctttcttagtctctgaaactcc

SEQ ID NO: 4231616 - DNA, 25 bp, Homo sapien
gtgagtttctagtgctgttgttgtc

SEQ ID NO: 4231617 - DNA, 25 bp, Homo sapien
aaatatctggtgatcgttagctgtc

SEQ ID NO: 4231618 - DNA, 25 bp, Homo sapien
tctctcttagactagtaattacagg

SEQ ID NO: 4231619 - DNA, 25 bp, Homo sapien
ctggttgcagggctctgcgcaactg

SEQ ID NO: 4231620 - DNA, 25 bp, Homo sapien
gctggttgcagggctctgcgcaact

SEQ ID NO: 4231621 - DNA, 25 bp, Homo sapien
tacttaagcattcacctgaatccgg

SEQ ID NO: 4231622 - DNA, 25 bp, Homo sapien
attgaccttgcctcccaacgggctg

SEQ ID NO: 4231623 - DNA, 25 bp, Homo sapien
ctgaatccggtgcagtcttacctgg

SEQ ID NO: 4231624 - DNA, 25 bp, Homo sapien
cttgcagagcagaggaggtatactt

SEQ ID NO: 4231625 - DNA, 25 bp, Homo sapien
cagtgcattgaagttgcctctccat

SEQ ID NO: 4231626 - DNA, 25 bp, Homo sapien
ccagtgcattgaagttgcctctcca

SEQ ID NO: 4231627 - DNA, 25 bp, Homo sapien
cccagtgcattgaagttgcctctcc

SEQ ID NO: 4231628 - DNA, 25 bp, Homo sapien
caatgcaggtctccaaagacctctc

SEQ ID NO: 4231629 - DNA, 25 bp, Homo sapien
aatgcaggtctccaaagacctctcc

SEQ ID NO: 4231630 - DNA, 25 bp, Homo sapien
gctcctcttttccaagatcctgcat

SEQ ID NO: 4231631 - DNA, 25 bp, Homo sapien
ctttgcactgtaaacagcagaccca

SEQ ID NO: 4231632 - DNA, 25 bp, Homo sapien
agacccacgctcctcttttccaaga

SEQ ID NO: 4231633 - DNA, 25 bp, Homo sapien
caaatctttgcactgtaaacagcag

SEQ ID NO: 4231634 - DNA, 25 bp, Homo sapien
cctctcagtctagtatacaaggcca

SEQ ID NO: 4231635 - DNA, 25 bp, Homo sapien
ctccaagcaacacccaccgtgcaca

SEQ ID NO: 4231636 - DNA, 25 bp, Homo sapien
tctagtatacaaggccatactccca

SEQ ID NO: 4231637 - DNA, 25 bp, Homo sapien
aatgcctctcagtctagtatacaag

SEQ ID NO: 4231638 - DNA, 25 bp, Homo sapien
aaaagattaatctcctgaagtccag

SEQ ID NO: 4231639 - DNA, 25 bp, Homo sapien
aatactaggaccctcacaacagtct

SEQ ID NO: 4231640 - DNA, 25 bp, Homo sapien
ccacatcatctaatactaggaccct

SEQ ID NO: 4231641 - DNA, 25 bp, Homo sapien
tctaatactaggaccctcacaacag

SEQ ID NO: 4231642 - DNA, 25 bp, Homo sapien
tcatctaatactaggaccctcacaa

SEQ ID NO: 4231643 - DNA, 25 bp, Homo sapien
cctttcatgggtacagtgttctgtt

SEQ ID NO: 4231644 - DNA, 25 bp, Homo sapien
gcctttcatgggtacagtgttctgt

SEQ ID NO: 4231645 - DNA, 25 bp, Homo sapien
tgcctttcatgggtacagtgttctg

SEQ ID NO: 4231646 - DNA, 25 bp, Homo sapien
agacccccggaagcagacagaaaga

SEQ ID NO: 4231647 - DNA, 25 bp, Homo sapien
ctatctcgcctaggggcagtttcag

SEQ ID NO: 4231648 - DNA, 25 bp, Homo sapien
gcttcagagacccccggaagcagac

SEQ ID NO: 4231649 - DNA, 25 bp, Homo sapien
agaataaactatctcgcctaggggc

SEQ ID NO: 4231650 - DNA, 25 bp, Homo sapien
tcagaggtctcacatgacaacctgg

SEQ ID NO: 4231651 - DNA, 25 bp, Homo sapien
tctcctgcgtgagactgatcagttc

SEQ ID NO: 4231652 - DNA, 25 bp, Homo sapien
ttcaagtgatgaggatagtgaccac

SEQ ID NO: 4231653 - DNA, 25 bp, Homo sapien
gaattagccctcctgaggcgctcag

SEQ ID NO: 4231654 - DNA, 25 bp, Homo sapien
gaacaggagttcaccaagcagagca

SEQ ID NO: 4231655 - DNA, 25 bp, Homo sapien
tctctaaactccgtggtgtgctccc

SEQ ID NO: 4231656 - DNA, 25 bp, Homo sapien
aatttatcctgcaagcaactgggac

SEQ ID NO: 4231657 - DNA, 25 bp, Homo sapien
gaaagtggcccattgtgttcaggga

SEQ ID NO: 4231658 - DNA, 25 bp, Homo sapien
tgtttcgactcctcttctaccccta

SEQ ID NO: 4231659 - DNA, 25 bp, Homo sapien
ctgtttcgactcctcttctacccct

SEQ ID NO: 4231660 - DNA, 25 bp, Homo sapien
tcctgtctctgtttcgactcctctt

SEQ ID NO: 4231661 - DNA, 25 bp, Homo sapien
gtctctgtttcgactcctcttctac

SEQ ID NO: 4231662 - DNA, 25 bp, Homo sapien
gcatctgcctgtagggtatacggag

SEQ ID NO: 4231663 - DNA, 25 bp, Homo sapien
catgagccacaacttacaggcagga

SEQ ID NO: 4231664 - DNA, 25 bp, Homo sapien
tgccagatcctagtatcatccaggg

SEQ ID NO: 4231665 - DNA, 25 bp, Homo sapien
tttcttgagggccaaccatgagcca

SEQ ID NO: 4231666 - DNA, 25 bp, Homo sapien
cacagacctaggtttgaagtccaac

SEQ ID NO: 4231667 - DNA, 25 bp, Homo sapien
tgtcatcgctcctcaaaagtagtca

SEQ ID NO: 4231668 - DNA, 25 bp, Homo sapien
tattcaagggtggtcattcagaggg

SEQ ID NO: 4231669 - DNA, 25 bp, Homo sapien
tcttcactgagagtcacgagcaacc

SEQ ID NO: 4231670 - DNA, 25 bp, Homo sapien
gagaggtggctcgacttgctataag

SEQ ID NO: 4231671 - DNA, 25 bp, Homo sapien
gcctcttgaaaacataatcgccgtg

SEQ ID NO: 4231672 - DNA, 25 bp, Homo sapien
aaatagaaccacatacagctgccga

SEQ ID NO: 4231673 - DNA, 25 bp, Homo sapien
tcgccgtgcagtaaagaggagacca

SEQ ID NO: 4231674 - DNA, 25 bp, Homo sapien
aaagaacatcctgtaggaagggatt

SEQ ID NO: 4231675 - DNA, 25 bp, Homo sapien
tgaggtgaggtagagaactctcctc

SEQ ID NO: 4231676 - DNA, 25 bp, Homo sapien
cagccaaggaattcttcacaccaag

SEQ ID NO: 4231677 - DNA, 25 bp, Homo sapien
ttgaccaggccggagcgcaatggta

SEQ ID NO: 4231678 - DNA, 25 bp, Homo sapien
taaacacgcaccgataatatggcca

SEQ ID NO: 4231679 - DNA, 25 bp, Homo sapien
ccatcatgtaggtaacagagcaggc

SEQ ID NO: 4231680 - DNA, 25 bp, Homo sapien
tacatgcgatgggagtaaacacgca

SEQ ID NO: 4231681 - DNA, 25 bp, Homo sapien
caattgtctatctgagtggcccagg

SEQ ID NO: 4231682 - DNA, 25 bp, Homo sapien
tccacagatggaacgtcgttgcctt

SEQ ID NO: 4231683 - DNA, 25 bp, Homo sapien
tcacccatgatccactcaagcaggt

SEQ ID NO: 4231684 - DNA, 25 bp, Homo sapien
tggaacgtcgttgccttcttgcctt

SEQ ID NO: 4231685 - DNA, 25 bp, Homo sapien
catgatccactcaagcaggtgtgcc

SEQ ID NO: 4231686 - DNA, 25 bp, Homo sapien
gacacgtatgtagtggccaacagga

SEQ ID NO: 4231687 - DNA, 25 bp, Homo sapien
acagtgggccacctatgagatgagc

SEQ ID NO: 4231688 - DNA, 25 bp, Homo sapien
caggataccagtgtagcagggaccc

SEQ ID NO: 4231689 - DNA, 25 bp, Homo sapien
tcaggaggaagtagcgtaacgtgcc

SEQ ID NO: 4231690 - DNA, 25 bp, Homo sapien
agcgcaatgattccgttgcggctca

SEQ ID NO: 4231691 - DNA, 25 bp, Homo sapien
caatgattccgttgcggctcactgc

SEQ ID NO: 4231692 - DNA, 25 bp, Homo sapien
tggagcgcaatgattccgttgcggc

SEQ ID NO: 4231693 - DNA, 25 bp, Homo sapien
ctggagcgcaatgattccgttgcgg

SEQ ID NO: 4231694 - DNA, 25 bp, Homo sapien
taatgtgtctattacaaatctgaaa

SEQ ID NO: 4231695 - DNA, 25 bp, Homo sapien
cacagggagctagtgcccttaaccc

SEQ ID NO: 4231696 - DNA, 25 bp, Homo sapien
taacccctgtgtagttctatgttgt

SEQ ID NO: 4231697 - DNA, 25 bp, Homo sapien
tgtctattacaaatctgaaaactac

SEQ ID NO: 4231698 - DNA, 25 bp, Homo sapien
ccatttgaccaaagtgggcctccag

SEQ ID NO: 4231699 - DNA, 25 bp, Homo sapien
gaagtacgcacaaatgcatggccca

SEQ ID NO: 4231700 - DNA, 25 bp, Homo sapien
catggccagcttgaaacctgtgggt

SEQ ID NO: 4231701 - DNA, 25 bp, Homo sapien
tcactcatggctgggaaaacagaag

SEQ ID NO: 4231702 - DNA, 25 bp, Homo sapien
aaggtaattggcacagacaggaatt

SEQ ID NO: 4231703 - DNA, 25 bp, Homo sapien
gttgagattttacccagaaacagaa

SEQ ID NO: 4231704 - DNA, 25 bp, Homo sapien
tcaccccaaatcctaagcaaaggta

SEQ ID NO: 4231705 - DNA, 25 bp, Homo sapien
gctgatacgcccagagttgagattt

SEQ ID NO: 4231706 - DNA, 25 bp, Homo sapien
ggagccgacggaatgatctctgtaa

SEQ ID NO: 4231707 - DNA, 25 bp, Homo sapien
ctgtaagaggcaaatggaactgggc

SEQ ID NO: 4231708 - DNA, 25 bp, Homo sapien
catgaggtaggttagatctggcttc

SEQ ID NO: 4231709 - DNA, 25 bp, Homo sapien
tgaatctctcacaggttgccgtaac

SEQ ID NO: 4231710 - DNA, 25 bp, Homo sapien
tctgagatggaatgccaataccaag

SEQ ID NO: 4231711 - DNA, 25 bp, Homo sapien
tggacagtcattcgaataggtttct

SEQ ID NO: 4231712 - DNA, 25 bp, Homo sapien
gtttcactgtcttcgtctttggcca

SEQ ID NO: 4231713 - DNA, 25 bp, Homo sapien
gttatatttattccgctactgggcc

SEQ ID NO: 4231714 - DNA, 25 bp, Homo sapien
gaagggcaacaccagttcagcctag

SEQ ID NO: 4231715 - DNA, 25 bp, Homo sapien
taggccaaagtgagtcagtactgct

SEQ ID NO: 4231716 - DNA, 25 bp, Homo sapien
tagttaatgagtcaacacacggctc

SEQ ID NO: 4231717 - DNA, 25 bp, Homo sapien
taatcacccttgcattgaggtgggc

SEQ ID NO: 4231718 - DNA, 25 bp, Homo sapien
cctgagagcttcaaggcccttggtg

SEQ ID NO: 4231719 - DNA, 25 bp, Homo sapien
tcctgagagcttcaaggcccttggt

SEQ ID NO: 4231720 - DNA, 25 bp, Homo sapien
aaaggttgttcaagtctgtcctgag

SEQ ID NO: 4231721 - DNA, 25 bp, Homo sapien
gagaaaaaggttgttcaagtctgtc

SEQ ID NO: 4231722 - DNA, 25 bp, Homo sapien
ttggctagacacagaagggtgctta

SEQ ID NO: 4231723 - DNA, 25 bp, Homo sapien
cagttatgttggaaacctgcctccc

SEQ ID NO: 4231724 - DNA, 25 bp, Homo sapien
cctgcagatggactatgtgggacct

SEQ ID NO: 4231725 - DNA, 25 bp, Homo sapien
gacctcacatagttccatgaccgtg

SEQ ID NO: 4231726 - DNA, 25 bp, Homo sapien
cctggttgtgccgccctacaggaac

SEQ ID NO: 4231727 - DNA, 25 bp, Homo sapien
cctccctggttgtgccgccctacag

SEQ ID NO: 4231728 - DNA, 25 bp, Homo sapien
ccacgccctccctggttgtgccgcc

SEQ ID NO: 4231729 - DNA, 25 bp, Homo sapien
ggttgtgccgccctacaggaacctc

SEQ ID NO: 4231730 - DNA, 25 bp, Homo sapien
tctcttatctagaagagttcctcgc

SEQ ID NO: 4231731 - DNA, 25 bp, Homo sapien
tttcaattctctcttatctagaaga

SEQ ID NO: 4231732 - DNA, 25 bp, Homo sapien
tgctcaaaaggggatccaaacaagg

SEQ ID NO: 4231733 - DNA, 25 bp, Homo sapien
aagagttcctcgctcccttacttct

SEQ ID NO: 4231734 - DNA, 25 bp, Homo sapien
caaaggtcagaagcatgatatgcaa

SEQ ID NO: 4231735 - DNA, 25 bp, Homo sapien
aagaaaccgacttgtagctggtgaa

SEQ ID NO: 4231736 - DNA, 25 bp, Homo sapien
gacaagtcaccgttttgctcaaaag

SEQ ID NO: 4231737 - DNA, 25 bp, Homo sapien
tgctcaaaagcgcagcaaaggtcag

SEQ ID NO: 4231738 - DNA, 25 bp, Homo sapien
tatattgagccacttattgcatgag

SEQ ID NO: 4231739 - DNA, 25 bp, Homo sapien
gaagaacaagtcaaatagcgccaaa

SEQ ID NO: 4231740 - DNA, 25 bp, Homo sapien
cctatgggacaactgaactggtttc

SEQ ID NO: 4231741 - DNA, 25 bp, Homo sapien
tacgtacaccttgtctgaatcttgg

SEQ ID NO: 4231742 - DNA, 25 bp, Homo sapien
catagactcagatggtgaacctcta

SEQ ID NO: 4231743 - DNA, 25 bp, Homo sapien
aaaataccgtgcttcgttgcctgaa

SEQ ID NO: 4231744 - DNA, 25 bp, Homo sapien
cacatgctatttgtcaggctcaaag

SEQ ID NO: 4231745 - DNA, 25 bp, Homo sapien
gtgcagacagcgctacctatgaccc

SEQ ID NO: 4231746 - DNA, 25 bp, Homo sapien
cctcaggaattagcactattatcca

SEQ ID NO: 4231747 - DNA, 25 bp, Homo sapien
tagcactattatccatgggagggaa

SEQ ID NO: 4231748 - DNA, 25 bp, Homo sapien
aaggtttattgggtctgcaggccaa

SEQ ID NO: 4231749 - DNA, 25 bp, Homo sapien
ggagggaaggtttattgggtctgca

SEQ ID NO: 4231750 - DNA, 25 bp, Homo sapien
cattcgtggcaggtagtaggtactc

SEQ ID NO: 4231751 - DNA, 25 bp, Homo sapien
ccgtcatgacatactcagtaccagt

SEQ ID NO: 4231752 - DNA, 25 bp, Homo sapien
gtaccagttgcattcgtggcaggta

SEQ ID NO: 4231753 - DNA, 25 bp, Homo sapien
gcaggtagtaggtactcagaatggt

SEQ ID NO: 4231754 - DNA, 25 bp, Homo sapien
aagaacacagcgacttgcatcatca

SEQ ID NO: 4231755 - DNA, 25 bp, Homo sapien
gaaatcaatgctcaaagcaaggaaa

SEQ ID NO: 4231756 - DNA, 25 bp, Homo sapien
aactggccaacactgaaccggcaga

SEQ ID NO: 4231757 - DNA, 25 bp, Homo sapien
tcacgaggcttctagaggaagaaca

SEQ ID NO: 4231758 - DNA, 25 bp, Homo sapien
tgtggtcccttgacaccacccttgg

SEQ ID NO: 4231759 - DNA, 25 bp, Homo sapien
gcacttataactgcaagaccctttc

SEQ ID NO: 4231760 - DNA, 25 bp, Homo sapien
ggtggctggagtttctggtcacagg

SEQ ID NO: 4231761 - DNA, 25 bp, Homo sapien
aggctccaagtccaccaggtggctg

SEQ ID NO: 4231762 - DNA, 25 bp, Homo sapien
cctgctgtgcactgagtggtaacac

SEQ ID NO: 4231763 - DNA, 25 bp, Homo sapien
ctcaggtactttccgtattggtaag

SEQ ID NO: 4231764 - DNA, 25 bp, Homo sapien
tttacagacctattatactcccgtg

SEQ ID NO: 4231765 - DNA, 25 bp, Homo sapien
tatactcccgtgagataagcacagc

SEQ ID NO: 4231766 - DNA, 25 bp, Homo sapien
tccgcagacacccaacacaggtaat

SEQ ID NO: 4231767 - DNA, 25 bp, Homo sapien
catgaccatatgacaactgaagaag

SEQ ID NO: 4231768 - DNA, 25 bp, Homo sapien
gaatccattggcagtaccaaccaaa

SEQ ID NO: 4231769 - DNA, 25 bp, Homo sapien
gactctgggaacgatgggctcctat

SEQ ID NO: 4231770 - DNA, 25 bp, Homo sapien
gggtaagatagcagacatgtagcca

SEQ ID NO: 4231771 - DNA, 25 bp, Homo sapien
ggtaagatagcagacatgtagccaa

SEQ ID NO: 4231772 - DNA, 25 bp, Homo sapien
tgggtaagatagcagacatgtagcc

SEQ ID NO: 4231773 - DNA, 25 bp, Homo sapien
gatagaggctaggaattctgggtaa

SEQ ID NO: 4231774 - DNA, 25 bp, Homo sapien
caaaagtcagactcaatttgggctt

SEQ ID NO: 4231775 - DNA, 25 bp, Homo sapien
gcctgttaagcaattctcgacaaaa

SEQ ID NO: 4231776 - DNA, 25 bp, Homo sapien
gaacgtggacagcagtccctcttcc

SEQ ID NO: 4231777 - DNA, 25 bp, Homo sapien
tgggctttgaacgtggacagcagtc

SEQ ID NO: 4231778 - DNA, 25 bp, Homo sapien
gaagatgtgttcagggaagtcactt

SEQ ID NO: 4231779 - DNA, 25 bp, Homo sapien
tccacacacagatgactgcaaacag

SEQ ID NO: 4231780 - DNA, 25 bp, Homo sapien
tacagactgggaatcagaccccatg

SEQ ID NO: 4231781 - DNA, 25 bp, Homo sapien
cttggtttgcaatttaaaggaatca

SEQ ID NO: 4231782 - DNA, 25 bp, Homo sapien
tgcaaacagaagaaagaccaggacg

SEQ ID NO: 4231783 - DNA, 25 bp, Homo sapien
gcactgaacttgatgcctggtcctg

SEQ ID NO: 4231784 - DNA, 25 bp, Homo sapien
tacattcacatggtcccggaggtgg

SEQ ID NO: 4231785 - DNA, 25 bp, Homo sapien
gacttcagagatcccgctgacgaca

SEQ ID NO: 4231786 - DNA, 25 bp, Homo sapien
tctctgcctagttgggaggacttca

SEQ ID NO: 4231787 - DNA, 25 bp, Homo sapien
agatacagttacagaggttggcagg

SEQ ID NO: 4231788 - DNA, 25 bp, Homo sapien
gaaccagatcatacacggacatggg

SEQ ID NO: 4231789 - DNA, 25 bp, Homo sapien
cagggacttgactgtagacaaggag

SEQ ID NO: 4231790 - DNA, 25 bp, Homo sapien
gcccaggtatgaagtttggacgtga

SEQ ID NO: 4231791 - DNA, 25 bp, Homo sapien
ccacatcttgttggaagttggctgt

SEQ ID NO: 4231792 - DNA, 25 bp, Homo sapien
ttttgtgcccacatcttgttggaag

SEQ ID NO: 4231793 - DNA, 25 bp, Homo sapien
tgtgggtgccccattaaacctcagg

SEQ ID NO: 4231794 - DNA, 25 bp, Homo sapien
aaacctcaggactgcgtcatgatca

SEQ ID NO: 4231795 - DNA, 25 bp, Homo sapien
ctcttactccatagctgcacagaag

SEQ ID NO: 4231796 - DNA, 25 bp, Homo sapien
ttctcttactccatagctgcacaga

SEQ ID NO: 4231797 - DNA, 25 bp, Homo sapien
tactccatagctgcacagaagaaat

SEQ ID NO: 4231798 - DNA, 25 bp, Homo sapien
ggtccttctcttactccatagctgc

SEQ ID NO: 4231799 - DNA, 25 bp, Homo sapien
caggaagatcaagagacttaattgg

SEQ ID NO: 4231800 - DNA, 25 bp, Homo sapien
agagacttaattggcagcctagata

SEQ ID NO: 4231801 - DNA, 25 bp, Homo sapien
gaactcaggaagatcaagagactta

SEQ ID NO: 4231802 - DNA, 25 bp, Homo sapien
cagcctagatatgctcccagtagat

SEQ ID NO: 4231803 - DNA, 25 bp, Homo sapien
cccttagtattgagaaatcggcatg

SEQ ID NO: 4231804 - DNA, 25 bp, Homo sapien
tgtgctacctgaaaatactccggga

SEQ ID NO: 4231805 - DNA, 25 bp, Homo sapien
gatgggcaggttgcagccctattgt

SEQ ID NO: 4231806 - DNA, 25 bp, Homo sapien
gaaccctgtggcaagaatatttctc

SEQ ID NO: 4231807 - DNA, 25 bp, Homo sapien
acagatatatagacgaatagaacag

SEQ ID NO: 4231808 - DNA, 25 bp, Homo sapien
ccaaaacagatatatagacgaatag

SEQ ID NO: 4231809 - DNA, 25 bp, Homo sapien
aaacagatatatagacgaatagaac

SEQ ID NO: 4231810 - DNA, 25 bp, Homo sapien
atatatagacgaatagaacagaaca

SEQ ID NO: 4231811 - DNA, 25 bp, Homo sapien
gaggcaataactaatagcctaacca

SEQ ID NO: 4231812 - DNA, 25 bp, Homo sapien
aacctctttgtatcaatccttctga

SEQ ID NO: 4231813 - DNA, 25 bp, Homo sapien
taaaaaacgataaattgggatatca

SEQ ID NO: 4231814 - DNA, 25 bp, Homo sapien
ctagcagaggtacaaacctctttgt

SEQ ID NO: 4231815 - DNA, 25 bp, Homo sapien
gaacgatcctgacacactcatcaaa

SEQ ID NO: 4231816 - DNA, 25 bp, Homo sapien
tggattttcacaacgattgcattaa

SEQ ID NO: 4231817 - DNA, 25 bp, Homo sapien
ggtctacatttaggtcatagatcca

SEQ ID NO: 4231818 - DNA, 25 bp, Homo sapien
tatgcctttggtgtaataatgacga

SEQ ID NO: 4231819 - DNA, 25 bp, Homo sapien
ttcccatcaacagtgcccacggatt

SEQ ID NO: 4231820 - DNA, 25 bp, Homo sapien
tattcttgggttgcatttccctagc

SEQ ID NO: 4231821 - DNA, 25 bp, Homo sapien
ttaagtttttgaggcactgccgtac

SEQ ID NO: 4231822 - DNA, 25 bp, Homo sapien
cacggattccgatttctgatcatag

SEQ ID NO: 4231823 - DNA, 25 bp, Homo sapien
tagcaactttaagtattcagcttag

SEQ ID NO: 4231824 - DNA, 25 bp, Homo sapien
ccttggcaaacatcattctactttg

SEQ ID NO: 4231825 - DNA, 25 bp, Homo sapien
gcttagtacattcctattgttgtgt

SEQ ID NO: 4231826 - DNA, 25 bp, Homo sapien
tactccaggtgttccatataaagtg

SEQ ID NO: 4231827 - DNA, 25 bp, Homo sapien
tagtgtatcccgggaagtgggccac

SEQ ID NO: 4231828 - DNA, 25 bp, Homo sapien
gaaaggctctcttgagggtgggtag

SEQ ID NO: 4231829 - DNA, 25 bp, Homo sapien
tcctcgcagccctggcacaatggtg

SEQ ID NO: 4231830 - DNA, 25 bp, Homo sapien
tctcttgagggtgggtagtgtatcc

SEQ ID NO: 4231831 - DNA, 25 bp, Homo sapien
ccaggaaaaggctacaccagggcat

SEQ ID NO: 4231832 - DNA, 25 bp, Homo sapien
tgccaggaaaaggctacaccagggc

SEQ ID NO: 4231833 - DNA, 25 bp, Homo sapien
gccaggaaaaggctacaccagggca

SEQ ID NO: 4231834 - DNA, 25 bp, Homo sapien
ctgccaggaaaaggctacaccaggg

SEQ ID NO: 4231835 - DNA, 25 bp, Homo sapien
tttggagatcctcttagggggcagg

SEQ ID NO: 4231836 - DNA, 25 bp, Homo sapien
catgctgagaataagtcattggcag

SEQ ID NO: 4231837 - DNA, 25 bp, Homo sapien
ctgagaataagtcattggcagagca

SEQ ID NO: 4231838 - DNA, 25 bp, Homo sapien
ggaggagttcatgctgagaataagt

SEQ ID NO: 4231839 - DNA, 25 bp, Homo sapien
ggtctatagtccaagggcagagcag

SEQ ID NO: 4231840 - DNA, 25 bp, Homo sapien
ttaagtactgtcctccttccactgg

SEQ ID NO: 4231841 - DNA, 25 bp, Homo sapien
gatttgtaagatagacgtgactgag

SEQ ID NO: 4231842 - DNA, 25 bp, Homo sapien
gttgtaacttaacaacagcccttca

SEQ ID NO: 4231843 - DNA, 25 bp, Homo sapien
cataagaactaagaacagaacccac

SEQ ID NO: 4231844 - DNA, 25 bp, Homo sapien
caattgtcggctgtagatgtgaaga

SEQ ID NO: 4231845 - DNA, 25 bp, Homo sapien
tcaaggatgagactactggccagga

SEQ ID NO: 4231846 - DNA, 25 bp, Homo sapien
aagctcctgttgtcacctaagaaat

SEQ ID NO: 4231847 - DNA, 25 bp, Homo sapien
tcctacagatgtaaggaagttcctg

SEQ ID NO: 4231848 - DNA, 25 bp, Homo sapien
tacagatgtaaggaagttcctggaa

SEQ ID NO: 4231849 - DNA, 25 bp, Homo sapien
cctacagatgtaaggaagttcctgg

SEQ ID NO: 4231850 - DNA, 25 bp, Homo sapien
cttcctacagatgtaaggaagttcc

SEQ ID NO: 4231851 - DNA, 25 bp, Homo sapien
tatacctgccttaaacatgagtgtg

SEQ ID NO: 4231852 - DNA, 25 bp, Homo sapien
ggaaccagcaatggctggttatggc

SEQ ID NO: 4231853 - DNA, 25 bp, Homo sapien
gacaaccttgcttgaagaattctgc

SEQ ID NO: 4231854 - DNA, 25 bp, Homo sapien
tggcctgcacatgggtagttatacc

SEQ ID NO: 4231855 - DNA, 25 bp, Homo sapien
gtgagaagctcatgtgtgcctctgc

SEQ ID NO: 4231856 - DNA, 25 bp, Homo sapien
tggtgagaagctcatgtgtgcctct

SEQ ID NO: 4231857 - DNA, 25 bp, Homo sapien
tgagaagctcatgtgtgcctctgct

SEQ ID NO: 4231858 - DNA, 25 bp, Homo sapien
ggtgagaagctcatgtgtgcctctg

SEQ ID NO: 4231859 - DNA, 25 bp, Homo sapien
ggaatcctttcaatcacctagagag

SEQ ID NO: 4231860 - DNA, 25 bp, Homo sapien
gaaaggtaaagataccagcctgcac

SEQ ID NO: 4231861 - DNA, 25 bp, Homo sapien
gactgacataggctctctcacgaag

SEQ ID NO: 4231862 - DNA, 25 bp, Homo sapien
tctggtgcagcacttaacttcggtg

SEQ ID NO: 4231863 - DNA, 25 bp, Homo sapien
gggatatctgagtggtatacagatg

SEQ ID NO: 4231864 - DNA, 25 bp, Homo sapien
caaactgtctttgaggaagcgcttc

SEQ ID NO: 4231865 - DNA, 25 bp, Homo sapien
tgggtcccatacaattaggattcct

SEQ ID NO: 4231866 - DNA, 25 bp, Homo sapien
taggattccttcattgtacaaactg

SEQ ID NO: 4231867 - DNA, 25 bp, Homo sapien
tcaacaagtgttgctcctgaggcac

SEQ ID NO: 4231868 - DNA, 25 bp, Homo sapien
cagagaggttagaatccagcaggcc

SEQ ID NO: 4231869 - DNA, 25 bp, Homo sapien
ttggcgacccaagatcagcttcagg

SEQ ID NO: 4231870 - DNA, 25 bp, Homo sapien
gcctgtcaggcattggtagatccaa

SEQ ID NO: 4231871 - DNA, 25 bp, Homo sapien
aattataatccggattctggtacca

SEQ ID NO: 4231872 - DNA, 25 bp, Homo sapien
gggtgcagcttacgataagtcttgt

SEQ ID NO: 4231873 - DNA, 25 bp, Homo sapien
cgataagtcttgtagttgttaaaga

SEQ ID NO: 4231874 - DNA, 25 bp, Homo sapien
gaatgtcccatagctcccaaggcat

SEQ ID NO: 4231875 - DNA, 25 bp, Homo sapien
gcaggcactatcgaagaacttctgg

SEQ ID NO: 4231876 - DNA, 25 bp, Homo sapien
tagcacacgtcagtcttgcgcttgg

SEQ ID NO: 4231877 - DNA, 25 bp, Homo sapien
gaggaactcataaatatccacctgg

SEQ ID NO: 4231878 - DNA, 25 bp, Homo sapien
gaacttctggtagtagtagcacacg

SEQ ID NO: 4231879 - DNA, 25 bp, Homo sapien
caagcaggtagatgtcctcatctgt

SEQ ID NO: 4231880 - DNA, 25 bp, Homo sapien
tggcttttccaagcaggtagatgtc

SEQ ID NO: 4231881 - DNA, 25 bp, Homo sapien
ctgtgccctggttgagatgcttcac

SEQ ID NO: 4231882 - DNA, 25 bp, Homo sapien
tagcagtgaatggtccggaagccag

SEQ ID NO: 4231883 - DNA, 25 bp, Homo sapien
tagattctacccagtgtcgtcccag

SEQ ID NO: 4231884 - DNA, 25 bp, Homo sapien
ccctgatgggagagatagaccttgc

SEQ ID NO: 4231885 - DNA, 25 bp, Homo sapien
tgacgttaagtccagagagccacac

SEQ ID NO: 4231886 - DNA, 25 bp, Homo sapien
cacagttttaagtgcgtggccctcc

SEQ ID NO: 4231887 - DNA, 25 bp, Homo sapien
cccaatatgattcggagtctcccag

SEQ ID NO: 4231888 - DNA, 25 bp, Homo sapien
tataatgctgccttcggtttcaccc

SEQ ID NO: 4231889 - DNA, 25 bp, Homo sapien
tgtaagactgttccagaagttcccc

SEQ ID NO: 4231890 - DNA, 25 bp, Homo sapien
taaactgcatgctcaactctaggaa

SEQ ID NO: 4231891 - DNA, 25 bp, Homo sapien
tagaagatcatcctaggcttttgag

SEQ ID NO: 4231892 - DNA, 25 bp, Homo sapien
ccagccctggtatgatggacatttt

SEQ ID NO: 4231893 - DNA, 25 bp, Homo sapien
gacattctcagatatgcaaggattc

SEQ ID NO: 4231894 - DNA, 25 bp, Homo sapien
ttgctagcagatgtttggccttctc

SEQ ID NO: 4231895 - DNA, 25 bp, Homo sapien
ctaagtatcgggaccacaggagggc

SEQ ID NO: 4231896 - DNA, 25 bp, Homo sapien
aggagggcatcaccacacccaaccc

SEQ ID NO: 4231897 - DNA, 25 bp, Homo sapien
cctcctaagtatcgggaccacagga

SEQ ID NO: 4231898 - DNA, 25 bp, Homo sapien
acaggagggcatcaccacacccaac

SEQ ID NO: 4231899 - DNA, 25 bp, Homo sapien
ttgggcttctcaccggcccgcttag

SEQ ID NO: 4231900 - DNA, 25 bp, Homo sapien
caggacatgaaacacctagggatga

SEQ ID NO: 4231901 - DNA, 25 bp, Homo sapien
tttttgaagtcacaacgttggcaca

SEQ ID NO: 4231902 - DNA, 25 bp, Homo sapien
tattgatgcatattaccttgggctt

SEQ ID NO: 4231903 - DNA, 25 bp, Homo sapien
aaggagtaaagtgtagagcttttgc

SEQ ID NO: 4231904 - DNA, 25 bp, Homo sapien
ttaatggtagaagaaatacgtagtc

SEQ ID NO: 4231905 - DNA, 25 bp, Homo sapien
tgtagctacaatagattgttaaggg

SEQ ID NO: 4231906 - DNA, 25 bp, Homo sapien
ctactatgagggctaaaataaaact

SEQ ID NO: 4231907 - DNA, 25 bp, Homo sapien
tactaccacgatgctgccactgaag

SEQ ID NO: 4231908 - DNA, 25 bp, Homo sapien
tcttcctactaccacgatgctgcca

SEQ ID NO: 4231909 - DNA, 25 bp, Homo sapien
tctttcttctatgagcactaatgcc

SEQ ID NO: 4231910 - DNA, 25 bp, Homo sapien
acaccaaccattcttgtggcctctt

SEQ ID NO: 4231911 - DNA, 25 bp, Homo sapien
gctcccactatcatcctgactggcc

SEQ ID NO: 4231912 - DNA, 25 bp, Homo sapien
gcacaaggacttcccggtcacaggc

SEQ ID NO: 4231913 - DNA, 25 bp, Homo sapien
cagctcccactatcatcctgactgg

SEQ ID NO: 4231914 - DNA, 25 bp, Homo sapien
cccactatcatcctgactggcctgt

SEQ ID NO: 4231915 - DNA, 25 bp, Homo sapien
cacggccagcattaagtgggaatgg

SEQ ID NO: 4231916 - DNA, 25 bp, Homo sapien
catttcttgatattcccacggccag

SEQ ID NO: 4231917 - DNA, 25 bp, Homo sapien
aatgggtagttacagcaaccatggc

SEQ ID NO: 4231918 - DNA, 25 bp, Homo sapien
tatgttcagaattcaggtggttctc

SEQ ID NO: 4231919 - DNA, 25 bp, Homo sapien
gagcatctgattaaccagcagggca

SEQ ID NO: 4231920 - DNA, 25 bp, Homo sapien
tctggccatgggcacaagactgtgg

SEQ ID NO: 4231921 - DNA, 25 bp, Homo sapien
caagtaagcgtctacccagaagaga

SEQ ID NO: 4231922 - DNA, 25 bp, Homo sapien
tgcaataggcccacgaacagagaag

SEQ ID NO: 4231923 - DNA, 25 bp, Homo sapien
tccctggaagcataacagaggtggg

SEQ ID NO: 4231924 - DNA, 25 bp, Homo sapien
gatcaggtcagcactgtgagataga

SEQ ID NO: 4231925 - DNA, 25 bp, Homo sapien
caaaggtcactcttacgtgcaacag

SEQ ID NO: 4231926 - DNA, 25 bp, Homo sapien
aaagaatgtctaccactggctcaaa

SEQ ID NO: 4231927 - DNA, 25 bp, Homo sapien
aatgtaatggcatctctcgaaagcc

SEQ ID NO: 4231928 - DNA, 25 bp, Homo sapien
gcatctctcgaaagccagccttggg

SEQ ID NO: 4231929 - DNA, 25 bp, Homo sapien
tgtccaggtagctgaaacatttggc

SEQ ID NO: 4231930 - DNA, 25 bp, Homo sapien
tgctccggaggattgctaaaattag

SEQ ID NO: 4231931 - DNA, 25 bp, Homo sapien
aatgagattgtctattctcagtgtc

SEQ ID NO: 4231932 - DNA, 25 bp, Homo sapien
tatgagctctgtagcaacacataag

SEQ ID NO: 4231933 - DNA, 25 bp, Homo sapien
gctctgtagcaacacataagtgata

SEQ ID NO: 4231934 - DNA, 25 bp, Homo sapien
tattcaatatgagctctgtagcaac

SEQ ID NO: 4231935 - DNA, 25 bp, Homo sapien
taacttcttgccgttgtttgactga

SEQ ID NO: 4231936 - DNA, 25 bp, Homo sapien
gtttgactgactggtatttcaggca

SEQ ID NO: 4231937 - DNA, 25 bp, Homo sapien
tgtttgactgactggtatttcaggc

SEQ ID NO: 4231938 - DNA, 25 bp, Homo sapien
cttcttgccgttgtttgactgactg

SEQ ID NO: 4231939 - DNA, 25 bp, Homo sapien
gggtggcaggatggttagtgccaga

SEQ ID NO: 4231940 - DNA, 25 bp, Homo sapien
gcaggatggttagtgccagacacag

SEQ ID NO: 4231941 - DNA, 25 bp, Homo sapien
caggatggttagtgccagacacagc

SEQ ID NO: 4231942 - DNA, 25 bp, Homo sapien
tggcaggatggttagtgccagacac

SEQ ID NO: 4231943 - DNA, 25 bp, Homo sapien
gagctgggtataggctacgcctcac

SEQ ID NO: 4231944 - DNA, 25 bp, Homo sapien
tggtgtcccagagcagatatttact

SEQ ID NO: 4231945 - DNA, 25 bp, Homo sapien
taactcctgtatgaatcacagagag

SEQ ID NO: 4231946 - DNA, 25 bp, Homo sapien
cctgatctacatatcctggagggag

SEQ ID NO: 4231947 - DNA, 25 bp, Homo sapien
acacctggctgattttgtattttcc

SEQ ID NO: 4231948 - DNA, 25 bp, Homo sapien
acctggctgattttgtattttccgt

SEQ ID NO: 4231949 - DNA, 25 bp, Homo sapien
ctggctgattttgtattttccgtag

SEQ ID NO: 4231950 - DNA, 25 bp, Homo sapien
tggctgattttgtattttccgtaga

SEQ ID NO: 4231951 - DNA, 25 bp, Homo sapien
aactgtgcaataggatccatgctgc

SEQ ID NO: 4231952 - DNA, 25 bp, Homo sapien
tccatgctgcaatggccttgtgcaa

SEQ ID NO: 4231953 - DNA, 25 bp, Homo sapien
gaataactgtgcaataggatccatg

SEQ ID NO: 4231954 - DNA, 25 bp, Homo sapien
gcaatggccttgtgcaagaacagcc

SEQ ID NO: 4231955 - DNA, 25 bp, Homo sapien
cagcatctggctgctacggtaacca

SEQ ID NO: 4231956 - DNA, 25 bp, Homo sapien
tgatgccttaggcagccaaggagaa

SEQ ID NO: 4231957 - DNA, 25 bp, Homo sapien
gtaaatttgttagtagatggagcaa

SEQ ID NO: 4231958 - DNA, 25 bp, Homo sapien
gctgctacggtaaccatgatgcctt

SEQ ID NO: 4231959 - DNA, 25 bp, Homo sapien
cctggcctggaaagagtatggggag

SEQ ID NO: 4231960 - DNA, 25 bp, Homo sapien
ggtgaggactgggaactggctcagt

SEQ ID NO: 4231961 - DNA, 25 bp, Homo sapien
ggactgggaactggctcagtttcac

SEQ ID NO: 4231962 - DNA, 25 bp, Homo sapien
tgaggactgggaactggctcagttt

SEQ ID NO: 4231963 - DNA, 25 bp, Homo sapien
ctaaaaatcctcatcgacaagacca

SEQ ID NO: 4231964 - DNA, 25 bp, Homo sapien
gcgcagtctccacggtctaaaaatc

SEQ ID NO: 4231965 - DNA, 25 bp, Homo sapien
aatcctcatcgacaagaccaggagg

SEQ ID NO: 4231966 - DNA, 25 bp, Homo sapien
ggcagcgcagtctccacggtctaaa

SEQ ID NO: 4231967 - DNA, 25 bp, Homo sapien
tctcgtcagtagtgagggaaggcaa

SEQ ID NO: 4231968 - DNA, 25 bp, Homo sapien
ggtctcgtcagtagtgagggaaggc

SEQ ID NO: 4231969 - DNA, 25 bp, Homo sapien
tcgtcagtagtgagggaaggcaatt

SEQ ID NO: 4231970 - DNA, 25 bp, Homo sapien
ctcgtcagtagtgagggaaggcaat

SEQ ID NO: 4231971 - DNA, 25 bp, Homo sapien
atgatgaggtcccagctgtcagccg

SEQ ID NO: 4231972 - DNA, 25 bp, Homo sapien
tttcttccactcatctgtggtcacg

SEQ ID NO: 4231973 - DNA, 25 bp, Homo sapien
ggtcccagctgtcagccggctttgc

SEQ ID NO: 4231974 - DNA, 25 bp, Homo sapien
gcctgaagcatgcaattccaggtac

SEQ ID NO: 4231975 - DNA, 25 bp, Homo sapien
aggatgaccacgtagggcgactgcc

SEQ ID NO: 4231976 - DNA, 25 bp, Homo sapien
accacgtagggcgactgccaggtgt

SEQ ID NO: 4231977 - DNA, 25 bp, Homo sapien
gatgaccacgtagggcgactgccag

SEQ ID NO: 4231978 - DNA, 25 bp, Homo sapien
gaagaggatgaccacgtagggcgac

SEQ ID NO: 4231979 - DNA, 25 bp, Homo sapien
atgcggtactggccgccacgctcgc

SEQ ID NO: 4231980 - DNA, 25 bp, Homo sapien
ctggccgccacgctcgccgtagcac

SEQ ID NO: 4231981 - DNA, 25 bp, Homo sapien
tactggccgccacgctcgccgtagc

SEQ ID NO: 4231982 - DNA, 25 bp, Homo sapien
cggtactggccgccacgctcgccgt

SEQ ID NO: 4231983 - DNA, 25 bp, Homo sapien
cagcaggaccgtggcccaaaacaag

SEQ ID NO: 4231984 - DNA, 25 bp, Homo sapien
aggcctcgcagaactctccgcggtg

SEQ ID NO: 4231985 - DNA, 25 bp, Homo sapien
cccgtctggtcctgcgacttggtgg

SEQ ID NO: 4231986 - DNA, 25 bp, Homo sapien
tacggagctacggaaagagaactgc

SEQ ID NO: 4231987 - DNA, 25 bp, Homo sapien
tctgccctgagtggaaagaagctgg

SEQ ID NO: 4231988 - DNA, 25 bp, Homo sapien
aaaaagagaccctgtgtacctggca

SEQ ID NO: 4231989 - DNA, 25 bp, Homo sapien
cagaatcacggatgaggctcacagg

SEQ ID NO: 4231990 - DNA, 25 bp, Homo sapien
cagtgacatcaccagcgctagaagt

SEQ ID NO: 4231991 - DNA, 25 bp, Homo sapien
tggaggggaccaatagctcattaca

SEQ ID NO: 4231992 - DNA, 25 bp, Homo sapien
aggggaccaatagctcattacagat

SEQ ID NO: 4231993 - DNA, 25 bp, Homo sapien
gaggggaccaatagctcattacaga

SEQ ID NO: 4231994 - DNA, 25 bp, Homo sapien
ggatggaggggaccaatagctcatt

SEQ ID NO: 4231995 - DNA, 25 bp, Homo sapien
tggccaaaaactggagctagataga

SEQ ID NO: 4231996 - DNA, 25 bp, Homo sapien
ctgaccttatgctgatcccctgaat

SEQ ID NO: 4231997 - DNA, 25 bp, Homo sapien
ttgaattcgagccaggataggagta

SEQ ID NO: 4231998 - DNA, 25 bp, Homo sapien
aaactgaccttatgctgatcccctg

SEQ ID NO: 4231999 - DNA, 25 bp, Homo sapien
ccttatgctgatcccctgaatgact

SEQ ID NO: 4232000 - DNA, 25 bp, Homo sapien
tgtctagcaagtaaatcaggacttg

SEQ ID NO: 4232001 - DNA, 25 bp, Homo sapien
attctgaacacctactgtctagcaa

SEQ ID NO: 4232002 - DNA, 25 bp, Homo sapien
gacttgctagatagcaggtgttcag

SEQ ID NO: 4232003 - DNA, 25 bp, Homo sapien
caggatatgcggactagatgaagaa

SEQ ID NO: 4232004 - DNA, 25 bp, Homo sapien
tccccagaatttctgaagtacagcc

SEQ ID NO: 4232005 - DNA, 25 bp, Homo sapien
ttctgtagcaagcagagatgtctga

SEQ ID NO: 4232006 - DNA, 25 bp, Homo sapien
gccagggctgaaaacttctgtagca

SEQ ID NO: 4232007 - DNA, 25 bp, Homo sapien
agaatttctgaagtacagccagggc

SEQ ID NO: 4232008 - DNA, 25 bp, Homo sapien
gaatccagggcaaatcatcaaggaa

SEQ ID NO: 4232009 - DNA, 25 bp, Homo sapien
tacaccaggcagtacaggtcgatca

SEQ ID NO: 4232010 - DNA, 25 bp, Homo sapien
tcagttagaaggcattacaccaggc

SEQ ID NO: 4232011 - DNA, 25 bp, Homo sapien
taaaactagatgcaaaaggaagtct

SEQ ID NO: 4232012 - DNA, 25 bp, Homo sapien
agtgtgagggacggtgaactcccca

SEQ ID NO: 4232013 - DNA, 25 bp, Homo sapien
agccattgtagcagcaaacctgcag

SEQ ID NO: 4232014 - DNA, 25 bp, Homo sapien
gcagaacacagccattgtagcagca

SEQ ID NO: 4232015 - DNA, 25 bp, Homo sapien
caagggagtgtgagggacggtgaac

SEQ ID NO: 4232016 - DNA, 25 bp, Homo sapien
gcagggatgagtaattataacaagt

SEQ ID NO: 4232017 - DNA, 25 bp, Homo sapien
ccatggagtctatgctttttggaac

SEQ ID NO: 4232018 - DNA, 25 bp, Homo sapien
gaaggagactccgaatatcgtcaca

SEQ ID NO: 4232019 - DNA, 25 bp, Homo sapien
tatgagtgtcccagcaagggtggca

SEQ ID NO: 4232020 - DNA, 25 bp, Homo sapien
taattaatcctataggacgggcatc

SEQ ID NO: 4232021 - DNA, 25 bp, Homo sapien
gacattctaccaagtacctgaccaa

SEQ ID NO: 4232022 - DNA, 25 bp, Homo sapien
tcatactagagtacagcgggccctt

SEQ ID NO: 4232023 - DNA, 25 bp, Homo sapien
caacctgtgaaaccccatgcatact

SEQ ID NO: 4232024 - DNA, 25 bp, Homo sapien
ccttagcagaaggtcgatgtgtcta

SEQ ID NO: 4232025 - DNA, 25 bp, Homo sapien
gcagaaggtcgatgtgtctaccagg

SEQ ID NO: 4232026 - DNA, 25 bp, Homo sapien
tagcagaaggtcgatgtgtctacca

SEQ ID NO: 4232027 - DNA, 25 bp, Homo sapien
caccttagcagaaggtcgatgtgtc

SEQ ID NO: 4232028 - DNA, 25 bp, Homo sapien
acttactagtttgcagtgctgggca

SEQ ID NO: 4232029 - DNA, 25 bp, Homo sapien
gaacacaggccgaatccaggctcta

SEQ ID NO: 4232030 - DNA, 25 bp, Homo sapien
ccttcggcctatccattactgggca

SEQ ID NO: 4232031 - DNA, 25 bp, Homo sapien
tacctacctcgtaaaagtctgatga

SEQ ID NO: 4232032 - DNA, 25 bp, Homo sapien
taaggtagacacaggtccgtccagg

SEQ ID NO: 4232033 - DNA, 25 bp, Homo sapien
ttccacaggagaagatgcatcggag

SEQ ID NO: 4232034 - DNA, 25 bp, Homo sapien
tgccccgctgaagaagaaagtgacc

SEQ ID NO: 4232035 - DNA, 25 bp, Homo sapien
gaaatcccgattgttgaccacagca

SEQ ID NO: 4232036 - DNA, 25 bp, Homo sapien
cggtgataccagtctccaaggagca

SEQ ID NO: 4232037 - DNA, 25 bp, Homo sapien
ttctgtgctggctactacgagggcg

SEQ ID NO: 4232038 - DNA, 25 bp, Homo sapien
aaactagctatgagtcccgctcggg

SEQ ID NO: 4232039 - DNA, 25 bp, Homo sapien
tcgggcaattacagcgtcacggaga

SEQ ID NO: 4232040 - DNA, 25 bp, Homo sapien
ggctagagacaccacccaaagaaga

SEQ ID NO: 4232041 - DNA, 25 bp, Homo sapien
gactgaggtgccattctcggctaga

SEQ ID NO: 4232042 - DNA, 25 bp, Homo sapien
gagaaccctgggcagtctggagact

SEQ ID NO: 4232043 - DNA, 25 bp, Homo sapien
tgctttcttaaccaccatgagtagg

SEQ ID NO: 4232044 - DNA, 25 bp, Homo sapien
gctagaggaccatcgctttcaagga

SEQ ID NO: 4232045 - DNA, 25 bp, Homo sapien
tctctaggagatgctgaccgcttgc

SEQ ID NO: 4232046 - DNA, 25 bp, Homo sapien
gcaaatgcttgggtaggccagcctc

SEQ ID NO: 4232047 - DNA, 25 bp, Homo sapien
tctcagtcgagatcaagacacgtgt

SEQ ID NO: 4232048 - DNA, 25 bp, Homo sapien
aattccaaagcatgcgtcccaggcg

SEQ ID NO: 4232049 - DNA, 25 bp, Homo sapien
caaagaccaagtgctcgtcagctgt

SEQ ID NO: 4232050 - DNA, 25 bp, Homo sapien
gaacttgtcatagttccagcacaga

SEQ ID NO: 4232051 - DNA, 25 bp, Homo sapien
caggcggtctcacactctgaaagtg

SEQ ID NO: 4232052 - DNA, 25 bp, Homo sapien
catggcaccgggcttctgggctaca

SEQ ID NO: 4232053 - DNA, 25 bp, Homo sapien
tccttgacagaaccggcctcaggag

SEQ ID NO: 4232054 - DNA, 25 bp, Homo sapien
cctcgatgtggtctggaaaaagcag

SEQ ID NO: 4232055 - DNA, 25 bp, Homo sapien
gctcagtgtctcctcgatgtggtct

SEQ ID NO: 4232056 - DNA, 25 bp, Homo sapien
caaggctgatttttccgtgttcctc

SEQ ID NO: 4232057 - DNA, 25 bp, Homo sapien
aggctgatttttccgtgttcctcct

SEQ ID NO: 4232058 - DNA, 25 bp, Homo sapien
cagggtgctgcctgctggcgaatgt

SEQ ID NO: 4232059 - DNA, 25 bp, Homo sapien
tccggacgctgctgaagctcagatt

SEQ ID NO: 4232060 - DNA, 25 bp, Homo sapien
tccaggagacataaaacttgaaacg

SEQ ID NO: 4232061 - DNA, 25 bp, Homo sapien
gggagacttcgtgcaaatcctgctc

SEQ ID NO: 4232062 - DNA, 25 bp, Homo sapien
ctgcgtgtcctgcatgtggtagtga

SEQ ID NO: 4232063 - DNA, 25 bp, Homo sapien
gccaagcttggcaaggctggcattc

SEQ ID NO: 4232064 - DNA, 25 bp, Homo sapien
tgctttatcaaccacagcctcttga

SEQ ID NO: 4232065 - DNA, 25 bp, Homo sapien
gcaaggctggcattcaaaagtgtga

SEQ ID NO: 4232066 - DNA, 25 bp, Homo sapien
caaccacagcctcttgataatgcca

SEQ ID NO: 4232067 - DNA, 25 bp, Homo sapien
caaatctggtggaagcaatactggt

SEQ ID NO: 4232068 - DNA, 25 bp, Homo sapien
caagatgggagctgaccataatccc

SEQ ID NO: 4232069 - DNA, 25 bp, Homo sapien
tcattgctgtatcacgtgaccagtc

SEQ ID NO: 4232070 - DNA, 25 bp, Homo sapien
catcagttgcccaaagagccaaggc

SEQ ID NO: 4232071 - DNA, 25 bp, Homo sapien
cagctcttttctgagtggccttatc

SEQ ID NO: 4232072 - DNA, 25 bp, Homo sapien
aagacgggctccggctgaggaccca

SEQ ID NO: 4232073 - DNA, 25 bp, Homo sapien
cagaggtttctgttgagggcatgga

SEQ ID NO: 4232074 - DNA, 25 bp, Homo sapien
gccagaggtttctgttgagggcatg

SEQ ID NO: 4232075 - DNA, 25 bp, Homo sapien
ccagaggtttctgttgagggcatgg

SEQ ID NO: 4232076 - DNA, 25 bp, Homo sapien
gaggtttctgttgagggcatggatg

SEQ ID NO: 4232077 - DNA, 25 bp, Homo sapien
cctcttgttcgggagctgtttccca

SEQ ID NO: 4232078 - DNA, 25 bp, Homo sapien
catgtgacttatcaatggcagagcc

SEQ ID NO: 4232079 - DNA, 25 bp, Homo sapien
tatgagttggggctcaaggattgta

SEQ ID NO: 4232080 - DNA, 25 bp, Homo sapien
cctttcctcttgttcgggagctgtt

SEQ ID NO: 4232081 - DNA, 25 bp, Homo sapien
tgtttgggtgaatcaattttcctgg

SEQ ID NO: 4232082 - DNA, 25 bp, Homo sapien
ttgtttgggtgaatcaattttcctg

SEQ ID NO: 4232083 - DNA, 25 bp, Homo sapien
gtttgggtgaatcaattttcctgga

SEQ ID NO: 4232084 - DNA, 25 bp, Homo sapien
tagcccctcaacgtgcaagtcttgc

SEQ ID NO: 4232085 - DNA, 25 bp, Homo sapien
caagtcttgcctgaatgcctcgatg

SEQ ID NO: 4232086 - DNA, 25 bp, Homo sapien
gagcccttgggataagaaagagccc

SEQ ID NO: 4232087 - DNA, 25 bp, Homo sapien
ttaaagccacctggtaagaggagca

SEQ ID NO: 4232088 - DNA, 25 bp, Homo sapien
tctgcggacaaagtgggatcctcct

SEQ ID NO: 4232089 - DNA, 25 bp, Homo sapien
gcctgaaggacatgagctctgcgga

SEQ ID NO: 4232090 - DNA, 25 bp, Homo sapien
gacatgagctctgcggacaaagtgg

SEQ ID NO: 4232091 - DNA, 25 bp, Homo sapien
ggttctggagaaccacagcctctcc

SEQ ID NO: 4232092 - DNA, 25 bp, Homo sapien
gctgtctctcaatgttcgtggttct

SEQ ID NO: 4232093 - DNA, 25 bp, Homo sapien
tcttttctgagcttgtgtgtgagca

SEQ ID NO: 4232094 - DNA, 25 bp, Homo sapien
tgagctgctgtctctcaatgttcgt

SEQ ID NO: 4232095 - DNA, 25 bp, Homo sapien
gctgctgtctctcaatgttcgtggt

SEQ ID NO: 4232096 - DNA, 25 bp, Homo sapien
tccagtattagaccttgcaaatccc

SEQ ID NO: 4232097 - DNA, 25 bp, Homo sapien
tagaccttgcaaatccctgacctct

SEQ ID NO: 4232098 - DNA, 25 bp, Homo sapien
cagctacttccaccaagtccagtat

SEQ ID NO: 4232099 - DNA, 25 bp, Homo sapien
ccaagtccagtattagaccttgcaa

SEQ ID NO: 4232100 - DNA, 25 bp, Homo sapien
caaacagtttcagtttcggtgttcg

SEQ ID NO: 4232101 - DNA, 25 bp, Homo sapien
tccctctgaagctgagagagtagct

SEQ ID NO: 4232102 - DNA, 25 bp, Homo sapien
ccctctgaagctgagagagtagctt

SEQ ID NO: 4232103 - DNA, 25 bp, Homo sapien
ttccctctgaagctgagagagtagc

SEQ ID NO: 4232104 - DNA, 25 bp, Homo sapien
ttgaaatgtctgctcccaagtccag

SEQ ID NO: 4232105 - DNA, 25 bp, Homo sapien
tgagccaggcagtctagctgaaggt

SEQ ID NO: 4232106 - DNA, 25 bp, Homo sapien
catccaacttcagcgtccatgtggc

SEQ ID NO: 4232107 - DNA, 25 bp, Homo sapien
gtattgcttccacccttgagccagg

SEQ ID NO: 4232108 - DNA, 25 bp, Homo sapien
tcatggtgctatccgaggagaactc

SEQ ID NO: 4232109 - DNA, 25 bp, Homo sapien
gaatctgcacttgggcggaagccca

SEQ ID NO: 4232110 - DNA, 25 bp, Homo sapien
tcttggcttggtttgcgaggtacac

SEQ ID NO: 4232111 - DNA, 25 bp, Homo sapien
tcaggcatctcatattgggaccagg

SEQ ID NO: 4232112 - DNA, 25 bp, Homo sapien
tcgactgggccctaatttctcatac

SEQ ID NO: 4232113 - DNA, 25 bp, Homo sapien
gatctgggtctcgactgggccctaa

SEQ ID NO: 4232114 - DNA, 25 bp, Homo sapien
cagtggatctgggtctcgactgggc

SEQ ID NO: 4232115 - DNA, 25 bp, Homo sapien
tgggtctcgactgggccctaatttc

SEQ ID NO: 4232116 - DNA, 25 bp, Homo sapien
gccagttcattgactaccatggaat

SEQ ID NO: 4232117 - DNA, 25 bp, Homo sapien
aacttgatcctgcttggtctcaaaa

SEQ ID NO: 4232118 - DNA, 25 bp, Homo sapien
tactgttttcagaggatggctagga

SEQ ID NO: 4232119 - DNA, 25 bp, Homo sapien
cagttatattaaagtggcagccagt

SEQ ID NO: 4232120 - DNA, 25 bp, Homo sapien
gagcttgttgcctccctgttacaaa

SEQ ID NO: 4232121 - DNA, 25 bp, Homo sapien
agtcatgcatatgttgggagacacc

SEQ ID NO: 4232122 - DNA, 25 bp, Homo sapien
ttatccacccggacaatatgaaata

SEQ ID NO: 4232123 - DNA, 25 bp, Homo sapien
tacatccgcaaagtccattctacca

SEQ ID NO: 4232124 - DNA, 25 bp, Homo sapien
cctccaacttcaaagcacttcaacc

SEQ ID NO: 4232125 - DNA, 25 bp, Homo sapien
caagtttatgagcaagcagttctga

SEQ ID NO: 4232126 - DNA, 25 bp, Homo sapien
ccaacttcaaagcacttcaacctct

SEQ ID NO: 4232127 - DNA, 25 bp, Homo sapien
tccaacttcaaagcacttcaacctc

SEQ ID NO: 4232128 - DNA, 25 bp, Homo sapien
caaaaaggaatcagatcccagagca

SEQ ID NO: 4232129 - DNA, 25 bp, Homo sapien
tcaattgcaactactgtgccagaag

SEQ ID NO: 4232130 - DNA, 25 bp, Homo sapien
gacactggactatctcaaacaacga

SEQ ID NO: 4232131 - DNA, 25 bp, Homo sapien
tagggtaaattcacatagcttcaga

SEQ ID NO: 4232132 - DNA, 25 bp, Homo sapien
tccctgacgttaatagttgccttgg

SEQ ID NO: 4232133 - DNA, 25 bp, Homo sapien
tttattttctagtacaagctcttgt

SEQ ID NO: 4232134 - DNA, 25 bp, Homo sapien
cactctcaaactctgttagaaatgt

SEQ ID NO: 4232135 - DNA, 25 bp, Homo sapien
gctaagcagtgtagagtactctaat

SEQ ID NO: 4232136 - DNA, 25 bp, Homo sapien
ggtgtaaaatcgcttccggctctgc

SEQ ID NO: 4232137 - DNA, 25 bp, Homo sapien
cctgcagaaggggtgtaaaatcgct

SEQ ID NO: 4232138 - DNA, 25 bp, Homo sapien
tccggctctgccgtctgatgaatct

SEQ ID NO: 4232139 - DNA, 25 bp, Homo sapien
tgtccttccgaacctccagaggctt

SEQ ID NO: 4232140 - DNA, 25 bp, Homo sapien
aaaaggcaatcttagagagacactg

SEQ ID NO: 4232141 - DNA, 25 bp, Homo sapien
gctgatagactctggtaatgaaatt

SEQ ID NO: 4232142 - DNA, 25 bp, Homo sapien
ggcaatcttagagagacactgtcaa

SEQ ID NO: 4232143 - DNA, 25 bp, Homo sapien
gagacactgtcaaggctgatagact

SEQ ID NO: 4232144 - DNA, 25 bp, Homo sapien
gcactggtgaaggaagactagtata

SEQ ID NO: 4232145 - DNA, 25 bp, Homo sapien
tagagttaaatgctagggtcagact

SEQ ID NO: 4232146 - DNA, 25 bp, Homo sapien
gactagtatatatgccaggtcagac

SEQ ID NO: 4232147 - DNA, 25 bp, Homo sapien
tgcacaaacgtaacagcacaggtgt

SEQ ID NO: 4232148 - DNA, 25 bp, Homo sapien
gctgatgtcataacaagattcagag

SEQ ID NO: 4232149 - DNA, 25 bp, Homo sapien
tcatcatgttcatgaactgcaaaag

SEQ ID NO: 4232150 - DNA, 25 bp, Homo sapien
gatgtcataacaagattcagagggt

SEQ ID NO: 4232151 - DNA, 25 bp, Homo sapien
catgttcatgaactgcaaaaggatc

SEQ ID NO: 4232152 - DNA, 25 bp, Homo sapien
tgatgatgaactgggtgcctcaaag

SEQ ID NO: 4232153 - DNA, 25 bp, Homo sapien
cagccagtgtgatggcaatgatgat

SEQ ID NO: 4232154 - DNA, 25 bp, Homo sapien
gatgaactgggtgcctcaaagactc

SEQ ID NO: 4232155 - DNA, 25 bp, Homo sapien
tcaaagactcaggatttagttctag

SEQ ID NO: 4232156 - DNA, 25 bp, Homo sapien
tgtctgaactttggccgatgaccaa

SEQ ID NO: 4232157 - DNA, 25 bp, Homo sapien
ggccgatgaccaacatcagtgaagg

SEQ ID NO: 4232158 - DNA, 25 bp, Homo sapien
gatcacatgcttcaatcttaaaccc

SEQ ID NO: 4232159 - DNA, 25 bp, Homo sapien
ggcttggggtgctaagatcacatgc

SEQ ID NO: 4232160 - DNA, 25 bp, Homo sapien
tgaccttggctattaacagcccctg

SEQ ID NO: 4232161 - DNA, 25 bp, Homo sapien
tctggctcctggaagtgaagcaacc

SEQ ID NO: 4232162 - DNA, 25 bp, Homo sapien
tcttcaaggccgcttgtggtcatca

SEQ ID NO: 4232163 - DNA, 25 bp, Homo sapien
tggtcatcattagcaggcacgcagg

SEQ ID NO: 4232164 - DNA, 25 bp, Homo sapien
tatggaccgtgaataaactgctaat

SEQ ID NO: 4232165 - DNA, 25 bp, Homo sapien
gaagatccggaaggtgattcatcct

SEQ ID NO: 4232166 - DNA, 25 bp, Homo sapien
tgaatgagacttagggaagagggcc

SEQ ID NO: 4232167 - DNA, 25 bp, Homo sapien
caaagaccctggttggaagatccgg

SEQ ID NO: 4232168 - DNA, 25 bp, Homo sapien
tctaccatcgatgttaacatgacgg

SEQ ID NO: 4232169 - DNA, 25 bp, Homo sapien
cttggactgtgaaccacctctagct

SEQ ID NO: 4232170 - DNA, 25 bp, Homo sapien
gggcagctacaggtctaccatcgat

SEQ ID NO: 4232171 - DNA, 25 bp, Homo sapien
taacatgacggagttccttggactg

SEQ ID NO: 4232172 - DNA, 25 bp, Homo sapien
gatttcagtaggtgaggccaaggta

SEQ ID NO: 4232173 - DNA, 25 bp, Homo sapien
caatttctgccccaaagtggtatgt

SEQ ID NO: 4232174 - DNA, 25 bp, Homo sapien
tgggaaaagacaggccagtgtagtc

SEQ ID NO: 4232175 - DNA, 25 bp, Homo sapien
tctgcagctactgaggaagggattc

SEQ ID NO: 4232176 - DNA, 25 bp, Homo sapien
tgccaccttgaagccgtccattctt

SEQ ID NO: 4232177 - DNA, 25 bp, Homo sapien
cgtccattcttgagcaagcagctta

SEQ ID NO: 4232178 - DNA, 25 bp, Homo sapien
aaaacagtgcaggtctgagtatgag

SEQ ID NO: 4232179 - DNA, 25 bp, Homo sapien
agtgagttagaaacttccagctctg

SEQ ID NO: 4232180 - DNA, 25 bp, Homo sapien
ggtgggcctcatccaatcagtagat

SEQ ID NO: 4232181 - DNA, 25 bp, Homo sapien
tttcagaatgctggtgggcctcatc

SEQ ID NO: 4232182 - DNA, 25 bp, Homo sapien
ctttcagaatgctggtgggcctcat

SEQ ID NO: 4232183 - DNA, 25 bp, Homo sapien
gggcctcatccaatcagtagatggc

SEQ ID NO: 4232184 - DNA, 25 bp, Homo sapien
tgggctccaggatatttactcaact

SEQ ID NO: 4232185 - DNA, 25 bp, Homo sapien
taacctagtcaaagatacggagaga

SEQ ID NO: 4232186 - DNA, 25 bp, Homo sapien
tgaatgaatcaggacagccgtcaag

SEQ ID NO: 4232187 - DNA, 25 bp, Homo sapien
caaaggtggtcactatctgctggaa

SEQ ID NO: 4232188 - DNA, 25 bp, Homo sapien
tgtgctttaccaggcacccctctcc

SEQ ID NO: 4232189 - DNA, 25 bp, Homo sapien
ttctgctgtgctttaccaggcaccc

SEQ ID NO: 4232190 - DNA, 25 bp, Homo sapien
ctccacagtgcctttctgctgtgct

SEQ ID NO: 4232191 - DNA, 25 bp, Homo sapien
tgcctttctgctgtgctttaccagg

SEQ ID NO: 4232192 - DNA, 25 bp, Homo sapien
tcatcatatttcaatgaagtggaat

SEQ ID NO: 4232193 - DNA, 25 bp, Homo sapien
gaatgcttgcatcagccctttgcaa

SEQ ID NO: 4232194 - DNA, 25 bp, Homo sapien
caaacagactgatcgatggagccag

SEQ ID NO: 4232195 - DNA, 25 bp, Homo sapien
ggagccagtgatcaggaaaattgaa

SEQ ID NO: 4232196 - DNA, 25 bp, Homo sapien
cttctgccccactagggttccctct

SEQ ID NO: 4232197 - DNA, 25 bp, Homo sapien
tttccccaacatctaccacccacaa

SEQ ID NO: 4232198 - DNA, 25 bp, Homo sapien
taccacccacaagatctgccaccca

SEQ ID NO: 4232199 - DNA, 25 bp, Homo sapien
cccactagggttccctctccatgcc

SEQ ID NO: 4232200 - DNA, 25 bp, Homo sapien
caagggctctgcgaggagaatatct

SEQ ID NO: 4232201 - DNA, 25 bp, Homo sapien
tggattctgaacatgggtgcaggca

SEQ ID NO: 4232202 - DNA, 25 bp, Homo sapien
ggtgcaggcagaattacaagggctc

SEQ ID NO: 4232203 - DNA, 25 bp, Homo sapien
agtgcacagtctcttgagcacataa

SEQ ID NO: 4232204 - DNA, 25 bp, Homo sapien
tctatttcattgacccctactttga

SEQ ID NO: 4232205 - DNA, 25 bp, Homo sapien
gaaggcaattagatctctgtgactg

SEQ ID NO: 4232206 - DNA, 25 bp, Homo sapien
tctgtgactgttatggcccaaaaga

SEQ ID NO: 4232207 - DNA, 25 bp, Homo sapien
gtaatcatgctctaagttgaaagca

SEQ ID NO: 4232208 - DNA, 25 bp, Homo sapien
ggatcagcttgacaatgtacagaag

SEQ ID NO: 4232209 - DNA, 25 bp, Homo sapien
gaattgcctcgaatctataggttag

SEQ ID NO: 4232210 - DNA, 25 bp, Homo sapien
gaataatacttacagttggctgggc

SEQ ID NO: 4232211 - DNA, 25 bp, Homo sapien
gaaatcatgtagcacaagttctgaa

SEQ ID NO: 4232212 - DNA, 25 bp, Homo sapien
tttctctatcccaagatgcctttca

SEQ ID NO: 4232213 - DNA, 25 bp, Homo sapien
cactgagctttaatgtccaggtgca

SEQ ID NO: 4232214 - DNA, 25 bp, Homo sapien
ccaggtgcatggcttcttgacagta

SEQ ID NO: 4232215 - DNA, 25 bp, Homo sapien
gacagtaaagttccctgttagcaat

SEQ ID NO: 4232216 - DNA, 25 bp, Homo sapien
caacccagagtactggtatctccca

SEQ ID NO: 4232217 - DNA, 25 bp, Homo sapien
accacaggaacaacccagagtactg

SEQ ID NO: 4232218 - DNA, 25 bp, Homo sapien
caggaacaacccagagtactggtat

SEQ ID NO: 4232219 - DNA, 25 bp, Homo sapien
ggaacaacccagagtactggtatct

SEQ ID NO: 4232220 - DNA, 25 bp, Homo sapien
gcagttaacaaggtggtaactgcca

SEQ ID NO: 4232221 - DNA, 25 bp, Homo sapien
gttaacaaggtggtaactgccagtg

SEQ ID NO: 4232222 - DNA, 25 bp, Homo sapien
gatagcagttaacaaggtggtaact

SEQ ID NO: 4232223 - DNA, 25 bp, Homo sapien
cagatagcagttaacaaggtggtaa

SEQ ID NO: 4232224 - DNA, 25 bp, Homo sapien
gcatttttgtgaaattgacgctagc

SEQ ID NO: 4232225 - DNA, 25 bp, Homo sapien
ttttgtgaaattgacgctagctggg

SEQ ID NO: 4232226 - DNA, 25 bp, Homo sapien
attctacgcgtatttactcgagcac

SEQ ID NO: 4232227 - DNA, 25 bp, Homo sapien
tatttactcgagcacttattaagtg

SEQ ID NO: 4232228 - DNA, 25 bp, Homo sapien
gacagaccactgagaatagaatcca

SEQ ID NO: 4232229 - DNA, 25 bp, Homo sapien
tccaaacaggtacaatgggagcaaa

SEQ ID NO: 4232230 - DNA, 25 bp, Homo sapien
aggagctcaggactgaggacagacc

SEQ ID NO: 4232231 - DNA, 25 bp, Homo sapien
cactgagaatagaatccaaattgct

SEQ ID NO: 4232232 - DNA, 25 bp, Homo sapien
cagctctgcagaaactttgtcttgt

SEQ ID NO: 4232233 - DNA, 25 bp, Homo sapien
cattgccagtcccaggtttccggca

SEQ ID NO: 4232234 - DNA, 25 bp, Homo sapien
ggtttccggcagatatgcagcttat

SEQ ID NO: 4232235 - DNA, 25 bp, Homo sapien
tgcagcttattgtccaattttatta

SEQ ID NO: 4232236 - DNA, 25 bp, Homo sapien
gaaccagtgatgatattggctcctg

SEQ ID NO: 4232237 - DNA, 25 bp, Homo sapien
tgaaggccctgagaccagtaactgg

SEQ ID NO: 4232238 - DNA, 25 bp, Homo sapien
gatatccaggaagctttgaaggccc

SEQ ID NO: 4232239 - DNA, 25 bp, Homo sapien
cagggacttggttatactccaggaa

SEQ ID NO: 4232240 - DNA, 25 bp, Homo sapien
tgtctctgttctccgactctacctt

SEQ ID NO: 4232241 - DNA, 25 bp, Homo sapien
tgttctccgactctaccttagatgt

SEQ ID NO: 4232242 - DNA, 25 bp, Homo sapien
agctgcttccttaacccaggaaact

SEQ ID NO: 4232243 - DNA, 25 bp, Homo sapien
tctctgttctccgactctaccttag

SEQ ID NO: 4232244 - DNA, 25 bp, Homo sapien
cggaggatttcctggtgacgcagaa

SEQ ID NO: 4232245 - DNA, 25 bp, Homo sapien
gacactatgggccacatgagactgc

SEQ ID NO: 4232246 - DNA, 25 bp, Homo sapien
caggttaaatgaggtactgtgacac

SEQ ID NO: 4232247 - DNA, 25 bp, Homo sapien
ccaaactgccgtaaccacggaggat

SEQ ID NO: 4232248 - DNA, 25 bp, Homo sapien
gatttgagaaagagactcattccac

SEQ ID NO: 4232249 - DNA, 25 bp, Homo sapien
cacgaatgcttatttagtgaccata

SEQ ID NO: 4232250 - DNA, 25 bp, Homo sapien
gaaagagactcattccacgaatgct

SEQ ID NO: 4232251 - DNA, 25 bp, Homo sapien
atttagtgaccataagggttctgtc

SEQ ID NO: 4232252 - DNA, 25 bp, Homo sapien
catatcaggtacacaggggagggtt

SEQ ID NO: 4232253 - DNA, 25 bp, Homo sapien
tcatatcaggtacacaggggagggt

SEQ ID NO: 4232254 - DNA, 25 bp, Homo sapien
atatcaggtacacaggggagggttt

SEQ ID NO: 4232255 - DNA, 25 bp, Homo sapien
tatcaggtacacaggggagggttta

SEQ ID NO: 4232256 - DNA, 25 bp, Homo sapien
atcagtgttaagtttccttctcctg

SEQ ID NO: 4232257 - DNA, 25 bp, Homo sapien
tgggaatcagtgttaagtttccttc

SEQ ID NO: 4232258 - DNA, 25 bp, Homo sapien
gaatcagtgttaagtttccttctcc

SEQ ID NO: 4232259 - DNA, 25 bp, Homo sapien
tcctgggggagaaggctctgacact

SEQ ID NO: 4232260 - DNA, 25 bp, Homo sapien
agcagagtgaacaactctgcttccc

SEQ ID NO: 4232261 - DNA, 25 bp, Homo sapien
tagccatcccattgtccacgttggc

SEQ ID NO: 4232262 - DNA, 25 bp, Homo sapien
ccagactttagaagagtcatgtctc

SEQ ID NO: 4232263 - DNA, 25 bp, Homo sapien
cacgttggctgaggcaccaagttct

SEQ ID NO: 4232264 - DNA, 25 bp, Homo sapien
tgatatagaagtggacaagggaggc

SEQ ID NO: 4232265 - DNA, 25 bp, Homo sapien
atatagaagtggacaagggaggcca

SEQ ID NO: 4232266 - DNA, 25 bp, Homo sapien
tgtgatatagaagtggacaagggag

SEQ ID NO: 4232267 - DNA, 25 bp, Homo sapien
tatagaagtggacaagggaggccac

SEQ ID NO: 4232268 - DNA, 25 bp, Homo sapien
tgggagggaagagacgaaccccaga

SEQ ID NO: 4232269 - DNA, 25 bp, Homo sapien
tgctcttggagaaggtccatggtaa

SEQ ID NO: 4232270 - DNA, 25 bp, Homo sapien
agagacgaaccccagaggagaaaga

SEQ ID NO: 4232271 - DNA, 25 bp, Homo sapien
gcagccatagatgaccatggcaggc

SEQ ID NO: 4232272 - DNA, 25 bp, Homo sapien
gactgccagagtgctctctgatgca

SEQ ID NO: 4232273 - DNA, 25 bp, Homo sapien
tggggactgccagagtgctctctga

SEQ ID NO: 4232274 - DNA, 25 bp, Homo sapien
gggactgccagagtgctctctgatg

SEQ ID NO: 4232275 - DNA, 25 bp, Homo sapien
ctggggactgccagagtgctctctg

SEQ ID NO: 4232276 - DNA, 25 bp, Homo sapien
aaacatccaaccttcgtcagcctaa

SEQ ID NO: 4232277 - DNA, 25 bp, Homo sapien
tcagcctaacattctggtgcagcgt

SEQ ID NO: 4232278 - DNA, 25 bp, Homo sapien
gcaatcttgactattcctaggcttt

SEQ ID NO: 4232279 - DNA, 25 bp, Homo sapien
taattatgcacacgcaagcacaccc

SEQ ID NO: 4232280 - DNA, 25 bp, Homo sapien
gatgtgagaagtgagtcctgtattg

SEQ ID NO: 4232281 - DNA, 25 bp, Homo sapien
gtgagaagtgagtcctgtattgtca

SEQ ID NO: 4232282 - DNA, 25 bp, Homo sapien
tgtgagaagtgagtcctgtattgtc

SEQ ID NO: 4232283 - DNA, 25 bp, Homo sapien
atgtgagaagtgagtcctgtattgt

SEQ ID NO: 4232284 - DNA, 25 bp, Homo sapien
gtaatgctccaagggtctgatattc

SEQ ID NO: 4232285 - DNA, 25 bp, Homo sapien
gggcatagtaatgctccaagggtct

SEQ ID NO: 4232286 - DNA, 25 bp, Homo sapien
tctgatattcagagactcatctacc

SEQ ID NO: 4232287 - DNA, 25 bp, Homo sapien
ccacccgcaaaaggagctcagagag

SEQ ID NO: 4232288 - DNA, 25 bp, Homo sapien
cagacagacccttctgctgctctct

SEQ ID NO: 4232289 - DNA, 25 bp, Homo sapien
tacagacagacccttctgctgctct

SEQ ID NO: 4232290 - DNA, 25 bp, Homo sapien
cctacagacagacccttctgctgct

SEQ ID NO: 4232291 - DNA, 25 bp, Homo sapien
gacagacccttctgctgctctctca

SEQ ID NO: 4232292 - DNA, 25 bp, Homo sapien
ctgcccaagaaaaggacaggggtct

SEQ ID NO: 4232293 - DNA, 25 bp, Homo sapien
ctgaggaagaatctgacaatgatca

SEQ ID NO: 4232294 - DNA, 25 bp, Homo sapien
ggtctgaggaagaatctgacaatga

SEQ ID NO: 4232295 - DNA, 25 bp, Homo sapien
aggaagaatctgacaatgatcatac

SEQ ID NO: 4232296 - DNA, 25 bp, Homo sapien
tgacaggaaactgacagaccatatg

SEQ ID NO: 4232297 - DNA, 25 bp, Homo sapien
tccatgacaggaaactgacagacca

SEQ ID NO: 4232298 - DNA, 25 bp, Homo sapien
aaactgacagaccatatgctggtgg

SEQ ID NO: 4232299 - DNA, 25 bp, Homo sapien
caggaaactgacagaccatatgctg

SEQ ID NO: 4232300 - DNA, 25 bp, Homo sapien
tcttcctattagatttgggtgtatc

SEQ ID NO: 4232301 - DNA, 25 bp, Homo sapien
ctgaaagtgtcttgttggatatagt

SEQ ID NO: 4232302 - DNA, 25 bp, Homo sapien
ggtgtatcttggagtgagatccaac

SEQ ID NO: 4232303 - DNA, 25 bp, Homo sapien
ccaacataggcaaactgaaagtgtc

SEQ ID NO: 4232304 - DNA, 25 bp, Homo sapien
ggctcaaaagcaggaagttcagaaa

SEQ ID NO: 4232305 - DNA, 25 bp, Homo sapien
caaaacagcataggagcggaagagc

SEQ ID NO: 4232306 - DNA, 25 bp, Homo sapien
gggcaatgcgatggctcaaaacagc

SEQ ID NO: 4232307 - DNA, 25 bp, Homo sapien
gcatcttcccttgagtgttccttgg

SEQ ID NO: 4232308 - DNA, 25 bp, Homo sapien
ccataatgatcagagtgggaagatc

SEQ ID NO: 4232309 - DNA, 25 bp, Homo sapien
ctggcccaacctggctcgagaatct

SEQ ID NO: 4232310 - DNA, 25 bp, Homo sapien
aatctgttccagtcgtaccataatg

SEQ ID NO: 4232311 - DNA, 25 bp, Homo sapien
tgggaagatcgtagggtacaaacat

SEQ ID NO: 4232312 - DNA, 25 bp, Homo sapien
aaactgatttccgaagttgttgctg

SEQ ID NO: 4232313 - DNA, 25 bp, Homo sapien
agcaaactgatttccgaagttgttg

SEQ ID NO: 4232314 - DNA, 25 bp, Homo sapien
actgatttccgaagttgttgctgct

SEQ ID NO: 4232315 - DNA, 25 bp, Homo sapien
gcaaactgatttccgaagttgttgc

SEQ ID NO: 4232316 - DNA, 25 bp, Homo sapien
cctccactaaacaatctgttttctt

SEQ ID NO: 4232317 - DNA, 25 bp, Homo sapien
cttaaccatggtacaaagccctcgg

SEQ ID NO: 4232318 - DNA, 25 bp, Homo sapien
taactgtccaccaactatggggctc

SEQ ID NO: 4232319 - DNA, 25 bp, Homo sapien
cctcggtagggctgcttaactgtcc

SEQ ID NO: 4232320 - DNA, 25 bp, Homo sapien
tgaagcatgtggttagcagactcag

SEQ ID NO: 4232321 - DNA, 25 bp, Homo sapien
ggttctcaaatcttgtttcagaaaa

SEQ ID NO: 4232322 - DNA, 25 bp, Homo sapien
aaaaacagaggagaatcaggtccat

SEQ ID NO: 4232323 - DNA, 25 bp, Homo sapien
attgtcttacttggttctcaaatct

SEQ ID NO: 4232324 - DNA, 25 bp, Homo sapien
agaaaaacagaggagaatcaggtcc

SEQ ID NO: 4232325 - DNA, 25 bp, Homo sapien
aggaaacgctggagcgaaaatgagg

SEQ ID NO: 4232326 - DNA, 25 bp, Homo sapien
aaggaaacgctggagcgaaaatgag

SEQ ID NO: 4232327 - DNA, 25 bp, Homo sapien
ggaaacgctggagcgaaaatgaggg

SEQ ID NO: 4232328 - DNA, 25 bp, Homo sapien
aaacgctggagcgaaaatgagggct

SEQ ID NO: 4232329 - DNA, 25 bp, Homo sapien
tagtttctggtcagtaggtggatcc

SEQ ID NO: 4232330 - DNA, 25 bp, Homo sapien
caggaaagtcaatgaagcaggtgct

SEQ ID NO: 4232331 - DNA, 25 bp, Homo sapien
tgactctgaaactagttatgtggcc

SEQ ID NO: 4232332 - DNA, 25 bp, Homo sapien
aaaatcagaggttcggctgggcgct

SEQ ID NO: 4232333 - DNA, 25 bp, Homo sapien
aacagcattctctctggtgggcgga

SEQ ID NO: 4232334 - DNA, 25 bp, Homo sapien
gcatgcgataaaggacaggtctggt

SEQ ID NO: 4232335 - DNA, 25 bp, Homo sapien
gggatctccaaatctctgcacacga

SEQ ID NO: 4232336 - DNA, 25 bp, Homo sapien
gacacaaagcatgaaggtccaacct

SEQ ID NO: 4232337 - DNA, 25 bp, Homo sapien
cagggccaccaaatagtccttgcct

SEQ ID NO: 4232338 - DNA, 25 bp, Homo sapien
ccagatgagtgtggtctgaggttgg

SEQ ID NO: 4232339 - DNA, 25 bp, Homo sapien
aatgctagaagagcagttgggtgaa

SEQ ID NO: 4232340 - DNA, 25 bp, Homo sapien
gaagcctaactcagggccctgaaac

SEQ ID NO: 4232341 - DNA, 25 bp, Homo sapien
ggtgagaattctgatcgaatccaac

SEQ ID NO: 4232342 - DNA, 25 bp, Homo sapien
gattctgacttagaaccagtggtga

SEQ ID NO: 4232343 - DNA, 25 bp, Homo sapien
gaagatttcagacattctgcttctt

SEQ ID NO: 4232344 - DNA, 25 bp, Homo sapien
acttagaaccagtggtgagaattct

SEQ ID NO: 4232345 - DNA, 25 bp, Homo sapien
gccatcatgggcttgacaaaaacct

SEQ ID NO: 4232346 - DNA, 25 bp, Homo sapien
cctcaacaagaactggagactatta

SEQ ID NO: 4232347 - DNA, 25 bp, Homo sapien
gaacttacataccaggccatcatgg

SEQ ID NO: 4232348 - DNA, 25 bp, Homo sapien
gaaataggaatcaccaagaacttac

SEQ ID NO: 4232349 - DNA, 25 bp, Homo sapien
tgcagatgggagaaagctgtagatc

SEQ ID NO: 4232350 - DNA, 25 bp, Homo sapien
caaaagagcacgacaggacaaaata

SEQ ID NO: 4232351 - DNA, 25 bp, Homo sapien
tatgtcactggtgggtctctgtcca

SEQ ID NO: 4232352 - DNA, 25 bp, Homo sapien
gaacgacacactttgatcatgcaga

SEQ ID NO: 4232353 - DNA, 25 bp, Homo sapien
tgtcaccagtaggagtcacctctag

SEQ ID NO: 4232354 - DNA, 25 bp, Homo sapien
tctcgctgtcaaagactcagggaat

SEQ ID NO: 4232355 - DNA, 25 bp, Homo sapien
gtaggctttacactcacggtctcaa

SEQ ID NO: 4232356 - DNA, 25 bp, Homo sapien
tcagctaagatcaggcaatacgtct

SEQ ID NO: 4232357 - DNA, 25 bp, Homo sapien
tctctcagggttctcgtgtgtctcc

SEQ ID NO: 4232358 - DNA, 25 bp, Homo sapien
ggcaaattgtccattcacggcagta

SEQ ID NO: 4232359 - DNA, 25 bp, Homo sapien
tacaaggtggacagccatgttgagc

SEQ ID NO: 4232360 - DNA, 25 bp, Homo sapien
catatcttgagaaggggcatgttca

SEQ ID NO: 4232361 - DNA, 25 bp, Homo sapien
caaggtcccgcagctaaaggtgtcc

SEQ ID NO: 4232362 - DNA, 25 bp, Homo sapien
tacatgaaatatagcatccagggcc

SEQ ID NO: 4232363 - DNA, 25 bp, Homo sapien
gcatgctgtaatccctccaaggtaa

SEQ ID NO: 4232364 - DNA, 25 bp, Homo sapien
gagaaaagctgacccctgaagagta

SEQ ID NO: 4232365 - DNA, 25 bp, Homo sapien
tccctttttgaagtgtaggcagaca

SEQ ID NO: 4232366 - DNA, 25 bp, Homo sapien
ctcacggtgccttttttcacggaag

SEQ ID NO: 4232367 - DNA, 25 bp, Homo sapien
tcaatgatgggcgagcgtgcaccat

SEQ ID NO: 4232368 - DNA, 25 bp, Homo sapien
tgaagttgttactaactaaactctc

SEQ ID NO: 4232369 - DNA, 25 bp, Homo sapien
ggaacggacatttgcacaacgctag

SEQ ID NO: 4232370 - DNA, 25 bp, Homo sapien
aaggcagggaaggacgtctctagca

SEQ ID NO: 4232371 - DNA, 25 bp, Homo sapien
tccctgcagtgtgagaagtgtaacc

SEQ ID NO: 4232372 - DNA, 25 bp, Homo sapien
caacgctagcttatctgtcggcaga

SEQ ID NO: 4232373 - DNA, 25 bp, Homo sapien
taccctagactccagaatttccgtg

SEQ ID NO: 4232374 - DNA, 25 bp, Homo sapien
gttacccactgaagaaggatccatg

SEQ ID NO: 4232375 - DNA, 25 bp, Homo sapien
caaagattgtactgagggctcctac

SEQ ID NO: 4232376 - DNA, 25 bp, Homo sapien
gaattaaatcaagaaacggctccac

SEQ ID NO: 4232377 - DNA, 25 bp, Homo sapien
tcttctccgatgaggagtttcggga

SEQ ID NO: 4232378 - DNA, 25 bp, Homo sapien
tggtggagaacaacctgccactgag

SEQ ID NO: 4232379 - DNA, 25 bp, Homo sapien
agagttcctcaacagccggatgctg

SEQ ID NO: 4232380 - DNA, 25 bp, Homo sapien
gccatcaagcctcctcgtgaagagt

SEQ ID NO: 4232381 - DNA, 25 bp, Homo sapien
tttatttgtcattcatagccaaatt

SEQ ID NO: 4232382 - DNA, 25 bp, Homo sapien
ttttatttatttgtcattcatagcc

SEQ ID NO: 4232383 - DNA, 25 bp, Homo sapien
ttatttatttgtcattcatagccaa

SEQ ID NO: 4232384 - DNA, 25 bp, Homo sapien
tatttatttgtcattcatagccaaa

SEQ ID NO: 4232385 - DNA, 25 bp, Homo sapien
tagagcccataaaacggtcctcatg

SEQ ID NO: 4232386 - DNA, 25 bp, Homo sapien
gagccgtgagcagtttagagcccat

SEQ ID NO: 4232387 - DNA, 25 bp, Homo sapien
tacaagggacctgagttgcattctg

SEQ ID NO: 4232388 - DNA, 25 bp, Homo sapien
tcaaccttaatcgtctccggagtcg

SEQ ID NO: 4232389 - DNA, 25 bp, Homo sapien
actatagtggacaatcttacattcg

SEQ ID NO: 4232390 - DNA, 25 bp, Homo sapien
tatgagacaaggataaccagttccc

SEQ ID NO: 4232391 - DNA, 25 bp, Homo sapien
aaaattttggactgtgaagcaaggc

SEQ ID NO: 4232392 - DNA, 25 bp, Homo sapien
gaatttgccaatacatgtgtctctg

SEQ ID NO: 4232393 - DNA, 25 bp, Homo sapien
tacttcttgttggagccggcaatag

SEQ ID NO: 4232394 - DNA, 25 bp, Homo sapien
tgtgtcattcccctcattgcctgct

SEQ ID NO: 4232395 - DNA, 25 bp, Homo sapien
tgttctgtgaaatccgcagagccga

SEQ ID NO: 4232396 - DNA, 25 bp, Homo sapien
gagattgactacgttccgggaatga

SEQ ID NO: 4232397 - DNA, 25 bp, Homo sapien
gaccaattaggacatggcacccggg

SEQ ID NO: 4232398 - DNA, 25 bp, Homo sapien
tagttttaggaccagactgcggcct

SEQ ID NO: 4232399 - DNA, 25 bp, Homo sapien
tcggaaatccttacggcttggcagc

SEQ ID NO: 4232400 - DNA, 25 bp, Homo sapien
caagctgtgtctctacggtttcggg

SEQ ID NO: 4232401 - DNA, 25 bp, Homo sapien
gaggctctggccaaactaggtcaat

SEQ ID NO: 4232402 - DNA, 25 bp, Homo sapien
gcggaaggcattctccaaatcggga

SEQ ID NO: 4232403 - DNA, 25 bp, Homo sapien
taggcagcggtaaaaacaccattcg

SEQ ID NO: 4232404 - DNA, 25 bp, Homo sapien
cattcggtttgagctcccggaacca

SEQ ID NO: 4232405 - DNA, 25 bp, Homo sapien
tgtcgaggccatcgcgttatcaaat

SEQ ID NO: 4232406 - DNA, 25 bp, Homo sapien
gccaagagggcgaagagtgttttcc

SEQ ID NO: 4232407 - DNA, 25 bp, Homo sapien
gccgtgcagctagttggctgaaaca

SEQ ID NO: 4232408 - DNA, 25 bp, Homo sapien
aaacagctccgcgatttgacctcac

SEQ ID NO: 4232409 - DNA, 25 bp, Homo sapien
caatgtccccgaacacctcggttat

SEQ ID NO: 4232410 - DNA, 25 bp, Homo sapien
ctgttggcaggaaacgtgatagaaa

SEQ ID NO: 4232411 - DNA, 25 bp, Homo sapien
atagaaatgaaagtcaggacacaat

SEQ ID NO: 4232412 - DNA, 25 bp, Homo sapien
cgaacacctcggttatccaaagcgg

SEQ ID NO: 4232413 - DNA, 25 bp, Homo sapien
tgcatttcctagaagcttgcaggct

SEQ ID NO: 4232414 - DNA, 25 bp, Homo sapien
tatggggaacgtcccttctgcaact

SEQ ID NO: 4232415 - DNA, 25 bp, Homo sapien
tctggaaggctgtctcgcgctgagc

SEQ ID NO: 4232416 - DNA, 25 bp, Homo sapien
cgctgagcgtatggggaacgtccct

SEQ ID NO: 4232417 - DNA, 25 bp, Homo sapien
cattaacgtgaataaggaccttggc

SEQ ID NO: 4232418 - DNA, 25 bp, Homo sapien
caggacggccgagggatctctgctc

SEQ ID NO: 4232419 - DNA, 25 bp, Homo sapien
tccagatcggatttttaaaggcatt

SEQ ID NO: 4232420 - DNA, 25 bp, Homo sapien
ccgggacgcgatttgctggcattgt

SEQ ID NO: 4232421 - DNA, 25 bp, Homo sapien
tgaaaatcagaaaggcctcgctgct

SEQ ID NO: 4232422 - DNA, 25 bp, Homo sapien
aagtcggtagtggaaggatgccacc

SEQ ID NO: 4232423 - DNA, 25 bp, Homo sapien
gcggtaccctgaccagatgctagga

SEQ ID NO: 4232424 - DNA, 25 bp, Homo sapien
gggatggcatacaacctccaaagtt

SEQ ID NO: 4232425 - DNA, 25 bp, Homo sapien
taaaacaccatagtggctggaaatg

SEQ ID NO: 4232426 - DNA, 25 bp, Homo sapien
gcctgtctgataccgagatagtgag

SEQ ID NO: 4232427 - DNA, 25 bp, Homo sapien
aaatgctgtagttttgccggcggtg

SEQ ID NO: 4232428 - DNA, 25 bp, Homo sapien
tctcagggcatcttaattctgctgc

SEQ ID NO: 4232429 - DNA, 25 bp, Homo sapien
catcccgaggagagagactgatggc

SEQ ID NO: 4232430 - DNA, 25 bp, Homo sapien
cagagccgtgatcttcctaatgaga

SEQ ID NO: 4232431 - DNA, 25 bp, Homo sapien
cgagccgaaccgagatttggaagga

SEQ ID NO: 4232432 - DNA, 25 bp, Homo sapien
tccttctgggtaactccgggaggca

SEQ ID NO: 4232433 - DNA, 25 bp, Homo sapien
ctcttaaactaagagctttagtcat

SEQ ID NO: 4232434 - DNA, 25 bp, Homo sapien
cctcttaaactaagagctttagtca

SEQ ID NO: 4232435 - DNA, 25 bp, Homo sapien
ctggctgtcaatcagcatgcaggga

SEQ ID NO: 4232436 - DNA, 25 bp, Homo sapien
taaaggcttgacaacagcattcaaa

SEQ ID NO: 4232437 - DNA, 25 bp, Homo sapien
ctctggctgtcaatcagcatgcagg

SEQ ID NO: 4232438 - DNA, 25 bp, Homo sapien
gacttttaaaggcttgacaacagca

SEQ ID NO: 4232439 - DNA, 25 bp, Homo sapien
gctttataggtttcccaatgcagat

SEQ ID NO: 4232440 - DNA, 25 bp, Homo sapien
tgaagaggaggtgcaaattttggtc

SEQ ID NO: 4232441 - DNA, 25 bp, Homo sapien
gagctcttggacactaagcactata

SEQ ID NO: 4232442 - DNA, 25 bp, Homo sapien
tcagttcggaaatcacaaatacaga

SEQ ID NO: 4232443 - DNA, 25 bp, Homo sapien
aataaggccaaaattatgggaccat

SEQ ID NO: 4232444 - DNA, 25 bp, Homo sapien
cataaaatcaaccataggtgtgact

SEQ ID NO: 4232445 - DNA, 25 bp, Homo sapien
ggccaaaattatgggaccatttctc

SEQ ID NO: 4232446 - DNA, 25 bp, Homo sapien
agcatcataaaatcaaccataggtg

SEQ ID NO: 4232447 - DNA, 25 bp, Homo sapien
atccagttcatcagtgccagaaggg

SEQ ID NO: 4232448 - DNA, 25 bp, Homo sapien
tccagttcatcagtgccagaaggga

SEQ ID NO: 4232449 - DNA, 25 bp, Homo sapien
tcctctttgatcaccacctggatct

SEQ ID NO: 4232450 - DNA, 25 bp, Homo sapien
ggtctcctctttgatcaccacctgg

SEQ ID NO: 4232451 - DNA, 25 bp, Homo sapien
ggagagaggcccatccctggtgtac

SEQ ID NO: 4232452 - DNA, 25 bp, Homo sapien
cgagggagagaggcccatccctggt

SEQ ID NO: 4232453 - DNA, 25 bp, Homo sapien
gggagagaggcccatccctggtgta

SEQ ID NO: 4232454 - DNA, 25 bp, Homo sapien
ctaagacgagggagagaggcccatc

SEQ ID NO: 4232455 - DNA, 25 bp, Homo sapien
ggttcagaatctgtacaggactcac

SEQ ID NO: 4232456 - DNA, 25 bp, Homo sapien
gtacaggactcaccctggcttccgg

SEQ ID NO: 4232457 - DNA, 25 bp, Homo sapien
gtgcacataaagaagggttcagaat

SEQ ID NO: 4232458 - DNA, 25 bp, Homo sapien
gcacataaagaagggttcagaatct

SEQ ID NO: 4232459 - DNA, 25 bp, Homo sapien
gatgaaggagtagcacagaccaaca

SEQ ID NO: 4232460 - DNA, 25 bp, Homo sapien
ggtccgtgctgatttgctgcctgga

SEQ ID NO: 4232461 - DNA, 25 bp, Homo sapien
cctgggtccgtgctgatttgctgcc

SEQ ID NO: 4232462 - DNA, 25 bp, Homo sapien
gaccaacatcggtaggcgtgagagt

SEQ ID NO: 4232463 - DNA, 25 bp, Homo sapien
ccatagtcgtacaaaaggcagcatt

SEQ ID NO: 4232464 - DNA, 25 bp, Homo sapien
aaattgccatagtcgtacaaaaggc

SEQ ID NO: 4232465 - DNA, 25 bp, Homo sapien
tcaaattgccatagtcgtacaaaag

SEQ ID NO: 4232466 - DNA, 25 bp, Homo sapien
ttgccatagtcgtacaaaaggcagc

SEQ ID NO: 4232467 - DNA, 25 bp, Homo sapien
ggctttgtcttatgcaaggctggtc

SEQ ID NO: 4232468 - DNA, 25 bp, Homo sapien
gctccatgctggctaatgatcactg

SEQ ID NO: 4232469 - DNA, 25 bp, Homo sapien
gatccagctaagaaataaccacttg

SEQ ID NO: 4232470 - DNA, 25 bp, Homo sapien
tggtctttcctcgatccagctaaga

SEQ ID NO: 4232471 - DNA, 25 bp, Homo sapien
ggttcgtatccgaactgctctttta

SEQ ID NO: 4232472 - DNA, 25 bp, Homo sapien
aaaactggttcgtatccgaactgct

SEQ ID NO: 4232473 - DNA, 25 bp, Homo sapien
cgtatccgaactgctcttttatgta

SEQ ID NO: 4232474 - DNA, 25 bp, Homo sapien
tatccgaactgctcttttatgtaac

SEQ ID NO: 4232475 - DNA, 25 bp, Homo sapien
tctccccacccgagaagaggatggg

SEQ ID NO: 4232476 - DNA, 25 bp, Homo sapien
tagtatttcctgcaatctggaggca

SEQ ID NO: 4232477 - DNA, 25 bp, Homo sapien
tgacgctttctccaacaggtaggtg

SEQ ID NO: 4232478 - DNA, 25 bp, Homo sapien
caagggtcacttcgaagtgtgcaca

SEQ ID NO: 4232479 - DNA, 25 bp, Homo sapien
ctgcttcgcctggaaggcaatgctg

SEQ ID NO: 4232480 - DNA, 25 bp, Homo sapien
tctcacccaggatggcacgtaggtt

SEQ ID NO: 4232481 - DNA, 25 bp, Homo sapien
gacacagctcctgttagtctctcac

SEQ ID NO: 4232482 - DNA, 25 bp, Homo sapien
tactcttgtctgcttcgcctggaag

SEQ ID NO: 4232483 - DNA, 25 bp, Homo sapien
gaaagatcttcttccacaatttctg

SEQ ID NO: 4232484 - DNA, 25 bp, Homo sapien
ggaaagatcttcttccacaatttct

SEQ ID NO: 4232485 - DNA, 25 bp, Homo sapien
tggaaagatcttcttccacaatttc

SEQ ID NO: 4232486 - DNA, 25 bp, Homo sapien
ctgcagtgactaatggttgttgtag

SEQ ID NO: 4232487 - DNA, 25 bp, Homo sapien
ataagcacagcccactctttcccgc

SEQ ID NO: 4232488 - DNA, 25 bp, Homo sapien
ctcctgattaggcctgcagtgacta

SEQ ID NO: 4232489 - DNA, 25 bp, Homo sapien
tgactaatggttgttgtagcaatgt

SEQ ID NO: 4232490 - DNA, 25 bp, Homo sapien
cagtgttaccatgggctgttaaaca

SEQ ID NO: 4232491 - DNA, 25 bp, Homo sapien
cctaaatgccatccaagggcaggta

SEQ ID NO: 4232492 - DNA, 25 bp, Homo sapien
tcttttcacagagattgttggagga

SEQ ID NO: 4232493 - DNA, 25 bp, Homo sapien
tgtgcagtgttaccatgggctgtta

SEQ ID NO: 4232494 - DNA, 25 bp, Homo sapien
catcccagcctacgtgaggcagttg

SEQ ID NO: 4232495 - DNA, 25 bp, Homo sapien
gggcatcccagcctacgtgaggcag

SEQ ID NO: 4232496 - DNA, 25 bp, Homo sapien
catggggcatcccagcctacgtgag

SEQ ID NO: 4232497 - DNA, 25 bp, Homo sapien
cccagcctacgtgaggcagttgcca

SEQ ID NO: 4232498 - DNA, 25 bp, Homo sapien
gccttgagaactttccaaccaggga

SEQ ID NO: 4232499 - DNA, 25 bp, Homo sapien
ccagcagtgccaggtttgacaagcc

SEQ ID NO: 4232500 - DNA, 25 bp, Homo sapien
ttgacaagccccacaaatctatgct

SEQ ID NO: 4232501 - DNA, 25 bp, Homo sapien
aatctatgctctttggccgccttga

SEQ ID NO: 4232502 - DNA, 25 bp, Homo sapien
tctatgaagctgtctacccatgggt

SEQ ID NO: 4232503 - DNA, 25 bp, Homo sapien
tgaagctgtctacccatgggtttcc

SEQ ID NO: 4232504 - DNA, 25 bp, Homo sapien
gaagctgtctacccatgggtttccc

SEQ ID NO: 4232505 - DNA, 25 bp, Homo sapien
tatgaagctgtctacccatgggttt

SEQ ID NO: 4232506 - DNA, 25 bp, Homo sapien
gtgccccagaacacggagatttcct

SEQ ID NO: 4232507 - DNA, 25 bp, Homo sapien
cacagcatggtacttcttctccttc

SEQ ID NO: 4232508 - DNA, 25 bp, Homo sapien
agaacacggagatttccttctgccc

SEQ ID NO: 4232509 - DNA, 25 bp, Homo sapien
ctccttctgagaatgatactgttac

SEQ ID NO: 4232510 - DNA, 25 bp, Homo sapien
agaatggttattaaagctaccttca

SEQ ID NO: 4232511 - DNA, 25 bp, Homo sapien
agatgacaaccatagactcccttga

SEQ ID NO: 4232512 - DNA, 25 bp, Homo sapien
gacaaccatagactcccttgaaaga

SEQ ID NO: 4232513 - DNA, 25 bp, Homo sapien
tattaaagctaccttcaagtcccat

SEQ ID NO: 4232514 - DNA, 25 bp, Homo sapien
gagtcagggatgtgagggtatacag

SEQ ID NO: 4232515 - DNA, 25 bp, Homo sapien
atatgcccgcttttcctggaactga

SEQ ID NO: 4232516 - DNA, 25 bp, Homo sapien
tatgcccgcttttcctggaactgac

SEQ ID NO: 4232517 - DNA, 25 bp, Homo sapien
catatgcccgcttttcctggaactg

SEQ ID NO: 4232518 - DNA, 25 bp, Homo sapien
ccaccctgagcttctactggtgcaa

SEQ ID NO: 4232519 - DNA, 25 bp, Homo sapien
aatggccccagatggtggctcaatg

SEQ ID NO: 4232520 - DNA, 25 bp, Homo sapien
gcttctactggtgcaatggccccag

SEQ ID NO: 4232521 - DNA, 25 bp, Homo sapien
cagatggtggctcaatgccatggat

SEQ ID NO: 4232522 - DNA, 25 bp, Homo sapien
tcagccaatgttcgctgatttggat

SEQ ID NO: 4232523 - DNA, 25 bp, Homo sapien
gtcagccaatgttcgctgatttgga

SEQ ID NO: 4232524 - DNA, 25 bp, Homo sapien
gccaatgttcgctgatttggattca

SEQ ID NO: 4232525 - DNA, 25 bp, Homo sapien
gattcacagcttctgctaaacttgg

SEQ ID NO: 4232526 - DNA, 25 bp, Homo sapien
gaaagaactagcatccgggaaaggc

SEQ ID NO: 4232527 - DNA, 25 bp, Homo sapien
cagccctggcggtttagagggagag

SEQ ID NO: 4232528 - DNA, 25 bp, Homo sapien
gagagttgggcagtgaccacctgtg

SEQ ID NO: 4232529 - DNA, 25 bp, Homo sapien
cgggaaaggcgatggtaatccacca

SEQ ID NO: 4232530 - DNA, 25 bp, Homo sapien
accacacagctcctcagatgtattc

SEQ ID NO: 4232531 - DNA, 25 bp, Homo sapien
atccaccacacagctcctcagatgt

SEQ ID NO: 4232532 - DNA, 25 bp, Homo sapien
tcatccaccacacagctcctcagat

SEQ ID NO: 4232533 - DNA, 25 bp, Homo sapien
ccaccacacagctcctcagatgtat

SEQ ID NO: 4232534 - DNA, 25 bp, Homo sapien
taagggaggcacacacggtgatctc

SEQ ID NO: 4232535 - DNA, 25 bp, Homo sapien
gccaaggtagctgaatcttcaaggg

SEQ ID NO: 4232536 - DNA, 25 bp, Homo sapien
taagagaccaaagagctaagctgag

SEQ ID NO: 4232537 - DNA, 25 bp, Homo sapien
gaaggaagtgttcttactgggctga

SEQ ID NO: 4232538 - DNA, 25 bp, Homo sapien
cccatgctccctggggtacatctgc

SEQ ID NO: 4232539 - DNA, 25 bp, Homo sapien
atgctccctggggtacatctgctaa

SEQ ID NO: 4232540 - DNA, 25 bp, Homo sapien
atcccatgctccctggggtacatct

SEQ ID NO: 4232541 - DNA, 25 bp, Homo sapien
catcccatgctccctggggtacatc

SEQ ID NO: 4232542 - DNA, 25 bp, Homo sapien
gcataagcaacaggtccttgtgcat

SEQ ID NO: 4232543 - DNA, 25 bp, Homo sapien
tggttccgcataagcaacaggtcct

SEQ ID NO: 4232544 - DNA, 25 bp, Homo sapien
cttgtggttccgcataagcaacagg

SEQ ID NO: 4232545 - DNA, 25 bp, Homo sapien
gtatagtgcttgtggttccgcataa

SEQ ID NO: 4232546 - DNA, 25 bp, Homo sapien
tgcatgactggactctgagccgcaa

SEQ ID NO: 4232547 - DNA, 25 bp, Homo sapien
tatcaaatagcaggtggtccctgtc

SEQ ID NO: 4232548 - DNA, 25 bp, Homo sapien
tccaagaccgcatgccagaagtaaa

SEQ ID NO: 4232549 - DNA, 25 bp, Homo sapien
gaggtattgtcgtaagtaacttcca

SEQ ID NO: 4232550 - DNA, 25 bp, Homo sapien
ccataatcccatcattatgtagatt

SEQ ID NO: 4232551 - DNA, 25 bp, Homo sapien
tttctctaagggcacatactaggaa

SEQ ID NO: 4232552 - DNA, 25 bp, Homo sapien
ggcacatactaggaaacattctact

SEQ ID NO: 4232553 - DNA, 25 bp, Homo sapien
taagggcacatactaggaaacattc

SEQ ID NO: 4232554 - DNA, 25 bp, Homo sapien
cctccccacattgagaaaaagccat

SEQ ID NO: 4232555 - DNA, 25 bp, Homo sapien
gccatagtaccatccaccatgaatg

SEQ ID NO: 4232556 - DNA, 25 bp, Homo sapien
gtaccatccaccatgaatggacttg

SEQ ID NO: 4232557 - DNA, 25 bp, Homo sapien
gagagcaagagatatcaccatgaaa

SEQ ID NO: 4232558 - DNA, 25 bp, Homo sapien
ctgaaatttgccatagtaccatcca

SEQ ID NO: 4232559 - DNA, 25 bp, Homo sapien
tcagacccctctccggtagctctct

SEQ ID NO: 4232560 - DNA, 25 bp, Homo sapien
gccagcagtccccagagatagagaa

SEQ ID NO: 4232561 - DNA, 25 bp, Homo sapien
agcagtccccagagatagagaagag

SEQ ID NO: 4232562 - DNA, 25 bp, Homo sapien
gacccctctccggtagctctctgaa

SEQ ID NO: 4232563 - DNA, 25 bp, Homo sapien
agagactcaggcaggagacttctct

SEQ ID NO: 4232564 - DNA, 25 bp, Homo sapien
ctcaggcaggagacttctctatccc

SEQ ID NO: 4232565 - DNA, 25 bp, Homo sapien
gagactcaggcaggagacttctcta

SEQ ID NO: 4232566 - DNA, 25 bp, Homo sapien
gactcaggcaggagacttctctatc

SEQ ID NO: 4232567 - DNA, 25 bp, Homo sapien
caggttctaactcgtcatctggctt

SEQ ID NO: 4232568 - DNA, 25 bp, Homo sapien
ggtattgcttttcccgggtcatgcc

SEQ ID NO: 4232569 - DNA, 25 bp, Homo sapien
ttcccgggtcatgccactttgctca

SEQ ID NO: 4232570 - DNA, 25 bp, Homo sapien
ttgctcaggttctaactcgtcatct

SEQ ID NO: 4232571 - DNA, 25 bp, Homo sapien
aataactttctgtcatagtgagtca

SEQ ID NO: 4232572 - DNA, 25 bp, Homo sapien
tgaattctcttggtctccagggcag

SEQ ID NO: 4232573 - DNA, 25 bp, Homo sapien
atcaataactttctgtcatagtgag

SEQ ID NO: 4232574 - DNA, 25 bp, Homo sapien
gtttgaattctcttggtctccaggg

SEQ ID NO: 4232575 - DNA, 25 bp, Homo sapien
ctggcggcggtgaagtggagtggcg

SEQ ID NO: 4232576 - DNA, 25 bp, Homo sapien
tattagctccggagctcccaacctt

SEQ ID NO: 4232577 - DNA, 25 bp, Homo sapien
ctcctttccacaaaattagacacat

SEQ ID NO: 4232578 - DNA, 25 bp, Homo sapien
cctctggtctggttttgaagttgca

SEQ ID NO: 4232579 - DNA, 25 bp, Homo sapien
ttctgactgtcatagtcaatctcca

SEQ ID NO: 4232580 - DNA, 25 bp, Homo sapien
tctgactgtcatagtcaatctccat

SEQ ID NO: 4232581 - DNA, 25 bp, Homo sapien
ttgatcacagacactcttaggagag

SEQ ID NO: 4232582 - DNA, 25 bp, Homo sapien
tatcagagaggtcacgtgtccaacc

SEQ ID NO: 4232583 - DNA, 25 bp, Homo sapien
tctgcaaatgccttgtgttgactat

SEQ ID NO: 4232584 - DNA, 25 bp, Homo sapien
tgtgttgactataagcacagagttg

SEQ ID NO: 4232585 - DNA, 25 bp, Homo sapien
agtttctcgaaaatgagcttctttg

SEQ ID NO: 4232586 - DNA, 25 bp, Homo sapien
tctgccttagtttcagattctgatt

SEQ ID NO: 4232587 - DNA, 25 bp, Homo sapien
cgaaaatgagcttctttgttggtta

SEQ ID NO: 4232588 - DNA, 25 bp, Homo sapien
ctctgccttagtttcagattctgat

SEQ ID NO: 4232589 - DNA, 25 bp, Homo sapien
tgaagcctgaggacttattccaact

SEQ ID NO: 4232590 - DNA, 25 bp, Homo sapien
catggactgaagaaccctagatgga

SEQ ID NO: 4232591 - DNA, 25 bp, Homo sapien
gccaggatcaatgttaagactcaag

SEQ ID NO: 4232592 - DNA, 25 bp, Homo sapien
gaatgaggccagcatgctccaatct

SEQ ID NO: 4232593 - DNA, 25 bp, Homo sapien
gataaaatcctgatggtgaaacctt

SEQ ID NO: 4232594 - DNA, 25 bp, Homo sapien
cactatggtgactagaagtgttcag

SEQ ID NO: 4232595 - DNA, 25 bp, Homo sapien
gcaggggtgccttaaacattgataa

SEQ ID NO: 4232596 - DNA, 25 bp, Homo sapien
tgtaatctgaaaatgaggcactatg

SEQ ID NO: 4232597 - DNA, 25 bp, Homo sapien
atcagtgttctccagggccacagga

SEQ ID NO: 4232598 - DNA, 25 bp, Homo sapien
gtttcaaatcagtgttctccagggc

SEQ ID NO: 4232599 - DNA, 25 bp, Homo sapien
aatcagtgttctccagggccacagg

SEQ ID NO: 4232600 - DNA, 25 bp, Homo sapien
tcaaatcagtgttctccagggccac

SEQ ID NO: 4232601 - DNA, 25 bp, Homo sapien
gacccagtgcctgcgccgtctagag

SEQ ID NO: 4232602 - DNA, 25 bp, Homo sapien
taggtaaatcagagtggtcagcagt

SEQ ID NO: 4232603 - DNA, 25 bp, Homo sapien
tgaggcagcggttagctgtgcagct

SEQ ID NO: 4232604 - DNA, 25 bp, Homo sapien
caaagccgcttttgggacccagtgc

SEQ ID NO: 4232605 - DNA, 25 bp, Homo sapien
aaaatgggaacttgtcacgacctgg

SEQ ID NO: 4232606 - DNA, 25 bp, Homo sapien
tcctagagaccttcacactgggcaa

SEQ ID NO: 4232607 - DNA, 25 bp, Homo sapien
taagaagtcatgcaaaggtaccacc

SEQ ID NO: 4232608 - DNA, 25 bp, Homo sapien
acatctaggactggcaaactctggg

SEQ ID NO: 4232609 - DNA, 25 bp, Homo sapien
tagaacaatagcgagaaagccaatg

SEQ ID NO: 4232610 - DNA, 25 bp, Homo sapien
gcaatgggatgttacactgcaaata

SEQ ID NO: 4232611 - DNA, 25 bp, Homo sapien
caatatacgggacatgcaatgggat

SEQ ID NO: 4232612 - DNA, 25 bp, Homo sapien
aagccaatgtgttatgttctaaggc

SEQ ID NO: 4232613 - DNA, 25 bp, Homo sapien
cttaatgaagggaagtaagcccagc

SEQ ID NO: 4232614 - DNA, 25 bp, Homo sapien
taagcccagcttgataggtgtttcc

SEQ ID NO: 4232615 - DNA, 25 bp, Homo sapien
gatctatgaagtatgaacgatggca

SEQ ID NO: 4232616 - DNA, 25 bp, Homo sapien
taaaagtggcccgaggtgacattat

SEQ ID NO: 4232617 - DNA, 25 bp, Homo sapien
gcacatgaacatctgggaagctaca

SEQ ID NO: 4232618 - DNA, 25 bp, Homo sapien
ggatccgccttggacactatgatgt

SEQ ID NO: 4232619 - DNA, 25 bp, Homo sapien
tgcaaaggcctcaggtgaaagagca

SEQ ID NO: 4232620 - DNA, 25 bp, Homo sapien
cctgaccctcaagaagctaagtgga

SEQ ID NO: 4232621 - DNA, 25 bp, Homo sapien
tgagcgtcttggaggatttttccat

SEQ ID NO: 4232622 - DNA, 25 bp, Homo sapien
atttacataagcatcggtaacactg

SEQ ID NO: 4232623 - DNA, 25 bp, Homo sapien
tttgagatgagcgtcttggaggatt

SEQ ID NO: 4232624 - DNA, 25 bp, Homo sapien
cataagcatcggtaacactggcaca

SEQ ID NO: 4232625 - DNA, 25 bp, Homo sapien
cctgcataatagtcagtaatgttct

SEQ ID NO: 4232626 - DNA, 25 bp, Homo sapien
ctgcataatagtcagtaatgttctc

SEQ ID NO: 4232627 - DNA, 25 bp, Homo sapien
tcctgcataatagtcagtaatgttc

SEQ ID NO: 4232628 - DNA, 25 bp, Homo sapien
ggtgattagcagcaaggtctaccac

SEQ ID NO: 4232629 - DNA, 25 bp, Homo sapien
tgattagcagcaaggtctaccacca

SEQ ID NO: 4232630 - DNA, 25 bp, Homo sapien
gtgattagcagcaaggtctaccacc

SEQ ID NO: 4232631 - DNA, 25 bp, Homo sapien
cgtgcagaaccgaaagcctcaggat

SEQ ID NO: 4232632 - DNA, 25 bp, Homo sapien
tcattccaaagcagagttgagacta

SEQ ID NO: 4232633 - DNA, 25 bp, Homo sapien
tatggtatagccgtgcacagtgtaa

SEQ ID NO: 4232634 - DNA, 25 bp, Homo sapien
cacagtgtaaggcatgaaggttgga

SEQ ID NO: 4232635 - DNA, 25 bp, Homo sapien
acaagcccggtggtgctgccagcat

SEQ ID NO: 4232636 - DNA, 25 bp, Homo sapien
aagcccggtggtgctgccagcatcc

SEQ ID NO: 4232637 - DNA, 25 bp, Homo sapien
gagaaacaagcccggtggtgctgcc

SEQ ID NO: 4232638 - DNA, 25 bp, Homo sapien
gaaacaagcccggtggtgctgccag

SEQ ID NO: 4232639 - DNA, 25 bp, Homo sapien
agacaggagcctgactgaggtctag

SEQ ID NO: 4232640 - DNA, 25 bp, Homo sapien
gaggtctagggtgtgggcccaagct

SEQ ID NO: 4232641 - DNA, 25 bp, Homo sapien
tggtgatgaggtgctcctctgcctg

SEQ ID NO: 4232642 - DNA, 25 bp, Homo sapien
ttgtggcccagctagacaggagcct

SEQ ID NO: 4232643 - DNA, 25 bp, Homo sapien
tgctgaatcgatagcaatttctgga

SEQ ID NO: 4232644 - DNA, 25 bp, Homo sapien
aaactgttattgattggccttgtaa

SEQ ID NO: 4232645 - DNA, 25 bp, Homo sapien
catccgtttattctggaccaattat

SEQ ID NO: 4232646 - DNA, 25 bp, Homo sapien
taagcactagaaagcgcaggaggaa

SEQ ID NO: 4232647 - DNA, 25 bp, Homo sapien
ctggaattcttgacttcaggttatc

SEQ ID NO: 4232648 - DNA, 25 bp, Homo sapien
tggaattcttgacttcaggttatct

SEQ ID NO: 4232649 - DNA, 25 bp, Homo sapien
tgcctctgcctcccacaaggctggg

SEQ ID NO: 4232650 - DNA, 25 bp, Homo sapien
ggtctggaattcttgacttcaggtt

SEQ ID NO: 4232651 - DNA, 25 bp, Homo sapien
ctgtgtttcgctgacagattttttc

SEQ ID NO: 4232652 - DNA, 25 bp, Homo sapien
ggtgagagaaagctatttccaacat

SEQ ID NO: 4232653 - DNA, 25 bp, Homo sapien
ttctgagctaatggtgagagaaagc

SEQ ID NO: 4232654 - DNA, 25 bp, Homo sapien
tgtttcgctgacagattttttctga

SEQ ID NO: 4232655 - DNA, 25 bp, Homo sapien
aagctttggccaaatgccagctggg

SEQ ID NO: 4232656 - DNA, 25 bp, Homo sapien
cacatgcatgggtggctgcacagga

SEQ ID NO: 4232657 - DNA, 25 bp, Homo sapien
gaggaatggcaagctttggccaaat

SEQ ID NO: 4232658 - DNA, 25 bp, Homo sapien
tcacacatgcgtgtactcatgtaca

SEQ ID NO: 4232659 - DNA, 25 bp, Homo sapien
ctcttccccagtaggaagcaatctc

SEQ ID NO: 4232660 - DNA, 25 bp, Homo sapien
ttccccagtaggaagcaatctctcc

SEQ ID NO: 4232661 - DNA, 25 bp, Homo sapien
tcttccctgaagactcttctcttcc

SEQ ID NO: 4232662 - DNA, 25 bp, Homo sapien
ccccagtaggaagcaatctctccat

SEQ ID NO: 4232663 - DNA, 25 bp, Homo sapien
tttgccaaaactgaaatatgtgtca

SEQ ID NO: 4232664 - DNA, 25 bp, Homo sapien
cccctacggcattgtcctttgccaa

SEQ ID NO: 4232665 - DNA, 25 bp, Homo sapien
cctttgccaaaactgaaatatgtgt

SEQ ID NO: 4232666 - DNA, 25 bp, Homo sapien
cccacacccctacggcattgtcctt

SEQ ID NO: 4232667 - DNA, 25 bp, Homo sapien
acgtttgtagaaagcaccttggaga

SEQ ID NO: 4232668 - DNA, 25 bp, Homo sapien
tagcagcttggttatccttgatatg

SEQ ID NO: 4232669 - DNA, 25 bp, Homo sapien
gcaggccatctgacttacttgccag

SEQ ID NO: 4232670 - DNA, 25 bp, Homo sapien
tggagatgaggtcatacgaggcctc

SEQ ID NO: 4232671 - DNA, 25 bp, Homo sapien
tctgctgagctcaggtgtgctctgg

SEQ ID NO: 4232672 - DNA, 25 bp, Homo sapien
tgctgagctcaggtgtgctctggtc

SEQ ID NO: 4232673 - DNA, 25 bp, Homo sapien
ctgagctcaggtgtgctctggtcat

SEQ ID NO: 4232674 - DNA, 25 bp, Homo sapien
gtctgctgagctcaggtgtgctctg

SEQ ID NO: 4232675 - DNA, 25 bp, Homo sapien
tgtctttccgagctgcacattcctg

SEQ ID NO: 4232676 - DNA, 25 bp, Homo sapien
tacgcattgcggatttggataccat

SEQ ID NO: 4232677 - DNA, 25 bp, Homo sapien
cctggactgtgtattggagagcaaa

SEQ ID NO: 4232678 - DNA, 25 bp, Homo sapien
gagctctgacctagatcccttctgg

SEQ ID NO: 4232679 - DNA, 25 bp, Homo sapien
gtttcatgtacttcacgtctctctg

SEQ ID NO: 4232680 - DNA, 25 bp, Homo sapien
gacaccctccataatgctgagacct

SEQ ID NO: 4232681 - DNA, 25 bp, Homo sapien
ggagcccagcgggaaaaatgttctg

SEQ ID NO: 4232682 - DNA, 25 bp, Homo sapien
cttcacgtctctctgttggtggcca

SEQ ID NO: 4232683 - DNA, 25 bp, Homo sapien
ctcagcaggggatcgggcaaacctc

SEQ ID NO: 4232684 - DNA, 25 bp, Homo sapien
gggatcgggcaaacctcatccctgc

SEQ ID NO: 4232685 - DNA, 25 bp, Homo sapien
tcagcaggggatcgggcaaacctca

SEQ ID NO: 4232686 - DNA, 25 bp, Homo sapien
caggggatcgggcaaacctcatccc

SEQ ID NO: 4232687 - DNA, 25 bp, Homo sapien
aggtctctggctcaagtctgattgc

SEQ ID NO: 4232688 - DNA, 25 bp, Homo sapien
aaaatctgatctgccttggaggctt

SEQ ID NO: 4232689 - DNA, 25 bp, Homo sapien
gggacgataatgaccgtcatatgag

SEQ ID NO: 4232690 - DNA, 25 bp, Homo sapien
ggaggcttgttagcagtttgctgcc

SEQ ID NO: 4232691 - DNA, 25 bp, Homo sapien
gaagtcgcttttagaccacagctca

SEQ ID NO: 4232692 - DNA, 25 bp, Homo sapien
ttagttctgttgtgcacagaaagca

SEQ ID NO: 4232693 - DNA, 25 bp, Homo sapien
tagtaagagtactcaggcagttcag

SEQ ID NO: 4232694 - DNA, 25 bp, Homo sapien
cattctgggccacagtgtatttcct

SEQ ID NO: 4232695 - DNA, 25 bp, Homo sapien
gtgtgcccttcattagactccctag

SEQ ID NO: 4232696 - DNA, 25 bp, Homo sapien
ttaacatcacagtgtgcccttcatt

SEQ ID NO: 4232697 - DNA, 25 bp, Homo sapien
tcattagactccctagccacattca

SEQ ID NO: 4232698 - DNA, 25 bp, Homo sapien
acagtgtgcccttcattagactccc

SEQ ID NO: 4232699 - DNA, 25 bp, Homo sapien
caaacatctactgaagccgtggtcc

SEQ ID NO: 4232700 - DNA, 25 bp, Homo sapien
cagggaggagagcaacactgtagca

SEQ ID NO: 4232701 - DNA, 25 bp, Homo sapien
taacagttaagagtggatcatccta

SEQ ID NO: 4232702 - DNA, 25 bp, Homo sapien
tctacacgctgagcgaagacaggga

SEQ ID NO: 4232703 - DNA, 25 bp, Homo sapien
gtagcagcttgttcaccctttatgg

SEQ ID NO: 4232704 - DNA, 25 bp, Homo sapien
taattgaacaggtgaactgtgcacc

SEQ ID NO: 4232705 - DNA, 25 bp, Homo sapien
tatttgtaggaaagaaggtacagat

SEQ ID NO: 4232706 - DNA, 25 bp, Homo sapien
tgtgcaccatttctagaaatccgtt

SEQ ID NO: 4232707 - DNA, 25 bp, Homo sapien
taaaatagtaatgtaatcaggctcc

SEQ ID NO: 4232708 - DNA, 25 bp, Homo sapien
gtaatgtaatcaggctcctcatgca

SEQ ID NO: 4232709 - DNA, 25 bp, Homo sapien
cagtgtcacttagtgaactttttaa

SEQ ID NO: 4232710 - DNA, 25 bp, Homo sapien
tgtaatcaggctcctcatgcacaaa

SEQ ID NO: 4232711 - DNA, 25 bp, Homo sapien
ggtacatatgagtaagctgtgggca

SEQ ID NO: 4232712 - DNA, 25 bp, Homo sapien
tctcagttgagtaaggccaagtcag

SEQ ID NO: 4232713 - DNA, 25 bp, Homo sapien
gccaagtcagtgcatagggtacata

SEQ ID NO: 4232714 - DNA, 25 bp, Homo sapien
ctgtgggcaggagattaagctttac

SEQ ID NO: 4232715 - DNA, 25 bp, Homo sapien
catgtataagcgctaggagtgcctg

SEQ ID NO: 4232716 - DNA, 25 bp, Homo sapien
cctcataggcttatcgtgggcttaa

SEQ ID NO: 4232717 - DNA, 25 bp, Homo sapien
acaatttaggctttcggcgagtcac

SEQ ID NO: 4232718 - DNA, 25 bp, Homo sapien
tgtacatgggataatagtgcctgcc

SEQ ID NO: 4232719 - DNA, 25 bp, Homo sapien
gaacatttttgtcttcacacaacaa

SEQ ID NO: 4232720 - DNA, 25 bp, Homo sapien
tttaggatgtgccttgcctcattca

SEQ ID NO: 4232721 - DNA, 25 bp, Homo sapien
cctggaataggctttaggatgtgcc

SEQ ID NO: 4232722 - DNA, 25 bp, Homo sapien
tcttgatgagctcagtacctggaat

SEQ ID NO: 4232723 - DNA, 25 bp, Homo sapien
ccactggatgggctggatccaccac

SEQ ID NO: 4232724 - DNA, 25 bp, Homo sapien
ctgagaggctcctttgatggtgatg

SEQ ID NO: 4232725 - DNA, 25 bp, Homo sapien
tgatggggcaggcaacgatgatcct

SEQ ID NO: 4232726 - DNA, 25 bp, Homo sapien
gatcctggagacacaaccgaggacc

SEQ ID NO: 4232727 - DNA, 25 bp, Homo sapien
gaatcttcagagatcaggcagagca

SEQ ID NO: 4232728 - DNA, 25 bp, Homo sapien
tacatagtaccaattccaagcagag

SEQ ID NO: 4232729 - DNA, 25 bp, Homo sapien
cattttgccagatcacaggatcgga

SEQ ID NO: 4232730 - DNA, 25 bp, Homo sapien
gagatatgatcgtgcctggaagcct

SEQ ID NO: 4232731 - DNA, 25 bp, Homo sapien
cggccccaagctgagtaagctctta

SEQ ID NO: 4232732 - DNA, 25 bp, Homo sapien
taagattccacactgatccctggca

SEQ ID NO: 4232733 - DNA, 25 bp, Homo sapien
ctgagggtaggtaagctaagattcc

SEQ ID NO: 4232734 - DNA, 25 bp, Homo sapien
cagtttgaacactcaagcgtaggga

SEQ ID NO: 4232735 - DNA, 25 bp, Homo sapien
tcactcagcagatcgaggagcgggc

SEQ ID NO: 4232736 - DNA, 25 bp, Homo sapien
cttgaagcaggttagatgcccgcga

SEQ ID NO: 4232737 - DNA, 25 bp, Homo sapien
cgtccgcttggcacgtgaggaaact

SEQ ID NO: 4232738 - DNA, 25 bp, Homo sapien
acttgtacagggtcgtcactcagca

SEQ ID NO: 4232739 - DNA, 25 bp, Homo sapien
ttaaggcgtcaaattagggcactga

SEQ ID NO: 4232740 - DNA, 25 bp, Homo sapien
gaaaagcctgcgtctactattaagg

SEQ ID NO: 4232741 - DNA, 25 bp, Homo sapien
tccaagattttcctcgtgagccccg

SEQ ID NO: 4232742 - DNA, 25 bp, Homo sapien
gaaaatggaaaagcctgcgtctact

SEQ ID NO: 4232743 - DNA, 25 bp, Homo sapien
aaagtgaaacttcggcagggctgga

SEQ ID NO: 4232744 - DNA, 25 bp, Homo sapien
ttatcccgggaaagctcgcgcggga

SEQ ID NO: 4232745 - DNA, 25 bp, Homo sapien
aaaaagtgaaacttcggcagggctg

SEQ ID NO: 4232746 - DNA, 25 bp, Homo sapien
ggctgtctcccgatcgctaaagcta

SEQ ID NO: 4232747 - DNA, 25 bp, Homo sapien
cgtggacctttacctattcttctat

SEQ ID NO: 4232748 - DNA, 25 bp, Homo sapien
tcgtggacctttacctattcttcta

SEQ ID NO: 4232749 - DNA, 25 bp, Homo sapien
ctggtgacgaagtggagaaaaccat

SEQ ID NO: 4232750 - DNA, 25 bp, Homo sapien
tgtccaccattattgaccataggct

SEQ ID NO: 4232751 - DNA, 25 bp, Homo sapien
gaaaaccatattggatgtcctaacc

SEQ ID NO: 4232752 - DNA, 25 bp, Homo sapien
tgtgcaagcagaaaaactggtgacg

SEQ ID NO: 4232753 - DNA, 25 bp, Homo sapien
cctaggagtaaaggctgtgacccaa

SEQ ID NO: 4232754 - DNA, 25 bp, Homo sapien
ggagtaaaggctgtgacccaactcc

SEQ ID NO: 4232755 - DNA, 25 bp, Homo sapien
ctggcctaggagtaaaggctgtgac

SEQ ID NO: 4232756 - DNA, 25 bp, Homo sapien
gaaacagggctggcctaggagtaaa

SEQ ID NO: 4232757 - DNA, 25 bp, Homo sapien
aaaatgatccggtatggtgaagccc

SEQ ID NO: 4232758 - DNA, 25 bp, Homo sapien
ggtgacaaatcagcgcacaacctgg

SEQ ID NO: 4232759 - DNA, 25 bp, Homo sapien
tattaaacagcacaacgaggacttg

SEQ ID NO: 4232760 - DNA, 25 bp, Homo sapien
gacactaacaatggcttcagcagga

SEQ ID NO: 4232761 - DNA, 25 bp, Homo sapien
tcttacagacgtgaatcaacaatca

SEQ ID NO: 4232762 - DNA, 25 bp, Homo sapien
aacaatcacttctgcagatgggcag

SEQ ID NO: 4232763 - DNA, 25 bp, Homo sapien
gagtgattcacaaggcagaggctct

SEQ ID NO: 4232764 - DNA, 25 bp, Homo sapien
gaggctctgccccaaacaaagcatg

SEQ ID NO: 4232765 - DNA, 25 bp, Homo sapien
caagttgaggtatttttggcaggcc

SEQ ID NO: 4232766 - DNA, 25 bp, Homo sapien
gaatgcaaatccaggcagtgtagct

SEQ ID NO: 4232767 - DNA, 25 bp, Homo sapien
gaattgggcctatctaaccaggaat

SEQ ID NO: 4232768 - DNA, 25 bp, Homo sapien
tgggcacttatcacatgtcaggctc

SEQ ID NO: 4232769 - DNA, 25 bp, Homo sapien
aaacaagtttgtggccagatcaggc

SEQ ID NO: 4232770 - DNA, 25 bp, Homo sapien
gattttgactctacctgacctgaca

SEQ ID NO: 4232771 - DNA, 25 bp, Homo sapien
ggcccagtaaactctccaggatgac

SEQ ID NO: 4232772 - DNA, 25 bp, Homo sapien
gaagagagcctaatggaaagacctg

SEQ ID NO: 4232773 - DNA, 25 bp, Homo sapien
gaggcaccaatctgcaatgatgatg

SEQ ID NO: 4232774 - DNA, 25 bp, Homo sapien
tatacctgcatgtccacagaggcac

SEQ ID NO: 4232775 - DNA, 25 bp, Homo sapien
tacttcacccactgcgccaatttgg

SEQ ID NO: 4232776 - DNA, 25 bp, Homo sapien
gatcacaacatcctagacagcccaa

SEQ ID NO: 4232777 - DNA, 25 bp, Homo sapien
aaacaagcgtgtcgcagatgtgggc

SEQ ID NO: 4232778 - DNA, 25 bp, Homo sapien
gataaagaagctccgctgcgaagac

SEQ ID NO: 4232779 - DNA, 25 bp, Homo sapien
catgcatgctcttcacggtggcaaa

SEQ ID NO: 4232780 - DNA, 25 bp, Homo sapien
tcatcagaggcacatgcacgggtca

SEQ ID NO: 4232781 - DNA, 25 bp, Homo sapien
ggattctgcccacaggctacgggag

SEQ ID NO: 4232782 - DNA, 25 bp, Homo sapien
cacagttttggagcagacaagagac

SEQ ID NO: 4232783 - DNA, 25 bp, Homo sapien
gctgggaagccgaaggacaaatgcc

SEQ ID NO: 4232784 - DNA, 25 bp, Homo sapien
tcttattggccaagcatcactcacg

SEQ ID NO: 4232785 - DNA, 25 bp, Homo sapien
tcttgagggaatataaggaggttca

SEQ ID NO: 4232786 - DNA, 25 bp, Homo sapien
ccacacatagtaagttcaggtttgt

SEQ ID NO: 4232787 - DNA, 25 bp, Homo sapien
caagcacagagcatgactggcaggg

SEQ ID NO: 4232788 - DNA, 25 bp, Homo sapien
cagggacacactcagagtagcaagc

SEQ ID NO: 4232789 - DNA, 25 bp, Homo sapien
aatagtgatttatgagtgatgctca

SEQ ID NO: 4232790 - DNA, 25 bp, Homo sapien
tgcttgtgctgtattgttaggtgaa

SEQ ID NO: 4232791 - DNA, 25 bp, Homo sapien
caaacaattcttaatgccatgagaa

SEQ ID NO: 4232792 - DNA, 25 bp, Homo sapien
tattagaaacgtaaacaatgcttgt

SEQ ID NO: 4232793 - DNA, 25 bp, Homo sapien
caaagtatgtacagaattgctccac

SEQ ID NO: 4232794 - DNA, 25 bp, Homo sapien
cttttgaggctagaaccaggtggga

SEQ ID NO: 4232795 - DNA, 25 bp, Homo sapien
tacagcttactagcgagaaataatt

SEQ ID NO: 4232796 - DNA, 25 bp, Homo sapien
tgggaaaactgatatttatacagct

SEQ ID NO: 4232797 - DNA, 25 bp, Homo sapien
cacaactggaagcaagaagttgacc

SEQ ID NO: 4232798 - DNA, 25 bp, Homo sapien
aactggaagcaagaagttgaccggg

SEQ ID NO: 4232799 - DNA, 25 bp, Homo sapien
ggcacaactggaagcaagaagttga

SEQ ID NO: 4232800 - DNA, 25 bp, Homo sapien
agcttcagctgatgtctcattctgt

SEQ ID NO: 4232801 - DNA, 25 bp, Homo sapien
cctctccaagctgtgagattttgga

SEQ ID NO: 4232802 - DNA, 25 bp, Homo sapien
ttcagtgagcctcagtcatgccagt

SEQ ID NO: 4232803 - DNA, 25 bp, Homo sapien
ggatgtatgtgtctcatcatcacct

SEQ ID NO: 4232804 - DNA, 25 bp, Homo sapien
taaaatagcactgttggaccacatc

SEQ ID NO: 4232805 - DNA, 25 bp, Homo sapien
catctcagaaactcttccttatggg

SEQ ID NO: 4232806 - DNA, 25 bp, Homo sapien
cagagaatgaggtgtcttaggcaaa

SEQ ID NO: 4232807 - DNA, 25 bp, Homo sapien
cagatacaaccctatcattttatag

SEQ ID NO: 4232808 - DNA, 25 bp, Homo sapien
cagcgtggccccaattatatcctga

SEQ ID NO: 4232809 - DNA, 25 bp, Homo sapien
ctctctgaccactggctgctgcccc

SEQ ID NO: 4232810 - DNA, 25 bp, Homo sapien
tctctgaccactggctgctgcccct

SEQ ID NO: 4232811 - DNA, 25 bp, Homo sapien
ctgaatttgattccagtttccacag

SEQ ID NO: 4232812 - DNA, 25 bp, Homo sapien
gggtcagactgaatttgattccagt

SEQ ID NO: 4232813 - DNA, 25 bp, Homo sapien
gtggggtcagactgaatttgattcc

SEQ ID NO: 4232814 - DNA, 25 bp, Homo sapien
actgctgtgttgaatcaaactgtgg

SEQ ID NO: 4232815 - DNA, 25 bp, Homo sapien
gaccttcagtgagtgtttgctcact

SEQ ID NO: 4232816 - DNA, 25 bp, Homo sapien
agtggaccttcagtgagtgtttgct

SEQ ID NO: 4232817 - DNA, 25 bp, Homo sapien
agtgagtgtttgctcactggctgac

SEQ ID NO: 4232818 - DNA, 25 bp, Homo sapien
cagtgagtgtttgctcactggctga

SEQ ID NO: 4232819 - DNA, 25 bp, Homo sapien
ctgcaacaataatagctctgagaca

SEQ ID NO: 4232820 - DNA, 25 bp, Homo sapien
gacccacgtttttcatggacaccag

SEQ ID NO: 4232821 - DNA, 25 bp, Homo sapien
agtttctctagggttgtcagtggtg

SEQ ID NO: 4232822 - DNA, 25 bp, Homo sapien
tctcatctggtgacccacgtttttc

SEQ ID NO: 4232823 - DNA, 25 bp, Homo sapien
ctggtgcctgctctgaccatgcaga

SEQ ID NO: 4232824 - DNA, 25 bp, Homo sapien
taaaatgagggttctagagtcacct

SEQ ID NO: 4232825 - DNA, 25 bp, Homo sapien
catagcgcgtgaaccttgtcagcaa

SEQ ID NO: 4232826 - DNA, 25 bp, Homo sapien
tgaatatcagaaagccaccacaacc

SEQ ID NO: 4232827 - DNA, 25 bp, Homo sapien
gaaacctccatgagcagcaaacaag

SEQ ID NO: 4232828 - DNA, 25 bp, Homo sapien
gaggtgtgtctaacaaagtggccca

SEQ ID NO: 4232829 - DNA, 25 bp, Homo sapien
tatactctacttacagctgggtgca

SEQ ID NO: 4232830 - DNA, 25 bp, Homo sapien
gaacaaagggcattccgacagaagg

SEQ ID NO: 4232831 - DNA, 25 bp, Homo sapien
tgtgcgtgcttgaatccccagggat

SEQ ID NO: 4232832 - DNA, 25 bp, Homo sapien
ctttcccaacatgccacttgtcagg

SEQ ID NO: 4232833 - DNA, 25 bp, Homo sapien
gcctttcccaacatgccacttgtca

SEQ ID NO: 4232834 - DNA, 25 bp, Homo sapien
tcaggcctttcccaacatgccactt

SEQ ID NO: 4232835 - DNA, 25 bp, Homo sapien
aggcctttcccaacatgccacttgt

SEQ ID NO: 4232836 - DNA, 25 bp, Homo sapien
tagagatggacgtttcaaagacccc

SEQ ID NO: 4232837 - DNA, 25 bp, Homo sapien
tctcagttccggaaacgtggcctgc

SEQ ID NO: 4232838 - DNA, 25 bp, Homo sapien
agtctctctgaaataagcccgtggg

SEQ ID NO: 4232839 - DNA, 25 bp, Homo sapien
tatgagataatgagagtgaaagccc

SEQ ID NO: 4232840 - DNA, 25 bp, Homo sapien
ctgccagacctaaaactgtctccag

SEQ ID NO: 4232841 - DNA, 25 bp, Homo sapien
gttctcagatcctgccagacctaaa

SEQ ID NO: 4232842 - DNA, 25 bp, Homo sapien
tggatgaagctcagggatgcagatc

SEQ ID NO: 4232843 - DNA, 25 bp, Homo sapien
aagatccccactcctgttctcagat

SEQ ID NO: 4232844 - DNA, 25 bp, Homo sapien
tcagatggacttgtctactttattg

SEQ ID NO: 4232845 - DNA, 25 bp, Homo sapien
ggactcacaagtcataccctactaa

SEQ ID NO: 4232846 - DNA, 25 bp, Homo sapien
tatactgctggccttgtggactcac

SEQ ID NO: 4232847 - DNA, 25 bp, Homo sapien
tccagtgtgttactgctaagcagtc

SEQ ID NO: 4232848 - DNA, 25 bp, Homo sapien
ggctgactgtatatagaaacaaagc

SEQ ID NO: 4232849 - DNA, 25 bp, Homo sapien
gaacaagggacagaggaatgaaggg

SEQ ID NO: 4232850 - DNA, 25 bp, Homo sapien
cagaacaagggacagaggaatgaag

SEQ ID NO: 4232851 - DNA, 25 bp, Homo sapien
cttccagaacaagggacagaggaat

SEQ ID NO: 4232852 - DNA, 25 bp, Homo sapien
tccagaacaagggacagaggaatga

SEQ ID NO: 4232853 - DNA, 25 bp, Homo sapien
tgcaggccctcagtccactacggga

SEQ ID NO: 4232854 - DNA, 25 bp, Homo sapien
cagaactgagacattctcgcctcag

SEQ ID NO: 4232855 - DNA, 25 bp, Homo sapien
ggaacagaactgagacattctcgcc

SEQ ID NO: 4232856 - DNA, 25 bp, Homo sapien
acagcaaggcggtggtctcgaagcc

SEQ ID NO: 4232857 - DNA, 25 bp, Homo sapien
acaggcagctggccctccactagcc

SEQ ID NO: 4232858 - DNA, 25 bp, Homo sapien
ccacaggcagctggccctccactag

SEQ ID NO: 4232859 - DNA, 25 bp, Homo sapien
caggcagctggccctccactagccc

SEQ ID NO: 4232860 - DNA, 25 bp, Homo sapien
ccccacaggcagctggccctccact

SEQ ID NO: 4232861 - DNA, 25 bp, Homo sapien
ttcaggccgatcttgtcttgaaatc

SEQ ID NO: 4232862 - DNA, 25 bp, Homo sapien
aagaagtactcccctgggaaagcag

SEQ ID NO: 4232863 - DNA, 25 bp, Homo sapien
taagaagtactcccctgggaaagca

SEQ ID NO: 4232864 - DNA, 25 bp, Homo sapien
tttcttcaggccgatcttgtcttga

SEQ ID NO: 4232865 - DNA, 25 bp, Homo sapien
taataggtcggtgtcttctgggtct

SEQ ID NO: 4232866 - DNA, 25 bp, Homo sapien
caggactcacctttgaatgggcata

SEQ ID NO: 4232867 - DNA, 25 bp, Homo sapien
tatcctaacgggaagaggtctgaac

SEQ ID NO: 4232868 - DNA, 25 bp, Homo sapien
cttcaagaatagtggtagaggctca

SEQ ID NO: 4232869 - DNA, 25 bp, Homo sapien
tcttccctctgatgagcgtccagtg

SEQ ID NO: 4232870 - DNA, 25 bp, Homo sapien
aagatcttccctctgatgagcgtcc

SEQ ID NO: 4232871 - DNA, 25 bp, Homo sapien
cctctgatgagcgtccagtggaaca

SEQ ID NO: 4232872 - DNA, 25 bp, Homo sapien
gatgagcgtccagtggaacaatgaa

SEQ ID NO: 4232873 - DNA, 25 bp, Homo sapien
taaagcccggctctctagagggtct

SEQ ID NO: 4232874 - DNA, 25 bp, Homo sapien
tgagaatatagcaaaccaggctctt

SEQ ID NO: 4232875 - DNA, 25 bp, Homo sapien
tcctcgtgtagacagtgcagctggc

SEQ ID NO: 4232876 - DNA, 25 bp, Homo sapien
tactctattaaacgcaggtgaaggc

SEQ ID NO: 4232877 - DNA, 25 bp, Homo sapien
gagaattcggatcccctaaggccat

SEQ ID NO: 4232878 - DNA, 25 bp, Homo sapien
gagtagaggtatctccactgtgcca

SEQ ID NO: 4232879 - DNA, 25 bp, Homo sapien
gacatccctgggttacacgaagaac

SEQ ID NO: 4232880 - DNA, 25 bp, Homo sapien
gataggtcactgctcagacccgaca

SEQ ID NO: 4232881 - DNA, 25 bp, Homo sapien
tccccatgaaacacagtggataaag

SEQ ID NO: 4232882 - DNA, 25 bp, Homo sapien
ctagagccactatatttccaggtat

SEQ ID NO: 4232883 - DNA, 25 bp, Homo sapien
tagagccactatatttccaggtatc

SEQ ID NO: 4232884 - DNA, 25 bp, Homo sapien
catgaaacacagtggataaaggttt

SEQ ID NO: 4232885 - DNA, 25 bp, Homo sapien
cagtctgtgaatagcccttggagca

SEQ ID NO: 4232886 - DNA, 25 bp, Homo sapien
aagatgagccatgactgactgcccg

SEQ ID NO: 4232887 - DNA, 25 bp, Homo sapien
taatgggctacgtgatcttgggcaa

SEQ ID NO: 4232888 - DNA, 25 bp, Homo sapien
cactattaggagcagaccgggaact

SEQ ID NO: 4232889 - DNA, 25 bp, Homo sapien
tgcggtggtggtctgcaactgaacc

SEQ ID NO: 4232890 - DNA, 25 bp, Homo sapien
ccatcagcaaaagcaggactcactg

SEQ ID NO: 4232891 - DNA, 25 bp, Homo sapien
gatcagtcagtagtcattagcatca

SEQ ID NO: 4232892 - DNA, 25 bp, Homo sapien
ccagcatgcttcaggtcaggttatt

SEQ ID NO: 4232893 - DNA, 25 bp, Homo sapien
tctgactgtaaagtgaggtgtttgg

SEQ ID NO: 4232894 - DNA, 25 bp, Homo sapien
tgagatgagatcctctgaagggtcc

SEQ ID NO: 4232895 - DNA, 25 bp, Homo sapien
aggtcacagatgtatccatctgcca

SEQ ID NO: 4232896 - DNA, 25 bp, Homo sapien
aattttgatatcctaccctagaggc

SEQ ID NO: 4232897 - DNA, 25 bp, Homo sapien
cagccttactagttgacatgattgg

SEQ ID NO: 4232898 - DNA, 25 bp, Homo sapien
gatgtgttatcccacctgagcagcc

SEQ ID NO: 4232899 - DNA, 25 bp, Homo sapien
caccaaaaccatgtctgagggaaga

SEQ ID NO: 4232900 - DNA, 25 bp, Homo sapien
agagcagccctgcatttggagctcg

SEQ ID NO: 4232901 - DNA, 25 bp, Homo sapien
tctccaacttgcttattaaagcatt

SEQ ID NO: 4232902 - DNA, 25 bp, Homo sapien
ataatctctttctccaacttgctta

SEQ ID NO: 4232903 - DNA, 25 bp, Homo sapien
tctttctccaacttgcttattaaag

SEQ ID NO: 4232904 - DNA, 25 bp, Homo sapien
ttgcttattaaagcattttgtagac

SEQ ID NO: 4232905 - DNA, 25 bp, Homo sapien
gatcccaatgttctcaggtaccaga

SEQ ID NO: 4232906 - DNA, 25 bp, Homo sapien
cagggtatctgcttcctaaaggctt

SEQ ID NO: 4232907 - DNA, 25 bp, Homo sapien
ggtgacttaagacaaccagagttct

SEQ ID NO: 4232908 - DNA, 25 bp, Homo sapien
taggtagccacccattagacacggt

SEQ ID NO: 4232909 - DNA, 25 bp, Homo sapien
caagttttgtaggtcagttcaagcc

SEQ ID NO: 4232910 - DNA, 25 bp, Homo sapien
taaaactcctgagggtagacaaaca

SEQ ID NO: 4232911 - DNA, 25 bp, Homo sapien
cacagtggatgtataactagagcta

SEQ ID NO: 4232912 - DNA, 25 bp, Homo sapien
ggctgtgttgaccactccactcaaa

SEQ ID NO: 4232913 - DNA, 25 bp, Homo sapien
tatatgtgcatcagggacagttcta

SEQ ID NO: 4232914 - DNA, 25 bp, Homo sapien
tctagcaccagaactaagattcagg

SEQ ID NO: 4232915 - DNA, 25 bp, Homo sapien
tcaggtctatgggatctggagcact

SEQ ID NO: 4232916 - DNA, 25 bp, Homo sapien
catcagggacagttctagcaccaga

SEQ ID NO: 4232917 - DNA, 25 bp, Homo sapien
tgagctctttgtagtgggaacatct

SEQ ID NO: 4232918 - DNA, 25 bp, Homo sapien
gtccaggatgagctctttgtagtgg

SEQ ID NO: 4232919 - DNA, 25 bp, Homo sapien
tttgtagtgggaacatctgggcccc

SEQ ID NO: 4232920 - DNA, 25 bp, Homo sapien
caggatgagctctttgtagtgggaa

SEQ ID NO: 4232921 - DNA, 25 bp, Homo sapien
acagctgttgttgagtcacagttgc

SEQ ID NO: 4232922 - DNA, 25 bp, Homo sapien
ctgggactacgggattctcctgact

SEQ ID NO: 4232923 - DNA, 25 bp, Homo sapien
tgccgtcattcacataaaagttgca

SEQ ID NO: 4232924 - DNA, 25 bp, Homo sapien
caaattgtctttagtgctcagaaac

SEQ ID NO: 4232925 - DNA, 25 bp, Homo sapien
ggattatcactacagaatagtccca

SEQ ID NO: 4232926 - DNA, 25 bp, Homo sapien
gtctccttgtagcacccaaagcatg

SEQ ID NO: 4232927 - DNA, 25 bp, Homo sapien
taggaaacttctctgattggataca

SEQ ID NO: 4232928 - DNA, 25 bp, Homo sapien
tgtgatgcctccatatacaggcctt

SEQ ID NO: 4232929 - DNA, 25 bp, Homo sapien
ccttcagtaagcacatggccatagc

SEQ ID NO: 4232930 - DNA, 25 bp, Homo sapien
aacacttcttgttctcgctgtcaaa

SEQ ID NO: 4232931 - DNA, 25 bp, Homo sapien
cagttggaataagcaagttctgtgc

SEQ ID NO: 4232932 - DNA, 25 bp, Homo sapien
tctgtgcgttcaactagaaaacact

SEQ ID NO: 4232933 - DNA, 25 bp, Homo sapien
tcatctgtctgtgcggcagaaagcc

SEQ ID NO: 4232934 - DNA, 25 bp, Homo sapien
gttactggtcaaaatccttcatgag

SEQ ID NO: 4232935 - DNA, 25 bp, Homo sapien
cttctgactcttctgaggttactgg

SEQ ID NO: 4232936 - DNA, 25 bp, Homo sapien
tgggttctcacacccaggtacgctg

SEQ ID NO: 4232937 - DNA, 25 bp, Homo sapien
gaggagagcacatgctttttctctt

SEQ ID NO: 4232938 - DNA, 25 bp, Homo sapien
tcataagtgttcctaaggcagaggc

SEQ ID NO: 4232939 - DNA, 25 bp, Homo sapien
taaagcgtggtcacaaaggtcagaa

SEQ ID NO: 4232940 - DNA, 25 bp, Homo sapien
gagtgtaagaacgaagtgctggccc

SEQ ID NO: 4232941 - DNA, 25 bp, Homo sapien
cacagcaatggtggcaggactacca

SEQ ID NO: 4232942 - DNA, 25 bp, Homo sapien
aatataaacattcaccagccaggta

SEQ ID NO: 4232943 - DNA, 25 bp, Homo sapien
gataacctgcaattgtcatttcaat

SEQ ID NO: 4232944 - DNA, 25 bp, Homo sapien
ttataattccaagcaatattgttga

SEQ ID NO: 4232945 - DNA, 25 bp, Homo sapien
cattcaccagccaggtaatacttaa

SEQ ID NO: 4232946 - DNA, 25 bp, Homo sapien
tgttctgcataagatggaaaccagc

SEQ ID NO: 4232947 - DNA, 25 bp, Homo sapien
tgactccaaattaaaccgacatgtg

SEQ ID NO: 4232948 - DNA, 25 bp, Homo sapien
gcattgacttaaacactgactccaa

SEQ ID NO: 4232949 - DNA, 25 bp, Homo sapien
gaacccatgtctgctgactgcaaga

SEQ ID NO: 4232950 - DNA, 25 bp, Homo sapien
tgtcaccgggcataccaagtacatg

SEQ ID NO: 4232951 - DNA, 25 bp, Homo sapien
taatattacggtgagcaggcaccca

SEQ ID NO: 4232952 - DNA, 25 bp, Homo sapien
gaggccttcaaggtccactagcatg

SEQ ID NO: 4232953 - DNA, 25 bp, Homo sapien
tgtagagtctatcacagaaccccag

SEQ ID NO: 4232954 - DNA, 25 bp, Homo sapien
ggtggacttatcacctggcaaaagt

SEQ ID NO: 4232955 - DNA, 25 bp, Homo sapien
gttcacttctacaggtcagcatcta

SEQ ID NO: 4232956 - DNA, 25 bp, Homo sapien
tggcttagggtttatggttcacttc

SEQ ID NO: 4232957 - DNA, 25 bp, Homo sapien
aaagcctggcaccatattaggtatt

SEQ ID NO: 4232958 - DNA, 25 bp, Homo sapien
taatccaccagttggttaacccaga

SEQ ID NO: 4232959 - DNA, 25 bp, Homo sapien
tgtcgtcctatcattagccccagga

SEQ ID NO: 4232960 - DNA, 25 bp, Homo sapien
cataggaccgtcgacaactggaatc

SEQ ID NO: 4232961 - DNA, 25 bp, Homo sapien
tgtatacaatgacctggactctgga

SEQ ID NO: 4232962 - DNA, 25 bp, Homo sapien
taagtcatcaggaaacttaagagca

SEQ ID NO: 4232963 - DNA, 25 bp, Homo sapien
ctcccaagcaagtatagtgcagacc

SEQ ID NO: 4232964 - DNA, 25 bp, Homo sapien
gtatagtgcagacccttaagtcatc

SEQ ID NO: 4232965 - DNA, 25 bp, Homo sapien
taagagcatattccatccctcttgc

SEQ ID NO: 4232966 - DNA, 25 bp, Homo sapien
gtgcccggccttgtaactggcttct

SEQ ID NO: 4232967 - DNA, 25 bp, Homo sapien
atggtgcccggccttgtaactggct

SEQ ID NO: 4232968 - DNA, 25 bp, Homo sapien
tgcttttccattcagccaatctact

SEQ ID NO: 4232969 - DNA, 25 bp, Homo sapien
ttgtagtccatatcagtactttatt

SEQ ID NO: 4232970 - DNA, 25 bp, Homo sapien
gttgggagctttatgcacagtgtgc

SEQ ID NO: 4232971 - DNA, 25 bp, Homo sapien
gggagttattgagtgcaggagctat

SEQ ID NO: 4232972 - DNA, 25 bp, Homo sapien
tatgcacagtgtgccctaaatggga

SEQ ID NO: 4232973 - DNA, 25 bp, Homo sapien
tgtgccctaaatgggagttattgag

SEQ ID NO: 4232974 - DNA, 25 bp, Homo sapien
gttagaggcagatcctccctgctct

SEQ ID NO: 4232975 - DNA, 25 bp, Homo sapien
ctgactgttagaggcagatcctccc

SEQ ID NO: 4232976 - DNA, 25 bp, Homo sapien
ctgttagaggcagatcctccctgct

SEQ ID NO: 4232977 - DNA, 25 bp, Homo sapien
gactgttagaggcagatcctccctg

SEQ ID NO: 4232978 - DNA, 25 bp, Homo sapien
gagggaaggagtctgaaatttacaa

SEQ ID NO: 4232979 - DNA, 25 bp, Homo sapien
cactgaggggtggttgttatttccg

SEQ ID NO: 4232980 - DNA, 25 bp, Homo sapien
ttacaagcaatgtccaaaatttggc

SEQ ID NO: 4232981 - DNA, 25 bp, Homo sapien
cctacgacattctctaaaacagtat

SEQ ID NO: 4232982 - DNA, 25 bp, Homo sapien
taaatactcatgatgggaatgggcc

SEQ ID NO: 4232983 - DNA, 25 bp, Homo sapien
aagctttcactttatgcactgcagg

SEQ ID NO: 4232984 - DNA, 25 bp, Homo sapien
ctagtccagacccaaacatttaggg

SEQ ID NO: 4232985 - DNA, 25 bp, Homo sapien
gcctcacgagaagtgtgtgccctag

SEQ ID NO: 4232986 - DNA, 25 bp, Homo sapien
cattagaatttactgacgacgtgct

SEQ ID NO: 4232987 - DNA, 25 bp, Homo sapien
tgacgacgtgctccccagtaagttg

SEQ ID NO: 4232988 - DNA, 25 bp, Homo sapien
aatttactgacgacgtgctccccag

SEQ ID NO: 4232989 - DNA, 25 bp, Homo sapien
tttccattagaatttactgacgacg

SEQ ID NO: 4232990 - DNA, 25 bp, Homo sapien
caaaaatggccgagctctggttatt

SEQ ID NO: 4232991 - DNA, 25 bp, Homo sapien
gactccaggacattgaggttgcagt

SEQ ID NO: 4232992 - DNA, 25 bp, Homo sapien
tgtcctggcaactgattcttagcaa

SEQ ID NO: 4232993 - DNA, 25 bp, Homo sapien
aagaacatcctgattagcatcacag

SEQ ID NO: 4232994 - DNA, 25 bp, Homo sapien
taaaggctggggtactcctacaaca

SEQ ID NO: 4232995 - DNA, 25 bp, Homo sapien
aagacaggcagttaagtagggtaga

SEQ ID NO: 4232996 - DNA, 25 bp, Homo sapien
caacaggggacgtatgaagacaggc

SEQ ID NO: 4232997 - DNA, 25 bp, Homo sapien
gtagatttccgccagggcacttcct

SEQ ID NO: 4232998 - DNA, 25 bp, Homo sapien
ccatctataattaggtggtggccaa

SEQ ID NO: 4232999 - DNA, 25 bp, Homo sapien
tcagctacccttcctattgccattg

SEQ ID NO: 4233000 - DNA, 25 bp, Homo sapien
tatttcaatgtgtaggcaaagattg

SEQ ID NO: 4233001 - DNA, 25 bp, Homo sapien
ccttttcatagactcttcaacacaa

SEQ ID NO: 4233002 - DNA, 25 bp, Homo sapien
ggactcctcaataaacagtgtttag

SEQ ID NO: 4233003 - DNA, 25 bp, Homo sapien
catttcaaatggtgtttagagtcgc

SEQ ID NO: 4233004 - DNA, 25 bp, Homo sapien
taaagcattacaattcctgtcacag

SEQ ID NO: 4233005 - DNA, 25 bp, Homo sapien
cggaattacaaatgggtacggctca

SEQ ID NO: 4233006 - DNA, 25 bp, Homo sapien
gtgagtaagaacatgcggtctttgg

SEQ ID NO: 4233007 - DNA, 25 bp, Homo sapien
tgtgagtaagaacatgcggtctttg

SEQ ID NO: 4233008 - DNA, 25 bp, Homo sapien
ctgtgagtaagaacatgcggtcttt

SEQ ID NO: 4233009 - DNA, 25 bp, Homo sapien
ctttcctgtgtccaagcattctcat

SEQ ID NO: 4233010 - DNA, 25 bp, Homo sapien
gttccctttcctgtgtccaagcatt

SEQ ID NO: 4233011 - DNA, 25 bp, Homo sapien
cctttcctgtgtccaagcattctca

SEQ ID NO: 4233012 - DNA, 25 bp, Homo sapien
tccctttcctgtgtccaagcattct

SEQ ID NO: 4233013 - DNA, 25 bp, Homo sapien
tggaaataccactagctgcagagac

SEQ ID NO: 4233014 - DNA, 25 bp, Homo sapien
cagggatcagcaaatacacaagtct

SEQ ID NO: 4233015 - DNA, 25 bp, Homo sapien
cattggcacccagattagcagtttc

SEQ ID NO: 4233016 - DNA, 25 bp, Homo sapien
cagaaaggcggagtgtttgtcccac

SEQ ID NO: 4233017 - DNA, 25 bp, Homo sapien
cctggaagactcatcgtcgtcatca

SEQ ID NO: 4233018 - DNA, 25 bp, Homo sapien
tcctggaagactcatcgtcgtcatc

SEQ ID NO: 4233019 - DNA, 25 bp, Homo sapien
tgtcatagaaaccacgtcatggagc

SEQ ID NO: 4233020 - DNA, 25 bp, Homo sapien
tcttcaacaaaggtactgagtgtca

SEQ ID NO: 4233021 - DNA, 25 bp, Homo sapien
gtcatggagcccaacacttttcaga

SEQ ID NO: 4233022 - DNA, 25 bp, Homo sapien
taagagaaggatcttcctgaccctg

SEQ ID NO: 4233023 - DNA, 25 bp, Homo sapien
attttcaccgctctttttctcacag

SEQ ID NO: 4233024 - DNA, 25 bp, Homo sapien
cacattttcaccgctctttttctca

SEQ ID NO: 4233025 - DNA, 25 bp, Homo sapien
cattttcaccgctctttttctcaca

SEQ ID NO: 4233026 - DNA, 25 bp, Homo sapien
acattttcaccgctctttttctcac

SEQ ID NO: 4233027 - DNA, 25 bp, Homo sapien
gttatcatcaaggtgcccctcaaga

SEQ ID NO: 4233028 - DNA, 25 bp, Homo sapien
cagggccactagagccaatcctaaa

SEQ ID NO: 4233029 - DNA, 25 bp, Homo sapien
tgcgcacaaagaacgtaaaagtcgg

SEQ ID NO: 4233030 - DNA, 25 bp, Homo sapien
tcggaagacctggtatttccaacca

SEQ ID NO: 4233031 - DNA, 25 bp, Homo sapien
agagctcattcagaagggtaacctg

SEQ ID NO: 4233032 - DNA, 25 bp, Homo sapien
gctaataaacaaagtttgactcaaa

SEQ ID NO: 4233033 - DNA, 25 bp, Homo sapien
ggtaacctgaggtctaatcaaatca

SEQ ID NO: 4233034 - DNA, 25 bp, Homo sapien
gaaggcaactgaacggtgaatgaga

SEQ ID NO: 4233035 - DNA, 25 bp, Homo sapien
tcagatagctggctcctggaatgga

SEQ ID NO: 4233036 - DNA, 25 bp, Homo sapien
tgacacaaggttcagccaactgcaa

SEQ ID NO: 4233037 - DNA, 25 bp, Homo sapien
tcctggaatggatggttgacacaag

SEQ ID NO: 4233038 - DNA, 25 bp, Homo sapien
tggatggttgacacaaggttcagcc

SEQ ID NO: 4233039 - DNA, 25 bp, Homo sapien
ttccaagtggcaactgagggctcgc

SEQ ID NO: 4233040 - DNA, 25 bp, Homo sapien
agctcccgaagaggcactgacgtga

SEQ ID NO: 4233041 - DNA, 25 bp, Homo sapien
gggaaggtcagcgactccttcagaa

SEQ ID NO: 4233042 - DNA, 25 bp, Homo sapien
ccacatcaacagcttctattgtggg

SEQ ID NO: 4233043 - DNA, 25 bp, Homo sapien
ccatctgcggaatctgataagaaac

SEQ ID NO: 4233044 - DNA, 25 bp, Homo sapien
cttcactttcccgtcgctgcctctg

SEQ ID NO: 4233045 - DNA, 25 bp, Homo sapien
catgttagtggcaccttggccattt

SEQ ID NO: 4233046 - DNA, 25 bp, Homo sapien
tactctgggcttcttactctccttc

SEQ ID NO: 4233047 - DNA, 25 bp, Homo sapien
gcagttgaaattccagccaaagctt

SEQ ID NO: 4233048 - DNA, 25 bp, Homo sapien
tgaccagaagcagttgaaattccag

SEQ ID NO: 4233049 - DNA, 25 bp, Homo sapien
ctccccagaatggttgaaacgcttt

SEQ ID NO: 4233050 - DNA, 25 bp, Homo sapien
tggttgaaacgctttggccgtacaa

SEQ ID NO: 4233051 - DNA, 25 bp, Homo sapien
gactgttggctgtcctgagaatgga

SEQ ID NO: 4233052 - DNA, 25 bp, Homo sapien
tacacaaattagtccagctggttgg

SEQ ID NO: 4233053 - DNA, 25 bp, Homo sapien
tataggcaaacgtgctctaacttct

SEQ ID NO: 4233054 - DNA, 25 bp, Homo sapien
cacaacttgttggaaagtttacaca

SEQ ID NO: 4233055 - DNA, 25 bp, Homo sapien
tactcggccacaatgggcactatac

SEQ ID NO: 4233056 - DNA, 25 bp, Homo sapien
cattgtgaactcgatgactcagagc

SEQ ID NO: 4233057 - DNA, 25 bp, Homo sapien
gaagtactgactagacatggcattg

SEQ ID NO: 4233058 - DNA, 25 bp, Homo sapien
aatgggcactatacacacatagaag

SEQ ID NO: 4233059 - DNA, 25 bp, Homo sapien
gagttttcactctttcgtccaggct

SEQ ID NO: 4233060 - DNA, 25 bp, Homo sapien
gcatgtgagctaaacagattccccg

SEQ ID NO: 4233061 - DNA, 25 bp, Homo sapien
gaattcaggcgagagtgcagcacct

SEQ ID NO: 4233062 - DNA, 25 bp, Homo sapien
gcacaggccaatatttgtctcaggg

SEQ ID NO: 4233063 - DNA, 25 bp, Homo sapien
caagggaatgagaactgatgctgtc

SEQ ID NO: 4233064 - DNA, 25 bp, Homo sapien
gaacataagggacatactcaaggcc

SEQ ID NO: 4233065 - DNA, 25 bp, Homo sapien
cagagtcctgcagaggcaaacatgt

SEQ ID NO: 4233066 - DNA, 25 bp, Homo sapien
tctaaaatgacaggtcagagtcctg

SEQ ID NO: 4233067 - DNA, 25 bp, Homo sapien
caaaagtctgtgacatgagtagctc

SEQ ID NO: 4233068 - DNA, 25 bp, Homo sapien
aagaattctgagaccaatgtctatg

SEQ ID NO: 4233069 - DNA, 25 bp, Homo sapien
gaattctgagaccaatgtctatggc

SEQ ID NO: 4233070 - DNA, 25 bp, Homo sapien
agaattctgagaccaatgtctatgg

SEQ ID NO: 4233071 - DNA, 25 bp, Homo sapien
agttggatcctatgtccctacgggt

SEQ ID NO: 4233072 - DNA, 25 bp, Homo sapien
agagtcagtagacacactaaggtca

SEQ ID NO: 4233073 - DNA, 25 bp, Homo sapien
ttttctatgaggcagttggatccta

SEQ ID NO: 4233074 - DNA, 25 bp, Homo sapien
gagtcagtagacacactaaggtcat

SEQ ID NO: 4233075 - DNA, 25 bp, Homo sapien
cagcccaattaaccctcagggccca

SEQ ID NO: 4233076 - DNA, 25 bp, Homo sapien
catccaccaccagcaagggcccttc

SEQ ID NO: 4233077 - DNA, 25 bp, Homo sapien
atccaccaccagcaagggcccttcc

SEQ ID NO: 4233078 - DNA, 25 bp, Homo sapien
acactcagcccaattaaccctcagg

SEQ ID NO: 4233079 - DNA, 25 bp, Homo sapien
aatgacgcttctacctctgtaataa

SEQ ID NO: 4233080 - DNA, 25 bp, Homo sapien
aaaatgacgcttctacctctgtaat

SEQ ID NO: 4233081 - DNA, 25 bp, Homo sapien
aaatgacgcttctacctctgtaata

SEQ ID NO: 4233082 - DNA, 25 bp, Homo sapien
tgacgcttctacctctgtaataata

SEQ ID NO: 4233083 - DNA, 25 bp, Homo sapien
tcccaaaggaatgggtggtctccat

SEQ ID NO: 4233084 - DNA, 25 bp, Homo sapien
gctgttgtgtagacactgaaatgct

SEQ ID NO: 4233085 - DNA, 25 bp, Homo sapien
tcacctccaggttgtttgtatgggt

SEQ ID NO: 4233086 - DNA, 25 bp, Homo sapien
tccatccgtgcaggcacatggccga

SEQ ID NO: 4233087 - DNA, 25 bp, Homo sapien
gggaatttcactgagagtatagaac

SEQ ID NO: 4233088 - DNA, 25 bp, Homo sapien
tatcttgggaatttcactgagagta

SEQ ID NO: 4233089 - DNA, 25 bp, Homo sapien
ttgggaatttcactgagagtataga

SEQ ID NO: 4233090 - DNA, 25 bp, Homo sapien
gaatttcactgagagtatagaacat

SEQ ID NO: 4233091 - DNA, 25 bp, Homo sapien
cgtccaagatgttacaactgcagtc

SEQ ID NO: 4233092 - DNA, 25 bp, Homo sapien
cctgatgtttccgtgaatttgtggc

SEQ ID NO: 4233093 - DNA, 25 bp, Homo sapien
tggctatcctcatggcataacacgc

SEQ ID NO: 4233094 - DNA, 25 bp, Homo sapien
gcagtctctaattgcaattaacagg

SEQ ID NO: 4233095 - DNA, 25 bp, Homo sapien
caggctccagttgaagggatgattc

SEQ ID NO: 4233096 - DNA, 25 bp, Homo sapien
cccaagctattgtggttcactaaaa

SEQ ID NO: 4233097 - DNA, 25 bp, Homo sapien
tagctataaaaagatggctgctttc

SEQ ID NO: 4233098 - DNA, 25 bp, Homo sapien
taggccactgcactgatgaatcatc

SEQ ID NO: 4233099 - DNA, 25 bp, Homo sapien
actacacgtgtaagtaagctctggg

SEQ ID NO: 4233100 - DNA, 25 bp, Homo sapien
caggttgcctgggtagtactactta

SEQ ID NO: 4233101 - DNA, 25 bp, Homo sapien
tgccatgcctgcctccatagtttaa

SEQ ID NO: 4233102 - DNA, 25 bp, Homo sapien
tagttctgttctatagcctcaggaa

SEQ ID NO: 4233103 - DNA, 25 bp, Homo sapien
ttgaggaagcgaatgatggttgact

SEQ ID NO: 4233104 - DNA, 25 bp, Homo sapien
tctcttgagagctgtaaagtaactc

SEQ ID NO: 4233105 - DNA, 25 bp, Homo sapien
gcagaagtcgctgattttgtacatg

SEQ ID NO: 4233106 - DNA, 25 bp, Homo sapien
aattatctcgagactaccaaggagc

SEQ ID NO: 4233107 - DNA, 25 bp, Homo sapien
tgtaaaatcactgggcccgaggagt

SEQ ID NO: 4233108 - DNA, 25 bp, Homo sapien
taaaatcactgggcccgaggagtga

SEQ ID NO: 4233109 - DNA, 25 bp, Homo sapien
gtaaaatcactgggcccgaggagtg

SEQ ID NO: 4233110 - DNA, 25 bp, Homo sapien
gctgacattctcaagacgaaacccc

SEQ ID NO: 4233111 - DNA, 25 bp, Homo sapien
gacattctcaagacgaaacccctca

SEQ ID NO: 4233112 - DNA, 25 bp, Homo sapien
tctcaagacgaaacccctcaatctg

SEQ ID NO: 4233113 - DNA, 25 bp, Homo sapien
gccagctgacattctcaagacgaaa

SEQ ID NO: 4233114 - DNA, 25 bp, Homo sapien
gcaaagtgaagcatgtccactaaaa

SEQ ID NO: 4233115 - DNA, 25 bp, Homo sapien
tatacatgcaatgatacaaaccctt

SEQ ID NO: 4233116 - DNA, 25 bp, Homo sapien
cccttacagccctatattatttgta

SEQ ID NO: 4233117 - DNA, 25 bp, Homo sapien
gaatacagctccaccatatcaatgc

SEQ ID NO: 4233118 - DNA, 25 bp, Homo sapien
aatgatcaccactttaactggcgtg

SEQ ID NO: 4233119 - DNA, 25 bp, Homo sapien
ccatattttggttggccacataaat

SEQ ID NO: 4233120 - DNA, 25 bp, Homo sapien
ctaatgaccagtgatagtgaggttt

SEQ ID NO: 4233121 - DNA, 25 bp, Homo sapien
tgaggaatgaccagactgtcttcta

SEQ ID NO: 4233122 - DNA, 25 bp, Homo sapien
ctagtctcccactgcccaacaggcc

SEQ ID NO: 4233123 - DNA, 25 bp, Homo sapien
cctagtctcccactgcccaacaggc

SEQ ID NO: 4233124 - DNA, 25 bp, Homo sapien
tagtctcccactgcccaacaggccc

SEQ ID NO: 4233125 - DNA, 25 bp, Homo sapien
tcgtcctgtggtcaccagcacctgc

SEQ ID NO: 4233126 - DNA, 25 bp, Homo sapien
ccagcacctgctcttgagaaagcaa

SEQ ID NO: 4233127 - DNA, 25 bp, Homo sapien
tggtcaccagcacctgctcttgaga

SEQ ID NO: 4233128 - DNA, 25 bp, Homo sapien
gtcaccagcacctgctcttgagaaa

SEQ ID NO: 4233129 - DNA, 25 bp, Homo sapien
tccttaattaagccaactgctaaag

SEQ ID NO: 4233130 - DNA, 25 bp, Homo sapien
cctccttaattaagccaactgctaa

SEQ ID NO: 4233131 - DNA, 25 bp, Homo sapien
acctccttaattaagccaactgcta

SEQ ID NO: 4233132 - DNA, 25 bp, Homo sapien
aacctccttaattaagccaactgct

SEQ ID NO: 4233133 - DNA, 25 bp, Homo sapien
caatagcctgacttgtcatgcagca

SEQ ID NO: 4233134 - DNA, 25 bp, Homo sapien
cctgacttgtcatgcagcaagtgag

SEQ ID NO: 4233135 - DNA, 25 bp, Homo sapien
tatcgaatgagcaaacaatagcctg

SEQ ID NO: 4233136 - DNA, 25 bp, Homo sapien
ggaattgtgaagcatcttagctgac

SEQ ID NO: 4233137 - DNA, 25 bp, Homo sapien
cagtgcattctaagaaactctgctc

SEQ ID NO: 4233138 - DNA, 25 bp, Homo sapien
cctttgccagatctcccagggatgg

SEQ ID NO: 4233139 - DNA, 25 bp, Homo sapien
gtgcagggtcaatgtgaagacgtca

SEQ ID NO: 4233140 - DNA, 25 bp, Homo sapien
tctcctttgccagatctcccaggga

SEQ ID NO: 4233141 - DNA, 25 bp, Homo sapien
ctctcagactctgagacgtacaggc

SEQ ID NO: 4233142 - DNA, 25 bp, Homo sapien
tctcagactctgagacgtacaggca

SEQ ID NO: 4233143 - DNA, 25 bp, Homo sapien
ctcagactctgagacgtacaggcaa

SEQ ID NO: 4233144 - DNA, 25 bp, Homo sapien
tcagactctgagacgtacaggcaag

SEQ ID NO: 4233145 - DNA, 25 bp, Homo sapien
gtccatccttggtagagagacagga

SEQ ID NO: 4233146 - DNA, 25 bp, Homo sapien
gggcactggaatcatctagaggtgg

SEQ ID NO: 4233147 - DNA, 25 bp, Homo sapien
ctggaatcatctagaggtggaggtg

SEQ ID NO: 4233148 - DNA, 25 bp, Homo sapien
actggaatcatctagaggtggaggt

SEQ ID NO: 4233149 - DNA, 25 bp, Homo sapien
agggcactggaatcatctagaggtg

SEQ ID NO: 4233150 - DNA, 25 bp, Homo sapien
ggtacttactggttacaactgcaat

SEQ ID NO: 4233151 - DNA, 25 bp, Homo sapien
tccagaaactgaattggtacttact

SEQ ID NO: 4233152 - DNA, 25 bp, Homo sapien
caagaaatctctagagctcattccc

SEQ ID NO: 4233153 - DNA, 25 bp, Homo sapien
gccttaaaagatctagactccagaa

SEQ ID NO: 4233154 - DNA, 25 bp, Homo sapien
aagcaaaaccaagttcatgggccat

SEQ ID NO: 4233155 - DNA, 25 bp, Homo sapien
ctagaggactaaagcaaaaccaagt

SEQ ID NO: 4233156 - DNA, 25 bp, Homo sapien
taaagcaaaaccaagttcatgggcc

SEQ ID NO: 4233157 - DNA, 25 bp, Homo sapien
actaaagcaaaaccaagttcatggg

SEQ ID NO: 4233158 - DNA, 25 bp, Homo sapien
cactaaccggcagcagaaagacaga

SEQ ID NO: 4233159 - DNA, 25 bp, Homo sapien
tgctgaccatgttgtttttgccctg

SEQ ID NO: 4233160 - DNA, 25 bp, Homo sapien
gaatacattaaagctcttgctgacc

SEQ ID NO: 4233161 - DNA, 25 bp, Homo sapien
agccgacatctcttttcatacccag

SEQ ID NO: 4233162 - DNA, 25 bp, Homo sapien
caggcagcaaagtgagtttgagata

SEQ ID NO: 4233163 - DNA, 25 bp, Homo sapien
tatcagagagcacgttttctgtgat

SEQ ID NO: 4233164 - DNA, 25 bp, Homo sapien
ggcagcaaagtgagtttgagataca

SEQ ID NO: 4233165 - DNA, 25 bp, Homo sapien
tagataatgctatcagagagcacgt

SEQ ID NO: 4233166 - DNA, 25 bp, Homo sapien
aaaagctaatacttagcacagagac

SEQ ID NO: 4233167 - DNA, 25 bp, Homo sapien
gacagaccttgataaccagggcatt

SEQ ID NO: 4233168 - DNA, 25 bp, Homo sapien
gagactggcaacaataaccccacaa

SEQ ID NO: 4233169 - DNA, 25 bp, Homo sapien
aatgagaaagtcatggcacataacc

SEQ ID NO: 4233170 - DNA, 25 bp, Homo sapien
tttcaaccatgcgactccatttcag

SEQ ID NO: 4233171 - DNA, 25 bp, Homo sapien
gaaccaagggtccataaataggctg

SEQ ID NO: 4233172 - DNA, 25 bp, Homo sapien
tcaaccatgcgactccatttcagaa

SEQ ID NO: 4233173 - DNA, 25 bp, Homo sapien
gggtccataaataggctggtgaacc

SEQ ID NO: 4233174 - DNA, 25 bp, Homo sapien
caatgtttggccaacccaaatctcc

SEQ ID NO: 4233175 - DNA, 25 bp, Homo sapien
ccccattctttgttgccaaaacagc

SEQ ID NO: 4233176 - DNA, 25 bp, Homo sapien
tctcctttaaaggaaatggtcctgc

SEQ ID NO: 4233177 - DNA, 25 bp, Homo sapien
gttagcaatgtttggccaacccaaa

SEQ ID NO: 4233178 - DNA, 25 bp, Homo sapien
atgcaaaacttgaagctgggtaatt

SEQ ID NO: 4233179 - DNA, 25 bp, Homo sapien
cagaaagcgtttactcatggaggaa

SEQ ID NO: 4233180 - DNA, 25 bp, Homo sapien
acaaaacacactatgtttgttagtc

SEQ ID NO: 4233181 - DNA, 25 bp, Homo sapien
cctcagaaagcgtttactcatggag

SEQ ID NO: 4233182 - DNA, 25 bp, Homo sapien
gcgtgaggccacatcccttctgctg

SEQ ID NO: 4233183 - DNA, 25 bp, Homo sapien
ttggcccatgcttggtgatgctgag

SEQ ID NO: 4233184 - DNA, 25 bp, Homo sapien
tgactcgattaaggtagtgtgtacc

SEQ ID NO: 4233185 - DNA, 25 bp, Homo sapien
caggaatatcacatgcgtgaggcca

SEQ ID NO: 4233186 - DNA, 25 bp, Homo sapien
gacagcgtccctttaccaaggacca

SEQ ID NO: 4233187 - DNA, 25 bp, Homo sapien
tctactgacagcgtccctttaccaa

SEQ ID NO: 4233188 - DNA, 25 bp, Homo sapien
cagctgctggtacacgaaggtggga

SEQ ID NO: 4233189 - DNA, 25 bp, Homo sapien
aggtgtctactgacagcgtcccttt

SEQ ID NO: 4233190 - DNA, 25 bp, Homo sapien
ggagcgcctctcctcaagtgtcttg

SEQ ID NO: 4233191 - DNA, 25 bp, Homo sapien
gtcaatctcagcgtccaggctggag

SEQ ID NO: 4233192 - DNA, 25 bp, Homo sapien
aggctggagcgcctctcctcaagtg

SEQ ID NO: 4233193 - DNA, 25 bp, Homo sapien
agccaagatgctggtcaaggagtca

SEQ ID NO: 4233194 - DNA, 25 bp, Homo sapien
tcagaatgaattttagatttccctg

SEQ ID NO: 4233195 - DNA, 25 bp, Homo sapien
tagatttccctgattgagaaccttc

SEQ ID NO: 4233196 - DNA, 25 bp, Homo sapien
ctatgttcctttttcagaatgaatt

SEQ ID NO: 4233197 - DNA, 25 bp, Homo sapien
gagaaccttcaaataatcccattat

SEQ ID NO: 4233198 - DNA, 25 bp, Homo sapien
tcctagaccatgagtcaaagcagcc

SEQ ID NO: 4233199 - DNA, 25 bp, Homo sapien
cacgcagtgctcaaacatatggcca

SEQ ID NO: 4233200 - DNA, 25 bp, Homo sapien
tgaaaggagcacatcacgcacatct

SEQ ID NO: 4233201 - DNA, 25 bp, Homo sapien
tctaattcagttccaccagagggaa

SEQ ID NO: 4233202 - DNA, 25 bp, Homo sapien
taattttgacacgtggtgatttacg

SEQ ID NO: 4233203 - DNA, 25 bp, Homo sapien
cacattgaagcccttctcctgtgtc

SEQ ID NO: 4233204 - DNA, 25 bp, Homo sapien
gttacttacgggcttatctcttctg

SEQ ID NO: 4233205 - DNA, 25 bp, Homo sapien
gatttacgtgacaatttaagtagca

SEQ ID NO: 4233206 - DNA, 25 bp, Homo sapien
tttgtatgcctctcatgtgccagaa

SEQ ID NO: 4233207 - DNA, 25 bp, Homo sapien
aacataattcgatccccttctgcag

SEQ ID NO: 4233208 - DNA, 25 bp, Homo sapien
tcaacatgaccccataacttaggtg

SEQ ID NO: 4233209 - DNA, 25 bp, Homo sapien
aaaacaaatgataaccttgcctcag

SEQ ID NO: 4233210 - DNA, 25 bp, Homo sapien
ttatcctgagcacaatgaatttggg

SEQ ID NO: 4233211 - DNA, 25 bp, Homo sapien
gaagcccagattgaaagaaactcag

SEQ ID NO: 4233212 - DNA, 25 bp, Homo sapien
gatcatctaattccacaagtccagt

SEQ ID NO: 4233213 - DNA, 25 bp, Homo sapien
ccaactcaaagatagaatgggcatg

SEQ ID NO: 4233214 - DNA, 25 bp, Homo sapien
catgctttagcgtctgggtaggtga

SEQ ID NO: 4233215 - DNA, 25 bp, Homo sapien
ttgaaaacataaggtagagcccagt

SEQ ID NO: 4233216 - DNA, 25 bp, Homo sapien
tagcatccacttttgacactagggc

SEQ ID NO: 4233217 - DNA, 25 bp, Homo sapien
ctagggcaagccttaagggtgtgca

SEQ ID NO: 4233218 - DNA, 25 bp, Homo sapien
cagattctattcttctcatgatacc

SEQ ID NO: 4233219 - DNA, 25 bp, Homo sapien
gattctattcttctcatgatacccc

SEQ ID NO: 4233220 - DNA, 25 bp, Homo sapien
ttccagattctattcttctcatgat

SEQ ID NO: 4233221 - DNA, 25 bp, Homo sapien
tctattcttctcatgataccccaca

SEQ ID NO: 4233222 - DNA, 25 bp, Homo sapien
tattcttgtcgttatggctttacac

SEQ ID NO: 4233223 - DNA, 25 bp, Homo sapien
cagccttgttcatagattcattatc

SEQ ID NO: 4233224 - DNA, 25 bp, Homo sapien
tcatatttatcacatattcttgtcg

SEQ ID NO: 4233225 - DNA, 25 bp, Homo sapien
tccgctaggcatccatacagccttg

SEQ ID NO: 4233226 - DNA, 25 bp, Homo sapien
caacatgcacgagctcaatgtgcgg

SEQ ID NO: 4233227 - DNA, 25 bp, Homo sapien
cgagctcaatgtgcggccattccaa

SEQ ID NO: 4233228 - DNA, 25 bp, Homo sapien
gtaatgccagctccaacatgcacga

SEQ ID NO: 4233229 - DNA, 25 bp, Homo sapien
tcaatgtgcggccattccaaggcat

SEQ ID NO: 4233230 - DNA, 25 bp, Homo sapien
caaacacacaagttaactgtccgtt

SEQ ID NO: 4233231 - DNA, 25 bp, Homo sapien
tcttctgcattatgaatcattcttg

SEQ ID NO: 4233232 - DNA, 25 bp, Homo sapien
aatcattcttgaacaaacacacaag

SEQ ID NO: 4233233 - DNA, 25 bp, Homo sapien
cagttcatcttctgcattatgaatc

SEQ ID NO: 4233234 - DNA, 25 bp, Homo sapien
tccactttgctggtgttaccagcca

SEQ ID NO: 4233235 - DNA, 25 bp, Homo sapien
tcctttgaggttgattccactttgc

SEQ ID NO: 4233236 - DNA, 25 bp, Homo sapien
tcggtagaagctcaggcattgaaca

SEQ ID NO: 4233237 - DNA, 25 bp, Homo sapien
ggcattgaacaccactctgacacca

SEQ ID NO: 4233238 - DNA, 25 bp, Homo sapien
gataatgtgactccaaatgctctcc

SEQ ID NO: 4233239 - DNA, 25 bp, Homo sapien
gatgccagccatgatcttctcagac

SEQ ID NO: 4233240 - DNA, 25 bp, Homo sapien
gctgcctgagtgatccttaacataa

SEQ ID NO: 4233241 - DNA, 25 bp, Homo sapien
tctatgtgatcatgagggcccctgc

SEQ ID NO: 4233242 - DNA, 25 bp, Homo sapien
caaaagtgccaacccttgcataagg

SEQ ID NO: 4233243 - DNA, 25 bp, Homo sapien
ttcaagcctgaagtgccaaaagtgc

SEQ ID NO: 4233244 - DNA, 25 bp, Homo sapien
gaagtgccaaaagtgccaacccttg

SEQ ID NO: 4233245 - DNA, 25 bp, Homo sapien
caatcaatcaccagggcattcagaa

SEQ ID NO: 4233246 - DNA, 25 bp, Homo sapien
tcaaattcctcactcagccaaaaac

SEQ ID NO: 4233247 - DNA, 25 bp, Homo sapien
aaattcctcactcagccaaaaacac

SEQ ID NO: 4233248 - DNA, 25 bp, Homo sapien
tctttcacgcaaatcttcctttcac

SEQ ID NO: 4233249 - DNA, 25 bp, Homo sapien
tttcacgcaaatcttcctttcacaa

SEQ ID NO: 4233250 - DNA, 25 bp, Homo sapien
tcctgttgagaactccagttaatcc

SEQ ID NO: 4233251 - DNA, 25 bp, Homo sapien
ttcctgttgagaactccagttaatc

SEQ ID NO: 4233252 - DNA, 25 bp, Homo sapien
tttcctgttgagaactccagttaat

SEQ ID NO: 4233253 - DNA, 25 bp, Homo sapien
ctggaataagtttgcctctataaaa

SEQ ID NO: 4233254 - DNA, 25 bp, Homo sapien
aaatggtgccagcatatagcgtgtt

SEQ ID NO: 4233255 - DNA, 25 bp, Homo sapien
aatgcctatatttgtgggagataaa

SEQ ID NO: 4233256 - DNA, 25 bp, Homo sapien
atggtgccagcatatagcgtgttcg

SEQ ID NO: 4233257 - DNA, 25 bp, Homo sapien
tcattcagtgcagtagataacctag

SEQ ID NO: 4233258 - DNA, 25 bp, Homo sapien
gctttgctgaaagcgcctacttgat

SEQ ID NO: 4233259 - DNA, 25 bp, Homo sapien
cagtcttagtttgaatggtcccaca

SEQ ID NO: 4233260 - DNA, 25 bp, Homo sapien
gaatacacagttaaggtagctccct

SEQ ID NO: 4233261 - DNA, 25 bp, Homo sapien
gccaaatccatgtctatcggaagaa

SEQ ID NO: 4233262 - DNA, 25 bp, Homo sapien
gataaatcctgtagtgaccacatgg

SEQ ID NO: 4233263 - DNA, 25 bp, Homo sapien
ttgcgagcaggttcagcaaatgccc

SEQ ID NO: 4233264 - DNA, 25 bp, Homo sapien
ccacatgggttagattcatttctgg

SEQ ID NO: 4233265 - DNA, 25 bp, Homo sapien
caaatggttacagcaaacgggtgta

SEQ ID NO: 4233266 - DNA, 25 bp, Homo sapien
tgactggggtcgaaactggaggaga

SEQ ID NO: 4233267 - DNA, 25 bp, Homo sapien
tgtgactggggtcgaaactggagga

SEQ ID NO: 4233268 - DNA, 25 bp, Homo sapien
tgtcctgtgactggggtcgaaactg

SEQ ID NO: 4233269 - DNA, 25 bp, Homo sapien
actggggtcgaaactggaggagagg

SEQ ID NO: 4233270 - DNA, 25 bp, Homo sapien
ggaccagtgactggatacatcccag

SEQ ID NO: 4233271 - DNA, 25 bp, Homo sapien
catagtagccttcataatagcgtcc

SEQ ID NO: 4233272 - DNA, 25 bp, Homo sapien
ccataggtagggtcagagtcatttc

SEQ ID NO: 4233273 - DNA, 25 bp, Homo sapien
agtgttccgattggagccacaggga

SEQ ID NO: 4233274 - DNA, 25 bp, Homo sapien
ttctcctccttatgttactgagttt

SEQ ID NO: 4233275 - DNA, 25 bp, Homo sapien
tctcctccttatgttactgagtttc

SEQ ID NO: 4233276 - DNA, 25 bp, Homo sapien
caacattgcgggagttataatcgcc

SEQ ID NO: 4233277 - DNA, 25 bp, Homo sapien
tatcttagacctgcttggcctcacc

SEQ ID NO: 4233278 - DNA, 25 bp, Homo sapien
caaccgctgtggtaccaacattgcg

SEQ ID NO: 4233279 - DNA, 25 bp, Homo sapien
catagatcactacccttgctgaggc

SEQ ID NO: 4233280 - DNA, 25 bp, Homo sapien
tgcttaatagtgctaaaggctgaag

SEQ ID NO: 4233281 - DNA, 25 bp, Homo sapien
gcttaatagtgctaaaggctgaaga

SEQ ID NO: 4233282 - DNA, 25 bp, Homo sapien
ttgcttaatagtgctaaaggctgaa

SEQ ID NO: 4233283 - DNA, 25 bp, Homo sapien
attcagacgaagtaacagagagtgt

SEQ ID NO: 4233284 - DNA, 25 bp, Homo sapien
tgttaacttaaaaggtccacatatg

SEQ ID NO: 4233285 - DNA, 25 bp, Homo sapien
gacgaagtaacagagagtgttaact

SEQ ID NO: 4233286 - DNA, 25 bp, Homo sapien
aaaggtccacatatggacaattaaa

SEQ ID NO: 4233287 - DNA, 25 bp, Homo sapien
tcataatgggaggaatcaacatcgt

SEQ ID NO: 4233288 - DNA, 25 bp, Homo sapien
aaatccaagttgtggtgagtgggca

SEQ ID NO: 4233289 - DNA, 25 bp, Homo sapien
tattggttcctctagtcataatggg

SEQ ID NO: 4233290 - DNA, 25 bp, Homo sapien
caacatcgtgttggttccagtacta

SEQ ID NO: 4233291 - DNA, 25 bp, Homo sapien
gaaagggatcatggctggccaattt

SEQ ID NO: 4233292 - DNA, 25 bp, Homo sapien
gccaatttcatatagtggtcacaca

SEQ ID NO: 4233293 - DNA, 25 bp, Homo sapien
tctaatttggaatctatctatcgga

SEQ ID NO: 4233294 - DNA, 25 bp, Homo sapien
cataaggctataggatttctccagc

SEQ ID NO: 4233295 - DNA, 25 bp, Homo sapien
gggtaagttttccatcagtgactaa

SEQ ID NO: 4233296 - DNA, 25 bp, Homo sapien
cataaagaggtctagaggttttcct

SEQ ID NO: 4233297 - DNA, 25 bp, Homo sapien
aaactccccagaagcactcaatgta

SEQ ID NO: 4233298 - DNA, 25 bp, Homo sapien
taggaaaactaaagcagctcatctc

SEQ ID NO: 4233299 - DNA, 25 bp, Homo sapien
gggagcaccagaatcggaaccattt

SEQ ID NO: 4233300 - DNA, 25 bp, Homo sapien
tatgagtgtttgtagctggccaaga

SEQ ID NO: 4233301 - DNA, 25 bp, Homo sapien
aaattacacagagcccatgaacgag

SEQ ID NO: 4233302 - DNA, 25 bp, Homo sapien
gctgtgagacagaatagggagcacc

SEQ ID NO: 4233303 - DNA, 25 bp, Homo sapien
ttaaatagttcagggatgttcaaga

SEQ ID NO: 4233304 - DNA, 25 bp, Homo sapien
tccacttactgtcacaacttctaat

SEQ ID NO: 4233305 - DNA, 25 bp, Homo sapien
gaaaatttccacttactgtcacaac

SEQ ID NO: 4233306 - DNA, 25 bp, Homo sapien
ttctaatttaagattcaggatctgc

SEQ ID NO: 4233307 - DNA, 25 bp, Homo sapien
agttaatattagagacagatcttga

SEQ ID NO: 4233308 - DNA, 25 bp, Homo sapien
actggaagaatggtcaaacttctcc

SEQ ID NO: 4233309 - DNA, 25 bp, Homo sapien
taaatgggcgaattatactgtatgc

SEQ ID NO: 4233310 - DNA, 25 bp, Homo sapien
taagctaataatatgtgggaactgg

SEQ ID NO: 4233311 - DNA, 25 bp, Homo sapien
ataacagacaccacagactaccaga

SEQ ID NO: 4233312 - DNA, 25 bp, Homo sapien
taaaagcacagctatttaagcccac

SEQ ID NO: 4233313 - DNA, 25 bp, Homo sapien
taatcctaagcaaattgatgcaggg

SEQ ID NO: 4233314 - DNA, 25 bp, Homo sapien
tgtagtaatcccacacacgtatccc

SEQ ID NO: 4233315 - DNA, 25 bp, Homo sapien
ttcctgttcagtatgatgcaggctg

SEQ ID NO: 4233316 - DNA, 25 bp, Homo sapien
tttgcaacctatggctaaagcctat

SEQ ID NO: 4233317 - DNA, 25 bp, Homo sapien
gtatggtgaaccaattttgcaacct

SEQ ID NO: 4233318 - DNA, 25 bp, Homo sapien
ctgagggtttgacatagatggttct

SEQ ID NO: 4233319 - DNA, 25 bp, Homo sapien
tcggccagtatgactgccccaaatt

SEQ ID NO: 4233320 - DNA, 25 bp, Homo sapien
tcagtttggacattattggtatata

SEQ ID NO: 4233321 - DNA, 25 bp, Homo sapien
aattgcttcggccagtatgactgcc

SEQ ID NO: 4233322 - DNA, 25 bp, Homo sapien
ataaattgcttcggccagtatgact

SEQ ID NO: 4233323 - DNA, 25 bp, Homo sapien
tgccaaggcctagaatagtatttct

SEQ ID NO: 4233324 - DNA, 25 bp, Homo sapien
gttgcaattgctttcggagacctca

SEQ ID NO: 4233325 - DNA, 25 bp, Homo sapien
tgctttcggagacctcatatgaaat

SEQ ID NO: 4233326 - DNA, 25 bp, Homo sapien
ttttgccaaggcctagaatagtatt

SEQ ID NO: 4233327 - DNA, 25 bp, Homo sapien
ttgcttctgatggtaataggccttc

SEQ ID NO: 4233328 - DNA, 25 bp, Homo sapien
cgggagaggctaaggatcaaagacc

SEQ ID NO: 4233329 - DNA, 25 bp, Homo sapien
catgggcagatgtcagtatcaccaa

SEQ ID NO: 4233330 - DNA, 25 bp, Homo sapien
gaaagatcaggtccgttccatccgg

SEQ ID NO: 4233331 - DNA, 25 bp, Homo sapien
atttccagggcacactgagtcactg

SEQ ID NO: 4233332 - DNA, 25 bp, Homo sapien
tttccagggcacactgagtcactgt

SEQ ID NO: 4233333 - DNA, 25 bp, Homo sapien
tcaggttacttttatggcgtccatc

SEQ ID NO: 4233334 - DNA, 25 bp, Homo sapien
tttgcagcaacctaactgtgtggcc

SEQ ID NO: 4233335 - DNA, 25 bp, Homo sapien
gacagtcttggagcttaaaatgcac

SEQ ID NO: 4233336 - DNA, 25 bp, Homo sapien
tgtggccctgggtacaactttcatc

SEQ ID NO: 4233337 - DNA, 25 bp, Homo sapien
acaggacaggagacatcacatttat

SEQ ID NO: 4233338 - DNA, 25 bp, Homo sapien
cacaggacaggagacatcacattta

SEQ ID NO: 4233339 - DNA, 25 bp, Homo sapien
aggacaggagacatcacatttatac

SEQ ID NO: 4233340 - DNA, 25 bp, Homo sapien
caggacaggagacatcacatttata

SEQ ID NO: 4233341 - DNA, 25 bp, Homo sapien
ttttgttatactaagcggcctccaa

SEQ ID NO: 4233342 - DNA, 25 bp, Homo sapien
gatactcattgatcctgaacttgtg

SEQ ID NO: 4233343 - DNA, 25 bp, Homo sapien
ggttctcctgaagtccactagggtg

SEQ ID NO: 4233344 - DNA, 25 bp, Homo sapien
gaacttgtgaagtacattcccaggg

SEQ ID NO: 4233345 - DNA, 25 bp, Homo sapien
tctagaactgagaagtaggacaagg

SEQ ID NO: 4233346 - DNA, 25 bp, Homo sapien
atactattttccagaagcggctagg

SEQ ID NO: 4233347 - DNA, 25 bp, Homo sapien
gagtctagctttgcctgatttcaca

SEQ ID NO: 4233348 - DNA, 25 bp, Homo sapien
tagatgccatcgtaccattttgcaa

SEQ ID NO: 4233349 - DNA, 25 bp, Homo sapien
caggaccccgaatacagatgcttca

SEQ ID NO: 4233350 - DNA, 25 bp, Homo sapien
tatttcttaacagggatgaggacag

SEQ ID NO: 4233351 - DNA, 25 bp, Homo sapien
gaaaagtgaccttgtactccatgca

SEQ ID NO: 4233352 - DNA, 25 bp, Homo sapien
cccacactgtaggtattactgcgca

SEQ ID NO: 4233353 - DNA, 25 bp, Homo sapien
ggtcactccctgactaaggaataaa

SEQ ID NO: 4233354 - DNA, 25 bp, Homo sapien
cttggtcactccctgactaaggaat

SEQ ID NO: 4233355 - DNA, 25 bp, Homo sapien
tggtcactccctgactaaggaataa

SEQ ID NO: 4233356 - DNA, 25 bp, Homo sapien
tcactccctgactaaggaataaatc

SEQ ID NO: 4233357 - DNA, 25 bp, Homo sapien
cagcagacgctctttaccggatcaa

SEQ ID NO: 4233358 - DNA, 25 bp, Homo sapien
aattaagcgggcactttccatcagg

SEQ ID NO: 4233359 - DNA, 25 bp, Homo sapien
tattatgggccaagaactaggccag

SEQ ID NO: 4233360 - DNA, 25 bp, Homo sapien
gaagccctatctcccaattaagcgg

SEQ ID NO: 4233361 - DNA, 25 bp, Homo sapien
taagccttctatgtgcttccttggt

SEQ ID NO: 4233362 - DNA, 25 bp, Homo sapien
ctaagccttctatgtgcttccttgg

SEQ ID NO: 4233363 - DNA, 25 bp, Homo sapien
aagccttctatgtgcttccttggtt

SEQ ID NO: 4233364 - DNA, 25 bp, Homo sapien
gcaaatgggcgtgactgaattccaa

SEQ ID NO: 4233365 - DNA, 25 bp, Homo sapien
tagtcaatgccaccaagtagacaga

SEQ ID NO: 4233366 - DNA, 25 bp, Homo sapien
taatcaaatgccctattgctctgcc

SEQ ID NO: 4233367 - DNA, 25 bp, Homo sapien
ttttatagagggtcaagccttttca

SEQ ID NO: 4233368 - DNA, 25 bp, Homo sapien
gagctttagctaacaagcctgagga

SEQ ID NO: 4233369 - DNA, 25 bp, Homo sapien
taagactaaggtcacagcggacaag

SEQ ID NO: 4233370 - DNA, 25 bp, Homo sapien
tggcagtggtggcaaatcactaact

SEQ ID NO: 4233371 - DNA, 25 bp, Homo sapien
gatgctggcatgataatcctttacc

SEQ ID NO: 4233372 - DNA, 25 bp, Homo sapien
gccagattcaatcaacaccattttc

SEQ ID NO: 4233373 - DNA, 25 bp, Homo sapien
tgtaaaccacagagctataaaccac

SEQ ID NO: 4233374 - DNA, 25 bp, Homo sapien
gattgtccaagctcagttggccaga

SEQ ID NO: 4233375 - DNA, 25 bp, Homo sapien
cgtttctcttcatggcacttaaata

SEQ ID NO: 4233376 - DNA, 25 bp, Homo sapien
catggaagcagatcagttaaggcta

SEQ ID NO: 4233377 - DNA, 25 bp, Homo sapien
taaaacccgccttatgctgtgtgtc

SEQ ID NO: 4233378 - DNA, 25 bp, Homo sapien
gaatatcctgccctgtattgcaaaa

SEQ ID NO: 4233379 - DNA, 25 bp, Homo sapien
tctacccagcatcgttatattgtga

SEQ ID NO: 4233380 - DNA, 25 bp, Homo sapien
ggaggctgctagctctgtggtcact

SEQ ID NO: 4233381 - DNA, 25 bp, Homo sapien
tagctctgtggtcactaagagcacc

SEQ ID NO: 4233382 - DNA, 25 bp, Homo sapien
tctgtggtcactaagagcaccttgt

SEQ ID NO: 4233383 - DNA, 25 bp, Homo sapien
gctgctagctctgtggtcactaaga

SEQ ID NO: 4233384 - DNA, 25 bp, Homo sapien
agaggagattaaaaccaatgaactt

SEQ ID NO: 4233385 - DNA, 25 bp, Homo sapien
actgtgaaaggcagcacagtgacag

SEQ ID NO: 4233386 - DNA, 25 bp, Homo sapien
ctgtgaaaggcagcacagtgacagc

SEQ ID NO: 4233387 - DNA, 25 bp, Homo sapien
caatgaactttagaaggtagtggga

SEQ ID NO: 4233388 - DNA, 25 bp, Homo sapien
gaggcaccaattactgactagccag

SEQ ID NO: 4233389 - DNA, 25 bp, Homo sapien
ggctaagtttgagcaccatcatcat

SEQ ID NO: 4233390 - DNA, 25 bp, Homo sapien
gacacagtaacacagggagagaact

SEQ ID NO: 4233391 - DNA, 25 bp, Homo sapien
cctataccatgcatgagagatgaca

SEQ ID NO: 4233392 - DNA, 25 bp, Homo sapien
tagctttctgacctcacatcaaggg

SEQ ID NO: 4233393 - DNA, 25 bp, Homo sapien
tcagtattcgtggtaatgggacacc

SEQ ID NO: 4233394 - DNA, 25 bp, Homo sapien
ggcattcttgccatgcgggtcccgg

SEQ ID NO: 4233395 - DNA, 25 bp, Homo sapien
tgggacaccacgttaaggcaaatgg

SEQ ID NO: 4233396 - DNA, 25 bp, Homo sapien
gaaaggtaactcaatagactgtgag

SEQ ID NO: 4233397 - DNA, 25 bp, Homo sapien
agaaaggtaactcaatagactgtga

SEQ ID NO: 4233398 - DNA, 25 bp, Homo sapien
aaaggtaactcaatagactgtgagc

SEQ ID NO: 4233399 - DNA, 25 bp, Homo sapien
tgaagatgtcagtgatgtctcgaag

SEQ ID NO: 4233400 - DNA, 25 bp, Homo sapien
gatgtctcgaaggtgagggaattct

SEQ ID NO: 4233401 - DNA, 25 bp, Homo sapien
cagctgtctgcagattacccaggac

SEQ ID NO: 4233402 - DNA, 25 bp, Homo sapien
gctggtaaagtcaacccatatatga

SEQ ID NO: 4233403 - DNA, 25 bp, Homo sapien
cactgccccttttctgagtggagaa

SEQ ID NO: 4233404 - DNA, 25 bp, Homo sapien
atcccactgccccttttctgagtgg

SEQ ID NO: 4233405 - DNA, 25 bp, Homo sapien
ctgccccttttctgagtggagaaga

SEQ ID NO: 4233406 - DNA, 25 bp, Homo sapien
gccccttttctgagtggagaagaaa

SEQ ID NO: 4233407 - DNA, 25 bp, Homo sapien
caaagtattcgtcagcaggtggatt

SEQ ID NO: 4233408 - DNA, 25 bp, Homo sapien
gggcaactgacgaaggccccagttg

SEQ ID NO: 4233409 - DNA, 25 bp, Homo sapien
agctcatcctctgggcggaatgaag

SEQ ID NO: 4233410 - DNA, 25 bp, Homo sapien
tctttttggtcaggtgctcaagctc

SEQ ID NO: 4233411 - DNA, 25 bp, Homo sapien
cagaagtcagctctaggccccactc

SEQ ID NO: 4233412 - DNA, 25 bp, Homo sapien
gaagtcagctctaggccccactcac

SEQ ID NO: 4233413 - DNA, 25 bp, Homo sapien
tcagaagtcagctctaggccccact

SEQ ID NO: 4233414 - DNA, 25 bp, Homo sapien
agaagtcagctctaggccccactca

SEQ ID NO: 4233415 - DNA, 25 bp, Homo sapien
tctcatgcatctggactcaaatact

SEQ ID NO: 4233416 - DNA, 25 bp, Homo sapien
tttaccagtggagctgataatagtt

SEQ ID NO: 4233417 - DNA, 25 bp, Homo sapien
ctcaaatactttaccagtggagctg

SEQ ID NO: 4233418 - DNA, 25 bp, Homo sapien
gggatgtatatcaactctcatgcat

SEQ ID NO: 4233419 - DNA, 25 bp, Homo sapien
tagagaacatttgccccaaccgttg

SEQ ID NO: 4233420 - DNA, 25 bp, Homo sapien
gctggtaagaagtgcatcctggctc

SEQ ID NO: 4233421 - DNA, 25 bp, Homo sapien
ccagtattgcttggccagcgaggga

SEQ ID NO: 4233422 - DNA, 25 bp, Homo sapien
actttatcgctcttgggtcaggccc

SEQ ID NO: 4233423 - DNA, 25 bp, Homo sapien
tcctcatggttggatagagctgaaa

SEQ ID NO: 4233424 - DNA, 25 bp, Homo sapien
cattgacagtgttgcagaattcagg

SEQ ID NO: 4233425 - DNA, 25 bp, Homo sapien
acaggtgtcttgaagcatgtcccat

SEQ ID NO: 4233426 - DNA, 25 bp, Homo sapien
caagaccactgcctagacgatgctg

SEQ ID NO: 4233427 - DNA, 25 bp, Homo sapien
ccttatagttgttgcagttatagca

SEQ ID NO: 4233428 - DNA, 25 bp, Homo sapien
tctacgtatatctgtcaatcatccc

SEQ ID NO: 4233429 - DNA, 25 bp, Homo sapien
tcaccttatactgcaacaaatagct

SEQ ID NO: 4233430 - DNA, 25 bp, Homo sapien
tcatttgtgacaggcttcagtacac

SEQ ID NO: 4233431 - DNA, 25 bp, Homo sapien
gtcatcactaccacaattgtcctca

SEQ ID NO: 4233432 - DNA, 25 bp, Homo sapien
tatggagctctaggtaaatatcagc

SEQ ID NO: 4233433 - DNA, 25 bp, Homo sapien
tgtcatcactaccacaattgtcctc

SEQ ID NO: 4233434 - DNA, 25 bp, Homo sapien
tttttaaacatatggagctctaggt

SEQ ID NO: 4233435 - DNA, 25 bp, Homo sapien
taaccaaggcagaacgagacaattt

SEQ ID NO: 4233436 - DNA, 25 bp, Homo sapien
tcttgaccatctgacaaaatgacac

SEQ ID NO: 4233437 - DNA, 25 bp, Homo sapien
cactgggaccagacgttcaatagag

SEQ ID NO: 4233438 - DNA, 25 bp, Homo sapien
tagagggtccagtctctgattggcc

SEQ ID NO: 4233439 - DNA, 25 bp, Homo sapien
ggcctaaaatagcatcaacttccga

SEQ ID NO: 4233440 - DNA, 25 bp, Homo sapien
ccgactgagtgagccaattgctagc

SEQ ID NO: 4233441 - DNA, 25 bp, Homo sapien
ttgacactgccgctgacggcctaaa

SEQ ID NO: 4233442 - DNA, 25 bp, Homo sapien
tagcatcaacttccgactgagtgag

SEQ ID NO: 4233443 - DNA, 25 bp, Homo sapien
tgcttgatctgccagaggagaacca

SEQ ID NO: 4233444 - DNA, 25 bp, Homo sapien
gaaccagaagcaaaagtatccccat

SEQ ID NO: 4233445 - DNA, 25 bp, Homo sapien
attttgaatgggaacgggctgcacg

SEQ ID NO: 4233446 - DNA, 25 bp, Homo sapien
taaactgttccggattgctctagag

SEQ ID NO: 4233447 - DNA, 25 bp, Homo sapien
cctcttgacttcgaaagtgactgca

SEQ ID NO: 4233448 - DNA, 25 bp, Homo sapien
tggtctgtctagaatacctcttgac

SEQ ID NO: 4233449 - DNA, 25 bp, Homo sapien
cataggtgatctccaaattaagtcc

SEQ ID NO: 4233450 - DNA, 25 bp, Homo sapien
tgactgcaatgctgaggccattcct

SEQ ID NO: 4233451 - DNA, 25 bp, Homo sapien
tacttgtccctcaactcaatgtggc

SEQ ID NO: 4233452 - DNA, 25 bp, Homo sapien
cagagacctctaaatttgttcatgg

SEQ ID NO: 4233453 - DNA, 25 bp, Homo sapien
taacatttatcacatgggaaaaggg

SEQ ID NO: 4233454 - DNA, 25 bp, Homo sapien
tataatggtctatggacttcttggg

SEQ ID NO: 4233455 - DNA, 25 bp, Homo sapien
caaaaatatagctggcttgatttgc

SEQ ID NO: 4233456 - DNA, 25 bp, Homo sapien
aaatatagctggcttgatttgcatt

SEQ ID NO: 4233457 - DNA, 25 bp, Homo sapien
aaaaatatagctggcttgatttgca

SEQ ID NO: 4233458 - DNA, 25 bp, Homo sapien
aaaatatagctggcttgatttgcat

SEQ ID NO: 4233459 - DNA, 25 bp, Homo sapien
caattggagaacttttcccagctgg

SEQ ID NO: 4233460 - DNA, 25 bp, Homo sapien
gcagcgtaatgcctcccaaagagga

SEQ ID NO: 4233461 - DNA, 25 bp, Homo sapien
tagaatctatgcaaagggtagggcc

SEQ ID NO: 4233462 - DNA, 25 bp, Homo sapien
tgcatgttcccaggaccaggattgt

SEQ ID NO: 4233463 - DNA, 25 bp, Homo sapien
tagacttatttaggtccccgccatg

SEQ ID NO: 4233464 - DNA, 25 bp, Homo sapien
gacctggttctcattgcgtcagata

SEQ ID NO: 4233465 - DNA, 25 bp, Homo sapien
catttctgaattgtgtctgacctgg

SEQ ID NO: 4233466 - DNA, 25 bp, Homo sapien
tctaactcaggaagaacctattgct

SEQ ID NO: 4233467 - DNA, 25 bp, Homo sapien
taatgtggcaatgtacagtgcacag

SEQ ID NO: 4233468 - DNA, 25 bp, Homo sapien
aattaaagttcacagcccattaggc

SEQ ID NO: 4233469 - DNA, 25 bp, Homo sapien
acactactggtgatttctgcgaaca

SEQ ID NO: 4233470 - DNA, 25 bp, Homo sapien
gaagtacactctaaagtccacaggt

SEQ ID NO: 4233471 - DNA, 25 bp, Homo sapien
aacatggtccctattgcaaaagcac

SEQ ID NO: 4233472 - DNA, 25 bp, Homo sapien
cctatgagttcaggcttatttttca

SEQ ID NO: 4233473 - DNA, 25 bp, Homo sapien
tatgagttcaggcttatttttcatc

SEQ ID NO: 4233474 - DNA, 25 bp, Homo sapien
tgagttcaggcttatttttcatctc

SEQ ID NO: 4233475 - DNA, 25 bp, Homo sapien
ttcaggcttatttttcatctcttac

SEQ ID NO: 4233476 - DNA, 25 bp, Homo sapien
tctgtaggtaggacacaagcttcag

SEQ ID NO: 4233477 - DNA, 25 bp, Homo sapien
tcaagcagagtggttgggaattctg

SEQ ID NO: 4233478 - DNA, 25 bp, Homo sapien
cttcagaggaagttggagtacactg

SEQ ID NO: 4233479 - DNA, 25 bp, Homo sapien
ggagtacactgcctttttaaggatc

SEQ ID NO: 4233480 - DNA, 25 bp, Homo sapien
aaaactgtgcacatatttgtggcca

SEQ ID NO: 4233481 - DNA, 25 bp, Homo sapien
caacatgttgaggttacttttccca

SEQ ID NO: 4233482 - DNA, 25 bp, Homo sapien
aacagttcccttataggcattagag

SEQ ID NO: 4233483 - DNA, 25 bp, Homo sapien
tgtggccatactactaattaacctg

SEQ ID NO: 4233484 - DNA, 25 bp, Homo sapien
tttatttgaagttctgtcttgggca

SEQ ID NO: 4233485 - DNA, 25 bp, Homo sapien
gactgtaaacacagcttggcattat

SEQ ID NO: 4233486 - DNA, 25 bp, Homo sapien
ggcaagagataccacacagggagag

SEQ ID NO: 4233487 - DNA, 25 bp, Homo sapien
gtcttgggcaagagataccacacag

SEQ ID NO: 4233488 - DNA, 25 bp, Homo sapien
gaattctcattgctaaactgtagtc

SEQ ID NO: 4233489 - DNA, 25 bp, Homo sapien
tgattccatctccagcattcgcata

SEQ ID NO: 4233490 - DNA, 25 bp, Homo sapien
tctcattgctaaactgtagtctgca

SEQ ID NO: 4233491 - DNA, 25 bp, Homo sapien
cagcattcgcatagcaacactaagc

SEQ ID NO: 4233492 - DNA, 25 bp, Homo sapien
gggcagatggggccacaaatacttg

SEQ ID NO: 4233493 - DNA, 25 bp, Homo sapien
tagattctcagtggagtgggcagat

SEQ ID NO: 4233494 - DNA, 25 bp, Homo sapien
cagatggggccacaaatacttgaca

SEQ ID NO: 4233495 - DNA, 25 bp, Homo sapien
ttagattctcagtggagtgggcaga

SEQ ID NO: 4233496 - DNA, 25 bp, Homo sapien
ttcccattaagcacattcttcgata

SEQ ID NO: 4233497 - DNA, 25 bp, Homo sapien
cacattcttcgatatattctgcaaa

SEQ ID NO: 4233498 - DNA, 25 bp, Homo sapien
tgaactgaagctctatatgccaatt

SEQ ID NO: 4233499 - DNA, 25 bp, Homo sapien
tatgccaattgtatgatatatcagc

SEQ ID NO: 4233500 - DNA, 25 bp, Homo sapien
tgcttgttttgaggcaggaccaaag

SEQ ID NO: 4233501 - DNA, 25 bp, Homo sapien
agcagtgcttgttttgaggcaggac

SEQ ID NO: 4233502 - DNA, 25 bp, Homo sapien
cctcttttgcaagcagtgcttgttt

SEQ ID NO: 4233503 - DNA, 25 bp, Homo sapien
tgttttgaggcaggaccaaagctgt

SEQ ID NO: 4233504 - DNA, 25 bp, Homo sapien
gactatggcttggataccaaaacac

SEQ ID NO: 4233505 - DNA, 25 bp, Homo sapien
tatggcttggataccaaaacactgc

SEQ ID NO: 4233506 - DNA, 25 bp, Homo sapien
agtgactatggcttggataccaaaa

SEQ ID NO: 4233507 - DNA, 25 bp, Homo sapien
gagtgactatggcttggataccaaa

SEQ ID NO: 4233508 - DNA, 25 bp, Homo sapien
tctttcagggccacggttctcgttg

SEQ ID NO: 4233509 - DNA, 25 bp, Homo sapien
gcagtattctgcgaagctccagcat

SEQ ID NO: 4233510 - DNA, 25 bp, Homo sapien
tgagaccttatctctctcttggact

SEQ ID NO: 4233511 - DNA, 25 bp, Homo sapien
taaattgattaatgtggcatctggc

SEQ ID NO: 4233512 - DNA, 25 bp, Homo sapien
gatgcaggtaaaacaatccacgtgg

SEQ ID NO: 4233513 - DNA, 25 bp, Homo sapien
gccctcggagcttgttgttgcagat

SEQ ID NO: 4233514 - DNA, 25 bp, Homo sapien
tgatccatggcagtgcatcctgtac

SEQ ID NO: 4233515 - DNA, 25 bp, Homo sapien
gttttctccacagcgagcacagcgg

SEQ ID NO: 4233516 - DNA, 25 bp, Homo sapien
aagtgcttgaggaacaaatctggaa

SEQ ID NO: 4233517 - DNA, 25 bp, Homo sapien
agtgcttgaggaacaaatctggaac

SEQ ID NO: 4233518 - DNA, 25 bp, Homo sapien
aaagtgcttgaggaacaaatctgga

SEQ ID NO: 4233519 - DNA, 25 bp, Homo sapien
taagaggtgtgactcagctacttgg

SEQ ID NO: 4233520 - DNA, 25 bp, Homo sapien
cagcagaccactaactgaatggcag

SEQ ID NO: 4233521 - DNA, 25 bp, Homo sapien
tcaaagggcccagtattctggaaga

SEQ ID NO: 4233522 - DNA, 25 bp, Homo sapien
tactgggcacttcaaatgtagggtg

SEQ ID NO: 4233523 - DNA, 25 bp, Homo sapien
tataataaacagttcccctgtttgc

SEQ ID NO: 4233524 - DNA, 25 bp, Homo sapien
taaggtgctttataataaacagttc

SEQ ID NO: 4233525 - DNA, 25 bp, Homo sapien
tgctttataataaacagttcccctg

SEQ ID NO: 4233526 - DNA, 25 bp, Homo sapien
aacagttcccctgtttgcatcatta

SEQ ID NO: 4233527 - DNA, 25 bp, Homo sapien
aatgattagctcagtcagcattact

SEQ ID NO: 4233528 - DNA, 25 bp, Homo sapien
gattagctcagtcagcattactgtt

SEQ ID NO: 4233529 - DNA, 25 bp, Homo sapien
ttagctcagtcagcattactgttca

SEQ ID NO: 4233530 - DNA, 25 bp, Homo sapien
tgattagctcagtcagcattactgt

SEQ ID NO: 4233531 - DNA, 25 bp, Homo sapien
aaattggataacaggtacatggacc

SEQ ID NO: 4233532 - DNA, 25 bp, Homo sapien
catggacctttgtcattatgcttca

SEQ ID NO: 4233533 - DNA, 25 bp, Homo sapien
catgatcatggaatagaacccaagg

SEQ ID NO: 4233534 - DNA, 25 bp, Homo sapien
tacttagagcttattttgcattgcc

SEQ ID NO: 4233535 - DNA, 25 bp, Homo sapien
tataatgatgatgtcagccttggct

SEQ ID NO: 4233536 - DNA, 25 bp, Homo sapien
ccttgtccttgtgaagtattcaaaa

SEQ ID NO: 4233537 - DNA, 25 bp, Homo sapien
ttcaaaaaaagcacctgtcttgcta

SEQ ID NO: 4233538 - DNA, 25 bp, Homo sapien
gtcagccttggctggcatcccctta

SEQ ID NO: 4233539 - DNA, 25 bp, Homo sapien
gaggagttaattccagaagagactt

SEQ ID NO: 4233540 - DNA, 25 bp, Homo sapien
gggtttatcgatctgtgcatgagga

SEQ ID NO: 4233541 - DNA, 25 bp, Homo sapien
taattacattggcaagttggtgggg

SEQ ID NO: 4233542 - DNA, 25 bp, Homo sapien
ttggtggggtttatcgatctgtgca

SEQ ID NO: 4233543 - DNA, 25 bp, Homo sapien
gccagtaaaatttcagcaaccagga

SEQ ID NO: 4233544 - DNA, 25 bp, Homo sapien
gaaatgctgcaagactgaaccaaaa

SEQ ID NO: 4233545 - DNA, 25 bp, Homo sapien
tctacagcagggttggattaattac

SEQ ID NO: 4233546 - DNA, 25 bp, Homo sapien
taacaattcactctgtacactggca

SEQ ID NO: 4233547 - DNA, 25 bp, Homo sapien
tatttggtggataaactagagctgt

SEQ ID NO: 4233548 - DNA, 25 bp, Homo sapien
gatcccattgactagtttaaattca

SEQ ID NO: 4233549 - DNA, 25 bp, Homo sapien
tatctcctcagggtaaatagaactt

SEQ ID NO: 4233550 - DNA, 25 bp, Homo sapien
aatagaactttgttgcagggttcct

SEQ ID NO: 4233551 - DNA, 25 bp, Homo sapien
caccagatttgtgctctaagtacaa

SEQ ID NO: 4233552 - DNA, 25 bp, Homo sapien
tgcctaatagctgaaagtgtctcct

SEQ ID NO: 4233553 - DNA, 25 bp, Homo sapien
tctgaatccggtagtgccttttggc

SEQ ID NO: 4233554 - DNA, 25 bp, Homo sapien
gaaagtgtgatccattgcctaatag

SEQ ID NO: 4233555 - DNA, 25 bp, Homo sapien
cctcacagtgtgaaaacggattaat

SEQ ID NO: 4233556 - DNA, 25 bp, Homo sapien
gaggcagggggtgatagttttataa

SEQ ID NO: 4233557 - DNA, 25 bp, Homo sapien
atacaaacttcatgttggaaagacc

SEQ ID NO: 4233558 - DNA, 25 bp, Homo sapien
tttataattgcccagtatcaggtat

SEQ ID NO: 4233559 - DNA, 25 bp, Homo sapien
acaagagcagccacagaaactgaga

SEQ ID NO: 4233560 - DNA, 25 bp, Homo sapien
gtcagcaggcacaagagcagccaca

SEQ ID NO: 4233561 - DNA, 25 bp, Homo sapien
aaggggccccaaagactgatgatgc

SEQ ID NO: 4233562 - DNA, 25 bp, Homo sapien
cagaaactgagaaggggccccaaag

SEQ ID NO: 4233563 - DNA, 25 bp, Homo sapien
tgacagaacgaggtaagtgcttact

SEQ ID NO: 4233564 - DNA, 25 bp, Homo sapien
aattaaatgtacaggcttagtcagc

SEQ ID NO: 4233565 - DNA, 25 bp, Homo sapien
caaaagactcactatggatgaggta

SEQ ID NO: 4233566 - DNA, 25 bp, Homo sapien
tacatgcataatctggccacaccat

SEQ ID NO: 4233567 - DNA, 25 bp, Homo sapien
ttgcctgttgataggttcactcttt

SEQ ID NO: 4233568 - DNA, 25 bp, Homo sapien
taagtaagtgagctggtttccaact

SEQ ID NO: 4233569 - DNA, 25 bp, Homo sapien
ggaaagcaccacagacacataattc

SEQ ID NO: 4233570 - DNA, 25 bp, Homo sapien
gataggttcactctttttgtctaat

SEQ ID NO: 4233571 - DNA, 25 bp, Homo sapien
cactgcgctcagtctgtatgttaac

SEQ ID NO: 4233572 - DNA, 25 bp, Homo sapien
ctgcgctcagtctgtatgttaactt

SEQ ID NO: 4233573 - DNA, 25 bp, Homo sapien
ccactgcgctcagtctgtatgttaa

SEQ ID NO: 4233574 - DNA, 25 bp, Homo sapien
gccactgcgctcagtctgtatgtta

SEQ ID NO: 4233575 - DNA, 25 bp, Homo sapien
gagatacaatcttaagcccaggctt

SEQ ID NO: 4233576 - DNA, 25 bp, Homo sapien
tagatttgctcaagtgggtccccaa

SEQ ID NO: 4233577 - DNA, 25 bp, Homo sapien
tacggataagagcattcactgagtc

SEQ ID NO: 4233578 - DNA, 25 bp, Homo sapien
cagctcatgggcagggatatcttct

SEQ ID NO: 4233579 - DNA, 25 bp, Homo sapien
cttcctgtcaggtattatgttcaca

SEQ ID NO: 4233580 - DNA, 25 bp, Homo sapien
ttaagacctgactaatcaaatactg

SEQ ID NO: 4233581 - DNA, 25 bp, Homo sapien
atcaaatactgtcatacaggaagag

SEQ ID NO: 4233582 - DNA, 25 bp, Homo sapien
tggatgatgggatcgatagaagccc

SEQ ID NO: 4233583 - DNA, 25 bp, Homo sapien
gaactaaagtggtgcctaggacaca

SEQ ID NO: 4233584 - DNA, 25 bp, Homo sapien
cagtgaagaggacgatgagagattt

SEQ ID NO: 4233585 - DNA, 25 bp, Homo sapien
gcaggcacttggctcagaacacaca

SEQ ID NO: 4233586 - DNA, 25 bp, Homo sapien
catacaaaggtagacagagaggaag

SEQ ID NO: 4233587 - DNA, 25 bp, Homo sapien
gcagctggggttctaattccagctc

SEQ ID NO: 4233588 - DNA, 25 bp, Homo sapien
ctggggttctaattccagctcaggc

SEQ ID NO: 4233589 - DNA, 25 bp, Homo sapien
cactgcatgcagctggggttctaat

SEQ ID NO: 4233590 - DNA, 25 bp, Homo sapien
catgcagctggggttctaattccag

SEQ ID NO: 4233591 - DNA, 25 bp, Homo sapien
tgttttgtttggtgtgtatggaaat

SEQ ID NO: 4233592 - DNA, 25 bp, Homo sapien
cagagcttatttcatatctcttaca

SEQ ID NO: 4233593 - DNA, 25 bp, Homo sapien
catttatacatgatgatttagatga

SEQ ID NO: 4233594 - DNA, 25 bp, Homo sapien
tatacatgatgatttagatgattta

SEQ ID NO: 4233595 - DNA, 25 bp, Homo sapien
gggctcaggcatccataacttttaa

SEQ ID NO: 4233596 - DNA, 25 bp, Homo sapien
tgattgtgtcagaacctcctcatct

SEQ ID NO: 4233597 - DNA, 25 bp, Homo sapien
gagtatgtatctagacatgtccgct

SEQ ID NO: 4233598 - DNA, 25 bp, Homo sapien
caatagcacatcagactcactcagg

SEQ ID NO: 4233599 - DNA, 25 bp, Homo sapien
gccctaaagagcactgaaaacattg

SEQ ID NO: 4233600 - DNA, 25 bp, Homo sapien
tgcccaaggtctagtttatccaggt

SEQ ID NO: 4233601 - DNA, 25 bp, Homo sapien
ggaataaagggataccttccatcat

SEQ ID NO: 4233602 - DNA, 25 bp, Homo sapien
gtggcgcccagaactgaactcagca

SEQ ID NO: 4233603 - DNA, 25 bp, Homo sapien
tataaactcttcgaagactaggatt

SEQ ID NO: 4233604 - DNA, 25 bp, Homo sapien
taaattgatgtttctagcactgaca

SEQ ID NO: 4233605 - DNA, 25 bp, Homo sapien
gctacagtaattgacacatagacaa

SEQ ID NO: 4233606 - DNA, 25 bp, Homo sapien
caagatgctatcaaatttctgaccc

SEQ ID NO: 4233607 - DNA, 25 bp, Homo sapien
gcttaagacataacaggcaatcagt

SEQ ID NO: 4233608 - DNA, 25 bp, Homo sapien
cattactatcctcagatggcctgca

SEQ ID NO: 4233609 - DNA, 25 bp, Homo sapien
gttcaagacactactgcatttgcag

SEQ ID NO: 4233610 - DNA, 25 bp, Homo sapien
caaaagcttcaatagggcatggttc

SEQ ID NO: 4233611 - DNA, 25 bp, Homo sapien
ggcattcatttgctagaaacctgga

SEQ ID NO: 4233612 - DNA, 25 bp, Homo sapien
gatgcacgcttcatacaaatattgg

SEQ ID NO: 4233613 - DNA, 25 bp, Homo sapien
ggattcatctgaacccatgacatga

SEQ ID NO: 4233614 - DNA, 25 bp, Homo sapien
gagggatgtctctaaatatgcctat

SEQ ID NO: 4233615 - DNA, 25 bp, Homo sapien
gacagcctgcgccttttactgcaat

SEQ ID NO: 4233616 - DNA, 25 bp, Homo sapien
ggcctaccagtagccttcgagaaag

SEQ ID NO: 4233617 - DNA, 25 bp, Homo sapien
gacatgttatccttcgacagcctgc

SEQ ID NO: 4233618 - DNA, 25 bp, Homo sapien
ccaagaatgaagttgactggcatcc

SEQ ID NO: 4233619 - DNA, 25 bp, Homo sapien
gcctagatgtatcgcaatttgccat

SEQ ID NO: 4233620 - DNA, 25 bp, Homo sapien
tacaggctagaaggccattccccag

SEQ ID NO: 4233621 - DNA, 25 bp, Homo sapien
tttgacctttcagggtacaggctag

SEQ ID NO: 4233622 - DNA, 25 bp, Homo sapien
cctcaatggtcccacttggaatgaa

SEQ ID NO: 4233623 - DNA, 25 bp, Homo sapien
tacaagtacctttctggataataaa

SEQ ID NO: 4233624 - DNA, 25 bp, Homo sapien
taaaatcttaatggcttcacaatgt

SEQ ID NO: 4233625 - DNA, 25 bp, Homo sapien
gtgatcaaatacaagtacctttctg

SEQ ID NO: 4233626 - DNA, 25 bp, Homo sapien
tccccttgcccctgtctccaatgac

SEQ ID NO: 4233627 - DNA, 25 bp, Homo sapien
tagcaccccttaaaagagacaccag

SEQ ID NO: 4233628 - DNA, 25 bp, Homo sapien
caatcaggaataaacccgggatgtg

SEQ ID NO: 4233629 - DNA, 25 bp, Homo sapien
caagaagtgtctgtacgtaggtaac

SEQ ID NO: 4233630 - DNA, 25 bp, Homo sapien
caccagttagtgagtcaggtctcag

SEQ ID NO: 4233631 - DNA, 25 bp, Homo sapien
tcatttaaagctttgatttacacac

SEQ ID NO: 4233632 - DNA, 25 bp, Homo sapien
tctggttcaccgattgaggaatgct

SEQ ID NO: 4233633 - DNA, 25 bp, Homo sapien
catatgggcatgcttgtgttccagt

SEQ ID NO: 4233634 - DNA, 25 bp, Homo sapien
tgtgaccacttagaccatagtgcga

SEQ ID NO: 4233635 - DNA, 25 bp, Homo sapien
tcagatgactgagacagagcatgct

SEQ ID NO: 4233636 - DNA, 25 bp, Homo sapien
caaagaagtgtgttatagagagaag

SEQ ID NO: 4233637 - DNA, 25 bp, Homo sapien
caagtggcttttctagtattactca

SEQ ID NO: 4233638 - DNA, 25 bp, Homo sapien
aacacaattagatgggtcaagtggc

SEQ ID NO: 4233639 - DNA, 25 bp, Homo sapien
actcaggtagtaggtggcaagtcca

SEQ ID NO: 4233640 - DNA, 25 bp, Homo sapien
taaggaaggcatttatcaccattta

SEQ ID NO: 4233641 - DNA, 25 bp, Homo sapien
gtctcaggtccttatcacaccactc

SEQ ID NO: 4233642 - DNA, 25 bp, Homo sapien
atcacaccactctaaggaaggcatt

SEQ ID NO: 4233643 - DNA, 25 bp, Homo sapien
cacaccactctaaggaaggcattta

SEQ ID NO: 4233644 - DNA, 25 bp, Homo sapien
ggaaacagaaaccacgtcagactgg

SEQ ID NO: 4233645 - DNA, 25 bp, Homo sapien
gatgggcttggaacacacattgcac

SEQ ID NO: 4233646 - DNA, 25 bp, Homo sapien
ggtggctcggagaatccgctccatg

SEQ ID NO: 4233647 - DNA, 25 bp, Homo sapien
tgcggtggcacatcacgcaggtgaa

SEQ ID NO: 4233648 - DNA, 25 bp, Homo sapien
gatgataggccttcccggtggctcg

SEQ ID NO: 4233649 - DNA, 25 bp, Homo sapien
tgagccagctttttcgtcattagaa

SEQ ID NO: 4233650 - DNA, 25 bp, Homo sapien
gctggatgactgcatggattgtctg

SEQ ID NO: 4233651 - DNA, 25 bp, Homo sapien
tacccagagatgcaatggacaagct

SEQ ID NO: 4233652 - DNA, 25 bp, Homo sapien
agaatgtatgcccagatgccaagca

SEQ ID NO: 4233653 - DNA, 25 bp, Homo sapien
gaccaaactgaagagctcaaataag

SEQ ID NO: 4233654 - DNA, 25 bp, Homo sapien
tgagaaaactctgggtcatcacagc

SEQ ID NO: 4233655 - DNA, 25 bp, Homo sapien
taactccctatcagtagagtggcag

SEQ ID NO: 4233656 - DNA, 25 bp, Homo sapien
tagagagggtttgatctaaagacca

SEQ ID NO: 4233657 - DNA, 25 bp, Homo sapien
tattttgggcccatgaataactggc

SEQ ID NO: 4233658 - DNA, 25 bp, Homo sapien
gaaaaggctagggaatggcatcaat

SEQ ID NO: 4233659 - DNA, 25 bp, Homo sapien
gacaatggcatgaaactgcctttga

SEQ ID NO: 4233660 - DNA, 25 bp, Homo sapien
tggcatcaatatgttgacaatggca

SEQ ID NO: 4233661 - DNA, 25 bp, Homo sapien
gagtctcagatctccaaactccttg

SEQ ID NO: 4233662 - DNA, 25 bp, Homo sapien
tgcttcctggctgttgacaatcaac

SEQ ID NO: 4233663 - DNA, 25 bp, Homo sapien
ggtgagaattaacccagaagacttc

SEQ ID NO: 4233664 - DNA, 25 bp, Homo sapien
catacagaaacctgagtccaccatt

SEQ ID NO: 4233665 - DNA, 25 bp, Homo sapien
caagccctgttaagtgctgtacaca

SEQ ID NO: 4233666 - DNA, 25 bp, Homo sapien
cttgtattccggcacatttctggca

SEQ ID NO: 4233667 - DNA, 25 bp, Homo sapien
taagcaacgacttccagtacagacc

SEQ ID NO: 4233668 - DNA, 25 bp, Homo sapien
tactttacagccaacagagcgaagg

SEQ ID NO: 4233669 - DNA, 25 bp, Homo sapien
ctcgcatcggtagcagtgaacatgg

SEQ ID NO: 4233670 - DNA, 25 bp, Homo sapien
gggctggcataataggctccttgca

SEQ ID NO: 4233671 - DNA, 25 bp, Homo sapien
aaagccacaatacggacagtctcct

SEQ ID NO: 4233672 - DNA, 25 bp, Homo sapien
tgaacatggaaatctcgatccaaag

SEQ ID NO: 4233673 - DNA, 25 bp, Homo sapien
ggtcttgcagaggatgtgcccatcc

SEQ ID NO: 4233674 - DNA, 25 bp, Homo sapien
caccctgatgcgggcagagttgcag

SEQ ID NO: 4233675 - DNA, 25 bp, Homo sapien
ccttcagacaggagaccaccgcaat

SEQ ID NO: 4233676 - DNA, 25 bp, Homo sapien
aaggtcagtgctcgccttggcggtc

SEQ ID NO: 4233677 - DNA, 25 bp, Homo sapien
aaattgtgcatttccctccccaagg

SEQ ID NO: 4233678 - DNA, 25 bp, Homo sapien
tctcagtgccggctgaacaggtgac

SEQ ID NO: 4233679 - DNA, 25 bp, Homo sapien
tccccaaggacgtgagtagtataaa

SEQ ID NO: 4233680 - DNA, 25 bp, Homo sapien
ggcaacttgccatgactaagctagg

SEQ ID NO: 4233681 - DNA, 25 bp, Homo sapien
tattttgatatgttctgcagagccc

SEQ ID NO: 4233682 - DNA, 25 bp, Homo sapien
tatagctctaggcaacagatggaca

SEQ ID NO: 4233683 - DNA, 25 bp, Homo sapien
taacaacctgatgccttatgctggg

SEQ ID NO: 4233684 - DNA, 25 bp, Homo sapien
gattgtctcccacgagagtgcacca

SEQ ID NO: 4233685 - DNA, 25 bp, Homo sapien
taaatgcccaccagagttaaatgaa

SEQ ID NO: 4233686 - DNA, 25 bp, Homo sapien
gaacattccattcgtagggtagaga

SEQ ID NO: 4233687 - DNA, 25 bp, Homo sapien
caagttgactgaatgcgattgtggc

SEQ ID NO: 4233688 - DNA, 25 bp, Homo sapien
aaatgaataaggatttctctggccc

SEQ ID NO: 4233689 - DNA, 25 bp, Homo sapien
gaaagcctttcaacctagcctgact

SEQ ID NO: 4233690 - DNA, 25 bp, Homo sapien
tctctgagtatagcccatgtttccc

SEQ ID NO: 4233691 - DNA, 25 bp, Homo sapien
cctgactcatggtgaactgccaagt

SEQ ID NO: 4233692 - DNA, 25 bp, Homo sapien
gaatatgaactgacccagaagtggg

SEQ ID NO: 4233693 - DNA, 25 bp, Homo sapien
caaattctaatgtctggccctcaga

SEQ ID NO: 4233694 - DNA, 25 bp, Homo sapien
gctacacaacaactgtcagaacggt

SEQ ID NO: 4233695 - DNA, 25 bp, Homo sapien
catgtactacaggttttgtgtggca

SEQ ID NO: 4233696 - DNA, 25 bp, Homo sapien
tactgttcatgggttagttactggg

SEQ ID NO: 4233697 - DNA, 25 bp, Homo sapien
tgcctctgtggaacgtacatcgtgg

SEQ ID NO: 4233698 - DNA, 25 bp, Homo sapien
tacagctcagaaagttacctccagg

SEQ ID NO: 4233699 - DNA, 25 bp, Homo sapien
ggtactaataactgtcctccctgcg

SEQ ID NO: 4233700 - DNA, 25 bp, Homo sapien
gacagcactggacttgcaagacctg

SEQ ID NO: 4233701 - DNA, 25 bp, Homo sapien
tatgctagaaggatggcatggtccc

SEQ ID NO: 4233702 - DNA, 25 bp, Homo sapien
ctacagagggaggaccaaggcactt

SEQ ID NO: 4233703 - DNA, 25 bp, Homo sapien
tatgcctcgggataaagcacagcag

SEQ ID NO: 4233704 - DNA, 25 bp, Homo sapien
gagcaacttctagagcatacatgga

SEQ ID NO: 4233705 - DNA, 25 bp, Homo sapien
gagtcagtctcgcaaagaggccgga

SEQ ID NO: 4233706 - DNA, 25 bp, Homo sapien
tttagcatagagaaaacccggcttc

SEQ ID NO: 4233707 - DNA, 25 bp, Homo sapien
gaaggctgcacagtacgactctggg

SEQ ID NO: 4233708 - DNA, 25 bp, Homo sapien
taaaagcctgtgtgcgtggctcagg

SEQ ID NO: 4233709 - DNA, 25 bp, Homo sapien
cttccagacgcacgtttaaacagta

SEQ ID NO: 4233710 - DNA, 25 bp, Homo sapien
cagacgcacgtttaaacagtatcct

SEQ ID NO: 4233711 - DNA, 25 bp, Homo sapien
ccagacgcacgtttaaacagtatcc

SEQ ID NO: 4233712 - DNA, 25 bp, Homo sapien
tccagacgcacgtttaaacagtatc

SEQ ID NO: 4233713 - DNA, 25 bp, Homo sapien
tcaagaggtcttgatttaagattcc

SEQ ID NO: 4233714 - DNA, 25 bp, Homo sapien
tctctttcttgttaccgcaatggtc

SEQ ID NO: 4233715 - DNA, 25 bp, Homo sapien
aggtcttgatttaagattcccctct

SEQ ID NO: 4233716 - DNA, 25 bp, Homo sapien
ggagtcaagaggtcttgatttaaga

SEQ ID NO: 4233717 - DNA, 25 bp, Homo sapien
tgtaatcaaagacaccctgtgtggg

SEQ ID NO: 4233718 - DNA, 25 bp, Homo sapien
tcaaagacaccctgtgtggggatca

SEQ ID NO: 4233719 - DNA, 25 bp, Homo sapien
taatcaaagacaccctgtgtgggga

SEQ ID NO: 4233720 - DNA, 25 bp, Homo sapien
ctgtaatcaaagacaccctgtgtgg

SEQ ID NO: 4233721 - DNA, 25 bp, Homo sapien
tagttccacattcactgtgaaaaag

SEQ ID NO: 4233722 - DNA, 25 bp, Homo sapien
tctcgtatgcccaattttcagaaga

SEQ ID NO: 4233723 - DNA, 25 bp, Homo sapien
gaagaggtagcaaaacgagtaatga

SEQ ID NO: 4233724 - DNA, 25 bp, Homo sapien
cgagtaatgaattgccacacagtca

SEQ ID NO: 4233725 - DNA, 25 bp, Homo sapien
tggctgccgccatgagtgttaattg

SEQ ID NO: 4233726 - DNA, 25 bp, Homo sapien
tctgctgcttgagcagttggctgcc

SEQ ID NO: 4233727 - DNA, 25 bp, Homo sapien
ttaattggagagacatctgaagtga

SEQ ID NO: 4233728 - DNA, 25 bp, Homo sapien
ttacgccgccgccatgatagacaca

SEQ ID NO: 4233729 - DNA, 25 bp, Homo sapien
tgggaacgcctgtaataggctctga

SEQ ID NO: 4233730 - DNA, 25 bp, Homo sapien
tgcaagggctcttacagggaactgt

SEQ ID NO: 4233731 - DNA, 25 bp, Homo sapien
ctcatctgagggcagcgtggatccc

SEQ ID NO: 4233732 - DNA, 25 bp, Homo sapien
gaaattgacgggcttgaccttctca

SEQ ID NO: 4233733 - DNA, 25 bp, Homo sapien
ttccttgcctcttacagtatctggg

SEQ ID NO: 4233734 - DNA, 25 bp, Homo sapien
ggcacaaagcctctagtaagagccc

SEQ ID NO: 4233735 - DNA, 25 bp, Homo sapien
tatctgggttgcataaacaaaggca

SEQ ID NO: 4233736 - DNA, 25 bp, Homo sapien
tcacaaatcaatccggttatgttcc

SEQ ID NO: 4233737 - DNA, 25 bp, Homo sapien
ataagcttcagacccttgccattcc

SEQ ID NO: 4233738 - DNA, 25 bp, Homo sapien
tgtcttccaataagcttcagaccct

SEQ ID NO: 4233739 - DNA, 25 bp, Homo sapien
tccaataagcttcagacccttgcca

SEQ ID NO: 4233740 - DNA, 25 bp, Homo sapien
tcttccaataagcttcagacccttg

SEQ ID NO: 4233741 - DNA, 25 bp, Homo sapien
tcgtctggctccagaccgcttgttc

SEQ ID NO: 4233742 - DNA, 25 bp, Homo sapien
gtctggctccagaccgcttgttcat

SEQ ID NO: 4233743 - DNA, 25 bp, Homo sapien
aagggtcctccgcactcgtctggct

SEQ ID NO: 4233744 - DNA, 25 bp, Homo sapien
atctgtttctcaagggtcctccgca

SEQ ID NO: 4233745 - DNA, 25 bp, Homo sapien
aagtgttgaagagccaccagcgaga

SEQ ID NO: 4233746 - DNA, 25 bp, Homo sapien
tgggctggaagtaagagagctttat

SEQ ID NO: 4233747 - DNA, 25 bp, Homo sapien
tatagacatctggtgttggaagtgt

SEQ ID NO: 4233748 - DNA, 25 bp, Homo sapien
caaaagtcagaagactttgggctgg

SEQ ID NO: 4233749 - DNA, 25 bp, Homo sapien
tgctttggacttaactctgcctgtg

SEQ ID NO: 4233750 - DNA, 25 bp, Homo sapien
taaagaggcagcatccagtaacatg

SEQ ID NO: 4233751 - DNA, 25 bp, Homo sapien
caccagggcagatggataaagaggc

SEQ ID NO: 4233752 - DNA, 25 bp, Homo sapien
ggctattcctgtaacctcaagatct

SEQ ID NO: 4233753 - DNA, 25 bp, Homo sapien
tcctgaggatctccactctgaccat

SEQ ID NO: 4233754 - DNA, 25 bp, Homo sapien
cagacacctggagtgtcctgaggat

SEQ ID NO: 4233755 - DNA, 25 bp, Homo sapien
ctgaccattggccttttctgcctgt

SEQ ID NO: 4233756 - DNA, 25 bp, Homo sapien
tccctcagacacctggagtgtcctg

SEQ ID NO: 4233757 - DNA, 25 bp, Homo sapien
taacgccgttaatttccaggcatgg

SEQ ID NO: 4233758 - DNA, 25 bp, Homo sapien
tccttagaaaactcccgtggatgag

SEQ ID NO: 4233759 - DNA, 25 bp, Homo sapien
tgcaatagctgaggtaaacttctgg

SEQ ID NO: 4233760 - DNA, 25 bp, Homo sapien
cacgtggtgcgtcggtgcaatagct

SEQ ID NO: 4233761 - DNA, 25 bp, Homo sapien
tggcggattccggaattggttcaaa

SEQ ID NO: 4233762 - DNA, 25 bp, Homo sapien
ttcaaaaggccttgatcccgaacac

SEQ ID NO: 4233763 - DNA, 25 bp, Homo sapien
tatttaaaagccctctgtcacgcac

SEQ ID NO: 4233764 - DNA, 25 bp, Homo sapien
cacttactgacgaatcctctggctc

SEQ ID NO: 4233765 - DNA, 25 bp, Homo sapien
ttatagacgtgaatggaaagcggcc

SEQ ID NO: 4233766 - DNA, 25 bp, Homo sapien
aagcttagaagcaggtgctaccgtg

SEQ ID NO: 4233767 - DNA, 25 bp, Homo sapien
gaaagcggccgcttctgaatgatcg

SEQ ID NO: 4233768 - DNA, 25 bp, Homo sapien
gcagcctgcgcgctaattatagacg

SEQ ID NO: 4233769 - DNA, 25 bp, Homo sapien
ggttaatgacccagttagcagctct

SEQ ID NO: 4233770 - DNA, 25 bp, Homo sapien
gcgtctctgccaagtacattctgtt

SEQ ID NO: 4233771 - DNA, 25 bp, Homo sapien
ctgcgtttccgacattttgcagaca

SEQ ID NO: 4233772 - DNA, 25 bp, Homo sapien
cagctcttggctgcgtttccgacat

SEQ ID NO: 4233773 - DNA, 25 bp, Homo sapien
tctgtaccggtcactttctctctct

SEQ ID NO: 4233774 - DNA, 25 bp, Homo sapien
cctccaacaaggaagggagtctcat

SEQ ID NO: 4233775 - DNA, 25 bp, Homo sapien
ttgaggaactgcacaacctcttctg

SEQ ID NO: 4233776 - DNA, 25 bp, Homo sapien
tcttctggtttctgtaccggtcact

SEQ ID NO: 4233777 - DNA, 25 bp, Homo sapien
tagccatcagtattgagatcaacag

SEQ ID NO: 4233778 - DNA, 25 bp, Homo sapien
tctctatggcataagagggatctag

SEQ ID NO: 4233779 - DNA, 25 bp, Homo sapien
gatcaacagcagagtttgtatccac

SEQ ID NO: 4233780 - DNA, 25 bp, Homo sapien
tagcaagcacaaaaatggcataacc

SEQ ID NO: 4233781 - DNA, 25 bp, Homo sapien
taaacagaccagactcattcgcatc

SEQ ID NO: 4233782 - DNA, 25 bp, Homo sapien
tgattgctggcgagtgatctcctca

SEQ ID NO: 4233783 - DNA, 25 bp, Homo sapien
gagccctccacagaatagccttatt

SEQ ID NO: 4233784 - DNA, 25 bp, Homo sapien
gaaacacactgtgggtcgtgccatg

SEQ ID NO: 4233785 - DNA, 25 bp, Homo sapien
gaggatgttggctcctgctccattc

SEQ ID NO: 4233786 - DNA, 25 bp, Homo sapien
atcctttcagagttccagttggccc

SEQ ID NO: 4233787 - DNA, 25 bp, Homo sapien
tcctttcagagttccagttggcccc

SEQ ID NO: 4233788 - DNA, 25 bp, Homo sapien
atggctgaggatgttggctcctgct

SEQ ID NO: 4233789 - DNA, 25 bp, Homo sapien
ccaataggagagtatgcagtctttc

SEQ ID NO: 4233790 - DNA, 25 bp, Homo sapien
caataggagagtatgcagtctttct

SEQ ID NO: 4233791 - DNA, 25 bp, Homo sapien
tttccaataggagagtatgcagtct

SEQ ID NO: 4233792 - DNA, 25 bp, Homo sapien
taggagagtatgcagtctttctcag

SEQ ID NO: 4233793 - DNA, 25 bp, Homo sapien
aaactggagccccagtaactgcgtt

SEQ ID NO: 4233794 - DNA, 25 bp, Homo sapien
ccacctacagatgctacaagaagtt

SEQ ID NO: 4233795 - DNA, 25 bp, Homo sapien
tccagggccccagtgtttgcttctc

SEQ ID NO: 4233796 - DNA, 25 bp, Homo sapien
actgcgttcacagccctctcggtgg

SEQ ID NO: 4233797 - DNA, 25 bp, Homo sapien
ttttgcaggcgccaacgctgccatc

SEQ ID NO: 4233798 - DNA, 25 bp, Homo sapien
gctgccatctcggtattgttgttgc

SEQ ID NO: 4233799 - DNA, 25 bp, Homo sapien
tttccctccaggtgcccaataactg

SEQ ID NO: 4233800 - DNA, 25 bp, Homo sapien
ttccctccaggtgcccaataactga

SEQ ID NO: 4233801 - DNA, 25 bp, Homo sapien
aaatggctgtcgcttctattatctg

SEQ ID NO: 4233802 - DNA, 25 bp, Homo sapien
tgtaaaacagtttttaggcagcctc

SEQ ID NO: 4233803 - DNA, 25 bp, Homo sapien
tttaggcagcctcattacacccttc

SEQ ID NO: 4233804 - DNA, 25 bp, Homo sapien
gctgtcgcttctattatctgtctgg

SEQ ID NO: 4233805 - DNA, 25 bp, Homo sapien
cacagtagcgcttgcctatagtccc

SEQ ID NO: 4233806 - DNA, 25 bp, Homo sapien
ctgagcacagtagcgcttgcctata

SEQ ID NO: 4233807 - DNA, 25 bp, Homo sapien
agcacagtagcgcttgcctatagtc

SEQ ID NO: 4233808 - DNA, 25 bp, Homo sapien
tgagcacagtagcgcttgcctatag

SEQ ID NO: 4233809 - DNA, 25 bp, Homo sapien
caggtttgcgaagggttctgctcca

SEQ ID NO: 4233810 - DNA, 25 bp, Homo sapien
tggtgccttataactcccctcttgc

SEQ ID NO: 4233811 - DNA, 25 bp, Homo sapien
cagtcattcagggttctgtggtgcc

SEQ ID NO: 4233812 - DNA, 25 bp, Homo sapien
gccttcagagtcctctacattcagc

SEQ ID NO: 4233813 - DNA, 25 bp, Homo sapien
gagagccactctttcagagcagaag

SEQ ID NO: 4233814 - DNA, 25 bp, Homo sapien
cagggcctgagttcaagtttagatt

SEQ ID NO: 4233815 - DNA, 25 bp, Homo sapien
tcagagtgtatctgcctgccagagg

SEQ ID NO: 4233816 - DNA, 25 bp, Homo sapien
tagaactccattatagttgtcagag

SEQ ID NO: 4233817 - DNA, 25 bp, Homo sapien
tgcgcgcaccatgcgcgagccaaag

SEQ ID NO: 4233818 - DNA, 25 bp, Homo sapien
aggtattgcctcactcgggaagtgc

SEQ ID NO: 4233819 - DNA, 25 bp, Homo sapien
cgaggtattgcctcactcgggaagt

SEQ ID NO: 4233820 - DNA, 25 bp, Homo sapien
gggtgcgcgcaccatgcgcgagcca

SEQ ID NO: 4233821 - DNA, 25 bp, Homo sapien
cagttctgtacacccctaggatgga

SEQ ID NO: 4233822 - DNA, 25 bp, Homo sapien
ggtgaaacctccaggtactgcaaaa

SEQ ID NO: 4233823 - DNA, 25 bp, Homo sapien
tctatggtctggagaagaaccccgc

SEQ ID NO: 4233824 - DNA, 25 bp, Homo sapien
ctcatgcaggtgtattcaggccagc

SEQ ID NO: 4233825 - DNA, 25 bp, Homo sapien
cattctgaatactggtggggtattt

SEQ ID NO: 4233826 - DNA, 25 bp, Homo sapien
gctgcatcttttagaagcaaaggat

SEQ ID NO: 4233827 - DNA, 25 bp, Homo sapien
aacagctgcatcttttagaagcaaa

SEQ ID NO: 4233828 - DNA, 25 bp, Homo sapien
tattgattgcttgtaggcattctga

SEQ ID NO: 4233829 - DNA, 25 bp, Homo sapien
gacaaatgaccatgctaactactat

SEQ ID NO: 4233830 - DNA, 25 bp, Homo sapien
ttagcacacgcaattaaaaacctga

SEQ ID NO: 4233831 - DNA, 25 bp, Homo sapien
tgctcctttatttcgagacacttgg

SEQ ID NO: 4233832 - DNA, 25 bp, Homo sapien
tacccctactacatcacagcaatga

SEQ ID NO: 4233833 - DNA, 25 bp, Homo sapien
aatggcattgtgctcccactgagag

SEQ ID NO: 4233834 - DNA, 25 bp, Homo sapien
gagatgccaagagccttagccacag

SEQ ID NO: 4233835 - DNA, 25 bp, Homo sapien
cagtgatgaaactaccagggaaaca

SEQ ID NO: 4233836 - DNA, 25 bp, Homo sapien
gaacagcagtactcttaatggtgga

SEQ ID NO: 4233837 - DNA, 25 bp, Homo sapien
gctcaagtgtaagatgtcacaaatc

SEQ ID NO: 4233838 - DNA, 25 bp, Homo sapien
tgtgagggactccattaacaggcat

SEQ ID NO: 4233839 - DNA, 25 bp, Homo sapien
ctgtctcggttgctcaagtgtaaga

SEQ ID NO: 4233840 - DNA, 25 bp, Homo sapien
tcttgacttggacttggcatccgtt

SEQ ID NO: 4233841 - DNA, 25 bp, Homo sapien
tgcaggggctttcctggaagcccat

SEQ ID NO: 4233842 - DNA, 25 bp, Homo sapien
agtgcaggggctttcctggaagccc

SEQ ID NO: 4233843 - DNA, 25 bp, Homo sapien
tttgggagtgcaggggctttcctgg

SEQ ID NO: 4233844 - DNA, 25 bp, Homo sapien
attttgggagtgcaggggctttcct

SEQ ID NO: 4233845 - DNA, 25 bp, Homo sapien
ctgtagcacgcagggtaaagccgtc

SEQ ID NO: 4233846 - DNA, 25 bp, Homo sapien
tctgggaccaagtcaacaagctggg

SEQ ID NO: 4233847 - DNA, 25 bp, Homo sapien
cactggttttccactgccggccatt

SEQ ID NO: 4233848 - DNA, 25 bp, Homo sapien
cattggacttggacagctttgttcc

SEQ ID NO: 4233849 - DNA, 25 bp, Homo sapien
tcaagcctgcttatcgggcctgaac

SEQ ID NO: 4233850 - DNA, 25 bp, Homo sapien
tctttcagtcctctcgtcttgattc

SEQ ID NO: 4233851 - DNA, 25 bp, Homo sapien
ctcgtcttgattcgtgaaagggaac

SEQ ID NO: 4233852 - DNA, 25 bp, Homo sapien
gaaagggaacgtagccaagcctcat

SEQ ID NO: 4233853 - DNA, 25 bp, Homo sapien
ctaaaactgtgagggttcgctggca

SEQ ID NO: 4233854 - DNA, 25 bp, Homo sapien
tcgctggcatgaacaggcaaacttc

SEQ ID NO: 4233855 - DNA, 25 bp, Homo sapien
gggagaccaagtttcaattagggca

SEQ ID NO: 4233856 - DNA, 25 bp, Homo sapien
tccaaatttagggtgagactttaca

SEQ ID NO: 4233857 - DNA, 25 bp, Homo sapien
tcatggagtgctctagatgccactg

SEQ ID NO: 4233858 - DNA, 25 bp, Homo sapien
aggcgctccggtggacagaccccat

SEQ ID NO: 4233859 - DNA, 25 bp, Homo sapien
gtctccaagacacttgacaacttgc

SEQ ID NO: 4233860 - DNA, 25 bp, Homo sapien
gctagcatagcctccactgtgtctg

SEQ ID NO: 4233861 - DNA, 25 bp, Homo sapien
ttcctttccagtatgccagactctt

SEQ ID NO: 4233862 - DNA, 25 bp, Homo sapien
ccagtatgccagactctttgtccag

SEQ ID NO: 4233863 - DNA, 25 bp, Homo sapien
tgtccagaatctacatcttggaact

SEQ ID NO: 4233864 - DNA, 25 bp, Homo sapien
gtatgccagactctttgtccagaat

SEQ ID NO: 4233865 - DNA, 25 bp, Homo sapien
actcagtcctaacctaacctcaagg

SEQ ID NO: 4233866 - DNA, 25 bp, Homo sapien
cacataaaactcagtcctaacctaa

SEQ ID NO: 4233867 - DNA, 25 bp, Homo sapien
aactcagtcctaacctaacctcaag

SEQ ID NO: 4233868 - DNA, 25 bp, Homo sapien
ccatcacataaaactcagtcctaac

SEQ ID NO: 4233869 - DNA, 25 bp, Homo sapien
gccatttaaaatccgagtctggtct

SEQ ID NO: 4233870 - DNA, 25 bp, Homo sapien
atgagcaatttcaggctgcctacca

SEQ ID NO: 4233871 - DNA, 25 bp, Homo sapien
aatgctgataagacaacatgttcct

SEQ ID NO: 4233872 - DNA, 25 bp, Homo sapien
gaagccatttaaaatccgagtctgg

SEQ ID NO: 4233873 - DNA, 25 bp, Homo sapien
agccttgatgggcctgccacggctg

SEQ ID NO: 4233874 - DNA, 25 bp, Homo sapien
aataggtgagttgccagccttgatg

SEQ ID NO: 4233875 - DNA, 25 bp, Homo sapien
gtaccacctctaattggcaaatagg

SEQ ID NO: 4233876 - DNA, 25 bp, Homo sapien
aatcatacagcagtaccacctctaa

SEQ ID NO: 4233877 - DNA, 25 bp, Homo sapien
gggtgtctttttgcacaggccatcc

SEQ ID NO: 4233878 - DNA, 25 bp, Homo sapien
tctacggagtgaagaggaacaggct

SEQ ID NO: 4233879 - DNA, 25 bp, Homo sapien
tgtgaatcaacagcatgaaatctct

SEQ ID NO: 4233880 - DNA, 25 bp, Homo sapien
tctgtaagggatgatccagactctg

SEQ ID NO: 4233881 - DNA, 25 bp, Homo sapien
gctctggtacaatgattccatgcaa

SEQ ID NO: 4233882 - DNA, 25 bp, Homo sapien
tacaatgattccatgcaagggccat

SEQ ID NO: 4233883 - DNA, 25 bp, Homo sapien
aggccgtctttgcacaatactgaca

SEQ ID NO: 4233884 - DNA, 25 bp, Homo sapien
tccaggccgtctttgcacaatactg

SEQ ID NO: 4233885 - DNA, 25 bp, Homo sapien
gaagggtcttaatgaggacaatctc

SEQ ID NO: 4233886 - DNA, 25 bp, Homo sapien
taggataaggataaaggtcagtgct

SEQ ID NO: 4233887 - DNA, 25 bp, Homo sapien
tcagaggtcccagatctgcctcatt

SEQ ID NO: 4233888 - DNA, 25 bp, Homo sapien
taaaggtcagtgctgaagggtctta

SEQ ID NO: 4233889 - DNA, 25 bp, Homo sapien
tggtgacttatcagaagggtcgcac

SEQ ID NO: 4233890 - DNA, 25 bp, Homo sapien
gactgctgctaagtacagaagccac

SEQ ID NO: 4233891 - DNA, 25 bp, Homo sapien
gaagccacgcttgtttttgcggtcg

SEQ ID NO: 4233892 - DNA, 25 bp, Homo sapien
gggtcgcacacatttgacaaacgga

SEQ ID NO: 4233893 - DNA, 25 bp, Homo sapien
tcaccacgaagatggaaggagcttc

SEQ ID NO: 4233894 - DNA, 25 bp, Homo sapien
gacctggacgcgtcctctgtacgtg

SEQ ID NO: 4233895 - DNA, 25 bp, Homo sapien
caatcccttggtgtagtttataaag

SEQ ID NO: 4233896 - DNA, 25 bp, Homo sapien
gacaatctagcatatcttcagtgct

SEQ ID NO: 4233897 - DNA, 25 bp, Homo sapien
ccatgcagggttgagttagagtctc

SEQ ID NO: 4233898 - DNA, 25 bp, Homo sapien
tgaaaccttcctgtcagaatgcagg

SEQ ID NO: 4233899 - DNA, 25 bp, Homo sapien
gcaggaacaggttgcaagcaccatg

SEQ ID NO: 4233900 - DNA, 25 bp, Homo sapien
tctcagtaagagatggccaactggc

SEQ ID NO: 4233901 - DNA, 25 bp, Homo sapien
gggcctgggatggtctctggaactt

SEQ ID NO: 4233902 - DNA, 25 bp, Homo sapien
tctctggaacttcttagaagcaaag

SEQ ID NO: 4233903 - DNA, 25 bp, Homo sapien
cttagaagcaaaggggcttccaaat

SEQ ID NO: 4233904 - DNA, 25 bp, Homo sapien
ctgtgggcctgggatggtctctgga

SEQ ID NO: 4233905 - DNA, 25 bp, Homo sapien
tggtggaagttcttcgggctctgaa

SEQ ID NO: 4233906 - DNA, 25 bp, Homo sapien
aagttcttcgggctctgaatcccca

SEQ ID NO: 4233907 - DNA, 25 bp, Homo sapien
catgttccaggaacgggagaaatgg

SEQ ID NO: 4233908 - DNA, 25 bp, Homo sapien
attacccaaaggcatccgcatgttc

SEQ ID NO: 4233909 - DNA, 25 bp, Homo sapien
catctggcctcggagaaacttcact

SEQ ID NO: 4233910 - DNA, 25 bp, Homo sapien
cagacagtacgtggagagccttgca

SEQ ID NO: 4233911 - DNA, 25 bp, Homo sapien
cagtgcccagatgaatccttataac

SEQ ID NO: 4233912 - DNA, 25 bp, Homo sapien
gagagccttgcattgtgttcaccac

SEQ ID NO: 4233913 - DNA, 25 bp, Homo sapien
ttatccattaacatctgctcatctc

SEQ ID NO: 4233914 - DNA, 25 bp, Homo sapien
tatccattaacatctgctcatctct

SEQ ID NO: 4233915 - DNA, 25 bp, Homo sapien
taggagaaatgttataacatcatcc

SEQ ID NO: 4233916 - DNA, 25 bp, Homo sapien
ggagaaatgttataacatcatccca

SEQ ID NO: 4233917 - DNA, 25 bp, Homo sapien
ctgtaggagaaatgttataacatca

SEQ ID NO: 4233918 - DNA, 25 bp, Homo sapien
gagaaatgttataacatcatcccac

SEQ ID NO: 4233919 - DNA, 25 bp, Homo sapien
tgtcttcttgcaccgagtcttactc

SEQ ID NO: 4233920 - DNA, 25 bp, Homo sapien
caggtcacacatgcaggagttggga

SEQ ID NO: 4233921 - DNA, 25 bp, Homo sapien
gatgggaacactgatgtcttcttgc

SEQ ID NO: 4233922 - DNA, 25 bp, Homo sapien
gttttaatcacttatccaaagatgg

SEQ ID NO: 4233923 - DNA, 25 bp, Homo sapien
taactgagcttattgaaggacgact

SEQ ID NO: 4233924 - DNA, 25 bp, Homo sapien
ccactttggaggtgggttgccatct

SEQ ID NO: 4233925 - DNA, 25 bp, Homo sapien
tattgaaggacgactggtgttaagg

SEQ ID NO: 4233926 - DNA, 25 bp, Homo sapien
tgccatctgaagtgttttgcacagg

SEQ ID NO: 4233927 - DNA, 25 bp, Homo sapien
gataatcagcaacgatggtgtgact

SEQ ID NO: 4233928 - DNA, 25 bp, Homo sapien
taaggtagctgtgcaaataacggcg

SEQ ID NO: 4233929 - DNA, 25 bp, Homo sapien
ttggactaggaagtgcccatggccc

SEQ ID NO: 4233930 - DNA, 25 bp, Homo sapien
tgtatagtagaatctgcctctggcc

SEQ ID NO: 4233931 - DNA, 25 bp, Homo sapien
ttcttcactcgtcaaagccagaagc

SEQ ID NO: 4233932 - DNA, 25 bp, Homo sapien
tgattttttcggcttctagaagctg

SEQ ID NO: 4233933 - DNA, 25 bp, Homo sapien
tgttccttctggaggatctaagaga

SEQ ID NO: 4233934 - DNA, 25 bp, Homo sapien
ccagctttgttgagttacaattgat

SEQ ID NO: 4233935 - DNA, 25 bp, Homo sapien
gacatgtgagtcattggccactcgg

SEQ ID NO: 4233936 - DNA, 25 bp, Homo sapien
cactcggaatagaagtaaggcctct

SEQ ID NO: 4233937 - DNA, 25 bp, Homo sapien
tcactgctcagtcccgtggacatgt

SEQ ID NO: 4233938 - DNA, 25 bp, Homo sapien
tgccttggactctgtcgaatggagc

SEQ ID NO: 4233939 - DNA, 25 bp, Homo sapien
tctccctcaagaagtcctgcatttt

SEQ ID NO: 4233940 - DNA, 25 bp, Homo sapien
taatacacatccagctgagggagca

SEQ ID NO: 4233941 - DNA, 25 bp, Homo sapien
gcatttttctgccaactccctctaa

SEQ ID NO: 4233942 - DNA, 25 bp, Homo sapien
ggagcaggagcagcctatcatccat

SEQ ID NO: 4233943 - DNA, 25 bp, Homo sapien
gggctagaccacagatagtggccag

SEQ ID NO: 4233944 - DNA, 25 bp, Homo sapien
ctagaccacagatagtggccaggag

SEQ ID NO: 4233945 - DNA, 25 bp, Homo sapien
tttctgcacaaagggggctagacca

SEQ ID NO: 4233946 - DNA, 25 bp, Homo sapien
ctttctgcacaaagggggctagacc

SEQ ID NO: 4233947 - DNA, 25 bp, Homo sapien
ttgtttgccatttaacggttcagaa

SEQ ID NO: 4233948 - DNA, 25 bp, Homo sapien
gggataaggtatgacctgctgggtt

SEQ ID NO: 4233949 - DNA, 25 bp, Homo sapien
tgccatttaacggttcagaaaggct

SEQ ID NO: 4233950 - DNA, 25 bp, Homo sapien
ttggggataaggtatgacctgctgg

SEQ ID NO: 4233951 - DNA, 25 bp, Homo sapien
aaactgcctgcaaagaaataatcac

SEQ ID NO: 4233952 - DNA, 25 bp, Homo sapien
tcaaactgcctgcaaagaaataatc

SEQ ID NO: 4233953 - DNA, 25 bp, Homo sapien
caaactgcctgcaaagaaataatca

SEQ ID NO: 4233954 - DNA, 25 bp, Homo sapien
cagctacctgagtttgagtggcaat

SEQ ID NO: 4233955 - DNA, 25 bp, Homo sapien
tattataacttcctccgttggagcc

SEQ ID NO: 4233956 - DNA, 25 bp, Homo sapien
tccatttgggagttcagccaatcag

SEQ ID NO: 4233957 - DNA, 25 bp, Homo sapien
gccaatcagttgctgaaccagacaa

SEQ ID NO: 4233958 - DNA, 25 bp, Homo sapien
cactttattgaactatgacatgcac

SEQ ID NO: 4233959 - DNA, 25 bp, Homo sapien
taaaataagaataccagtgtgatat

SEQ ID NO: 4233960 - DNA, 25 bp, Homo sapien
tattgaactatgacatgcactcaga

SEQ ID NO: 4233961 - DNA, 25 bp, Homo sapien
aataaacactttattgaactatgac

SEQ ID NO: 4233962 - DNA, 25 bp, Homo sapien
aaacagaatatgatgagcaaacgga

SEQ ID NO: 4233963 - DNA, 25 bp, Homo sapien
cctagctatggcaaaacagaatatg

SEQ ID NO: 4233964 - DNA, 25 bp, Homo sapien
tgtgtcctagctatggcaaaacaga

SEQ ID NO: 4233965 - DNA, 25 bp, Homo sapien
gagcaaacggaattcctgaaactta

SEQ ID NO: 4233966 - DNA, 25 bp, Homo sapien
gaaatctgtcttggcatcgggtcct

SEQ ID NO: 4233967 - DNA, 25 bp, Homo sapien
tacttccgtgagatataaggctgat

SEQ ID NO: 4233968 - DNA, 25 bp, Homo sapien
cagtctcagagggttggtcatctcc

SEQ ID NO: 4233969 - DNA, 25 bp, Homo sapien
ccatcgataggtggtcagtctcaga

SEQ ID NO: 4233970 - DNA, 25 bp, Homo sapien
gaaggaagctcgaggacacacttct

SEQ ID NO: 4233971 - DNA, 25 bp, Homo sapien
gagcatcccatcgtaaactttagag

SEQ ID NO: 4233972 - DNA, 25 bp, Homo sapien
cattgcacaggtaagagagctcagc

SEQ ID NO: 4233973 - DNA, 25 bp, Homo sapien
gagagtcagtgcgatcttagcaacc

SEQ ID NO: 4233974 - DNA, 25 bp, Homo sapien
gagctcaagagggaaaggtactaga

SEQ ID NO: 4233975 - DNA, 25 bp, Homo sapien
tagaaacctatgaagcactctccac

SEQ ID NO: 4233976 - DNA, 25 bp, Homo sapien
gtaacctctaagctaaccatgactg

SEQ ID NO: 4233977 - DNA, 25 bp, Homo sapien
aaaagatctcccacgtacacatgaa

SEQ ID NO: 4233978 - DNA, 25 bp, Homo sapien
tccccatgtggactaagtattgttc

SEQ ID NO: 4233979 - DNA, 25 bp, Homo sapien
aaagcatcgagggtcctgggttcca

SEQ ID NO: 4233980 - DNA, 25 bp, Homo sapien
tctagttcttgcgtggcccagaggt

SEQ ID NO: 4233981 - DNA, 25 bp, Homo sapien
aaggttatccaagcagactgatggc

SEQ ID NO: 4233982 - DNA, 25 bp, Homo sapien
ccttgaatggtctctccagaagtct

SEQ ID NO: 4233983 - DNA, 25 bp, Homo sapien
tttgtcaagagccagaagccttgaa

SEQ ID NO: 4233984 - DNA, 25 bp, Homo sapien
tcttccatggcagtctcaatggccc

SEQ ID NO: 4233985 - DNA, 25 bp, Homo sapien
cagctacgtgacctttcaagtcttc

SEQ ID NO: 4233986 - DNA, 25 bp, Homo sapien
ttgttttgtggttgctgttggggga

SEQ ID NO: 4233987 - DNA, 25 bp, Homo sapien
ttttgcctttccctgccttggtgtg

SEQ ID NO: 4233988 - DNA, 25 bp, Homo sapien
tgtggttgctgttgggggagttggg

SEQ ID NO: 4233989 - DNA, 25 bp, Homo sapien
tgttgttgtttttgcctttccctgc

SEQ ID NO: 4233990 - DNA, 25 bp, Homo sapien
tccttggtgctggcttaatggatcc

SEQ ID NO: 4233991 - DNA, 25 bp, Homo sapien
gtgtcaagatgttctccttggtgct

SEQ ID NO: 4233992 - DNA, 25 bp, Homo sapien
ctttattgccatcatatcatacttt

SEQ ID NO: 4233993 - DNA, 25 bp, Homo sapien
ttggtgctggcttaatggatccgtt

SEQ ID NO: 4233994 - DNA, 25 bp, Homo sapien
agaggcaacccttggccattgaagg

SEQ ID NO: 4233995 - DNA, 25 bp, Homo sapien
caatataatactgaggcacgtgtgg

SEQ ID NO: 4233996 - DNA, 25 bp, Homo sapien
tcaaataagtttttgccagaggaga

SEQ ID NO: 4233997 - DNA, 25 bp, Homo sapien
cagggaatgccaaatatgaaagagg

SEQ ID NO: 4233998 - DNA, 25 bp, Homo sapien
tctgtgaccagtagaattctctcct

SEQ ID NO: 4233999 - DNA, 25 bp, Homo sapien
cagatcaagagagtcttgtctgtga

SEQ ID NO: 4234000 - DNA, 25 bp, Homo sapien
gtcttgtctgtgaccagtagaattc

SEQ ID NO: 4234001 - DNA, 25 bp, Homo sapien
atttgcagatcaagagagtcttgtc

SEQ ID NO: 4234002 - DNA, 25 bp, Homo sapien
tgtccagggacatcccagggaaggt

SEQ ID NO: 4234003 - DNA, 25 bp, Homo sapien
ggaaggtgaacttgcccaggcagat

SEQ ID NO: 4234004 - DNA, 25 bp, Homo sapien
ttgtccagggacatcccagggaagg

SEQ ID NO: 4234005 - DNA, 25 bp, Homo sapien
cagatgcgatagacagcgctcagag

SEQ ID NO: 4234006 - DNA, 25 bp, Homo sapien
taatagaatgatgtctgcgatgccc

SEQ ID NO: 4234007 - DNA, 25 bp, Homo sapien
tgacactaagtcaacaggaggcaga

SEQ ID NO: 4234008 - DNA, 25 bp, Homo sapien
tctccaaaaggatgtgtaaaggcca

SEQ ID NO: 4234009 - DNA, 25 bp, Homo sapien
tggcctttggatccgagaaagcaag

SEQ ID NO: 4234010 - DNA, 25 bp, Homo sapien
ttcctggagttatgcaacccttggg

SEQ ID NO: 4234011 - DNA, 25 bp, Homo sapien
gcatacacttcagctatttgctctg

SEQ ID NO: 4234012 - DNA, 25 bp, Homo sapien
gggcggcatacacttcagctatttg

SEQ ID NO: 4234013 - DNA, 25 bp, Homo sapien
tagattgtctagacaggagatgttg

SEQ ID NO: 4234014 - DNA, 25 bp, Homo sapien
cattcaacactgtccatgagcatgt

SEQ ID NO: 4234015 - DNA, 25 bp, Homo sapien
tcttccactactgtctctattttcc

SEQ ID NO: 4234016 - DNA, 25 bp, Homo sapien
ctcttccactactgtctctattttc

SEQ ID NO: 4234017 - DNA, 25 bp, Homo sapien
caacactgtccatgagcatgttctc

SEQ ID NO: 4234018 - DNA, 25 bp, Homo sapien
ttggaaggctctaaacacatcataa

SEQ ID NO: 4234019 - DNA, 25 bp, Homo sapien
tcttggaaggctctaaacacatcat

SEQ ID NO: 4234020 - DNA, 25 bp, Homo sapien
catcttggaaggctctaaacacatc

SEQ ID NO: 4234021 - DNA, 25 bp, Homo sapien
gcatcttggaaggctctaaacacat

SEQ ID NO: 4234022 - DNA, 25 bp, Homo sapien
catgcctcactggcgtggggacctg

SEQ ID NO: 4234023 - DNA, 25 bp, Homo sapien
gactgagcctgggaacactgcagcc

SEQ ID NO: 4234024 - DNA, 25 bp, Homo sapien
ctgcatgcctcactggcgtggggac

SEQ ID NO: 4234025 - DNA, 25 bp, Homo sapien
actgagcctgggaacactgcagcct

SEQ ID NO: 4234026 - DNA, 25 bp, Homo sapien
ccagtaatcactcattttatccact

SEQ ID NO: 4234027 - DNA, 25 bp, Homo sapien
gttgtccagtaatcactcattttat

SEQ ID NO: 4234028 - DNA, 25 bp, Homo sapien
agtaatcactcattttatccactaa

SEQ ID NO: 4234029 - DNA, 25 bp, Homo sapien
gtccagtaatcactcattttatcca

SEQ ID NO: 4234030 - DNA, 25 bp, Homo sapien
gggattgtagggaaagctgccttgg

SEQ ID NO: 4234031 - DNA, 25 bp, Homo sapien
acctcctgttccatgttacttcctc

SEQ ID NO: 4234032 - DNA, 25 bp, Homo sapien
ccttggttgggcagaaagccacatg

SEQ ID NO: 4234033 - DNA, 25 bp, Homo sapien
agttcagctaattcctcctcgagca

SEQ ID NO: 4234034 - DNA, 25 bp, Homo sapien
taattatgtttggagtaagtgcagc

SEQ ID NO: 4234035 - DNA, 25 bp, Homo sapien
cagcacttcaagacgttaaactttg

SEQ ID NO: 4234036 - DNA, 25 bp, Homo sapien
taagtgcagcatacggacttacccc

SEQ ID NO: 4234037 - DNA, 25 bp, Homo sapien
tatactgtccaaacgtgttcactgc

SEQ ID NO: 4234038 - DNA, 25 bp, Homo sapien
tgatcaagaatagggtcgatgtcta

SEQ ID NO: 4234039 - DNA, 25 bp, Homo sapien
tgcagttcatggtcaaatcggttgg

SEQ ID NO: 4234040 - DNA, 25 bp, Homo sapien
cgatgtctaaatcatgttcatggcc

SEQ ID NO: 4234041 - DNA, 25 bp, Homo sapien
caaatgaactgtgagctgatcaaga

SEQ ID NO: 4234042 - DNA, 25 bp, Homo sapien
tccaaggatgcttcttatgtgtcag

SEQ ID NO: 4234043 - DNA, 25 bp, Homo sapien
tcaatgttttcatatgtaagatttc

SEQ ID NO: 4234044 - DNA, 25 bp, Homo sapien
acctgtatccgggtccaaggatgct

SEQ ID NO: 4234045 - DNA, 25 bp, Homo sapien
ttcttccacctgtatccgggtccaa

SEQ ID NO: 4234046 - DNA, 25 bp, Homo sapien
gctgccatgacaataacagtttcca

SEQ ID NO: 4234047 - DNA, 25 bp, Homo sapien
cagttcaggtgggagacagtttcaa

SEQ ID NO: 4234048 - DNA, 25 bp, Homo sapien
aactgactgagaaaagacatgggac

SEQ ID NO: 4234049 - DNA, 25 bp, Homo sapien
gacatgggacttcttaaatggtaga

SEQ ID NO: 4234050 - DNA, 25 bp, Homo sapien
ggaaatacggatattgatgtcacac

SEQ ID NO: 4234051 - DNA, 25 bp, Homo sapien
gtctgacactcagaacagtggctag

SEQ ID NO: 4234052 - DNA, 25 bp, Homo sapien
tcagaacagtggctagagctggaaa

SEQ ID NO: 4234053 - DNA, 25 bp, Homo sapien
cagtggctagagctggaaatacgga

SEQ ID NO: 4234054 - DNA, 25 bp, Homo sapien
taaggaacttcagtggaccatgggt

SEQ ID NO: 4234055 - DNA, 25 bp, Homo sapien
tccagcgggacagaagagactgctc

SEQ ID NO: 4234056 - DNA, 25 bp, Homo sapien
tctcactggtgtatttcataggatg

SEQ ID NO: 4234057 - DNA, 25 bp, Homo sapien
tcataggatgctcagtgaaagtagc

SEQ ID NO: 4234058 - DNA, 25 bp, Homo sapien
cagttctgggttcagtactcatcct

SEQ ID NO: 4234059 - DNA, 25 bp, Homo sapien
tacatgatccccttgaaaagatgga

SEQ ID NO: 4234060 - DNA, 25 bp, Homo sapien
taatgcgttcactgctattcatcag

SEQ ID NO: 4234061 - DNA, 25 bp, Homo sapien
gttgtagggcacacataatgcgttc

SEQ ID NO: 4234062 - DNA, 25 bp, Homo sapien
tagccaagtttgttgcggtttccaa

SEQ ID NO: 4234063 - DNA, 25 bp, Homo sapien
gaacaagcttagacatgaacccaga

SEQ ID NO: 4234064 - DNA, 25 bp, Homo sapien
cagccctgtgtaggtctcaatcaaa

SEQ ID NO: 4234065 - DNA, 25 bp, Homo sapien
tcttgtgggcattctggatagctgg

SEQ ID NO: 4234066 - DNA, 25 bp, Homo sapien
tcttgtatgaggtctaaagtgtgta

SEQ ID NO: 4234067 - DNA, 25 bp, Homo sapien
tagcgtgggtcaaactggaattttc

SEQ ID NO: 4234068 - DNA, 25 bp, Homo sapien
ctgtggatgatatgcttatggtacc

SEQ ID NO: 4234069 - DNA, 25 bp, Homo sapien
ctatcagtccaatcaagcttttaaa

SEQ ID NO: 4234070 - DNA, 25 bp, Homo sapien
gataggctcagcagcatttattttc

SEQ ID NO: 4234071 - DNA, 25 bp, Homo sapien
gctcagcagcatttattttctagtt

SEQ ID NO: 4234072 - DNA, 25 bp, Homo sapien
ggctcagcagcatttattttctagt

SEQ ID NO: 4234073 - DNA, 25 bp, Homo sapien
taggctcagcagcatttattttcta

SEQ ID NO: 4234074 - DNA, 25 bp, Homo sapien
caagtttgacatctgggcatcggaa

SEQ ID NO: 4234075 - DNA, 25 bp, Homo sapien
ttcaaaaccctctgcgatccatgga

SEQ ID NO: 4234076 - DNA, 25 bp, Homo sapien
tggaaaatgatagggtcaccggcct

SEQ ID NO: 4234077 - DNA, 25 bp, Homo sapien
gataagagggctgaagaccaagacc

SEQ ID NO: 4234078 - DNA, 25 bp, Homo sapien
tctcagtaactccaaggcctcagag

SEQ ID NO: 4234079 - DNA, 25 bp, Homo sapien
caagcccttgtataattgttggcca

SEQ ID NO: 4234080 - DNA, 25 bp, Homo sapien
caaggaaatcaagaggcctagtccc

SEQ ID NO: 4234081 - DNA, 25 bp, Homo sapien
tgttaacctttgaaaaccacaggca

SEQ ID NO: 4234082 - DNA, 25 bp, Homo sapien
tcttcatcccagttagggtggctat

SEQ ID NO: 4234083 - DNA, 25 bp, Homo sapien
ctagtatagccgttatggaaaccag

SEQ ID NO: 4234084 - DNA, 25 bp, Homo sapien
aaattagaaggaccatatgatccag

SEQ ID NO: 4234085 - DNA, 25 bp, Homo sapien
atataaaggaaagggaacacactgt

SEQ ID NO: 4234086 - DNA, 25 bp, Homo sapien
gcaatggcttgcgtccttggcgaag

SEQ ID NO: 4234087 - DNA, 25 bp, Homo sapien
taatgggccgtaattagagggagca

SEQ ID NO: 4234088 - DNA, 25 bp, Homo sapien
ggagcagagcctaaacaaccctttg

SEQ ID NO: 4234089 - DNA, 25 bp, Homo sapien
ggccctgccagggagaatgttaaat

SEQ ID NO: 4234090 - DNA, 25 bp, Homo sapien
gttgactgtcaatggatcagaaaat

SEQ ID NO: 4234091 - DNA, 25 bp, Homo sapien
acatgtgttgactgtcaatggatca

SEQ ID NO: 4234092 - DNA, 25 bp, Homo sapien
tccataaacatgtgttgactgtcaa

SEQ ID NO: 4234093 - DNA, 25 bp, Homo sapien
aaatacactatcactggaacctctc

SEQ ID NO: 4234094 - DNA, 25 bp, Homo sapien
ggattccagggcctcgtaaagtata

SEQ ID NO: 4234095 - DNA, 25 bp, Homo sapien
cagggcctcgtaaagtataaatgtg

SEQ ID NO: 4234096 - DNA, 25 bp, Homo sapien
cctcgtaaagtataaatgtgatgac

SEQ ID NO: 4234097 - DNA, 25 bp, Homo sapien
agctgaagttcagctacaggggatt

SEQ ID NO: 4234098 - DNA, 25 bp, Homo sapien
ccctttattacagcctcctcagtta

SEQ ID NO: 4234099 - DNA, 25 bp, Homo sapien
tttaaaggagtcagggctctccact

SEQ ID NO: 4234100 - DNA, 25 bp, Homo sapien
agctttaaaggagtcagggctctcc

SEQ ID NO: 4234101 - DNA, 25 bp, Homo sapien
tattacagcctcctcagttacaggg

SEQ ID NO: 4234102 - DNA, 25 bp, Homo sapien
aagacagcagttcatcctggtgtct

SEQ ID NO: 4234103 - DNA, 25 bp, Homo sapien
tgtaaatggaccagggaatcactaa

SEQ ID NO: 4234104 - DNA, 25 bp, Homo sapien
gaagacagcagttcatcctggtgtc

SEQ ID NO: 4234105 - DNA, 25 bp, Homo sapien
tttgtaaatggaccagggaatcact

SEQ ID NO: 4234106 - DNA, 25 bp, Homo sapien
gacatttcaagatcccatggaatgg

SEQ ID NO: 4234107 - DNA, 25 bp, Homo sapien
tcaagatcccatggaatgggacacg

SEQ ID NO: 4234108 - DNA, 25 bp, Homo sapien
atcccatggaatgggacacgaccca

SEQ ID NO: 4234109 - DNA, 25 bp, Homo sapien
gtgcagacatttcaagatcccatgg

SEQ ID NO: 4234110 - DNA, 25 bp, Homo sapien
cttcgttgccaggctgagggatcca

SEQ ID NO: 4234111 - DNA, 25 bp, Homo sapien
tagtttgggccacttcaaacacagc

SEQ ID NO: 4234112 - DNA, 25 bp, Homo sapien
ggtgccctagtttgggccacttcaa

SEQ ID NO: 4234113 - DNA, 25 bp, Homo sapien
cctagtttgggccacttcaaacaca

SEQ ID NO: 4234114 - DNA, 25 bp, Homo sapien
tgggccataggagactctgagctaa

SEQ ID NO: 4234115 - DNA, 25 bp, Homo sapien
gccataggagactctgagctaagtc

SEQ ID NO: 4234116 - DNA, 25 bp, Homo sapien
ctgggccataggagactctgagcta

SEQ ID NO: 4234117 - DNA, 25 bp, Homo sapien
ggccataggagactctgagctaagt

SEQ ID NO: 4234118 - DNA, 25 bp, Homo sapien
tgctactacaaccaatgacataaat

SEQ ID NO: 4234119 - DNA, 25 bp, Homo sapien
aaagtctaccaattattggccaggc

SEQ ID NO: 4234120 - DNA, 25 bp, Homo sapien
tgaaaagtctaccaatgagaacact

SEQ ID NO: 4234121 - DNA, 25 bp, Homo sapien
ataatgtaatagaggtaataaccca

SEQ ID NO: 4234122 - DNA, 25 bp, Homo sapien
tccaaagttgtgtcagcatgactgg

SEQ ID NO: 4234123 - DNA, 25 bp, Homo sapien
ctccaaagttgtgtcagcatgactg

SEQ ID NO: 4234124 - DNA, 25 bp, Homo sapien
acaggatgactggatagaacatggc

SEQ ID NO: 4234125 - DNA, 25 bp, Homo sapien
cacaattgtacaggatgactggata

SEQ ID NO: 4234126 - DNA, 25 bp, Homo sapien
gcttgacacaattgtacaggatgac

SEQ ID NO: 4234127 - DNA, 25 bp, Homo sapien
ttttgaagcttgacacaattgtaca

SEQ ID NO: 4234128 - DNA, 25 bp, Homo sapien
taccagtgattcctaggtttggcca

SEQ ID NO: 4234129 - DNA, 25 bp, Homo sapien
cattgactttatagcctgatgacta

SEQ ID NO: 4234130 - DNA, 25 bp, Homo sapien
tctctactggattgtaaggcttctg

SEQ ID NO: 4234131 - DNA, 25 bp, Homo sapien
tacctgatggctttcgtctcactgc

SEQ ID NO: 4234132 - DNA, 25 bp, Homo sapien
gcttggatccatatctttagaacta

SEQ ID NO: 4234133 - DNA, 25 bp, Homo sapien
tcatcagagtagtatacatcgtatc

SEQ ID NO: 4234134 - DNA, 25 bp, Homo sapien
ttacatagatgaattacacagtgat

SEQ ID NO: 4234135 - DNA, 25 bp, Homo sapien
tctattcatggaacttagcttggat

SEQ ID NO: 4234136 - DNA, 25 bp, Homo sapien
catcattgccagtgatggaggactt

SEQ ID NO: 4234137 - DNA, 25 bp, Homo sapien
cagcatgtaagagtgtcttcaccat

SEQ ID NO: 4234138 - DNA, 25 bp, Homo sapien
gagaatttgtgcttcgtctctgcaa

SEQ ID NO: 4234139 - DNA, 25 bp, Homo sapien
tgttagtcttctgtatgtctaaaga

SEQ ID NO: 4234140 - DNA, 25 bp, Homo sapien
tgaggctttgcatcacatacccagg

SEQ ID NO: 4234141 - DNA, 25 bp, Homo sapien
gacgaccgctggattgaattcggac

SEQ ID NO: 4234142 - DNA, 25 bp, Homo sapien
gctgcagagcataaggacgaccgct

SEQ ID NO: 4234143 - DNA, 25 bp, Homo sapien
ggattactcatctgtgctctcacag

SEQ ID NO: 4234144 - DNA, 25 bp, Homo sapien
acaggatcagccgtgggtgaaagac

SEQ ID NO: 4234145 - DNA, 25 bp, Homo sapien
gatcagccgtgggtgaaagacaaga

SEQ ID NO: 4234146 - DNA, 25 bp, Homo sapien
gaaaacaggatcagccgtgggtgaa

SEQ ID NO: 4234147 - DNA, 25 bp, Homo sapien
atgtggaaaacaggatcagccgtgg

SEQ ID NO: 4234148 - DNA, 25 bp, Homo sapien
gccacgtccatgattagaggaatcc

SEQ ID NO: 4234149 - DNA, 25 bp, Homo sapien
tggcagaagggccacgtccatgatt

SEQ ID NO: 4234150 - DNA, 25 bp, Homo sapien
cagaagggccacgtccatgattaga

SEQ ID NO: 4234151 - DNA, 25 bp, Homo sapien
gaagggccacgtccatgattagagg

SEQ ID NO: 4234152 - DNA, 25 bp, Homo sapien
catttccaggcttggttactttctt

SEQ ID NO: 4234153 - DNA, 25 bp, Homo sapien
cccaattagttgttaagcagaaacg

SEQ ID NO: 4234154 - DNA, 25 bp, Homo sapien
cattaataagctgtctttgagtgta

SEQ ID NO: 4234155 - DNA, 25 bp, Homo sapien
tagtcaggcatgaatgactgatgac

SEQ ID NO: 4234156 - DNA, 25 bp, Homo sapien
tagcgatactggtaactctgggcag

SEQ ID NO: 4234157 - DNA, 25 bp, Homo sapien
caggagggcacgtcattggtcatga

SEQ ID NO: 4234158 - DNA, 25 bp, Homo sapien
tatgaatctggctcagcaagggaac

SEQ ID NO: 4234159 - DNA, 25 bp, Homo sapien
gatgacgtaaacttcctaagacttg

SEQ ID NO: 4234160 - DNA, 25 bp, Homo sapien
taaaggaattaatgccactcatgag

SEQ ID NO: 4234161 - DNA, 25 bp, Homo sapien
tagcaagggcctgttctcctagatg

SEQ ID NO: 4234162 - DNA, 25 bp, Homo sapien
gaaggtcaagctgtctcaggcctct

SEQ ID NO: 4234163 - DNA, 25 bp, Homo sapien
cattctcatatggttgaaggtcaag

SEQ ID NO: 4234164 - DNA, 25 bp, Homo sapien
tgcacagcatagtggaatacagctt

SEQ ID NO: 4234165 - DNA, 25 bp, Homo sapien
tctgtcctgcgatgctaggaaaaat

SEQ ID NO: 4234166 - DNA, 25 bp, Homo sapien
gggcatgttacactcctcggaggac

SEQ ID NO: 4234167 - DNA, 25 bp, Homo sapien
tagtaaaagcctgtactgtgggcat

SEQ ID NO: 4234168 - DNA, 25 bp, Homo sapien
ttatcactgtgtttcaattacctac

SEQ ID NO: 4234169 - DNA, 25 bp, Homo sapien
cattttggtcgacaatggaccacat

SEQ ID NO: 4234170 - DNA, 25 bp, Homo sapien
gaaaactcgagttatggctggactg

SEQ ID NO: 4234171 - DNA, 25 bp, Homo sapien
gctggactgaagaggctatttgact

SEQ ID NO: 4234172 - DNA, 25 bp, Homo sapien
tagtacgatatcacccattagattc

SEQ ID NO: 4234173 - DNA, 25 bp, Homo sapien
gcttggtgcagcgttcttccagaaa

SEQ ID NO: 4234174 - DNA, 25 bp, Homo sapien
gcctgtgcagggcagagagctgggc

SEQ ID NO: 4234175 - DNA, 25 bp, Homo sapien
tgaaagagcggagcctgtgcagggc

SEQ ID NO: 4234176 - DNA, 25 bp, Homo sapien
ggagcctgtgcagggcagagagctg

SEQ ID NO: 4234177 - DNA, 25 bp, Homo sapien
ctgaaagagcggagcctgtgcaggg

SEQ ID NO: 4234178 - DNA, 25 bp, Homo sapien
taaggaggtttggaattgtacagcg

SEQ ID NO: 4234179 - DNA, 25 bp, Homo sapien
ggctcccacgaagtcttcactgaaa

SEQ ID NO: 4234180 - DNA, 25 bp, Homo sapien
tgagggagggatgattatggctccc

SEQ ID NO: 4234181 - DNA, 25 bp, Homo sapien
gtacagcgagatagcagactggacc

SEQ ID NO: 4234182 - DNA, 25 bp, Homo sapien
ttctcctctacctcatggctgtcag

SEQ ID NO: 4234183 - DNA, 25 bp, Homo sapien
caagaatgcctcattagcctggaca

SEQ ID NO: 4234184 - DNA, 25 bp, Homo sapien
aaatcttccttgaaatggctttcaa

SEQ ID NO: 4234185 - DNA, 25 bp, Homo sapien
gacatctttgatgcgtgatttttga

SEQ ID NO: 4234186 - DNA, 25 bp, Homo sapien
tcaacgaacggagaacaattatata

SEQ ID NO: 4234187 - DNA, 25 bp, Homo sapien
caactgtctttgatatcaacgaacg

SEQ ID NO: 4234188 - DNA, 25 bp, Homo sapien
gcaatagggtcaaatgctatcagac

SEQ ID NO: 4234189 - DNA, 25 bp, Homo sapien
tatatagatataaagccgggaggct

SEQ ID NO: 4234190 - DNA, 25 bp, Homo sapien
gatgtaagggtcagggcagtactgt

SEQ ID NO: 4234191 - DNA, 25 bp, Homo sapien
cagtactgtagggtggcacaccgtg

SEQ ID NO: 4234192 - DNA, 25 bp, Homo sapien
cgctggatgtaagggtcagggcagt

SEQ ID NO: 4234193 - DNA, 25 bp, Homo sapien
ggcacaccgtgaagtttcaaaattc

SEQ ID NO: 4234194 - DNA, 25 bp, Homo sapien
gcagcgcatggtaatagagcggcat

SEQ ID NO: 4234195 - DNA, 25 bp, Homo sapien
agacgcagcgcatggtaatagagcg

SEQ ID NO: 4234196 - DNA, 25 bp, Homo sapien
tcagacgcagcgcatggtaatagag

SEQ ID NO: 4234197 - DNA, 25 bp, Homo sapien
acgcagcgcatggtaatagagcggc

SEQ ID NO: 4234198 - DNA, 25 bp, Homo sapien
ggcatattctgtactaacaagcagc

SEQ ID NO: 4234199 - DNA, 25 bp, Homo sapien
gcatattctgtactaacaagcagca

SEQ ID NO: 4234200 - DNA, 25 bp, Homo sapien
aaatctttgggtcagatagccctga

SEQ ID NO: 4234201 - DNA, 25 bp, Homo sapien
gatttttgaacctatgcgcattggc

SEQ ID NO: 4234202 - DNA, 25 bp, Homo sapien
cacttactagttaggtcacccttgg

SEQ ID NO: 4234203 - DNA, 25 bp, Homo sapien
ggtataacatttgccagagtgagat

SEQ ID NO: 4234204 - DNA, 25 bp, Homo sapien
accaacatagtggataatgtggtgt

SEQ ID NO: 4234205 - DNA, 25 bp, Homo sapien
ctttttaaaaacagtgtagcatcca

SEQ ID NO: 4234206 - DNA, 25 bp, Homo sapien
tttttaaaaacagtgtagcatccat

SEQ ID NO: 4234207 - DNA, 25 bp, Homo sapien
ttccaagagaaatgagctggggttt

SEQ ID NO: 4234208 - DNA, 25 bp, Homo sapien
ctttccaagagaaatgagctggggt

SEQ ID NO: 4234209 - DNA, 25 bp, Homo sapien
tttctttccaagagaaatgagctgg

SEQ ID NO: 4234210 - DNA, 25 bp, Homo sapien
tggatcggtaataactttctttcca

SEQ ID NO: 4234211 - DNA, 25 bp, Homo sapien
ccagatatgctggaaaacctctgga

SEQ ID NO: 4234212 - DNA, 25 bp, Homo sapien
tgtttgtcgcaccatcttctgatgg

SEQ ID NO: 4234213 - DNA, 25 bp, Homo sapien
cgagtcctgcatgcggatacagtcc

SEQ ID NO: 4234214 - DNA, 25 bp, Homo sapien
gatacagtccatgctaatctcaatc

SEQ ID NO: 4234215 - DNA, 25 bp, Homo sapien
tccacaaagttcaagtcaatgggct

SEQ ID NO: 4234216 - DNA, 25 bp, Homo sapien
gttgtttgtcatagtaggaagtgcc

SEQ ID NO: 4234217 - DNA, 25 bp, Homo sapien
gaaggatagagaagttgtttgtcat

SEQ ID NO: 4234218 - DNA, 25 bp, Homo sapien
cattaaagaaggatagagaagttgt

SEQ ID NO: 4234219 - DNA, 25 bp, Homo sapien
ctgcattaaagaaggatagagaagt

SEQ ID NO: 4234220 - DNA, 25 bp, Homo sapien
ccaggtacttaaacctgcatatgca

SEQ ID NO: 4234221 - DNA, 25 bp, Homo sapien
atagaattcatgtgcataaattcct

SEQ ID NO: 4234222 - DNA, 25 bp, Homo sapien
tctgttaccaggtacttaaacctgc

SEQ ID NO: 4234223 - DNA, 25 bp, Homo sapien
ctgcatatgcacatagaattcatgt

SEQ ID NO: 4234224 - DNA, 25 bp, Homo sapien
ttgccaacttttatgagtccaagac

SEQ ID NO: 4234225 - DNA, 25 bp, Homo sapien
cttttatgagtccaagactgagaac

SEQ ID NO: 4234226 - DNA, 25 bp, Homo sapien
caacttttatgagtccaagactgag

SEQ ID NO: 4234227 - DNA, 25 bp, Homo sapien
ctttttgccaacttttatgagtcca

SEQ ID NO: 4234228 - DNA, 25 bp, Homo sapien
tatcaatcacttctctggcagcttg

SEQ ID NO: 4234229 - DNA, 25 bp, Homo sapien
tctagaagcagcagactcgtgcaag

SEQ ID NO: 4234230 - DNA, 25 bp, Homo sapien
ggatttgatcccctgcttagccctc

SEQ ID NO: 4234231 - DNA, 25 bp, Homo sapien
agactaattcattacaccaccaacg

SEQ ID NO: 4234232 - DNA, 25 bp, Homo sapien
caccatggcaaatggtcatagacgc

SEQ ID NO: 4234233 - DNA, 25 bp, Homo sapien
ccatggcaaatggtcatagacgcag

SEQ ID NO: 4234234 - DNA, 25 bp, Homo sapien
tggcaaatggtcatagacgcagtca

SEQ ID NO: 4234235 - DNA, 25 bp, Homo sapien
ctgccaccatggcaaatggtcatag

SEQ ID NO: 4234236 - DNA, 25 bp, Homo sapien
caccccgagacccttacaatatgaa

SEQ ID NO: 4234237 - DNA, 25 bp, Homo sapien
tagctgtaagattgatcaatgctgc

SEQ ID NO: 4234238 - DNA, 25 bp, Homo sapien
taagattgatcaatgctgctgtcct

SEQ ID NO: 4234239 - DNA, 25 bp, Homo sapien
tacttaagaagataacagaactcaa

SEQ ID NO: 4234240 - DNA, 25 bp, Homo sapien
cactaaattgagtctgggcattgtt

SEQ ID NO: 4234241 - DNA, 25 bp, Homo sapien
ctcactaaattgagtctgggcattg

SEQ ID NO: 4234242 - DNA, 25 bp, Homo sapien
actaaattgagtctgggcattgttt

SEQ ID NO: 4234243 - DNA, 25 bp, Homo sapien
tcactaaattgagtctgggcattgt

SEQ ID NO: 4234244 - DNA, 25 bp, Homo sapien
tgaaagttggttcccagaaaataca

SEQ ID NO: 4234245 - DNA, 25 bp, Homo sapien
tgactaacttgaaagttggttccca

SEQ ID NO: 4234246 - DNA, 25 bp, Homo sapien
gccttcaggacctcaaaataagcca

SEQ ID NO: 4234247 - DNA, 25 bp, Homo sapien
ccttcaggacctcaaaataagccat

SEQ ID NO: 4234248 - DNA, 25 bp, Homo sapien
tggccttcaggacctcaaaataagc

SEQ ID NO: 4234249 - DNA, 25 bp, Homo sapien
ggccttcaggacctcaaaataagcc

SEQ ID NO: 4234250 - DNA, 25 bp, Homo sapien
tttgcagttcaaagtatacggtgac

SEQ ID NO: 4234251 - DNA, 25 bp, Homo sapien
gaggcaacatttcctcagtctccct

SEQ ID NO: 4234252 - DNA, 25 bp, Homo sapien
cagttcaaagtatacggtgactctg

SEQ ID NO: 4234253 - DNA, 25 bp, Homo sapien
agggtttttggccttgaggcaacat

SEQ ID NO: 4234254 - DNA, 25 bp, Homo sapien
ttctctcccggcaggtgtggccaaa

SEQ ID NO: 4234255 - DNA, 25 bp, Homo sapien
cagctttctctcccggcaggtgtgg

SEQ ID NO: 4234256 - DNA, 25 bp, Homo sapien
catcttcagctttctctcccggcag

SEQ ID NO: 4234257 - DNA, 25 bp, Homo sapien
caggtgtggccaaactgcaggtaag

SEQ ID NO: 4234258 - DNA, 25 bp, Homo sapien
caaccagcttatggtacagttgctt

SEQ ID NO: 4234259 - DNA, 25 bp, Homo sapien
aaaatgaacaaaggggcaaccagct

SEQ ID NO: 4234260 - DNA, 25 bp, Homo sapien
ccttccgacacatagaaatcttgtt

SEQ ID NO: 4234261 - DNA, 25 bp, Homo sapien
ctttgtaaaaccttccgacacatag

SEQ ID NO: 4234262 - DNA, 25 bp, Homo sapien
ctagcatccgctaacacaatgactg

SEQ ID NO: 4234263 - DNA, 25 bp, Homo sapien
gaatcttctggttctgacttcaggg

SEQ ID NO: 4234264 - DNA, 25 bp, Homo sapien
gaggtagagcatttgccctagcatc

SEQ ID NO: 4234265 - DNA, 25 bp, Homo sapien
tgtccatgccatcaaaactgtcagc

SEQ ID NO: 4234266 - DNA, 25 bp, Homo sapien
aggagccccaggttcgtgtactgtg

SEQ ID NO: 4234267 - DNA, 25 bp, Homo sapien
ggagccccaggttcgtgtactgtgg

SEQ ID NO: 4234268 - DNA, 25 bp, Homo sapien
gtggacgaggagccgttctgaatct

SEQ ID NO: 4234269 - DNA, 25 bp, Homo sapien
gttatagggactggtggacgaggag

SEQ ID NO: 4234270 - DNA, 25 bp, Homo sapien
aaggacacgtcgaaactgtgcgggc

SEQ ID NO: 4234271 - DNA, 25 bp, Homo sapien
gccgacttggcggtgctcgactgct

SEQ ID NO: 4234272 - DNA, 25 bp, Homo sapien
gctgggctgtgcgtagggcgagggc

SEQ ID NO: 4234273 - DNA, 25 bp, Homo sapien
ggagagagagcatcgaaggtggagc

SEQ ID NO: 4234274 - DNA, 25 bp, Homo sapien
cttgtcctgggtacttcacaaagaa

SEQ ID NO: 4234275 - DNA, 25 bp, Homo sapien
ggatacaatccagtgagagggaagc

SEQ ID NO: 4234276 - DNA, 25 bp, Homo sapien
tctacagttgaaatatgagccaccg

SEQ ID NO: 4234277 - DNA, 25 bp, Homo sapien
cctcactagcacagtggaagttata

SEQ ID NO: 4234278 - DNA, 25 bp, Homo sapien
agagcctacatctgcttgggcaggc

SEQ ID NO: 4234279 - DNA, 25 bp, Homo sapien
tcttaaatctggaaagggcctctcc

SEQ ID NO: 4234280 - DNA, 25 bp, Homo sapien
ttcttaaatctggaaagggcctctc

SEQ ID NO: 4234281 - DNA, 25 bp, Homo sapien
cttaaatctggaaagggcctctcct

SEQ ID NO: 4234282 - DNA, 25 bp, Homo sapien
tccacttgctcaagtcaaattctcc

SEQ ID NO: 4234283 - DNA, 25 bp, Homo sapien
tttatccataattatgacactgttc

SEQ ID NO: 4234284 - DNA, 25 bp, Homo sapien
ttgatgacaatagcttggtcagaaa

SEQ ID NO: 4234285 - DNA, 25 bp, Homo sapien
tgatgacaatagcttggtcagaaat

SEQ ID NO: 4234286 - DNA, 25 bp, Homo sapien
ataattatgacactgttcttatggg

SEQ ID NO: 4234287 - DNA, 25 bp, Homo sapien
ctccctcatacctaacaagtatcgt

SEQ ID NO: 4234288 - DNA, 25 bp, Homo sapien
tccacggtagtcaagcttcccggcg

SEQ ID NO: 4234289 - DNA, 25 bp, Homo sapien
ccggcgcctctggtcttgtctccct

SEQ ID NO: 4234290 - DNA, 25 bp, Homo sapien
cctcatacctaacaagtatcgtcat

SEQ ID NO: 4234291 - DNA, 25 bp, Homo sapien
caaaagtaataactattgcatggga

SEQ ID NO: 4234292 - DNA, 25 bp, Homo sapien
tcacatttaactgacatccttggtt

SEQ ID NO: 4234293 - DNA, 25 bp, Homo sapien
ctggcaactctagctagaaaggata

SEQ ID NO: 4234294 - DNA, 25 bp, Homo sapien
tcaaggtagattgccaggatgataa

SEQ ID NO: 4234295 - DNA, 25 bp, Homo sapien
cgtatacactcaaatactctgaata

SEQ ID NO: 4234296 - DNA, 25 bp, Homo sapien
acgtatacactcaaatactctgaat

SEQ ID NO: 4234297 - DNA, 25 bp, Homo sapien
tgaccagtaatatcattcacagtta

SEQ ID NO: 4234298 - DNA, 25 bp, Homo sapien
ctgaccagtaatatcattcacagtt

SEQ ID NO: 4234299 - DNA, 25 bp, Homo sapien
gaccagtaatatcattcacagttac

SEQ ID NO: 4234300 - DNA, 25 bp, Homo sapien
aatggagctcaaaagtggtctattt

SEQ ID NO: 4234301 - DNA, 25 bp, Homo sapien
atggagctcaaaagtggtctattta

SEQ ID NO: 4234302 - DNA, 25 bp, Homo sapien
ggagctcaaaagtggtctatttaac

SEQ ID NO: 4234303 - DNA, 25 bp, Homo sapien
tggagctcaaaagtggtctatttaa

SEQ ID NO: 4234304 - DNA, 25 bp, Homo sapien
aaatctgtccactttttagagctgc

SEQ ID NO: 4234305 - DNA, 25 bp, Homo sapien
tccactttttagagctgcatgctgc

SEQ ID NO: 4234306 - DNA, 25 bp, Homo sapien
ctgcatgctgcctgtttactactgg

SEQ ID NO: 4234307 - DNA, 25 bp, Homo sapien
caacaggagatattgttacattcca

SEQ ID NO: 4234308 - DNA, 25 bp, Homo sapien
tttgcaatttggcagtagagtttct

SEQ ID NO: 4234309 - DNA, 25 bp, Homo sapien
gatggggcatgtctttgcaatttgg

SEQ ID NO: 4234310 - DNA, 25 bp, Homo sapien
gtagagtttcttcagttcagtggaa

SEQ ID NO: 4234311 - DNA, 25 bp, Homo sapien
tggatggggcatgtctttgcaattt

SEQ ID NO: 4234312 - DNA, 25 bp, Homo sapien
gcgcggataacagctccctgaggag

SEQ ID NO: 4234313 - DNA, 25 bp, Homo sapien
ggcgcggataacagctccctgagga

SEQ ID NO: 4234314 - DNA, 25 bp, Homo sapien
cacctccgtgacgtgctcagctttt

SEQ ID NO: 4234315 - DNA, 25 bp, Homo sapien
ttgaattcacggctcagctcatggt

SEQ ID NO: 4234316 - DNA, 25 bp, Homo sapien
atggttggggcaccgcttcaccacc

SEQ ID NO: 4234317 - DNA, 25 bp, Homo sapien
gacgtgctcagcttttttgtagaca

SEQ ID NO: 4234318 - DNA, 25 bp, Homo sapien
tactcgaatcaaatgactaggaggg

SEQ ID NO: 4234319 - DNA, 25 bp, Homo sapien
tggctgttcccctctactcgaatca

SEQ ID NO: 4234320 - DNA, 25 bp, Homo sapien
ggtggctcataaggtaccagcacac

SEQ ID NO: 4234321 - DNA, 25 bp, Homo sapien
tgatgggatcttctacatactgggc

SEQ ID NO: 4234322 - DNA, 25 bp, Homo sapien
cgtttgtaagctgatccacatcatg

SEQ ID NO: 4234323 - DNA, 25 bp, Homo sapien
tataccaccttcatgaatatcactg

SEQ ID NO: 4234324 - DNA, 25 bp, Homo sapien
aacattttgtgatctttgatcctgt

SEQ ID NO: 4234325 - DNA, 25 bp, Homo sapien
ggggataattgccaaaaacagtagc

SEQ ID NO: 4234326 - DNA, 25 bp, Homo sapien
caagactgtcgtgaattcagtgcca

SEQ ID NO: 4234327 - DNA, 25 bp, Homo sapien
tgttacacatgaaattgtacaagac

SEQ ID NO: 4234328 - DNA, 25 bp, Homo sapien
aattggacggcggttcatccctcca

SEQ ID NO: 4234329 - DNA, 25 bp, Homo sapien
tccaacacaactgctgttacacatg

SEQ ID NO: 4234330 - DNA, 25 bp, Homo sapien
tatgtaaccgtttgtagcaaggatt

SEQ ID NO: 4234331 - DNA, 25 bp, Homo sapien
agcaaggatttagagcacaaaggac

SEQ ID NO: 4234332 - DNA, 25 bp, Homo sapien
agatcttttatgtaaccgtttgtag

SEQ ID NO: 4234333 - DNA, 25 bp, Homo sapien
cgtttgtagcaaggatttagagcac

SEQ ID NO: 4234334 - DNA, 25 bp, Homo sapien
tcaaagcagcgtcggcccaggactt

SEQ ID NO: 4234335 - DNA, 25 bp, Homo sapien
gatgctatcttcatccgccttcctg

SEQ ID NO: 4234336 - DNA, 25 bp, Homo sapien
acagatccgggcctcaaagcagcgt

SEQ ID NO: 4234337 - DNA, 25 bp, Homo sapien
catcaccgttctttgtactgtccga

SEQ ID NO: 4234338 - DNA, 25 bp, Homo sapien
aggtcacaggtcttatcatgcagct

SEQ ID NO: 4234339 - DNA, 25 bp, Homo sapien
gcagcttctccaatatcaccccatt

SEQ ID NO: 4234340 - DNA, 25 bp, Homo sapien
tcacaggtcttatcatgcagcttct

SEQ ID NO: 4234341 - DNA, 25 bp, Homo sapien
acaggtcttatcatgcagcttctcc

SEQ ID NO: 4234342 - DNA, 25 bp, Homo sapien
tggtggaggaaaaatgcaagtttca

SEQ ID NO: 4234343 - DNA, 25 bp, Homo sapien
gtggaggaaaaatgcaagtttcatc

SEQ ID NO: 4234344 - DNA, 25 bp, Homo sapien
ctggtggaggaaaaatgcaagtttc

SEQ ID NO: 4234345 - DNA, 25 bp, Homo sapien
ggtggaggaaaaatgcaagtttcat

SEQ ID NO: 4234346 - DNA, 25 bp, Homo sapien
gtaagtataacagttcatcatctgg

SEQ ID NO: 4234347 - DNA, 25 bp, Homo sapien
tgatggatgtcatctggataccatg

SEQ ID NO: 4234348 - DNA, 25 bp, Homo sapien
tcatctggggatcttcgtttcttga

SEQ ID NO: 4234349 - DNA, 25 bp, Homo sapien
ctggataccatgtgtgttctgacga

SEQ ID NO: 4234350 - DNA, 25 bp, Homo sapien
cgtttcaattgtgtgctgaggaagg

SEQ ID NO: 4234351 - DNA, 25 bp, Homo sapien
gctgttgctgttgcctgtacgtttc

SEQ ID NO: 4234352 - DNA, 25 bp, Homo sapien
tttctgaagtaagtgctggtgctgc

SEQ ID NO: 4234353 - DNA, 25 bp, Homo sapien
atttcataagtctcacggcccctca

SEQ ID NO: 4234354 - DNA, 25 bp, Homo sapien
ccaattatcatgcactaggtctcag

SEQ ID NO: 4234355 - DNA, 25 bp, Homo sapien
gacacgtaaaaaaggttgcaactga

SEQ ID NO: 4234356 - DNA, 25 bp, Homo sapien
ccaaaagtggatagtgtgcatccca

SEQ ID NO: 4234357 - DNA, 25 bp, Homo sapien
tctacagtgttattcccaaaagtgg

SEQ ID NO: 4234358 - DNA, 25 bp, Homo sapien
ctacagagtctctgacaatacttcc

SEQ ID NO: 4234359 - DNA, 25 bp, Homo sapien
tctacattactcaagtggactcata

SEQ ID NO: 4234360 - DNA, 25 bp, Homo sapien
aaatataatctttgcctctggaaga

SEQ ID NO: 4234361 - DNA, 25 bp, Homo sapien
taaacaaggtcctgattggtcaacc

SEQ ID NO: 4234362 - DNA, 25 bp, Homo sapien
cggggctccacaagctcattcctga

SEQ ID NO: 4234363 - DNA, 25 bp, Homo sapien
ctatgggtacactgatcggtttggg

SEQ ID NO: 4234364 - DNA, 25 bp, Homo sapien
taaagaagacgtcagattgttttgg

SEQ ID NO: 4234365 - DNA, 25 bp, Homo sapien
gggcttggaatgtctaaagaagacg

SEQ ID NO: 4234366 - DNA, 25 bp, Homo sapien
tggtaatgatcacctcgctgcccag

SEQ ID NO: 4234367 - DNA, 25 bp, Homo sapien
gaaatgttctacctacacatgaggg

SEQ ID NO: 4234368 - DNA, 25 bp, Homo sapien
tatgagggctagatacacacgcaca

SEQ ID NO: 4234369 - DNA, 25 bp, Homo sapien
ccaatggccggtctaaggatacaaa

SEQ ID NO: 4234370 - DNA, 25 bp, Homo sapien
ggagctgttaccatatgaagatgga

SEQ ID NO: 4234371 - DNA, 25 bp, Homo sapien
ggttgataagctggctcacagaagg

SEQ ID NO: 4234372 - DNA, 25 bp, Homo sapien
gttggctcccatgccatcaggaatg

SEQ ID NO: 4234373 - DNA, 25 bp, Homo sapien
tgaagatggagactgtattgaggtc

SEQ ID NO: 4234374 - DNA, 25 bp, Homo sapien
taggtgtctagatccctacagtccc

SEQ ID NO: 4234375 - DNA, 25 bp, Homo sapien
caatatttagaaggactcacgtgcc

SEQ ID NO: 4234376 - DNA, 25 bp, Homo sapien
catctagtcaaacagaacggtcaga

SEQ ID NO: 4234377 - DNA, 25 bp, Homo sapien
cattttcagggttgtatacaggaac

SEQ ID NO: 4234378 - DNA, 25 bp, Homo sapien
catcatcatgtaccagcatcccagt

SEQ ID NO: 4234379 - DNA, 25 bp, Homo sapien
cagaagcaggaggaacaaaaagggt

SEQ ID NO: 4234380 - DNA, 25 bp, Homo sapien
acagaagcaggaggaacaaaaaggg

SEQ ID NO: 4234381 - DNA, 25 bp, Homo sapien
ctgaacagaagcaggaggaacaaaa

SEQ ID NO: 4234382 - DNA, 25 bp, Homo sapien
gaacagaagcaggaggaacaaaaag

SEQ ID NO: 4234383 - DNA, 25 bp, Homo sapien
atgctgcaatctgtgggatacggag

SEQ ID NO: 4234384 - DNA, 25 bp, Homo sapien
ctgacaatgctgcaatctgtgggat

SEQ ID NO: 4234385 - DNA, 25 bp, Homo sapien
caatgctgcaatctgtgggatacgg

SEQ ID NO: 4234386 - DNA, 25 bp, Homo sapien
gacaatgctgcaatctgtgggatac

SEQ ID NO: 4234387 - DNA, 25 bp, Homo sapien
tatacactaggcaagaaatctggga

SEQ ID NO: 4234388 - DNA, 25 bp, Homo sapien
tcattacagaacagaccctgggtgg

SEQ ID NO: 4234389 - DNA, 25 bp, Homo sapien
gaacctactcttgcctctgtgggaa

SEQ ID NO: 4234390 - DNA, 25 bp, Homo sapien
tgactgaactccaaccacaggactg

SEQ ID NO: 4234391 - DNA, 25 bp, Homo sapien
cagcccctgggtcgtgaaatagtcc

SEQ ID NO: 4234392 - DNA, 25 bp, Homo sapien
gagtaatgctcaatctgatagatgg

SEQ ID NO: 4234393 - DNA, 25 bp, Homo sapien
atccatggagtaatgctcaatctga

SEQ ID NO: 4234394 - DNA, 25 bp, Homo sapien
gtcgtgaaatagtccagacatgatg

SEQ ID NO: 4234395 - DNA, 25 bp, Homo sapien
gaagcaagaaaaagtcccctctcgc

SEQ ID NO: 4234396 - DNA, 25 bp, Homo sapien
gaacggctgaatctcccttaaggta

SEQ ID NO: 4234397 - DNA, 25 bp, Homo sapien
ttttaagagaatagcaccaccggtg

SEQ ID NO: 4234398 - DNA, 25 bp, Homo sapien
gagaggcaaagtgataaccccaagt

SEQ ID NO: 4234399 - DNA, 25 bp, Homo sapien
ttgaggctctcagtaaatgcaaagc

SEQ ID NO: 4234400 - DNA, 25 bp, Homo sapien
gcccggcctaaataagcatagcttt

SEQ ID NO: 4234401 - DNA, 25 bp, Homo sapien
tcctaatgatcaagggaacatcctg

SEQ ID NO: 4234402 - DNA, 25 bp, Homo sapien
cacagattggcataggacttagtca

SEQ ID NO: 4234403 - DNA, 25 bp, Homo sapien
cagggattttcagacttgccagatc

SEQ ID NO: 4234404 - DNA, 25 bp, Homo sapien
tcagggattttcagacttgccagat

SEQ ID NO: 4234405 - DNA, 25 bp, Homo sapien
tgcggcgagcatccatgtcaaagtt

SEQ ID NO: 4234406 - DNA, 25 bp, Homo sapien
cggagggtgaatcgcacagcatcaa

SEQ ID NO: 4234407 - DNA, 25 bp, Homo sapien
tggagcccacactgactgtagaggc

SEQ ID NO: 4234408 - DNA, 25 bp, Homo sapien
aattcgtggagctgccggtggtcca

SEQ ID NO: 4234409 - DNA, 25 bp, Homo sapien
cccttaatgggtttgcaaagctgca

SEQ ID NO: 4234410 - DNA, 25 bp, Homo sapien
tacaggaatttccaaggccctagtg

SEQ ID NO: 4234411 - DNA, 25 bp, Homo sapien
tgacagcccttgaccagaatgcatg

SEQ ID NO: 4234412 - DNA, 25 bp, Homo sapien
tagtactgacatagctcggaagtcc

SEQ ID NO: 4234413 - DNA, 25 bp, Homo sapien
caaagcccatgtgtagcctccacac

SEQ ID NO: 4234414 - DNA, 25 bp, Homo sapien
tagagccacatcttgtgccatttgc

SEQ ID NO: 4234415 - DNA, 25 bp, Homo sapien
tgacaacacagggtagttattcttg

SEQ ID NO: 4234416 - DNA, 25 bp, Homo sapien
tgccatttgctgacaacacagggta

SEQ ID NO: 4234417 - DNA, 25 bp, Homo sapien
gtgaaggccgaatagatgttgtgtt

SEQ ID NO: 4234418 - DNA, 25 bp, Homo sapien
aaggtagattgctatttgtcctccc

SEQ ID NO: 4234419 - DNA, 25 bp, Homo sapien
gttttctggcaacaaggcatcaaca

SEQ ID NO: 4234420 - DNA, 25 bp, Homo sapien
tgcaaaggtagattgctatttgtcc

SEQ ID NO: 4234421 - DNA, 25 bp, Homo sapien
gatctgggtgaggatctgatttctg

SEQ ID NO: 4234422 - DNA, 25 bp, Homo sapien
tagtcaccatgatgtctaccagcat

SEQ ID NO: 4234423 - DNA, 25 bp, Homo sapien
taggagtagacttttacacttggga

SEQ ID NO: 4234424 - DNA, 25 bp, Homo sapien
gattgcagtctgaaatggttccctt

SEQ ID NO: 4234425 - DNA, 25 bp, Homo sapien
atacacacatggtctgccgaacagc

SEQ ID NO: 4234426 - DNA, 25 bp, Homo sapien
taatactaacactatctcatgtggg

SEQ ID NO: 4234427 - DNA, 25 bp, Homo sapien
gctcacaacagattgaacaggcatt

SEQ ID NO: 4234428 - DNA, 25 bp, Homo sapien
ctctaaagtctcatagctcacaaca

SEQ ID NO: 4234429 - DNA, 25 bp, Homo sapien
tgatgaccagcaagaataaaccttt

SEQ ID NO: 4234430 - DNA, 25 bp, Homo sapien
ggaagcagctcacacatttttcgtg

SEQ ID NO: 4234431 - DNA, 25 bp, Homo sapien
cacacatttttcgtggctaaccctg

SEQ ID NO: 4234432 - DNA, 25 bp, Homo sapien
ttaaccagctcgaaaaagcagtgga

SEQ ID NO: 4234433 - DNA, 25 bp, Homo sapien
tcgtggctaaccctgagcacatgga

SEQ ID NO: 4234434 - DNA, 25 bp, Homo sapien
ccataatccagtcctgttccacctt

SEQ ID NO: 4234435 - DNA, 25 bp, Homo sapien
taatccagtcctgttccaccttgtt

SEQ ID NO: 4234436 - DNA, 25 bp, Homo sapien
cataatccagtcctgttccaccttg

SEQ ID NO: 4234437 - DNA, 25 bp, Homo sapien
ccccataatccagtcctgttccacc

SEQ ID NO: 4234438 - DNA, 25 bp, Homo sapien
aggagtagggtatactgccacgcat

SEQ ID NO: 4234439 - DNA, 25 bp, Homo sapien
gagtgtgagtatgcaggttgattcc

SEQ ID NO: 4234440 - DNA, 25 bp, Homo sapien
gaaggagtagggtatactgccacgc

SEQ ID NO: 4234441 - DNA, 25 bp, Homo sapien
gtgagtatgcaggttgattccataa

SEQ ID NO: 4234442 - DNA, 25 bp, Homo sapien
gcagccaggaccattccacttactc

SEQ ID NO: 4234443 - DNA, 25 bp, Homo sapien
atttggcagccaggaccattccact

SEQ ID NO: 4234444 - DNA, 25 bp, Homo sapien
gccaggaccattccacttactctct

SEQ ID NO: 4234445 - DNA, 25 bp, Homo sapien
caggaccattccacttactctctgg

SEQ ID NO: 4234446 - DNA, 25 bp, Homo sapien
tgcaaaattaatggtaatagaaacg

SEQ ID NO: 4234447 - DNA, 25 bp, Homo sapien
catctatggatatagggataaaggg

SEQ ID NO: 4234448 - DNA, 25 bp, Homo sapien
gaaacgataatgagcatccagacat

SEQ ID NO: 4234449 - DNA, 25 bp, Homo sapien
taaagggacagtcatcagcatccag

SEQ ID NO: 4234450 - DNA, 25 bp, Homo sapien
ttacaaattcacatcattgcagata

SEQ ID NO: 4234451 - DNA, 25 bp, Homo sapien
atttttccattcaaacatgataatc

SEQ ID NO: 4234452 - DNA, 25 bp, Homo sapien
tttttccattcaaacatgataatca

SEQ ID NO: 4234453 - DNA, 25 bp, Homo sapien
aacttgaacattccttctcagtgac

SEQ ID NO: 4234454 - DNA, 25 bp, Homo sapien
tgtgtccaaagttgaccttcatgtg

SEQ ID NO: 4234455 - DNA, 25 bp, Homo sapien
tgtgttgtgagccaacctgcttgcc

SEQ ID NO: 4234456 - DNA, 25 bp, Homo sapien
caaatccaaagctctaaatgtaccc

SEQ ID NO: 4234457 - DNA, 25 bp, Homo sapien
ggattgagagcccagagaatgtgcc

SEQ ID NO: 4234458 - DNA, 25 bp, Homo sapien
tgtgccttggctaaaagtttctgta

SEQ ID NO: 4234459 - DNA, 25 bp, Homo sapien
gaccacaagcgaggcagatgtcaga

SEQ ID NO: 4234460 - DNA, 25 bp, Homo sapien
cactgcattctagcgagaggtgtgg

SEQ ID NO: 4234461 - DNA, 25 bp, Homo sapien
ctccagaagtcattgtgacagccac

SEQ ID NO: 4234462 - DNA, 25 bp, Homo sapien
catttctgactgagctatccagcct

SEQ ID NO: 4234463 - DNA, 25 bp, Homo sapien
caaagtctctgtcatttctatggac

SEQ ID NO: 4234464 - DNA, 25 bp, Homo sapien
ccccagaagcttaatcgtagtttga

SEQ ID NO: 4234465 - DNA, 25 bp, Homo sapien
gaaatagaccgctggcatgtttaag

SEQ ID NO: 4234466 - DNA, 25 bp, Homo sapien
cctctctgctataaatgaatccaag

SEQ ID NO: 4234467 - DNA, 25 bp, Homo sapien
aagttatcctggaatgaggtcgcat

SEQ ID NO: 4234468 - DNA, 25 bp, Homo sapien
tcatgtctgaaaggttggcagccgt

SEQ ID NO: 4234469 - DNA, 25 bp, Homo sapien
ttggcagccgtttcatcagtcctct

SEQ ID NO: 4234470 - DNA, 25 bp, Homo sapien
cttgatgtttctccctcttaatctc

SEQ ID NO: 4234471 - DNA, 25 bp, Homo sapien
tctttcttgatgtttctccctctta

SEQ ID NO: 4234472 - DNA, 25 bp, Homo sapien
tctctttcttgatgtttctccctct

SEQ ID NO: 4234473 - DNA, 25 bp, Homo sapien
ttcttgatgtttctccctcttaatc

SEQ ID NO: 4234474 - DNA, 25 bp, Homo sapien
tcaggacatcaaggctatgagcttg

SEQ ID NO: 4234475 - DNA, 25 bp, Homo sapien
gtactcaggacatcaaggctatgag

SEQ ID NO: 4234476 - DNA, 25 bp, Homo sapien
catcaaggctatgagcttgagtcag

SEQ ID NO: 4234477 - DNA, 25 bp, Homo sapien
gctatgagcttgagtcagcctttcc

SEQ ID NO: 4234478 - DNA, 25 bp, Homo sapien
gatgtgcgcagcgacttccagcgca

SEQ ID NO: 4234479 - DNA, 25 bp, Homo sapien
caccgcgtcagcgaggatgtgcgca

SEQ ID NO: 4234480 - DNA, 25 bp, Homo sapien
gcgcgctgttatcgcagctgtgaga

SEQ ID NO: 4234481 - DNA, 25 bp, Homo sapien
gcgcagagtgccctacaactacctg

SEQ ID NO: 4234482 - DNA, 25 bp, Homo sapien
ctcaagcggcgctagctctctggct

SEQ ID NO: 4234483 - DNA, 25 bp, Homo sapien
gcctcaagcggcgctagctctctgg

SEQ ID NO: 4234484 - DNA, 25 bp, Homo sapien
tcaagcggcgctagctctctggctg

SEQ ID NO: 4234485 - DNA, 25 bp, Homo sapien
ccggcctcaagcggcgctagctctc

SEQ ID NO: 4234486 - DNA, 25 bp, Homo sapien
ggcaccattgacacattagactgaa

SEQ ID NO: 4234487 - DNA, 25 bp, Homo sapien
gcctcgcagtgctcaaactatgcta

SEQ ID NO: 4234488 - DNA, 25 bp, Homo sapien
actatgctatatccctcaggcttgg

SEQ ID NO: 4234489 - DNA, 25 bp, Homo sapien
tactcctgctactgcctacctgtgg

SEQ ID NO: 4234490 - DNA, 25 bp, Homo sapien
ctaatcaatgagatgctgagagttc

SEQ ID NO: 4234491 - DNA, 25 bp, Homo sapien
ggtgggctgctagtacccatcaggc

SEQ ID NO: 4234492 - DNA, 25 bp, Homo sapien
ccacagatgaggttgctaatcaatg

SEQ ID NO: 4234493 - DNA, 25 bp, Homo sapien
gaaggattgtgcatttccttgagac

SEQ ID NO: 4234494 - DNA, 25 bp, Homo sapien
catcttcatactctgctgctggatc

SEQ ID NO: 4234495 - DNA, 25 bp, Homo sapien
atcttcatactctgctgctggatca

SEQ ID NO: 4234496 - DNA, 25 bp, Homo sapien
tgtgtttagatccatcttcatactc

SEQ ID NO: 4234497 - DNA, 25 bp, Homo sapien
ccatcttcatactctgctgctggat

SEQ ID NO: 4234498 - DNA, 25 bp, Homo sapien
acacccagcccagaagacttcaatt

SEQ ID NO: 4234499 - DNA, 25 bp, Homo sapien
cagaagacttcaattttaagtagaa

SEQ ID NO: 4234500 - DNA, 25 bp, Homo sapien
agacttcaattttaagtagaaggtg

SEQ ID NO: 4234501 - DNA, 25 bp, Homo sapien
cagcccagaagacttcaattttaag

SEQ ID NO: 4234502 - DNA, 25 bp, Homo sapien
gttttctggtgggcaggagtgggga

SEQ ID NO: 4234503 - DNA, 25 bp, Homo sapien
ttctggtgggcaggagtggggatca

SEQ ID NO: 4234504 - DNA, 25 bp, Homo sapien
gcaggagtggggatcacaaggtact

SEQ ID NO: 4234505 - DNA, 25 bp, Homo sapien
agtggggatcacaaggtactcagtg

SEQ ID NO: 4234506 - DNA, 25 bp, Homo sapien
gacctcccaagggaggtcacgatct

SEQ ID NO: 4234507 - DNA, 25 bp, Homo sapien
acctcccaagggaggtcacgatctg

SEQ ID NO: 4234508 - DNA, 25 bp, Homo sapien
gaggacctcccaagggaggtcacga

SEQ ID NO: 4234509 - DNA, 25 bp, Homo sapien
caggaggacctcccaagggaggtca

SEQ ID NO: 4234510 - DNA, 25 bp, Homo sapien
ggtcacaaggtattcagtgggggag

SEQ ID NO: 4234511 - DNA, 25 bp, Homo sapien
tcacaaggtattcagtgggggagct

SEQ ID NO: 4234512 - DNA, 25 bp, Homo sapien
caaggtattcagtgggggagctttt

SEQ ID NO: 4234513 - DNA, 25 bp, Homo sapien
cacaaggtattcagtgggggagctt

SEQ ID NO: 4234514 - DNA, 25 bp, Homo sapien
ttaaaggaaccacaagcacagagag

SEQ ID NO: 4234515 - DNA, 25 bp, Homo sapien
gaattaaaggaaccacaagcacaga

SEQ ID NO: 4234516 - DNA, 25 bp, Homo sapien
aattaaaggaaccacaagcacagag

SEQ ID NO: 4234517 - DNA, 25 bp, Homo sapien
atagaattaaaggaaccacaagcac

SEQ ID NO: 4234518 - DNA, 25 bp, Homo sapien
tgtgtcaacttctacccatttggaa

SEQ ID NO: 4234519 - DNA, 25 bp, Homo sapien
atgtgtcaacttctacccatttgga

SEQ ID NO: 4234520 - DNA, 25 bp, Homo sapien
ccatgtgtcaacttctacccatttg

SEQ ID NO: 4234521 - DNA, 25 bp, Homo sapien
catgtgtcaacttctacccatttgg

SEQ ID NO: 4234522 - DNA, 25 bp, Homo sapien
cttgatggtgccttagcaccttaac

SEQ ID NO: 4234523 - DNA, 25 bp, Homo sapien
gtgccttagcaccttaacagtctct

SEQ ID NO: 4234524 - DNA, 25 bp, Homo sapien
gccttagcaccttaacagtctctat

SEQ ID NO: 4234525 - DNA, 25 bp, Homo sapien
gatggtgccttagcaccttaacagt

SEQ ID NO: 4234526 - DNA, 25 bp, Homo sapien
tacccccacacagcagatggacctt

SEQ ID NO: 4234527 - DNA, 25 bp, Homo sapien
cacagcagatggacctttggcgcac

SEQ ID NO: 4234528 - DNA, 25 bp, Homo sapien
ccacacagcagatggacctttggcg

SEQ ID NO: 4234529 - DNA, 25 bp, Homo sapien
ccccacacagcagatggacctttgg

SEQ ID NO: 4234530 - DNA, 25 bp, Homo sapien
ttcactcatccacaaactgagaaca

SEQ ID NO: 4234531 - DNA, 25 bp, Homo sapien
ctgagaacaccaaagactccagtaa

SEQ ID NO: 4234532 - DNA, 25 bp, Homo sapien
tatatcaagtaatacatatgagctc

SEQ ID NO: 4234533 - DNA, 25 bp, Homo sapien
tatgagctcataatctgccacgatt

SEQ ID NO: 4234534 - DNA, 25 bp, Homo sapien
tgctctgatgtttcaacaacacatc

SEQ ID NO: 4234535 - DNA, 25 bp, Homo sapien
ttgctctgatgtttcaacaacacat

SEQ ID NO: 4234536 - DNA, 25 bp, Homo sapien
gttgctctgatgtttcaacaacaca

SEQ ID NO: 4234537 - DNA, 25 bp, Homo sapien
ctctgatgtttcaacaacacatcag

SEQ ID NO: 4234538 - DNA, 25 bp, Homo sapien
tctgcttttcaaggtattattggac

SEQ ID NO: 4234539 - DNA, 25 bp, Homo sapien
actagcaaatgctctgatcccttct

SEQ ID NO: 4234540 - DNA, 25 bp, Homo sapien
atcccttctgaggactctccagatt

SEQ ID NO: 4234541 - DNA, 25 bp, Homo sapien
tggtgccaactagcaaatgctctga

SEQ ID NO: 4234542 - DNA, 25 bp, Homo sapien
catgatgttatctctgaagttgttc

SEQ ID NO: 4234543 - DNA, 25 bp, Homo sapien
caaagcagcatgatgttatctctga

SEQ ID NO: 4234544 - DNA, 25 bp, Homo sapien
gcatgatgttatctctgaagttgtt

SEQ ID NO: 4234545 - DNA, 25 bp, Homo sapien
tctggcagacagcaactcgtttaag

SEQ ID NO: 4234546 - DNA, 25 bp, Homo sapien
ccaatagcgtccttgagtaagacaa

SEQ ID NO: 4234547 - DNA, 25 bp, Homo sapien
tacaagtggatcacagcataattcc

SEQ ID NO: 4234548 - DNA, 25 bp, Homo sapien
ttctgtttgtctgcctcatgctgtg

SEQ ID NO: 4234549 - DNA, 25 bp, Homo sapien
cagcgtaatgagctacttctgcatg

SEQ ID NO: 4234550 - DNA, 25 bp, Homo sapien
agcgtaatgagctacttctgcatga

SEQ ID NO: 4234551 - DNA, 25 bp, Homo sapien
tcagcgtaatgagctacttctgcat

SEQ ID NO: 4234552 - DNA, 25 bp, Homo sapien
gcgtaatgagctacttctgcatgac

SEQ ID NO: 4234553 - DNA, 25 bp, Homo sapien
gtatctaaaccccatgatgatatta

SEQ ID NO: 4234554 - DNA, 25 bp, Homo sapien
tgtagttacacccttgtcacttaaa

SEQ ID NO: 4234555 - DNA, 25 bp, Homo sapien
ccccatgatgatattatctaaaggt

SEQ ID NO: 4234556 - DNA, 25 bp, Homo sapien
tattatctaaaggtgtagttacacc

SEQ ID NO: 4234557 - DNA, 25 bp, Homo sapien
agctgattcgtctctagagctgagc

SEQ ID NO: 4234558 - DNA, 25 bp, Homo sapien
cttccttcgtaaatgagtagctgat

SEQ ID NO: 4234559 - DNA, 25 bp, Homo sapien
ggcgctgcccatgcaaactctggac

SEQ ID NO: 4234560 - DNA, 25 bp, Homo sapien
ctatggtccttcactttagcacagg

SEQ ID NO: 4234561 - DNA, 25 bp, Homo sapien
agttcactaggtcttccggtccagg

SEQ ID NO: 4234562 - DNA, 25 bp, Homo sapien
ccaggaactgcttctgtcactatct

SEQ ID NO: 4234563 - DNA, 25 bp, Homo sapien
tctatgttgaccgatgcatggacaa

SEQ ID NO: 4234564 - DNA, 25 bp, Homo sapien
tctgtcactatctgggaccaccttt

SEQ ID NO: 4234565 - DNA, 25 bp, Homo sapien
attccccagcctttaggttgctcct

SEQ ID NO: 4234566 - DNA, 25 bp, Homo sapien
cattccccagcctttaggttgctcc

SEQ ID NO: 4234567 - DNA, 25 bp, Homo sapien
tcttccgtactctacaatatgtccc

SEQ ID NO: 4234568 - DNA, 25 bp, Homo sapien
tacaatatgtccctgaccacttcca

SEQ ID NO: 4234569 - DNA, 25 bp, Homo sapien
gtactctacaatatgtccctgacca

SEQ ID NO: 4234570 - DNA, 25 bp, Homo sapien
ctttcttcttccgtactctacaata

SEQ ID NO: 4234571 - DNA, 25 bp, Homo sapien
tctcttgaatttgtgggtgtcttct

SEQ ID NO: 4234572 - DNA, 25 bp, Homo sapien
ctcttgaatttgtgggtgtcttctg

SEQ ID NO: 4234573 - DNA, 25 bp, Homo sapien
ctctcttgaatttgtgggtgtcttc

SEQ ID NO: 4234574 - DNA, 25 bp, Homo sapien
tcttgaatttgtgggtgtcttctgt

SEQ ID NO: 4234575 - DNA, 25 bp, Homo sapien
ttgggagccagtaaggcacataagg

SEQ ID NO: 4234576 - DNA, 25 bp, Homo sapien
gagtcgctgattagcattcagttca

SEQ ID NO: 4234577 - DNA, 25 bp, Homo sapien
tgcacagctggagtcgctgattagc

SEQ ID NO: 4234578 - DNA, 25 bp, Homo sapien
cagcaattggagtggagcacttggg

SEQ ID NO: 4234579 - DNA, 25 bp, Homo sapien
attaactgggccattctgcgcaggc

SEQ ID NO: 4234580 - DNA, 25 bp, Homo sapien
ttaactgggccattctgcgcaggcc

SEQ ID NO: 4234581 - DNA, 25 bp, Homo sapien
tgaagtgtgatcattaactgggcca

SEQ ID NO: 4234582 - DNA, 25 bp, Homo sapien
cgtgaaattatgaagtgtgatcatt

SEQ ID NO: 4234583 - DNA, 25 bp, Homo sapien
aagaccaccaccattgtagatctgg

SEQ ID NO: 4234584 - DNA, 25 bp, Homo sapien
ggtggtctgctgtgattcccaagac

SEQ ID NO: 4234585 - DNA, 25 bp, Homo sapien
acaacagctgagctagccaagccca

SEQ ID NO: 4234586 - DNA, 25 bp, Homo sapien
gataccctggggaatttagagctgt

SEQ ID NO: 4234587 - DNA, 25 bp, Homo sapien
gcttgggaaagagcagacgtatgaa

SEQ ID NO: 4234588 - DNA, 25 bp, Homo sapien
tgttccctgaacactccgaaatgta

SEQ ID NO: 4234589 - DNA, 25 bp, Homo sapien
taggatgccctctgccaaaatttca

SEQ ID NO: 4234590 - DNA, 25 bp, Homo sapien
gttggaatgaactgggttaagatct

SEQ ID NO: 4234591 - DNA, 25 bp, Homo sapien
cacctcaccctcttaaatgcagttg

SEQ ID NO: 4234592 - DNA, 25 bp, Homo sapien
aatacacaggataagttggcagcca

SEQ ID NO: 4234593 - DNA, 25 bp, Homo sapien
caagcaaaagctgttgagaacaggt

SEQ ID NO: 4234594 - DNA, 25 bp, Homo sapien
gagaacaggtctaatgactactgag

SEQ ID NO: 4234595 - DNA, 25 bp, Homo sapien
ctggaaacagaccaatagacatttt

SEQ ID NO: 4234596 - DNA, 25 bp, Homo sapien
tggaaacagaccaatagacattttg

SEQ ID NO: 4234597 - DNA, 25 bp, Homo sapien
tggtaaatccaacagcaagggagat

SEQ ID NO: 4234598 - DNA, 25 bp, Homo sapien
cacaaggaaagtcagccactgtgtc

SEQ ID NO: 4234599 - DNA, 25 bp, Homo sapien
taaggtgctatctgttcagtgatgc

SEQ ID NO: 4234600 - DNA, 25 bp, Homo sapien
cagctgacgctgctaggatagttag

SEQ ID NO: 4234601 - DNA, 25 bp, Homo sapien
cccaggtgttgtaacacaactttat

SEQ ID NO: 4234602 - DNA, 25 bp, Homo sapien
caattgagtagctgcatgctgttcc

SEQ ID NO: 4234603 - DNA, 25 bp, Homo sapien
gaggcaaatctttctgcatgaccaa

SEQ ID NO: 4234604 - DNA, 25 bp, Homo sapien
taaattcctgttgaccttcccacac

SEQ ID NO: 4234605 - DNA, 25 bp, Homo sapien
ccatacatgcttatgaggaggtcag

SEQ ID NO: 4234606 - DNA, 25 bp, Homo sapien
tggtaaacctgtggtccgtggaaca

SEQ ID NO: 4234607 - DNA, 25 bp, Homo sapien
tgcaaaaaccatccatcagaaagag

SEQ ID NO: 4234608 - DNA, 25 bp, Homo sapien
gaggacataccttaaccatggagcc

SEQ ID NO: 4234609 - DNA, 25 bp, Homo sapien
catgtgacttttcaagtactgtgct

SEQ ID NO: 4234610 - DNA, 25 bp, Homo sapien
ttattgaaatttgataaatccatgt

SEQ ID NO: 4234611 - DNA, 25 bp, Homo sapien
tctgactcaaatcatccaggagttc

SEQ ID NO: 4234612 - DNA, 25 bp, Homo sapien
ggaaataggaataaatatctgactc

SEQ ID NO: 4234613 - DNA, 25 bp, Homo sapien
gctctcaagggaggtatttctcagt

SEQ ID NO: 4234614 - DNA, 25 bp, Homo sapien
gattttagcataccaggctctcaag

SEQ ID NO: 4234615 - DNA, 25 bp, Homo sapien
gctaaccaggttctccatagacaac

SEQ ID NO: 4234616 - DNA, 25 bp, Homo sapien
catgagtttctagttatcagtgacc

SEQ ID NO: 4234617 - DNA, 25 bp, Homo sapien
gaagtaatcagcctcgcacagacct

SEQ ID NO: 4234618 - DNA, 25 bp, Homo sapien
cgattccccgctaattgtaggttga

SEQ ID NO: 4234619 - DNA, 25 bp, Homo sapien
agatgggcctgaatcacagtgaagc

SEQ ID NO: 4234620 - DNA, 25 bp, Homo sapien
gttgtaatgcagagtaaaagggcct

SEQ ID NO: 4234621 - DNA, 25 bp, Homo sapien
ttgggaatttatcctctaagacctg

SEQ ID NO: 4234622 - DNA, 25 bp, Homo sapien
catgtttcttcacatcgagcctcat

SEQ ID NO: 4234623 - DNA, 25 bp, Homo sapien
tcagtgccaaaactcgagatccatg

SEQ ID NO: 4234624 - DNA, 25 bp, Homo sapien
aactcgagatccatgtttcttcaca

SEQ ID NO: 4234625 - DNA, 25 bp, Homo sapien
gagatccatgtttcttcacatcgag

SEQ ID NO: 4234626 - DNA, 25 bp, Homo sapien
gcatgtacagtaaggattccgacac

SEQ ID NO: 4234627 - DNA, 25 bp, Homo sapien
gaagagtcaggcagattatcagcat

SEQ ID NO: 4234628 - DNA, 25 bp, Homo sapien
ggcagattatcagcatgtacagtaa

SEQ ID NO: 4234629 - DNA, 25 bp, Homo sapien
taaggattccgacacaggcagaaat

SEQ ID NO: 4234630 - DNA, 25 bp, Homo sapien
tttctgacccaactgtgggctagtg

SEQ ID NO: 4234631 - DNA, 25 bp, Homo sapien
agaaggcaggtcagtgcaagggctg

SEQ ID NO: 4234632 - DNA, 25 bp, Homo sapien
tcagtgcaagggctgagtgtgtttc

SEQ ID NO: 4234633 - DNA, 25 bp, Homo sapien
gagagaggagttctgtaacgttttc

SEQ ID NO: 4234634 - DNA, 25 bp, Homo sapien
caaacaggctgtaaccaacagtggg

SEQ ID NO: 4234635 - DNA, 25 bp, Homo sapien
tcaggatggcaacatgggcagacac

SEQ ID NO: 4234636 - DNA, 25 bp, Homo sapien
ggtacctggcaatgtgaaaatactg

SEQ ID NO: 4234637 - DNA, 25 bp, Homo sapien
taagtggcgggtgtcagtcttctgt

SEQ ID NO: 4234638 - DNA, 25 bp, Homo sapien
tcagcattcaccatccaacagtcag

SEQ ID NO: 4234639 - DNA, 25 bp, Homo sapien
caagcgatgtattgaagaagatccc

SEQ ID NO: 4234640 - DNA, 25 bp, Homo sapien
aaaaaggcaaagaagcaagcgatgt

SEQ ID NO: 4234641 - DNA, 25 bp, Homo sapien
caggtggccacaatcaaaaacccag

SEQ ID NO: 4234642 - DNA, 25 bp, Homo sapien
cagtagcagagatcacttaattacc

SEQ ID NO: 4234643 - DNA, 25 bp, Homo sapien
gactcaataaatagtccatgttgcc

SEQ ID NO: 4234644 - DNA, 25 bp, Homo sapien
attgggtaggttttgcatgccttgc

SEQ ID NO: 4234645 - DNA, 25 bp, Homo sapien
taatgggataacaagacctacctca

SEQ ID NO: 4234646 - DNA, 25 bp, Homo sapien
cgttgacttttgtccaacaatggat

SEQ ID NO: 4234647 - DNA, 25 bp, Homo sapien
caatggattaaagtgagctgctgtg

SEQ ID NO: 4234648 - DNA, 25 bp, Homo sapien
aactcttcttctaaatcccgtgcca

SEQ ID NO: 4234649 - DNA, 25 bp, Homo sapien
tcttctagtaggagtagcatcattc

SEQ ID NO: 4234650 - DNA, 25 bp, Homo sapien
tggaatcgtactcatcacaggtgcg

SEQ ID NO: 4234651 - DNA, 25 bp, Homo sapien
caaaagcatttgtgacgcattccca

SEQ ID NO: 4234652 - DNA, 25 bp, Homo sapien
cagaggcctcggcattttgtgctca

SEQ ID NO: 4234653 - DNA, 25 bp, Homo sapien
gatgctccgcaagtatggaatcgta

SEQ ID NO: 4234654 - DNA, 25 bp, Homo sapien
taatgtacggctcatcagggaggaa

SEQ ID NO: 4234655 - DNA, 25 bp, Homo sapien
tagtaacgtggctccagcaacaaag

SEQ ID NO: 4234656 - DNA, 25 bp, Homo sapien
gggaggaatttcacgcagtcaagac

SEQ ID NO: 4234657 - DNA, 25 bp, Homo sapien
tcatcaacgctcgagttaccaccag

SEQ ID NO: 4234658 - DNA, 25 bp, Homo sapien
caaagtagaacgttccacatacaca

SEQ ID NO: 4234659 - DNA, 25 bp, Homo sapien
tagaacgttccacatacacatcaac

SEQ ID NO: 4234660 - DNA, 25 bp, Homo sapien
ccacacagagccaatgattcctggg

SEQ ID NO: 4234661 - DNA, 25 bp, Homo sapien
accacacagagccaatgattcctgg

SEQ ID NO: 4234662 - DNA, 25 bp, Homo sapien
tttatattggataccaagaaatata

SEQ ID NO: 4234663 - DNA, 25 bp, Homo sapien
agccattccgagccaacaggaccaa

SEQ ID NO: 4234664 - DNA, 25 bp, Homo sapien
caaaaagcaacccagagacccagcc

SEQ ID NO: 4234665 - DNA, 25 bp, Homo sapien
tattggataccaagaaatatattgt

SEQ ID NO: 4234666 - DNA, 25 bp, Homo sapien
aaacacccgcggctgaataggcttt

SEQ ID NO: 4234667 - DNA, 25 bp, Homo sapien
aaggatagtttctctcaggtccaac

SEQ ID NO: 4234668 - DNA, 25 bp, Homo sapien
cattttggccgtctctgtgcgaggg

SEQ ID NO: 4234669 - DNA, 25 bp, Homo sapien
tacacccttgtgtctacagcataca

SEQ ID NO: 4234670 - DNA, 25 bp, Homo sapien
cgtgcccagccgcaacattgatttt

SEQ ID NO: 4234671 - DNA, 25 bp, Homo sapien
caactagattggaactgcttcagag

SEQ ID NO: 4234672 - DNA, 25 bp, Homo sapien
ccagtggctggtatacgaagttgtt

SEQ ID NO: 4234673 - DNA, 25 bp, Homo sapien
tgaggtagaaagtcaccacgagctc

SEQ ID NO: 4234674 - DNA, 25 bp, Homo sapien
caggacgccctgtgcaagagcttta

SEQ ID NO: 4234675 - DNA, 25 bp, Homo sapien
ttgatactcacatctcaggacgccc

SEQ ID NO: 4234676 - DNA, 25 bp, Homo sapien
tcagtctgctgagccgagtggacag

SEQ ID NO: 4234677 - DNA, 25 bp, Homo sapien
tttggtcacgggacaagaacctgga

SEQ ID NO: 4234678 - DNA, 25 bp, Homo sapien
ctttactatgttcccctgaacttca

SEQ ID NO: 4234679 - DNA, 25 bp, Homo sapien
gattcatacgcccacaccaaggtta

SEQ ID NO: 4234680 - DNA, 25 bp, Homo sapien
caccaaggttatgggactgtgcttc

SEQ ID NO: 4234681 - DNA, 25 bp, Homo sapien
tcacagcggagaactgagtccagct

SEQ ID NO: 4234682 - DNA, 25 bp, Homo sapien
agagtatgtgctcacagcggagaac

SEQ ID NO: 4234683 - DNA, 25 bp, Homo sapien
gcttttgtggctacagaaggaggtg

SEQ ID NO: 4234684 - DNA, 25 bp, Homo sapien
tgagggtcaaaaccacagcatctac

SEQ ID NO: 4234685 - DNA, 25 bp, Homo sapien
tttctataaaaagaagctgctctcc

SEQ ID NO: 4234686 - DNA, 25 bp, Homo sapien
tttgtggctacagaaggaggtgagg

SEQ ID NO: 4234687 - DNA, 25 bp, Homo sapien
attgattctcacaggcgcaccatgg

SEQ ID NO: 4234688 - DNA, 25 bp, Homo sapien
gaggagaccccgaattgattctcac

SEQ ID NO: 4234689 - DNA, 25 bp, Homo sapien
cacaggcgcaccatggcagtttttg

SEQ ID NO: 4234690 - DNA, 25 bp, Homo sapien
tgaggagaccccgaattgattctca

SEQ ID NO: 4234691 - DNA, 25 bp, Homo sapien
ggttacttttggagtcaggatcctc

SEQ ID NO: 4234692 - DNA, 25 bp, Homo sapien
tcggttacttttggagtcaggatcc

SEQ ID NO: 4234693 - DNA, 25 bp, Homo sapien
ttctcggttacttttggagtcagga

SEQ ID NO: 4234694 - DNA, 25 bp, Homo sapien
ctcattcttttctcggttacttttg

SEQ ID NO: 4234695 - DNA, 25 bp, Homo sapien
ctaggtagtgatggaagctcttaac

SEQ ID NO: 4234696 - DNA, 25 bp, Homo sapien
gtagtgatggaagctcttaacttcc

SEQ ID NO: 4234697 - DNA, 25 bp, Homo sapien
taggtagtgatggaagctcttaact

SEQ ID NO: 4234698 - DNA, 25 bp, Homo sapien
ggtagtgatggaagctcttaacttc

SEQ ID NO: 4234699 - DNA, 25 bp, Homo sapien
ggtggatcttcttattgttaacaat

SEQ ID NO: 4234700 - DNA, 25 bp, Homo sapien
ctgcttctggtggatcttcttattg

SEQ ID NO: 4234701 - DNA, 25 bp, Homo sapien
tattaaatttgtgctgctctttcag

SEQ ID NO: 4234702 - DNA, 25 bp, Homo sapien
tattgttaacaatctgcttattaaa

SEQ ID NO: 4234703 - DNA, 25 bp, Homo sapien
gatggccaattcatggctccatctg

SEQ ID NO: 4234704 - DNA, 25 bp, Homo sapien
tggctccatctgcaactccacaaat

SEQ ID NO: 4234705 - DNA, 25 bp, Homo sapien
aacttggtggagtaaatacaaggtg

SEQ ID NO: 4234706 - DNA, 25 bp, Homo sapien
tctctttgcccagataaacttggtg

SEQ ID NO: 4234707 - DNA, 25 bp, Homo sapien
tatatgtgagcaacttaactgcttc

SEQ ID NO: 4234708 - DNA, 25 bp, Homo sapien
tgtcacctcagcgatctcaacgata

SEQ ID NO: 4234709 - DNA, 25 bp, Homo sapien
tgtgtttgccgctattccaggtaac

SEQ ID NO: 4234710 - DNA, 25 bp, Homo sapien
caacgatagggatcttgtgtttgcc

SEQ ID NO: 4234711 - DNA, 25 bp, Homo sapien
aagatcctggaaaataagattctgt

SEQ ID NO: 4234712 - DNA, 25 bp, Homo sapien
ctgtagaaaagcagattattcttct

SEQ ID NO: 4234713 - DNA, 25 bp, Homo sapien
acatgcgctggggattctctctgct

SEQ ID NO: 4234714 - DNA, 25 bp, Homo sapien
ggaagatcctggaaaataagattct

SEQ ID NO: 4234715 - DNA, 25 bp, Homo sapien
gatgaagaagactcccaattcagca

SEQ ID NO: 4234716 - DNA, 25 bp, Homo sapien
gactcccaattcagcaagccagaac

SEQ ID NO: 4234717 - DNA, 25 bp, Homo sapien
aattcagcaagccagaactcctcag

SEQ ID NO: 4234718 - DNA, 25 bp, Homo sapien
ctcagagatccacaagccatgcaga

SEQ ID NO: 4234719 - DNA, 25 bp, Homo sapien
tcctgcatgactcagaaggagcggg

SEQ ID NO: 4234720 - DNA, 25 bp, Homo sapien
tccaaggtttctgggctctgcaagc

SEQ ID NO: 4234721 - DNA, 25 bp, Homo sapien
cttcaggactggtgggagcagccat

SEQ ID NO: 4234722 - DNA, 25 bp, Homo sapien
tggctccatgaaagtcacagaaggt

SEQ ID NO: 4234723 - DNA, 25 bp, Homo sapien
cagactgacgagtcttcgcacatct

SEQ ID NO: 4234724 - DNA, 25 bp, Homo sapien
cgagtcttcgcacatcttcttgctc

SEQ ID NO: 4234725 - DNA, 25 bp, Homo sapien
gacgagtcttcgcacatcttcttgc

SEQ ID NO: 4234726 - DNA, 25 bp, Homo sapien
gactgacgagtcttcgcacatcttc

SEQ ID NO: 4234727 - DNA, 25 bp, Homo sapien
tgagatcggtgccaccctgcccttt

SEQ ID NO: 4234728 - DNA, 25 bp, Homo sapien
gcaagatcgtgctctcgcagttgag

SEQ ID NO: 4234729 - DNA, 25 bp, Homo sapien
tcctgtctcgacgtatttagcaatc

SEQ ID NO: 4234730 - DNA, 25 bp, Homo sapien
cgaggcgcacacatgcgctcattgc

SEQ ID NO: 4234731 - DNA, 25 bp, Homo sapien
cggagacctggatcccggcagtctt

SEQ ID NO: 4234732 - DNA, 25 bp, Homo sapien
agtgtcgccgggcactgcttccttc

SEQ ID NO: 4234733 - DNA, 25 bp, Homo sapien
aagctgagagggcgcagcaaaagca

SEQ ID NO: 4234734 - DNA, 25 bp, Homo sapien
cttccgcgcctctggccaaagcgga

SEQ ID NO: 4234735 - DNA, 25 bp, Homo sapien
gatctctaagaatccgtctaccctg

SEQ ID NO: 4234736 - DNA, 25 bp, Homo sapien
tctaccctgagattctgcggcttgg

SEQ ID NO: 4234737 - DNA, 25 bp, Homo sapien
ttgggttcgaatccgggctccagtc

SEQ ID NO: 4234738 - DNA, 25 bp, Homo sapien
cctgcaaagcaaagatgggtctctg

SEQ ID NO: 4234739 - DNA, 25 bp, Homo sapien
ctcctccagaagctggtccgacacc

SEQ ID NO: 4234740 - DNA, 25 bp, Homo sapien
cgctgagagcgacgtgataccgagt

SEQ ID NO: 4234741 - DNA, 25 bp, Homo sapien
gtgctgggacacaccgcttccttct

SEQ ID NO: 4234742 - DNA, 25 bp, Homo sapien
tgtcacagctctgcgctgagagcga

SEQ ID NO: 4234743 - DNA, 25 bp, Homo sapien
tagctccgcttcctccggggctggg

SEQ ID NO: 4234744 - DNA, 25 bp, Homo sapien
tccgcttcctccggggctgggaaga

SEQ ID NO: 4234745 - DNA, 25 bp, Homo sapien
gctccgcttcctccggggctgggaa

SEQ ID NO: 4234746 - DNA, 25 bp, Homo sapien
ctagctccgcttcctccggggctgg

SEQ ID NO: 4234747 - DNA, 25 bp, Homo sapien
ttctcatccagtagctaaaccaggg

SEQ ID NO: 4234748 - DNA, 25 bp, Homo sapien
agcagaatgcttcgcgtggcgccct

SEQ ID NO: 4234749 - DNA, 25 bp, Homo sapien
gctgtgggctagctcttaaaggaaa

SEQ ID NO: 4234750 - DNA, 25 bp, Homo sapien
taaaccagggatctgtacagcagag

SEQ ID NO: 4234751 - DNA, 25 bp, Homo sapien
tcattgtgaccattataaatctcca

SEQ ID NO: 4234752 - DNA, 25 bp, Homo sapien
cttccaactacccaaagggctcatt

SEQ ID NO: 4234753 - DNA, 25 bp, Homo sapien
aacccagtatcggaaaggtgagata

SEQ ID NO: 4234754 - DNA, 25 bp, Homo sapien
gtatcggaaaggtgagataacttgc

SEQ ID NO: 4234755 - DNA, 25 bp, Homo sapien
gcagcatctctgtacaatccaaaag

SEQ ID NO: 4234756 - DNA, 25 bp, Homo sapien
cctaagagagcaaggatagaaggct

SEQ ID NO: 4234757 - DNA, 25 bp, Homo sapien
gaaaaatgtaaggttgctcgactga

SEQ ID NO: 4234758 - DNA, 25 bp, Homo sapien
tgtaacacagctgcaacttccaact

SEQ ID NO: 4234759 - DNA, 25 bp, Homo sapien
catctgcgtttgcaagcctgtgtgc

SEQ ID NO: 4234760 - DNA, 25 bp, Homo sapien
gcaaggagcaaaatgttccttctac

SEQ ID NO: 4234761 - DNA, 25 bp, Homo sapien
gcaaacatatgctccaaaatgccaa

SEQ ID NO: 4234762 - DNA, 25 bp, Homo sapien
ctataggagcaaacatatgctccaa

SEQ ID NO: 4234763 - DNA, 25 bp, Homo sapien
taaaatgcgtagatgagtctcagca

SEQ ID NO: 4234764 - DNA, 25 bp, Homo sapien
tgctacgtaactctatgagcctcgg

SEQ ID NO: 4234765 - DNA, 25 bp, Homo sapien
gactaatacataggccatgctacgt

SEQ ID NO: 4234766 - DNA, 25 bp, Homo sapien
ccagaggtgggacaattggaagttc

SEQ ID NO: 4234767 - DNA, 25 bp, Homo sapien
tctttcaattcctgccagatcttcc

SEQ ID NO: 4234768 - DNA, 25 bp, Homo sapien
cactgctctttcaattcctgccaga

SEQ ID NO: 4234769 - DNA, 25 bp, Homo sapien
tgctctttcaattcctgccagatct

SEQ ID NO: 4234770 - DNA, 25 bp, Homo sapien
tggctgcccactgctctttcaattc

SEQ ID NO: 4234771 - DNA, 25 bp, Homo sapien
caagtcttccattctgacacggagt

SEQ ID NO: 4234772 - DNA, 25 bp, Homo sapien
tctgacacggagtgctgccaagtgg

SEQ ID NO: 4234773 - DNA, 25 bp, Homo sapien
gcccagacacaagtcttccattctg

SEQ ID NO: 4234774 - DNA, 25 bp, Homo sapien
acagacacgactgggctggtaagag

SEQ ID NO: 4234775 - DNA, 25 bp, Homo sapien
gcctaatctttcctagtcacgtgaa

SEQ ID NO: 4234776 - DNA, 25 bp, Homo sapien
ggagcccaagccataattcccaaat

SEQ ID NO: 4234777 - DNA, 25 bp, Homo sapien
gccatagtgaaaactctaattgcag

SEQ ID NO: 4234778 - DNA, 25 bp, Homo sapien
tcacgtgaaaagaaccctaaggaga

SEQ ID NO: 4234779 - DNA, 25 bp, Homo sapien
tgctgatgttctagttcttaggtga

SEQ ID NO: 4234780 - DNA, 25 bp, Homo sapien
ttaggtgatgatcacatgacgatgc

SEQ ID NO: 4234781 - DNA, 25 bp, Homo sapien
tttgagatattaaagggaggggcaa

SEQ ID NO: 4234782 - DNA, 25 bp, Homo sapien
ttctagttcttaggtgatgatcaca

SEQ ID NO: 4234783 - DNA, 25 bp, Homo sapien
tgaaaactacgaccattcgcacttt

SEQ ID NO: 4234784 - DNA, 25 bp, Homo sapien
ctgcccactgaaaactacgaccatt

SEQ ID NO: 4234785 - DNA, 25 bp, Homo sapien
cactgaaaactacgaccattcgcac

SEQ ID NO: 4234786 - DNA, 25 bp, Homo sapien
tacgaccattcgcacttttgaaaac

SEQ ID NO: 4234787 - DNA, 25 bp, Homo sapien
tgtctgcaatctaccatactgtgaa

SEQ ID NO: 4234788 - DNA, 25 bp, Homo sapien
catagaaagtctagaaatcctggat

SEQ ID NO: 4234789 - DNA, 25 bp, Homo sapien
tcccttttagtgacacatagacaca

SEQ ID NO: 4234790 - DNA, 25 bp, Homo sapien
tggaatactttacaatccaggtact

SEQ ID NO: 4234791 - DNA, 25 bp, Homo sapien
agtagagactcactacacaccacag

SEQ ID NO: 4234792 - DNA, 25 bp, Homo sapien
ccataaaagtagagactcactacac

SEQ ID NO: 4234793 - DNA, 25 bp, Homo sapien
gagactcactacacaccacagaagt

SEQ ID NO: 4234794 - DNA, 25 bp, Homo sapien
tcactacacaccacagaagtgtcat

SEQ ID NO: 4234795 - DNA, 25 bp, Homo sapien
tttgctaccgcagaagacaatggac

SEQ ID NO: 4234796 - DNA, 25 bp, Homo sapien
gagtggactcattaccctacgcatg

SEQ ID NO: 4234797 - DNA, 25 bp, Homo sapien
cctgtgtactctatcccatgaagac

SEQ ID NO: 4234798 - DNA, 25 bp, Homo sapien
tgaagactagagacagcaatggttc

SEQ ID NO: 4234799 - DNA, 25 bp, Homo sapien
tgattagtccaaaaacataggctga

SEQ ID NO: 4234800 - DNA, 25 bp, Homo sapien
caaactctataaaggtcttagctgg

SEQ ID NO: 4234801 - DNA, 25 bp, Homo sapien
tagctggttcctcttataaagcaac

SEQ ID NO: 4234802 - DNA, 25 bp, Homo sapien
aatttcacgtgatccaggcccatga

SEQ ID NO: 4234803 - DNA, 25 bp, Homo sapien
gggaaggcaccagcactcattagct

SEQ ID NO: 4234804 - DNA, 25 bp, Homo sapien
tggatggattacagtaaaggtcatt

SEQ ID NO: 4234805 - DNA, 25 bp, Homo sapien
gggactccttggatggattacagta

SEQ ID NO: 4234806 - DNA, 25 bp, Homo sapien
ggaaggcaccagcactcattagctt

SEQ ID NO: 4234807 - DNA, 25 bp, Homo sapien
tgtgagggggcaggataagcgtgta

SEQ ID NO: 4234808 - DNA, 25 bp, Homo sapien
ggcaggataagcgtgtaaggatata

SEQ ID NO: 4234809 - DNA, 25 bp, Homo sapien
ggataagcgtgtaaggatatacctt

SEQ ID NO: 4234810 - DNA, 25 bp, Homo sapien
caggataagcgtgtaaggatatacc

SEQ ID NO: 4234811 - DNA, 25 bp, Homo sapien
gaatatggattggttaaaatgcccc

SEQ ID NO: 4234812 - DNA, 25 bp, Homo sapien
tcatttccctaggactgaagaggct

SEQ ID NO: 4234813 - DNA, 25 bp, Homo sapien
tagaactctacactgctgggtaccc

SEQ ID NO: 4234814 - DNA, 25 bp, Homo sapien
caaaaagtgatcgtttccgagaaag

SEQ ID NO: 4234815 - DNA, 25 bp, Homo sapien
caagtaagaaaagacttgaagccat

SEQ ID NO: 4234816 - DNA, 25 bp, Homo sapien
ttcaagtaagaaaagacttgaagcc

SEQ ID NO: 4234817 - DNA, 25 bp, Homo sapien
gttcttcaagtaagaaaagacttga

SEQ ID NO: 4234818 - DNA, 25 bp, Homo sapien
tcttcaagtaagaaaagacttgaag

SEQ ID NO: 4234819 - DNA, 25 bp, Homo sapien
gaccttgtccgccatactgggaaaa

SEQ ID NO: 4234820 - DNA, 25 bp, Homo sapien
gactctggatgttaccctgggtagc

SEQ ID NO: 4234821 - DNA, 25 bp, Homo sapien
tatgtgctgcactctgaccacggct

SEQ ID NO: 4234822 - DNA, 25 bp, Homo sapien
gctggataatgtaacagtcctgccc

SEQ ID NO: 4234823 - DNA, 25 bp, Homo sapien
ggcacatgcagtcaggtatctcaaa

SEQ ID NO: 4234824 - DNA, 25 bp, Homo sapien
ggagcggccatgtgacttactttga

SEQ ID NO: 4234825 - DNA, 25 bp, Homo sapien
tacaagagcaagtccggcctggacg

SEQ ID NO: 4234826 - DNA, 25 bp, Homo sapien
caagtttaacgagcatcacggcttc

SEQ ID NO: 4234827 - DNA, 25 bp, Homo sapien
ggtgtctagtccccagtcatcgcag

SEQ ID NO: 4234828 - DNA, 25 bp, Homo sapien
gtctagtccccagtcatcgcagcgt

SEQ ID NO: 4234829 - DNA, 25 bp, Homo sapien
tctagtccccagtcatcgcagcgtt

SEQ ID NO: 4234830 - DNA, 25 bp, Homo sapien
gtgtctagtccccagtcatcgcagc

SEQ ID NO: 4234831 - DNA, 25 bp, Homo sapien
tcagagtaaggccagctgaatgggc

SEQ ID NO: 4234832 - DNA, 25 bp, Homo sapien
tgggcacttgatgcgagctggctca

SEQ ID NO: 4234833 - DNA, 25 bp, Homo sapien
tctccttactaatgcggttctcggg

SEQ ID NO: 4234834 - DNA, 25 bp, Homo sapien
caagaagtgttcaaagagtgggcac

SEQ ID NO: 4234835 - DNA, 25 bp, Homo sapien
acggatcatccggaaaagagcccag

SEQ ID NO: 4234836 - DNA, 25 bp, Homo sapien
gagaggactcccagttcgttctagg

SEQ ID NO: 4234837 - DNA, 25 bp, Homo sapien
taataacaaggctccactttcggac

SEQ ID NO: 4234838 - DNA, 25 bp, Homo sapien
ggagaacattctaagggccacaacc

SEQ ID NO: 4234839 - DNA, 25 bp, Homo sapien
gggaaatgcaactttgctgcaatat

SEQ ID NO: 4234840 - DNA, 25 bp, Homo sapien
taccaagtgatagtcggtttgacac

SEQ ID NO: 4234841 - DNA, 25 bp, Homo sapien
gtttgacactggaaggaaaatatcc

SEQ ID NO: 4234842 - DNA, 25 bp, Homo sapien
catctacatttggacaagtgatcct

SEQ ID NO: 4234843 - DNA, 25 bp, Homo sapien
cgttctcctgttgtcaagtctgaca

SEQ ID NO: 4234844 - DNA, 25 bp, Homo sapien
tctgacagacaccacgttacttcca

SEQ ID NO: 4234845 - DNA, 25 bp, Homo sapien
cttttggcgttctcctgttgtcaag

SEQ ID NO: 4234846 - DNA, 25 bp, Homo sapien
gacagacaccacgttacttccatct

SEQ ID NO: 4234847 - DNA, 25 bp, Homo sapien
ctgtgtctttacttctatatgtttg

SEQ ID NO: 4234848 - DNA, 25 bp, Homo sapien
tgtgtctttacttctatatgtttgg

SEQ ID NO: 4234849 - DNA, 25 bp, Homo sapien
gtgtctttacttctatatgtttgga

SEQ ID NO: 4234850 - DNA, 25 bp, Homo sapien
gaatgtatttctgctcctaattcac

SEQ ID NO: 4234851 - DNA, 25 bp, Homo sapien
tcatgggcctgatcaagatctagga

SEQ ID NO: 4234852 - DNA, 25 bp, Homo sapien
gagaaattgaactatctcagtccac

SEQ ID NO: 4234853 - DNA, 25 bp, Homo sapien
gcatgagccaccaactttatcccat

SEQ ID NO: 4234854 - DNA, 25 bp, Homo sapien
tccgtctgataatctaggccccaat

SEQ ID NO: 4234855 - DNA, 25 bp, Homo sapien
atattaatttgggactccagtcact

SEQ ID NO: 4234856 - DNA, 25 bp, Homo sapien
ctgttgtttccctgtatcagatatt

SEQ ID NO: 4234857 - DNA, 25 bp, Homo sapien
gatagggtctcatcagtctgtgacc

SEQ ID NO: 4234858 - DNA, 25 bp, Homo sapien
taaaattctgtattttataacagcc

SEQ ID NO: 4234859 - DNA, 25 bp, Homo sapien
cgggtattacattattaaaattctg

SEQ ID NO: 4234860 - DNA, 25 bp, Homo sapien
gtattacattattaaaattctgtat

SEQ ID NO: 4234861 - DNA, 25 bp, Homo sapien
ttaaaattctgtattttataacagc

SEQ ID NO: 4234862 - DNA, 25 bp, Homo sapien
cctttacagtcagagtcctggtgag

SEQ ID NO: 4234863 - DNA, 25 bp, Homo sapien
tcctggtgagatgaaacgtacgtcc

SEQ ID NO: 4234864 - DNA, 25 bp, Homo sapien
gaaacgtacgtccattttctggata

SEQ ID NO: 4234865 - DNA, 25 bp, Homo sapien
tactacctttacagtcagagtcctg

SEQ ID NO: 4234866 - DNA, 25 bp, Homo sapien
tttctcatagaccacatgatcatta

SEQ ID NO: 4234867 - DNA, 25 bp, Homo sapien
cacatgatcattaggtgaatggatc

SEQ ID NO: 4234868 - DNA, 25 bp, Homo sapien
atcattaggtgaatggatcacaggg

SEQ ID NO: 4234869 - DNA, 25 bp, Homo sapien
catagaccacatgatcattaggtga

SEQ ID NO: 4234870 - DNA, 25 bp, Homo sapien
aattcagagacatagctgtaattac

SEQ ID NO: 4234871 - DNA, 25 bp, Homo sapien
ctgaaacaagaggtgtgtcaagtgg

SEQ ID NO: 4234872 - DNA, 25 bp, Homo sapien
caagaggtgtgtcaagtggaggatg

SEQ ID NO: 4234873 - DNA, 25 bp, Homo sapien
gaggtgtgtcaagtggaggatgcat

SEQ ID NO: 4234874 - DNA, 25 bp, Homo sapien
tccatgaacaactacatacctcttt

SEQ ID NO: 4234875 - DNA, 25 bp, Homo sapien
ctggatggcgaagaggtccacatct

SEQ ID NO: 4234876 - DNA, 25 bp, Homo sapien
tgcacaacccagttcaagtcgccag

SEQ ID NO: 4234877 - DNA, 25 bp, Homo sapien
ggcaaaccaatggtgcttgtgcaca

SEQ ID NO: 4234878 - DNA, 25 bp, Homo sapien
tggcgaagaggtccacatctatgtt

SEQ ID NO: 4234879 - DNA, 25 bp, Homo sapien
gttacagcctttctagccaattgtg

SEQ ID NO: 4234880 - DNA, 25 bp, Homo sapien
aaatctcattttgttaagtccctga

SEQ ID NO: 4234881 - DNA, 25 bp, Homo sapien
tctgcatgaagacttagcatcccta

SEQ ID NO: 4234882 - DNA, 25 bp, Homo sapien
gaatgctttgctgcccgccctgatg

SEQ ID NO: 4234883 - DNA, 25 bp, Homo sapien
taaaatagaccgtacagggaatgag

SEQ ID NO: 4234884 - DNA, 25 bp, Homo sapien
aaaatagaccgtacagggaatgagt

SEQ ID NO: 4234885 - DNA, 25 bp, Homo sapien
ctaaaatagaccgtacagggaatga

SEQ ID NO: 4234886 - DNA, 25 bp, Homo sapien
tcgttaatggtgacatcaatagtga

SEQ ID NO: 4234887 - DNA, 25 bp, Homo sapien
tttccatcaatggtccaccaaacct

SEQ ID NO: 4234888 - DNA, 25 bp, Homo sapien
aacctcattgcgagaatccatcaga

SEQ ID NO: 4234889 - DNA, 25 bp, Homo sapien
accaaacctcattgcgagaatccat

SEQ ID NO: 4234890 - DNA, 25 bp, Homo sapien
catagctgcgcttgagatcctcaga

SEQ ID NO: 4234891 - DNA, 25 bp, Homo sapien
gcctttggcacttctagcatgacag

SEQ ID NO: 4234892 - DNA, 25 bp, Homo sapien
tgctttggcaacttcgcctttggca

SEQ ID NO: 4234893 - DNA, 25 bp, Homo sapien
tgagatcctcagaggtaactttctt

SEQ ID NO: 4234894 - DNA, 25 bp, Homo sapien
gagccaggaggattctgaatgacct

SEQ ID NO: 4234895 - DNA, 25 bp, Homo sapien
tacatttgggcattacggtactaac

SEQ ID NO: 4234896 - DNA, 25 bp, Homo sapien
cactctatagactaggagccaggag

SEQ ID NO: 4234897 - DNA, 25 bp, Homo sapien
gacacagtctgatttaggagcagca

SEQ ID NO: 4234898 - DNA, 25 bp, Homo sapien
ataaggtagtggtattattgtgtct

SEQ ID NO: 4234899 - DNA, 25 bp, Homo sapien
ggtatatatgccaataactgtgctg

SEQ ID NO: 4234900 - DNA, 25 bp, Homo sapien
aaggtagtggtattattgtgtctac

SEQ ID NO: 4234901 - DNA, 25 bp, Homo sapien
tatgccaataactgtgctgagcact

SEQ ID NO: 4234902 - DNA, 25 bp, Homo sapien
acaggtggacaacaaatagcaagat

SEQ ID NO: 4234903 - DNA, 25 bp, Homo sapien
tggtacactgtaattcatgcaaaac

SEQ ID NO: 4234904 - DNA, 25 bp, Homo sapien
aattataagaaagctggcagtgagc

SEQ ID NO: 4234905 - DNA, 25 bp, Homo sapien
ccaagaatggatagtgtcagaaata

SEQ ID NO: 4234906 - DNA, 25 bp, Homo sapien
agaccagtccccctctattgcagat

SEQ ID NO: 4234907 - DNA, 25 bp, Homo sapien
tccccctctattgcagatggtcgtc

SEQ ID NO: 4234908 - DNA, 25 bp, Homo sapien
cagcttcgggaaggagtcacgtgaa

SEQ ID NO: 4234909 - DNA, 25 bp, Homo sapien
tcgggaaggagtcacgtgaaacagt

SEQ ID NO: 4234910 - DNA, 25 bp, Homo sapien
gtggcttaaattgtgtattagtcaa

SEQ ID NO: 4234911 - DNA, 25 bp, Homo sapien
tttgaaggaggaacagtatatttac

SEQ ID NO: 4234912 - DNA, 25 bp, Homo sapien
tctgggatatttagaagtctattac

SEQ ID NO: 4234913 - DNA, 25 bp, Homo sapien
aagcaggagtggcttaaattgtgta

SEQ ID NO: 4234914 - DNA, 25 bp, Homo sapien
tgacacctaaacctccttacaaata

SEQ ID NO: 4234915 - DNA, 25 bp, Homo sapien
agggcttagaaggtcatcaaattca

SEQ ID NO: 4234916 - DNA, 25 bp, Homo sapien
gcacctggcatagaaggtgtttttt

SEQ ID NO: 4234917 - DNA, 25 bp, Homo sapien
tttgaatagtctttgacaatatata

SEQ ID NO: 4234918 - DNA, 25 bp, Homo sapien
gagcccggtaaaataggaccatctc

SEQ ID NO: 4234919 - DNA, 25 bp, Homo sapien
tgtggctccaaaaccacaagccagt

SEQ ID NO: 4234920 - DNA, 25 bp, Homo sapien
ggaccatctctagccagtaaacatg

SEQ ID NO: 4234921 - DNA, 25 bp, Homo sapien
gaatcaccactagcaggactgtggc

SEQ ID NO: 4234922 - DNA, 25 bp, Homo sapien
tccacggagggtcagtaatacaaat

SEQ ID NO: 4234923 - DNA, 25 bp, Homo sapien
tcaaagatgcacagcttgtatccaa

SEQ ID NO: 4234924 - DNA, 25 bp, Homo sapien
attccttgcataggatacataaata

SEQ ID NO: 4234925 - DNA, 25 bp, Homo sapien
ccaggcagactgtctcggtcaaaga

SEQ ID NO: 4234926 - DNA, 25 bp, Homo sapien
ggcttagaacaaccaggaggcgtct

SEQ ID NO: 4234927 - DNA, 25 bp, Homo sapien
taaaatgacgttgatgttgccccga

SEQ ID NO: 4234928 - DNA, 25 bp, Homo sapien
gccccgagaggccatattttctagg

SEQ ID NO: 4234929 - DNA, 25 bp, Homo sapien
tccatttaatgaccgtgagcaccgt

SEQ ID NO: 4234930 - DNA, 25 bp, Homo sapien
aagatgaatacgagaggccctgctc

SEQ ID NO: 4234931 - DNA, 25 bp, Homo sapien
ggccctgctcatcactgctagaccg

SEQ ID NO: 4234932 - DNA, 25 bp, Homo sapien
tcatcactgctagaccgcctgggac

SEQ ID NO: 4234933 - DNA, 25 bp, Homo sapien
gatgaatacgagaggccctgctcat

SEQ ID NO: 4234934 - DNA, 25 bp, Homo sapien
tatactcggaaactcatgaccctgt

SEQ ID NO: 4234935 - DNA, 25 bp, Homo sapien
caagggtggtatagaagacaagtcc

SEQ ID NO: 4234936 - DNA, 25 bp, Homo sapien
caattaatgcccgatggctggctac

SEQ ID NO: 4234937 - DNA, 25 bp, Homo sapien
tcatgttaccgggataagggctttc

SEQ ID NO: 4234938 - DNA, 25 bp, Homo sapien
gggaatcatctaagttacaatacag

SEQ ID NO: 4234939 - DNA, 25 bp, Homo sapien
taaaattaagtaccaaaggcaggca

SEQ ID NO: 4234940 - DNA, 25 bp, Homo sapien
tgttaacctgggcatggaacgtccc

SEQ ID NO: 4234941 - DNA, 25 bp, Homo sapien
ggaacgtccctatagcatatattta

SEQ ID NO: 4234942 - DNA, 25 bp, Homo sapien
tggttatgaatctctgcccggctct

SEQ ID NO: 4234943 - DNA, 25 bp, Homo sapien
tcctttgaacgtgatccagactgat

SEQ ID NO: 4234944 - DNA, 25 bp, Homo sapien
caatggagttctggcacatgacacc

SEQ ID NO: 4234945 - DNA, 25 bp, Homo sapien
tcacagtaggtgacacaacagcggc

SEQ ID NO: 4234946 - DNA, 25 bp, Homo sapien
cacaggttcatgacatacagagggt

SEQ ID NO: 4234947 - DNA, 25 bp, Homo sapien
gagaacgccatgtatccctgggtgg

SEQ ID NO: 4234948 - DNA, 25 bp, Homo sapien
tacaccctgtaagcatcatagccca

SEQ ID NO: 4234949 - DNA, 25 bp, Homo sapien
cctgaatgggacgaaggcacctatt

SEQ ID NO: 4234950 - DNA, 25 bp, Homo sapien
tccttcttaactttaagccatccca

SEQ ID NO: 4234951 - DNA, 25 bp, Homo sapien
taagccatcccataattgacattat

SEQ ID NO: 4234952 - DNA, 25 bp, Homo sapien
acaatatggcaacattggggctcaa

SEQ ID NO: 4234953 - DNA, 25 bp, Homo sapien
gggctcaattagtgacaaaaatcaa

SEQ ID NO: 4234954 - DNA, 25 bp, Homo sapien
gatcagctcaattgtaacagcccag

SEQ ID NO: 4234955 - DNA, 25 bp, Homo sapien
tatgtccttagagccaacctgtgtc

SEQ ID NO: 4234956 - DNA, 25 bp, Homo sapien
cattcactgttactgaccgggagcc

SEQ ID NO: 4234957 - DNA, 25 bp, Homo sapien
tgacagtaagcaggcaagaaacctc

SEQ ID NO: 4234958 - DNA, 25 bp, Homo sapien
gaagtaggactcacatccatctcta

SEQ ID NO: 4234959 - DNA, 25 bp, Homo sapien
ttctattatggatatgcatggccca

SEQ ID NO: 4234960 - DNA, 25 bp, Homo sapien
tactgaacatcacattcaatttggc

SEQ ID NO: 4234961 - DNA, 25 bp, Homo sapien
caatttggcatgtcaggtcaagaaa

SEQ ID NO: 4234962 - DNA, 25 bp, Homo sapien
tgtgctgaggcaacttcgagggcta

SEQ ID NO: 4234963 - DNA, 25 bp, Homo sapien
gatgatttgtagtccttggctggag

SEQ ID NO: 4234964 - DNA, 25 bp, Homo sapien
tacatatgatgactacagcgatccc

SEQ ID NO: 4234965 - DNA, 25 bp, Homo sapien
taagctcctatgctggacgtgtagc

SEQ ID NO: 4234966 - DNA, 25 bp, Homo sapien
taaagcatagcacaacaggaagcca

SEQ ID NO: 4234967 - DNA, 25 bp, Homo sapien
tatgattacagcaggacctcagagc

SEQ ID NO: 4234968 - DNA, 25 bp, Homo sapien
tagtagactgagatggacccgaggt

SEQ ID NO: 4234969 - DNA, 25 bp, Homo sapien
tggagtactggtagcaaagtccctt

SEQ ID NO: 4234970 - DNA, 25 bp, Homo sapien
gacactcactgcacattatagctat

SEQ ID NO: 4234971 - DNA, 25 bp, Homo sapien
tgaaagtcacacagtcagtacaact

SEQ ID NO: 4234972 - DNA, 25 bp, Homo sapien
tcgctgccccgttacattactgata

SEQ ID NO: 4234973 - DNA, 25 bp, Homo sapien
gaaagtttttacacatctcgctgcc

SEQ ID NO: 4234974 - DNA, 25 bp, Homo sapien
caagaggagcttgggttttgattat

SEQ ID NO: 4234975 - DNA, 25 bp, Homo sapien
gggttttgattattggacactgaaa

SEQ ID NO: 4234976 - DNA, 25 bp, Homo sapien
tgatggatccaagaggagcttgggt

SEQ ID NO: 4234977 - DNA, 25 bp, Homo sapien
tttgattattggacactgaaattct

SEQ ID NO: 4234978 - DNA, 25 bp, Homo sapien
tgccttgtctcacatccacactgta

SEQ ID NO: 4234979 - DNA, 25 bp, Homo sapien
atttgacagtgccttgtctcacatc

SEQ ID NO: 4234980 - DNA, 25 bp, Homo sapien
gacagtgccttgtctcacatccaca

SEQ ID NO: 4234981 - DNA, 25 bp, Homo sapien
ttgtctcacatccacactgtactct

SEQ ID NO: 4234982 - DNA, 25 bp, Homo sapien
aatcttgctctgagacacgtagttg

SEQ ID NO: 4234983 - DNA, 25 bp, Homo sapien
tgagacacgtagttgtagtttttca

SEQ ID NO: 4234984 - DNA, 25 bp, Homo sapien
cttagacctcagtctaagtgccagc

SEQ ID NO: 4234985 - DNA, 25 bp, Homo sapien
gacctcagtctaagtgccagcaaaa

SEQ ID NO: 4234986 - DNA, 25 bp, Homo sapien
ggttctgggtcttcctggcagccat

SEQ ID NO: 4234987 - DNA, 25 bp, Homo sapien
cttgggccacctcagccttggggtt

SEQ ID NO: 4234988 - DNA, 25 bp, Homo sapien
tggggttctgggtcttcctggcagc

SEQ ID NO: 4234989 - DNA, 25 bp, Homo sapien
cttggggttctgggtcttcctggca

SEQ ID NO: 4234990 - DNA, 25 bp, Homo sapien
catgacgcccttgggtcccaggttg

SEQ ID NO: 4234991 - DNA, 25 bp, Homo sapien
tcctcatgacgcccttgggtcccag

SEQ ID NO: 4234992 - DNA, 25 bp, Homo sapien
ggcatcctcatgacgcccttgggtc

SEQ ID NO: 4234993 - DNA, 25 bp, Homo sapien
ctcatgacgcccttgggtcccaggt

SEQ ID NO: 4234994 - DNA, 25 bp, Homo sapien
tgcatttcgtgaatttgcattttgt

SEQ ID NO: 4234995 - DNA, 25 bp, Homo sapien
ggcacatggctgtctttagtaagct

SEQ ID NO: 4234996 - DNA, 25 bp, Homo sapien
cattttgtgaagtggcacatggctg

SEQ ID NO: 4234997 - DNA, 25 bp, Homo sapien
tgcattttgtgaagtggcacatggc

SEQ ID NO: 4234998 - DNA, 25 bp, Homo sapien
gtaagtcataccatcacccgttata

SEQ ID NO: 4234999 - DNA, 25 bp, Homo sapien
tgtaagtcataccatcacccgttat

SEQ ID NO: 4235000 - DNA, 25 bp, Homo sapien
taagtcataccatcacccgttatat

SEQ ID NO: 4235001 - DNA, 25 bp, Homo sapien
aaatgtagaggttggcctgtttcag

SEQ ID NO: 4235002 - DNA, 25 bp, Homo sapien
gtttcagtagctctctaattattag

SEQ ID NO: 4235003 - DNA, 25 bp, Homo sapien
gtagaggttggcctgtttcagtagc

SEQ ID NO: 4235004 - DNA, 25 bp, Homo sapien
tcagtagctctctaattattaggac

SEQ ID NO: 4235005 - DNA, 25 bp, Homo sapien
cacactacacttgaggatgtatgca

SEQ ID NO: 4235006 - DNA, 25 bp, Homo sapien
tctaatgacacactacacttgagga

SEQ ID NO: 4235007 - DNA, 25 bp, Homo sapien
taatgacacactacacttgaggatg

SEQ ID NO: 4235008 - DNA, 25 bp, Homo sapien
tgacacactacacttgaggatgtat

SEQ ID NO: 4235009 - DNA, 25 bp, Homo sapien
accactggctcacctatgttgaggt

SEQ ID NO: 4235010 - DNA, 25 bp, Homo sapien
ccactggctcacctatgttgaggtc

SEQ ID NO: 4235011 - DNA, 25 bp, Homo sapien
attaatagctttcatgatctcgtca

SEQ ID NO: 4235012 - DNA, 25 bp, Homo sapien
tagctttcatgatctcgtcaaccaa

SEQ ID NO: 4235013 - DNA, 25 bp, Homo sapien
gactgttcaatagcctgagcagcag

SEQ ID NO: 4235014 - DNA, 25 bp, Homo sapien
gcagaattgtcaggagagatcttgt

SEQ ID NO: 4235015 - DNA, 25 bp, Homo sapien
ttcaatagcctgagcagcagaattg

SEQ ID NO: 4235016 - DNA, 25 bp, Homo sapien
ccttcaggagactgttcaatagcct

SEQ ID NO: 4235017 - DNA, 25 bp, Homo sapien
ctgttttcattaggtgccccagggt

SEQ ID NO: 4235018 - DNA, 25 bp, Homo sapien
tactgttttcattaggtgccccagg

SEQ ID NO: 4235019 - DNA, 25 bp, Homo sapien
ggagctactgttttcattaggtgcc

SEQ ID NO: 4235020 - DNA, 25 bp, Homo sapien
gctactgttttcattaggtgcccca

SEQ ID NO: 4235021 - DNA, 25 bp, Homo sapien
ttccagaggatgtttgttgtctcat

SEQ ID NO: 4235022 - DNA, 25 bp, Homo sapien
aactctcttctagaagtttaatcat

SEQ ID NO: 4235023 - DNA, 25 bp, Homo sapien
tgttgtctcattacagagttcctag

SEQ ID NO: 4235024 - DNA, 25 bp, Homo sapien
tacagagttcctagaactctcttct

SEQ ID NO: 4235025 - DNA, 25 bp, Homo sapien
gacatgctaagactctgcggtggac

SEQ ID NO: 4235026 - DNA, 25 bp, Homo sapien
tggactgggataatgaagacatgct

SEQ ID NO: 4235027 - DNA, 25 bp, Homo sapien
agaatggtaatcacccctgacatgc

SEQ ID NO: 4235028 - DNA, 25 bp, Homo sapien
catgctgacttatgcaacaactcca

SEQ ID NO: 4235029 - DNA, 25 bp, Homo sapien
aatcagatggccacaagagctccat

SEQ ID NO: 4235030 - DNA, 25 bp, Homo sapien
caatcagatggccacaagagctcca

SEQ ID NO: 4235031 - DNA, 25 bp, Homo sapien
cagtggaaccgggataaggtacaca

SEQ ID NO: 4235032 - DNA, 25 bp, Homo sapien
gtcttcactaagagttttaccagtg

SEQ ID NO: 4235033 - DNA, 25 bp, Homo sapien
gataaggtacacacagaatgtgaag

SEQ ID NO: 4235034 - DNA, 25 bp, Homo sapien
tgtcttcactaagagttttaccagt

SEQ ID NO: 4235035 - DNA, 25 bp, Homo sapien
taacacactcatcagtcggacagca

SEQ ID NO: 4235036 - DNA, 25 bp, Homo sapien
tgttaggaagtgtgcgatgccaacc

SEQ ID NO: 4235037 - DNA, 25 bp, Homo sapien
gatgggattctacaactaacacact

SEQ ID NO: 4235038 - DNA, 25 bp, Homo sapien
tagacagcttactattaagatggga

SEQ ID NO: 4235039 - DNA, 25 bp, Homo sapien
tatgtcatgaacctcttgctttctg

SEQ ID NO: 4235040 - DNA, 25 bp, Homo sapien
gatacttcaaagctactggcctcat

SEQ ID NO: 4235041 - DNA, 25 bp, Homo sapien
tatacctctgccatgtgtactggct

SEQ ID NO: 4235042 - DNA, 25 bp, Homo sapien
tactggctttgcatggattctgtag

SEQ ID NO: 4235043 - DNA, 25 bp, Homo sapien
acccaaccagcatagcataatacag

SEQ ID NO: 4235044 - DNA, 25 bp, Homo sapien
ccaaccagcatagcataatacagcc

SEQ ID NO: 4235045 - DNA, 25 bp, Homo sapien
tctgacctgggttggctcaaccatc

SEQ ID NO: 4235046 - DNA, 25 bp, Homo sapien
tgacctgggttggctcaaccatcct

SEQ ID NO: 4235047 - DNA, 25 bp, Homo sapien
ccttttgggctggagtctcggccag

SEQ ID NO: 4235048 - DNA, 25 bp, Homo sapien
cttttgggctggagtctcggccagc

SEQ ID NO: 4235049 - DNA, 25 bp, Homo sapien
ttttgggctggagtctcggccagct

SEQ ID NO: 4235050 - DNA, 25 bp, Homo sapien
ccatttcagtctctctagcctctct

SEQ ID NO: 4235051 - DNA, 25 bp, Homo sapien
ccaaaagaatccagatgcagggagg

SEQ ID NO: 4235052 - DNA, 25 bp, Homo sapien
caaaagaatccagatgcagggaggg

SEQ ID NO: 4235053 - DNA, 25 bp, Homo sapien
tccccaaaagaatccagatgcaggg

SEQ ID NO: 4235054 - DNA, 25 bp, Homo sapien
gatccccaaaagaatccagatgcag

SEQ ID NO: 4235055 - DNA, 25 bp, Homo sapien
gcttgggaaagaggcatcccccatc

SEQ ID NO: 4235056 - DNA, 25 bp, Homo sapien
ctgcttgggaaagaggcatccccca

SEQ ID NO: 4235057 - DNA, 25 bp, Homo sapien
tgcttgggaaagaggcatcccccat

SEQ ID NO: 4235058 - DNA, 25 bp, Homo sapien
ccatggcctgtaggcctgtatctgt

SEQ ID NO: 4235059 - DNA, 25 bp, Homo sapien
tccatggcctgtaggcctgtatctg

SEQ ID NO: 4235060 - DNA, 25 bp, Homo sapien
tccatttccatggcctgtaggcctg

SEQ ID NO: 4235061 - DNA, 25 bp, Homo sapien
atttccatggcctgtaggcctgtat

SEQ ID NO: 4235062 - DNA, 25 bp, Homo sapien
tcagcctgtggtagttaagtccttc

SEQ ID NO: 4235063 - DNA, 25 bp, Homo sapien
ttcagcctgtggtagttaagtcctt

SEQ ID NO: 4235064 - DNA, 25 bp, Homo sapien
aaccctgttgtaatctgaggccctg

SEQ ID NO: 4235065 - DNA, 25 bp, Homo sapien
ggcccacgtggcagttcatcttacg

SEQ ID NO: 4235066 - DNA, 25 bp, Homo sapien
cctctgcttgtctgggtaacttatg

SEQ ID NO: 4235067 - DNA, 25 bp, Homo sapien
tcatcttacgactgcaagtgatagt

SEQ ID NO: 4235068 - DNA, 25 bp, Homo sapien
tacacaggaagcatactaactctgg

SEQ ID NO: 4235069 - DNA, 25 bp, Homo sapien
agatgggcttccctaaagagtccct

SEQ ID NO: 4235070 - DNA, 25 bp, Homo sapien
taatattgttatcgcgtagccagaa

SEQ ID NO: 4235071 - DNA, 25 bp, Homo sapien
aagagtcccttgacccctgtgatgc

SEQ ID NO: 4235072 - DNA, 25 bp, Homo sapien
actagaagttctggcgtccacctgc

SEQ ID NO: 4235073 - DNA, 25 bp, Homo sapien
aagtctgttcgcctggctttgatcc

SEQ ID NO: 4235074 - DNA, 25 bp, Homo sapien
tggctttgatccgagggcactagaa

SEQ ID NO: 4235075 - DNA, 25 bp, Homo sapien
tcatgtgacagccagagagcgagaa

SEQ ID NO: 4235076 - DNA, 25 bp, Homo sapien
gaggtagaggatggcggtttccagg

SEQ ID NO: 4235077 - DNA, 25 bp, Homo sapien
agcagggacccaatgggtgtgaggg

SEQ ID NO: 4235078 - DNA, 25 bp, Homo sapien
cccctggtcccggaggtagaggatg

SEQ ID NO: 4235079 - DNA, 25 bp, Homo sapien
gcagggacccaatgggtgtgagggc

SEQ ID NO: 4235080 - DNA, 25 bp, Homo sapien
atcacgaggtggggtgggtactcac

SEQ ID NO: 4235081 - DNA, 25 bp, Homo sapien
tgtttcctccgctcagtctctgggt

SEQ ID NO: 4235082 - DNA, 25 bp, Homo sapien
gggagctgtttcctccgctcagtct

SEQ ID NO: 4235083 - DNA, 25 bp, Homo sapien
gagctgtttcctccgctcagtctct

SEQ ID NO: 4235084 - DNA, 25 bp, Homo sapien
cctgggagctgtttcctccgctcag

SEQ ID NO: 4235085 - DNA, 25 bp, Homo sapien
cacctgtgaccgtggagtctttttc

SEQ ID NO: 4235086 - DNA, 25 bp, Homo sapien
ttctccgaatcgtcctctgctcctc

SEQ ID NO: 4235087 - DNA, 25 bp, Homo sapien
ggccgctccacctgtgaccgtggag

SEQ ID NO: 4235088 - DNA, 25 bp, Homo sapien
ttttctgtcacttccgtctctgtca

SEQ ID NO: 4235089 - DNA, 25 bp, Homo sapien
caagctaacaaggtgtctgccaaac

SEQ ID NO: 4235090 - DNA, 25 bp, Homo sapien
gattcagcaacagccctcaagggtg

SEQ ID NO: 4235091 - DNA, 25 bp, Homo sapien
tagttaacttcttgcctgtcgctag

SEQ ID NO: 4235092 - DNA, 25 bp, Homo sapien
tatcagtgggacttttagccacacc

SEQ ID NO: 4235093 - DNA, 25 bp, Homo sapien
cattttgagccatttcaggtaggcc

SEQ ID NO: 4235094 - DNA, 25 bp, Homo sapien
gccttataaggagccagttgactga

SEQ ID NO: 4235095 - DNA, 25 bp, Homo sapien
ggccatgtgttgtaccttgacctaa

SEQ ID NO: 4235096 - DNA, 25 bp, Homo sapien
tctatcacaccagagcttaagggcc

SEQ ID NO: 4235097 - DNA, 25 bp, Homo sapien
cctttgattaagacaagatccctca

SEQ ID NO: 4235098 - DNA, 25 bp, Homo sapien
aacacatacacagctccctaaaaga

SEQ ID NO: 4235099 - DNA, 25 bp, Homo sapien
tgtctctgacttagtgtctttgttg

SEQ ID NO: 4235100 - DNA, 25 bp, Homo sapien
gatagacccatccaatgatcctttg

SEQ ID NO: 4235101 - DNA, 25 bp, Homo sapien
tgtgagttgactaccaatatagcac

SEQ ID NO: 4235102 - DNA, 25 bp, Homo sapien
caaaggttcgcatgaaacctgattt

SEQ ID NO: 4235103 - DNA, 25 bp, Homo sapien
gcacaccagtcatggaaagaataat

SEQ ID NO: 4235104 - DNA, 25 bp, Homo sapien
gatttttcgggcaaaaactgtgcta

SEQ ID NO: 4235105 - DNA, 25 bp, Homo sapien
actggtattacagaccaactggttt

SEQ ID NO: 4235106 - DNA, 25 bp, Homo sapien
cacatttcatgaactggtattacag

SEQ ID NO: 4235107 - DNA, 25 bp, Homo sapien
tattacagaccaactggtttctttc

SEQ ID NO: 4235108 - DNA, 25 bp, Homo sapien
acatttcatgaactggtattacaga

SEQ ID NO: 4235109 - DNA, 25 bp, Homo sapien
gtgcgagctctatagttgtcaacaa

SEQ ID NO: 4235110 - DNA, 25 bp, Homo sapien
tatgagttctcaattctactgatga

SEQ ID NO: 4235111 - DNA, 25 bp, Homo sapien
taaaaacctttggagctatgagttc

SEQ ID NO: 4235112 - DNA, 25 bp, Homo sapien
tactgatgaatatgggtaggttcgg

SEQ ID NO: 4235113 - DNA, 25 bp, Homo sapien
cctccatagtagagatgatttcacc

SEQ ID NO: 4235114 - DNA, 25 bp, Homo sapien
tagagatgatttcacccacaccctc

SEQ ID NO: 4235115 - DNA, 25 bp, Homo sapien
cctcctcctccaactgccctcccat

SEQ ID NO: 4235116 - DNA, 25 bp, Homo sapien
acaccctcctcctccaactgccctc

SEQ ID NO: 4235117 - DNA, 25 bp, Homo sapien
tgcagcagagttggtcagacagcaa

SEQ ID NO: 4235118 - DNA, 25 bp, Homo sapien
ctcagaagactcagtagctattgta

SEQ ID NO: 4235119 - DNA, 25 bp, Homo sapien
tgtaaaggcatcttagttctgtcca

SEQ ID NO: 4235120 - DNA, 25 bp, Homo sapien
gaaaagcctctgtcttgtaaaggca

SEQ ID NO: 4235121 - DNA, 25 bp, Homo sapien
tcaacatcactaacttttatgggca

SEQ ID NO: 4235122 - DNA, 25 bp, Homo sapien
ctttccaaccccagtgtggcttcct

SEQ ID NO: 4235123 - DNA, 25 bp, Homo sapien
gtttttgaggtttcaacatcactaa

SEQ ID NO: 4235124 - DNA, 25 bp, Homo sapien
gctttccaaccccagtgtggcttcc

SEQ ID NO: 4235125 - DNA, 25 bp, Homo sapien
tcgaggatgaggacttgccaaagcc

SEQ ID NO: 4235126 - DNA, 25 bp, Homo sapien
tcttgcagctttgagtaaaggaccc

SEQ ID NO: 4235127 - DNA, 25 bp, Homo sapien
caatcttcagaactaggctgtcaca

SEQ ID NO: 4235128 - DNA, 25 bp, Homo sapien
tcttgggttcgcaaatactagactc

SEQ ID NO: 4235129 - DNA, 25 bp, Homo sapien
acagacacacgccttgcaattttct

SEQ ID NO: 4235130 - DNA, 25 bp, Homo sapien
agacacacgccttgcaattttctta

SEQ ID NO: 4235131 - DNA, 25 bp, Homo sapien
ttgtgacattgttactgggctcctg

SEQ ID NO: 4235132 - DNA, 25 bp, Homo sapien
ccctggtgagcgggcttgtgacatt

SEQ ID NO: 4235133 - DNA, 25 bp, Homo sapien
atcaaatagatctggtagctatcta

SEQ ID NO: 4235134 - DNA, 25 bp, Homo sapien
ttataatcatcagtctcttggaacc

SEQ ID NO: 4235135 - DNA, 25 bp, Homo sapien
ggtagctatctatagaactctccac

SEQ ID NO: 4235136 - DNA, 25 bp, Homo sapien
catgagaaatactctaaaatggatc

SEQ ID NO: 4235137 - DNA, 25 bp, Homo sapien
tcaacacatgggcatcatgtcatct

SEQ ID NO: 4235138 - DNA, 25 bp, Homo sapien
ggctgttttggcattccgtggtgat

SEQ ID NO: 4235139 - DNA, 25 bp, Homo sapien
ccgtggtgattttggcattctcaga

SEQ ID NO: 4235140 - DNA, 25 bp, Homo sapien
tcttcatgggcacaagcaattttgg

SEQ ID NO: 4235141 - DNA, 25 bp, Homo sapien
ccatacctgacttgtattaaggtaa

SEQ ID NO: 4235142 - DNA, 25 bp, Homo sapien
tttcgtttccgcagtgtagctccat

SEQ ID NO: 4235143 - DNA, 25 bp, Homo sapien
tacacggcctgttttgaggttccat

SEQ ID NO: 4235144 - DNA, 25 bp, Homo sapien
gatttgttttagcttcaccaggatt

SEQ ID NO: 4235145 - DNA, 25 bp, Homo sapien
tcgtgaaagatcaggagattctaac

SEQ ID NO: 4235146 - DNA, 25 bp, Homo sapien
gagattctaactttagagtactgtc

SEQ ID NO: 4235147 - DNA, 25 bp, Homo sapien
tttagagtactgtctctgcagtttc

SEQ ID NO: 4235148 - DNA, 25 bp, Homo sapien
tcaggagattctaactttagagtac

SEQ ID NO: 4235149 - DNA, 25 bp, Homo sapien
ctgctggaaagcaaagattgggacc

SEQ ID NO: 4235150 - DNA, 25 bp, Homo sapien
gctggaaagcaaagattgggacctc

SEQ ID NO: 4235151 - DNA, 25 bp, Homo sapien
aaagcaaagattgggacctccagcc

SEQ ID NO: 4235152 - DNA, 25 bp, Homo sapien
ggaaagcaaagattgggacctccag

SEQ ID NO: 4235153 - DNA, 25 bp, Homo sapien
tgttcttccaggcaagtcgtgagtc

SEQ ID NO: 4235154 - DNA, 25 bp, Homo sapien
cattgaaataatggtgttcttccag

SEQ ID NO: 4235155 - DNA, 25 bp, Homo sapien
gagtcagcttggctcataagtaagt

SEQ ID NO: 4235156 - DNA, 25 bp, Homo sapien
tgccgacaacaccgcctaaaatctt

SEQ ID NO: 4235157 - DNA, 25 bp, Homo sapien
agctccacagtgtcagtgtcacagc

SEQ ID NO: 4235158 - DNA, 25 bp, Homo sapien
gctccacagtgtcagtgtcacagcc

SEQ ID NO: 4235159 - DNA, 25 bp, Homo sapien
aggatgaaatgtgcacttgccaatc

SEQ ID NO: 4235160 - DNA, 25 bp, Homo sapien
ctgcacatctatgactccagaatca

SEQ ID NO: 4235161 - DNA, 25 bp, Homo sapien
gcacatctatgactccagaatcaaa

SEQ ID NO: 4235162 - DNA, 25 bp, Homo sapien
tgcacatctatgactccagaatcaa

SEQ ID NO: 4235163 - DNA, 25 bp, Homo sapien
acatctatgactccagaatcaaagg

SEQ ID NO: 4235164 - DNA, 25 bp, Homo sapien
aattcatcaagaagcaagagttttg

SEQ ID NO: 4235165 - DNA, 25 bp, Homo sapien
gtctcaatcacatcattttctaggg

SEQ ID NO: 4235166 - DNA, 25 bp, Homo sapien
tgtcaaggggagacccaaaaccaga

SEQ ID NO: 4235167 - DNA, 25 bp, Homo sapien
ttttctagggacaccaattcatcaa

SEQ ID NO: 4235168 - DNA, 25 bp, Homo sapien
tctgcatgcatctccatccccagtt

SEQ ID NO: 4235169 - DNA, 25 bp, Homo sapien
atgcatctccatccccagttctgga

SEQ ID NO: 4235170 - DNA, 25 bp, Homo sapien
gataggggagattgtgaatataaac

SEQ ID NO: 4235171 - DNA, 25 bp, Homo sapien
gcagcctactgtgataggggagatt

SEQ ID NO: 4235172 - DNA, 25 bp, Homo sapien
gagatgactgcaccaagaactgctt

SEQ ID NO: 4235173 - DNA, 25 bp, Homo sapien
gactgcaccaagaactgcttcactt

SEQ ID NO: 4235174 - DNA, 25 bp, Homo sapien
tcagtaatgagagtcaaggatgtgg

SEQ ID NO: 4235175 - DNA, 25 bp, Homo sapien
ctgaagagatgactgcaccaagaac

SEQ ID NO: 4235176 - DNA, 25 bp, Homo sapien
gatccatggggataccaaatcgcct

SEQ ID NO: 4235177 - DNA, 25 bp, Homo sapien
ggtttctaccaatccgatccatggg

SEQ ID NO: 4235178 - DNA, 25 bp, Homo sapien
caaatcgcctttttggatgatctac

SEQ ID NO: 4235179 - DNA, 25 bp, Homo sapien
tctggaatttgaaagccggtttcta

SEQ ID NO: 4235180 - DNA, 25 bp, Homo sapien
taaaatgtacgtgcatcaaaatgat

SEQ ID NO: 4235181 - DNA, 25 bp, Homo sapien
taacaatgctgtaatgtgatggact

SEQ ID NO: 4235182 - DNA, 25 bp, Homo sapien
gttcaagctttggaaaggatttgca

SEQ ID NO: 4235183 - DNA, 25 bp, Homo sapien
gatttacacaatttaattgaagctg

SEQ ID NO: 4235184 - DNA, 25 bp, Homo sapien
ttctatagttcatcacaaggttggg

SEQ ID NO: 4235185 - DNA, 25 bp, Homo sapien
gaaaggcagacaaggatatcacaac

SEQ ID NO: 4235186 - DNA, 25 bp, Homo sapien
gaagcttacaaatacccaaatgtgc

SEQ ID NO: 4235187 - DNA, 25 bp, Homo sapien
ggctacagccctctactacaatgaa

SEQ ID NO: 4235188 - DNA, 25 bp, Homo sapien
ttgacactagaacccagaactccat

SEQ ID NO: 4235189 - DNA, 25 bp, Homo sapien
aattccctaaagctatgaacaggtt

SEQ ID NO: 4235190 - DNA, 25 bp, Homo sapien
aaattttaggacaacatagccagta

SEQ ID NO: 4235191 - DNA, 25 bp, Homo sapien
caggttaaaggtacaacttgacaga

SEQ ID NO: 4235192 - DNA, 25 bp, Homo sapien
tttcttatcatagtctttagtgttt

SEQ ID NO: 4235193 - DNA, 25 bp, Homo sapien
catttcttatcatagtctttagtgt

SEQ ID NO: 4235194 - DNA, 25 bp, Homo sapien
tcatttcttatcatagtctttagtg

SEQ ID NO: 4235195 - DNA, 25 bp, Homo sapien
ttcttatcatagtctttagtgtttc

SEQ ID NO: 4235196 - DNA, 25 bp, Homo sapien
acacgggtcacctaaaacatagtct

SEQ ID NO: 4235197 - DNA, 25 bp, Homo sapien
gggccttgtatcctaaaggcctcaa

SEQ ID NO: 4235198 - DNA, 25 bp, Homo sapien
aggccacacgggtcacctaaaacat

SEQ ID NO: 4235199 - DNA, 25 bp, Homo sapien
ttgtatcctaaaggcctcaacaaaa

SEQ ID NO: 4235200 - DNA, 25 bp, Homo sapien
gcccgctgccgcctcgctgttgtct

SEQ ID NO: 4235201 - DNA, 25 bp, Homo sapien
ctcagtgacgcgccgcctgaggctg

SEQ ID NO: 4235202 - DNA, 25 bp, Homo sapien
ttgtgctcagtgacgcgccgcctga

SEQ ID NO: 4235203 - DNA, 25 bp, Homo sapien
ccgctgccgcctcgctgttgtctcc

SEQ ID NO: 4235204 - DNA, 25 bp, Homo sapien
caaatatccggagcccggaaatgga

SEQ ID NO: 4235205 - DNA, 25 bp, Homo sapien
caaagcagcgggagacggtccccga

SEQ ID NO: 4235206 - DNA, 25 bp, Homo sapien
gccccaatcgataccaaatatccgg

SEQ ID NO: 4235207 - DNA, 25 bp, Homo sapien
tgcaggtctgtaaccgcaattgcga

SEQ ID NO: 4235208 - DNA, 25 bp, Homo sapien
tccaggcagcttggactggtcgatg

SEQ ID NO: 4235209 - DNA, 25 bp, Homo sapien
caggcagcttggactggtcgatgct

SEQ ID NO: 4235210 - DNA, 25 bp, Homo sapien
gcttggactggtcgatgctgacttc

SEQ ID NO: 4235211 - DNA, 25 bp, Homo sapien
gactggtcgatgctgacttcagcca

SEQ ID NO: 4235212 - DNA, 25 bp, Homo sapien
gggtggccacagtatactcattctg

SEQ ID NO: 4235213 - DNA, 25 bp, Homo sapien
caagtggcagtagtttgcaggtccc

SEQ ID NO: 4235214 - DNA, 25 bp, Homo sapien
tatcagataaatgagctgtcactgc

SEQ ID NO: 4235215 - DNA, 25 bp, Homo sapien
caatcacgtggtctctgctacaact

SEQ ID NO: 4235216 - DNA, 25 bp, Homo sapien
caagccctcaaatggtttggcagcc

SEQ ID NO: 4235217 - DNA, 25 bp, Homo sapien
gccatgcccattaaaacccaaagat

SEQ ID NO: 4235218 - DNA, 25 bp, Homo sapien
taaacctctgtaggataaacccagc

SEQ ID NO: 4235219 - DNA, 25 bp, Homo sapien
cagtactctgtttgccttagcctag

SEQ ID NO: 4235220 - DNA, 25 bp, Homo sapien
cagatctcaatggtcccgtaggctc

SEQ ID NO: 4235221 - DNA, 25 bp, Homo sapien
atctcaatggtcccgtaggctctcc

SEQ ID NO: 4235222 - DNA, 25 bp, Homo sapien
ctcaatggtcccgtaggctctcccc

SEQ ID NO: 4235223 - DNA, 25 bp, Homo sapien
gatctcaatggtcccgtaggctctc

SEQ ID NO: 4235224 - DNA, 25 bp, Homo sapien
tttctctgtgggcacatttaaggtg

SEQ ID NO: 4235225 - DNA, 25 bp, Homo sapien
catttctcaaactttttgcctccca

SEQ ID NO: 4235226 - DNA, 25 bp, Homo sapien
ccacctttcaccctcccatttctca

SEQ ID NO: 4235227 - DNA, 25 bp, Homo sapien
cacatttaaggtgaaccacctttca

SEQ ID NO: 4235228 - DNA, 25 bp, Homo sapien
ctccaggacagcaaaatctcggcat

SEQ ID NO: 4235229 - DNA, 25 bp, Homo sapien
tccaggacagcaaaatctcggcata

SEQ ID NO: 4235230 - DNA, 25 bp, Homo sapien
gctgggcctgcgctttcagatcttc

SEQ ID NO: 4235231 - DNA, 25 bp, Homo sapien
tgctggaccaaacggttccgctgaa

SEQ ID NO: 4235232 - DNA, 25 bp, Homo sapien
gctgcttagccacctggagatcatg

SEQ ID NO: 4235233 - DNA, 25 bp, Homo sapien
aacgttcgatgccaaatgatgctca

SEQ ID NO: 4235234 - DNA, 25 bp, Homo sapien
gtctctctgcctcaatagccagctt

SEQ ID NO: 4235235 - DNA, 25 bp, Homo sapien
tgcgtcgtctctctgcctcaatagc

SEQ ID NO: 4235236 - DNA, 25 bp, Homo sapien
ttcttctcctgaatgcgtcgtctct

SEQ ID NO: 4235237 - DNA, 25 bp, Homo sapien
tttcctgagcaatttcacagtcttg

SEQ ID NO: 4235238 - DNA, 25 bp, Homo sapien
cataagcacgggttgcagggaactc

SEQ ID NO: 4235239 - DNA, 25 bp, Homo sapien
aatagtaactatctgcataagcacg

SEQ ID NO: 4235240 - DNA, 25 bp, Homo sapien
ctgtaactccttttcttgcaaaagg

SEQ ID NO: 4235241 - DNA, 25 bp, Homo sapien
tttcttgcaaaaggcgagctatgtc

SEQ ID NO: 4235242 - DNA, 25 bp, Homo sapien
gaatcctgccacacatctaaatgta

SEQ ID NO: 4235243 - DNA, 25 bp, Homo sapien
aaggagtgttttatggttgagtcta

SEQ ID NO: 4235244 - DNA, 25 bp, Homo sapien
gggataagagaaacagtcccaggtc

SEQ ID NO: 4235245 - DNA, 25 bp, Homo sapien
cctaaggtcactttatgaacaaaat

SEQ ID NO: 4235246 - DNA, 25 bp, Homo sapien
catcagagaaacacatatttacctt

SEQ ID NO: 4235247 - DNA, 25 bp, Homo sapien
tgttactgggcaaaattatactcaa

SEQ ID NO: 4235248 - DNA, 25 bp, Homo sapien
cccattatctacatatacactgctt

SEQ ID NO: 4235249 - DNA, 25 bp, Homo sapien
tcacttgtgatcctaagtattggtc

SEQ ID NO: 4235250 - DNA, 25 bp, Homo sapien
tgagacctgtatgtttcttgagacc

SEQ ID NO: 4235251 - DNA, 25 bp, Homo sapien
gaaccacagtcctatgactccaaag

SEQ ID NO: 4235252 - DNA, 25 bp, Homo sapien
tgctgtgacagctttaaatcttgga

SEQ ID NO: 4235253 - DNA, 25 bp, Homo sapien
tttggcaaatataacttactccctc

SEQ ID NO: 4235254 - DNA, 25 bp, Homo sapien
aagtagaggttgaggaatcttgtaa

SEQ ID NO: 4235255 - DNA, 25 bp, Homo sapien
aaagtagaggttgaggaatcttgta

SEQ ID NO: 4235256 - DNA, 25 bp, Homo sapien
caatttgaaactagtatagagtaaa

SEQ ID NO: 4235257 - DNA, 25 bp, Homo sapien
cactctctgagaatggaggagtcct

SEQ ID NO: 4235258 - DNA, 25 bp, Homo sapien
tcaccactgatcgtgggaagcagag

SEQ ID NO: 4235259 - DNA, 25 bp, Homo sapien
caaggtcttgagaatccagaaccca

SEQ ID NO: 4235260 - DNA, 25 bp, Homo sapien
tgaaagtcgatcttggtgtcgagac

SEQ ID NO: 4235261 - DNA, 25 bp, Homo sapien
aattcattggtttgtagttatatac

SEQ ID NO: 4235262 - DNA, 25 bp, Homo sapien
ggacttccatcgagactgtcctcta

SEQ ID NO: 4235263 - DNA, 25 bp, Homo sapien
tttcaaagtcatgagcatgaactag

SEQ ID NO: 4235264 - DNA, 25 bp, Homo sapien
gttatatacatgataccaggacttc

SEQ ID NO: 4235265 - DNA, 25 bp, Homo sapien
caccaactgtagagttagagctgga

SEQ ID NO: 4235266 - DNA, 25 bp, Homo sapien
aagttcctaagaatccacctccagg

SEQ ID NO: 4235267 - DNA, 25 bp, Homo sapien
tctaaaacatgtccaaactgccagg

SEQ ID NO: 4235268 - DNA, 25 bp, Homo sapien
gatggacttcagagttaagcctcag

SEQ ID NO: 4235269 - DNA, 25 bp, Homo sapien
taaacccttgatgtatcactggaat

SEQ ID NO: 4235270 - DNA, 25 bp, Homo sapien
gtcagaatctgaggtaatatctctc

SEQ ID NO: 4235271 - DNA, 25 bp, Homo sapien
cattaagtagaaaatctccacagcc

SEQ ID NO: 4235272 - DNA, 25 bp, Homo sapien
gactgtaacctctggcagttaaaaa

SEQ ID NO: 4235273 - DNA, 25 bp, Homo sapien
cagtgggatgtgctcaaatttcaag

SEQ ID NO: 4235274 - DNA, 25 bp, Homo sapien
taaggatgacagaacatgcctacct

SEQ ID NO: 4235275 - DNA, 25 bp, Homo sapien
tgtcagtggacaagatagtctgcta

SEQ ID NO: 4235276 - DNA, 25 bp, Homo sapien
ggaactcagtactgggcaatgtcag

SEQ ID NO: 4235277 - DNA, 25 bp, Homo sapien
ggcttctgcggcttcagaagccaca

SEQ ID NO: 4235278 - DNA, 25 bp, Homo sapien
aagccacagactcatacacatctgt

SEQ ID NO: 4235279 - DNA, 25 bp, Homo sapien
acagactcatacacatctgtatttc

SEQ ID NO: 4235280 - DNA, 25 bp, Homo sapien
ttgtacaactttcaacctggcttct

SEQ ID NO: 4235281 - DNA, 25 bp, Homo sapien
gcacctggcagtcatgtgataatac

SEQ ID NO: 4235282 - DNA, 25 bp, Homo sapien
tcataccattcctgatccctgtggg

SEQ ID NO: 4235283 - DNA, 25 bp, Homo sapien
tcgtgatggagtagatacagcttct

SEQ ID NO: 4235284 - DNA, 25 bp, Homo sapien
cctgtgggccattcgtgatggagta

SEQ ID NO: 4235285 - DNA, 25 bp, Homo sapien
cctgatccctgtgggccattcgtga

SEQ ID NO: 4235286 - DNA, 25 bp, Homo sapien
tcttgagctacttgagcggctctca

SEQ ID NO: 4235287 - DNA, 25 bp, Homo sapien
ttgagctacttgagcggctctcatg

SEQ ID NO: 4235288 - DNA, 25 bp, Homo sapien
atcttgagctacttgagcggctctc

SEQ ID NO: 4235289 - DNA, 25 bp, Homo sapien
gagctacttgagcggctctcatgtc

SEQ ID NO: 4235290 - DNA, 25 bp, Homo sapien
ccaaagatgatttctcccgctcctt

SEQ ID NO: 4235291 - DNA, 25 bp, Homo sapien
cagccattagaagtcgagcgatttc

SEQ ID NO: 4235292 - DNA, 25 bp, Homo sapien
tcttcagccattagaagtcgagcga

SEQ ID NO: 4235293 - DNA, 25 bp, Homo sapien
ttcagccattagaagtcgagcgatt

SEQ ID NO: 4235294 - DNA, 25 bp, Homo sapien
cactctcttttgacttggaatttgc

SEQ ID NO: 4235295 - DNA, 25 bp, Homo sapien
agaatggtgaggttcatcactctct

SEQ ID NO: 4235296 - DNA, 25 bp, Homo sapien
gaatggtgaggttcatcactctctt

SEQ ID NO: 4235297 - DNA, 25 bp, Homo sapien
tctcttttgacttggaatttgctgc

SEQ ID NO: 4235298 - DNA, 25 bp, Homo sapien
ttctcagagcaatacaaacccaatg

SEQ ID NO: 4235299 - DNA, 25 bp, Homo sapien
ttcacttgaaggaaacaagtctagg

SEQ ID NO: 4235300 - DNA, 25 bp, Homo sapien
gaatatgccactattcttctcagag

SEQ ID NO: 4235301 - DNA, 25 bp, Homo sapien
caacaacagtgtcaattattcaatg

SEQ ID NO: 4235302 - DNA, 25 bp, Homo sapien
gggaatgtactaacctatagagttc

SEQ ID NO: 4235303 - DNA, 25 bp, Homo sapien
cttttacttggatactttgggaatg

SEQ ID NO: 4235304 - DNA, 25 bp, Homo sapien
agaggccaaggatctgaagactgca

SEQ ID NO: 4235305 - DNA, 25 bp, Homo sapien
tccagtactgttccatcatatatgc

SEQ ID NO: 4235306 - DNA, 25 bp, Homo sapien
ccatctgtcatgataggtggtggtg

SEQ ID NO: 4235307 - DNA, 25 bp, Homo sapien
tctgctggtttgtaaaatgagtgta

SEQ ID NO: 4235308 - DNA, 25 bp, Homo sapien
aaatgagtgtaatccgcatcttcac

SEQ ID NO: 4235309 - DNA, 25 bp, Homo sapien
gaaatgccgtgtggaactctgctgg

SEQ ID NO: 4235310 - DNA, 25 bp, Homo sapien
tcccaagaagtatatgcagcataga

SEQ ID NO: 4235311 - DNA, 25 bp, Homo sapien
catagaggtggccaatattcagaag

SEQ ID NO: 4235312 - DNA, 25 bp, Homo sapien
tactgcccaagtgatcatgaataac

SEQ ID NO: 4235313 - DNA, 25 bp, Homo sapien
gctaaataaggcctactccctagat

SEQ ID NO: 4235314 - DNA, 25 bp, Homo sapien
taggaaagccttgctactgaggcaa

SEQ ID NO: 4235315 - DNA, 25 bp, Homo sapien
gaatgctatctaggccaatctcccc

SEQ ID NO: 4235316 - DNA, 25 bp, Homo sapien
gaggttatcaacaaatactgctctg

SEQ ID NO: 4235317 - DNA, 25 bp, Homo sapien
gaaggatggcatcattacttatgca

SEQ ID NO: 4235318 - DNA, 25 bp, Homo sapien
gagtgggtgtctatgtcaagcagcc

SEQ ID NO: 4235319 - DNA, 25 bp, Homo sapien
ccaaatacttggctggctggacatg

SEQ ID NO: 4235320 - DNA, 25 bp, Homo sapien
aatactggtgttaatgaggcctggc

SEQ ID NO: 4235321 - DNA, 25 bp, Homo sapien
tttgaaggacacgaagcgaaatcac

SEQ ID NO: 4235322 - DNA, 25 bp, Homo sapien
ggaatatgttgacctagatccaagt

SEQ ID NO: 4235323 - DNA, 25 bp, Homo sapien
tcaggacacattagagaagaaaagc

SEQ ID NO: 4235324 - DNA, 25 bp, Homo sapien
tctatcatcagaacacctagggtta

SEQ ID NO: 4235325 - DNA, 25 bp, Homo sapien
tggtattccccaaagcgatgcttat

SEQ ID NO: 4235326 - DNA, 25 bp, Homo sapien
taatattcttacctctcgccatgga

SEQ ID NO: 4235327 - DNA, 25 bp, Homo sapien
caacttgtgctgtacggaggtgaac

SEQ ID NO: 4235328 - DNA, 25 bp, Homo sapien
gaaagacattgtgccccatgcagca

SEQ ID NO: 4235329 - DNA, 25 bp, Homo sapien
tatggctttaagactcacaggcacc

SEQ ID NO: 4235330 - DNA, 25 bp, Homo sapien
aatacaccaggcatcattatcatgt

SEQ ID NO: 4235331 - DNA, 25 bp, Homo sapien
gtccttgaatgctgtaaagaaacaa

SEQ ID NO: 4235332 - DNA, 25 bp, Homo sapien
aataagactctcgtaagtttccctg

SEQ ID NO: 4235333 - DNA, 25 bp, Homo sapien
cagaaagtgtatggaaatggagtaa

SEQ ID NO: 4235334 - DNA, 25 bp, Homo sapien
tggaggaaagtgaaaggtacatctc

SEQ ID NO: 4235335 - DNA, 25 bp, Homo sapien
tcatggaggaaagtgaaaggtacat

SEQ ID NO: 4235336 - DNA, 25 bp, Homo sapien
gaggaaagtgaaaggtacatctcac

SEQ ID NO: 4235337 - DNA, 25 bp, Homo sapien
acaatcatggaggaaagtgaaaggt

SEQ ID NO: 4235338 - DNA, 25 bp, Homo sapien
ctttcccagggagattgttctgatc

SEQ ID NO: 4235339 - DNA, 25 bp, Homo sapien
tgttctgatcagagacttgaacttg

SEQ ID NO: 4235340 - DNA, 25 bp, Homo sapien
tctcccagacagatgcgtttgattc

SEQ ID NO: 4235341 - DNA, 25 bp, Homo sapien
tctgggggacggtctgtagctcctt

SEQ ID NO: 4235342 - DNA, 25 bp, Homo sapien
tgtggcctatatggtctacccttga

SEQ ID NO: 4235343 - DNA, 25 bp, Homo sapien
tcttttaggctacagagtctgaggc

SEQ ID NO: 4235344 - DNA, 25 bp, Homo sapien
ggtctacagtgccttttcagtccaa

SEQ ID NO: 4235345 - DNA, 25 bp, Homo sapien
tattatattgggatcaagctctccc

SEQ ID NO: 4235346 - DNA, 25 bp, Homo sapien
tgttttaactgcagtgagacactat

SEQ ID NO: 4235347 - DNA, 25 bp, Homo sapien
tataccagtttgttatttgcatgtc

SEQ ID NO: 4235348 - DNA, 25 bp, Homo sapien
cccacagagttaagctcttcatata

SEQ ID NO: 4235349 - DNA, 25 bp, Homo sapien
gcatttgttcttgcccatcttttag

SEQ ID NO: 4235350 - DNA, 25 bp, Homo sapien
tgggcatccatcgtctcagtcactt

SEQ ID NO: 4235351 - DNA, 25 bp, Homo sapien
gcaaaagtttatgggcatccatcgt

SEQ ID NO: 4235352 - DNA, 25 bp, Homo sapien
agtttatgggcatccatcgtctcag

SEQ ID NO: 4235353 - DNA, 25 bp, Homo sapien
ctgggcaaaagtttatgggcatcca

SEQ ID NO: 4235354 - DNA, 25 bp, Homo sapien
ccattccacctgctgccgattggtg

SEQ ID NO: 4235355 - DNA, 25 bp, Homo sapien
tgctgccgattggtggccgtacatg

SEQ ID NO: 4235356 - DNA, 25 bp, Homo sapien
gtggccgtacatgtctcaatcttgg

SEQ ID NO: 4235357 - DNA, 25 bp, Homo sapien
cacctgctgccgattggtggccgta

SEQ ID NO: 4235358 - DNA, 25 bp, Homo sapien
agcagagactggaatagtgattgcc

SEQ ID NO: 4235359 - DNA, 25 bp, Homo sapien
aagcagagactggaatagtgattgc

SEQ ID NO: 4235360 - DNA, 25 bp, Homo sapien
gcagagactggaatagtgattgcca

SEQ ID NO: 4235361 - DNA, 25 bp, Homo sapien
gattatgggtttgtcctcactctca

SEQ ID NO: 4235362 - DNA, 25 bp, Homo sapien
tcttagaaacgtagccccagatttg

SEQ ID NO: 4235363 - DNA, 25 bp, Homo sapien
gactgcctgttgagtcagtagacct

SEQ ID NO: 4235364 - DNA, 25 bp, Homo sapien
gagtctcagttcatcagggatccag

SEQ ID NO: 4235365 - DNA, 25 bp, Homo sapien
caagtgccatttaccattcggatga

SEQ ID NO: 4235366 - DNA, 25 bp, Homo sapien
caactgttactgaggtttcaaccag

SEQ ID NO: 4235367 - DNA, 25 bp, Homo sapien
gaggcagtagacaggccaactgtta

SEQ ID NO: 4235368 - DNA, 25 bp, Homo sapien
taccattcggatgaaggactccagc

SEQ ID NO: 4235369 - DNA, 25 bp, Homo sapien
caccctccatccattgacaagaata

SEQ ID NO: 4235370 - DNA, 25 bp, Homo sapien
catttccacattgtgtgttctaacc

SEQ ID NO: 4235371 - DNA, 25 bp, Homo sapien
cctccatccattgacaagaataagg

SEQ ID NO: 4235372 - DNA, 25 bp, Homo sapien
cattgtgtgttctaacctcggtttt

SEQ ID NO: 4235373 - DNA, 25 bp, Homo sapien
aaacccaacccctgagtctgccttg

SEQ ID NO: 4235374 - DNA, 25 bp, Homo sapien
agtctgccttgtgaccccttcttaa

SEQ ID NO: 4235375 - DNA, 25 bp, Homo sapien
gactaatggtgttcagaatcctttc

SEQ ID NO: 4235376 - DNA, 25 bp, Homo sapien
tgccctctaatatactgctagtgag

SEQ ID NO: 4235377 - DNA, 25 bp, Homo sapien
gaatcctttcaagtgcttagcggcc

SEQ ID NO: 4235378 - DNA, 25 bp, Homo sapien
gccattctgaaaatgtatagcgcca

SEQ ID NO: 4235379 - DNA, 25 bp, Homo sapien
cctcacatggtatttattcggcgat

SEQ ID NO: 4235380 - DNA, 25 bp, Homo sapien
tatttattcggcgatcatgcaccac

SEQ ID NO: 4235381 - DNA, 25 bp, Homo sapien
ctgagtccagggtgtaagaagggtt

SEQ ID NO: 4235382 - DNA, 25 bp, Homo sapien
ggcgatcatgcaccacggctgtctc

SEQ ID NO: 4235383 - DNA, 25 bp, Homo sapien
cagagagctttttgcagcggtagaa

SEQ ID NO: 4235384 - DNA, 25 bp, Homo sapien
gacaagcggccatgagaattcacag

SEQ ID NO: 4235385 - DNA, 25 bp, Homo sapien
taataaaggagggttatgctgaggc

SEQ ID NO: 4235386 - DNA, 25 bp, Homo sapien
gtgaatagttcaaggccttaaggca

SEQ ID NO: 4235387 - DNA, 25 bp, Homo sapien
tacaaagttggtcatcctgggttgc

SEQ ID NO: 4235388 - DNA, 25 bp, Homo sapien
tgtatatgagtcagccatccaagct

SEQ ID NO: 4235389 - DNA, 25 bp, Homo sapien
aaacttcttgatagccctggtgact

SEQ ID NO: 4235390 - DNA, 25 bp, Homo sapien
gctgcttttatctcgtggctctaca

SEQ ID NO: 4235391 - DNA, 25 bp, Homo sapien
gaggttgtgtgccactggtgatgat

SEQ ID NO: 4235392 - DNA, 25 bp, Homo sapien
cactctcacatatgttagaggttgt

SEQ ID NO: 4235393 - DNA, 25 bp, Homo sapien
cacatatgttagaggttgtgtgcca

SEQ ID NO: 4235394 - DNA, 25 bp, Homo sapien
ctcacatatgttagaggttgtgtgc

SEQ ID NO: 4235395 - DNA, 25 bp, Homo sapien
aagctgttatgccttgacgagattc

SEQ ID NO: 4235396 - DNA, 25 bp, Homo sapien
gcatcttgctgctacactacctggg

SEQ ID NO: 4235397 - DNA, 25 bp, Homo sapien
gacgagattctcctgcagtgtgaag

SEQ ID NO: 4235398 - DNA, 25 bp, Homo sapien
tttgtcatacttcaaagctgcagtg

SEQ ID NO: 4235399 - DNA, 25 bp, Homo sapien
ttgtaaacacgactgcatttggagg

SEQ ID NO: 4235400 - DNA, 25 bp, Homo sapien
aacacgactgcatttggaggagaca

SEQ ID NO: 4235401 - DNA, 25 bp, Homo sapien
taaacacgactgcatttggaggaga

SEQ ID NO: 4235402 - DNA, 25 bp, Homo sapien
gtaaacacgactgcatttggaggag

SEQ ID NO: 4235403 - DNA, 25 bp, Homo sapien
cataaagggctgttgagttttgtca

SEQ ID NO: 4235404 - DNA, 25 bp, Homo sapien
gagatatgtctcatcaatacttagt

SEQ ID NO: 4235405 - DNA, 25 bp, Homo sapien
gatatgtctcatcaatacttagttt

SEQ ID NO: 4235406 - DNA, 25 bp, Homo sapien
ttgagatatgtctcatcaatactta

SEQ ID NO: 4235407 - DNA, 25 bp, Homo sapien
cttgatttggaactcattcaactta

SEQ ID NO: 4235408 - DNA, 25 bp, Homo sapien
tgatttggaactcattcaacttaaa

SEQ ID NO: 4235409 - DNA, 25 bp, Homo sapien
aaaattaaaggtcgtctgttcactg

SEQ ID NO: 4235410 - DNA, 25 bp, Homo sapien
aaggtcgtctgttcactgtaagcca

SEQ ID NO: 4235411 - DNA, 25 bp, Homo sapien
gtcagggtaatttgtctccactctg

SEQ ID NO: 4235412 - DNA, 25 bp, Homo sapien
cactctgatgcaccaaatcttcttt

SEQ ID NO: 4235413 - DNA, 25 bp, Homo sapien
tgtctccactctgatgcaccaaatc

SEQ ID NO: 4235414 - DNA, 25 bp, Homo sapien
taatttgtctccactctgatgcacc

SEQ ID NO: 4235415 - DNA, 25 bp, Homo sapien
tcagccataatcagttacagctgaa

SEQ ID NO: 4235416 - DNA, 25 bp, Homo sapien
taatgcaatccaaaggtaaggactg

SEQ ID NO: 4235417 - DNA, 25 bp, Homo sapien
tgggagacgtaattatacctgtgcc

SEQ ID NO: 4235418 - DNA, 25 bp, Homo sapien
taaggaaactagctcctgagggaac

SEQ ID NO: 4235419 - DNA, 25 bp, Homo sapien
gactctattgggatgtgtggcactt

SEQ ID NO: 4235420 - DNA, 25 bp, Homo sapien
gatgttacagtactttcaccaaggt

SEQ ID NO: 4235421 - DNA, 25 bp, Homo sapien
tgtatccctcactagaattctgtgg

SEQ ID NO: 4235422 - DNA, 25 bp, Homo sapien
caaacacgggaagtcttgctcttag

SEQ ID NO: 4235423 - DNA, 25 bp, Homo sapien
tggaaagaccaacctctaccaaggc

SEQ ID NO: 4235424 - DNA, 25 bp, Homo sapien
tgtagttttagtgtagatggcattt

SEQ ID NO: 4235425 - DNA, 25 bp, Homo sapien
ttgtagttttagtgtagatggcatt

SEQ ID NO: 4235426 - DNA, 25 bp, Homo sapien
ggccgtctaattgctgggtctctgg

SEQ ID NO: 4235427 - DNA, 25 bp, Homo sapien
ttgaggagcggactataaaactggg

SEQ ID NO: 4235428 - DNA, 25 bp, Homo sapien
tcaggtctttcgctggccgtctaac

SEQ ID NO: 4235429 - DNA, 25 bp, Homo sapien
ttttcttcatcaggtctttcgctgg

SEQ ID NO: 4235430 - DNA, 25 bp, Homo sapien
tctcaatatatcctcatatcagcaa

SEQ ID NO: 4235431 - DNA, 25 bp, Homo sapien
tgcctggtgttggtctggacacaca

SEQ ID NO: 4235432 - DNA, 25 bp, Homo sapien
tgttgtagtattatgcctggtgttg

SEQ ID NO: 4235433 - DNA, 25 bp, Homo sapien
cagcaaagtgaaatggacagaggtg

SEQ ID NO: 4235434 - DNA, 25 bp, Homo sapien
aaatcaaagctaacccagctagtta

SEQ ID NO: 4235435 - DNA, 25 bp, Homo sapien
acatgtcaaatgatctttagaacat

SEQ ID NO: 4235436 - DNA, 25 bp, Homo sapien
tagaacatgctccaataagaaaatc

SEQ ID NO: 4235437 - DNA, 25 bp, Homo sapien
aatcaaagctaacccagctagttag

SEQ ID NO: 4235438 - DNA, 25 bp, Homo sapien
ctgtagaagttcagactatagtgta

SEQ ID NO: 4235439 - DNA, 25 bp, Homo sapien
gctctgtagaagttcagactatagt

SEQ ID NO: 4235440 - DNA, 25 bp, Homo sapien
gtagaagttcagactatagtgtaag

SEQ ID NO: 4235441 - DNA, 25 bp, Homo sapien
ctatagtgtaagctctcccagcagc

SEQ ID NO: 4235442 - DNA, 25 bp, Homo sapien
tctgtacagttaatgggtcaagact

SEQ ID NO: 4235443 - DNA, 25 bp, Homo sapien
caggagttgataccacgtgggcaac

SEQ ID NO: 4235444 - DNA, 25 bp, Homo sapien
tagacatagttgctctccctccttc

SEQ ID NO: 4235445 - DNA, 25 bp, Homo sapien
ttaacattaggtatagggacatgga

SEQ ID NO: 4235446 - DNA, 25 bp, Homo sapien
ttcttatcagctgggatttctcttt

SEQ ID NO: 4235447 - DNA, 25 bp, Homo sapien
agctactcagctatagatgtaaaag

SEQ ID NO: 4235448 - DNA, 25 bp, Homo sapien
tcagctactcagctatagatgtaaa

SEQ ID NO: 4235449 - DNA, 25 bp, Homo sapien
cagctactcagctatagatgtaaaa

SEQ ID NO: 4235450 - DNA, 25 bp, Homo sapien
tgaccaaccacccagctttgggaag

SEQ ID NO: 4235451 - DNA, 25 bp, Homo sapien
attggagattgtcgtcttctttgac

SEQ ID NO: 4235452 - DNA, 25 bp, Homo sapien
gatatacccttgtccaaagacaggt

SEQ ID NO: 4235453 - DNA, 25 bp, Homo sapien
cagatcaggtgaatcaattctggac

SEQ ID NO: 4235454 - DNA, 25 bp, Homo sapien
ccttaactgcaatgtgaactctttc

SEQ ID NO: 4235455 - DNA, 25 bp, Homo sapien
tatccttaactgcaatgtgaactct

SEQ ID NO: 4235456 - DNA, 25 bp, Homo sapien
ttaactgcaatgtgaactctttcat

SEQ ID NO: 4235457 - DNA, 25 bp, Homo sapien
tccttaactgcaatgtgaactcttt

SEQ ID NO: 4235458 - DNA, 25 bp, Homo sapien
actgccttatgagtcgtcctccata

SEQ ID NO: 4235459 - DNA, 25 bp, Homo sapien
tgagtcgtcctccatacgtgattta

SEQ ID NO: 4235460 - DNA, 25 bp, Homo sapien
tataaaatccatatgagtgtggctt

SEQ ID NO: 4235461 - DNA, 25 bp, Homo sapien
ggcttttaccctcgtaacatgacat

SEQ ID NO: 4235462 - DNA, 25 bp, Homo sapien
tgaacgcaagcaagtaatcttcgtg

SEQ ID NO: 4235463 - DNA, 25 bp, Homo sapien
ggatgcttctaactcagggttgacg

SEQ ID NO: 4235464 - DNA, 25 bp, Homo sapien
tccttcttgaaggtcgtaacagtca

SEQ ID NO: 4235465 - DNA, 25 bp, Homo sapien
aaaataagtatttgcctgaggcgta

SEQ ID NO: 4235466 - DNA, 25 bp, Homo sapien
tcagtgcccttgagattggtttaaa

SEQ ID NO: 4235467 - DNA, 25 bp, Homo sapien
tgtcagcccagttgtctgaagctcc

SEQ ID NO: 4235468 - DNA, 25 bp, Homo sapien
tgaagctccctattctgtaccccgt

SEQ ID NO: 4235469 - DNA, 25 bp, Homo sapien
gctgaggattattgctacacccttg

SEQ ID NO: 4235470 - DNA, 25 bp, Homo sapien
ttgagatatgttgactagtgtaagt

SEQ ID NO: 4235471 - DNA, 25 bp, Homo sapien
actgaccatggccagagacttgaga

SEQ ID NO: 4235472 - DNA, 25 bp, Homo sapien
atttcgttggcctgatttagatcat

SEQ ID NO: 4235473 - DNA, 25 bp, Homo sapien
tctgtccacacttcagtgactgacc

SEQ ID NO: 4235474 - DNA, 25 bp, Homo sapien
ttagctccaatacaaggttaaatgt

SEQ ID NO: 4235475 - DNA, 25 bp, Homo sapien
tattgagctttagtaacagacggaa

SEQ ID NO: 4235476 - DNA, 25 bp, Homo sapien
tctattagttggaaagaatgagctg

SEQ ID NO: 4235477 - DNA, 25 bp, Homo sapien
tcccatggctagaattggtattagc

SEQ ID NO: 4235478 - DNA, 25 bp, Homo sapien
gggcagcaagccatcctattctcat

SEQ ID NO: 4235479 - DNA, 25 bp, Homo sapien
taatgctttgcaattggctacgcag

SEQ ID NO: 4235480 - DNA, 25 bp, Homo sapien
gcaatgtgatgctttatgggcctca

SEQ ID NO: 4235481 - DNA, 25 bp, Homo sapien
tgtgcttccgcaaattggagggcag

SEQ ID NO: 4235482 - DNA, 25 bp, Homo sapien
caaagcaatgtctcaggtgtggaca

SEQ ID NO: 4235483 - DNA, 25 bp, Homo sapien
taagtcctaggaaattagtcaacgc

SEQ ID NO: 4235484 - DNA, 25 bp, Homo sapien
caaatcaggagtggtgtagagacat

SEQ ID NO: 4235485 - DNA, 25 bp, Homo sapien
tatgactccaacagacaggattgtg

SEQ ID NO: 4235486 - DNA, 25 bp, Homo sapien
cctctaatgctttcattagagctac

SEQ ID NO: 4235487 - DNA, 25 bp, Homo sapien
ttcattagagctaccgggccaatct

SEQ ID NO: 4235488 - DNA, 25 bp, Homo sapien
agctaccgggccaatctctgttctt

SEQ ID NO: 4235489 - DNA, 25 bp, Homo sapien
ttcctctaatgctttcattagagct

SEQ ID NO: 4235490 - DNA, 25 bp, Homo sapien
tcttgcccagaagcgtaagcacgtt

SEQ ID NO: 4235491 - DNA, 25 bp, Homo sapien
gaagagtgacagcacacagcgtttt

SEQ ID NO: 4235492 - DNA, 25 bp, Homo sapien
ccttcttgtgcagaactgtagacat

SEQ ID NO: 4235493 - DNA, 25 bp, Homo sapien
taagcacgttctgtgaggaaccttc

SEQ ID NO: 4235494 - DNA, 25 bp, Homo sapien
taaatgggccacgaagatccaatct

SEQ ID NO: 4235495 - DNA, 25 bp, Homo sapien
gaaactgaaagctgcattggaataa

SEQ ID NO: 4235496 - DNA, 25 bp, Homo sapien
gtcaccacagctacatgaaataagg

SEQ ID NO: 4235497 - DNA, 25 bp, Homo sapien
tccaatctattgagagtcaccacag

SEQ ID NO: 4235498 - DNA, 25 bp, Homo sapien
aaagatactgatcacatccctgcgc

SEQ ID NO: 4235499 - DNA, 25 bp, Homo sapien
gatactgatcacatccctgcgctgt

SEQ ID NO: 4235500 - DNA, 25 bp, Homo sapien
tataaagatactgatcacatccctg

SEQ ID NO: 4235501 - DNA, 25 bp, Homo sapien
tactgatcacatccctgcgctgtca

SEQ ID NO: 4235502 - DNA, 25 bp, Homo sapien
tgtgcaacatgaatagtgatacttc

SEQ ID NO: 4235503 - DNA, 25 bp, Homo sapien
ttaactgtctgaatacccaggatag

SEQ ID NO: 4235504 - DNA, 25 bp, Homo sapien
attcagataacttgaagatgtcagg

SEQ ID NO: 4235505 - DNA, 25 bp, Homo sapien
ggatagcttaaagccacatgccaga

SEQ ID NO: 4235506 - DNA, 25 bp, Homo sapien
tatgtagggcagagaagtgcagtct

SEQ ID NO: 4235507 - DNA, 25 bp, Homo sapien
gcagagaagtgcagtctgggtaatc

SEQ ID NO: 4235508 - DNA, 25 bp, Homo sapien
ctagtatgtagggcagagaagtgca

SEQ ID NO: 4235509 - DNA, 25 bp, Homo sapien
agaagtgcagtctgggtaatcagtt

SEQ ID NO: 4235510 - DNA, 25 bp, Homo sapien
tccccagatggagtagatgcttgaa

SEQ ID NO: 4235511 - DNA, 25 bp, Homo sapien
tgaaaacccacatctagagttctgg

SEQ ID NO: 4235512 - DNA, 25 bp, Homo sapien
ctcttcgtggaaaattggaagcagc

SEQ ID NO: 4235513 - DNA, 25 bp, Homo sapien
atctagttttagataaaggccacca

SEQ ID NO: 4235514 - DNA, 25 bp, Homo sapien
gcattaaactcataaagagcaatat

SEQ ID NO: 4235515 - DNA, 25 bp, Homo sapien
tatagattacttatgtgcattaaac

SEQ ID NO: 4235516 - DNA, 25 bp, Homo sapien
tcttatgaagacctaataatgttct

SEQ ID NO: 4235517 - DNA, 25 bp, Homo sapien
gaatctgtacaactaaagatggtaa

SEQ ID NO: 4235518 - DNA, 25 bp, Homo sapien
ttgttctccgaccttcctgttcttc

SEQ ID NO: 4235519 - DNA, 25 bp, Homo sapien
cttcttttgttctccgaccttcctg

SEQ ID NO: 4235520 - DNA, 25 bp, Homo sapien
tcatgtggcattccagtcgttctcc

SEQ ID NO: 4235521 - DNA, 25 bp, Homo sapien
gagcactgtctacgacttcatgtgg

SEQ ID NO: 4235522 - DNA, 25 bp, Homo sapien
tacgacttcatgtggcattccagtc

SEQ ID NO: 4235523 - DNA, 25 bp, Homo sapien
attgcacagagagcactgtctacga

SEQ ID NO: 4235524 - DNA, 25 bp, Homo sapien
ccttcttagtggtctcagagttctt

SEQ ID NO: 4235525 - DNA, 25 bp, Homo sapien
tagtggtctcagagttcttcctttg

SEQ ID NO: 4235526 - DNA, 25 bp, Homo sapien
ttcttagtggtctcagagttcttcc

SEQ ID NO: 4235527 - DNA, 25 bp, Homo sapien
gtggtctcagagttcttcctttgta

SEQ ID NO: 4235528 - DNA, 25 bp, Homo sapien
tgtttcactggaagccagaatattg

SEQ ID NO: 4235529 - DNA, 25 bp, Homo sapien
cagaatattggctgaggtgtgtgtc

SEQ ID NO: 4235530 - DNA, 25 bp, Homo sapien
gggactcgagcaaactgacgtgtag

SEQ ID NO: 4235531 - DNA, 25 bp, Homo sapien
tctggaagagagacggcgatggttt

SEQ ID NO: 4235532 - DNA, 25 bp, Homo sapien
tatttaatctgtgcaagtgatattt

SEQ ID NO: 4235533 - DNA, 25 bp, Homo sapien
cctggataagcccttgatgacaaac

SEQ ID NO: 4235534 - DNA, 25 bp, Homo sapien
ttagcttctgccctggataagccct

SEQ ID NO: 4235535 - DNA, 25 bp, Homo sapien
ttgatgacaaaccattgtcgactct

SEQ ID NO: 4235536 - DNA, 25 bp, Homo sapien
gattaaaacgcagactctgggcctg

SEQ ID NO: 4235537 - DNA, 25 bp, Homo sapien
tagacatacaagatgccactcaggc

SEQ ID NO: 4235538 - DNA, 25 bp, Homo sapien
tatcccaaccttcaggcagaactgg

SEQ ID NO: 4235539 - DNA, 25 bp, Homo sapien
tagttgaatgtacccaggatgctgg

SEQ ID NO: 4235540 - DNA, 25 bp, Homo sapien
tgcatttgagaacccttttctctat

SEQ ID NO: 4235541 - DNA, 25 bp, Homo sapien
tctctattctgtctataccaggctg

SEQ ID NO: 4235542 - DNA, 25 bp, Homo sapien
ctattctgtctataccaggctgcat

SEQ ID NO: 4235543 - DNA, 25 bp, Homo sapien
ccttttctctattctgtctatacca

SEQ ID NO: 4235544 - DNA, 25 bp, Homo sapien
ttggagctctcaactgctcttttgc

SEQ ID NO: 4235545 - DNA, 25 bp, Homo sapien
gccgaaagtattattacaccactag

SEQ ID NO: 4235546 - DNA, 25 bp, Homo sapien
caccacggtgcctgaatttaccagg

SEQ ID NO: 4235547 - DNA, 25 bp, Homo sapien
caccactagaactcactctggttga

SEQ ID NO: 4235548 - DNA, 25 bp, Homo sapien
agggagccatttttgacgccctagg

SEQ ID NO: 4235549 - DNA, 25 bp, Homo sapien
gagggagccatttttgacgccctag

SEQ ID NO: 4235550 - DNA, 25 bp, Homo sapien
catcttcaatgttctatcctgaggg

SEQ ID NO: 4235551 - DNA, 25 bp, Homo sapien
tttcttatcagagcacccactgatg

SEQ ID NO: 4235552 - DNA, 25 bp, Homo sapien
catgctcagcaattacattcagtct

SEQ ID NO: 4235553 - DNA, 25 bp, Homo sapien
acattcagtctgaagctggttttct

SEQ ID NO: 4235554 - DNA, 25 bp, Homo sapien
tcagggtaagttttgatctggtgaa

SEQ ID NO: 4235555 - DNA, 25 bp, Homo sapien
ggtgaagatggaggttccttggtcc

SEQ ID NO: 4235556 - DNA, 25 bp, Homo sapien
ttaccacatggctttatgatttaga

SEQ ID NO: 4235557 - DNA, 25 bp, Homo sapien
gatttagagttccattcattataat

SEQ ID NO: 4235558 - DNA, 25 bp, Homo sapien
taccacatggctttatgatttagag

SEQ ID NO: 4235559 - DNA, 25 bp, Homo sapien
ttatgatttagagttccattcatta

SEQ ID NO: 4235560 - DNA, 25 bp, Homo sapien
gtgggtttttgcaactcgactctag

SEQ ID NO: 4235561 - DNA, 25 bp, Homo sapien
gcttcaaaggatattgcagtgggtt

SEQ ID NO: 4235562 - DNA, 25 bp, Homo sapien
gtttctcactgaggagcgagtcatg

SEQ ID NO: 4235563 - DNA, 25 bp, Homo sapien
gcgagtcatgtatgtgttgctgtca

SEQ ID NO: 4235564 - DNA, 25 bp, Homo sapien
gcgcaagccggagggcgcagtagag

SEQ ID NO: 4235565 - DNA, 25 bp, Homo sapien
cccggcggagcgcaagccggagggc

SEQ ID NO: 4235566 - DNA, 25 bp, Homo sapien
aaattttagcactgcctccccgcga

SEQ ID NO: 4235567 - DNA, 25 bp, Homo sapien
gcagctatggctgcggcgatagcca

SEQ ID NO: 4235568 - DNA, 25 bp, Homo sapien
gtccggcgggtaatccccatctgat

SEQ ID NO: 4235569 - DNA, 25 bp, Homo sapien
agcgcggcgatgacctgatcccgag

SEQ ID NO: 4235570 - DNA, 25 bp, Homo sapien
ggactgagtgatcggccttgcgtcc

SEQ ID NO: 4235571 - DNA, 25 bp, Homo sapien
tcacttccttcctcggccgggatgg

SEQ ID NO: 4235572 - DNA, 25 bp, Homo sapien
gggaaatggagtaaattatgctgat

SEQ ID NO: 4235573 - DNA, 25 bp, Homo sapien
gctgatgatgacttaaaaagccaaa

SEQ ID NO: 4235574 - DNA, 25 bp, Homo sapien
aaagccaaaaagctctctgacaata

SEQ ID NO: 4235575 - DNA, 25 bp, Homo sapien
cttctcactggggaaatggagtaaa

SEQ ID NO: 4235576 - DNA, 25 bp, Homo sapien
tatattccttttcttctgtgaacat

SEQ ID NO: 4235577 - DNA, 25 bp, Homo sapien
ctgatgtctgtggctctctgtttgc

SEQ ID NO: 4235578 - DNA, 25 bp, Homo sapien
tctctgtttgccttattatattcct

SEQ ID NO: 4235579 - DNA, 25 bp, Homo sapien
tctgtttgccttattatattccttt

SEQ ID NO: 4235580 - DNA, 25 bp, Homo sapien
aatatgaattgtcctcataagttca

SEQ ID NO: 4235581 - DNA, 25 bp, Homo sapien
gaattgtcctcataagttcattttg

SEQ ID NO: 4235582 - DNA, 25 bp, Homo sapien
agaatatgaattgtcctcataagtt

SEQ ID NO: 4235583 - DNA, 25 bp, Homo sapien
tatgaattgtcctcataagttcatt

SEQ ID NO: 4235584 - DNA, 25 bp, Homo sapien
gtgctttccgtgactatctccttga

SEQ ID NO: 4235585 - DNA, 25 bp, Homo sapien
tctgtgctttctttccgggttagta

SEQ ID NO: 4235586 - DNA, 25 bp, Homo sapien
ctttccgggttagtaaagatgtgct

SEQ ID NO: 4235587 - DNA, 25 bp, Homo sapien
tgccagcctttacaatacacatttg

SEQ ID NO: 4235588 - DNA, 25 bp, Homo sapien
cactcttctactcttatagtgctct

SEQ ID NO: 4235589 - DNA, 25 bp, Homo sapien
tactcttatagtgctctacaaacgt

SEQ ID NO: 4235590 - DNA, 25 bp, Homo sapien
tatagtgctctacaaacgttattga

SEQ ID NO: 4235591 - DNA, 25 bp, Homo sapien
agtgctctacaaacgttattgaaaa

SEQ ID NO: 4235592 - DNA, 25 bp, Homo sapien
gtagggcgagcttatctctgggatt

SEQ ID NO: 4235593 - DNA, 25 bp, Homo sapien
tgtaagtagggcgagcttatctctg

SEQ ID NO: 4235594 - DNA, 25 bp, Homo sapien
ccagctcctgtgtaagtagggcgag

SEQ ID NO: 4235595 - DNA, 25 bp, Homo sapien
ctcctgtgtaagtagggcgagctta

SEQ ID NO: 4235596 - DNA, 25 bp, Homo sapien
tgtgttctccagcactggaacacag

SEQ ID NO: 4235597 - DNA, 25 bp, Homo sapien
tttgtgttctccagcactggaacac

SEQ ID NO: 4235598 - DNA, 25 bp, Homo sapien
gtgttctccagcactggaacacagt

SEQ ID NO: 4235599 - DNA, 25 bp, Homo sapien
ctttgtgttctccagcactggaaca

SEQ ID NO: 4235600 - DNA, 25 bp, Homo sapien
taggtgaagatatggatctctgatg

SEQ ID NO: 4235601 - DNA, 25 bp, Homo sapien
ttctaggtgaagatatggatctctg

SEQ ID NO: 4235602 - DNA, 25 bp, Homo sapien
ggtgaagatatggatctctgatgag

SEQ ID NO: 4235603 - DNA, 25 bp, Homo sapien
tctaggtgaagatatggatctctga

SEQ ID NO: 4235604 - DNA, 25 bp, Homo sapien
caagagtttcaatcttcttgtcatc

SEQ ID NO: 4235605 - DNA, 25 bp, Homo sapien
taagatttgggtccaaaggcttctg

SEQ ID NO: 4235606 - DNA, 25 bp, Homo sapien
gatcaagagtttcaatcttcttgtc

SEQ ID NO: 4235607 - DNA, 25 bp, Homo sapien
attccacataagatttgggtccaaa

SEQ ID NO: 4235608 - DNA, 25 bp, Homo sapien
atcactgctgcagttttgccaggca

SEQ ID NO: 4235609 - DNA, 25 bp, Homo sapien
tttgaggctcccgatcacatctagg

SEQ ID NO: 4235610 - DNA, 25 bp, Homo sapien
caatgtggtagctttcatcactgct

SEQ ID NO: 4235611 - DNA, 25 bp, Homo sapien
tggaaagcactgacaatgtggtagc

SEQ ID NO: 4235612 - DNA, 25 bp, Homo sapien
tggccgtgacctgcgttcgcacctt

SEQ ID NO: 4235613 - DNA, 25 bp, Homo sapien
cgcgcgacttggagttgttcagtgt

SEQ ID NO: 4235614 - DNA, 25 bp, Homo sapien
cctctctgcgatttgcgagggcggc

SEQ ID NO: 4235615 - DNA, 25 bp, Homo sapien
gaaaagttgctcgtgcgttccacag

SEQ ID NO: 4235616 - DNA, 25 bp, Homo sapien
ggagagcgcgttggctttcgccggg

SEQ ID NO: 4235617 - DNA, 25 bp, Homo sapien
gagagcgcgttggctttcgccgggc

SEQ ID NO: 4235618 - DNA, 25 bp, Homo sapien
gggagagcgcgttggctttcgccgg

SEQ ID NO: 4235619 - DNA, 25 bp, Homo sapien
gggccgtgctcgagcccaccgaggg

SEQ ID NO: 4235620 - DNA, 25 bp, Homo sapien
aggtctcaaggggccgtgctcgagc

SEQ ID NO: 4235621 - DNA, 25 bp, Homo sapien
aaggggccgtgctcgagcccaccga

SEQ ID NO: 4235622 - DNA, 25 bp, Homo sapien
tctcaaggggccgtgctcgagccca

SEQ ID NO: 4235623 - DNA, 25 bp, Homo sapien
attcccacaccggagtcgcccttgg

SEQ ID NO: 4235624 - DNA, 25 bp, Homo sapien
gaggtgccaaggaccccggtccaga

SEQ ID NO: 4235625 - DNA, 25 bp, Homo sapien
tgcgggtgcttcccttccgccggat

SEQ ID NO: 4235626 - DNA, 25 bp, Homo sapien
ggacaccgaggtagtcgggctccca

SEQ ID NO: 4235627 - DNA, 25 bp, Homo sapien
gaatttctatgggtagaatcccaga

SEQ ID NO: 4235628 - DNA, 25 bp, Homo sapien
ccgctgcagcacaaaggactatttt

SEQ ID NO: 4235629 - DNA, 25 bp, Homo sapien
gggtagaatcccagatgagccaatt

SEQ ID NO: 4235630 - DNA, 25 bp, Homo sapien
tccttttgctaattgtctctccctc

SEQ ID NO: 4235631 - DNA, 25 bp, Homo sapien
tattcaagacaacttgttacagtgc

SEQ ID NO: 4235632 - DNA, 25 bp, Homo sapien
tgttacagtgctattagaagagatg

SEQ ID NO: 4235633 - DNA, 25 bp, Homo sapien
tagaagagatggaaaacgtccaact

SEQ ID NO: 4235634 - DNA, 25 bp, Homo sapien
aacgagctcgtgtttattcaagaca

SEQ ID NO: 4235635 - DNA, 25 bp, Homo sapien
attgctcaaacccggtaggtgaagg

SEQ ID NO: 4235636 - DNA, 25 bp, Homo sapien
tcttctcacattgttctgcagatta

SEQ ID NO: 4235637 - DNA, 25 bp, Homo sapien
tccagtcttactcccaaatttctct

SEQ ID NO: 4235638 - DNA, 25 bp, Homo sapien
tccatttcctccagtcttactccca

SEQ ID NO: 4235639 - DNA, 25 bp, Homo sapien
ttgttctgcagattaattccatttc

SEQ ID NO: 4235640 - DNA, 25 bp, Homo sapien
ttatccaggaaaatatgacctcacc

SEQ ID NO: 4235641 - DNA, 25 bp, Homo sapien
gcagcaattaatcctagagagacag

SEQ ID NO: 4235642 - DNA, 25 bp, Homo sapien
gctgttttgaggactcgcaatgaaa

SEQ ID NO: 4235643 - DNA, 25 bp, Homo sapien
taattagtgggcttgaaggcaggct

SEQ ID NO: 4235644 - DNA, 25 bp, Homo sapien
tgcagtgaccagaaacttagagcac

SEQ ID NO: 4235645 - DNA, 25 bp, Homo sapien
cagtcctaatagtggtgacaacagg

SEQ ID NO: 4235646 - DNA, 25 bp, Homo sapien
caacaggagtatttgtgtcacctct

SEQ ID NO: 4235647 - DNA, 25 bp, Homo sapien
gggtgagaccccagtaccatactag

SEQ ID NO: 4235648 - DNA, 25 bp, Homo sapien
tctctatgtactagacagcaaacac

SEQ ID NO: 4235649 - DNA, 25 bp, Homo sapien
tggtaacagctctaaagtctctcta

SEQ ID NO: 4235650 - DNA, 25 bp, Homo sapien
taaacatgtgtatcaatgcttcggg

SEQ ID NO: 4235651 - DNA, 25 bp, Homo sapien
tatctattgtcaccaattcaactgg

SEQ ID NO: 4235652 - DNA, 25 bp, Homo sapien
tctgtgggagttttgtaaagtgtga

SEQ ID NO: 4235653 - DNA, 25 bp, Homo sapien
agaaagtatctgtgggagttttgta

SEQ ID NO: 4235654 - DNA, 25 bp, Homo sapien
taagaagtagacgagagaaagtatc

SEQ ID NO: 4235655 - DNA, 25 bp, Homo sapien
gacttctcagagtggtggtaagaag

SEQ ID NO: 4235656 - DNA, 25 bp, Homo sapien
tttgagcctctgaggtgcttctagt

SEQ ID NO: 4235657 - DNA, 25 bp, Homo sapien
ttgagcctctgaggtgcttctagta

SEQ ID NO: 4235658 - DNA, 25 bp, Homo sapien
ctttgagcctctgaggtgcttctag

SEQ ID NO: 4235659 - DNA, 25 bp, Homo sapien
tgagcctctgaggtgcttctagtac

SEQ ID NO: 4235660 - DNA, 25 bp, Homo sapien
agcgatcccggtactgcatgagtca

SEQ ID NO: 4235661 - DNA, 25 bp, Homo sapien
ggcccgagaaccctatcaagatgtt

SEQ ID NO: 4235662 - DNA, 25 bp, Homo sapien
tctcggatggaaagtctggacccgg

SEQ ID NO: 4235663 - DNA, 25 bp, Homo sapien
gatagattgaacacccagattgctg

SEQ ID NO: 4235664 - DNA, 25 bp, Homo sapien
cattgtatactaggcactgtggata

SEQ ID NO: 4235665 - DNA, 25 bp, Homo sapien
tatatggaccctcagaaagttccca

SEQ ID NO: 4235666 - DNA, 25 bp, Homo sapien
aaagactcctaagctctgggaagac

SEQ ID NO: 4235667 - DNA, 25 bp, Homo sapien
cgtgatgggtcctagtttcctaagc

SEQ ID NO: 4235668 - DNA, 25 bp, Homo sapien
ggtgtggtagggtcaaatgaagctg

SEQ ID NO: 4235669 - DNA, 25 bp, Homo sapien
tcaggtgtggtagggtcaaatgaag

SEQ ID NO: 4235670 - DNA, 25 bp, Homo sapien
caggcatttgaactgcctcattcat

SEQ ID NO: 4235671 - DNA, 25 bp, Homo sapien
tgtggtagggtcaaatgaagctgag

SEQ ID NO: 4235672 - DNA, 25 bp, Homo sapien
taagagagcacgaagccagtgatat

SEQ ID NO: 4235673 - DNA, 25 bp, Homo sapien
tacactaggccccatggagaatata

SEQ ID NO: 4235674 - DNA, 25 bp, Homo sapien
cccatggagaatataagagagcacg

SEQ ID NO: 4235675 - DNA, 25 bp, Homo sapien
gagaatataagagagcacgaagcca

SEQ ID NO: 4235676 - DNA, 25 bp, Homo sapien
aataagattggattccaatacctag

SEQ ID NO: 4235677 - DNA, 25 bp, Homo sapien
caatacctagaaccaggtagtctga

SEQ ID NO: 4235678 - DNA, 25 bp, Homo sapien
tggtggcagtagacaaataagattg

SEQ ID NO: 4235679 - DNA, 25 bp, Homo sapien
gacccgtgaaagggccagagatgct

SEQ ID NO: 4235680 - DNA, 25 bp, Homo sapien
ctgatactgctcctgaacacatggg

SEQ ID NO: 4235681 - DNA, 25 bp, Homo sapien
tcagcagaacggctttctgatactg

SEQ ID NO: 4235682 - DNA, 25 bp, Homo sapien
tcttcgttcttccttatgccaggcc

SEQ ID NO: 4235683 - DNA, 25 bp, Homo sapien
cgttcttccttatgccaggcctcaa

SEQ ID NO: 4235684 - DNA, 25 bp, Homo sapien
ccttttaatatgacagcaggagtaa

SEQ ID NO: 4235685 - DNA, 25 bp, Homo sapien
ttctcgtactcctctagcacttata

SEQ ID NO: 4235686 - DNA, 25 bp, Homo sapien
tcacagatgactactgtcctttgga

SEQ ID NO: 4235687 - DNA, 25 bp, Homo sapien
gcacttatatctgttgctccttcag

SEQ ID NO: 4235688 - DNA, 25 bp, Homo sapien
gctctgactagacagcattactctt

SEQ ID NO: 4235689 - DNA, 25 bp, Homo sapien
tttttcatctgtgaatctgttctgg

SEQ ID NO: 4235690 - DNA, 25 bp, Homo sapien
gcttcaaatgagactgaaattaaaa

SEQ ID NO: 4235691 - DNA, 25 bp, Homo sapien
tctttttcatctgtgaatctgttct

SEQ ID NO: 4235692 - DNA, 25 bp, Homo sapien
ttttcatctgtgaatctgttctgga

SEQ ID NO: 4235693 - DNA, 25 bp, Homo sapien
tcagattcccacccatcaggggagg

SEQ ID NO: 4235694 - DNA, 25 bp, Homo sapien
cccaagggttaaggagaagctgtca

SEQ ID NO: 4235695 - DNA, 25 bp, Homo sapien
tggtttgggaactgattaaactcca

SEQ ID NO: 4235696 - DNA, 25 bp, Homo sapien
taaactccattgctaaaatccattc

SEQ ID NO: 4235697 - DNA, 25 bp, Homo sapien
gctgaaaattcgcccagcaggagat

SEQ ID NO: 4235698 - DNA, 25 bp, Homo sapien
tgccaatgggagtgaacctgtgttg

SEQ ID NO: 4235699 - DNA, 25 bp, Homo sapien
cactgagcacaaatgaccacagggt

SEQ ID NO: 4235700 - DNA, 25 bp, Homo sapien
gatttgaataagagttccagtaagc

SEQ ID NO: 4235701 - DNA, 25 bp, Homo sapien
cagtaagctcttctcgcccactgag

SEQ ID NO: 4235702 - DNA, 25 bp, Homo sapien
ttttttgtgaattcagggccagaat

SEQ ID NO: 4235703 - DNA, 25 bp, Homo sapien
aattcagggccagaatgtattttca

SEQ ID NO: 4235704 - DNA, 25 bp, Homo sapien
aactgaatcacgaattttttttgtg

SEQ ID NO: 4235705 - DNA, 25 bp, Homo sapien
tttgtgaattcagggccagaatgta

SEQ ID NO: 4235706 - DNA, 25 bp, Homo sapien
cagttgctacattttgcttgatacc

SEQ ID NO: 4235707 - DNA, 25 bp, Homo sapien
tccatgtgaggttgaaaggagcact

SEQ ID NO: 4235708 - DNA, 25 bp, Homo sapien
gatgactctgttcccgcatgtctct

SEQ ID NO: 4235709 - DNA, 25 bp, Homo sapien
cgatgataactctagaatggctcca

SEQ ID NO: 4235710 - DNA, 25 bp, Homo sapien
atctaggagagaagacgccactgac

SEQ ID NO: 4235711 - DNA, 25 bp, Homo sapien
gacttgctctccttggttgtccagg

SEQ ID NO: 4235712 - DNA, 25 bp, Homo sapien
gacgccactgacttgctctccttgg

SEQ ID NO: 4235713 - DNA, 25 bp, Homo sapien
aaagattgttctgtggtccctggat

SEQ ID NO: 4235714 - DNA, 25 bp, Homo sapien
agcctaactagtaatatctccccaa

SEQ ID NO: 4235715 - DNA, 25 bp, Homo sapien
caacttgctgtgttcagtgggttac

SEQ ID NO: 4235716 - DNA, 25 bp, Homo sapien
tctcagatgaagtaaatcaacttgc

SEQ ID NO: 4235717 - DNA, 25 bp, Homo sapien
gagaacatgatatgctctagggccc

SEQ ID NO: 4235718 - DNA, 25 bp, Homo sapien
tagctaaccctttatcaggctttcg

SEQ ID NO: 4235719 - DNA, 25 bp, Homo sapien
ccttcactagaatgttggttccaag

SEQ ID NO: 4235720 - DNA, 25 bp, Homo sapien
caactcagtctagattacatggccc

SEQ ID NO: 4235721 - DNA, 25 bp, Homo sapien
cgtggatttgcttgtatgctctaaa

SEQ ID NO: 4235722 - DNA, 25 bp, Homo sapien
taattccgcactcctacttaggaag

SEQ ID NO: 4235723 - DNA, 25 bp, Homo sapien
gagaacaggtttgcatgttgccaag

SEQ ID NO: 4235724 - DNA, 25 bp, Homo sapien
tatcccctgaagctgctagtaagaa

SEQ ID NO: 4235725 - DNA, 25 bp, Homo sapien
gtcattagttaagcagcagaacgct

SEQ ID NO: 4235726 - DNA, 25 bp, Homo sapien
ctttaggattcttatttgaggtgtc

SEQ ID NO: 4235727 - DNA, 25 bp, Homo sapien
gatctggttgctttatgtcccattg

SEQ ID NO: 4235728 - DNA, 25 bp, Homo sapien
tattttctctatttcgtggatatgg

SEQ ID NO: 4235729 - DNA, 25 bp, Homo sapien
tatggattatcctgtttgttggatc

SEQ ID NO: 4235730 - DNA, 25 bp, Homo sapien
cgcaagaggggaggaagaactgagt

SEQ ID NO: 4235731 - DNA, 25 bp, Homo sapien
caagaggggaggaagaactgagtca

SEQ ID NO: 4235732 - DNA, 25 bp, Homo sapien
aagaggggaggaagaactgagtcat

SEQ ID NO: 4235733 - DNA, 25 bp, Homo sapien
gcaagaggggaggaagaactgagtc

SEQ ID NO: 4235734 - DNA, 25 bp, Homo sapien
aggggttgctccaacagattccaag

SEQ ID NO: 4235735 - DNA, 25 bp, Homo sapien
ggggttgctccaacagattccaagc

SEQ ID NO: 4235736 - DNA, 25 bp, Homo sapien
ttttttgtcttgtagtgatgtgagc

SEQ ID NO: 4235737 - DNA, 25 bp, Homo sapien
tcttgtagtgatgtgagctgggcca

SEQ ID NO: 4235738 - DNA, 25 bp, Homo sapien
ccttcggcagcagtcatcttgtttt

SEQ ID NO: 4235739 - DNA, 25 bp, Homo sapien
atagtcccttgtgccctttgcacca

SEQ ID NO: 4235740 - DNA, 25 bp, Homo sapien
gcaccatttccttcggcagcagtca

SEQ ID NO: 4235741 - DNA, 25 bp, Homo sapien
ttgtgtcctgggcatagtcccttgt

SEQ ID NO: 4235742 - DNA, 25 bp, Homo sapien
tgattgcgccacgctttgcctccag

SEQ ID NO: 4235743 - DNA, 25 bp, Homo sapien
acatccctgattgcgccacgctttg

SEQ ID NO: 4235744 - DNA, 25 bp, Homo sapien
acaacatccctgattgcgccacgct

SEQ ID NO: 4235745 - DNA, 25 bp, Homo sapien
tcacaacatccctgattgcgccacg

SEQ ID NO: 4235746 - DNA, 25 bp, Homo sapien
tctgctatggctgtgagggtcctca

SEQ ID NO: 4235747 - DNA, 25 bp, Homo sapien
ctcagtagtgtctctgagtttggtg

SEQ ID NO: 4235748 - DNA, 25 bp, Homo sapien
ggtcgttcttggtggcaagagctgt

SEQ ID NO: 4235749 - DNA, 25 bp, Homo sapien
catagtcagtggtgtgcgtgtgctc

SEQ ID NO: 4235750 - DNA, 25 bp, Homo sapien
catcttcagtttgagctcgtggctt

SEQ ID NO: 4235751 - DNA, 25 bp, Homo sapien
gactcagtgtgggtttgagctagct

SEQ ID NO: 4235752 - DNA, 25 bp, Homo sapien
gccttgtggaaaagacgctgtcttg

SEQ ID NO: 4235753 - DNA, 25 bp, Homo sapien
tctcttttggcgaacttgatggcat

SEQ ID NO: 4235754 - DNA, 25 bp, Homo sapien
gagaagctgactttctgccgtttcc

SEQ ID NO: 4235755 - DNA, 25 bp, Homo sapien
agggagaagctgactttctgccgtt

SEQ ID NO: 4235756 - DNA, 25 bp, Homo sapien
gactttctgccgtttccttcttatg

SEQ ID NO: 4235757 - DNA, 25 bp, Homo sapien
gaagctgactttctgccgtttcctt

SEQ ID NO: 4235758 - DNA, 25 bp, Homo sapien
gtctcaccccagctatcataagcag

SEQ ID NO: 4235759 - DNA, 25 bp, Homo sapien
tcataagcagccaaaggaaccactt

SEQ ID NO: 4235760 - DNA, 25 bp, Homo sapien
caaatatgggagattcagaaatcct

SEQ ID NO: 4235761 - DNA, 25 bp, Homo sapien
gatagggtgactgagagagcttcca

SEQ ID NO: 4235762 - DNA, 25 bp, Homo sapien
agctaagaactgtgttggcatctct

SEQ ID NO: 4235763 - DNA, 25 bp, Homo sapien
gctaagaactgtgttggcatctctt

SEQ ID NO: 4235764 - DNA, 25 bp, Homo sapien
attggtgttggcagctatgtctccc

SEQ ID NO: 4235765 - DNA, 25 bp, Homo sapien
tctgatcttcgagctaagaactgtg

SEQ ID NO: 4235766 - DNA, 25 bp, Homo sapien
cttaggggataccacgatgtgctgg

SEQ ID NO: 4235767 - DNA, 25 bp, Homo sapien
ttaggggataccacgatgtgctggt

SEQ ID NO: 4235768 - DNA, 25 bp, Homo sapien
ggtggttgggctccagatccctcat

SEQ ID NO: 4235769 - DNA, 25 bp, Homo sapien
gtgctggtggttgggctccagatcc

SEQ ID NO: 4235770 - DNA, 25 bp, Homo sapien
gaatcctgtgactgacaagatcaca

SEQ ID NO: 4235771 - DNA, 25 bp, Homo sapien
tgtcatattgacgttgcagtcatct

SEQ ID NO: 4235772 - DNA, 25 bp, Homo sapien
tgacaagatcacagcacgactccag

SEQ ID NO: 4235773 - DNA, 25 bp, Homo sapien
cagccagcggaatcattccttgttg

SEQ ID NO: 4235774 - DNA, 25 bp, Homo sapien
ggaactacttggcatgttagctgga

SEQ ID NO: 4235775 - DNA, 25 bp, Homo sapien
gaatcatatgaacctgggaactact

SEQ ID NO: 4235776 - DNA, 25 bp, Homo sapien
caaattgtgttttggagcaacttca

SEQ ID NO: 4235777 - DNA, 25 bp, Homo sapien
tggccagtgaccagagtagtttccc

SEQ ID NO: 4235778 - DNA, 25 bp, Homo sapien
ctgaacgaggcagcggagcatctgt

SEQ ID NO: 4235779 - DNA, 25 bp, Homo sapien
gacacagtctgagtggccgctacgc

SEQ ID NO: 4235780 - DNA, 25 bp, Homo sapien
cgggacgccggaggaatatttgaca

SEQ ID NO: 4235781 - DNA, 25 bp, Homo sapien
tgtgaggaggttgggcctttgcaga

SEQ ID NO: 4235782 - DNA, 25 bp, Homo sapien
gtgggagcaggtgtggatagttcac

SEQ ID NO: 4235783 - DNA, 25 bp, Homo sapien
caatagcgaagttgtgagatgaggt

SEQ ID NO: 4235784 - DNA, 25 bp, Homo sapien
gctgcaggtgctctgcggtctccca

SEQ ID NO: 4235785 - DNA, 25 bp, Homo sapien
tggatcccatagtgtttgaaagctg

SEQ ID NO: 4235786 - DNA, 25 bp, Homo sapien
gaattgtccaaacacttccatgtgg

SEQ ID NO: 4235787 - DNA, 25 bp, Homo sapien
acacagctgccaacatcttgtttat

SEQ ID NO: 4235788 - DNA, 25 bp, Homo sapien
ctctaccttctgttggaggtgctaa

SEQ ID NO: 4235789 - DNA, 25 bp, Homo sapien
ggactgatgcaatttgctggttcaa

SEQ ID NO: 4235790 - DNA, 25 bp, Homo sapien
caagccctgtgtaccattttgtgtt

SEQ ID NO: 4235791 - DNA, 25 bp, Homo sapien
agccctgtgtaccattttgtgttat

SEQ ID NO: 4235792 - DNA, 25 bp, Homo sapien
tttgtgttatggatgttgtactcaa

SEQ ID NO: 4235793 - DNA, 25 bp, Homo sapien
tatggatgttgtactcaaagggcat

SEQ ID NO: 4235794 - DNA, 25 bp, Homo sapien
tccccttctcaagctgtggtgcttc

SEQ ID NO: 4235795 - DNA, 25 bp, Homo sapien
cttcatccttccagtcttttcatct

SEQ ID NO: 4235796 - DNA, 25 bp, Homo sapien
gctgcccatcaagttccttcatcct

SEQ ID NO: 4235797 - DNA, 25 bp, Homo sapien
gatgctgcccatcaagttccttcat

SEQ ID NO: 4235798 - DNA, 25 bp, Homo sapien
tgtatgccgtttggatgtctatgcc

SEQ ID NO: 4235799 - DNA, 25 bp, Homo sapien
gatgtctatgccaagtgttttggtg

SEQ ID NO: 4235800 - DNA, 25 bp, Homo sapien
tatggccataccctgggtatggtct

SEQ ID NO: 4235801 - DNA, 25 bp, Homo sapien
cctgggtatggtctttgatgtatgc

SEQ ID NO: 4235802 - DNA, 25 bp, Homo sapien
aacagatgctgacatagttctggac

SEQ ID NO: 4235803 - DNA, 25 bp, Homo sapien
tagttcttcaatgtcataatcctga

SEQ ID NO: 4235804 - DNA, 25 bp, Homo sapien
gatgtaaaatgggttcttcaagcat

SEQ ID NO: 4235805 - DNA, 25 bp, Homo sapien
gatgctgacatagttctggactcaa

SEQ ID NO: 4235806 - DNA, 25 bp, Homo sapien
ttctccccttgagctgcgtcttgtg

SEQ ID NO: 4235807 - DNA, 25 bp, Homo sapien
cagatccgcagctcgttctcccctt

SEQ ID NO: 4235808 - DNA, 25 bp, Homo sapien
aggggcctcggaatgatgaactatt

SEQ ID NO: 4235809 - DNA, 25 bp, Homo sapien
taatgcctctgtgccgaggggcctc

SEQ ID NO: 4235810 - DNA, 25 bp, Homo sapien
aggctccttgtctgatcgtgcatgg

SEQ ID NO: 4235811 - DNA, 25 bp, Homo sapien
cttgtctgatcgtgcatggagggtt

SEQ ID NO: 4235812 - DNA, 25 bp, Homo sapien
tccttgtctgatcgtgcatggaggg

SEQ ID NO: 4235813 - DNA, 25 bp, Homo sapien
tctgatcgtgcatggagggttgcca

SEQ ID NO: 4235814 - DNA, 25 bp, Homo sapien
tgcttctcagtagtgcacgtttgga

SEQ ID NO: 4235815 - DNA, 25 bp, Homo sapien
cacgtttggaatatggcttggtcaa

SEQ ID NO: 4235816 - DNA, 25 bp, Homo sapien
gcttggtcaaatgatggctgtttct

SEQ ID NO: 4235817 - DNA, 25 bp, Homo sapien
aatctccaagttccataagaggtga

SEQ ID NO: 4235818 - DNA, 25 bp, Homo sapien
tgtcctcatagtggaatgccagcca

SEQ ID NO: 4235819 - DNA, 25 bp, Homo sapien
cagcttgtcactccagtggccagag

SEQ ID NO: 4235820 - DNA, 25 bp, Homo sapien
tcacagtacagaattcggaaggttc

SEQ ID NO: 4235821 - DNA, 25 bp, Homo sapien
ctttggaggaagagtctcacagtac

SEQ ID NO: 4235822 - DNA, 25 bp, Homo sapien
ttttggaaatgggtgctgtgcatgc

SEQ ID NO: 4235823 - DNA, 25 bp, Homo sapien
tatggctttctttcgcctcacaacc

SEQ ID NO: 4235824 - DNA, 25 bp, Homo sapien
ttagcttttgtagcaattacatcga

SEQ ID NO: 4235825 - DNA, 25 bp, Homo sapien
catcgattgaagagtgaccatacaa

SEQ ID NO: 4235826 - DNA, 25 bp, Homo sapien
cctgggttggagatgcctgtttaga

SEQ ID NO: 4235827 - DNA, 25 bp, Homo sapien
taattccacagggattatgtacacg

SEQ ID NO: 4235828 - DNA, 25 bp, Homo sapien
ccagaagttcggcaagatgcgcacg

SEQ ID NO: 4235829 - DNA, 25 bp, Homo sapien
gagtagtcacgcttatggcaggaac

SEQ ID NO: 4235830 - DNA, 25 bp, Homo sapien
caatagactgcacattcagggctgg

SEQ ID NO: 4235831 - DNA, 25 bp, Homo sapien
gtgtcctttataacctgcaatagac

SEQ ID NO: 4235832 - DNA, 25 bp, Homo sapien
tcctttataacctgcaatagactgc

SEQ ID NO: 4235833 - DNA, 25 bp, Homo sapien
ctttataacctgcaatagactgcac

SEQ ID NO: 4235834 - DNA, 25 bp, Homo sapien
gtttgtacgctgtaaatagagccta

SEQ ID NO: 4235835 - DNA, 25 bp, Homo sapien
aatcctttgtggatggttccagctc

SEQ ID NO: 4235836 - DNA, 25 bp, Homo sapien
tcacagattgtttcatggtttatgc

SEQ ID NO: 4235837 - DNA, 25 bp, Homo sapien
tagagcctatattgcaatacctgta

SEQ ID NO: 4235838 - DNA, 25 bp, Homo sapien
tctgaacttggcagagcagacgtcc

SEQ ID NO: 4235839 - DNA, 25 bp, Homo sapien
tcagtccgtgccttcgtgaatatgc

SEQ ID NO: 4235840 - DNA, 25 bp, Homo sapien
gatggccttttaataacctctgaac

SEQ ID NO: 4235841 - DNA, 25 bp, Homo sapien
gtgaatatgcccatgttccgtgtga

SEQ ID NO: 4235842 - DNA, 25 bp, Homo sapien
tgaaggatgttagggtttacagcag

SEQ ID NO: 4235843 - DNA, 25 bp, Homo sapien
agcagagtatcttctagatgccagg

SEQ ID NO: 4235844 - DNA, 25 bp, Homo sapien
ttacagcagtgtcagtcctcaggaa

SEQ ID NO: 4235845 - DNA, 25 bp, Homo sapien
tagatgccaggtaatctgaaggatg

SEQ ID NO: 4235846 - DNA, 25 bp, Homo sapien
tagggcgctatcctaagggcaacat

SEQ ID NO: 4235847 - DNA, 25 bp, Homo sapien
tgagaagcggtggaatggactaaca

SEQ ID NO: 4235848 - DNA, 25 bp, Homo sapien
agtgaaatgcccttttggaagacca

SEQ ID NO: 4235849 - DNA, 25 bp, Homo sapien
gaaagtgttgcaatagtccaggaga

SEQ ID NO: 4235850 - DNA, 25 bp, Homo sapien
ttgaacttgggcaattgggtggttc

SEQ ID NO: 4235851 - DNA, 25 bp, Homo sapien
tgaacttgggcaattgggtggttca

SEQ ID NO: 4235852 - DNA, 25 bp, Homo sapien
gaacttgggcaattgggtggttcac

SEQ ID NO: 4235853 - DNA, 25 bp, Homo sapien
cattggtaaatggagatcacctctc

SEQ ID NO: 4235854 - DNA, 25 bp, Homo sapien
tcagtatgagtcagggatgccagga

SEQ ID NO: 4235855 - DNA, 25 bp, Homo sapien
cccgttgtgagaaagatggtccacc

SEQ ID NO: 4235856 - DNA, 25 bp, Homo sapien
tggtccacctaggtcagagctgcgg

SEQ ID NO: 4235857 - DNA, 25 bp, Homo sapien
cacaggcatgtgagggtacttccgg

SEQ ID NO: 4235858 - DNA, 25 bp, Homo sapien
cagtgggcacacgttatctttctca

SEQ ID NO: 4235859 - DNA, 25 bp, Homo sapien
ggaccccggtgtttcttcacaggca

SEQ ID NO: 4235860 - DNA, 25 bp, Homo sapien
gtgtgcttatcagtcatcctccaag

SEQ ID NO: 4235861 - DNA, 25 bp, Homo sapien
tgcacaggatcatctcggaagtttg

SEQ ID NO: 4235862 - DNA, 25 bp, Homo sapien
agaacattatgtatccagggcaggg

SEQ ID NO: 4235863 - DNA, 25 bp, Homo sapien
tatgggcctccatgtgcttggaaag

SEQ ID NO: 4235864 - DNA, 25 bp, Homo sapien
gaaagttcccgagagttgtattcac

SEQ ID NO: 4235865 - DNA, 25 bp, Homo sapien
ggtagacagctgtcataatcaatga

SEQ ID NO: 4235866 - DNA, 25 bp, Homo sapien
taatcaatgacctgtcaacaccaag

SEQ ID NO: 4235867 - DNA, 25 bp, Homo sapien
actccactgtcttatcaaagtaggg

SEQ ID NO: 4235868 - DNA, 25 bp, Homo sapien
tttggaggaattttacactgaagag

SEQ ID NO: 4235869 - DNA, 25 bp, Homo sapien
cctctaagtgtgacagcagtttgga

SEQ ID NO: 4235870 - DNA, 25 bp, Homo sapien
gaagggcaagttctacctctaagtg

SEQ ID NO: 4235871 - DNA, 25 bp, Homo sapien
cattctcccatctggtaaataaggg

SEQ ID NO: 4235872 - DNA, 25 bp, Homo sapien
tattcatggctgagagtttgccaca

SEQ ID NO: 4235873 - DNA, 25 bp, Homo sapien
tccacggatggagatatatcacatc

SEQ ID NO: 4235874 - DNA, 25 bp, Homo sapien
ctgccgtgctaactgaggctgcata

SEQ ID NO: 4235875 - DNA, 25 bp, Homo sapien
tgtgaacgtctaccaaaagaagctt

SEQ ID NO: 4235876 - DNA, 25 bp, Homo sapien
tctaagtattgagcttgtgaacgtc

SEQ ID NO: 4235877 - DNA, 25 bp, Homo sapien
tcctgtcatggcaggttttcttatc

SEQ ID NO: 4235878 - DNA, 25 bp, Homo sapien
actgtgggactcttgatggtatggc

SEQ ID NO: 4235879 - DNA, 25 bp, Homo sapien
ttcctctccaaccaaactgtgggac

SEQ ID NO: 4235880 - DNA, 25 bp, Homo sapien
tggaaatcctgtcatggcaggtttt

SEQ ID NO: 4235881 - DNA, 25 bp, Homo sapien
cagacattccgtgatgctggagtga

SEQ ID NO: 4235882 - DNA, 25 bp, Homo sapien
cctttcagacattccgtgatgctgg

SEQ ID NO: 4235883 - DNA, 25 bp, Homo sapien
tagttttagtctacttttcctgcca

SEQ ID NO: 4235884 - DNA, 25 bp, Homo sapien
cattccgtgatgctggagtgagtca

SEQ ID NO: 4235885 - DNA, 25 bp, Homo sapien
tcttccctctcgttctgaacagacg

SEQ ID NO: 4235886 - DNA, 25 bp, Homo sapien
ctcgtaagcgttggtaatttattat

SEQ ID NO: 4235887 - DNA, 25 bp, Homo sapien
catttatttttgaccctagactgac

SEQ ID NO: 4235888 - DNA, 25 bp, Homo sapien
gaacagacggttttgatgtcaagag

SEQ ID NO: 4235889 - DNA, 25 bp, Homo sapien
cctccaagactctgctggttccttt

SEQ ID NO: 4235890 - DNA, 25 bp, Homo sapien
tcacagccattctgccattgcattc

SEQ ID NO: 4235891 - DNA, 25 bp, Homo sapien
attctcacaaacatcatcctggctg

SEQ ID NO: 4235892 - DNA, 25 bp, Homo sapien
ctgacagggggggccctccaagact

SEQ ID NO: 4235893 - DNA, 25 bp, Homo sapien
ctctccagcaatgggcaagccccac

SEQ ID NO: 4235894 - DNA, 25 bp, Homo sapien
tttcatacatcatgacatcgtactg

SEQ ID NO: 4235895 - DNA, 25 bp, Homo sapien
tcatgacatcgtactgagtgggaga

SEQ ID NO: 4235896 - DNA, 25 bp, Homo sapien
agatatagagaagacgccacactgt

SEQ ID NO: 4235897 - DNA, 25 bp, Homo sapien
ctgagggggcgacaagtgtccaaat

SEQ ID NO: 4235898 - DNA, 25 bp, Homo sapien
agggggcgacaagtgtccaaattgt

SEQ ID NO: 4235899 - DNA, 25 bp, Homo sapien
tgagggggcgacaagtgtccaaatt

SEQ ID NO: 4235900 - DNA, 25 bp, Homo sapien
gagggggcgacaagtgtccaaattg

SEQ ID NO: 4235901 - DNA, 25 bp, Homo sapien
tctgttgggctgtctgtacatagca

SEQ ID NO: 4235902 - DNA, 25 bp, Homo sapien
gcatcaaggcctatggtgacagtag

SEQ ID NO: 4235903 - DNA, 25 bp, Homo sapien
gacagtagggatgactacaccttct

SEQ ID NO: 4235904 - DNA, 25 bp, Homo sapien
tgcagctcaaacaactaagtctgga

SEQ ID NO: 4235905 - DNA, 25 bp, Homo sapien
gaagctgtgctcactgtgaaattca

SEQ ID NO: 4235906 - DNA, 25 bp, Homo sapien
gcttctcagaagctgtgctcactgt

SEQ ID NO: 4235907 - DNA, 25 bp, Homo sapien
cttacacatgtctgccagccccagc

SEQ ID NO: 4235908 - DNA, 25 bp, Homo sapien
ctcagaagctgtgctcactgtgaaa

SEQ ID NO: 4235909 - DNA, 25 bp, Homo sapien
aaccaggaagtatgtgcttgaaaca

SEQ ID NO: 4235910 - DNA, 25 bp, Homo sapien
cagttttccaaatgacctagccctt

SEQ ID NO: 4235911 - DNA, 25 bp, Homo sapien
tgagactttccctcccgttagctac

SEQ ID NO: 4235912 - DNA, 25 bp, Homo sapien
cccttctttgtctgatggtaagtca

SEQ ID NO: 4235913 - DNA, 25 bp, Homo sapien
ttttatcaacagtgcttggagcaat

SEQ ID NO: 4235914 - DNA, 25 bp, Homo sapien
tgtgttttatcaacagtgcttggag

SEQ ID NO: 4235915 - DNA, 25 bp, Homo sapien
tgttttatcaacagtgcttggagca

SEQ ID NO: 4235916 - DNA, 25 bp, Homo sapien
tatttgtgttttatcaacagtgctt

SEQ ID NO: 4235917 - DNA, 25 bp, Homo sapien
ctggatggcattaagagagtccgtc

SEQ ID NO: 4235918 - DNA, 25 bp, Homo sapien
ggatggcattaagagagtccgtcca

SEQ ID NO: 4235919 - DNA, 25 bp, Homo sapien
gagagtccgtccagaattgtagacc

SEQ ID NO: 4235920 - DNA, 25 bp, Homo sapien
tccgtccagaattgtagaccaaatg

SEQ ID NO: 4235921 - DNA, 25 bp, Homo sapien
gagttattttaacattctcatcagt

SEQ ID NO: 4235922 - DNA, 25 bp, Homo sapien
ctggagagttattttaacattctca

SEQ ID NO: 4235923 - DNA, 25 bp, Homo sapien
ggtgggtggaagtgaacagtctcaa

SEQ ID NO: 4235924 - DNA, 25 bp, Homo sapien
tgaacagtctcaaggttggaactgg

SEQ ID NO: 4235925 - DNA, 25 bp, Homo sapien
cttgaattcctattgaaatgctggt

SEQ ID NO: 4235926 - DNA, 25 bp, Homo sapien
gaattcctattgaaatgctggttat

SEQ ID NO: 4235927 - DNA, 25 bp, Homo sapien
tcctattgaaatgctggttattgtg

SEQ ID NO: 4235928 - DNA, 25 bp, Homo sapien
ctacttgaattcctattgaaatgct

SEQ ID NO: 4235929 - DNA, 25 bp, Homo sapien
ggagacccttgacagtgactttggt

SEQ ID NO: 4235930 - DNA, 25 bp, Homo sapien
tcaccgactggggaatcctcagacg

SEQ ID NO: 4235931 - DNA, 25 bp, Homo sapien
tcttcctgcatagaggtgtcatgga

SEQ ID NO: 4235932 - DNA, 25 bp, Homo sapien
gtatgaaagtacagagggacctcac

SEQ ID NO: 4235933 - DNA, 25 bp, Homo sapien
gttcaatagcctagagacctcggtg

SEQ ID NO: 4235934 - DNA, 25 bp, Homo sapien
ctagagacctcggtgattacattcc

SEQ ID NO: 4235935 - DNA, 25 bp, Homo sapien
gcaagtggggagttcaatagcctag

SEQ ID NO: 4235936 - DNA, 25 bp, Homo sapien
tcacagcaaaggaacgcaggctttt

SEQ ID NO: 4235937 - DNA, 25 bp, Homo sapien
caggtagcaacactgagactgtggg

SEQ ID NO: 4235938 - DNA, 25 bp, Homo sapien
gcaggtagcaacactgagactgtgg

SEQ ID NO: 4235939 - DNA, 25 bp, Homo sapien
aagcaggtagcaacactgagactgt

SEQ ID NO: 4235940 - DNA, 25 bp, Homo sapien
agcaggtagcaacactgagactgtg

SEQ ID NO: 4235941 - DNA, 25 bp, Homo sapien
ctgcagtaaagctttcagggacagc

SEQ ID NO: 4235942 - DNA, 25 bp, Homo sapien
cagctatcacctgaggcgccatgaa

SEQ ID NO: 4235943 - DNA, 25 bp, Homo sapien
tcagaaacctcagggttcaccagaa

SEQ ID NO: 4235944 - DNA, 25 bp, Homo sapien
cacacagggatcaaggtggtgtccc

SEQ ID NO: 4235945 - DNA, 25 bp, Homo sapien
ggggtcggccgtcgcagccatggag

SEQ ID NO: 4235946 - DNA, 25 bp, Homo sapien
caactggacctcgttcctgttccag

SEQ ID NO: 4235947 - DNA, 25 bp, Homo sapien
gaggccaactggacctcgttcctgt

SEQ ID NO: 4235948 - DNA, 25 bp, Homo sapien
atggaggccaactggacctcgttcc

SEQ ID NO: 4235949 - DNA, 25 bp, Homo sapien
tataaagaatagaaactgcggatgt

SEQ ID NO: 4235950 - DNA, 25 bp, Homo sapien
gcagagtattcagggccttataaat

SEQ ID NO: 4235951 - DNA, 25 bp, Homo sapien
accgccgccactgctttgttgtcac

SEQ ID NO: 4235952 - DNA, 25 bp, Homo sapien
gagaggatccggaaatattaacagt

SEQ ID NO: 4235953 - DNA, 25 bp, Homo sapien
cagtttttggtgaagaccaactctc

SEQ ID NO: 4235954 - DNA, 25 bp, Homo sapien
ttttagctttagagctagagctccc

SEQ ID NO: 4235955 - DNA, 25 bp, Homo sapien
tataagatgggctcctctttagggc

SEQ ID NO: 4235956 - DNA, 25 bp, Homo sapien
aactctcattcttccgtgtggtcca

SEQ ID NO: 4235957 - DNA, 25 bp, Homo sapien
ggccagaggatacatcttgattaca

SEQ ID NO: 4235958 - DNA, 25 bp, Homo sapien
gattacactaatcagcatgtacttc

SEQ ID NO: 4235959 - DNA, 25 bp, Homo sapien
gatacatcttgattacactaatcag

SEQ ID NO: 4235960 - DNA, 25 bp, Homo sapien
cttgattacactaatcagcatgtac

SEQ ID NO: 4235961 - DNA, 25 bp, Homo sapien
gagccacggaaactcaactctgcca

SEQ ID NO: 4235962 - DNA, 25 bp, Homo sapien
atccaggtcaagcagagtggtggcc

SEQ ID NO: 4235963 - DNA, 25 bp, Homo sapien
taatgcggtaagaagcaccaagggc

SEQ ID NO: 4235964 - DNA, 25 bp, Homo sapien
acaaaatccaaagccgtgtgggtgc

SEQ ID NO: 4235965 - DNA, 25 bp, Homo sapien
ccggaagggctctgaagttttctgg

SEQ ID NO: 4235966 - DNA, 25 bp, Homo sapien
tgtcccagtgccacgggattttctt

SEQ ID NO: 4235967 - DNA, 25 bp, Homo sapien
tcacagggcagctgtatatgagtga

SEQ ID NO: 4235968 - DNA, 25 bp, Homo sapien
cagctgtatatgagtgattctggtc

SEQ ID NO: 4235969 - DNA, 25 bp, Homo sapien
tcctccaagatgcttcaactcttga

SEQ ID NO: 4235970 - DNA, 25 bp, Homo sapien
caactcttgagcctgctgtatgatc

SEQ ID NO: 4235971 - DNA, 25 bp, Homo sapien
atttccatgactcctctctgacgct

SEQ ID NO: 4235972 - DNA, 25 bp, Homo sapien
gatcacaactgatgtgtctccttct

SEQ ID NO: 4235973 - DNA, 25 bp, Homo sapien
gggccaacaacaacctggaatggtc

SEQ ID NO: 4235974 - DNA, 25 bp, Homo sapien
gggcttacacatccataccaaccag

SEQ ID NO: 4235975 - DNA, 25 bp, Homo sapien
cagactatcatgtacctctcctggg

SEQ ID NO: 4235976 - DNA, 25 bp, Homo sapien
tctgatctctgactatgcactttgg

SEQ ID NO: 4235977 - DNA, 25 bp, Homo sapien
tcagcccttcgttttaatgtggata

SEQ ID NO: 4235978 - DNA, 25 bp, Homo sapien
gcacctgtaagatgaagtgtaaatt

SEQ ID NO: 4235979 - DNA, 25 bp, Homo sapien
ggtacccattataccttgcaggctt

SEQ ID NO: 4235980 - DNA, 25 bp, Homo sapien
tcctctgattaaacccttctctagc

SEQ ID NO: 4235981 - DNA, 25 bp, Homo sapien
cttgtaatttcaaatattttgtgtc

SEQ ID NO: 4235982 - DNA, 25 bp, Homo sapien
tgtaatttcaaatattttgtgtccc

SEQ ID NO: 4235983 - DNA, 25 bp, Homo sapien
taatttcaaatattttgtgtcccat

SEQ ID NO: 4235984 - DNA, 25 bp, Homo sapien
gtaatttcaaatattttgtgtccca

SEQ ID NO: 4235985 - DNA, 25 bp, Homo sapien
tctgtcagtgtcccttgaccttctt

SEQ ID NO: 4235986 - DNA, 25 bp, Homo sapien
cttctgtcagtgtcccttgaccttc

SEQ ID NO: 4235987 - DNA, 25 bp, Homo sapien
ttctgtcagtgtcccttgaccttct

SEQ ID NO: 4235988 - DNA, 25 bp, Homo sapien
gcttctgtcagtgtcccttgacctt

SEQ ID NO: 4235989 - DNA, 25 bp, Homo sapien
tcgcttggccccgagcccagcttcg

SEQ ID NO: 4235990 - DNA, 25 bp, Homo sapien
gtcgctccggctagacctcgcttgg

SEQ ID NO: 4235991 - DNA, 25 bp, Homo sapien
caggaggcggggcacagtcgctccg

SEQ ID NO: 4235992 - DNA, 25 bp, Homo sapien
ggggcacagtcgctccggctagacc

SEQ ID NO: 4235993 - DNA, 25 bp, Homo sapien
ctgccgagccggcacgaggctctga

SEQ ID NO: 4235994 - DNA, 25 bp, Homo sapien
tctcaagccggggtcttcttctcgc

SEQ ID NO: 4235995 - DNA, 25 bp, Homo sapien
gcggccgcgggacgactccatctgt

SEQ ID NO: 4235996 - DNA, 25 bp, Homo sapien
gtcttcttctcgcaccgggaggcag

SEQ ID NO: 4235997 - DNA, 25 bp, Homo sapien
agcgccgccacgctgaaacggtccc

SEQ ID NO: 4235998 - DNA, 25 bp, Homo sapien
tgaacgtctgctcatgcctaagagg

SEQ ID NO: 4235999 - DNA, 25 bp, Homo sapien
tctcacgctacaaaggagggttcca

SEQ ID NO: 4236000 - DNA, 25 bp, Homo sapien
tagaatatctctaaggtgcccaggc

SEQ ID NO: 4236001 - DNA, 25 bp, Homo sapien
gataatgtgaagtggaacctcgctc

SEQ ID NO: 4236002 - DNA, 25 bp, Homo sapien
tccaggctcagatggatgtccagcc

SEQ ID NO: 4236003 - DNA, 25 bp, Homo sapien
tactgtgtagtgtagcatgtatagg

SEQ ID NO: 4236004 - DNA, 25 bp, Homo sapien
tgtataggtactctggtttgcaccc

SEQ ID NO: 4236005 - DNA, 25 bp, Homo sapien
gccatatattacaaaacctactctg

SEQ ID NO: 4236006 - DNA, 25 bp, Homo sapien
caggtgctatgttgataacgtaacc

SEQ ID NO: 4236007 - DNA, 25 bp, Homo sapien
aacgtaaccatcacccaagtacagg

SEQ ID NO: 4236008 - DNA, 25 bp, Homo sapien
gaacacttcgatcaagtcccctggg

SEQ ID NO: 4236009 - DNA, 25 bp, Homo sapien
tgctgatagccaggacggaacactt

SEQ ID NO: 4236010 - DNA, 25 bp, Homo sapien
tattttgaataagactgattctatg

SEQ ID NO: 4236011 - DNA, 25 bp, Homo sapien
ttgaataagactgattctatgtcct

SEQ ID NO: 4236012 - DNA, 25 bp, Homo sapien
aaatgtatacaggaatcacccatta

SEQ ID NO: 4236013 - DNA, 25 bp, Homo sapien
tatacaggaatcacccattatccca

SEQ ID NO: 4236014 - DNA, 25 bp, Homo sapien
tggaaaatgtatcacagtagttaac

SEQ ID NO: 4236015 - DNA, 25 bp, Homo sapien
cctgaacgctcaaaccacaataata

SEQ ID NO: 4236016 - DNA, 25 bp, Homo sapien
gaatatcaatctacaggatcaaacc

SEQ ID NO: 4236017 - DNA, 25 bp, Homo sapien
gaatttaaggcatgataataagaaa

SEQ ID NO: 4236018 - DNA, 25 bp, Homo sapien
ctcagggtacaggtctaaagccagg

SEQ ID NO: 4236019 - DNA, 25 bp, Homo sapien
tatatctttggcctgacaatgtcag

SEQ ID NO: 4236020 - DNA, 25 bp, Homo sapien
ggaactactatatctttggcctgac

SEQ ID NO: 4236021 - DNA, 25 bp, Homo sapien
gccaggctccagtccttgtcaaact

SEQ ID NO: 4236022 - DNA, 25 bp, Homo sapien
aacatagatacagataagattattg

SEQ ID NO: 4236023 - DNA, 25 bp, Homo sapien
ttccaaattaatactgtagggtaca

SEQ ID NO: 4236024 - DNA, 25 bp, Homo sapien
taacatagatacagataagattatt

SEQ ID NO: 4236025 - DNA, 25 bp, Homo sapien
acatagatacagataagattattgt

SEQ ID NO: 4236026 - DNA, 25 bp, Homo sapien
gacaagtaagttataggccacctcc

SEQ ID NO: 4236027 - DNA, 25 bp, Homo sapien
tacaaactctgaccgctttatgatt

SEQ ID NO: 4236028 - DNA, 25 bp, Homo sapien
caccagggccttactgctgaataca

SEQ ID NO: 4236029 - DNA, 25 bp, Homo sapien
tctccatagcgaagcaatgtcacaa

SEQ ID NO: 4236030 - DNA, 25 bp, Homo sapien
ccaaatccaactctgcattctttat

SEQ ID NO: 4236031 - DNA, 25 bp, Homo sapien
ggccataataaaggcctcgttctgg

SEQ ID NO: 4236032 - DNA, 25 bp, Homo sapien
tttggattataaggtcaccaaatcc

SEQ ID NO: 4236033 - DNA, 25 bp, Homo sapien
ctgtccatgggccataataaaggcc

SEQ ID NO: 4236034 - DNA, 25 bp, Homo sapien
cagcttccctgttaggaacaggcac

SEQ ID NO: 4236035 - DNA, 25 bp, Homo sapien
gagggacacaacagaagtcttggct

SEQ ID NO: 4236036 - DNA, 25 bp, Homo sapien
gaaagagggacacaacagaagtctt

SEQ ID NO: 4236037 - DNA, 25 bp, Homo sapien
gcagcttccctgttaggaacaggca

SEQ ID NO: 4236038 - DNA, 25 bp, Homo sapien
tcaacggtacttatcgctcggttgg

SEQ ID NO: 4236039 - DNA, 25 bp, Homo sapien
caacggtacttatcgctcggttggc

SEQ ID NO: 4236040 - DNA, 25 bp, Homo sapien
ccttttggaaacaagcccaggaatg

SEQ ID NO: 4236041 - DNA, 25 bp, Homo sapien
tgtccttttggaaacaagcccagga

SEQ ID NO: 4236042 - DNA, 25 bp, Homo sapien
cccaggaatgagaagacaccaacag

SEQ ID NO: 4236043 - DNA, 25 bp, Homo sapien
gaatgagaagacaccaacagcagct

SEQ ID NO: 4236044 - DNA, 25 bp, Homo sapien
atccatcataggaatctggaacagt

SEQ ID NO: 4236045 - DNA, 25 bp, Homo sapien
gaatctggaacagtaatgatgcact

SEQ ID NO: 4236046 - DNA, 25 bp, Homo sapien
gatgcactgaaaataagtattcacc

SEQ ID NO: 4236047 - DNA, 25 bp, Homo sapien
ctgaaaataagtattcaccccaggt

SEQ ID NO: 4236048 - DNA, 25 bp, Homo sapien
gcaatgagcacacctcagaggaagg

SEQ ID NO: 4236049 - DNA, 25 bp, Homo sapien
tacatcaacggaggctatgaaagcc

SEQ ID NO: 4236050 - DNA, 25 bp, Homo sapien
tagcagaagactcaacctggcctcc

SEQ ID NO: 4236051 - DNA, 25 bp, Homo sapien
tggcctcccataaacaggacagatt

SEQ ID NO: 4236052 - DNA, 25 bp, Homo sapien
ctccttaaagaatgaattccaggta

SEQ ID NO: 4236053 - DNA, 25 bp, Homo sapien
ttaaagaatgaattccaggtagaat

SEQ ID NO: 4236054 - DNA, 25 bp, Homo sapien
atttctctgtcctccttaaagaatg

SEQ ID NO: 4236055 - DNA, 25 bp, Homo sapien
ccttaaagaatgaattccaggtaga

SEQ ID NO: 4236056 - DNA, 25 bp, Homo sapien
gctattgaactaattcttggacccc

SEQ ID NO: 4236057 - DNA, 25 bp, Homo sapien
tatctggatttcacctatactggcc

SEQ ID NO: 4236058 - DNA, 25 bp, Homo sapien
tatactggcctctaatggttttcat

SEQ ID NO: 4236059 - DNA, 25 bp, Homo sapien
cttggaccccgtattgtgagagaaa

SEQ ID NO: 4236060 - DNA, 25 bp, Homo sapien
aagctggctccatatagaccagcag

SEQ ID NO: 4236061 - DNA, 25 bp, Homo sapien
gctccatatagaccagcaggacagc

SEQ ID NO: 4236062 - DNA, 25 bp, Homo sapien
tggctccatatagaccagcaggaca

SEQ ID NO: 4236063 - DNA, 25 bp, Homo sapien
ccaaagctggctccatatagaccag

SEQ ID NO: 4236064 - DNA, 25 bp, Homo sapien
agatgcaagttgaaagtagtgagta

SEQ ID NO: 4236065 - DNA, 25 bp, Homo sapien
gatgcaagttgaaagtagtgagtag

SEQ ID NO: 4236066 - DNA, 25 bp, Homo sapien
aataagatgcaagttgaaagtagtg

SEQ ID NO: 4236067 - DNA, 25 bp, Homo sapien
taagatgcaagttgaaagtagtgag

SEQ ID NO: 4236068 - DNA, 25 bp, Homo sapien
tcacatataaggctcggcacaattt

SEQ ID NO: 4236069 - DNA, 25 bp, Homo sapien
tgctagacactatggagatatggcg

SEQ ID NO: 4236070 - DNA, 25 bp, Homo sapien
cagacagcatgcagcgaatgaggca

SEQ ID NO: 4236071 - DNA, 25 bp, Homo sapien
ggcacttgcaattcactgtcctcac

SEQ ID NO: 4236072 - DNA, 25 bp, Homo sapien
ggcagaaagcggtaaatgctctcaa

SEQ ID NO: 4236073 - DNA, 25 bp, Homo sapien
caaacggccattactgttgcaaaga

SEQ ID NO: 4236074 - DNA, 25 bp, Homo sapien
tgttgaggccgatgaaccagaagaa

SEQ ID NO: 4236075 - DNA, 25 bp, Homo sapien
ggaacatagtgtttgcccagtaggg

SEQ ID NO: 4236076 - DNA, 25 bp, Homo sapien
agttgtctgtcttctgaggattggt

SEQ ID NO: 4236077 - DNA, 25 bp, Homo sapien
ttgtctgtcttctgaggattggtca

SEQ ID NO: 4236078 - DNA, 25 bp, Homo sapien
tatattctccactaagagttgtctg

SEQ ID NO: 4236079 - DNA, 25 bp, Homo sapien
tgctatattctccactaagagttgt

SEQ ID NO: 4236080 - DNA, 25 bp, Homo sapien
tgttccataaatttattctgaccat

SEQ ID NO: 4236081 - DNA, 25 bp, Homo sapien
ctcacttccgagttctgtagtcatt

SEQ ID NO: 4236082 - DNA, 25 bp, Homo sapien
ctttgttccataaatttattctgac

SEQ ID NO: 4236083 - DNA, 25 bp, Homo sapien
ttccgagttctgtagtcatttccct

SEQ ID NO: 4236084 - DNA, 25 bp, Homo sapien
tagaggtggtgacacgccctctctc

SEQ ID NO: 4236085 - DNA, 25 bp, Homo sapien
tcaccacgtccattgtgtcttcgtc

SEQ ID NO: 4236086 - DNA, 25 bp, Homo sapien
tgtcttcgtcgaataagcctcgtgg

SEQ ID NO: 4236087 - DNA, 25 bp, Homo sapien
tcgaataagcctcgtggactagagg

SEQ ID NO: 4236088 - DNA, 25 bp, Homo sapien
tgagcagactgcagacggtatctgt

SEQ ID NO: 4236089 - DNA, 25 bp, Homo sapien
caaatgcctgtgaaggcatcaaaga

SEQ ID NO: 4236090 - DNA, 25 bp, Homo sapien
tctgtctctgagtaacacaggaaaa

SEQ ID NO: 4236091 - DNA, 25 bp, Homo sapien
ccaagaagatctgagcagactgcag

SEQ ID NO: 4236092 - DNA, 25 bp, Homo sapien
gatgtctcagcaaccaggacacatg

SEQ ID NO: 4236093 - DNA, 25 bp, Homo sapien
cggtggagtctttcattctgtctaa

SEQ ID NO: 4236094 - DNA, 25 bp, Homo sapien
cagatgcaggtcctttatcagcgag

SEQ ID NO: 4236095 - DNA, 25 bp, Homo sapien
tatcagcgagatccctgctgtgtca

SEQ ID NO: 4236096 - DNA, 25 bp, Homo sapien
gaacaagacactgttttgtgcctgc

SEQ ID NO: 4236097 - DNA, 25 bp, Homo sapien
tcctcctctgcaacttggtctctca

SEQ ID NO: 4236098 - DNA, 25 bp, Homo sapien
tgcctgcttttacccataaagtttc

SEQ ID NO: 4236099 - DNA, 25 bp, Homo sapien
cacaccaggaccactttctactgga

SEQ ID NO: 4236100 - DNA, 25 bp, Homo sapien
ctctcgattcctgacatatcccact

SEQ ID NO: 4236101 - DNA, 25 bp, Homo sapien
gttcctctcgattcctgacatatcc

SEQ ID NO: 4236102 - DNA, 25 bp, Homo sapien
cgttcctctcgattcctgacatatc

SEQ ID NO: 4236103 - DNA, 25 bp, Homo sapien
cgattcctgacatatcccactccct

SEQ ID NO: 4236104 - DNA, 25 bp, Homo sapien
tatgtcgctggtgccccccttttgt

SEQ ID NO: 4236105 - DNA, 25 bp, Homo sapien
atgtcgctggtgccccccttttgtt

SEQ ID NO: 4236106 - DNA, 25 bp, Homo sapien
tttctggacaatgtgttacgggatg

SEQ ID NO: 4236107 - DNA, 25 bp, Homo sapien
ttctggacaatgtgttacgggatgg

SEQ ID NO: 4236108 - DNA, 25 bp, Homo sapien
agaccagcatggcacgtatgggcac

SEQ ID NO: 4236109 - DNA, 25 bp, Homo sapien
tcatttggaatcctccccttggtgt

SEQ ID NO: 4236110 - DNA, 25 bp, Homo sapien
tcccatgttccttgcaagaagcaga

SEQ ID NO: 4236111 - DNA, 25 bp, Homo sapien
tgctgaggacaacggtaagtgtgta

SEQ ID NO: 4236112 - DNA, 25 bp, Homo sapien
gcatcttttcaactcttggagacag

SEQ ID NO: 4236113 - DNA, 25 bp, Homo sapien
tagcatcttttcaactcttggagac

SEQ ID NO: 4236114 - DNA, 25 bp, Homo sapien
tttagcatcttttcaactcttggag

SEQ ID NO: 4236115 - DNA, 25 bp, Homo sapien
ctttagcatcttttcaactcttgga

SEQ ID NO: 4236116 - DNA, 25 bp, Homo sapien
gtttccataggcagtagctgacaac

SEQ ID NO: 4236117 - DNA, 25 bp, Homo sapien
gaggagtttccataggcagtagctg

SEQ ID NO: 4236118 - DNA, 25 bp, Homo sapien
ctgtgtgacaaggaggagtttccat

SEQ ID NO: 4236119 - DNA, 25 bp, Homo sapien
tccataggcagtagctgacaacaca

SEQ ID NO: 4236120 - DNA, 25 bp, Homo sapien
ctgcctgcagctgataggtgggata

SEQ ID NO: 4236121 - DNA, 25 bp, Homo sapien
cctgcctgcagctgataggtgggat

SEQ ID NO: 4236122 - DNA, 25 bp, Homo sapien
tgataggtgggataagttgcttttc

SEQ ID NO: 4236123 - DNA, 25 bp, Homo sapien
caacaagtgttcatgcactgtcact

SEQ ID NO: 4236124 - DNA, 25 bp, Homo sapien
ggacaatcaacaagtgttcatgcac

SEQ ID NO: 4236125 - DNA, 25 bp, Homo sapien
aatctggacaatcaacaagtgttca

SEQ ID NO: 4236126 - DNA, 25 bp, Homo sapien
tgttcatgcactgtcacttgtgaca

SEQ ID NO: 4236127 - DNA, 25 bp, Homo sapien
ggcagtcacacccagtaaggagtag

SEQ ID NO: 4236128 - DNA, 25 bp, Homo sapien
cacacacacttgtacatccatgcaa

SEQ ID NO: 4236129 - DNA, 25 bp, Homo sapien
cagcaaagaccttcatgtcatccat

SEQ ID NO: 4236130 - DNA, 25 bp, Homo sapien
taaaggtaaatacatggcagtcaca

SEQ ID NO: 4236131 - DNA, 25 bp, Homo sapien
tccacaagtgctgaaagggcctggg

SEQ ID NO: 4236132 - DNA, 25 bp, Homo sapien
atccacaagtgctgaaagggcctgg

SEQ ID NO: 4236133 - DNA, 25 bp, Homo sapien
catccacaagtgctgaaagggcctg

SEQ ID NO: 4236134 - DNA, 25 bp, Homo sapien
ttgcaagctctattaactgcaattt

SEQ ID NO: 4236135 - DNA, 25 bp, Homo sapien
aaaaactccgggcatgatagcgtaa

SEQ ID NO: 4236136 - DNA, 25 bp, Homo sapien
catgatagcgtaattgcaagctcta

SEQ ID NO: 4236137 - DNA, 25 bp, Homo sapien
ctggcacaaaaactccgggcatgat

SEQ ID NO: 4236138 - DNA, 25 bp, Homo sapien
tagcatacatattccaccaaagcaa

SEQ ID NO: 4236139 - DNA, 25 bp, Homo sapien
aaagtttatcttcatcttgaatact

SEQ ID NO: 4236140 - DNA, 25 bp, Homo sapien
tgaatactcttcaccagaaggcagg

SEQ ID NO: 4236141 - DNA, 25 bp, Homo sapien
tcttcatcttgaatactcttcacca

SEQ ID NO: 4236142 - DNA, 25 bp, Homo sapien
ctcgatattaagttgaaaagtttat

SEQ ID NO: 4236143 - DNA, 25 bp, Homo sapien
ttttggactttcaagagtagatccc

SEQ ID NO: 4236144 - DNA, 25 bp, Homo sapien
gactttcaagagtagatcccttctg

SEQ ID NO: 4236145 - DNA, 25 bp, Homo sapien
agagtagatcccttctgctatcaaa

SEQ ID NO: 4236146 - DNA, 25 bp, Homo sapien
tcaagagtagatcccttctgctatc

SEQ ID NO: 4236147 - DNA, 25 bp, Homo sapien
gtttgagcctcattggtatagccag

SEQ ID NO: 4236148 - DNA, 25 bp, Homo sapien
gaggagcagtgtattccctgatagg

SEQ ID NO: 4236149 - DNA, 25 bp, Homo sapien
taggaaatccctaatgtgaggagca

SEQ ID NO: 4236150 - DNA, 25 bp, Homo sapien
tggtattacacgagaaaaggtcatg

SEQ ID NO: 4236151 - DNA, 25 bp, Homo sapien
ctcgtgggaggagttcagtttgcca

SEQ ID NO: 4236152 - DNA, 25 bp, Homo sapien
tcatgggacactttgagaagggcca

SEQ ID NO: 4236153 - DNA, 25 bp, Homo sapien
tcctcctagcagagggcgactcgtg

SEQ ID NO: 4236154 - DNA, 25 bp, Homo sapien
gaagcgtctgcacgacaaggtcagg

SEQ ID NO: 4236155 - DNA, 25 bp, Homo sapien
ggagcagcctcctttgagacagctg

SEQ ID NO: 4236156 - DNA, 25 bp, Homo sapien
taagttgggcacaaaaagatcggca

SEQ ID NO: 4236157 - DNA, 25 bp, Homo sapien
ggcaatgagttctttccctgtaagt

SEQ ID NO: 4236158 - DNA, 25 bp, Homo sapien
ttgtcctgttggatttgcagtcaga

SEQ ID NO: 4236159 - DNA, 25 bp, Homo sapien
tgggagttcttgcacccgctcctca

SEQ ID NO: 4236160 - DNA, 25 bp, Homo sapien
ctgggagttcttgcacccgctcctc

SEQ ID NO: 4236161 - DNA, 25 bp, Homo sapien
gggagttcttgcacccgctcctcac

SEQ ID NO: 4236162 - DNA, 25 bp, Homo sapien
taggtcctctgaataaagcagtgac

SEQ ID NO: 4236163 - DNA, 25 bp, Homo sapien
ttaggtcctctgaataaagcagtga

SEQ ID NO: 4236164 - DNA, 25 bp, Homo sapien
aaacctgtggattgaagctttcatt

SEQ ID NO: 4236165 - DNA, 25 bp, Homo sapien
gacttccttaagtgttgaaccatca

SEQ ID NO: 4236166 - DNA, 25 bp, Homo sapien
gtgaaaggagactacatagactagt

SEQ ID NO: 4236167 - DNA, 25 bp, Homo sapien
tagactagtttgatgatacctttgt

SEQ ID NO: 4236168 - DNA, 25 bp, Homo sapien
ggaaacaacaggccaccccaaggca

SEQ ID NO: 4236169 - DNA, 25 bp, Homo sapien
gctgaacggggatatttgagagcaa

SEQ ID NO: 4236170 - DNA, 25 bp, Homo sapien
gaacggggatatttgagagcaagtc

SEQ ID NO: 4236171 - DNA, 25 bp, Homo sapien
acggggatatttgagagcaagtcct

SEQ ID NO: 4236172 - DNA, 25 bp, Homo sapien
ttggaaataacagaaagcaaagagg

SEQ ID NO: 4236173 - DNA, 25 bp, Homo sapien
ctccagagagcagcttttaatttcc

SEQ ID NO: 4236174 - DNA, 25 bp, Homo sapien
gagagcagcttttaatttcctattt

SEQ ID NO: 4236175 - DNA, 25 bp, Homo sapien
ctatttttggaaataacagaaagca

SEQ ID NO: 4236176 - DNA, 25 bp, Homo sapien
cttgattttccccaggggcctcagc

SEQ ID NO: 4236177 - DNA, 25 bp, Homo sapien
ttccccaggggcctcagcccagttc

SEQ ID NO: 4236178 - DNA, 25 bp, Homo sapien
ctgcaccaggaacctgttcttgatt

SEQ ID NO: 4236179 - DNA, 25 bp, Homo sapien
caccaggaacctgttcttgattttc

SEQ ID NO: 4236180 - DNA, 25 bp, Homo sapien
ataaataatcctaagtggacttttg

SEQ ID NO: 4236181 - DNA, 25 bp, Homo sapien
tcctaagtggacttttggaagaatg

SEQ ID NO: 4236182 - DNA, 25 bp, Homo sapien
tgaaagaggtaaccagcataaataa

SEQ ID NO: 4236183 - DNA, 25 bp, Homo sapien
aagaggtaaccagcataaataatcc

SEQ ID NO: 4236184 - DNA, 25 bp, Homo sapien
aaataatattaattcgtatccatgg

SEQ ID NO: 4236185 - DNA, 25 bp, Homo sapien
tgcatcggagagattgtgatgctct

SEQ ID NO: 4236186 - DNA, 25 bp, Homo sapien
tattaattcgtatccatggactgca

SEQ ID NO: 4236187 - DNA, 25 bp, Homo sapien
tccatggactgcatcggagagattg

SEQ ID NO: 4236188 - DNA, 25 bp, Homo sapien
aaataaactctccatttttgaatag

SEQ ID NO: 4236189 - DNA, 25 bp, Homo sapien
gatgatagcatagagagttctcata

SEQ ID NO: 4236190 - DNA, 25 bp, Homo sapien
gcaccctgctggcaaagcatatttg

SEQ ID NO: 4236191 - DNA, 25 bp, Homo sapien
tcacaattaagtaaccagtactggc

SEQ ID NO: 4236192 - DNA, 25 bp, Homo sapien
gaacctcgagtggagaaaaactata

SEQ ID NO: 4236193 - DNA, 25 bp, Homo sapien
ggggatgggaacctcgagtggagaa

SEQ ID NO: 4236194 - DNA, 25 bp, Homo sapien
acctcgagtggagaaaaactatact

SEQ ID NO: 4236195 - DNA, 25 bp, Homo sapien
gatgggaacctcgagtggagaaaaa

SEQ ID NO: 4236196 - DNA, 25 bp, Homo sapien
gccggaggcagacatcttatctgtt

SEQ ID NO: 4236197 - DNA, 25 bp, Homo sapien
cttcactacgggtggtgatgccgga

SEQ ID NO: 4236198 - DNA, 25 bp, Homo sapien
gaggagagcttgagatgtggccaac

SEQ ID NO: 4236199 - DNA, 25 bp, Homo sapien
ttccttccttcactacgggtggtga

SEQ ID NO: 4236200 - DNA, 25 bp, Homo sapien
cgaggccctcccaatggcgcatgga

SEQ ID NO: 4236201 - DNA, 25 bp, Homo sapien
gacccaggaagtggccctcagcagc

SEQ ID NO: 4236202 - DNA, 25 bp, Homo sapien
atggacttccgcaagagcctgacag

SEQ ID NO: 4236203 - DNA, 25 bp, Homo sapien
tcccggtccaggaatgacccaggaa

SEQ ID NO: 4236204 - DNA, 25 bp, Homo sapien
caggccacagcggcccgacgtagtc

SEQ ID NO: 4236205 - DNA, 25 bp, Homo sapien
ccacagcggcccgacgtagtcgcca

SEQ ID NO: 4236206 - DNA, 25 bp, Homo sapien
aggccacagcggcccgacgtagtcg

SEQ ID NO: 4236207 - DNA, 25 bp, Homo sapien
cagcggcccgacgtagtcgccacat

SEQ ID NO: 4236208 - DNA, 25 bp, Homo sapien
gaagacaccgagagttaggagaaat

SEQ ID NO: 4236209 - DNA, 25 bp, Homo sapien
tacacatggcgtggaaatggaagaa

SEQ ID NO: 4236210 - DNA, 25 bp, Homo sapien
agaaaaagaagacaccgagagttag

SEQ ID NO: 4236211 - DNA, 25 bp, Homo sapien
tgcaatgtacacatggcgtggaaat

SEQ ID NO: 4236212 - DNA, 25 bp, Homo sapien
caaaaatggactccaaacagatgag

SEQ ID NO: 4236213 - DNA, 25 bp, Homo sapien
tccaaacagatgagctcctttctgc

SEQ ID NO: 4236214 - DNA, 25 bp, Homo sapien
gtgggatccccatcaaaaatggact

SEQ ID NO: 4236215 - DNA, 25 bp, Homo sapien
ctctagtgggatccccatcaaaaat

SEQ ID NO: 4236216 - DNA, 25 bp, Homo sapien
tgactgatctaactcggactgttcc

SEQ ID NO: 4236217 - DNA, 25 bp, Homo sapien
tttgactgatctaactcggactgtt

SEQ ID NO: 4236218 - DNA, 25 bp, Homo sapien
atctaactcggactgttccttcttt

SEQ ID NO: 4236219 - DNA, 25 bp, Homo sapien
gactgatctaactcggactgttcct

SEQ ID NO: 4236220 - DNA, 25 bp, Homo sapien
aggacatgaagaaagaggactgtac

SEQ ID NO: 4236221 - DNA, 25 bp, Homo sapien
caaggacatgaagaaagaggactgt

SEQ ID NO: 4236222 - DNA, 25 bp, Homo sapien
aaggacatgaagaaagaggactgta

SEQ ID NO: 4236223 - DNA, 25 bp, Homo sapien
aacttccttttattccagagctgtg

SEQ ID NO: 4236224 - DNA, 25 bp, Homo sapien
tttcactaaagactggcagacctca

SEQ ID NO: 4236225 - DNA, 25 bp, Homo sapien
cagatgtagtttttgtagtggtaaa

SEQ ID NO: 4236226 - DNA, 25 bp, Homo sapien
gagctgtgtttcactaaagactggc

SEQ ID NO: 4236227 - DNA, 25 bp, Homo sapien
gaagagaactgctgaaaggatgtcc

SEQ ID NO: 4236228 - DNA, 25 bp, Homo sapien
gtgaatgataaatgcttcgtgaaac

SEQ ID NO: 4236229 - DNA, 25 bp, Homo sapien
cgtaaaggaaggtttgtcagagaag

SEQ ID NO: 4236230 - DNA, 25 bp, Homo sapien
tcgttgaagctttaaggtaggatga

SEQ ID NO: 4236231 - DNA, 25 bp, Homo sapien
ctttttggctgtgtagccaccccca

SEQ ID NO: 4236232 - DNA, 25 bp, Homo sapien
gctaatcttgctggccaaaaattcc

SEQ ID NO: 4236233 - DNA, 25 bp, Homo sapien
cgaagttttaagagtctcgtagcta

SEQ ID NO: 4236234 - DNA, 25 bp, Homo sapien
cccaacagccgatcctagtatgaga

SEQ ID NO: 4236235 - DNA, 25 bp, Homo sapien
catttatattcactaaggtccggta

SEQ ID NO: 4236236 - DNA, 25 bp, Homo sapien
ccacacaatgtcaggcacaatccat

SEQ ID NO: 4236237 - DNA, 25 bp, Homo sapien
ctaaggtccggtatcatatctttcc

SEQ ID NO: 4236238 - DNA, 25 bp, Homo sapien
tcgatatactcatcaatttcccaca

SEQ ID NO: 4236239 - DNA, 25 bp, Homo sapien
gctgtggtaaaattatgggctactg

SEQ ID NO: 4236240 - DNA, 25 bp, Homo sapien
tatgattccaagaccgcacttcagc

SEQ ID NO: 4236241 - DNA, 25 bp, Homo sapien
aaggactactttagccagttcaggg

SEQ ID NO: 4236242 - DNA, 25 bp, Homo sapien
aatgctccaaacagttagtggcagc

SEQ ID NO: 4236243 - DNA, 25 bp, Homo sapien
aaggtcttctgaactaggaagggct

SEQ ID NO: 4236244 - DNA, 25 bp, Homo sapien
aataagctaaggctttcaacaatct

SEQ ID NO: 4236245 - DNA, 25 bp, Homo sapien
aaaagtccttcaataagctaaggct

SEQ ID NO: 4236246 - DNA, 25 bp, Homo sapien
caacaatcttgtcaaagtctggtgc

SEQ ID NO: 4236247 - DNA, 25 bp, Homo sapien
aaacaaagatgtctgagatctcaga

SEQ ID NO: 4236248 - DNA, 25 bp, Homo sapien
aatttaacagaaatgagcaaacaaa

SEQ ID NO: 4236249 - DNA, 25 bp, Homo sapien
aatgagcaaacaaagatgtctgaga

SEQ ID NO: 4236250 - DNA, 25 bp, Homo sapien
ctgtgaaaaatcagcaaaaggggaa

SEQ ID NO: 4236251 - DNA, 25 bp, Homo sapien
cctatgacttcactaaccaatttgt

SEQ ID NO: 4236252 - DNA, 25 bp, Homo sapien
gagaagtaggtcagaagctcctatg

SEQ ID NO: 4236253 - DNA, 25 bp, Homo sapien
gctcctatgacttcactaaccaatt

SEQ ID NO: 4236254 - DNA, 25 bp, Homo sapien
cagaagctcctatgacttcactaac

SEQ ID NO: 4236255 - DNA, 25 bp, Homo sapien
cctaaaggataatgagtttgcctaa

SEQ ID NO: 4236256 - DNA, 25 bp, Homo sapien
taaaaggcatgttaaggtcagcaaa

SEQ ID NO: 4236257 - DNA, 25 bp, Homo sapien
tcaaccatgacagggcagatgagac

SEQ ID NO: 4236258 - DNA, 25 bp, Homo sapien
tgagtttgcctaatatagttctggg

SEQ ID NO: 4236259 - DNA, 25 bp, Homo sapien
cacgatctgttgctctaaacgccgt

SEQ ID NO: 4236260 - DNA, 25 bp, Homo sapien
cagatccacgatctgttgctctaaa

SEQ ID NO: 4236261 - DNA, 25 bp, Homo sapien
tgttgctctaaacgccgtttcttcc

SEQ ID NO: 4236262 - DNA, 25 bp, Homo sapien
gcttgtcactttcagatccacgatc

SEQ ID NO: 4236263 - DNA, 25 bp, Homo sapien
aaataattcagtagtgtccacaaac

SEQ ID NO: 4236264 - DNA, 25 bp, Homo sapien
ctcaagatagtagtgtaaggttaaa

SEQ ID NO: 4236265 - DNA, 25 bp, Homo sapien
ttttgatcaacatgacataaataat

SEQ ID NO: 4236266 - DNA, 25 bp, Homo sapien
tcaatcatacctcaagatagtagtg

SEQ ID NO: 4236267 - DNA, 25 bp, Homo sapien
cagaaatggccgattagatagtaag

SEQ ID NO: 4236268 - DNA, 25 bp, Homo sapien
tcaactgattttactaagacacaag

SEQ ID NO: 4236269 - DNA, 25 bp, Homo sapien
gctacaaaggttatggaaggcttca

SEQ ID NO: 4236270 - DNA, 25 bp, Homo sapien
aggcttcatgaagtgacaattgagc

SEQ ID NO: 4236271 - DNA, 25 bp, Homo sapien
catgaggtttctggagttattggcc

SEQ ID NO: 4236272 - DNA, 25 bp, Homo sapien
catcatctatgaagccaagggtcct

SEQ ID NO: 4236273 - DNA, 25 bp, Homo sapien
gtctcatttcacgtacaaagtcctg

SEQ ID NO: 4236274 - DNA, 25 bp, Homo sapien
tgttgaaacctagcctcacaatgtg

SEQ ID NO: 4236275 - DNA, 25 bp, Homo sapien
aagagcaatagtgagaagggggcaa

SEQ ID NO: 4236276 - DNA, 25 bp, Homo sapien
taactcattccctttggatcagcca

SEQ ID NO: 4236277 - DNA, 25 bp, Homo sapien
agataactcattccctttggatcag

SEQ ID NO: 4236278 - DNA, 25 bp, Homo sapien
gagataactcattccctttggatca

SEQ ID NO: 4236279 - DNA, 25 bp, Homo sapien
ggcatagctcgtgctatattggcca

SEQ ID NO: 4236280 - DNA, 25 bp, Homo sapien
ggctctgcgcgcttcctcttcatgc

SEQ ID NO: 4236281 - DNA, 25 bp, Homo sapien
atgctcttgaatttgttgttgtaag

SEQ ID NO: 4236282 - DNA, 25 bp, Homo sapien
cttgcgcttctgttgggcatagctc

SEQ ID NO: 4236283 - DNA, 25 bp, Homo sapien
ccaaatgagataaggttagccagca

SEQ ID NO: 4236284 - DNA, 25 bp, Homo sapien
gcaggcctatgggactcatttcaag

SEQ ID NO: 4236285 - DNA, 25 bp, Homo sapien
tatattcacagtatacagaacaggg

SEQ ID NO: 4236286 - DNA, 25 bp, Homo sapien
aaactaaagtataggtggctcagcc

SEQ ID NO: 4236287 - DNA, 25 bp, Homo sapien
ttggcatgccatcacactgtaatag

SEQ ID NO: 4236288 - DNA, 25 bp, Homo sapien
taaacagtcgcctaaactgtgagga

SEQ ID NO: 4236289 - DNA, 25 bp, Homo sapien
taaatagctccaaaaacgatctggt

SEQ ID NO: 4236290 - DNA, 25 bp, Homo sapien
gatgtttagtataagccaagggcta

SEQ ID NO: 4236291 - DNA, 25 bp, Homo sapien
agttcttcctgaagttggtcaattt

SEQ ID NO: 4236292 - DNA, 25 bp, Homo sapien
ctgagtgtgcagaagttcttcctga

SEQ ID NO: 4236293 - DNA, 25 bp, Homo sapien
ttcctgaagttggtcaattttctct

SEQ ID NO: 4236294 - DNA, 25 bp, Homo sapien
ctgaagttggtcaattttctctttg

SEQ ID NO: 4236295 - DNA, 25 bp, Homo sapien
ctccttttctaatcgttccaagatt

SEQ ID NO: 4236296 - DNA, 25 bp, Homo sapien
ctaatcgttccaagattctctgata

SEQ ID NO: 4236297 - DNA, 25 bp, Homo sapien
ctttgtcatctttctgcaatactaa

SEQ ID NO: 4236298 - DNA, 25 bp, Homo sapien
tttctaatcgttccaagattctctg

SEQ ID NO: 4236299 - DNA, 25 bp, Homo sapien
gataagtcacttacatgtccatcaa

SEQ ID NO: 4236300 - DNA, 25 bp, Homo sapien
caataccagcacacactttttcgaa

SEQ ID NO: 4236301 - DNA, 25 bp, Homo sapien
cattcactggcatacaagtaaagca

SEQ ID NO: 4236302 - DNA, 25 bp, Homo sapien
ggtaaataagttcaccaatgtgctg

SEQ ID NO: 4236303 - DNA, 25 bp, Homo sapien
ggcagatgatcttgcgtattataac

SEQ ID NO: 4236304 - DNA, 25 bp, Homo sapien
gatgatcttgcgtattataactggc

SEQ ID NO: 4236305 - DNA, 25 bp, Homo sapien
ccgtggcagatgatcttgcgtatta

SEQ ID NO: 4236306 - DNA, 25 bp, Homo sapien
tcttgcgtattataactggcatcat

SEQ ID NO: 4236307 - DNA, 25 bp, Homo sapien
tagtctttccagcactctgatctcc

SEQ ID NO: 4236308 - DNA, 25 bp, Homo sapien
ttcgagcttgggcaatcatttccaa

SEQ ID NO: 4236309 - DNA, 25 bp, Homo sapien
ttccaacacactagtctttccagca

SEQ ID NO: 4236310 - DNA, 25 bp, Homo sapien
ttgggaatattcgagcttgggcaat

SEQ ID NO: 4236311 - DNA, 25 bp, Homo sapien
tttggtaagatcaaactcccgagaa

SEQ ID NO: 4236312 - DNA, 25 bp, Homo sapien
atggtgaggaccttcactcagagtc

SEQ ID NO: 4236313 - DNA, 25 bp, Homo sapien
tggtgaggaccttcactcagagtca

SEQ ID NO: 4236314 - DNA, 25 bp, Homo sapien
tcaaactcccgagaactatctttaa

SEQ ID NO: 4236315 - DNA, 25 bp, Homo sapien
ctcattcgaagttctatttcatgtc

SEQ ID NO: 4236316 - DNA, 25 bp, Homo sapien
taacggtacagccttctttcacatt

SEQ ID NO: 4236317 - DNA, 25 bp, Homo sapien
ttttcctcattcgaagttctatttc

SEQ ID NO: 4236318 - DNA, 25 bp, Homo sapien
tcagggctaacggtacagccttctt

SEQ ID NO: 4236319 - DNA, 25 bp, Homo sapien
gtcaacaagcaccatcctctgtagt

SEQ ID NO: 4236320 - DNA, 25 bp, Homo sapien
cctggtaagtcaacaagcaccatcc

SEQ ID NO: 4236321 - DNA, 25 bp, Homo sapien
catcctctgtagtccagggcctttt

SEQ ID NO: 4236322 - DNA, 25 bp, Homo sapien
taagtcaacaagcaccatcctctgt

SEQ ID NO: 4236323 - DNA, 25 bp, Homo sapien
tagtttcctttgtgtcaggagccat

SEQ ID NO: 4236324 - DNA, 25 bp, Homo sapien
aatacacagtatgatggcattagga

SEQ ID NO: 4236325 - DNA, 25 bp, Homo sapien
acacagtatgatggcattaggattc

SEQ ID NO: 4236326 - DNA, 25 bp, Homo sapien
gtttcctttgtgtcaggagccatgc

SEQ ID NO: 4236327 - DNA, 25 bp, Homo sapien
tgccaggtctactttggtcaaaacg

SEQ ID NO: 4236328 - DNA, 25 bp, Homo sapien
catgagggtccatttgactgaccaa

SEQ ID NO: 4236329 - DNA, 25 bp, Homo sapien
aacgaatatggttctccttccatga

SEQ ID NO: 4236330 - DNA, 25 bp, Homo sapien
tgaccaagtctgtaacaatactgcg

SEQ ID NO: 4236331 - DNA, 25 bp, Homo sapien
tctcgcaacaaagaatttgacctca

SEQ ID NO: 4236332 - DNA, 25 bp, Homo sapien
ctcgcaacaaagaatttgacctcac

SEQ ID NO: 4236333 - DNA, 25 bp, Homo sapien
ccattaatgccacggcaggccttac

SEQ ID NO: 4236334 - DNA, 25 bp, Homo sapien
tatcagaaccattaatgccacggca

SEQ ID NO: 4236335 - DNA, 25 bp, Homo sapien
aaccattaatgccacggcaggcctt

SEQ ID NO: 4236336 - DNA, 25 bp, Homo sapien
cagaaccattaatgccacggcaggc

SEQ ID NO: 4236337 - DNA, 25 bp, Homo sapien
caacagcaaaataacctaaagcttt

SEQ ID NO: 4236338 - DNA, 25 bp, Homo sapien
acagcaaaataacctaaagctttca

SEQ ID NO: 4236339 - DNA, 25 bp, Homo sapien
aagctttcattgggaagagctttcc

SEQ ID NO: 4236340 - DNA, 25 bp, Homo sapien
taaagctttcattgggaagagcttt

SEQ ID NO: 4236341 - DNA, 25 bp, Homo sapien
tttaggagctttgaattctgaaaaa

SEQ ID NO: 4236342 - DNA, 25 bp, Homo sapien
gctttgaattctgaaaaaactcttc

SEQ ID NO: 4236343 - DNA, 25 bp, Homo sapien
tctcttatagcttcaatgctttcag

SEQ ID NO: 4236344 - DNA, 25 bp, Homo sapien
tcatattctcttatagcttcaatgc

SEQ ID NO: 4236345 - DNA, 25 bp, Homo sapien
tctatgttgtctttcagtgcccacg

SEQ ID NO: 4236346 - DNA, 25 bp, Homo sapien
cacgtccaaggaagcatgccagtat

SEQ ID NO: 4236347 - DNA, 25 bp, Homo sapien
tatctagggatacttcttcgacaac

SEQ ID NO: 4236348 - DNA, 25 bp, Homo sapien
tatgttgtcagtgcactccccaaag

SEQ ID NO: 4236349 - DNA, 25 bp, Homo sapien
tccaatacggtagctactggcacac

SEQ ID NO: 4236350 - DNA, 25 bp, Homo sapien
gaggaaaacattccaatacggtagc

SEQ ID NO: 4236351 - DNA, 25 bp, Homo sapien
gcacactgggttattgagccctgga

SEQ ID NO: 4236352 - DNA, 25 bp, Homo sapien
ttacctttcataccagtgctgttca

SEQ ID NO: 4236353 - DNA, 25 bp, Homo sapien
aaataacaagagctaaagtatatta

SEQ ID NO: 4236354 - DNA, 25 bp, Homo sapien
ataacaagagctaaagtatattaaa

SEQ ID NO: 4236355 - DNA, 25 bp, Homo sapien
aataacaagagctaaagtatattaa

SEQ ID NO: 4236356 - DNA, 25 bp, Homo sapien
ctttgaaactatcagcctgttgttc

SEQ ID NO: 4236357 - DNA, 25 bp, Homo sapien
ccattttccaaaagcagtctgatac

SEQ ID NO: 4236358 - DNA, 25 bp, Homo sapien
tgttcaacagactctcgtaccattt

SEQ ID NO: 4236359 - DNA, 25 bp, Homo sapien
tagtcacttggtgtgcctttagcat

SEQ ID NO: 4236360 - DNA, 25 bp, Homo sapien
cgaggatagttattcttccattcag

SEQ ID NO: 4236361 - DNA, 25 bp, Homo sapien
ttcccgcaggcgaggatagttattc

SEQ ID NO: 4236362 - DNA, 25 bp, Homo sapien
gcaggcgaggatagttattcttcca

SEQ ID NO: 4236363 - DNA, 25 bp, Homo sapien
gtcaagttcccgcaggcgaggatag

SEQ ID NO: 4236364 - DNA, 25 bp, Homo sapien
tgttttggtgtaacctggctcagac

SEQ ID NO: 4236365 - DNA, 25 bp, Homo sapien
ggtgtaacctggctcagactgataa

SEQ ID NO: 4236366 - DNA, 25 bp, Homo sapien
tgtaacctggctcagactgataact

SEQ ID NO: 4236367 - DNA, 25 bp, Homo sapien
gataacttcatcaaggatttcattt

SEQ ID NO: 4236368 - DNA, 25 bp, Homo sapien
gatccgaccataggggcctcccaaa

SEQ ID NO: 4236369 - DNA, 25 bp, Homo sapien
gagcttaagtgatccgaccataggg

SEQ ID NO: 4236370 - DNA, 25 bp, Homo sapien
cttaagtgatccgaccataggggcc

SEQ ID NO: 4236371 - DNA, 25 bp, Homo sapien
aagtgatccgaccataggggcctcc

SEQ ID NO: 4236372 - DNA, 25 bp, Homo sapien
gatagacccttaggctgtttccagc

SEQ ID NO: 4236373 - DNA, 25 bp, Homo sapien
ttctgtgtagtattatgttgcatga

SEQ ID NO: 4236374 - DNA, 25 bp, Homo sapien
attcttgtgttgatagacccttagg

SEQ ID NO: 4236375 - DNA, 25 bp, Homo sapien
acaccgcatctagcaatatttcact

SEQ ID NO: 4236376 - DNA, 25 bp, Homo sapien
taaatgcaatcatgtggcatatact

SEQ ID NO: 4236377 - DNA, 25 bp, Homo sapien
tcaaaagttgtaaccactggaactg

SEQ ID NO: 4236378 - DNA, 25 bp, Homo sapien
gcaatcatgtggcatatactctttt

SEQ ID NO: 4236379 - DNA, 25 bp, Homo sapien
atcctcaaaagttgtaaccactgga

SEQ ID NO: 4236380 - DNA, 25 bp, Homo sapien
caaagattgttgaaggatttcctcc

SEQ ID NO: 4236381 - DNA, 25 bp, Homo sapien
ccactgtggtgttaaaagttcctga

SEQ ID NO: 4236382 - DNA, 25 bp, Homo sapien
tcctgaattcatggtctgcgcagct

SEQ ID NO: 4236383 - DNA, 25 bp, Homo sapien
tgtttaagcttgatatccactgtgg

SEQ ID NO: 4236384 - DNA, 25 bp, Homo sapien
taagcaactaggcaaaggatcacac

SEQ ID NO: 4236385 - DNA, 25 bp, Homo sapien
taatttaagtataactgagctcaga

SEQ ID NO: 4236386 - DNA, 25 bp, Homo sapien
taaagccaagatacatggtagcaga

SEQ ID NO: 4236387 - DNA, 25 bp, Homo sapien
taatcttctgtcaggatcctaagaa

SEQ ID NO: 4236388 - DNA, 25 bp, Homo sapien
ttcttcttgtagggtctcccaagca

SEQ ID NO: 4236389 - DNA, 25 bp, Homo sapien
gctctttccctttcggttctgtcat

SEQ ID NO: 4236390 - DNA, 25 bp, Homo sapien
tgtcctccgcaaagtcattccactt

SEQ ID NO: 4236391 - DNA, 25 bp, Homo sapien
taacagcctctttaagtttatcaaa

SEQ ID NO: 4236392 - DNA, 25 bp, Homo sapien
caagctgtcctccgcaaagtcattc

SEQ ID NO: 4236393 - DNA, 25 bp, Homo sapien
tcccattgctgtttatcagatatgg

SEQ ID NO: 4236394 - DNA, 25 bp, Homo sapien
taaaataaatagctgcatcccattg

SEQ ID NO: 4236395 - DNA, 25 bp, Homo sapien
gatatggatcggtcttccaaagcat

SEQ ID NO: 4236396 - DNA, 25 bp, Homo sapien
tttatcagatatggatcggtcttcc

SEQ ID NO: 4236397 - DNA, 25 bp, Homo sapien
ttttccagtctggacccaccatgtt

SEQ ID NO: 4236398 - DNA, 25 bp, Homo sapien
ccagtataaccacctctttttccag

SEQ ID NO: 4236399 - DNA, 25 bp, Homo sapien
ctgttcttgggtccgattcttccag

SEQ ID NO: 4236400 - DNA, 25 bp, Homo sapien
gggtccgattcttccagtataacca

SEQ ID NO: 4236401 - DNA, 25 bp, Homo sapien
ggagagcttgactcaatgagtctga

SEQ ID NO: 4236402 - DNA, 25 bp, Homo sapien
gacatgaggctagcttttgaagaaa

SEQ ID NO: 4236403 - DNA, 25 bp, Homo sapien
gaaggagagcttgactcaatgagtc

SEQ ID NO: 4236404 - DNA, 25 bp, Homo sapien
ggatagagaaggagagcttgactca

SEQ ID NO: 4236405 - DNA, 25 bp, Homo sapien
tcttctagaatccatgtctcactgt

SEQ ID NO: 4236406 - DNA, 25 bp, Homo sapien
cctccaggtatgaggttgaaaacac

SEQ ID NO: 4236407 - DNA, 25 bp, Homo sapien
agacctagggatattctcaacctct

SEQ ID NO: 4236408 - DNA, 25 bp, Homo sapien
tgtaacctccaggtatgaggttgaa

SEQ ID NO: 4236409 - DNA, 25 bp, Homo sapien
tagtttggcttaaacaaggcgagaa

SEQ ID NO: 4236410 - DNA, 25 bp, Homo sapien
ggccattagaagagagaactactct

SEQ ID NO: 4236411 - DNA, 25 bp, Homo sapien
tctatcacagctatgaaatctgagt

SEQ ID NO: 4236412 - DNA, 25 bp, Homo sapien
gaaatcgctggtaatggtgttccca

SEQ ID NO: 4236413 - DNA, 25 bp, Homo sapien
cttgcaagataagctgggtgctcct

SEQ ID NO: 4236414 - DNA, 25 bp, Homo sapien
gtggttatttcatcacttgcaagat

SEQ ID NO: 4236415 - DNA, 25 bp, Homo sapien
gggtgctcctcattacatttcaaca

SEQ ID NO: 4236416 - DNA, 25 bp, Homo sapien
tacttctactcctcgggattcaagg

SEQ ID NO: 4236417 - DNA, 25 bp, Homo sapien
gcaaaggtctaggtcggtttcatcc

SEQ ID NO: 4236418 - DNA, 25 bp, Homo sapien
tgcaatctgaaacagcgtgacgtgg

SEQ ID NO: 4236419 - DNA, 25 bp, Homo sapien
tcagcaaatgtacacgtgacaaaag

SEQ ID NO: 4236420 - DNA, 25 bp, Homo sapien
tgaactgactgttgaccattgaact

SEQ ID NO: 4236421 - DNA, 25 bp, Homo sapien
aggttacaatggtttagagctgttt

SEQ ID NO: 4236422 - DNA, 25 bp, Homo sapien
aacctcttcgacaaaggttacaatg

SEQ ID NO: 4236423 - DNA, 25 bp, Homo sapien
cctcttcgacaaaggttacaatggt

SEQ ID NO: 4236424 - DNA, 25 bp, Homo sapien
taaacttgatgccaagtatccttaa

SEQ ID NO: 4236425 - DNA, 25 bp, Homo sapien
tgtatacgccaaaacaagaccacat

SEQ ID NO: 4236426 - DNA, 25 bp, Homo sapien
ctgtatacgccaaaacaagaccaca

SEQ ID NO: 4236427 - DNA, 25 bp, Homo sapien
ccttaaagtatttgcggtgatagca

SEQ ID NO: 4236428 - DNA, 25 bp, Homo sapien
tatttgcggtgatagcaagcatgcg

SEQ ID NO: 4236429 - DNA, 25 bp, Homo sapien
tgttgccttaaagtatttgcggtga

SEQ ID NO: 4236430 - DNA, 25 bp, Homo sapien
taagttgttgccttaaagtatttgc

SEQ ID NO: 4236431 - DNA, 25 bp, Homo sapien
ctaggagtccattcccaacagagtt

SEQ ID NO: 4236432 - DNA, 25 bp, Homo sapien
actacaggcctcaagcggttttcct

SEQ ID NO: 4236433 - DNA, 25 bp, Homo sapien
actttaatggaagtgcagatttccc

SEQ ID NO: 4236434 - DNA, 25 bp, Homo sapien
cagatttcccaaaaaactaagtgat

SEQ ID NO: 4236435 - DNA, 25 bp, Homo sapien
ccagttgaacgcgtttaccagtaag

SEQ ID NO: 4236436 - DNA, 25 bp, Homo sapien
tgaacgcgtttaccagtaagcaatt

SEQ ID NO: 4236437 - DNA, 25 bp, Homo sapien
tccgccagttgaacgcgtttaccag

SEQ ID NO: 4236438 - DNA, 25 bp, Homo sapien
gaggtcttccgccagttgaacgcgt

SEQ ID NO: 4236439 - DNA, 25 bp, Homo sapien
gtaaggtagagggcagtaagaacta

SEQ ID NO: 4236440 - DNA, 25 bp, Homo sapien
taaggtagagggcagtaagaactac

SEQ ID NO: 4236441 - DNA, 25 bp, Homo sapien
aggtagagggcagtaagaactactc

SEQ ID NO: 4236442 - DNA, 25 bp, Homo sapien
aaggtagagggcagtaagaactact

SEQ ID NO: 4236443 - DNA, 25 bp, Homo sapien
cgtgctcagcccagttccttgtaac

SEQ ID NO: 4236444 - DNA, 25 bp, Homo sapien
ccgtgctcagcccagttccttgtaa

SEQ ID NO: 4236445 - DNA, 25 bp, Homo sapien
tgctcagcccagttccttgtaactt

SEQ ID NO: 4236446 - DNA, 25 bp, Homo sapien
ctcagcccagttccttgtaactttt

SEQ ID NO: 4236447 - DNA, 25 bp, Homo sapien
cttggaagtgataggacttaaggtc

SEQ ID NO: 4236448 - DNA, 25 bp, Homo sapien
tatacatgaacctacttggaagtga

SEQ ID NO: 4236449 - DNA, 25 bp, Homo sapien
taggacttaaggtcagcaacttact

SEQ ID NO: 4236450 - DNA, 25 bp, Homo sapien
tgtttctaagaactatacatgaacc

SEQ ID NO: 4236451 - DNA, 25 bp, Homo sapien
tggcacaaagcgtcagagcagagct

SEQ ID NO: 4236452 - DNA, 25 bp, Homo sapien
gactccatgacgaagagcaacctgg

SEQ ID NO: 4236453 - DNA, 25 bp, Homo sapien
gagctcagtaaaagggactccatga

SEQ ID NO: 4236454 - DNA, 25 bp, Homo sapien
taaaagaagtgtcaatgctgggtgc

SEQ ID NO: 4236455 - DNA, 25 bp, Homo sapien
gggaagccatggtagcctactgcag

SEQ ID NO: 4236456 - DNA, 25 bp, Homo sapien
ggtgttaatgcctgacctgggttac

SEQ ID NO: 4236457 - DNA, 25 bp, Homo sapien
gagggtatctccacaaaggcatggt

SEQ ID NO: 4236458 - DNA, 25 bp, Homo sapien
caaagtgattattagtagggccaag

SEQ ID NO: 4236459 - DNA, 25 bp, Homo sapien
gaccctattcccaagtgtcagacca

SEQ ID NO: 4236460 - DNA, 25 bp, Homo sapien
ggctgaagtatccatgaccctattc

SEQ ID NO: 4236461 - DNA, 25 bp, Homo sapien
taaacagtaacgaaaaggcactctc

SEQ ID NO: 4236462 - DNA, 25 bp, Homo sapien
tgaacaggctatactagaaactttg

SEQ ID NO: 4236463 - DNA, 25 bp, Homo sapien
tctgtgacctgctgacatctcctca

SEQ ID NO: 4236464 - DNA, 25 bp, Homo sapien
tgctccagctatggaatctaccata

SEQ ID NO: 4236465 - DNA, 25 bp, Homo sapien
tccaaagaatcctggaagagcctct

SEQ ID NO: 4236466 - DNA, 25 bp, Homo sapien
cctgagacaaaatcatgtgagctcc

SEQ ID NO: 4236467 - DNA, 25 bp, Homo sapien
ggcccattaatgtccttagagcaaa

SEQ ID NO: 4236468 - DNA, 25 bp, Homo sapien
gattgccaggcttcatccactgtaa

SEQ ID NO: 4236469 - DNA, 25 bp, Homo sapien
tatattactacaatggaaccctcgg

SEQ ID NO: 4236470 - DNA, 25 bp, Homo sapien
cagtgtttcaacgtcttcagggatg

SEQ ID NO: 4236471 - DNA, 25 bp, Homo sapien
tatctaagttgacaccaaacttaaa

SEQ ID NO: 4236472 - DNA, 25 bp, Homo sapien
tttatctaagttgacaccaaactta

SEQ ID NO: 4236473 - DNA, 25 bp, Homo sapien
ttatctaagttgacaccaaacttaa

SEQ ID NO: 4236474 - DNA, 25 bp, Homo sapien
attttatctaagttgacaccaaact

SEQ ID NO: 4236475 - DNA, 25 bp, Homo sapien
caggctttagtgaacaagggttcca

SEQ ID NO: 4236476 - DNA, 25 bp, Homo sapien
ccaggcaatttctatgaaggcccaa

SEQ ID NO: 4236477 - DNA, 25 bp, Homo sapien
caataatgccccttgaatgtgtcag

SEQ ID NO: 4236478 - DNA, 25 bp, Homo sapien
taacctagtaacagcagatacaatg

SEQ ID NO: 4236479 - DNA, 25 bp, Homo sapien
tgaaggacactggtaactatggaag

SEQ ID NO: 4236480 - DNA, 25 bp, Homo sapien
ctgtgaaggacactggtaactatgg

SEQ ID NO: 4236481 - DNA, 25 bp, Homo sapien
gtgaaggacactggtaactatggaa

SEQ ID NO: 4236482 - DNA, 25 bp, Homo sapien
tgtgaaggacactggtaactatgga

SEQ ID NO: 4236483 - DNA, 25 bp, Homo sapien
ggtaataatgattatcttcatcatt

SEQ ID NO: 4236484 - DNA, 25 bp, Homo sapien
aacatgtatgtctttccgatcaacc

SEQ ID NO: 4236485 - DNA, 25 bp, Homo sapien
tatggcaggtatgggagaagtgtcg

SEQ ID NO: 4236486 - DNA, 25 bp, Homo sapien
taacaacactcaagggtatggcagg

SEQ ID NO: 4236487 - DNA, 25 bp, Homo sapien
gaagtgtcggaatgtgaagtcactg

SEQ ID NO: 4236488 - DNA, 25 bp, Homo sapien
cacagacgatattctcatccgtaac

SEQ ID NO: 4236489 - DNA, 25 bp, Homo sapien
tatccagaccagtgaaacttcctgc

SEQ ID NO: 4236490 - DNA, 25 bp, Homo sapien
tgcgtctcaggcaataaggctgttc

SEQ ID NO: 4236491 - DNA, 25 bp, Homo sapien
gctgttctgctttatcattcgtgtg

SEQ ID NO: 4236492 - DNA, 25 bp, Homo sapien
cacctctcagctttcggagaattga

SEQ ID NO: 4236493 - DNA, 25 bp, Homo sapien
cagctagggccttaagacacgtatt

SEQ ID NO: 4236494 - DNA, 25 bp, Homo sapien
cagaactcttgcttgaccagatgca

SEQ ID NO: 4236495 - DNA, 25 bp, Homo sapien
gatgttgtgctagcaggcacaaaaa

SEQ ID NO: 4236496 - DNA, 25 bp, Homo sapien
gaaaacaagcaggatagacttagca

SEQ ID NO: 4236497 - DNA, 25 bp, Homo sapien
gcaggttacggtggctatggcaatt

SEQ ID NO: 4236498 - DNA, 25 bp, Homo sapien
aacaaatgctaaggatcacctgagc

SEQ ID NO: 4236499 - DNA, 25 bp, Homo sapien
ggtggtggctgttgcaggttacggt

SEQ ID NO: 4236500 - DNA, 25 bp, Homo sapien
gctaacaaatgctaaggatcacctg

SEQ ID NO: 4236501 - DNA, 25 bp, Homo sapien
cgatttgagtacaatagggcagtgc

SEQ ID NO: 4236502 - DNA, 25 bp, Homo sapien
gatgcaggtgtctcaccctgtaagg

SEQ ID NO: 4236503 - DNA, 25 bp, Homo sapien
taagctggatggactactgcaggga

SEQ ID NO: 4236504 - DNA, 25 bp, Homo sapien
cacgggaatctcaaacgggtgcttc

SEQ ID NO: 4236505 - DNA, 25 bp, Homo sapien
tgaagcccaattaagaacccacagt

SEQ ID NO: 4236506 - DNA, 25 bp, Homo sapien
gggagatgcttgcaacaaacatgag

SEQ ID NO: 4236507 - DNA, 25 bp, Homo sapien
tactaatgtctggatcataggcaaa

SEQ ID NO: 4236508 - DNA, 25 bp, Homo sapien
tggccttagactgggaaatgacttt

SEQ ID NO: 4236509 - DNA, 25 bp, Homo sapien
ccagatggattatagtagtaggtct

SEQ ID NO: 4236510 - DNA, 25 bp, Homo sapien
cagatggattatagtagtaggtctc

SEQ ID NO: 4236511 - DNA, 25 bp, Homo sapien
ctaaatggttggtatacttaactat

SEQ ID NO: 4236512 - DNA, 25 bp, Homo sapien
cacaaatcaggaggtaattatttac

SEQ ID NO: 4236513 - DNA, 25 bp, Homo sapien
aaaggtatcacaaatcaggaggtaa

SEQ ID NO: 4236514 - DNA, 25 bp, Homo sapien
tggtatacttaactatttgcgggaa

SEQ ID NO: 4236515 - DNA, 25 bp, Homo sapien
atttctcctgatgaagagcttcaat

SEQ ID NO: 4236516 - DNA, 25 bp, Homo sapien
gaagagcttcaatgaaagcatcaag

SEQ ID NO: 4236517 - DNA, 25 bp, Homo sapien
atgaaagcatcaagtttttcttgaa

SEQ ID NO: 4236518 - DNA, 25 bp, Homo sapien
ttatttctcctgatgaagagcttca

SEQ ID NO: 4236519 - DNA, 25 bp, Homo sapien
tttgctggcacactgttccgaatga

SEQ ID NO: 4236520 - DNA, 25 bp, Homo sapien
gctggcacactgttccgaatgatgt

SEQ ID NO: 4236521 - DNA, 25 bp, Homo sapien
ttgctggcacactgttccgaatgat

SEQ ID NO: 4236522 - DNA, 25 bp, Homo sapien
tgctggcacactgttccgaatgatg

SEQ ID NO: 4236523 - DNA, 25 bp, Homo sapien
ggatgtcacactgatcagctgaggg

SEQ ID NO: 4236524 - DNA, 25 bp, Homo sapien
cacagagtcttaagtcacaagggtt

SEQ ID NO: 4236525 - DNA, 25 bp, Homo sapien
ccattatgtaaaacactggctggct

SEQ ID NO: 4236526 - DNA, 25 bp, Homo sapien
tcttagagactagacaggtagcagc

SEQ ID NO: 4236527 - DNA, 25 bp, Homo sapien
cccatgactttattgtatgtttaga

SEQ ID NO: 4236528 - DNA, 25 bp, Homo sapien
tatgcagagctgattatgagtacga

SEQ ID NO: 4236529 - DNA, 25 bp, Homo sapien
aaagaggctggacaaaagacgttga

SEQ ID NO: 4236530 - DNA, 25 bp, Homo sapien
tgttcttcagatgtatgcagagctg

SEQ ID NO: 4236531 - DNA, 25 bp, Homo sapien
tcttccattcgagaggcagctgatg

SEQ ID NO: 4236532 - DNA, 25 bp, Homo sapien
tcttcaaggactgaacctaatggcc

SEQ ID NO: 4236533 - DNA, 25 bp, Homo sapien
taatccattaaacgagtgccaccac

SEQ ID NO: 4236534 - DNA, 25 bp, Homo sapien
gcagctgatggttaaagcgcccgta

SEQ ID NO: 4236535 - DNA, 25 bp, Homo sapien
tctttcactgaacgttacaatccaa

SEQ ID NO: 4236536 - DNA, 25 bp, Homo sapien
gcttccaaggcaaatttcttcgctg

SEQ ID NO: 4236537 - DNA, 25 bp, Homo sapien
tcaaataggtaagctggtactgact

SEQ ID NO: 4236538 - DNA, 25 bp, Homo sapien
ttcttcgctggctatgaagggttga

SEQ ID NO: 4236539 - DNA, 25 bp, Homo sapien
catcctgtgtcataatccggtggct

SEQ ID NO: 4236540 - DNA, 25 bp, Homo sapien
aaagcctttttctgatacctagttg

SEQ ID NO: 4236541 - DNA, 25 bp, Homo sapien
tctttgcttgaatgtcctttagcca

SEQ ID NO: 4236542 - DNA, 25 bp, Homo sapien
taaaatagtcttatgaaagaaagcc

SEQ ID NO: 4236543 - DNA, 25 bp, Homo sapien
gcagcaaatgagatagacattttaa

SEQ ID NO: 4236544 - DNA, 25 bp, Homo sapien
catctgtgctgcttaaggctggacc

SEQ ID NO: 4236545 - DNA, 25 bp, Homo sapien
cgtcaggactctcatgtgggacttt

SEQ ID NO: 4236546 - DNA, 25 bp, Homo sapien
tgttacatcttgagggatcacaacg

SEQ ID NO: 4236547 - DNA, 25 bp, Homo sapien
tatcctcaaccgagcataccaagtg

SEQ ID NO: 4236548 - DNA, 25 bp, Homo sapien
caaattcccacattgtgaggctggg

SEQ ID NO: 4236549 - DNA, 25 bp, Homo sapien
gctgcaagggccacttatttcgtgc

SEQ ID NO: 4236550 - DNA, 25 bp, Homo sapien
gaaaggttgactgttccacccgcaa

SEQ ID NO: 4236551 - DNA, 25 bp, Homo sapien
gctgtgcactgcctaggtacactga

SEQ ID NO: 4236552 - DNA, 25 bp, Homo sapien
taatatctacacgtaatgtgaaggt

SEQ ID NO: 4236553 - DNA, 25 bp, Homo sapien
aaatgacctttgatcaagctcaggc

SEQ ID NO: 4236554 - DNA, 25 bp, Homo sapien
aaagttcattcacagtgcacaagtg

SEQ ID NO: 4236555 - DNA, 25 bp, Homo sapien
tactgctagagctataacatagacc

SEQ ID NO: 4236556 - DNA, 25 bp, Homo sapien
ccatggagtacaactgtgaaatgca

SEQ ID NO: 4236557 - DNA, 25 bp, Homo sapien
aaaaaagcaccggttgaccatggag

SEQ ID NO: 4236558 - DNA, 25 bp, Homo sapien
tgttttgacaagtaccacgatgtga

SEQ ID NO: 4236559 - DNA, 25 bp, Homo sapien
cactgagagcttgttagaccatgaa

SEQ ID NO: 4236560 - DNA, 25 bp, Homo sapien
ttaacgcggcttctgcagaatatgt

SEQ ID NO: 4236561 - DNA, 25 bp, Homo sapien
cagaatatgtacgtaactcacgaga

SEQ ID NO: 4236562 - DNA, 25 bp, Homo sapien
tctgcagaatatgtacgtaactcac

SEQ ID NO: 4236563 - DNA, 25 bp, Homo sapien
acaaatgcaccttaacgcggcttct

SEQ ID NO: 4236564 - DNA, 25 bp, Homo sapien
taaagaatgtacatgagatacctgg

SEQ ID NO: 4236565 - DNA, 25 bp, Homo sapien
gaaaccagacatatctcaaggcaag

SEQ ID NO: 4236566 - DNA, 25 bp, Homo sapien
tcctaatagtcttgggaaaccagac

SEQ ID NO: 4236567 - DNA, 25 bp, Homo sapien
aaagtagtaatttgggccaggctag

SEQ ID NO: 4236568 - DNA, 25 bp, Homo sapien
aaacaatgcttttgacgcgaacaaa

SEQ ID NO: 4236569 - DNA, 25 bp, Homo sapien
gcctcactccaccaacaggataaga

SEQ ID NO: 4236570 - DNA, 25 bp, Homo sapien
atccaggtccaaatgcctcactcca

SEQ ID NO: 4236571 - DNA, 25 bp, Homo sapien
tgacgcgaacaaaattacactctca

SEQ ID NO: 4236572 - DNA, 25 bp, Homo sapien
tagtacctgcacatcaaaaggccag

SEQ ID NO: 4236573 - DNA, 25 bp, Homo sapien
ttcacatgaaccagaacaggcccat

SEQ ID NO: 4236574 - DNA, 25 bp, Homo sapien
tgtacacaagtttgtgaccaacttg

SEQ ID NO: 4236575 - DNA, 25 bp, Homo sapien
cttgtagtacctgcacatcaaaagg

SEQ ID NO: 4236576 - DNA, 25 bp, Homo sapien
aaaatgatttgacacaaaggattcc

SEQ ID NO: 4236577 - DNA, 25 bp, Homo sapien
caaaggattccaaaatgtcctcctc

SEQ ID NO: 4236578 - DNA, 25 bp, Homo sapien
acaaaggattccaaaatgtcctcct

SEQ ID NO: 4236579 - DNA, 25 bp, Homo sapien
gatttgacacaaaggattccaaaat

SEQ ID NO: 4236580 - DNA, 25 bp, Homo sapien
cacacgatacatacaggtaaccagg

SEQ ID NO: 4236581 - DNA, 25 bp, Homo sapien
ggaggttgagcataccacgcctcat

SEQ ID NO: 4236582 - DNA, 25 bp, Homo sapien
taagcttcccattagatgtggcaca

SEQ ID NO: 4236583 - DNA, 25 bp, Homo sapien
gtggcacatgcagacttgtcccata

SEQ ID NO: 4236584 - DNA, 25 bp, Homo sapien
tattatcacccaaatgcaccgaggc

SEQ ID NO: 4236585 - DNA, 25 bp, Homo sapien
tgttggtaaacgacaatgcctgcct

SEQ ID NO: 4236586 - DNA, 25 bp, Homo sapien
gagtaacgcttttttgccaaccagc

SEQ ID NO: 4236587 - DNA, 25 bp, Homo sapien
tcatgatatgaaaaggaactgcctc

SEQ ID NO: 4236588 - DNA, 25 bp, Homo sapien
taccacaacgcattaaccattcgag

SEQ ID NO: 4236589 - DNA, 25 bp, Homo sapien
tagttgtaatgtggcatccgaaacc

SEQ ID NO: 4236590 - DNA, 25 bp, Homo sapien
gcttgatagcagataaccggattat

SEQ ID NO: 4236591 - DNA, 25 bp, Homo sapien
ggttatgcagatcctccaactgttg

SEQ ID NO: 4236592 - DNA, 25 bp, Homo sapien
gaaaaacctgagtgcccaggcccgc

SEQ ID NO: 4236593 - DNA, 25 bp, Homo sapien
agtgcccaggcccgcctgctcatcc

SEQ ID NO: 4236594 - DNA, 25 bp, Homo sapien
tgcccaggcccgcctgctcatccat

SEQ ID NO: 4236595 - DNA, 25 bp, Homo sapien
cagaaaaacctgagtgcccaggccc

SEQ ID NO: 4236596 - DNA, 25 bp, Homo sapien
aggagagggcggtatgtttccaaca

SEQ ID NO: 4236597 - DNA, 25 bp, Homo sapien
tggccactggcgcatattggcagag

SEQ ID NO: 4236598 - DNA, 25 bp, Homo sapien
gcagagcaaacacacgggcctccga

SEQ ID NO: 4236599 - DNA, 25 bp, Homo sapien
ttagacactgttcggcagccccctg

SEQ ID NO: 4236600 - DNA, 25 bp, Homo sapien
tcaacattctactgtcaaccagcgt

SEQ ID NO: 4236601 - DNA, 25 bp, Homo sapien
tcaaggctctccctattggctttgc

SEQ ID NO: 4236602 - DNA, 25 bp, Homo sapien
ttctgtgccttgccttccactggtc

SEQ ID NO: 4236603 - DNA, 25 bp, Homo sapien
ccagcgtccacatcggcaggatact

SEQ ID NO: 4236604 - DNA, 25 bp, Homo sapien
tcccaccagggctcgtttgtaaagc

SEQ ID NO: 4236605 - DNA, 25 bp, Homo sapien
caggtctgatacttaacaccagcat

SEQ ID NO: 4236606 - DNA, 25 bp, Homo sapien
tcagacgaggtgtggccttcagagc

SEQ ID NO: 4236607 - DNA, 25 bp, Homo sapien
aaatcccagactgccgagaatgcct

SEQ ID NO: 4236608 - DNA, 25 bp, Homo sapien
gctggcttcacctgccttttcagtg

SEQ ID NO: 4236609 - DNA, 25 bp, Homo sapien
aactacccacccgaaaagcgtgcag

SEQ ID NO: 4236610 - DNA, 25 bp, Homo sapien
tagccatgccgactcctctcaaggg

SEQ ID NO: 4236611 - DNA, 25 bp, Homo sapien
ccgaaaagcgtgcagaagcagctgg

SEQ ID NO: 4236612 - DNA, 25 bp, Homo sapien
atgggccccatgaggacggtcactc

SEQ ID NO: 4236613 - DNA, 25 bp, Homo sapien
acgctgctgggcgagtctctcccca

SEQ ID NO: 4236614 - DNA, 25 bp, Homo sapien
gccccatgaggacggtcactctggc

SEQ ID NO: 4236615 - DNA, 25 bp, Homo sapien
gctgctgggcgagtctctccccaga

SEQ ID NO: 4236616 - DNA, 25 bp, Homo sapien
gaccccattgtctgcacggatgagc

SEQ ID NO: 4236617 - DNA, 25 bp, Homo sapien
ccattgtctgcacggatgagctggg

SEQ ID NO: 4236618 - DNA, 25 bp, Homo sapien
tgagctggggttcatttgggaaacc

SEQ ID NO: 4236619 - DNA, 25 bp, Homo sapien
tggtctgatcacgtgcggctccctg

SEQ ID NO: 4236620 - DNA, 25 bp, Homo sapien
ggagcatttttcctgcggccacagc

SEQ ID NO: 4236621 - DNA, 25 bp, Homo sapien
gatgtagaccccagatgccacctgc

SEQ ID NO: 4236622 - DNA, 25 bp, Homo sapien
ccggagcatttttcctgcggccaca

SEQ ID NO: 4236623 - DNA, 25 bp, Homo sapien
acctgcgccttctccggagcatttt

SEQ ID NO: 4236624 - DNA, 25 bp, Homo sapien
tgtgttgattccgttcccgtactct

SEQ ID NO: 4236625 - DNA, 25 bp, Homo sapien
gttgattccgttcccgtactctcca

SEQ ID NO: 4236626 - DNA, 25 bp, Homo sapien
cctgctgtgttgattccgttcccgt

SEQ ID NO: 4236627 - DNA, 25 bp, Homo sapien
tgctgtgttgattccgttcccgtac

SEQ ID NO: 4236628 - DNA, 25 bp, Homo sapien
ggaaccctgatgatagcctaaaccc

SEQ ID NO: 4236629 - DNA, 25 bp, Homo sapien
tccaggatgtccacatcaaccgact

SEQ ID NO: 4236630 - DNA, 25 bp, Homo sapien
tcagaggagaagctagacgtggaac

SEQ ID NO: 4236631 - DNA, 25 bp, Homo sapien
ttcagactgtttatttccgatgcac

SEQ ID NO: 4236632 - DNA, 25 bp, Homo sapien
tcggttcgtcggctaccatcatctg

SEQ ID NO: 4236633 - DNA, 25 bp, Homo sapien
tcgtcggctaccatcatctgcacag

SEQ ID NO: 4236634 - DNA, 25 bp, Homo sapien
cacccagaaggtgtttgtcggttcg

SEQ ID NO: 4236635 - DNA, 25 bp, Homo sapien
cagaatccagagttgcgccagacac

SEQ ID NO: 4236636 - DNA, 25 bp, Homo sapien
gggacctagccacgggccactgcca

SEQ ID NO: 4236637 - DNA, 25 bp, Homo sapien
gagctgggacctagccacgggccac

SEQ ID NO: 4236638 - DNA, 25 bp, Homo sapien
agctgggacctagccacgggccact

SEQ ID NO: 4236639 - DNA, 25 bp, Homo sapien
ctgggacctagccacgggccactgc

SEQ ID NO: 4236640 - DNA, 25 bp, Homo sapien
tgaccagacactcacggaaccttgg

SEQ ID NO: 4236641 - DNA, 25 bp, Homo sapien
gaggcctgtgtctgtcccttgacca

SEQ ID NO: 4236642 - DNA, 25 bp, Homo sapien
ggaaccttggaagctctcctttctg

SEQ ID NO: 4236643 - DNA, 25 bp, Homo sapien
agtgagaagtttctgaactgaggcc

SEQ ID NO: 4236644 - DNA, 25 bp, Homo sapien
tcgcttttcctgagcacgatttgcc

SEQ ID NO: 4236645 - DNA, 25 bp, Homo sapien
tgcattctccacattacggcacagc

SEQ ID NO: 4236646 - DNA, 25 bp, Homo sapien
agaccttgtcattccctcgcttgaa

SEQ ID NO: 4236647 - DNA, 25 bp, Homo sapien
aaccaaatcatggacatctctgtgg

SEQ ID NO: 4236648 - DNA, 25 bp, Homo sapien
aatggcaagtggttatgttaaaggg

SEQ ID NO: 4236649 - DNA, 25 bp, Homo sapien
atggcaagtggttatgttaaaggga

SEQ ID NO: 4236650 - DNA, 25 bp, Homo sapien
tggcaagtggttatgttaaagggaa

SEQ ID NO: 4236651 - DNA, 25 bp, Homo sapien
taaatttgttcagagtggccccagt

SEQ ID NO: 4236652 - DNA, 25 bp, Homo sapien
tttcctcatccgcaacatgggacag

SEQ ID NO: 4236653 - DNA, 25 bp, Homo sapien
gacagaaccattcaaaggtggagca

SEQ ID NO: 4236654 - DNA, 25 bp, Homo sapien
tagcacttactaggcaccctgcaga

SEQ ID NO: 4236655 - DNA, 25 bp, Homo sapien
ctggtaagtgtaacatccactgagg

SEQ ID NO: 4236656 - DNA, 25 bp, Homo sapien
tctgacttctcaaagtaactaacgg

SEQ ID NO: 4236657 - DNA, 25 bp, Homo sapien
cgggcaaggagaccctttctaacat

SEQ ID NO: 4236658 - DNA, 25 bp, Homo sapien
acatccactgaggaactgtagttct

SEQ ID NO: 4236659 - DNA, 25 bp, Homo sapien
tctacacataaaggctccatccggc

SEQ ID NO: 4236660 - DNA, 25 bp, Homo sapien
gtaaatttggatgccgtaatatgca

SEQ ID NO: 4236661 - DNA, 25 bp, Homo sapien
catccggctctgactttttctgata

SEQ ID NO: 4236662 - DNA, 25 bp, Homo sapien
gacagcgtggaccatctacacataa

SEQ ID NO: 4236663 - DNA, 25 bp, Homo sapien
ttcccatgagtatctctaaggcagg

SEQ ID NO: 4236664 - DNA, 25 bp, Homo sapien
ctccaatttcatctcgtagaagaaa

SEQ ID NO: 4236665 - DNA, 25 bp, Homo sapien
gagtatctctaaggcagggcccacc

SEQ ID NO: 4236666 - DNA, 25 bp, Homo sapien
gaaatcttcccatgagtatctctaa

SEQ ID NO: 4236667 - DNA, 25 bp, Homo sapien
cagcagcagactgggtccctcatgc

SEQ ID NO: 4236668 - DNA, 25 bp, Homo sapien
gccaaggacaaatcgaagcagcagc

SEQ ID NO: 4236669 - DNA, 25 bp, Homo sapien
aagccaggtcaccacgagagccaag

SEQ ID NO: 4236670 - DNA, 25 bp, Homo sapien
tagagcctccatcgtagtaaattgc

SEQ ID NO: 4236671 - DNA, 25 bp, Homo sapien
taccccgctaacacagtggagagaa

SEQ ID NO: 4236672 - DNA, 25 bp, Homo sapien
tgctggctccactgcatgcacagag

SEQ ID NO: 4236673 - DNA, 25 bp, Homo sapien
agtccacgggctcgccagtctgtgt

SEQ ID NO: 4236674 - DNA, 25 bp, Homo sapien
aactcacagagctacactcaccata

SEQ ID NO: 4236675 - DNA, 25 bp, Homo sapien
aggcatctgtccggctccattgtcc

SEQ ID NO: 4236676 - DNA, 25 bp, Homo sapien
caggcatctgtccggctccattgtc

SEQ ID NO: 4236677 - DNA, 25 bp, Homo sapien
ccaggcatctgtccggctccattgt

SEQ ID NO: 4236678 - DNA, 25 bp, Homo sapien
gggacagaacatgggaacaactgcc

SEQ ID NO: 4236679 - DNA, 25 bp, Homo sapien
agaacatgggaacaactgccagcag

SEQ ID NO: 4236680 - DNA, 25 bp, Homo sapien
gacagaacatgggaacaactgccag

SEQ ID NO: 4236681 - DNA, 25 bp, Homo sapien
cagaacatgggaacaactgccagca

SEQ ID NO: 4236682 - DNA, 25 bp, Homo sapien
ctcttcccggcagagagggtgcctg

SEQ ID NO: 4236683 - DNA, 25 bp, Homo sapien
cctgcggtgtgactcgagggaactc

SEQ ID NO: 4236684 - DNA, 25 bp, Homo sapien
tgggactcagtcaccaggacaggga

SEQ ID NO: 4236685 - DNA, 25 bp, Homo sapien
caggcccctctgtcatggactcagg

SEQ ID NO: 4236686 - DNA, 25 bp, Homo sapien
cttgagcagaatcctggctggtggt

SEQ ID NO: 4236687 - DNA, 25 bp, Homo sapien
gacactgaagcacggcaggtgcact

SEQ ID NO: 4236688 - DNA, 25 bp, Homo sapien
cacttggagttgaggcttgaatggc

SEQ ID NO: 4236689 - DNA, 25 bp, Homo sapien
tcataaagccatttgatagctcgct

SEQ ID NO: 4236690 - DNA, 25 bp, Homo sapien
tgcttattgttacgcttctgccaca

SEQ ID NO: 4236691 - DNA, 25 bp, Homo sapien
ttccacggcagaagcggcgcagcta

SEQ ID NO: 4236692 - DNA, 25 bp, Homo sapien
agctagcccagcacgactctgctta

SEQ ID NO: 4236693 - DNA, 25 bp, Homo sapien
aggagattggctgccgaacctgttc

SEQ ID NO: 4236694 - DNA, 25 bp, Homo sapien
tgagagcccacactttgttaagtga

SEQ ID NO: 4236695 - DNA, 25 bp, Homo sapien
tctctggtttggtgagagcccacac

SEQ ID NO: 4236696 - DNA, 25 bp, Homo sapien
gagagcccacactttgttaagtgag

SEQ ID NO: 4236697 - DNA, 25 bp, Homo sapien
gtgagagcccacactttgttaagtg

SEQ ID NO: 4236698 - DNA, 25 bp, Homo sapien
tagaaggaaacatgttcgccggtgc

SEQ ID NO: 4236699 - DNA, 25 bp, Homo sapien
cagggaagccgcgtcagcatgctgc

SEQ ID NO: 4236700 - DNA, 25 bp, Homo sapien
acatgttcgccggtgcctgagaggc

SEQ ID NO: 4236701 - DNA, 25 bp, Homo sapien
ttcgccggtgcctgagaggctgtct

SEQ ID NO: 4236702 - DNA, 25 bp, Homo sapien
tctgaatgtgagctccaaggctgcc

SEQ ID NO: 4236703 - DNA, 25 bp, Homo sapien
ctttataggactctgggtggaaaat

SEQ ID NO: 4236704 - DNA, 25 bp, Homo sapien
tgtggttagattagaatcatttcca

SEQ ID NO: 4236705 - DNA, 25 bp, Homo sapien
tgactgggcttggtaaatggttccc

SEQ ID NO: 4236706 - DNA, 25 bp, Homo sapien
gaaagggcacttcatcgccctggcc

SEQ ID NO: 4236707 - DNA, 25 bp, Homo sapien
ccttgggagcattgtcgagggactt

SEQ ID NO: 4236708 - DNA, 25 bp, Homo sapien
gagcattgtcgagggactttttcag

SEQ ID NO: 4236709 - DNA, 25 bp, Homo sapien
ctgtgtatgtctccccactcggtag

SEQ ID NO: 4236710 - DNA, 25 bp, Homo sapien
cattccctctttgaattaaggtcac

SEQ ID NO: 4236711 - DNA, 25 bp, Homo sapien
acattccctctttgaattaaggtca

SEQ ID NO: 4236712 - DNA, 25 bp, Homo sapien
taacctaaggagatctctttgtgag

SEQ ID NO: 4236713 - DNA, 25 bp, Homo sapien
tgtaacctaaggagatctctttgtg

SEQ ID NO: 4236714 - DNA, 25 bp, Homo sapien
acctaaggagatctctttgtgagca

SEQ ID NO: 4236715 - DNA, 25 bp, Homo sapien
aacctaaggagatctctttgtgagc

SEQ ID NO: 4236716 - DNA, 25 bp, Homo sapien
tatcttatcagaacctgtgtctcct

SEQ ID NO: 4236717 - DNA, 25 bp, Homo sapien
ggagcttatatcttatcagaacctg

SEQ ID NO: 4236718 - DNA, 25 bp, Homo sapien
caaatgcagggtgggatctggagct

SEQ ID NO: 4236719 - DNA, 25 bp, Homo sapien
tctgtggtccatatttccaggtcac

SEQ ID NO: 4236720 - DNA, 25 bp, Homo sapien
tcctgatgttggcagcttagaatgc

SEQ ID NO: 4236721 - DNA, 25 bp, Homo sapien
aatgcaggagccttagatgggtggc

SEQ ID NO: 4236722 - DNA, 25 bp, Homo sapien
ttcctgaacagagcgtgctgttccc

SEQ ID NO: 4236723 - DNA, 25 bp, Homo sapien
ctgtccagctcgacattcctgaaca

SEQ ID NO: 4236724 - DNA, 25 bp, Homo sapien
ttaatacacaagggggaacagagaa

SEQ ID NO: 4236725 - DNA, 25 bp, Homo sapien
taatacacaagggggaacagagaaa

SEQ ID NO: 4236726 - DNA, 25 bp, Homo sapien
atacacaagggggaacagagaaaga

SEQ ID NO: 4236727 - DNA, 25 bp, Homo sapien
tacacaagggggaacagagaaagaa

SEQ ID NO: 4236728 - DNA, 25 bp, Homo sapien
cggaaacagcagatgctattgcttc

SEQ ID NO: 4236729 - DNA, 25 bp, Homo sapien
gcagatgctattgcttccatgagca

SEQ ID NO: 4236730 - DNA, 25 bp, Homo sapien
aattccaaagcccttagcatcttcc

SEQ ID NO: 4236731 - DNA, 25 bp, Homo sapien
tgagaccacacagtgcttccagctt

SEQ ID NO: 4236732 - DNA, 25 bp, Homo sapien
ctgagagaagaccagaaatatccat

SEQ ID NO: 4236733 - DNA, 25 bp, Homo sapien
tcttcctgtcaaccctggcattgcc

SEQ ID NO: 4236734 - DNA, 25 bp, Homo sapien
gcttgcattcacaccgtccctctcc

SEQ ID NO: 4236735 - DNA, 25 bp, Homo sapien
ttccccgcatgacctggtgggtgca

SEQ ID NO: 4236736 - DNA, 25 bp, Homo sapien
gactttagtgccctcttccagtgtt

SEQ ID NO: 4236737 - DNA, 25 bp, Homo sapien
cgggcaaaaggatgttgagtccagt

SEQ ID NO: 4236738 - DNA, 25 bp, Homo sapien
tacgggcaaaaggatgttgagtcca

SEQ ID NO: 4236739 - DNA, 25 bp, Homo sapien
caaaaggatgttgagtccagtggaa

SEQ ID NO: 4236740 - DNA, 25 bp, Homo sapien
gatacgggcaaaaggatgttgagtc

SEQ ID NO: 4236741 - DNA, 25 bp, Homo sapien
ttgtttccaccagggagtgcgctga

SEQ ID NO: 4236742 - DNA, 25 bp, Homo sapien
gtttgtttccaccagggagtgcgct

SEQ ID NO: 4236743 - DNA, 25 bp, Homo sapien
tttgtttccaccagggagtgcgctg

SEQ ID NO: 4236744 - DNA, 25 bp, Homo sapien
gtttccaccagggagtgcgctgaag

SEQ ID NO: 4236745 - DNA, 25 bp, Homo sapien
tgccagggcacccagtgaagagcga

SEQ ID NO: 4236746 - DNA, 25 bp, Homo sapien
cacccagtgaagagcgaatgaatga

SEQ ID NO: 4236747 - DNA, 25 bp, Homo sapien
gaatgaacgagtgaacaccggactg

SEQ ID NO: 4236748 - DNA, 25 bp, Homo sapien
aatgaacgagtgaacaccggactgg

SEQ ID NO: 4236749 - DNA, 25 bp, Homo sapien
gacagcgagcctttcatgtgggcag

SEQ ID NO: 4236750 - DNA, 25 bp, Homo sapien
gcaatgcgaacctacgcctggagct

SEQ ID NO: 4236751 - DNA, 25 bp, Homo sapien
gctcctagtcccctgaatgaacaca

SEQ ID NO: 4236752 - DNA, 25 bp, Homo sapien
cccggagagcttgggaagcgaccta

SEQ ID NO: 4236753 - DNA, 25 bp, Homo sapien
cccggcattactcagcgccctgaac

SEQ ID NO: 4236754 - DNA, 25 bp, Homo sapien
ttactcagcgccctgaactgtctgc

SEQ ID NO: 4236755 - DNA, 25 bp, Homo sapien
cggcattactcagcgccctgaactg

SEQ ID NO: 4236756 - DNA, 25 bp, Homo sapien
cttcctggagcgcagcacaaaggtc

SEQ ID NO: 4236757 - DNA, 25 bp, Homo sapien
gcgctgcaccgtggctttgaggagt

SEQ ID NO: 4236758 - DNA, 25 bp, Homo sapien
ggccgtctctaagcagcctgcgagt

SEQ ID NO: 4236759 - DNA, 25 bp, Homo sapien
cagcgctgcgacacggtggaggcag

SEQ ID NO: 4236760 - DNA, 25 bp, Homo sapien
tcacaccacggagaggaaacagatg

SEQ ID NO: 4236761 - DNA, 25 bp, Homo sapien
actggtcagctcttcacatgcagcg

SEQ ID NO: 4236762 - DNA, 25 bp, Homo sapien
cctgctgcatgctgtcagggactat

SEQ ID NO: 4236763 - DNA, 25 bp, Homo sapien
cccatctgtgaaacgagagcactgg

SEQ ID NO: 4236764 - DNA, 25 bp, Homo sapien
catgcagcgtttgtgggatgaatcc

SEQ ID NO: 4236765 - DNA, 25 bp, Homo sapien
gtgtttgtcacaaggcggccccaca

SEQ ID NO: 4236766 - DNA, 25 bp, Homo sapien
gcaggctgagaacccgtgtttgtca

SEQ ID NO: 4236767 - DNA, 25 bp, Homo sapien
tctgagtacatcaacaacagggagt

SEQ ID NO: 4236768 - DNA, 25 bp, Homo sapien
gttgacttgagtagccctgagatgc

SEQ ID NO: 4236769 - DNA, 25 bp, Homo sapien
tcaccccagtatcccggtagctgac

SEQ ID NO: 4236770 - DNA, 25 bp, Homo sapien
acattgcacacgctcaggcctgcta

SEQ ID NO: 4236771 - DNA, 25 bp, Homo sapien
tattacaacattgcacacgctcagg

SEQ ID NO: 4236772 - DNA, 25 bp, Homo sapien
tattacaacattgcacacgctcagc

SEQ ID NO: 4236773 - DNA, 25 bp, Homo sapien
tgcacctgctcaaccctgcaatatt

SEQ ID NO: 4236774 - DNA, 25 bp, Homo sapien
cctgtgatccatggggtcatccctc

SEQ ID NO: 4236775 - DNA, 25 bp, Homo sapien
cccccgggatgacctgtgatccatg

SEQ ID NO: 4236776 - DNA, 25 bp, Homo sapien
aacaacccccgggatgacctgtgat

SEQ ID NO: 4236777 - DNA, 25 bp, Homo sapien
atggggtcatccctcacagcttgct

SEQ ID NO: 4236778 - DNA, 25 bp, Homo sapien
catcagctgcaacagatcccagctt

SEQ ID NO: 4236779 - DNA, 25 bp, Homo sapien
tcagctgcaacagatcccagcttct

SEQ ID NO: 4236780 - DNA, 25 bp, Homo sapien
cactcattttgtcattgtgatatgt

SEQ ID NO: 4236781 - DNA, 25 bp, Homo sapien
gaggacactcattttgtcattgtga

SEQ ID NO: 4236782 - DNA, 25 bp, Homo sapien
gctggactgggtgagtttacccttg

SEQ ID NO: 4236783 - DNA, 25 bp, Homo sapien
tccagaatcttctaacaatattaag

SEQ ID NO: 4236784 - DNA, 25 bp, Homo sapien
tagactagctcttcgtctctgagct

SEQ ID NO: 4236785 - DNA, 25 bp, Homo sapien
cgtgaggctgagtgctaatgtctct

SEQ ID NO: 4236786 - DNA, 25 bp, Homo sapien
ccagcccctttgctttgtaactttg

SEQ ID NO: 4236787 - DNA, 25 bp, Homo sapien
taactttgagatccccctcctagtc

SEQ ID NO: 4236788 - DNA, 25 bp, Homo sapien
ctactgtgaatggtctctgccccag

SEQ ID NO: 4236789 - DNA, 25 bp, Homo sapien
gctactgtgaatggtctctgcccca

SEQ ID NO: 4236790 - DNA, 25 bp, Homo sapien
gggtggtaccgcatgagtgtcctac

SEQ ID NO: 4236791 - DNA, 25 bp, Homo sapien
gtgggaagggcatccacatggaggg

SEQ ID NO: 4236792 - DNA, 25 bp, Homo sapien
ggaagggcatccacatggagggtgg

SEQ ID NO: 4236793 - DNA, 25 bp, Homo sapien
ggaagggtggtaccgcatgagtgtc

SEQ ID NO: 4236794 - DNA, 25 bp, Homo sapien
cgaggagggtgccaacataggaggg

SEQ ID NO: 4236795 - DNA, 25 bp, Homo sapien
ggcagcccagcatgtgtcggagacc

SEQ ID NO: 4236796 - DNA, 25 bp, Homo sapien
gtggagcgaggagggtgccaacata

SEQ ID NO: 4236797 - DNA, 25 bp, Homo sapien
tcggagaccaaagcagggtccgaag

SEQ ID NO: 4236798 - DNA, 25 bp, Homo sapien
atgggatccaggaacaggccaagag

SEQ ID NO: 4236799 - DNA, 25 bp, Homo sapien
aggaacaggccaagagaaccagctc

SEQ ID NO: 4236800 - DNA, 25 bp, Homo sapien
caggaacaggccaagagaaccagct

SEQ ID NO: 4236801 - DNA, 25 bp, Homo sapien
gatccaggaacaggccaagagaacc

SEQ ID NO: 4236802 - DNA, 25 bp, Homo sapien
agcaatgccggaagagattgagatt

SEQ ID NO: 4236803 - DNA, 25 bp, Homo sapien
tcagcaatgccggaagagattgaga

SEQ ID NO: 4236804 - DNA, 25 bp, Homo sapien
cagcaatgccggaagagattgagat

SEQ ID NO: 4236805 - DNA, 25 bp, Homo sapien
gcaatgccggaagagattgagattc

SEQ ID NO: 4236806 - DNA, 25 bp, Homo sapien
atgggggctcgcagctcctcaggcc

SEQ ID NO: 4236807 - DNA, 25 bp, Homo sapien
gtgggtaacaaaacatggacgctgc

SEQ ID NO: 4236808 - DNA, 25 bp, Homo sapien
cctcaggcctcggtatcacagaggt

SEQ ID NO: 4236809 - DNA, 25 bp, Homo sapien
cacagaggtcttagtcaacgggtgg

SEQ ID NO: 4236810 - DNA, 25 bp, Homo sapien
ttgggcacattgctggaagtgagaa

SEQ ID NO: 4236811 - DNA, 25 bp, Homo sapien
gcacattgctggaagtgagaagcat

SEQ ID NO: 4236812 - DNA, 25 bp, Homo sapien
gggttgggcacattgctggaagtga

SEQ ID NO: 4236813 - DNA, 25 bp, Homo sapien
ggcagggttgggcacattgctggaa

SEQ ID NO: 4236814 - DNA, 25 bp, Homo sapien
aatgttgtttaccacagatgtgttg

SEQ ID NO: 4236815 - DNA, 25 bp, Homo sapien
tcacatccgatggagtacttagggc

SEQ ID NO: 4236816 - DNA, 25 bp, Homo sapien
tagggccatgcttcttcctagagca

SEQ ID NO: 4236817 - DNA, 25 bp, Homo sapien
gtgttgttctctgatggctgacatt

SEQ ID NO: 4236818 - DNA, 25 bp, Homo sapien
ctgggttggagagtatgttcgaggg

SEQ ID NO: 4236819 - DNA, 25 bp, Homo sapien
cccacaagtcatgctggcatctccc

SEQ ID NO: 4236820 - DNA, 25 bp, Homo sapien
ccccacaagtcatgctggcatctcc

SEQ ID NO: 4236821 - DNA, 25 bp, Homo sapien
ggttggagagtatgttcgagggcag

SEQ ID NO: 4236822 - DNA, 25 bp, Homo sapien
cactaacgacgttcatcccatagag

SEQ ID NO: 4236823 - DNA, 25 bp, Homo sapien
taacgacgttcatcccatagagtcc

SEQ ID NO: 4236824 - DNA, 25 bp, Homo sapien
ggcctcactaacgacgttcatccca

SEQ ID NO: 4236825 - DNA, 25 bp, Homo sapien
ctcactaacgacgttcatcccatag

SEQ ID NO: 4236826 - DNA, 25 bp, Homo sapien
gcttgggctggtaaaaggcacacca

SEQ ID NO: 4236827 - DNA, 25 bp, Homo sapien
cttgggctggtaaaaggcacaccaa

SEQ ID NO: 4236828 - DNA, 25 bp, Homo sapien
tagcttgggctggtaaaaggcacac

SEQ ID NO: 4236829 - DNA, 25 bp, Homo sapien
agtagcttgggctggtaaaaggcac

SEQ ID NO: 4236830 - DNA, 25 bp, Homo sapien
cgctcaagggggtgttttcaagtct

SEQ ID NO: 4236831 - DNA, 25 bp, Homo sapien
tgctgaatccgtaaaaactgggtgt

SEQ ID NO: 4236832 - DNA, 25 bp, Homo sapien
tgccatcgtaaatctccagggagct

SEQ ID NO: 4236833 - DNA, 25 bp, Homo sapien
cttggaaagtgctgaatccgtaaaa

SEQ ID NO: 4236834 - DNA, 25 bp, Homo sapien
tcttctggatgatcccttgttagcc

SEQ ID NO: 4236835 - DNA, 25 bp, Homo sapien
tggtaagggccatgtggtaaatgtc

SEQ ID NO: 4236836 - DNA, 25 bp, Homo sapien
tacctgtgaagaagggctctatgtg

SEQ ID NO: 4236837 - DNA, 25 bp, Homo sapien
tctatgtggacactagttgcttgcc

SEQ ID NO: 4236838 - DNA, 25 bp, Homo sapien
ccacagcacgctgggtcctcaccag

SEQ ID NO: 4236839 - DNA, 25 bp, Homo sapien
cagacagcagaggagtcttccatag

SEQ ID NO: 4236840 - DNA, 25 bp, Homo sapien
ggagtcttccataggagtcaggtcc

SEQ ID NO: 4236841 - DNA, 25 bp, Homo sapien
taggagtcaggtcctgagggcaact

SEQ ID NO: 4236842 - DNA, 25 bp, Homo sapien
catctgtggttgaggctttaaggtg

SEQ ID NO: 4236843 - DNA, 25 bp, Homo sapien
gggcagacttggcatctgtggttga

SEQ ID NO: 4236844 - DNA, 25 bp, Homo sapien
aagttgagctttcaccttgctggcc

SEQ ID NO: 4236845 - DNA, 25 bp, Homo sapien
ccctggctgggcagacttggcatct

SEQ ID NO: 4236846 - DNA, 25 bp, Homo sapien
catggtacctatgaccaaggcttag

SEQ ID NO: 4236847 - DNA, 25 bp, Homo sapien
ttgtccttttggaccatggtaccta

SEQ ID NO: 4236848 - DNA, 25 bp, Homo sapien
ttttggaccatggtacctatgacca

SEQ ID NO: 4236849 - DNA, 25 bp, Homo sapien
tgaccaaggcttaggccttttctgt

SEQ ID NO: 4236850 - DNA, 25 bp, Homo sapien
tcagtctccgtgtgttccccacaaa

SEQ ID NO: 4236851 - DNA, 25 bp, Homo sapien
ttccccacaaatactcgtggtttca

SEQ ID NO: 4236852 - DNA, 25 bp, Homo sapien
atactcgtggtttcatttcgattgc

SEQ ID NO: 4236853 - DNA, 25 bp, Homo sapien
gattgcattgctcaatgttttccag

SEQ ID NO: 4236854 - DNA, 25 bp, Homo sapien
gggcagtcaaggcctaggatctgca

SEQ ID NO: 4236855 - DNA, 25 bp, Homo sapien
ggcagtcaaggcctaggatctgcac

SEQ ID NO: 4236856 - DNA, 25 bp, Homo sapien
ttgggcagtcaaggcctaggatctg

SEQ ID NO: 4236857 - DNA, 25 bp, Homo sapien
tgggcagtcaaggcctaggatctgc

SEQ ID NO: 4236858 - DNA, 25 bp, Homo sapien
cctgcagtagtgcatgctctccaca

SEQ ID NO: 4236859 - DNA, 25 bp, Homo sapien
gataaagtgtttttgcctgcagtag

SEQ ID NO: 4236860 - DNA, 25 bp, Homo sapien
ccttttcctacacagtccactgatg

SEQ ID NO: 4236861 - DNA, 25 bp, Homo sapien
cttggtctcctactggataaagtgt

SEQ ID NO: 4236862 - DNA, 25 bp, Homo sapien
ctgatatgagtccaatttcagtggg

SEQ ID NO: 4236863 - DNA, 25 bp, Homo sapien
gctgatatgagtccaatttcagtgg

SEQ ID NO: 4236864 - DNA, 25 bp, Homo sapien
tatgagtccaatttcagtgggggcc

SEQ ID NO: 4236865 - DNA, 25 bp, Homo sapien
tcagctgatatgagtccaatttcag

SEQ ID NO: 4236866 - DNA, 25 bp, Homo sapien
taggctgagctctgcagttgtaggt

SEQ ID NO: 4236867 - DNA, 25 bp, Homo sapien
ctgagctctgcagttgtaggtcccc

SEQ ID NO: 4236868 - DNA, 25 bp, Homo sapien
ctaggctgagctctgcagttgtagg

SEQ ID NO: 4236869 - DNA, 25 bp, Homo sapien
agctctgcagttgtaggtcccctac

SEQ ID NO: 4236870 - DNA, 25 bp, Homo sapien
cgtcagcgtttttcctcatagttgg

SEQ ID NO: 4236871 - DNA, 25 bp, Homo sapien
acaatgcagcgcctccgtcagcgtt

SEQ ID NO: 4236872 - DNA, 25 bp, Homo sapien
cgtttttcctcatagttggagctgg

SEQ ID NO: 4236873 - DNA, 25 bp, Homo sapien
ctgtgggttgacctagctttccaca

SEQ ID NO: 4236874 - DNA, 25 bp, Homo sapien
ctcttgtatccatccatacatagcc

SEQ ID NO: 4236875 - DNA, 25 bp, Homo sapien
catccatacatagcctctatcaaga

SEQ ID NO: 4236876 - DNA, 25 bp, Homo sapien
tatccatccatacatagcctctatc

SEQ ID NO: 4236877 - DNA, 25 bp, Homo sapien
catacatagcctctatcaagagcct

SEQ ID NO: 4236878 - DNA, 25 bp, Homo sapien
acccttggtgaaggtgctgagaacc

SEQ ID NO: 4236879 - DNA, 25 bp, Homo sapien
gcagccgactcccaaacctggaggt

SEQ ID NO: 4236880 - DNA, 25 bp, Homo sapien
cttgacccttggtgaaggtgctgag

SEQ ID NO: 4236881 - DNA, 25 bp, Homo sapien
tcctcagcattcccaggcagcctgg

SEQ ID NO: 4236882 - DNA, 25 bp, Homo sapien
ttcttctaccagctggacactttga

SEQ ID NO: 4236883 - DNA, 25 bp, Homo sapien
aatgccagaggatcaggccctacag

SEQ ID NO: 4236884 - DNA, 25 bp, Homo sapien
gtttctccccaaccaggcgttgaca

SEQ ID NO: 4236885 - DNA, 25 bp, Homo sapien
ggccctacagctgactcttcttcta

SEQ ID NO: 4236886 - DNA, 25 bp, Homo sapien
gattccaaccagcattctagacgct

SEQ ID NO: 4236887 - DNA, 25 bp, Homo sapien
tcagaaacagatcgggctcctgggc

SEQ ID NO: 4236888 - DNA, 25 bp, Homo sapien
acagacttgccttattccggtccag

SEQ ID NO: 4236889 - DNA, 25 bp, Homo sapien
cagctgcgtaaccagggtgattcca

SEQ ID NO: 4236890 - DNA, 25 bp, Homo sapien
cctgctgccgcggttaggcctgact

SEQ ID NO: 4236891 - DNA, 25 bp, Homo sapien
ctgccgcggttaggcctgactgtcc

SEQ ID NO: 4236892 - DNA, 25 bp, Homo sapien
taattatccttatgtcttactggcc

SEQ ID NO: 4236893 - DNA, 25 bp, Homo sapien
tccttatgtcttactggcccgtttc

SEQ ID NO: 4236894 - DNA, 25 bp, Homo sapien
cagtgcctgttctactctttctcgc

SEQ ID NO: 4236895 - DNA, 25 bp, Homo sapien
gattttgtgatttttcgcctctgct

SEQ ID NO: 4236896 - DNA, 25 bp, Homo sapien
gtgatttttcgcctctgctgagcca

SEQ ID NO: 4236897 - DNA, 25 bp, Homo sapien
tttctcgctttgagtgaaaattgta

SEQ ID NO: 4236898 - DNA, 25 bp, Homo sapien
aactctcccttacccttgttgctct

SEQ ID NO: 4236899 - DNA, 25 bp, Homo sapien
tgatctctagttccagttgcagaag

SEQ ID NO: 4236900 - DNA, 25 bp, Homo sapien
aaaacgtcctcaggcacatccatca

SEQ ID NO: 4236901 - DNA, 25 bp, Homo sapien
ccattgatctctagttccagttgca

SEQ ID NO: 4236902 - DNA, 25 bp, Homo sapien
aaagaccggattgaatgagacttat

SEQ ID NO: 4236903 - DNA, 25 bp, Homo sapien
tgagacttattttggtttgcttctt

SEQ ID NO: 4236904 - DNA, 25 bp, Homo sapien
aagaccggattgaatgagacttatt

SEQ ID NO: 4236905 - DNA, 25 bp, Homo sapien
gagacttattttggtttgcttcttc

SEQ ID NO: 4236906 - DNA, 25 bp, Homo sapien
tgtttgacacttccggtgatggtgg

SEQ ID NO: 4236907 - DNA, 25 bp, Homo sapien
tcacgttcatgggcagaataagcgt

SEQ ID NO: 4236908 - DNA, 25 bp, Homo sapien
tggatgtagaaacctcacgttcatg

SEQ ID NO: 4236909 - DNA, 25 bp, Homo sapien
tgaggctgatgtttgacacttccgg

SEQ ID NO: 4236910 - DNA, 25 bp, Homo sapien
aggctccacgtagcatgtccagaaa

SEQ ID NO: 4236911 - DNA, 25 bp, Homo sapien
gaggctacggacttaatagctccta

SEQ ID NO: 4236912 - DNA, 25 bp, Homo sapien
gaaagggcccaatgaggctacggac

SEQ ID NO: 4236913 - DNA, 25 bp, Homo sapien
tattttaaaggctccacgtagcatg

SEQ ID NO: 4236914 - DNA, 25 bp, Homo sapien
gggaatgctttgaaccgggcatcaa

SEQ ID NO: 4236915 - DNA, 25 bp, Homo sapien
aggcacggaccagaccaggagattt

SEQ ID NO: 4236916 - DNA, 25 bp, Homo sapien
gggccggattccaagtcagtctaaa

SEQ ID NO: 4236917 - DNA, 25 bp, Homo sapien
tcgctgcaggtcttgtaatgtccac

SEQ ID NO: 4236918 - DNA, 25 bp, Homo sapien
gatgctccgaaggaatttgtgttgg

SEQ ID NO: 4236919 - DNA, 25 bp, Homo sapien
gtcagatgctccgaaggaatttgtg

SEQ ID NO: 4236920 - DNA, 25 bp, Homo sapien
tttattcctgctaccgaaacagcca

SEQ ID NO: 4236921 - DNA, 25 bp, Homo sapien
tggaggcctgttgccgaattgtttg

SEQ ID NO: 4236922 - DNA, 25 bp, Homo sapien
tgttgttgcacagggttgactatat

SEQ ID NO: 4236923 - DNA, 25 bp, Homo sapien
cagggttgactatataagaggccaa

SEQ ID NO: 4236924 - DNA, 25 bp, Homo sapien
tgactatataagaggccaattccat

SEQ ID NO: 4236925 - DNA, 25 bp, Homo sapien
tgcacagggttgactatataagagg

SEQ ID NO: 4236926 - DNA, 25 bp, Homo sapien
ctttgcttctggagccagttccagg

SEQ ID NO: 4236927 - DNA, 25 bp, Homo sapien
gagccagttccaggctggggtccat

SEQ ID NO: 4236928 - DNA, 25 bp, Homo sapien
tggagccagttccaggctggggtcc

SEQ ID NO: 4236929 - DNA, 25 bp, Homo sapien
tctggagccagttccaggctggggt

SEQ ID NO: 4236930 - DNA, 25 bp, Homo sapien
cacctgagtagggatgatcttctga

SEQ ID NO: 4236931 - DNA, 25 bp, Homo sapien
actgtacccggagcctgcccgcagc

SEQ ID NO: 4236932 - DNA, 25 bp, Homo sapien
cgcagcaaaggactcccagctgtct

SEQ ID NO: 4236933 - DNA, 25 bp, Homo sapien
tcttctgaggggcactgtacccgga

SEQ ID NO: 4236934 - DNA, 25 bp, Homo sapien
ttaccccttgataaatttcacaatc

SEQ ID NO: 4236935 - DNA, 25 bp, Homo sapien
caatcaagcaagctaaaaatggaga

SEQ ID NO: 4236936 - DNA, 25 bp, Homo sapien
cagacaaggtctggaccactctctg

SEQ ID NO: 4236937 - DNA, 25 bp, Homo sapien
gtgtgtctccaccagacaaggtctg

SEQ ID NO: 4236938 - DNA, 25 bp, Homo sapien
aagatagaaattgaacacctgactt

SEQ ID NO: 4236939 - DNA, 25 bp, Homo sapien
ctgacttgtggacagcacctctaaa

SEQ ID NO: 4236940 - DNA, 25 bp, Homo sapien
gacttgtggacagcacctctaaaca

SEQ ID NO: 4236941 - DNA, 25 bp, Homo sapien
agatagaaattgaacacctgacttg

SEQ ID NO: 4236942 - DNA, 25 bp, Homo sapien
ggccacatgtttcctgggacatgtg

SEQ ID NO: 4236943 - DNA, 25 bp, Homo sapien
tgagtggccttctgtccggagagca

SEQ ID NO: 4236944 - DNA, 25 bp, Homo sapien
tctggggccacatgtttcctgggac

SEQ ID NO: 4236945 - DNA, 25 bp, Homo sapien
actgagtggccttctgtccggagag

SEQ ID NO: 4236946 - DNA, 25 bp, Homo sapien
catgcaaacagatggaaacgggtgt

SEQ ID NO: 4236947 - DNA, 25 bp, Homo sapien
tatggatatggtagtgcctggctca

SEQ ID NO: 4236948 - DNA, 25 bp, Homo sapien
cccaaggtacaagtggcaggcagcg

SEQ ID NO: 4236949 - DNA, 25 bp, Homo sapien
gaagtcatttgtaacctggccccag

SEQ ID NO: 4236950 - DNA, 25 bp, Homo sapien
gagtgtttgaaacttcccgcatgtg

SEQ ID NO: 4236951 - DNA, 25 bp, Homo sapien
aagtgggacctgttctatatggacc

SEQ ID NO: 4236952 - DNA, 25 bp, Homo sapien
tctggtttatgctaacagtcctgcc

SEQ ID NO: 4236953 - DNA, 25 bp, Homo sapien
tgagaattacccagaggaaacagtc

SEQ ID NO: 4236954 - DNA, 25 bp, Homo sapien
aactaagaggcccaattgctgggag

SEQ ID NO: 4236955 - DNA, 25 bp, Homo sapien
gacaaatggtgtttccagggccaca

SEQ ID NO: 4236956 - DNA, 25 bp, Homo sapien
tccctagagaagacggcagtgcaac

SEQ ID NO: 4236957 - DNA, 25 bp, Homo sapien
caactgaaagtggaactaagaggcc

SEQ ID NO: 4236958 - DNA, 25 bp, Homo sapien
catcaaccgcttctgagggctccat

SEQ ID NO: 4236959 - DNA, 25 bp, Homo sapien
aatcatcaaccgcttctgagggctc

SEQ ID NO: 4236960 - DNA, 25 bp, Homo sapien
cctgacaatcatcaaccgcttctga

SEQ ID NO: 4236961 - DNA, 25 bp, Homo sapien
gacaatcatcaaccgcttctgaggg

SEQ ID NO: 4236962 - DNA, 25 bp, Homo sapien
aatgtgcttagctgagtggagaatg

SEQ ID NO: 4236963 - DNA, 25 bp, Homo sapien
cgaatgtgcttagctgagtggagaa

SEQ ID NO: 4236964 - DNA, 25 bp, Homo sapien
tggagaatgatttctcggtgttgta

SEQ ID NO: 4236965 - DNA, 25 bp, Homo sapien
atttctcggtgttgtatttgctctg

SEQ ID NO: 4236966 - DNA, 25 bp, Homo sapien
attgctaagatgtccattgcaatca

SEQ ID NO: 4236967 - DNA, 25 bp, Homo sapien
tgctaagatgtccattgcaatcaga

SEQ ID NO: 4236968 - DNA, 25 bp, Homo sapien
ttgctaagatgtccattgcaatcag

SEQ ID NO: 4236969 - DNA, 25 bp, Homo sapien
tgttcccttaagctgtagcccttgg

SEQ ID NO: 4236970 - DNA, 25 bp, Homo sapien
tgattttcatgttcccttaagctgt

SEQ ID NO: 4236971 - DNA, 25 bp, Homo sapien
ttcatgttcccttaagctgtagccc

SEQ ID NO: 4236972 - DNA, 25 bp, Homo sapien
gccagagatgtgaccaggagtggcc

SEQ ID NO: 4236973 - DNA, 25 bp, Homo sapien
gctccctggcaacctcatctattgc

SEQ ID NO: 4236974 - DNA, 25 bp, Homo sapien
tcatgccgccattctcaagaggggc

SEQ ID NO: 4236975 - DNA, 25 bp, Homo sapien
ctggcaacctcatctattgcctgtt

SEQ ID NO: 4236976 - DNA, 25 bp, Homo sapien
caggagaggccgatggcaggcagtt

SEQ ID NO: 4236977 - DNA, 25 bp, Homo sapien
gtcaccgccccagactgtgggaaaa

SEQ ID NO: 4236978 - DNA, 25 bp, Homo sapien
tgggaaaacgctgctccgctcacct

SEQ ID NO: 4236979 - DNA, 25 bp, Homo sapien
gccgggaaacaggagccgcctgccg

SEQ ID NO: 4236980 - DNA, 25 bp, Homo sapien
tgtgtgagcgccatgtgtcaccgcc

SEQ ID NO: 4236981 - DNA, 25 bp, Homo sapien
agtggatgctgctacgagtagttcc

SEQ ID NO: 4236982 - DNA, 25 bp, Homo sapien
gatgccagttgacatggacatggat

SEQ ID NO: 4236983 - DNA, 25 bp, Homo sapien
tggatgctgctacgagtagttccag

SEQ ID NO: 4236984 - DNA, 25 bp, Homo sapien
ctgctacgagtagttccagatgcca

SEQ ID NO: 4236985 - DNA, 25 bp, Homo sapien
ttatggcaattacatcaacaggtcg

SEQ ID NO: 4236986 - DNA, 25 bp, Homo sapien
ttacatcaacaggtcggaagggcag

SEQ ID NO: 4236987 - DNA, 25 bp, Homo sapien
aacaggtcggaagggcagcactttc

SEQ ID NO: 4236988 - DNA, 25 bp, Homo sapien
tggaatcttcaattatggcaattac

SEQ ID NO: 4236989 - DNA, 25 bp, Homo sapien
catcttgatgtcttctgctaagcca

SEQ ID NO: 4236990 - DNA, 25 bp, Homo sapien
gttactcaacatcccttctatcagg

SEQ ID NO: 4236991 - DNA, 25 bp, Homo sapien
tgctaagccatccttgaggacccca

SEQ ID NO: 4236992 - DNA, 25 bp, Homo sapien
caagaagctcatagttcacactggt

SEQ ID NO: 4236993 - DNA, 25 bp, Homo sapien
gaggctacctgtggactgcaatggc

SEQ ID NO: 4236994 - DNA, 25 bp, Homo sapien
aaaagtgtccagtcgcttccaaagc

SEQ ID NO: 4236995 - DNA, 25 bp, Homo sapien
gatttccttagtgagccagctatac

SEQ ID NO: 4236996 - DNA, 25 bp, Homo sapien
ggcaggttctgcgtacttctcttaa

SEQ ID NO: 4236997 - DNA, 25 bp, Homo sapien
tcactcagtactcggtggagaagag

SEQ ID NO: 4236998 - DNA, 25 bp, Homo sapien
ctcagtactcggtggagaagagcaa

SEQ ID NO: 4236999 - DNA, 25 bp, Homo sapien
gcttcactcagtactcggtggagaa

SEQ ID NO: 4237000 - DNA, 25 bp, Homo sapien
ggcttcactcagtactcggtggaga

SEQ ID NO: 4237001 - DNA, 25 bp, Homo sapien
ctgttggactgaatgacctcatagc

SEQ ID NO: 4237002 - DNA, 25 bp, Homo sapien
gcactgtctgtcagcgactctttca

SEQ ID NO: 4237003 - DNA, 25 bp, Homo sapien
ctgaatgacctcatagcctgagctg

SEQ ID NO: 4237004 - DNA, 25 bp, Homo sapien
gcctgagctgttctcatggtgttgg

SEQ ID NO: 4237005 - DNA, 25 bp, Homo sapien
tttggcagacgaagcacagcccctc

SEQ ID NO: 4237006 - DNA, 25 bp, Homo sapien
cccacttgcccctgaatatctttct

SEQ ID NO: 4237007 - DNA, 25 bp, Homo sapien
tccggtgcccttaatcaaacccaca

SEQ ID NO: 4237008 - DNA, 25 bp, Homo sapien
tctacccatcttcctagagacaggt

SEQ ID NO: 4237009 - DNA, 25 bp, Homo sapien
aagatgtcgggagcctgagctcctg

SEQ ID NO: 4237010 - DNA, 25 bp, Homo sapien
acttccttcgtatgactgctgtaac

SEQ ID NO: 4237011 - DNA, 25 bp, Homo sapien
gtcgcccacttccttcgtatgactg

SEQ ID NO: 4237012 - DNA, 25 bp, Homo sapien
gtaacaagatgtcgggagcctgagc

SEQ ID NO: 4237013 - DNA, 25 bp, Homo sapien
tttcccgtgggaaatcaccacagcc

SEQ ID NO: 4237014 - DNA, 25 bp, Homo sapien
ggttttcaaaagtgtcgttcacatg

SEQ ID NO: 4237015 - DNA, 25 bp, Homo sapien
tcctctgccgattacagtgacatga

SEQ ID NO: 4237016 - DNA, 25 bp, Homo sapien
tgatgtcgtttttattgaggcaaga

SEQ ID NO: 4237017 - DNA, 25 bp, Homo sapien
ttcccaggttagctcttgtctcatc

SEQ ID NO: 4237018 - DNA, 25 bp, Homo sapien
gggtgaatttgcaaggactccacac

SEQ ID NO: 4237019 - DNA, 25 bp, Homo sapien
tacagcgtggtcaacctgccatttg

SEQ ID NO: 4237020 - DNA, 25 bp, Homo sapien
gagatttgtcctcattgagacttcc

SEQ ID NO: 4237021 - DNA, 25 bp, Homo sapien
ggatgctaacttgtacccttgtgca

SEQ ID NO: 4237022 - DNA, 25 bp, Homo sapien
aggagggtatccctgagggatcaca

SEQ ID NO: 4237023 - DNA, 25 bp, Homo sapien
cctgagggatcacagggatgctaac

SEQ ID NO: 4237024 - DNA, 25 bp, Homo sapien
ttcagtgaggcgagcctgcaaggcc

SEQ ID NO: 4237025 - DNA, 25 bp, Homo sapien
agctactttgaattgctacaacttt

SEQ ID NO: 4237026 - DNA, 25 bp, Homo sapien
atttttggatgtagaaagggatagg

SEQ ID NO: 4237027 - DNA, 25 bp, Homo sapien
tggatgtagaaagggataggtgaga

SEQ ID NO: 4237028 - DNA, 25 bp, Homo sapien
taaagctactttgaattgctacaac

SEQ ID NO: 4237029 - DNA, 25 bp, Homo sapien
ttcggttgggtttatagagttgtga

SEQ ID NO: 4237030 - DNA, 25 bp, Homo sapien
aagggacttgctcagctgcccacag

SEQ ID NO: 4237031 - DNA, 25 bp, Homo sapien
gggagggaagggacttgctcagctg

SEQ ID NO: 4237032 - DNA, 25 bp, Homo sapien
cagctgggagctgttttcaccacac

SEQ ID NO: 4237033 - DNA, 25 bp, Homo sapien
ggggtgtagggtgggcagaagccag

SEQ ID NO: 4237034 - DNA, 25 bp, Homo sapien
caactcgtttattgccactttggga

SEQ ID NO: 4237035 - DNA, 25 bp, Homo sapien
ttcacacacacgtttttagataggg

SEQ ID NO: 4237036 - DNA, 25 bp, Homo sapien
gctaaagcagcctcgtgggtcaaat

SEQ ID NO: 4237037 - DNA, 25 bp, Homo sapien
gactggtggaatgggcaagtaactt

SEQ ID NO: 4237038 - DNA, 25 bp, Homo sapien
caaatctttcagaaccagtgcctgc

SEQ ID NO: 4237039 - DNA, 25 bp, Homo sapien
tgctggtcggccctcattaactact

SEQ ID NO: 4237040 - DNA, 25 bp, Homo sapien
aatacactgacccagattcttctga

SEQ ID NO: 4237041 - DNA, 25 bp, Homo sapien
taactactgggttatgccactccct

SEQ ID NO: 4237042 - DNA, 25 bp, Homo sapien
gcctatgaagttaccctcctttctg

SEQ ID NO: 4237043 - DNA, 25 bp, Homo sapien
cctcttggtgaaaggtgatgagcct

SEQ ID NO: 4237044 - DNA, 25 bp, Homo sapien
tgtgtggtgaaaatcctcttggtga

SEQ ID NO: 4237045 - DNA, 25 bp, Homo sapien
gccccaataagctttgcaagcttct

SEQ ID NO: 4237046 - DNA, 25 bp, Homo sapien
gctgcagtttgacatcagccggccg

SEQ ID NO: 4237047 - DNA, 25 bp, Homo sapien
ctggagccggagcacgtgccaggat

SEQ ID NO: 4237048 - DNA, 25 bp, Homo sapien
ccaggatgttttattgccgccgcgg

SEQ ID NO: 4237049 - DNA, 25 bp, Homo sapien
agtttgacatcagccggccggcgtg

SEQ ID NO: 4237050 - DNA, 25 bp, Homo sapien
taccgacacatctaaagttcccgct

SEQ ID NO: 4237051 - DNA, 25 bp, Homo sapien
cacatctaaagttcccgctcagact

SEQ ID NO: 4237052 - DNA, 25 bp, Homo sapien
ttaccgacacatctaaagttcccgc

SEQ ID NO: 4237053 - DNA, 25 bp, Homo sapien
cgacacatctaaagttcccgctcag

SEQ ID NO: 4237054 - DNA, 25 bp, Homo sapien
ctctcatatgtaacagagctgcttt

SEQ ID NO: 4237055 - DNA, 25 bp, Homo sapien
ctacaacgtcaatcaaaaggatttt

SEQ ID NO: 4237056 - DNA, 25 bp, Homo sapien
ttggtcttgatcttgtctatttctt

SEQ ID NO: 4237057 - DNA, 25 bp, Homo sapien
gagctgctttgactgtagtaagttc

SEQ ID NO: 4237058 - DNA, 25 bp, Homo sapien
ccacagtaactttcagccaatggga

SEQ ID NO: 4237059 - DNA, 25 bp, Homo sapien
ccattggccgccaggcacaaggtct

SEQ ID NO: 4237060 - DNA, 25 bp, Homo sapien
gagacacgcggcaccgctcgtggac

SEQ ID NO: 4237061 - DNA, 25 bp, Homo sapien
ccaggcacaaggtctggcggccaat

SEQ ID NO: 4237062 - DNA, 25 bp, Homo sapien
cgcgaacggctcgtgtgaaacttcc

SEQ ID NO: 4237063 - DNA, 25 bp, Homo sapien
ctgcacgcgaacggctcgtgtgaaa

SEQ ID NO: 4237064 - DNA, 25 bp, Homo sapien
cacgcgaacggctcgtgtgaaactt

SEQ ID NO: 4237065 - DNA, 25 bp, Homo sapien
gaacggctcgtgtgaaacttcccaa

SEQ ID NO: 4237066 - DNA, 25 bp, Homo sapien
tggcggcctctatatatatctggga

SEQ ID NO: 4237067 - DNA, 25 bp, Homo sapien
cgctgttatcagcaccagctccgga

SEQ ID NO: 4237068 - DNA, 25 bp, Homo sapien
ttggtgatcagtagcgctgttccag

SEQ ID NO: 4237069 - DNA, 25 bp, Homo sapien
tcagtagcgctgttccaggaccaag

SEQ ID NO: 4237070 - DNA, 25 bp, Homo sapien
gagactttcacaaaactactgagca

SEQ ID NO: 4237071 - DNA, 25 bp, Homo sapien
gagcaagtgctgagggtttattata

SEQ ID NO: 4237072 - DNA, 25 bp, Homo sapien
cttgagactttcacaaaactactga

SEQ ID NO: 4237073 - DNA, 25 bp, Homo sapien
tgagcaagtgctgagggtttattat

SEQ ID NO: 4237074 - DNA, 25 bp, Homo sapien
agcagccaccggggacgaggaattt

SEQ ID NO: 4237075 - DNA, 25 bp, Homo sapien
gggtagcagccaccggggacgagga

SEQ ID NO: 4237076 - DNA, 25 bp, Homo sapien
gtagcagccaccggggacgaggaat

SEQ ID NO: 4237077 - DNA, 25 bp, Homo sapien
ctggggtagcagccaccggggacga

SEQ ID NO: 4237078 - DNA, 25 bp, Homo sapien
tgtctttggtttatccggtgtcgtg

SEQ ID NO: 4237079 - DNA, 25 bp, Homo sapien
ggtttatccggtgtcgtgttgacac

SEQ ID NO: 4237080 - DNA, 25 bp, Homo sapien
ttggtttatccggtgtcgtgttgac

SEQ ID NO: 4237081 - DNA, 25 bp, Homo sapien
ttatccggtgtcgtgttgacactgg

SEQ ID NO: 4237082 - DNA, 25 bp, Homo sapien
ctgcaaataaaaaaaagagttctgt

SEQ ID NO: 4237083 - DNA, 25 bp, Homo sapien
tgcaaataaaaaaaagagttctgtg

SEQ ID NO: 4237084 - DNA, 25 bp, Homo sapien
gctcttcgtcttttctccataatag

SEQ ID NO: 4237085 - DNA, 25 bp, Homo sapien
cttcagagcatccaaaatcagtgtt

SEQ ID NO: 4237086 - DNA, 25 bp, Homo sapien
ttttctccataataggctttgatga

SEQ ID NO: 4237087 - DNA, 25 bp, Homo sapien
ttcgtcttttctccataataggctt

SEQ ID NO: 4237088 - DNA, 25 bp, Homo sapien
tctctggaccccagcgaataaggcc

SEQ ID NO: 4237089 - DNA, 25 bp, Homo sapien
cacggagcgcaagcattatctctgg

SEQ ID NO: 4237090 - DNA, 25 bp, Homo sapien
ttaaaagagcgagcagcatttcccc

SEQ ID NO: 4237091 - DNA, 25 bp, Homo sapien
gagaacgcagtaccagcgagtgcca

SEQ ID NO: 4237092 - DNA, 25 bp, Homo sapien
tctccagcttggaatgccgcgagct

SEQ ID NO: 4237093 - DNA, 25 bp, Homo sapien
atctgcgcccgctgcaggttccgga

SEQ ID NO: 4237094 - DNA, 25 bp, Homo sapien
gcccgctgcaggttccggaggtgct

SEQ ID NO: 4237095 - DNA, 25 bp, Homo sapien
ttctccagcttggaatgccgcgagc

SEQ ID NO: 4237096 - DNA, 25 bp, Homo sapien
gcatttaaacctatctcagccccag

SEQ ID NO: 4237097 - DNA, 25 bp, Homo sapien
ccgtgaaactgcctccggcagggag

SEQ ID NO: 4237098 - DNA, 25 bp, Homo sapien
gaaggagtgctaaaccagtgacccc

SEQ ID NO: 4237099 - DNA, 25 bp, Homo sapien
cccgattccctgtagctgcatttaa

SEQ ID NO: 4237100 - DNA, 25 bp, Homo sapien
tccccagcacacttgggtctgtgct

SEQ ID NO: 4237101 - DNA, 25 bp, Homo sapien
acacttgggtctgtgctcagcgcag

SEQ ID NO: 4237102 - DNA, 25 bp, Homo sapien
gcactcgctgaagccggctcggtac

SEQ ID NO: 4237103 - DNA, 25 bp, Homo sapien
aagccggctcggtacttccccagca

SEQ ID NO: 4237104 - DNA, 25 bp, Homo sapien
acaggaagcgggtcacctcgttcat

SEQ ID NO: 4237105 - DNA, 25 bp, Homo sapien
gacaggaagcgggtcacctcgttca

SEQ ID NO: 4237106 - DNA, 25 bp, Homo sapien
taacgccctcgcacgtggacaggaa

SEQ ID NO: 4237107 - DNA, 25 bp, Homo sapien
ctcggtattaacgccctcgcacgtg

SEQ ID NO: 4237108 - DNA, 25 bp, Homo sapien
tcatggcattgatctgggtcatgca

SEQ ID NO: 4237109 - DNA, 25 bp, Homo sapien
catgcagttggccaggtggccgagc

SEQ ID NO: 4237110 - DNA, 25 bp, Homo sapien
gtaggtcatggcattgatctgggtc

SEQ ID NO: 4237111 - DNA, 25 bp, Homo sapien
tgatctgggtcatgcagttggccag

SEQ ID NO: 4237112 - DNA, 25 bp, Homo sapien
ggcggcgcctgcaaggcggggtgcg

SEQ ID NO: 4237113 - DNA, 25 bp, Homo sapien
tggcggcgcctgcaaggcggggtgc

SEQ ID NO: 4237114 - DNA, 25 bp, Homo sapien
gcggcgcctgcaaggcggggtgcgg

SEQ ID NO: 4237115 - DNA, 25 bp, Homo sapien
gcgccgccgggagggggcgccgcgc

SEQ ID NO: 4237116 - DNA, 25 bp, Homo sapien
ggcgccgcgcccccggggatgggca

SEQ ID NO: 4237117 - DNA, 25 bp, Homo sapien
gcgccgcgcccccggggatgggcac

SEQ ID NO: 4237118 - DNA, 25 bp, Homo sapien
cttgcagggggcgccgccgggaggg

SEQ ID NO: 4237119 - DNA, 25 bp, Homo sapien
gcctccaaacaccttagccgcctct

SEQ ID NO: 4237120 - DNA, 25 bp, Homo sapien
atgacagggccgctgtgcgcgaagg

SEQ ID NO: 4237121 - DNA, 25 bp, Homo sapien
ggccccgttgggaatgaggaaagca

SEQ ID NO: 4237122 - DNA, 25 bp, Homo sapien
ggagccggtaccacctggaagcctc

SEQ ID NO: 4237123 - DNA, 25 bp, Homo sapien
tttaggaggaggggtggcctgagcc

SEQ ID NO: 4237124 - DNA, 25 bp, Homo sapien
taggaggaggggtggcctgagcccc

SEQ ID NO: 4237125 - DNA, 25 bp, Homo sapien
gagtttaggaggaggggtggcctga

SEQ ID NO: 4237126 - DNA, 25 bp, Homo sapien
agtttaggaggaggggtggcctgag

SEQ ID NO: 4237127 - DNA, 25 bp, Homo sapien
ggcgcaatccaatatgaacatataa

SEQ ID NO: 4237128 - DNA, 25 bp, Homo sapien
taatacagctctctctacaaaaagt

SEQ ID NO: 4237129 - DNA, 25 bp, Homo sapien
cttttataatacaaaggcgcaatcc

SEQ ID NO: 4237130 - DNA, 25 bp, Homo sapien
taaaaaacgaaatgtcatctgagct

SEQ ID NO: 4237131 - DNA, 25 bp, Homo sapien
tattctggaagaatcagttcgaaga

SEQ ID NO: 4237132 - DNA, 25 bp, Homo sapien
ttctggaagaatcagttcgaagaca

SEQ ID NO: 4237133 - DNA, 25 bp, Homo sapien
attctggaagaatcagttcgaagac

SEQ ID NO: 4237134 - DNA, 25 bp, Homo sapien
cgcggctgatgtgtctggtctcgca

SEQ ID NO: 4237135 - DNA, 25 bp, Homo sapien
ggtctcgcagggctcgtggttttca

SEQ ID NO: 4237136 - DNA, 25 bp, Homo sapien
tctgacaaaatctgacaagcctttg

SEQ ID NO: 4237137 - DNA, 25 bp, Homo sapien
taaagctgtccgctttgagttagga

SEQ ID NO: 4237138 - DNA, 25 bp, Homo sapien
agtggaaaactgctgtctccccgat

SEQ ID NO: 4237139 - DNA, 25 bp, Homo sapien
gctgtctccccgatcattcctatga

SEQ ID NO: 4237140 - DNA, 25 bp, Homo sapien
cattcctatgatagagccgctctcc

SEQ ID NO: 4237141 - DNA, 25 bp, Homo sapien
ggtccgaaggtatcttgagtggaaa

SEQ ID NO: 4237142 - DNA, 25 bp, Homo sapien
ggctctcgtgttgaccgaagagcac

SEQ ID NO: 4237143 - DNA, 25 bp, Homo sapien
ttcggcgcctttcccgctccggatg

SEQ ID NO: 4237144 - DNA, 25 bp, Homo sapien
agggtccccattccagaaacgcgtg

SEQ ID NO: 4237145 - DNA, 25 bp, Homo sapien
ccggagtcgcgcttctgcgcttgga

SEQ ID NO: 4237146 - DNA, 25 bp, Homo sapien
gtgtgaacatgtattgggcatagca

SEQ ID NO: 4237147 - DNA, 25 bp, Homo sapien
tgggcatagcatctcatagcccaga

SEQ ID NO: 4237148 - DNA, 25 bp, Homo sapien
cttggtggtcccgtgctcccagaaa

SEQ ID NO: 4237149 - DNA, 25 bp, Homo sapien
tccccctcggtctcttcagtggctg

SEQ ID NO: 4237150 - DNA, 25 bp, Homo sapien
ggaatctccttgttctgcactcaaa

SEQ ID NO: 4237151 - DNA, 25 bp, Homo sapien
gacagcttcggtctttgatacagga

SEQ ID NO: 4237152 - DNA, 25 bp, Homo sapien
tgaggcaagaacaacatttgacgtt

SEQ ID NO: 4237153 - DNA, 25 bp, Homo sapien
caggaaccgtgcgaatagttgaggc

SEQ ID NO: 4237154 - DNA, 25 bp, Homo sapien
tggtctcccagtagttcctcggagg

SEQ ID NO: 4237155 - DNA, 25 bp, Homo sapien
gcctggcactcggaggtagataagt

SEQ ID NO: 4237156 - DNA, 25 bp, Homo sapien
aagtgcagtgtgaatggtctcccag

SEQ ID NO: 4237157 - DNA, 25 bp, Homo sapien
ccagtagttcctcggagggaggtct

SEQ ID NO: 4237158 - DNA, 25 bp, Homo sapien
gggccccatgcacccaaatgtactt

SEQ ID NO: 4237159 - DNA, 25 bp, Homo sapien
tacttgagtataaggtggccagagt

SEQ ID NO: 4237160 - DNA, 25 bp, Homo sapien
gtgccgcctccacttgtcctgatca

SEQ ID NO: 4237161 - DNA, 25 bp, Homo sapien
acttgtcctgatcacactggccctt

SEQ ID NO: 4237162 - DNA, 25 bp, Homo sapien
agattcacctctcctagggcgacct

SEQ ID NO: 4237163 - DNA, 25 bp, Homo sapien
tcagcatgaacgttttgatctctcc

SEQ ID NO: 4237164 - DNA, 25 bp, Homo sapien
tctcctagggcgacctggtggtccc

SEQ ID NO: 4237165 - DNA, 25 bp, Homo sapien
tcacctctcctagggcgacctggtg

SEQ ID NO: 4237166 - DNA, 25 bp, Homo sapien
tacaagttggagacactttttctaa

SEQ ID NO: 4237167 - DNA, 25 bp, Homo sapien
gcttcgagttatcccgcacctctga

SEQ ID NO: 4237168 - DNA, 25 bp, Homo sapien
tctaactgccggcattgcaactcaa

SEQ ID NO: 4237169 - DNA, 25 bp, Homo sapien
tccagatcaaatttgctgtgtttac

SEQ ID NO: 4237170 - DNA, 25 bp, Homo sapien
atttcctaactccgcatcctgacgc

SEQ ID NO: 4237171 - DNA, 25 bp, Homo sapien
ttcctaactccgcatcctgacgcat

SEQ ID NO: 4237172 - DNA, 25 bp, Homo sapien
catttcctaactccgcatcctgacg

SEQ ID NO: 4237173 - DNA, 25 bp, Homo sapien
tcatttcctaactccgcatcctgac

SEQ ID NO: 4237174 - DNA, 25 bp, Homo sapien
ggagttgtgaggctcgatgcaaaca

SEQ ID NO: 4237175 - DNA, 25 bp, Homo sapien
gagcatctatagagccaagctgtgg

SEQ ID NO: 4237176 - DNA, 25 bp, Homo sapien
gtgaggctcgatgcaaacaccacct

SEQ ID NO: 4237177 - DNA, 25 bp, Homo sapien
acctcctgttcctctagctagggca

SEQ ID NO: 4237178 - DNA, 25 bp, Homo sapien
ggaaatgacgccacctactaagtct

SEQ ID NO: 4237179 - DNA, 25 bp, Homo sapien
gttcttcttcggcagaggtggatcg

SEQ ID NO: 4237180 - DNA, 25 bp, Homo sapien
gatcgtcctttaatgacaaagcagg

SEQ ID NO: 4237181 - DNA, 25 bp, Homo sapien
cgggaggaaatgacgccacctacta

SEQ ID NO: 4237182 - DNA, 25 bp, Homo sapien
caaaggcccctgcaaatgactgaca

SEQ ID NO: 4237183 - DNA, 25 bp, Homo sapien
aatggccggctgtctcctggatcag

SEQ ID NO: 4237184 - DNA, 25 bp, Homo sapien
tttgctggcacttggcgaacgcctg

SEQ ID NO: 4237185 - DNA, 25 bp, Homo sapien
cacaggttcctttgagtcgagttgg

SEQ ID NO: 4237186 - DNA, 25 bp, Homo sapien
gaagaggtaaacagggatgaggacc

SEQ ID NO: 4237187 - DNA, 25 bp, Homo sapien
agaagaggtaaacagggatgaggac

SEQ ID NO: 4237188 - DNA, 25 bp, Homo sapien
gacaacagagtactggcatttcgat

SEQ ID NO: 4237189 - DNA, 25 bp, Homo sapien
ggcaaggcgaggacagtcttgtgta

SEQ ID NO: 4237190 - DNA, 25 bp, Homo sapien
agtactggcatttcgatcctctggg

SEQ ID NO: 4237191 - DNA, 25 bp, Homo sapien
tccactgcacctcctagattaggcc

SEQ ID NO: 4237192 - DNA, 25 bp, Homo sapien
tgttaatgacccacgggtgatgggt

SEQ ID NO: 4237193 - DNA, 25 bp, Homo sapien
tggtgcggaactgctctaaagcttt

SEQ ID NO: 4237194 - DNA, 25 bp, Homo sapien
taaaagggcattcttggacaaactc

SEQ ID NO: 4237195 - DNA, 25 bp, Homo sapien
aagctttgttaatgacccacgggtg

SEQ ID NO: 4237196 - DNA, 25 bp, Homo sapien
gaataatccttcattcgcctctgca

SEQ ID NO: 4237197 - DNA, 25 bp, Homo sapien
aagtgaataatccttcattcgcctc

SEQ ID NO: 4237198 - DNA, 25 bp, Homo sapien
agaaagtgaataatccttcattcgc

SEQ ID NO: 4237199 - DNA, 25 bp, Homo sapien
gtgaataatccttcattcgcctctg

SEQ ID NO: 4237200 - DNA, 25 bp, Homo sapien
cacacaggagcagttaaagtggcac

SEQ ID NO: 4237201 - DNA, 25 bp, Homo sapien
caagctcatcgcctctgagatcaga

SEQ ID NO: 4237202 - DNA, 25 bp, Homo sapien
ggctgtatttcgcatcctgaccaat

SEQ ID NO: 4237203 - DNA, 25 bp, Homo sapien
taagttgaggaaacgcacacaggag

SEQ ID NO: 4237204 - DNA, 25 bp, Homo sapien
cttggaagttgtgcggctgtcaaga

SEQ ID NO: 4237205 - DNA, 25 bp, Homo sapien
tgccttggaagttgtgcggctgtca

SEQ ID NO: 4237206 - DNA, 25 bp, Homo sapien
gaagttgtgcggctgtcaagagtct

SEQ ID NO: 4237207 - DNA, 25 bp, Homo sapien
gtggggtttgcagcccgcggggcca

SEQ ID NO: 4237208 - DNA, 25 bp, Homo sapien
tctgcaattggtgtgtgctccaggg

SEQ ID NO: 4237209 - DNA, 25 bp, Homo sapien
ttcccccgagtctcctgagcatctg

SEQ ID NO: 4237210 - DNA, 25 bp, Homo sapien
cctgcctgtggtgttctggtgaaaa

SEQ ID NO: 4237211 - DNA, 25 bp, Homo sapien
tttcacagcatctggaggcctttgc

SEQ ID NO: 4237212 - DNA, 25 bp, Homo sapien
tggctgggtaacctgggaagccagg

SEQ ID NO: 4237213 - DNA, 25 bp, Homo sapien
ttgtggctgggtaacctgggaagcc

SEQ ID NO: 4237214 - DNA, 25 bp, Homo sapien
tgtggctgggtaacctgggaagcca

SEQ ID NO: 4237215 - DNA, 25 bp, Homo sapien
gctgggtaacctgggaagccaggag

SEQ ID NO: 4237216 - DNA, 25 bp, Homo sapien
tgaaaagccgacctacatgcagaga

SEQ ID NO: 4237217 - DNA, 25 bp, Homo sapien
ccttttggtcccttgacgaccgatg

SEQ ID NO: 4237218 - DNA, 25 bp, Homo sapien
tgagtcagggtaagggagcccaaaa

SEQ ID NO: 4237219 - DNA, 25 bp, Homo sapien
gccttgctctactgaccccttttgg

SEQ ID NO: 4237220 - DNA, 25 bp, Homo sapien
tcccaaagtctacccggtgcttgtg

SEQ ID NO: 4237221 - DNA, 25 bp, Homo sapien
ccaaagtctacccggtgcttgtgcc

SEQ ID NO: 4237222 - DNA, 25 bp, Homo sapien
cccaaagtctacccggtgcttgtgc

SEQ ID NO: 4237223 - DNA, 25 bp, Homo sapien
ctcccaaagtctacccggtgcttgt

SEQ ID NO: 4237224 - DNA, 25 bp, Homo sapien
gtttgggcagccaatctcttgccac

SEQ ID NO: 4237225 - DNA, 25 bp, Homo sapien
catctggatggccatcagtttccac

SEQ ID NO: 4237226 - DNA, 25 bp, Homo sapien
agtttccacctagcccctgtcccag

SEQ ID NO: 4237227 - DNA, 25 bp, Homo sapien
actgctccctgtatcttcatctggg

SEQ ID NO: 4237228 - DNA, 25 bp, Homo sapien
tttcctcatatgttatatcactggg

SEQ ID NO: 4237229 - DNA, 25 bp, Homo sapien
tctcaggttccagtggagccgtccc

SEQ ID NO: 4237230 - DNA, 25 bp, Homo sapien
gagtctatttcttagttgtttctgc

SEQ ID NO: 4237231 - DNA, 25 bp, Homo sapien
aatctgccacattcagagtctattt

SEQ ID NO: 4237232 - DNA, 25 bp, Homo sapien
cacaatctcaggcatgaacaggtga

SEQ ID NO: 4237233 - DNA, 25 bp, Homo sapien
tgtgcttctcataccagttggcgcc

SEQ ID NO: 4237234 - DNA, 25 bp, Homo sapien
cgtaagctgccatgctcgacagata

SEQ ID NO: 4237235 - DNA, 25 bp, Homo sapien
aagctggttctcagtcatgggatcc

SEQ ID NO: 4237236 - DNA, 25 bp, Homo sapien
cacggccagagacggactcagtgct

SEQ ID NO: 4237237 - DNA, 25 bp, Homo sapien
tctgtgaaatgggtgttagaaccgt

SEQ ID NO: 4237238 - DNA, 25 bp, Homo sapien
ccaccaagtgtctgggggaactgga

SEQ ID NO: 4237239 - DNA, 25 bp, Homo sapien
tgttagaaccgtgtctcctgaaaag

SEQ ID NO: 4237240 - DNA, 25 bp, Homo sapien
gctgaacttcccgtctgctccctta

SEQ ID NO: 4237241 - DNA, 25 bp, Homo sapien
cagctgaacttcccgtctgctccct

SEQ ID NO: 4237242 - DNA, 25 bp, Homo sapien
tgaacttcccgtctgctcccttagc

SEQ ID NO: 4237243 - DNA, 25 bp, Homo sapien
aacttcccgtctgctcccttagctc

SEQ ID NO: 4237244 - DNA, 25 bp, Homo sapien
gcccagcctgcggcgctgactgatg

SEQ ID NO: 4237245 - DNA, 25 bp, Homo sapien
ggcgctgactgatgaatgggaggcc

SEQ ID NO: 4237246 - DNA, 25 bp, Homo sapien
agcctgcggcgctgactgatgaatg

SEQ ID NO: 4237247 - DNA, 25 bp, Homo sapien
cggcgctgactgatgaatgggaggc

SEQ ID NO: 4237248 - DNA, 25 bp, Homo sapien
ctggctctcgggaggcccgcgctcc

SEQ ID NO: 4237249 - DNA, 25 bp, Homo sapien
aaacacaggcacagcccttggcaca

SEQ ID NO: 4237250 - DNA, 25 bp, Homo sapien
tccccagtgggccatccaggcctgg

SEQ ID NO: 4237251 - DNA, 25 bp, Homo sapien
tcaggttccacagctgtccctgaaa

SEQ ID NO: 4237252 - DNA, 25 bp, Homo sapien
ctgtaaatcagggccagagggatgg

SEQ ID NO: 4237253 - DNA, 25 bp, Homo sapien
taaatcagggccagagggatggtgg

SEQ ID NO: 4237254 - DNA, 25 bp, Homo sapien
cagggaggagactggggagtgtctg

SEQ ID NO: 4237255 - DNA, 25 bp, Homo sapien
actggggagtgtctggggaagggct

SEQ ID NO: 4237256 - DNA, 25 bp, Homo sapien
tgtatgtttctgaggcttaaccaga

SEQ ID NO: 4237257 - DNA, 25 bp, Homo sapien
tcctcctccacggaagagtctcgag

SEQ ID NO: 4237258 - DNA, 25 bp, Homo sapien
aatccaaaccccttgctgggtgtat

SEQ ID NO: 4237259 - DNA, 25 bp, Homo sapien
taaccagaatctgtcccgtgactgc

SEQ ID NO: 4237260 - DNA, 25 bp, Homo sapien
ctactgcatgttagaccagggtgct

SEQ ID NO: 4237261 - DNA, 25 bp, Homo sapien
tactgcatgttagaccagggtgctg

SEQ ID NO: 4237262 - DNA, 25 bp, Homo sapien
tgcatgttagaccagggtgctggag

SEQ ID NO: 4237263 - DNA, 25 bp, Homo sapien
actgcatgttagaccagggtgctgg

SEQ ID NO: 4237264 - DNA, 25 bp, Homo sapien
gcagactccgtagtgtttgccttcc

SEQ ID NO: 4237265 - DNA, 25 bp, Homo sapien
tgttctttgcacagctgtaatggcc

SEQ ID NO: 4237266 - DNA, 25 bp, Homo sapien
acagctgcatgctcaggcgtagcat

SEQ ID NO: 4237267 - DNA, 25 bp, Homo sapien
ggctcactcgttggagcacagctgc

SEQ ID NO: 4237268 - DNA, 25 bp, Homo sapien
ttcattgccgagcagttttctgtag

SEQ ID NO: 4237269 - DNA, 25 bp, Homo sapien
gtggcttagcacaattacgtatagg

SEQ ID NO: 4237270 - DNA, 25 bp, Homo sapien
tgtggtgatatctaattgcggtctt

SEQ ID NO: 4237271 - DNA, 25 bp, Homo sapien
tgtagtatacatgttccaccgttta

SEQ ID NO: 4237272 - DNA, 25 bp, Homo sapien
atgaaaagcacctgtaaccttgccg

SEQ ID NO: 4237273 - DNA, 25 bp, Homo sapien
aaagcacctgtaaccttgccggcct

SEQ ID NO: 4237274 - DNA, 25 bp, Homo sapien
ctatccatcgatttgaatgaagaca

SEQ ID NO: 4237275 - DNA, 25 bp, Homo sapien
tccatcgatttgaatgaagacaaaa

SEQ ID NO: 4237276 - DNA, 25 bp, Homo sapien
ggtttggcactaggtctccaggtgt

SEQ ID NO: 4237277 - DNA, 25 bp, Homo sapien
aaccttgtaagagcgagtagggcca

SEQ ID NO: 4237278 - DNA, 25 bp, Homo sapien
caatatgtgatgtaacaagccctcc

SEQ ID NO: 4237279 - DNA, 25 bp, Homo sapien
taaactgggcggtgcataggaagca

SEQ ID NO: 4237280 - DNA, 25 bp, Homo sapien
cttttccttctccttagcagcagcc

SEQ ID NO: 4237281 - DNA, 25 bp, Homo sapien
tttccttctccttagcagcagccat

SEQ ID NO: 4237282 - DNA, 25 bp, Homo sapien
ttttccttctccttagcagcagcca

SEQ ID NO: 4237283 - DNA, 25 bp, Homo sapien
tcccatgtggctgatttgtcccggt

SEQ ID NO: 4237284 - DNA, 25 bp, Homo sapien
gcagcctttcccgtggccggtgctt

SEQ ID NO: 4237285 - DNA, 25 bp, Homo sapien
aagatccaatgcagcctttcccgtg

SEQ ID NO: 4237286 - DNA, 25 bp, Homo sapien
ggagccctccttaaggcccaagatc

SEQ ID NO: 4237287 - DNA, 25 bp, Homo sapien
tccacatcctataaagaagcccctt

SEQ ID NO: 4237288 - DNA, 25 bp, Homo sapien
gcagagtctcttgtgaggagaatcc

SEQ ID NO: 4237289 - DNA, 25 bp, Homo sapien
ataacattacaagacgaggcaaaaa

SEQ ID NO: 4237290 - DNA, 25 bp, Homo sapien
tcttgtgaggagaatccacatccta

SEQ ID NO: 4237291 - DNA, 25 bp, Homo sapien
ggtctagggagtcgcgccttacaaa

SEQ ID NO: 4237292 - DNA, 25 bp, Homo sapien
gagtcgcgccttacaaatcataaat

SEQ ID NO: 4237293 - DNA, 25 bp, Homo sapien
gggtctagggagtcgcgccttacaa

SEQ ID NO: 4237294 - DNA, 25 bp, Homo sapien
agggagtcgcgccttacaaatcata

SEQ ID NO: 4237295 - DNA, 25 bp, Homo sapien
ggagtgtgcggcctaacaaggccat

SEQ ID NO: 4237296 - DNA, 25 bp, Homo sapien
tgaggtctattcactgcatcccagt

SEQ ID NO: 4237297 - DNA, 25 bp, Homo sapien
tcccagtgatacaaagtggaggcca

SEQ ID NO: 4237298 - DNA, 25 bp, Homo sapien
ggagtctggtctgctccactaacca

SEQ ID NO: 4237299 - DNA, 25 bp, Homo sapien
gtctacttctatccacacagacccg

SEQ ID NO: 4237300 - DNA, 25 bp, Homo sapien
ttctatccacacagacccggcaacc

SEQ ID NO: 4237301 - DNA, 25 bp, Homo sapien
acttctatccacacagacccggcaa

SEQ ID NO: 4237302 - DNA, 25 bp, Homo sapien
tatccacacagacccggcaaccatc

SEQ ID NO: 4237303 - DNA, 25 bp, Homo sapien
cttgaatacaagtggctaagccaac

SEQ ID NO: 4237304 - DNA, 25 bp, Homo sapien
gatagactgagtcttctctcgtagg

SEQ ID NO: 4237305 - DNA, 25 bp, Homo sapien
ccaggtgtgggttctactcagtgcc

SEQ ID NO: 4237306 - DNA, 25 bp, Homo sapien
gatttgtgaattccctaagaccttg

SEQ ID NO: 4237307 - DNA, 25 bp, Homo sapien
agcagtctggcaacgcccacagtta

SEQ ID NO: 4237308 - DNA, 25 bp, Homo sapien
aaactgatcgtgctataaaatggac

SEQ ID NO: 4237309 - DNA, 25 bp, Homo sapien
tatgaagctatgcatcttagacctc

SEQ ID NO: 4237310 - DNA, 25 bp, Homo sapien
tatgctgcaaagacctggatgatgt

SEQ ID NO: 4237311 - DNA, 25 bp, Homo sapien
caaagcaatatgaatttgatgagtt

SEQ ID NO: 4237312 - DNA, 25 bp, Homo sapien
gaatggctgccgttttttcaaagca

SEQ ID NO: 4237313 - DNA, 25 bp, Homo sapien
taaaaaatactggatttgaatggct

SEQ ID NO: 4237314 - DNA, 25 bp, Homo sapien
tctctgtcttatcaataatgaggct

SEQ ID NO: 4237315 - DNA, 25 bp, Homo sapien
ggaaaatgctgcttaccctgggccc

SEQ ID NO: 4237316 - DNA, 25 bp, Homo sapien
tcttggttgatccagaatggccacc

SEQ ID NO: 4237317 - DNA, 25 bp, Homo sapien
tatctggcgcaggagctcttggttg

SEQ ID NO: 4237318 - DNA, 25 bp, Homo sapien
ccctgggctgtagaaagaagacacc

SEQ ID NO: 4237319 - DNA, 25 bp, Homo sapien
actcctgggttcaagccatctgcct

SEQ ID NO: 4237320 - DNA, 25 bp, Homo sapien
ccatctgcctgcctcggcctcccaa

SEQ ID NO: 4237321 - DNA, 25 bp, Homo sapien
gccatgttgcccgggctggtctcaa

SEQ ID NO: 4237322 - DNA, 25 bp, Homo sapien
ttttttgcagagaggaggttttgcc

SEQ ID NO: 4237323 - DNA, 25 bp, Homo sapien
tggcgtgtaactatgctcatcattg

SEQ ID NO: 4237324 - DNA, 25 bp, Homo sapien
catatcagtggcgtgtaactatgct

SEQ ID NO: 4237325 - DNA, 25 bp, Homo sapien
tatcagtggcgtgtaactatgctca

SEQ ID NO: 4237326 - DNA, 25 bp, Homo sapien
cagtggcgtgtaactatgctcatca

SEQ ID NO: 4237327 - DNA, 25 bp, Homo sapien
gaaatgagtattccattgcagggac

SEQ ID NO: 4237328 - DNA, 25 bp, Homo sapien
gaattgcttggtctgagggtatcta

SEQ ID NO: 4237329 - DNA, 25 bp, Homo sapien
tattgtaaatccttgcacacttcag

SEQ ID NO: 4237330 - DNA, 25 bp, Homo sapien
tccaggttgtagtcttaccagcagt

SEQ ID NO: 4237331 - DNA, 25 bp, Homo sapien
atccagttgcctctgttgaccaggt

SEQ ID NO: 4237332 - DNA, 25 bp, Homo sapien
ttgtatccagttgcctctgttgacc

SEQ ID NO: 4237333 - DNA, 25 bp, Homo sapien
gtatccagttgcctctgttgaccag

SEQ ID NO: 4237334 - DNA, 25 bp, Homo sapien
catgttgtatccagttgcctctgtt

SEQ ID NO: 4237335 - DNA, 25 bp, Homo sapien
ccatggaaggtttgccacggtattt

SEQ ID NO: 4237336 - DNA, 25 bp, Homo sapien
taagggtagctgaaaacatctagga

SEQ ID NO: 4237337 - DNA, 25 bp, Homo sapien
gactggtttgcaagcaagacagctc

SEQ ID NO: 4237338 - DNA, 25 bp, Homo sapien
tagagatctaccctatccacactgt

SEQ ID NO: 4237339 - DNA, 25 bp, Homo sapien
tcacaggtatcggtatgtcatagga

SEQ ID NO: 4237340 - DNA, 25 bp, Homo sapien
tagttatgactaggtggcagtgttc

SEQ ID NO: 4237341 - DNA, 25 bp, Homo sapien
gcagtgttctagttggcaggtcaca

SEQ ID NO: 4237342 - DNA, 25 bp, Homo sapien
ttgctgtagttatgactaggtggca

SEQ ID NO: 4237343 - DNA, 25 bp, Homo sapien
tgcatgctattgcagaaagggccag

SEQ ID NO: 4237344 - DNA, 25 bp, Homo sapien
tttccgacgctggtgtggcctgtgt

SEQ ID NO: 4237345 - DNA, 25 bp, Homo sapien
tcatttctagtatctttgcatgcta

SEQ ID NO: 4237346 - DNA, 25 bp, Homo sapien
gcccttgtggacttgtctatggcaa

SEQ ID NO: 4237347 - DNA, 25 bp, Homo sapien
gtttactgacacttaaagcctgtgg

SEQ ID NO: 4237348 - DNA, 25 bp, Homo sapien
taaaataagtcccaccgcagcttgc

SEQ ID NO: 4237349 - DNA, 25 bp, Homo sapien
tgagtatacctcatagcctgtgtct

SEQ ID NO: 4237350 - DNA, 25 bp, Homo sapien
gatgccaaagtctactgagtctgag

SEQ ID NO: 4237351 - DNA, 25 bp, Homo sapien
aggtcagggtcttcacagagatttg

SEQ ID NO: 4237352 - DNA, 25 bp, Homo sapien
aggctgaaggtcagggtcttcacag

SEQ ID NO: 4237353 - DNA, 25 bp, Homo sapien
ttttactctgaatcttggcctttac

SEQ ID NO: 4237354 - DNA, 25 bp, Homo sapien
cttggcctttacattctcagtggtg

SEQ ID NO: 4237355 - DNA, 25 bp, Homo sapien
tgtgggtctgaagcacatgagagat

SEQ ID NO: 4237356 - DNA, 25 bp, Homo sapien
ggtagttgccatcgcgatggtccag

SEQ ID NO: 4237357 - DNA, 25 bp, Homo sapien
cacccctgatgagattgttacaaag

SEQ ID NO: 4237358 - DNA, 25 bp, Homo sapien
gtctgcaaacatgtagttgaatctg

SEQ ID NO: 4237359 - DNA, 25 bp, Homo sapien
ctgaatcaaggcaaagctgatggag

SEQ ID NO: 4237360 - DNA, 25 bp, Homo sapien
aatcaaggcaaagctgatggagata

SEQ ID NO: 4237361 - DNA, 25 bp, Homo sapien
aggcaaagctgatggagataggcat

SEQ ID NO: 4237362 - DNA, 25 bp, Homo sapien
caaggcaaagctgatggagataggc

SEQ ID NO: 4237363 - DNA, 25 bp, Homo sapien
ttagtctataagttcaacgttgttg

SEQ ID NO: 4237364 - DNA, 25 bp, Homo sapien
tagtctataagttcaacgttgttgg

SEQ ID NO: 4237365 - DNA, 25 bp, Homo sapien
agtctataagttcaacgttgttgga

SEQ ID NO: 4237366 - DNA, 25 bp, Homo sapien
tctataagttcaacgttgttggaaa

SEQ ID NO: 4237367 - DNA, 25 bp, Homo sapien
tatgaaacaaaacggtgaggccagg

SEQ ID NO: 4237368 - DNA, 25 bp, Homo sapien
taatttgcatccaggacggtcggaa

SEQ ID NO: 4237369 - DNA, 25 bp, Homo sapien
tcttctctaagacgctaaggcggct

SEQ ID NO: 4237370 - DNA, 25 bp, Homo sapien
tgttatcagtgtcgcggactcgggc

SEQ ID NO: 4237371 - DNA, 25 bp, Homo sapien
aacagataatccagagttttgatgc

SEQ ID NO: 4237372 - DNA, 25 bp, Homo sapien
ctgactaccgctgtgtgctgtgagg

SEQ ID NO: 4237373 - DNA, 25 bp, Homo sapien
ttctgactaccgctgtgtgctgtga

SEQ ID NO: 4237374 - DNA, 25 bp, Homo sapien
gcgagatgaactcattctggtgaat

SEQ ID NO: 4237375 - DNA, 25 bp, Homo sapien
ttccgagtttgttctagaagtcaga

SEQ ID NO: 4237376 - DNA, 25 bp, Homo sapien
catgagtgccacctatgatccttcc

SEQ ID NO: 4237377 - DNA, 25 bp, Homo sapien
cagtcaaccagctgtagatgggctt

SEQ ID NO: 4237378 - DNA, 25 bp, Homo sapien
gcagtgagacatgagtgccacctat

SEQ ID NO: 4237379 - DNA, 25 bp, Homo sapien
gacacgtggaaatagcaagatgttt

SEQ ID NO: 4237380 - DNA, 25 bp, Homo sapien
gtgtagtgacaaagagacacgtgga

SEQ ID NO: 4237381 - DNA, 25 bp, Homo sapien
caagatgtttctagtgtgctccacc

SEQ ID NO: 4237382 - DNA, 25 bp, Homo sapien
gagctatttaagtgtatttaaggag

SEQ ID NO: 4237383 - DNA, 25 bp, Homo sapien
tcttgcaggtgaaccacatagacta

SEQ ID NO: 4237384 - DNA, 25 bp, Homo sapien
tctcgactcgatgcaaccttgatct

SEQ ID NO: 4237385 - DNA, 25 bp, Homo sapien
gatactagtctatgtgttatttgac

SEQ ID NO: 4237386 - DNA, 25 bp, Homo sapien
tgtaatggttcgatctcgactcgat

SEQ ID NO: 4237387 - DNA, 25 bp, Homo sapien
tattcagttgtttcgacatcatttg

SEQ ID NO: 4237388 - DNA, 25 bp, Homo sapien
ctctgtatccattagtagtcactgc

SEQ ID NO: 4237389 - DNA, 25 bp, Homo sapien
tgagatattagtcatgcatcctaaa

SEQ ID NO: 4237390 - DNA, 25 bp, Homo sapien
tctgggatcatgtccattttaagtt

SEQ ID NO: 4237391 - DNA, 25 bp, Homo sapien
agtgcagcgtcacagtcacatctca

SEQ ID NO: 4237392 - DNA, 25 bp, Homo sapien
tccctcgctgtgaaaggatcaacac

SEQ ID NO: 4237393 - DNA, 25 bp, Homo sapien
gaaacagacccattttccctcgctg

SEQ ID NO: 4237394 - DNA, 25 bp, Homo sapien
tctatcgcctgtattccttgcaaag

SEQ ID NO: 4237395 - DNA, 25 bp, Homo sapien
ttaacactagttgacctaaatatca

SEQ ID NO: 4237396 - DNA, 25 bp, Homo sapien
tataatactttaccaatatcatcgt

SEQ ID NO: 4237397 - DNA, 25 bp, Homo sapien
agaacagtttcctgttataccagaa

SEQ ID NO: 4237398 - DNA, 25 bp, Homo sapien
aagaccagtacagcacactcctgta

SEQ ID NO: 4237399 - DNA, 25 bp, Homo sapien
cacacggagtgtttagttgccacag

SEQ ID NO: 4237400 - DNA, 25 bp, Homo sapien
catacatactaggtcagggtctcct

SEQ ID NO: 4237401 - DNA, 25 bp, Homo sapien
tcgtagatcagaatagaccaccgcc

SEQ ID NO: 4237402 - DNA, 25 bp, Homo sapien
ttaacgctgtgggttcaccgtagct

SEQ ID NO: 4237403 - DNA, 25 bp, Homo sapien
taggtgctatccaagtgcattagag

SEQ ID NO: 4237404 - DNA, 25 bp, Homo sapien
agcacttattctgtttcatgtcacg

SEQ ID NO: 4237405 - DNA, 25 bp, Homo sapien
gcctagtgtcactcccgtttatgaa

SEQ ID NO: 4237406 - DNA, 25 bp, Homo sapien
ttcatgtcacgggatcctggcacag

SEQ ID NO: 4237407 - DNA, 25 bp, Homo sapien
ttagtacatgtttgccgtgtttgcc

SEQ ID NO: 4237408 - DNA, 25 bp, Homo sapien
aggctacaaagcagtggtgcggtct

SEQ ID NO: 4237409 - DNA, 25 bp, Homo sapien
ttttagtacatgtttgccgtgtttg

SEQ ID NO: 4237410 - DNA, 25 bp, Homo sapien
gatacacaatgatgtacatatttgg

SEQ ID NO: 4237411 - DNA, 25 bp, Homo sapien
gacaacccagggtcgaatgggccat

SEQ ID NO: 4237412 - DNA, 25 bp, Homo sapien
cagcagcgcgtttgcagaggacaac

SEQ ID NO: 4237413 - DNA, 25 bp, Homo sapien
gacaggcctggctttgcatacaagg

SEQ ID NO: 4237414 - DNA, 25 bp, Homo sapien
tcccttagctggaaagacggcaggc

SEQ ID NO: 4237415 - DNA, 25 bp, Homo sapien
gccgattttccaggcacatgtgcaa

SEQ ID NO: 4237416 - DNA, 25 bp, Homo sapien
gcacccacaggttgaattccacata

SEQ ID NO: 4237417 - DNA, 25 bp, Homo sapien
taccatcatgagaaccgcacaggaa

SEQ ID NO: 4237418 - DNA, 25 bp, Homo sapien
aaggcacattcctttcgcctaggag

SEQ ID NO: 4237419 - DNA, 25 bp, Homo sapien
tgaaccactgatatgtaaaacacga

SEQ ID NO: 4237420 - DNA, 25 bp, Homo sapien
gcttcatgctatgtgaaaggagtca

SEQ ID NO: 4237421 - DNA, 25 bp, Homo sapien
aaccttacagtgaaatgctactcag

SEQ ID NO: 4237422 - DNA, 25 bp, Homo sapien
ggagtcagactcaagactatctact

SEQ ID NO: 4237423 - DNA, 25 bp, Homo sapien
tcaagggttcctcctgccttcgctt

SEQ ID NO: 4237424 - DNA, 25 bp, Homo sapien
tgggggtttcactatgttgctaagg

SEQ ID NO: 4237425 - DNA, 25 bp, Homo sapien
ctggtcttgaattcctggcctcaag

SEQ ID NO: 4237426 - DNA, 25 bp, Homo sapien
ggcaacttttaattttttgcacaga

SEQ ID NO: 4237427 - DNA, 25 bp, Homo sapien
accttagccagcctagtaggtggga

SEQ ID NO: 4237428 - DNA, 25 bp, Homo sapien
tatgagattgtataagtaaagacct

SEQ ID NO: 4237429 - DNA, 25 bp, Homo sapien
ctaaaagcaaaccatgaaagggcct

SEQ ID NO: 4237430 - DNA, 25 bp, Homo sapien
gcccagctagcatcccctgttttag

SEQ ID NO: 4237431 - DNA, 25 bp, Homo sapien
gcatactgtcccaaatccgtctgaa

SEQ ID NO: 4237432 - DNA, 25 bp, Homo sapien
cttttgagcagaacacgtgattacg

SEQ ID NO: 4237433 - DNA, 25 bp, Homo sapien
agaggaaccactgttggcacgggcc

SEQ ID NO: 4237434 - DNA, 25 bp, Homo sapien
taatctgtcgcttggagaactctgc

SEQ ID NO: 4237435 - DNA, 25 bp, Homo sapien
ggtgcaatgttgaggaagatctcca

SEQ ID NO: 4237436 - DNA, 25 bp, Homo sapien
tgaatgaacccaagatatggtgcaa

SEQ ID NO: 4237437 - DNA, 25 bp, Homo sapien
tacacatgcctgtacgatggcccaa

SEQ ID NO: 4237438 - DNA, 25 bp, Homo sapien
cgaccttagagatgaaagaagttca

SEQ ID NO: 4237439 - DNA, 25 bp, Homo sapien
taatctgaactgtgttggtccctgg

SEQ ID NO: 4237440 - DNA, 25 bp, Homo sapien
agctttgctttgtgatgttaaccac

SEQ ID NO: 4237441 - DNA, 25 bp, Homo sapien
tttgaatggagacccaggatgcagg

SEQ ID NO: 4237442 - DNA, 25 bp, Homo sapien
tgaaatagtacagaggactggatgc

SEQ ID NO: 4237443 - DNA, 25 bp, Homo sapien
aatgagttaggcatggagtcaggat

SEQ ID NO: 4237444 - DNA, 25 bp, Homo sapien
tgagttaggcatggagtcaggataa

SEQ ID NO: 4237445 - DNA, 25 bp, Homo sapien
ttttccaggaatgagttaggcatgg

SEQ ID NO: 4237446 - DNA, 25 bp, Homo sapien
caggaatgagttaggcatggagtca

SEQ ID NO: 4237447 - DNA, 25 bp, Homo sapien
ttgagtctaggagtttgaggcagca

SEQ ID NO: 4237448 - DNA, 25 bp, Homo sapien
ctctagcctgggtgacaccgcaaga

SEQ ID NO: 4237449 - DNA, 25 bp, Homo sapien
gtctaggagtttgaggcagcagtga

SEQ ID NO: 4237450 - DNA, 25 bp, Homo sapien
gctatgattgcaccactgtactcta

SEQ ID NO: 4237451 - DNA, 25 bp, Homo sapien
agatgtccgcataaacgccagggct

SEQ ID NO: 4237452 - DNA, 25 bp, Homo sapien
taacacggtcaaggtaggcttcctg

SEQ ID NO: 4237453 - DNA, 25 bp, Homo sapien
gaagaggtatttacctggcccataa

SEQ ID NO: 4237454 - DNA, 25 bp, Homo sapien
tgagagctcaatgggctaacacggt

SEQ ID NO: 4237455 - DNA, 25 bp, Homo sapien
cgaacgtttgctctgttcccgtgga

SEQ ID NO: 4237456 - DNA, 25 bp, Homo sapien
tgacaagtcggctgagcctcaggtt

SEQ ID NO: 4237457 - DNA, 25 bp, Homo sapien
tgttcccgtggagcccatcatctac

SEQ ID NO: 4237458 - DNA, 25 bp, Homo sapien
acaccgtgtaggagcaggagcgaac

SEQ ID NO: 4237459 - DNA, 25 bp, Homo sapien
aggagaactggagcccaatccctac

SEQ ID NO: 4237460 - DNA, 25 bp, Homo sapien
tgtgcccacttgtattaacccgtca

SEQ ID NO: 4237461 - DNA, 25 bp, Homo sapien
caaattagtgacaggaggagaactg

SEQ ID NO: 4237462 - DNA, 25 bp, Homo sapien
gatccccttgggctctaatccatca

SEQ ID NO: 4237463 - DNA, 25 bp, Homo sapien
ccaaatagatcgtctgcccaggcag

SEQ ID NO: 4237464 - DNA, 25 bp, Homo sapien
catgcctgggtctattatcttgtcc

SEQ ID NO: 4237465 - DNA, 25 bp, Homo sapien
gagacttcaagatcttcgctggaac

SEQ ID NO: 4237466 - DNA, 25 bp, Homo sapien
tcgattcagcttcagtgtgagcagc

SEQ ID NO: 4237467 - DNA, 25 bp, Homo sapien
taatgcgatgttctcactggaagtg

SEQ ID NO: 4237468 - DNA, 25 bp, Homo sapien
caggtggtctttttaacatgatggc

SEQ ID NO: 4237469 - DNA, 25 bp, Homo sapien
tctgcgaccgcaagttaatgcgatg

SEQ ID NO: 4237470 - DNA, 25 bp, Homo sapien
taaaatcgccaagtattagtactcg

SEQ ID NO: 4237471 - DNA, 25 bp, Homo sapien
ggagggctgtcagatatagcaggta

SEQ ID NO: 4237472 - DNA, 25 bp, Homo sapien
atatagcaggtaagaaatacagacc

SEQ ID NO: 4237473 - DNA, 25 bp, Homo sapien
aggagggctgtcagatatagcaggt

SEQ ID NO: 4237474 - DNA, 25 bp, Homo sapien
agatatagcaggtaagaaatacaga

SEQ ID NO: 4237475 - DNA, 25 bp, Homo sapien
ttcgctgtcctgtctaaatccccct

SEQ ID NO: 4237476 - DNA, 25 bp, Homo sapien
ctttcgctgtcctgtctaaatcccc

SEQ ID NO: 4237477 - DNA, 25 bp, Homo sapien
tttcgctgtcctgtctaaatccccc

SEQ ID NO: 4237478 - DNA, 25 bp, Homo sapien
tcgctgtcctgtctaaatccccctt

SEQ ID NO: 4237479 - DNA, 25 bp, Homo sapien
cagattgctctgtctgaagagggcc

SEQ ID NO: 4237480 - DNA, 25 bp, Homo sapien
tgtgggccatgagaacagtgctaaa

SEQ ID NO: 4237481 - DNA, 25 bp, Homo sapien
taaggctcttgataacccaactgct

SEQ ID NO: 4237482 - DNA, 25 bp, Homo sapien
catagtgaagaacgcctgtgcctgg

SEQ ID NO: 4237483 - DNA, 25 bp, Homo sapien
gttcttggggcatggaccgactgtt

SEQ ID NO: 4237484 - DNA, 25 bp, Homo sapien
gaccgactgttttgaatacttcttg

SEQ ID NO: 4237485 - DNA, 25 bp, Homo sapien
gggcatggaccgactgttttgaata

SEQ ID NO: 4237486 - DNA, 25 bp, Homo sapien
tgttttgaatacttcttgcggtacg

SEQ ID NO: 4237487 - DNA, 25 bp, Homo sapien
tccgtgagggaccaatagactggcc

SEQ ID NO: 4237488 - DNA, 25 bp, Homo sapien
ccagcccaccgcatagggtggcagg

SEQ ID NO: 4237489 - DNA, 25 bp, Homo sapien
ggtaaaccagtcacagttgagagtc

SEQ ID NO: 4237490 - DNA, 25 bp, Homo sapien
tcatgcagcgcacattttctgccag

SEQ ID NO: 4237491 - DNA, 25 bp, Homo sapien
cagcaccctgagtacctgctgcggg

SEQ ID NO: 4237492 - DNA, 25 bp, Homo sapien
gcggcactggacctcgctgtatcca

SEQ ID NO: 4237493 - DNA, 25 bp, Homo sapien
aggcagagggcttgccccgcaacct

SEQ ID NO: 4237494 - DNA, 25 bp, Homo sapien
ggcctcctctatgcctcggccattg

SEQ ID NO: 4237495 - DNA, 25 bp, Homo sapien
tgtaacaacctgaaatgtgcccctt

SEQ ID NO: 4237496 - DNA, 25 bp, Homo sapien
gggcacacattgcaactcataacac

SEQ ID NO: 4237497 - DNA, 25 bp, Homo sapien
aatgttaacaccttgtgggcagtgg

SEQ ID NO: 4237498 - DNA, 25 bp, Homo sapien
tttcccggttgctgcccggtcctga

SEQ ID NO: 4237499 - DNA, 25 bp, Homo sapien
accgctgcttcgcccgccaccgcgt

SEQ ID NO: 4237500 - DNA, 25 bp, Homo sapien
ctggaccgctgcttcgcccgccacc

SEQ ID NO: 4237501 - DNA, 25 bp, Homo sapien
ggaccgctgcttcgcccgccaccgc

SEQ ID NO: 4237502 - DNA, 25 bp, Homo sapien
tggaccgctgcttcgcccgccaccg

SEQ ID NO: 4237503 - DNA, 25 bp, Homo sapien
ggcagagtcctcacgaacggtttag

SEQ ID NO: 4237504 - DNA, 25 bp, Homo sapien
tcacgagacacatttgggacgaagg

SEQ ID NO: 4237505 - DNA, 25 bp, Homo sapien
caaaaaggagtcatctgggagcccg

SEQ ID NO: 4237506 - DNA, 25 bp, Homo sapien
gacactagcactgtagaacgggccc

SEQ ID NO: 4237507 - DNA, 25 bp, Homo sapien
ggcagaaagctccatcagagtgtga

SEQ ID NO: 4237508 - DNA, 25 bp, Homo sapien
ggtaagctgctgtactgccatcctc

SEQ ID NO: 4237509 - DNA, 25 bp, Homo sapien
gaaagaggcagacttgcacccagtg

SEQ ID NO: 4237510 - DNA, 25 bp, Homo sapien
tgcaaccccacatacaggagtcgag

SEQ ID NO: 4237511 - DNA, 25 bp, Homo sapien
gaatcatttattgcaggtagcctta

SEQ ID NO: 4237512 - DNA, 25 bp, Homo sapien
ttcatatggaaaagtcgtgggagct

SEQ ID NO: 4237513 - DNA, 25 bp, Homo sapien
gcataaatagagatggctcctgccc

SEQ ID NO: 4237514 - DNA, 25 bp, Homo sapien
tgccctttacgaagcatcagtctgt

SEQ ID NO: 4237515 - DNA, 25 bp, Homo sapien
ctgagatggtgccactgccctccag

SEQ ID NO: 4237516 - DNA, 25 bp, Homo sapien
cctgggaggcggaggttgcagtgag

SEQ ID NO: 4237517 - DNA, 25 bp, Homo sapien
gaggcacgataatctcttgaacctg

SEQ ID NO: 4237518 - DNA, 25 bp, Homo sapien
gccctccagcctgggccacaaagcg

SEQ ID NO: 4237519 - DNA, 25 bp, Homo sapien
tctaagctcttatagctagtaagca

SEQ ID NO: 4237520 - DNA, 25 bp, Homo sapien
taagcagtaaattaggaactctgct

SEQ ID NO: 4237521 - DNA, 25 bp, Homo sapien
agatggatttgttaagaactatgca

SEQ ID NO: 4237522 - DNA, 25 bp, Homo sapien
aagcaacgcttaaggcagatactgc

SEQ ID NO: 4237523 - DNA, 25 bp, Homo sapien
gataagaccttttacacagacaggc

SEQ ID NO: 4237524 - DNA, 25 bp, Homo sapien
ccgccctgagtcttgaacaatgagt

SEQ ID NO: 4237525 - DNA, 25 bp, Homo sapien
actcgagcccagatgtgaagcagca

SEQ ID NO: 4237526 - DNA, 25 bp, Homo sapien
tacagggctttaagcacgtgtacaa

SEQ ID NO: 4237527 - DNA, 25 bp, Homo sapien
cccattgcaggagaaataacgtgta

SEQ ID NO: 4237528 - DNA, 25 bp, Homo sapien
gaaataacgtgtagtcaaacagtgc

SEQ ID NO: 4237529 - DNA, 25 bp, Homo sapien
tctttaggaaggaagcggacttcat

SEQ ID NO: 4237530 - DNA, 25 bp, Homo sapien
caggccagggccctctttaggaagg

SEQ ID NO: 4237531 - DNA, 25 bp, Homo sapien
ttggacgaggttcgcacttgggtct

SEQ ID NO: 4237532 - DNA, 25 bp, Homo sapien
cttggacgaggttcgcacttgggtc

SEQ ID NO: 4237533 - DNA, 25 bp, Homo sapien
gaaccttggacgaggttcgcacttg

SEQ ID NO: 4237534 - DNA, 25 bp, Homo sapien
accttggacgaggttcgcacttggg

SEQ ID NO: 4237535 - DNA, 25 bp, Homo sapien
gactccaccagtgagacgggtctct

SEQ ID NO: 4237536 - DNA, 25 bp, Homo sapien
taggaaggaagtggacttcatgcta

SEQ ID NO: 4237537 - DNA, 25 bp, Homo sapien
cttcatgctaagcatggaaggaggg

SEQ ID NO: 4237538 - DNA, 25 bp, Homo sapien
tgtggtcgacatcgcacttgggtct

SEQ ID NO: 4237539 - DNA, 25 bp, Homo sapien
agagagagtgcttaggaaccccgca

SEQ ID NO: 4237540 - DNA, 25 bp, Homo sapien
gaaaatattcagcttcgagtgtgca

SEQ ID NO: 4237541 - DNA, 25 bp, Homo sapien
aagaatatgcaggaactcctcggcg

SEQ ID NO: 4237542 - DNA, 25 bp, Homo sapien
aaaaagctagaagcgcgcgtgcaaa

SEQ ID NO: 4237543 - DNA, 25 bp, Homo sapien
tagagcacggtgtaagttgggtcct

SEQ ID NO: 4237544 - DNA, 25 bp, Homo sapien
gccttttcgggcttggacaccagca

SEQ ID NO: 4237545 - DNA, 25 bp, Homo sapien
tagtgcaggctcacagcgtagccct

SEQ ID NO: 4237546 - DNA, 25 bp, Homo sapien
ttaaattccgccagcgcgttggccg

SEQ ID NO: 4237547 - DNA, 25 bp, Homo sapien
gcgcagcggcactagcgggatggtg

SEQ ID NO: 4237548 - DNA, 25 bp, Homo sapien
ggtccgtgtaggagcagcttgcgca

SEQ ID NO: 4237549 - DNA, 25 bp, Homo sapien
cagggtccgtgtaggagcagcttgc

SEQ ID NO: 4237550 - DNA, 25 bp, Homo sapien
cagcagggtccgtgtaggagcagct

SEQ ID NO: 4237551 - DNA, 25 bp, Homo sapien
gcttgggcgcgctgcggctgcgctc

SEQ ID NO: 4237552 - DNA, 25 bp, Homo sapien
cagctgttcgccgagcaggtcctcg

SEQ ID NO: 4237553 - DNA, 25 bp, Homo sapien
caggtcctcggtgatggagccaagc

SEQ ID NO: 4237554 - DNA, 25 bp, Homo sapien
gcagccctcgggttgctcctcttcc

SEQ ID NO: 4237555 - DNA, 25 bp, Homo sapien
tcaaagtgcatggcgaccactagcg

SEQ ID NO: 4237556 - DNA, 25 bp, Homo sapien
tgcatggcgaccactagcgcacgct

SEQ ID NO: 4237557 - DNA, 25 bp, Homo sapien
aaagtgcatggcgaccactagcgca

SEQ ID NO: 4237558 - DNA, 25 bp, Homo sapien
atggcgaccactagcgcacgctgcg

SEQ ID NO: 4237559 - DNA, 25 bp, Homo sapien
ttctccagagtatccaacaagtccc

SEQ ID NO: 4237560 - DNA, 25 bp, Homo sapien
ctccccacggccattctccagagta

SEQ ID NO: 4237561 - DNA, 25 bp, Homo sapien
ccccacggccattctccagagtatc

SEQ ID NO: 4237562 - DNA, 25 bp, Homo sapien
cagagtatccaacaagtccccgcac

SEQ ID NO: 4237563 - DNA, 25 bp, Homo sapien
gctcgcccaggtcgctaataagttg

SEQ ID NO: 4237564 - DNA, 25 bp, Homo sapien
atggagctctcgctgcccgtgctgt

SEQ ID NO: 4237565 - DNA, 25 bp, Homo sapien
cacgtcgttgccgaagctgagctcg

SEQ ID NO: 4237566 - DNA, 25 bp, Homo sapien
tcacccgcaagtcggcctgcagggt

SEQ ID NO: 4237567 - DNA, 25 bp, Homo sapien
taactgtaaacaaaacgcgactctc

SEQ ID NO: 4237568 - DNA, 25 bp, Homo sapien
gctaaagggttgcattaaagcctca

SEQ ID NO: 4237569 - DNA, 25 bp, Homo sapien
ccaagtgtaggtctgggccccaaat

SEQ ID NO: 4237570 - DNA, 25 bp, Homo sapien
catggagtgagatcttttgagcaag

SEQ ID NO: 4237571 - DNA, 25 bp, Homo sapien
agcaaaagaagacgaagttcccctg

SEQ ID NO: 4237572 - DNA, 25 bp, Homo sapien
gaacgtaggtcctgaagacgagccc

SEQ ID NO: 4237573 - DNA, 25 bp, Homo sapien
gctggttcctggcttcgccaaggga

SEQ ID NO: 4237574 - DNA, 25 bp, Homo sapien
tcagagcccgagatagtttctagcc

SEQ ID NO: 4237575 - DNA, 25 bp, Homo sapien
cagacgttggtgaaggtccaggaac

SEQ ID NO: 4237576 - DNA, 25 bp, Homo sapien
acaggactgtatggcgggtctccca

SEQ ID NO: 4237577 - DNA, 25 bp, Homo sapien
ccttgaggacaggactgtatggcgg

SEQ ID NO: 4237578 - DNA, 25 bp, Homo sapien
aggacaggactgtatggcgggtctc

SEQ ID NO: 4237579 - DNA, 25 bp, Homo sapien
tgaggacaggactgtatggcgggtc

SEQ ID NO: 4237580 - DNA, 25 bp, Homo sapien
tactcttacacatacactacggccg

SEQ ID NO: 4237581 - DNA, 25 bp, Homo sapien
taattctcacgatgccatgaggagg

SEQ ID NO: 4237582 - DNA, 25 bp, Homo sapien
gagccatgtcctctgacgtcaggag

SEQ ID NO: 4237583 - DNA, 25 bp, Homo sapien
tatacaaggtggtcccgagtgatct

SEQ ID NO: 4237584 - DNA, 25 bp, Homo sapien
ggttggctattaaatctggaaacag

SEQ ID NO: 4237585 - DNA, 25 bp, Homo sapien
ttaggaccagagcactaatataggt

SEQ ID NO: 4237586 - DNA, 25 bp, Homo sapien
gattagagatacaaccaaagagcac

SEQ ID NO: 4237587 - DNA, 25 bp, Homo sapien
gcacagtaaactgcatggacattta

SEQ ID NO: 4237588 - DNA, 25 bp, Homo sapien
tctcctctctcacacgaggttggaa

SEQ ID NO: 4237589 - DNA, 25 bp, Homo sapien
tagtgtaatgaaggtcttctcctct

SEQ ID NO: 4237590 - DNA, 25 bp, Homo sapien
gctgggccagcatgaattagtgtaa

SEQ ID NO: 4237591 - DNA, 25 bp, Homo sapien
gtgttaacagcacctcacatctggg

SEQ ID NO: 4237592 - DNA, 25 bp, Homo sapien
cagaaagacgtgagtcaaattcttg

SEQ ID NO: 4237593 - DNA, 25 bp, Homo sapien
agaaagacgtgagtcaaattcttga

SEQ ID NO: 4237594 - DNA, 25 bp, Homo sapien
gaaagacgtgagtcaaattcttgaa

SEQ ID NO: 4237595 - DNA, 25 bp, Homo sapien
gaaagaggaccatgttacaggccca

SEQ ID NO: 4237596 - DNA, 25 bp, Homo sapien
cagtgtacggtgcaactttaggagg

SEQ ID NO: 4237597 - DNA, 25 bp, Homo sapien
cataccgtgggaaagtcagactcta

SEQ ID NO: 4237598 - DNA, 25 bp, Homo sapien
tgtcccagtggcctaaggagtcttg

SEQ ID NO: 4237599 - DNA, 25 bp, Homo sapien
tcgggaaaacagacctcctgggctg

SEQ ID NO: 4237600 - DNA, 25 bp, Homo sapien
acctgtagatgcgtgtttccactga

SEQ ID NO: 4237601 - DNA, 25 bp, Homo sapien
ggaagccactaacaatggcatccat

SEQ ID NO: 4237602 - DNA, 25 bp, Homo sapien
tgttcctctacattctacctgtaga

SEQ ID NO: 4237603 - DNA, 25 bp, Homo sapien
gtttccactgagcacaacggaagcc

SEQ ID NO: 4237604 - DNA, 25 bp, Homo sapien
ttggtcaaggcagtagcaaagttcc

SEQ ID NO: 4237605 - DNA, 25 bp, Homo sapien
attctgttggtcaaggcagtagcaa

SEQ ID NO: 4237606 - DNA, 25 bp, Homo sapien
tgtaattcacacaatgtcgcttccc

SEQ ID NO: 4237607 - DNA, 25 bp, Homo sapien
cttgtaattcacacaatgtcgcttc

SEQ ID NO: 4237608 - DNA, 25 bp, Homo sapien
ctacagaaacacaggtaatgccagc

SEQ ID NO: 4237609 - DNA, 25 bp, Homo sapien
aacacaggtaatgccagcaaacccc

SEQ ID NO: 4237610 - DNA, 25 bp, Homo sapien
ccccacttgacctgattcttcgata

SEQ ID NO: 4237611 - DNA, 25 bp, Homo sapien
gattcttcgataactgctccctgca

SEQ ID NO: 4237612 - DNA, 25 bp, Homo sapien
ccgcaaggcgatggcaaggactatc

SEQ ID NO: 4237613 - DNA, 25 bp, Homo sapien
ccaccgcaaggcgatggcaaggact

SEQ ID NO: 4237614 - DNA, 25 bp, Homo sapien
ctggccaccgcaaggcgatggcaag

SEQ ID NO: 4237615 - DNA, 25 bp, Homo sapien
caaggcgatggcaaggactatcgcg

SEQ ID NO: 4237616 - DNA, 25 bp, Homo sapien
tgggagctcctgtctcgtcagctgt

SEQ ID NO: 4237617 - DNA, 25 bp, Homo sapien
gagggtgtgccacgatgggagctcc

SEQ ID NO: 4237618 - DNA, 25 bp, Homo sapien
ggtaatccagcatgtcggcctcgga

SEQ ID NO: 4237619 - DNA, 25 bp, Homo sapien
tcatcactgtagatagccggagggt

SEQ ID NO: 4237620 - DNA, 25 bp, Homo sapien
taccacaggaggtccagggaggggc

SEQ ID NO: 4237621 - DNA, 25 bp, Homo sapien
ctaccacaggaggtccagggagggg

SEQ ID NO: 4237622 - DNA, 25 bp, Homo sapien
cacaggaggtccagggaggggccca

SEQ ID NO: 4237623 - DNA, 25 bp, Homo sapien
cccgcactgtggaagaccgcacagg

SEQ ID NO: 4237624 - DNA, 25 bp, Homo sapien
tacgtcctgtttgggaacatgggca

SEQ ID NO: 4237625 - DNA, 25 bp, Homo sapien
cgcactgtggaagaccgcacaggga

SEQ ID NO: 4237626 - DNA, 25 bp, Homo sapien
aacatgggcacgtacagggtggtcc

SEQ ID NO: 4237627 - DNA, 25 bp, Homo sapien
aggccacctgcttgaactgcaacag

SEQ ID NO: 4237628 - DNA, 25 bp, Homo sapien
tatcacagtagacgtggtggacagc

SEQ ID NO: 4237629 - DNA, 25 bp, Homo sapien
tcatggcaccctgccaagtagaggc

SEQ ID NO: 4237630 - DNA, 25 bp, Homo sapien
tatcctggacgtagggcagatcctc

SEQ ID NO: 4237631 - DNA, 25 bp, Homo sapien
agcacaaacagtgggcacggggttc

SEQ ID NO: 4237632 - DNA, 25 bp, Homo sapien
cacaaacagtgggcacggggttctc

SEQ ID NO: 4237633 - DNA, 25 bp, Homo sapien
aaacagtgggcacggggttctcagc

SEQ ID NO: 4237634 - DNA, 25 bp, Homo sapien
ttggagcacaaacagtgggcacggg

SEQ ID NO: 4237635 - DNA, 25 bp, Homo sapien
tccagtgtctgggatgtgcggccag

SEQ ID NO: 4237636 - DNA, 25 bp, Homo sapien
aatggacgctccagtgtctgggatg

SEQ ID NO: 4237637 - DNA, 25 bp, Homo sapien
caaatggacgctccagtgtctggga

SEQ ID NO: 4237638 - DNA, 25 bp, Homo sapien
tgcaaatggacgctccagtgtctgg

SEQ ID NO: 4237639 - DNA, 25 bp, Homo sapien
caggccgatgcaagaagccaaggct

SEQ ID NO: 4237640 - DNA, 25 bp, Homo sapien
tggacagggatgccagcaaggccag

SEQ ID NO: 4237641 - DNA, 25 bp, Homo sapien
ccacacaggccgatgcaagaagcca

SEQ ID NO: 4237642 - DNA, 25 bp, Homo sapien
cacaggccgatgcaagaagccaagg

SEQ ID NO: 4237643 - DNA, 25 bp, Homo sapien
catgtggccgaggactgaaaagctc

SEQ ID NO: 4237644 - DNA, 25 bp, Homo sapien
tgccagccatgtggccgaggactga

SEQ ID NO: 4237645 - DNA, 25 bp, Homo sapien
tggccgaggactgaaaagctcccgt

SEQ ID NO: 4237646 - DNA, 25 bp, Homo sapien
gactgaaaagctcccgtgggagatg

SEQ ID NO: 4237647 - DNA, 25 bp, Homo sapien
cactgtgacagtagccccaggggag

SEQ ID NO: 4237648 - DNA, 25 bp, Homo sapien
gcagcgctgtcctctcacaggcata

SEQ ID NO: 4237649 - DNA, 25 bp, Homo sapien
tcgggttctgtctacagccctggct

SEQ ID NO: 4237650 - DNA, 25 bp, Homo sapien
gcagcgtgtagtagattcgggttct

SEQ ID NO: 4237651 - DNA, 25 bp, Homo sapien
cctgcttagaaatcaatcatccaga

SEQ ID NO: 4237652 - DNA, 25 bp, Homo sapien
tgaggagcgcggctctcacatgtta

SEQ ID NO: 4237653 - DNA, 25 bp, Homo sapien
gaggagcgcaactctcacttgttac

SEQ ID NO: 4237654 - DNA, 25 bp, Homo sapien
ttacttgagttttacccagcaggtg

SEQ ID NO: 4237655 - DNA, 25 bp, Homo sapien
gatatttgcatacaccgaaccatct

SEQ ID NO: 4237656 - DNA, 25 bp, Homo sapien
catctactcttgttctgaagaggag

SEQ ID NO: 4237657 - DNA, 25 bp, Homo sapien
gcatacaccgaaccatctactcttg

SEQ ID NO: 4237658 - DNA, 25 bp, Homo sapien
tgtgatatttgcatacaccgaacca

SEQ ID NO: 4237659 - DNA, 25 bp, Homo sapien
tctagctccaggcatacggcagatg

SEQ ID NO: 4237660 - DNA, 25 bp, Homo sapien
tgtggcaaggaactcaaggcaactg

SEQ ID NO: 4237661 - DNA, 25 bp, Homo sapien
gaacgatgtaagcaaagccctgtgg

SEQ ID NO: 4237662 - DNA, 25 bp, Homo sapien
gacagaacgccatggaaagtgcaca

SEQ ID NO: 4237663 - DNA, 25 bp, Homo sapien
tctctaacaattttcatactgctcc

SEQ ID NO: 4237664 - DNA, 25 bp, Homo sapien
ctctctaacaattttcatactgctc

SEQ ID NO: 4237665 - DNA, 25 bp, Homo sapien
tcctccttcccacaggttcagcgtc

SEQ ID NO: 4237666 - DNA, 25 bp, Homo sapien
ctggccgtgaactcgcccctgcaaa

SEQ ID NO: 4237667 - DNA, 25 bp, Homo sapien
gaactcgcccctgcaaatcctcctt

SEQ ID NO: 4237668 - DNA, 25 bp, Homo sapien
ctccttcccacaggttcagcgtcca

SEQ ID NO: 4237669 - DNA, 25 bp, Homo sapien
gaacccatgctcatcagtgtcagca

SEQ ID NO: 4237670 - DNA, 25 bp, Homo sapien
cccatgctcatcagtgtcagcaggg

SEQ ID NO: 4237671 - DNA, 25 bp, Homo sapien
tgtcagcagggagggacagtgtcat

SEQ ID NO: 4237672 - DNA, 25 bp, Homo sapien
tgctccaaagaacccatgctcatca

SEQ ID NO: 4237673 - DNA, 25 bp, Homo sapien
tgcagcccctcatgcttagaatcct

SEQ ID NO: 4237674 - DNA, 25 bp, Homo sapien
agctgccatcgtgagttggagctgc

SEQ ID NO: 4237675 - DNA, 25 bp, Homo sapien
agcccctcatgcttagaatcctgtc

SEQ ID NO: 4237676 - DNA, 25 bp, Homo sapien
caggaccagagctgccatcgtgagt

SEQ ID NO: 4237677 - DNA, 25 bp, Homo sapien
tttcctgatcccctggctctgaaga

SEQ ID NO: 4237678 - DNA, 25 bp, Homo sapien
gcccgccaggctgtttcgtcctgtg

SEQ ID NO: 4237679 - DNA, 25 bp, Homo sapien
tgtgcccgccaggctgtttcgtcct

SEQ ID NO: 4237680 - DNA, 25 bp, Homo sapien
gtttcctgatcccctggctctgaag

SEQ ID NO: 4237681 - DNA, 25 bp, Homo sapien
gtacttaaaggtctggtgcttggca

SEQ ID NO: 4237682 - DNA, 25 bp, Homo sapien
tgaaagctgtgcaagccgagggctc

SEQ ID NO: 4237683 - DNA, 25 bp, Homo sapien
tattccgttactcaggcatcgtcta

SEQ ID NO: 4237684 - DNA, 25 bp, Homo sapien
gcttggcaaacatggcagcgagtgt

SEQ ID NO: 4237685 - DNA, 25 bp, Homo sapien
gatgtgccaatctccagtgactcac

SEQ ID NO: 4237686 - DNA, 25 bp, Homo sapien
atgaaactctgcatgaggcagctgg

SEQ ID NO: 4237687 - DNA, 25 bp, Homo sapien
tgtgccaatctccagtgactcacag

SEQ ID NO: 4237688 - DNA, 25 bp, Homo sapien
gacagatgtgccaatctccagtgac

SEQ ID NO: 4237689 - DNA, 25 bp, Homo sapien
ctgtgattgtgatgaagagcgaggg

SEQ ID NO: 4237690 - DNA, 25 bp, Homo sapien
ggcaataggagggtccagtcactaa

SEQ ID NO: 4237691 - DNA, 25 bp, Homo sapien
gagggtccagtcactaatccagtga

SEQ ID NO: 4237692 - DNA, 25 bp, Homo sapien
tccggatacagggtaagcaactgtg

SEQ ID NO: 4237693 - DNA, 25 bp, Homo sapien
ccaccctgcccactcactctgggca

SEQ ID NO: 4237694 - DNA, 25 bp, Homo sapien
cgcccaccctgcccactcactctgg

SEQ ID NO: 4237695 - DNA, 25 bp, Homo sapien
gcccaccctgcccactcactctggg

SEQ ID NO: 4237696 - DNA, 25 bp, Homo sapien
caccctgcccactcactctgggcat

SEQ ID NO: 4237697 - DNA, 25 bp, Homo sapien
aggagccacagagacaccaaggcag

SEQ ID NO: 4237698 - DNA, 25 bp, Homo sapien
cgctgcttgcaaggatcttccagga

SEQ ID NO: 4237699 - DNA, 25 bp, Homo sapien
cttgcaaggatcttccaggagccac

SEQ ID NO: 4237700 - DNA, 25 bp, Homo sapien
gacaccaaggcagggtatgagtcca

SEQ ID NO: 4237701 - DNA, 25 bp, Homo sapien
gcatatgagtccatcgtccaccttg

SEQ ID NO: 4237702 - DNA, 25 bp, Homo sapien
gctgccagcaaggatctcccaagag

SEQ ID NO: 4237703 - DNA, 25 bp, Homo sapien
gagtccatcgtccaccttgactggc

SEQ ID NO: 4237704 - DNA, 25 bp, Homo sapien
aagccaccaccgcagggctcaagtc

SEQ ID NO: 4237705 - DNA, 25 bp, Homo sapien
tttttatatagtcgctctggagggc

SEQ ID NO: 4237706 - DNA, 25 bp, Homo sapien
actcaggtgggcagaattgattccc

SEQ ID NO: 4237707 - DNA, 25 bp, Homo sapien
tcacagggctgtagtcaaggcgttg

SEQ ID NO: 4237708 - DNA, 25 bp, Homo sapien
caggcggcatgttcttctggaggcc

SEQ ID NO: 4237709 - DNA, 25 bp, Homo sapien
ttcaacccaggcttatcatacagga

SEQ ID NO: 4237710 - DNA, 25 bp, Homo sapien
tcgagcacattcttgcccgtgcgtg

SEQ ID NO: 4237711 - DNA, 25 bp, Homo sapien
catacaggaatgtgtagatcacttc

SEQ ID NO: 4237712 - DNA, 25 bp, Homo sapien
cccgtgcgtgacatgtgtattatgc

SEQ ID NO: 4237713 - DNA, 25 bp, Homo sapien
tttatcctttccaccaccagtggtg

SEQ ID NO: 4237714 - DNA, 25 bp, Homo sapien
gaccttgtggaggatgccaacacat

SEQ ID NO: 4237715 - DNA, 25 bp, Homo sapien
ttccactggtgtggaccttgtggag

SEQ ID NO: 4237716 - DNA, 25 bp, Homo sapien
gtgcacagggccagatcatgctgga

SEQ ID NO: 4237717 - DNA, 25 bp, Homo sapien
aaaaaatgatatccaccagtccttt

SEQ ID NO: 4237718 - DNA, 25 bp, Homo sapien
taaaaaatgatatccaccagtcctt

SEQ ID NO: 4237719 - DNA, 25 bp, Homo sapien
aaaaatgatatccaccagtcctttc

SEQ ID NO: 4237720 - DNA, 25 bp, Homo sapien
ttaaaaaatgatatccaccagtcct

SEQ ID NO: 4237721 - DNA, 25 bp, Homo sapien
gtttcctcggtgataggcctctgta

SEQ ID NO: 4237722 - DNA, 25 bp, Homo sapien
tgtttgatttcacgaaaggactggc

SEQ ID NO: 4237723 - DNA, 25 bp, Homo sapien
ccagcaactttagccagagccaaga

SEQ ID NO: 4237724 - DNA, 25 bp, Homo sapien
tgtagggtctcttctaacccgtgag

SEQ ID NO: 4237725 - DNA, 25 bp, Homo sapien
acaaagaaccgacatttccatcacc

SEQ ID NO: 4237726 - DNA, 25 bp, Homo sapien
aataacaaagaaccgacatttccat

SEQ ID NO: 4237727 - DNA, 25 bp, Homo sapien
taacaaagaaccgacatttccatca

SEQ ID NO: 4237728 - DNA, 25 bp, Homo sapien
aaagaaccgacatttccatcaccca

SEQ ID NO: 4237729 - DNA, 25 bp, Homo sapien
ttaaagcttctggttttctcacatc

SEQ ID NO: 4237730 - DNA, 25 bp, Homo sapien
ttttaaagcttctggttttctcaca

SEQ ID NO: 4237731 - DNA, 25 bp, Homo sapien
taaagcttctggttttctcacatct

SEQ ID NO: 4237732 - DNA, 25 bp, Homo sapien
tttaaagcttctggttttctcacat

SEQ ID NO: 4237733 - DNA, 25 bp, Homo sapien
gtaactggaattaccggcttgtgcc

SEQ ID NO: 4237734 - DNA, 25 bp, Homo sapien
ttgtgccaccacgcctggctaattt

SEQ ID NO: 4237735 - DNA, 25 bp, Homo sapien
ccaagtaactggaattaccggcttg

SEQ ID NO: 4237736 - DNA, 25 bp, Homo sapien
aagtaactggaattaccggcttgtg

SEQ ID NO: 4237737 - DNA, 25 bp, Homo sapien
gacgaacgtgtccactcttgagcac

SEQ ID NO: 4237738 - DNA, 25 bp, Homo sapien
cactgtgagttagacagagcagcga

SEQ ID NO: 4237739 - DNA, 25 bp, Homo sapien
gtgtcatcaggaccacagcggttgc

SEQ ID NO: 4237740 - DNA, 25 bp, Homo sapien
gagcacctcaaagtctagccaggaa

SEQ ID NO: 4237741 - DNA, 25 bp, Homo sapien
aggaggatgcggagctccagctcca

SEQ ID NO: 4237742 - DNA, 25 bp, Homo sapien
ccagctccaccgccaggacttccat

SEQ ID NO: 4237743 - DNA, 25 bp, Homo sapien
gcagggccaggaggatgcggagctc

SEQ ID NO: 4237744 - DNA, 25 bp, Homo sapien
gggccaggaggatgcggagctccag

SEQ ID NO: 4237745 - DNA, 25 bp, Homo sapien
caaggctgcatcaaacatcttttta

SEQ ID NO: 4237746 - DNA, 25 bp, Homo sapien
taaatattcacaagtcggcatacca

SEQ ID NO: 4237747 - DNA, 25 bp, Homo sapien
caatacaacgatttcccaaggctgc

SEQ ID NO: 4237748 - DNA, 25 bp, Homo sapien
ggcataccaaagacaatacaacgat

SEQ ID NO: 4237749 - DNA, 25 bp, Homo sapien
aaggcgccagatgtgagtgttgcac

SEQ ID NO: 4237750 - DNA, 25 bp, Homo sapien
tcaaaaaccagaaaggcgccagatg

SEQ ID NO: 4237751 - DNA, 25 bp, Homo sapien
gtgttgcaccgacacatggcccgca

SEQ ID NO: 4237752 - DNA, 25 bp, Homo sapien
atggcccgcacatgccttcgcaagc

SEQ ID NO: 4237753 - DNA, 25 bp, Homo sapien
gttgctgctgccccctgtcaatggc

SEQ ID NO: 4237754 - DNA, 25 bp, Homo sapien
ttgctgctgccccctgtcaatggct

SEQ ID NO: 4237755 - DNA, 25 bp, Homo sapien
ctgctgccccctgtcaatggctcct

SEQ ID NO: 4237756 - DNA, 25 bp, Homo sapien
tgctgctgccccctgtcaatggctc

SEQ ID NO: 4237757 - DNA, 25 bp, Homo sapien
aatgtccctcttgtgcagctatcca

SEQ ID NO: 4237758 - DNA, 25 bp, Homo sapien
tccacagcatgtaggttaatcacta

SEQ ID NO: 4237759 - DNA, 25 bp, Homo sapien
tccttcatgtaacctgggattgctg

SEQ ID NO: 4237760 - DNA, 25 bp, Homo sapien
tttccatgtcatagagccattcacc

SEQ ID NO: 4237761 - DNA, 25 bp, Homo sapien
tgcaaggggttctttaggccctgag

SEQ ID NO: 4237762 - DNA, 25 bp, Homo sapien
gacatccttagcacgctctgcaagg

SEQ ID NO: 4237763 - DNA, 25 bp, Homo sapien
tgggagtccttggagagtaagacat

SEQ ID NO: 4237764 - DNA, 25 bp, Homo sapien
gagagtaagacatccttagcacgct

SEQ ID NO: 4237765 - DNA, 25 bp, Homo sapien
aatgtctgtgaaaggagacactgtg

SEQ ID NO: 4237766 - DNA, 25 bp, Homo sapien
tctgtgaaaggagacactgtggaaa

SEQ ID NO: 4237767 - DNA, 25 bp, Homo sapien
cacagccgactgagaaatgtctgtg

SEQ ID NO: 4237768 - DNA, 25 bp, Homo sapien
actgtggaaaaatacaatgaatgcc

SEQ ID NO: 4237769 - DNA, 25 bp, Homo sapien
cctggtagcagtgacattagtttca

SEQ ID NO: 4237770 - DNA, 25 bp, Homo sapien
tttcagagtccgctcgcctaggcat

SEQ ID NO: 4237771 - DNA, 25 bp, Homo sapien
gctatctgctccaagtagaggagat

SEQ ID NO: 4237772 - DNA, 25 bp, Homo sapien
gaggagatacctggtagcagtgaca

SEQ ID NO: 4237773 - DNA, 25 bp, Homo sapien
cctcttgagatattccaccttgttt

SEQ ID NO: 4237774 - DNA, 25 bp, Homo sapien
ggaagttggtccctcttgagatatt

SEQ ID NO: 4237775 - DNA, 25 bp, Homo sapien
tctgagaattcttgtgctctctcag

SEQ ID NO: 4237776 - DNA, 25 bp, Homo sapien
gagaattcttgtgctctctcagtct

SEQ ID NO: 4237777 - DNA, 25 bp, Homo sapien
ttaaccacccccacagccaaactca

SEQ ID NO: 4237778 - DNA, 25 bp, Homo sapien
taaccacccccacagccaaactcac

SEQ ID NO: 4237779 - DNA, 25 bp, Homo sapien
tcttctgcaattatggtgccagcca

SEQ ID NO: 4237780 - DNA, 25 bp, Homo sapien
cctagtgtgccttcctgatttcaac

SEQ ID NO: 4237781 - DNA, 25 bp, Homo sapien
tgatttcaacacaacaagctcttgg

SEQ ID NO: 4237782 - DNA, 25 bp, Homo sapien
tggctgttgaaatgcaggcacggct

SEQ ID NO: 4237783 - DNA, 25 bp, Homo sapien
ttcctggcatcctcacttgcatctg

SEQ ID NO: 4237784 - DNA, 25 bp, Homo sapien
gaggtcctccaggtcacgctcccca

SEQ ID NO: 4237785 - DNA, 25 bp, Homo sapien
aggtcctccaggtcacgctccccat

SEQ ID NO: 4237786 - DNA, 25 bp, Homo sapien
ctcttcgtttgatgtgctaaagttt

SEQ ID NO: 4237787 - DNA, 25 bp, Homo sapien
tcccctcttcacagcaccgatgatg

SEQ ID NO: 4237788 - DNA, 25 bp, Homo sapien
ttcacagcaccgatgatgtctgcgg

SEQ ID NO: 4237789 - DNA, 25 bp, Homo sapien
cgtttgatgtgctaaagtttgatgt

SEQ ID NO: 4237790 - DNA, 25 bp, Homo sapien
ctcctcgaggacattggagggtcgt

SEQ ID NO: 4237791 - DNA, 25 bp, Homo sapien
gggcctcatgtacaactgcttcttg

SEQ ID NO: 4237792 - DNA, 25 bp, Homo sapien
gcctgcgtaggccattctgtcaagt

SEQ ID NO: 4237793 - DNA, 25 bp, Homo sapien
taacgcctgtggtgcctggttcagg

SEQ ID NO: 4237794 - DNA, 25 bp, Homo sapien
cacagctagctgggggtagactctt

SEQ ID NO: 4237795 - DNA, 25 bp, Homo sapien
tcagaaggcagcggcgccctggccc

SEQ ID NO: 4237796 - DNA, 25 bp, Homo sapien
cagctagctgggggtagactcttgc

SEQ ID NO: 4237797 - DNA, 25 bp, Homo sapien
gctagctgggggtagactcttgccc

SEQ ID NO: 4237798 - DNA, 25 bp, Homo sapien
taattgtacatgtatacttgtcatt

SEQ ID NO: 4237799 - DNA, 25 bp, Homo sapien
aagatgaatgtctatttaattgtac

SEQ ID NO: 4237800 - DNA, 25 bp, Homo sapien
gcctgacacacagtatgtacttgct

SEQ ID NO: 4237801 - DNA, 25 bp, Homo sapien
ctatttaattgtacatgtatacttg

SEQ ID NO: 4237802 - DNA, 25 bp, Homo sapien
aagcccttaaggacaaggtcatagc

SEQ ID NO: 4237803 - DNA, 25 bp, Homo sapien
cacgaggtcctgtaaagcccttaag

SEQ ID NO: 4237804 - DNA, 25 bp, Homo sapien
gagccacgaggtcctgtaaagccct

SEQ ID NO: 4237805 - DNA, 25 bp, Homo sapien
aggtcatagctcttcgaagcgtggg

SEQ ID NO: 4237806 - DNA, 25 bp, Homo sapien
tccagctgggccacgaaactggtta

SEQ ID NO: 4237807 - DNA, 25 bp, Homo sapien
tacttcccgatgctataagggccat

SEQ ID NO: 4237808 - DNA, 25 bp, Homo sapien
ccagtcgataccagcatttggtcca

SEQ ID NO: 4237809 - DNA, 25 bp, Homo sapien
cgaaactggttacttcccgatgcta

SEQ ID NO: 4237810 - DNA, 25 bp, Homo sapien
gtgttaaggacctgactccgggcaa

SEQ ID NO: 4237811 - DNA, 25 bp, Homo sapien
ttaaggacctgactccgggcaagac

SEQ ID NO: 4237812 - DNA, 25 bp, Homo sapien
tgttaaggacctgactccgggcaag

SEQ ID NO: 4237813 - DNA, 25 bp, Homo sapien
aaggacctgactccgggcaagacag

SEQ ID NO: 4237814 - DNA, 25 bp, Homo sapien
ccttgatgcgtagcagctctggagg

SEQ ID NO: 4237815 - DNA, 25 bp, Homo sapien
acccttcggtgatgcttgtccttga

SEQ ID NO: 4237816 - DNA, 25 bp, Homo sapien
gttcggaagcccgagagtctcttct

SEQ ID NO: 4237817 - DNA, 25 bp, Homo sapien
cacaacaggagacccttcggtgatg

SEQ ID NO: 4237818 - DNA, 25 bp, Homo sapien
tgggtgtaattggaaactgaatggt

SEQ ID NO: 4237819 - DNA, 25 bp, Homo sapien
ctgtgggtgggtgtaattggaaact

SEQ ID NO: 4237820 - DNA, 25 bp, Homo sapien
ggtgggtgtaattggaaactgaatg

SEQ ID NO: 4237821 - DNA, 25 bp, Homo sapien
tgggtgggtgtaattggaaactgaa

SEQ ID NO: 4237822 - DNA, 25 bp, Homo sapien
aggcagatcgcacagaaatgagggc

SEQ ID NO: 4237823 - DNA, 25 bp, Homo sapien
ccagggaggcagatcgcacagaaat

SEQ ID NO: 4237824 - DNA, 25 bp, Homo sapien
agggaggcagatcgcacagaaatga

SEQ ID NO: 4237825 - DNA, 25 bp, Homo sapien
caccagggaggcagatcgcacagaa

SEQ ID NO: 4237826 - DNA, 25 bp, Homo sapien
taaggccctgaaggtctgaagcctt

SEQ ID NO: 4237827 - DNA, 25 bp, Homo sapien
ctaaggccctgaaggtctgaagcct

SEQ ID NO: 4237828 - DNA, 25 bp, Homo sapien
actctccctgcaaatgcattcatct

SEQ ID NO: 4237829 - DNA, 25 bp, Homo sapien
tccttcactagttccagagctcttc

SEQ ID NO: 4237830 - DNA, 25 bp, Homo sapien
cagatagtggccctcaggttccccg

SEQ ID NO: 4237831 - DNA, 25 bp, Homo sapien
ccagcagatagtggccctcaggttc

SEQ ID NO: 4237832 - DNA, 25 bp, Homo sapien
gatagtggccctcaggttccccgaa

SEQ ID NO: 4237833 - DNA, 25 bp, Homo sapien
agcagatagtggccctcaggttccc

SEQ ID NO: 4237834 - DNA, 25 bp, Homo sapien
cggctccggtttggcactgccggct

SEQ ID NO: 4237835 - DNA, 25 bp, Homo sapien
gttccgctgcggctccggtttggca

SEQ ID NO: 4237836 - DNA, 25 bp, Homo sapien
ggagaagctgcaagctgcgttccgc

SEQ ID NO: 4237837 - DNA, 25 bp, Homo sapien
acagggtgacgcaactgcttctgcc

SEQ ID NO: 4237838 - DNA, 25 bp, Homo sapien
gtccacaacaactccacaaagtttg

SEQ ID NO: 4237839 - DNA, 25 bp, Homo sapien
cacaaagtttgtacccggtgatggg

SEQ ID NO: 4237840 - DNA, 25 bp, Homo sapien
ctgcacgtcggtgtctctccaggga

SEQ ID NO: 4237841 - DNA, 25 bp, Homo sapien
gtcggtgtctctccagggaaaccca

SEQ ID NO: 4237842 - DNA, 25 bp, Homo sapien
ttcagccttcctccgtgagaggggc

SEQ ID NO: 4237843 - DNA, 25 bp, Homo sapien
cagggagaacatgttcagccttcct

SEQ ID NO: 4237844 - DNA, 25 bp, Homo sapien
tgaagccccgtgggtaagtgtgggc

SEQ ID NO: 4237845 - DNA, 25 bp, Homo sapien
gatgccccgagggtaagtgtggggc

SEQ ID NO: 4237846 - DNA, 25 bp, Homo sapien
aggccaggcaggttttcaggacgtt

SEQ ID NO: 4237847 - DNA, 25 bp, Homo sapien
gcaggttttcaggacgttgggcgac

SEQ ID NO: 4237848 - DNA, 25 bp, Homo sapien
tcaggccaggcaggttttcaggacg

SEQ ID NO: 4237849 - DNA, 25 bp, Homo sapien
caggcaggttttcaggacgttgggc

SEQ ID NO: 4237850 - DNA, 25 bp, Homo sapien
gacacgaatggctgtggggcctggg

SEQ ID NO: 4237851 - DNA, 25 bp, Homo sapien
ctggggacaagagccctgcatacat

SEQ ID NO: 4237852 - DNA, 25 bp, Homo sapien
gggcctggggacaagagccctgcat

SEQ ID NO: 4237853 - DNA, 25 bp, Homo sapien
ggcctggggacaagagccctgcata

SEQ ID NO: 4237854 - DNA, 25 bp, Homo sapien
cttctcacaaggacttttggtgtca

SEQ ID NO: 4237855 - DNA, 25 bp, Homo sapien
ccaaccagcgccaagtgagcacaaa

SEQ ID NO: 4237856 - DNA, 25 bp, Homo sapien
ccaaatatctccagctgcccaacca

SEQ ID NO: 4237857 - DNA, 25 bp, Homo sapien
ttctcacaaggacttttggtgtcat

SEQ ID NO: 4237858 - DNA, 25 bp, Homo sapien
agcccatcggcacatgagcccatgg

SEQ ID NO: 4237859 - DNA, 25 bp, Homo sapien
agatcccaagcccatcggcacatga

SEQ ID NO: 4237860 - DNA, 25 bp, Homo sapien
ggacgacaagctcacagatcccaag

SEQ ID NO: 4237861 - DNA, 25 bp, Homo sapien
gaatgttccatccagggatttcggg

SEQ ID NO: 4237862 - DNA, 25 bp, Homo sapien
ctttaaaatagaatgatggggagag

SEQ ID NO: 4237863 - DNA, 25 bp, Homo sapien
ttaaaatagaatgatggggagagtg

SEQ ID NO: 4237864 - DNA, 25 bp, Homo sapien
gatggggagagtggggaagactcac

SEQ ID NO: 4237865 - DNA, 25 bp, Homo sapien
atgatggggagagtggggaagactc

SEQ ID NO: 4237866 - DNA, 25 bp, Homo sapien
catgtaagtgaagctggagacacga

SEQ ID NO: 4237867 - DNA, 25 bp, Homo sapien
taacaggcatgtaagtgaagctgga

SEQ ID NO: 4237868 - DNA, 25 bp, Homo sapien
gtgaagctggagacacgatactggc

SEQ ID NO: 4237869 - DNA, 25 bp, Homo sapien
taagtgaagctggagacacgatact

SEQ ID NO: 4237870 - DNA, 25 bp, Homo sapien
gctggtgacacaacgagcagcaagt

SEQ ID NO: 4237871 - DNA, 25 bp, Homo sapien
gagcaaatgctccagacacaaggac

SEQ ID NO: 4237872 - DNA, 25 bp, Homo sapien
caaggaccacctgacgctggtgaca

SEQ ID NO: 4237873 - DNA, 25 bp, Homo sapien
taagtctgcatagcgagctggcacc

SEQ ID NO: 4237874 - DNA, 25 bp, Homo sapien
gaagatttctacagctgcaggctga

SEQ ID NO: 4237875 - DNA, 25 bp, Homo sapien
ggaggtgcggaggtaatgcgagagg

SEQ ID NO: 4237876 - DNA, 25 bp, Homo sapien
gaggtgcggaggtaatgcgagagga

SEQ ID NO: 4237877 - DNA, 25 bp, Homo sapien
cggtggttgatgtaggtccagtcct

SEQ ID NO: 4237878 - DNA, 25 bp, Homo sapien
tggaggtgcggaggtaatgcgagag

SEQ ID NO: 4237879 - DNA, 25 bp, Homo sapien
tccagaggaagtgccggtggccacg

SEQ ID NO: 4237880 - DNA, 25 bp, Homo sapien
caagcatcaggacggtgaggagtcc

SEQ ID NO: 4237881 - DNA, 25 bp, Homo sapien
gaggagtccagaggaagtgccggtg

SEQ ID NO: 4237882 - DNA, 25 bp, Homo sapien
cagccaagcatcaggacggtgagga

SEQ ID NO: 4237883 - DNA, 25 bp, Homo sapien
ccaattgaatcgtggttactccatg

SEQ ID NO: 4237884 - DNA, 25 bp, Homo sapien
ttgaatcgtggttactccatgtgtc

SEQ ID NO: 4237885 - DNA, 25 bp, Homo sapien
tccagaacccaattgaatcgtggtt

SEQ ID NO: 4237886 - DNA, 25 bp, Homo sapien
gactggtacccatctccagaaccca

SEQ ID NO: 4237887 - DNA, 25 bp, Homo sapien
gattgagcttcgctgtcatgaaact

SEQ ID NO: 4237888 - DNA, 25 bp, Homo sapien
acctgggtgttcagctgtgatgatt

SEQ ID NO: 4237889 - DNA, 25 bp, Homo sapien
acaccactcgggctgaaggatctgc

SEQ ID NO: 4237890 - DNA, 25 bp, Homo sapien
gctgtcatgaaacttccccagagtt

SEQ ID NO: 4237891 - DNA, 25 bp, Homo sapien
tctcctgaagctcggggatatccag

SEQ ID NO: 4237892 - DNA, 25 bp, Homo sapien
taaaagcctgtttgctaacctgctg

SEQ ID NO: 4237893 - DNA, 25 bp, Homo sapien
ccagggcttgttgattctgaagagc

SEQ ID NO: 4237894 - DNA, 25 bp, Homo sapien
gatatccagtggcttcagggtaaaa

SEQ ID NO: 4237895 - DNA, 25 bp, Homo sapien
gattacagagccttcgagcgttaca

SEQ ID NO: 4237896 - DNA, 25 bp, Homo sapien
cagttgcacactcgaggctggagga

SEQ ID NO: 4237897 - DNA, 25 bp, Homo sapien
caagttcccagaagagcagttgcac

SEQ ID NO: 4237898 - DNA, 25 bp, Homo sapien
gacatgggcagaaccagagctcctt

SEQ ID NO: 4237899 - DNA, 25 bp, Homo sapien
tcatcttgctgaatagcgtcactgc

SEQ ID NO: 4237900 - DNA, 25 bp, Homo sapien
ttctcatcttgctgaatagcgtcac

SEQ ID NO: 4237901 - DNA, 25 bp, Homo sapien
tcttgctgaatagcgtcactgctcc

SEQ ID NO: 4237902 - DNA, 25 bp, Homo sapien
catcttgctgaatagcgtcactgct

SEQ ID NO: 4237903 - DNA, 25 bp, Homo sapien
aaaaatatcgattgcattcatatgg

SEQ ID NO: 4237904 - DNA, 25 bp, Homo sapien
cagaggaagcggtacacataggaag

SEQ ID NO: 4237905 - DNA, 25 bp, Homo sapien
gcattcatatggtgtttccacgcag

SEQ ID NO: 4237906 - DNA, 25 bp, Homo sapien
gatatccttgcccatgtaagaaaaa

SEQ ID NO: 4237907 - DNA, 25 bp, Homo sapien
ctaggagcagcctgtgttttctggc

SEQ ID NO: 4237908 - DNA, 25 bp, Homo sapien
ggagcagcctgtgttttctggcatg

SEQ ID NO: 4237909 - DNA, 25 bp, Homo sapien
taggagcagcctgtgttttctggca

SEQ ID NO: 4237910 - DNA, 25 bp, Homo sapien
agcagcctgtgttttctggcatggc

SEQ ID NO: 4237911 - DNA, 25 bp, Homo sapien
aacccagtgccgcatggagacgcca

SEQ ID NO: 4237912 - DNA, 25 bp, Homo sapien
agtgccgcatggagacgccagggca

SEQ ID NO: 4237913 - DNA, 25 bp, Homo sapien
cccagtgccgcatggagacgccagg

SEQ ID NO: 4237914 - DNA, 25 bp, Homo sapien
gcccaacccagtgccgcatggagac

SEQ ID NO: 4237915 - DNA, 25 bp, Homo sapien
tgtgcattgacacgttgtgatccaa

SEQ ID NO: 4237916 - DNA, 25 bp, Homo sapien
ctctgtgcattgacacgttgtgatc

SEQ ID NO: 4237917 - DNA, 25 bp, Homo sapien
cattgacacgttgtgatccaagata

SEQ ID NO: 4237918 - DNA, 25 bp, Homo sapien
acacgttgtgatccaagatatactg

SEQ ID NO: 4237919 - DNA, 25 bp, Homo sapien
caagtgtgtactcaatgccattgga

SEQ ID NO: 4237920 - DNA, 25 bp, Homo sapien
ccacctcccctgatgaagatgagtg

SEQ ID NO: 4237921 - DNA, 25 bp, Homo sapien
ccctgaagaggtggagcagatatct

SEQ ID NO: 4237922 - DNA, 25 bp, Homo sapien
tcattctaggtattggcaggtccac

SEQ ID NO: 4237923 - DNA, 25 bp, Homo sapien
tcccactagaattgaactgctccct

SEQ ID NO: 4237924 - DNA, 25 bp, Homo sapien
gggcttgaacagctgctccctctac

SEQ ID NO: 4237925 - DNA, 25 bp, Homo sapien
cagggccagcgctaggaagggtgtt

SEQ ID NO: 4237926 - DNA, 25 bp, Homo sapien
ttgaacagctgctccctctacaagc

SEQ ID NO: 4237927 - DNA, 25 bp, Homo sapien
gagaagtaacacagtttgcagccgg

SEQ ID NO: 4237928 - DNA, 25 bp, Homo sapien
tgggtgagccacgtccacggagtct

SEQ ID NO: 4237929 - DNA, 25 bp, Homo sapien
gcccagcaccttcgtgcctgggtga

SEQ ID NO: 4237930 - DNA, 25 bp, Homo sapien
gagggcgctccactttttctgatct

SEQ ID NO: 4237931 - DNA, 25 bp, Homo sapien
ttctgcagctcgggcaccaccgagt

SEQ ID NO: 4237932 - DNA, 25 bp, Homo sapien
gcaccaccgagtcatagtgagtgtt

SEQ ID NO: 4237933 - DNA, 25 bp, Homo sapien
tcaagtttgggtcttctgcagctcg

SEQ ID NO: 4237934 - DNA, 25 bp, Homo sapien
tgcagctcgggcaccaccgagtcat

SEQ ID NO: 4237935 - DNA, 25 bp, Homo sapien
cccgcatccagggaccacggccgcc

SEQ ID NO: 4237936 - DNA, 25 bp, Homo sapien
catccagggaccacggccgccagga

SEQ ID NO: 4237937 - DNA, 25 bp, Homo sapien
cgcatccagggaccacggccgccag

SEQ ID NO: 4237938 - DNA, 25 bp, Homo sapien
atccagggaccacggccgccaggag

SEQ ID NO: 4237939 - DNA, 25 bp, Homo sapien
ttgtttaatgccctggcagagtctt

SEQ ID NO: 4237940 - DNA, 25 bp, Homo sapien
ggttcgcgtatgactttgtttaatg

SEQ ID NO: 4237941 - DNA, 25 bp, Homo sapien
taatgccctggcagagtcttctgag

SEQ ID NO: 4237942 - DNA, 25 bp, Homo sapien
tgaggcattacactcaccaccgcca

SEQ ID NO: 4237943 - DNA, 25 bp, Homo sapien
caagagtcatcaggcgctgttgctc

SEQ ID NO: 4237944 - DNA, 25 bp, Homo sapien
ttgttgtggctcttcccaagagtca

SEQ ID NO: 4237945 - DNA, 25 bp, Homo sapien
catcaggcgctgttgctcacgcata

SEQ ID NO: 4237946 - DNA, 25 bp, Homo sapien
cgcctgcaggccctcgctttgttgt

SEQ ID NO: 4237947 - DNA, 25 bp, Homo sapien
gcgtggacactgctatatattacat

SEQ ID NO: 4237948 - DNA, 25 bp, Homo sapien
agaccatagcgtggacactgctata

SEQ ID NO: 4237949 - DNA, 25 bp, Homo sapien
tgggttcccggagcctctggcctct

SEQ ID NO: 4237950 - DNA, 25 bp, Homo sapien
atattgaattgggttcccggagcct

SEQ ID NO: 4237951 - DNA, 25 bp, Homo sapien
gcctctaacaaatgcagaagagatg

SEQ ID NO: 4237952 - DNA, 25 bp, Homo sapien
aatgcagaagagatggacgcaggcc

SEQ ID NO: 4237953 - DNA, 25 bp, Homo sapien
ttaggcccatgcagcctctaacaaa

SEQ ID NO: 4237954 - DNA, 25 bp, Homo sapien
ggggtgatggacgcaggtcgctggc

SEQ ID NO: 4237955 - DNA, 25 bp, Homo sapien
ctctttcctatccatggggtcagca

SEQ ID NO: 4237956 - DNA, 25 bp, Homo sapien
ccatggggtcagcatattttgtggt

SEQ ID NO: 4237957 - DNA, 25 bp, Homo sapien
cacacttggttgtgtcccaggtccc

SEQ ID NO: 4237958 - DNA, 25 bp, Homo sapien
tttgacacacttggttgtgtcccag

SEQ ID NO: 4237959 - DNA, 25 bp, Homo sapien
acacacttggttgtgtcccaggtcc

SEQ ID NO: 4237960 - DNA, 25 bp, Homo sapien
tgacacacttggttgtgtcccaggt

SEQ ID NO: 4237961 - DNA, 25 bp, Homo sapien
tgtggacttcacgtggccctttgcc

SEQ ID NO: 4237962 - DNA, 25 bp, Homo sapien
cttaaactttggtgaatatcctggg

SEQ ID NO: 4237963 - DNA, 25 bp, Homo sapien
tgcctttgggcgtaagtcagacgag

SEQ ID NO: 4237964 - DNA, 25 bp, Homo sapien
tcagacgagatgatgatacggtgtg

SEQ ID NO: 4237965 - DNA, 25 bp, Homo sapien
tataatactcgttcagcttggtcac

SEQ ID NO: 4237966 - DNA, 25 bp, Homo sapien
tacctgctgcttacagacgttcaca

SEQ ID NO: 4237967 - DNA, 25 bp, Homo sapien
aatcagcgtgtcctttacctgctgc

SEQ ID NO: 4237968 - DNA, 25 bp, Homo sapien
gccagtgatagtataatactcgttc

SEQ ID NO: 4237969 - DNA, 25 bp, Homo sapien
tccatcctgcagttgcggcgaaatc

SEQ ID NO: 4237970 - DNA, 25 bp, Homo sapien
gccagatgttcacctccgtttccat

SEQ ID NO: 4237971 - DNA, 25 bp, Homo sapien
gagatgttttcctgaggcggctcca

SEQ ID NO: 4237972 - DNA, 25 bp, Homo sapien
cagaaactggcgtttttccgagctc

SEQ ID NO: 4237973 - DNA, 25 bp, Homo sapien
cagcctttcctgcatgagtcatggc

SEQ ID NO: 4237974 - DNA, 25 bp, Homo sapien
ggccaggcaagctcggtgacatgca

SEQ ID NO: 4237975 - DNA, 25 bp, Homo sapien
atggccaggcaagctcggtgacatg

SEQ ID NO: 4237976 - DNA, 25 bp, Homo sapien
gtgcagcctttcctgcatgagtcat

SEQ ID NO: 4237977 - DNA, 25 bp, Homo sapien
caaaggtctttgaagggccttctgc

SEQ ID NO: 4237978 - DNA, 25 bp, Homo sapien
gcattaggacccttggaatttgctg

SEQ ID NO: 4237979 - DNA, 25 bp, Homo sapien
ctggaattagggttctggtgatgtc

SEQ ID NO: 4237980 - DNA, 25 bp, Homo sapien
aggcattaggacccttggaatttgc

SEQ ID NO: 4237981 - DNA, 25 bp, Homo sapien
gtgtctccacagctaaaggttataa

SEQ ID NO: 4237982 - DNA, 25 bp, Homo sapien
taaagtccttgaggaccagcagggt

SEQ ID NO: 4237983 - DNA, 25 bp, Homo sapien
tctccacagctaaaggttataaagt

SEQ ID NO: 4237984 - DNA, 25 bp, Homo sapien
ggtgtctccacagctaaaggttata

SEQ ID NO: 4237985 - DNA, 25 bp, Homo sapien
ttgtagctttctccgagtcccttcc

SEQ ID NO: 4237986 - DNA, 25 bp, Homo sapien
agggccccagcttgtagctttctcc

SEQ ID NO: 4237987 - DNA, 25 bp, Homo sapien
agcttgtagctttctccgagtccct

SEQ ID NO: 4237988 - DNA, 25 bp, Homo sapien
cccagcttgtagctttctccgagtc

SEQ ID NO: 4237989 - DNA, 25 bp, Homo sapien
ttttcaaatgatggcatgaagcgga

SEQ ID NO: 4237990 - DNA, 25 bp, Homo sapien
catgaagcggagggaactgaagtcc

SEQ ID NO: 4237991 - DNA, 25 bp, Homo sapien
gtagggcctggcacggaaaccattc

SEQ ID NO: 4237992 - DNA, 25 bp, Homo sapien
cagccagtgtccagctctctaatta

SEQ ID NO: 4237993 - DNA, 25 bp, Homo sapien
tgcactcctgcgacgtggaggtacc

SEQ ID NO: 4237994 - DNA, 25 bp, Homo sapien
gaaagcgtccgtggctgcactcctg

SEQ ID NO: 4237995 - DNA, 25 bp, Homo sapien
agctgagcggctgagcacactgtga

SEQ ID NO: 4237996 - DNA, 25 bp, Homo sapien
gcgacgtggaggtacctttgccaaa

SEQ ID NO: 4237997 - DNA, 25 bp, Homo sapien
gagggcattgctaatggcatcacaa

SEQ ID NO: 4237998 - DNA, 25 bp, Homo sapien
tctgtacaactaattaggtggcccc

SEQ ID NO: 4237999 - DNA, 25 bp, Homo sapien
tctcggtgcccgaagatgcttttgg

SEQ ID NO: 4238000 - DNA, 25 bp, Homo sapien
tacagcaggcttacggttctcatag

SEQ ID NO: 4238001 - DNA, 25 bp, Homo sapien
gcttcctgtgtctgaaaacacgact

SEQ ID NO: 4238002 - DNA, 25 bp, Homo sapien
tccgggatgacgtcccaagactcgg

SEQ ID NO: 4238003 - DNA, 25 bp, Homo sapien
ggtggagcacgtgaaaagcttcctg

SEQ ID NO: 4238004 - DNA, 25 bp, Homo sapien
tgcctcccgggcaggctaggagctc

SEQ ID NO: 4238005 - DNA, 25 bp, Homo sapien
tctggaaatcatagcgctgtagtca

SEQ ID NO: 4238006 - DNA, 25 bp, Homo sapien
ggaggagaagttattccccactgtc

SEQ ID NO: 4238007 - DNA, 25 bp, Homo sapien
gattctgttgcgtccagcatccgtg

SEQ ID NO: 4238008 - DNA, 25 bp, Homo sapien
taatcctaggtccatggaactgaca

SEQ ID NO: 4238009 - DNA, 25 bp, Homo sapien
cctgagcgaaacacttcgagcagca

SEQ ID NO: 4238010 - DNA, 25 bp, Homo sapien
cctgggaccgtgctcacgttcagca

SEQ ID NO: 4238011 - DNA, 25 bp, Homo sapien
ggaccgtgctcacgttcagcagtgc

SEQ ID NO: 4238012 - DNA, 25 bp, Homo sapien
ctgagcgaaacacttcgagcagcat

SEQ ID NO: 4238013 - DNA, 25 bp, Homo sapien
cagtggaaactacgtgaaggcccag

SEQ ID NO: 4238014 - DNA, 25 bp, Homo sapien
gcccggccccatcatgagttcttga

SEQ ID NO: 4238015 - DNA, 25 bp, Homo sapien
tcttgatgcttcagctctcgatctc

SEQ ID NO: 4238016 - DNA, 25 bp, Homo sapien
caatgaagaagcctatttcctttct

SEQ ID NO: 4238017 - DNA, 25 bp, Homo sapien
ggccctccgagctgttcctgagagc

SEQ ID NO: 4238018 - DNA, 25 bp, Homo sapien
gcaacaggactgtgtctagaccatg

SEQ ID NO: 4238019 - DNA, 25 bp, Homo sapien
agagctgtatgaatggagttcccgg

SEQ ID NO: 4238020 - DNA, 25 bp, Homo sapien
aggaagagcattcccagcacggcac

SEQ ID NO: 4238021 - DNA, 25 bp, Homo sapien
caaacaccagttggggaaacgccat

SEQ ID NO: 4238022 - DNA, 25 bp, Homo sapien
agaccattgtttcccaaacaccagt

SEQ ID NO: 4238023 - DNA, 25 bp, Homo sapien
acaccagttggggaaacgccatcat

SEQ ID NO: 4238024 - DNA, 25 bp, Homo sapien
cattgtttcccaaacaccagttggg

SEQ ID NO: 4238025 - DNA, 25 bp, Homo sapien
gctggctggctggccagcagttcag

SEQ ID NO: 4238026 - DNA, 25 bp, Homo sapien
ctggctggctggccagcagttcaga

SEQ ID NO: 4238027 - DNA, 25 bp, Homo sapien
ggctggctggctggccagcagttca

SEQ ID NO: 4238028 - DNA, 25 bp, Homo sapien
caggcttcggcacggccactgtggc

SEQ ID NO: 4238029 - DNA, 25 bp, Homo sapien
tcttctgggccaccttgtcattcat

SEQ ID NO: 4238030 - DNA, 25 bp, Homo sapien
caggactggtcttctgggccacctt

SEQ ID NO: 4238031 - DNA, 25 bp, Homo sapien
gctgccaggactggtcttctgggcc

SEQ ID NO: 4238032 - DNA, 25 bp, Homo sapien
tgtgaaatttggagaattcacggca

SEQ ID NO: 4238033 - DNA, 25 bp, Homo sapien
gtgaaatttggagaattcacggcac

SEQ ID NO: 4238034 - DNA, 25 bp, Homo sapien
ctgtgaaatttggagaattcacggc

SEQ ID NO: 4238035 - DNA, 25 bp, Homo sapien
tcttttaaagcatcattgatcacat

SEQ ID NO: 4238036 - DNA, 25 bp, Homo sapien
ggtgggcgatggcttcccttctgtc

SEQ ID NO: 4238037 - DNA, 25 bp, Homo sapien
cacataataaggtttgtcatagtcc

SEQ ID NO: 4238038 - DNA, 25 bp, Homo sapien
ttccccctgagaggcgagtgagcca

SEQ ID NO: 4238039 - DNA, 25 bp, Homo sapien
gagatggcaagagccggaacgtttc

SEQ ID NO: 4238040 - DNA, 25 bp, Homo sapien
tgagatggcaagagccggaacgttt

SEQ ID NO: 4238041 - DNA, 25 bp, Homo sapien
gggtcctaagtcgggcctgatgtgg

SEQ ID NO: 4238042 - DNA, 25 bp, Homo sapien
gatcttcccggtggcattctgtggc

SEQ ID NO: 4238043 - DNA, 25 bp, Homo sapien
tctcccggtggcattccatggcttg

SEQ ID NO: 4238044 - DNA, 25 bp, Homo sapien
agatcttcccggtggcattccgtgg

SEQ ID NO: 4238045 - DNA, 25 bp, Homo sapien
cagatcttcccatggcattccgtgg

SEQ ID NO: 4238046 - DNA, 25 bp, Homo sapien
ttccgtggatcatgaattgtggtgg

SEQ ID NO: 4238047 - DNA, 25 bp, Homo sapien
tagctttgggtttgccttggaccca

SEQ ID NO: 4238048 - DNA, 25 bp, Homo sapien
gattgggaggactttccgtggatca

SEQ ID NO: 4238049 - DNA, 25 bp, Homo sapien
ggcataccatgggtggagcgccctc

SEQ ID NO: 4238050 - DNA, 25 bp, Homo sapien
gatgccgtatgtagatggttttcca

SEQ ID NO: 4238051 - DNA, 25 bp, Homo sapien
tacagtggataaggattggagattc

SEQ ID NO: 4238052 - DNA, 25 bp, Homo sapien
tgacggtgcatgctggttcccatag

SEQ ID NO: 4238053 - DNA, 25 bp, Homo sapien
tccatcagcctcagtaccaggagaa

SEQ ID NO: 4238054 - DNA, 25 bp, Homo sapien
tgggtccactttgggtcagtgctgc

SEQ ID NO: 4238055 - DNA, 25 bp, Homo sapien
caaaggctggtgtaagattcaggta

SEQ ID NO: 4238056 - DNA, 25 bp, Homo sapien
atgcttcttagcctaggttcacagg

SEQ ID NO: 4238057 - DNA, 25 bp, Homo sapien
gtctctttcaaggacattcttgggt

SEQ ID NO: 4238058 - DNA, 25 bp, Homo sapien
tcagcatttcatgcgataggctcca

SEQ ID NO: 4238059 - DNA, 25 bp, Homo sapien
tctcttaatgtccagtgtagggagc

SEQ ID NO: 4238060 - DNA, 25 bp, Homo sapien
aaaggtcacatgtcccttgcttgga

SEQ ID NO: 4238061 - DNA, 25 bp, Homo sapien
gaggcttcgaaggaccccttcagca

SEQ ID NO: 4238062 - DNA, 25 bp, Homo sapien
agcaagggcctcaggaagaacgaag

SEQ ID NO: 4238063 - DNA, 25 bp, Homo sapien
tgagttttgccctgatcgccccctt

SEQ ID NO: 4238064 - DNA, 25 bp, Homo sapien
ttttgccctgatcgcccccttggag

SEQ ID NO: 4238065 - DNA, 25 bp, Homo sapien
catctgagcaagggcctcaggaaga

SEQ ID NO: 4238066 - DNA, 25 bp, Homo sapien
tcagatcatgcccaaaggtaacctg

SEQ ID NO: 4238067 - DNA, 25 bp, Homo sapien
tgtgctgacggataagctcttcccc

SEQ ID NO: 4238068 - DNA, 25 bp, Homo sapien
tctcggtcgccatgcatcagatcat

SEQ ID NO: 4238069 - DNA, 25 bp, Homo sapien
tggcttgggaacctactacagtgac

SEQ ID NO: 4238070 - DNA, 25 bp, Homo sapien
tgtgtgtcgtagaaggatctagatc

SEQ ID NO: 4238071 - DNA, 25 bp, Homo sapien
aggtggcgcttgcagaactcttagg

SEQ ID NO: 4238072 - DNA, 25 bp, Homo sapien
gtggcgggaggtggcgcttgcagaa

SEQ ID NO: 4238073 - DNA, 25 bp, Homo sapien
tgcctcctgtgtgtcgtagaaggat

SEQ ID NO: 4238074 - DNA, 25 bp, Homo sapien
cccttgcttcaagaaggtgtgaaca

SEQ ID NO: 4238075 - DNA, 25 bp, Homo sapien
taggtgtcggtcctgaaagacccgc

SEQ ID NO: 4238076 - DNA, 25 bp, Homo sapien
ctccttgggaatgtgccaagtaggt

SEQ ID NO: 4238077 - DNA, 25 bp, Homo sapien
ttggtgttctgccaggcttgacgag

SEQ ID NO: 4238078 - DNA, 25 bp, Homo sapien
ttccagtcgtgacagccttgtcttc

SEQ ID NO: 4238079 - DNA, 25 bp, Homo sapien
cagagagggcactggatcctttgcg

SEQ ID NO: 4238080 - DNA, 25 bp, Homo sapien
ctttgcgcaggtcttctttcttcca

SEQ ID NO: 4238081 - DNA, 25 bp, Homo sapien
acggtcttcgtctctgtatctgctt

SEQ ID NO: 4238082 - DNA, 25 bp, Homo sapien
ttcccctgagtcttgctctccctcc

SEQ ID NO: 4238083 - DNA, 25 bp, Homo sapien
ctgctggtttgccatagttcctcat

SEQ ID NO: 4238084 - DNA, 25 bp, Homo sapien
ctggaaattcatctggaaggcccgt

SEQ ID NO: 4238085 - DNA, 25 bp, Homo sapien
tggaaggcccgtgtgtttgaaggtc

SEQ ID NO: 4238086 - DNA, 25 bp, Homo sapien
gctttcatgtagcttgagggagtcc

SEQ ID NO: 4238087 - DNA, 25 bp, Homo sapien
gggcctcgtgcgaggatgacttggc

SEQ ID NO: 4238088 - DNA, 25 bp, Homo sapien
cctcgtgcgaggatgacttggctgt

SEQ ID NO: 4238089 - DNA, 25 bp, Homo sapien
gcttgagggagtcctcagatcccag

SEQ ID NO: 4238090 - DNA, 25 bp, Homo sapien
tggctcctttgtgccacctcagact

SEQ ID NO: 4238091 - DNA, 25 bp, Homo sapien
ggggccaaccttccgagagcgttca

SEQ ID NO: 4238092 - DNA, 25 bp, Homo sapien
tttgtgccacctcagacttcctggc

SEQ ID NO: 4238093 - DNA, 25 bp, Homo sapien
gctgtgcagacactggggccaacct

SEQ ID NO: 4238094 - DNA, 25 bp, Homo sapien
gcggtggcgtatgccataaacgcct

SEQ ID NO: 4238095 - DNA, 25 bp, Homo sapien
ctgcggtggcgtatgccataaacgc

SEQ ID NO: 4238096 - DNA, 25 bp, Homo sapien
ggtggcgtatgccataaacgcctcc

SEQ ID NO: 4238097 - DNA, 25 bp, Homo sapien
gtggcgtatgccataaacgcctccc

SEQ ID NO: 4238098 - DNA, 25 bp, Homo sapien
aaaaagaaatgtgagcagttgaaga

SEQ ID NO: 4238099 - DNA, 25 bp, Homo sapien
tttctgtgacatgtgcagcatctgg

SEQ ID NO: 4238100 - DNA, 25 bp, Homo sapien
tggacctgatttacgggagtctttg

SEQ ID NO: 4238101 - DNA, 25 bp, Homo sapien
tgaaacgggatcttgccgcttcgcc

SEQ ID NO: 4238102 - DNA, 25 bp, Homo sapien
caggtggctgcccctgaatctgggc

SEQ ID NO: 4238103 - DNA, 25 bp, Homo sapien
ctggatgcccaggttccagatgctt

SEQ ID NO: 4238104 - DNA, 25 bp, Homo sapien
gatgcccaggttccagatgcttcac

SEQ ID NO: 4238105 - DNA, 25 bp, Homo sapien
gccttgcgagcctgttgcctggatg

SEQ ID NO: 4238106 - DNA, 25 bp, Homo sapien
tctgcaaacctatggccttatgggt

SEQ ID NO: 4238107 - DNA, 25 bp, Homo sapien
gagcatggtactcggaaaccgcctt

SEQ ID NO: 4238108 - DNA, 25 bp, Homo sapien
tgtccgcagtgctggtgaatttccc

SEQ ID NO: 4238109 - DNA, 25 bp, Homo sapien
gtttagtccgactgaagctccttgc

SEQ ID NO: 4238110 - DNA, 25 bp, Homo sapien
ggctccctccaacccattgcctggc

SEQ ID NO: 4238111 - DNA, 25 bp, Homo sapien
gaaaggctttgctccacgtccactg

SEQ ID NO: 4238112 - DNA, 25 bp, Homo sapien
gtgactccctgcagtcgtctgtgtt

SEQ ID NO: 4238113 - DNA, 25 bp, Homo sapien
acgtccactgatcggctgctccaga

SEQ ID NO: 4238114 - DNA, 25 bp, Homo sapien
ctgtgttttgtggacaatgaaaggc

SEQ ID NO: 4238115 - DNA, 25 bp, Homo sapien
tgcataggctcgcacactggaggag

SEQ ID NO: 4238116 - DNA, 25 bp, Homo sapien
tggctcctgccgagctgacactggc

SEQ ID NO: 4238117 - DNA, 25 bp, Homo sapien
tggcatgggtaagactgcataggct

SEQ ID NO: 4238118 - DNA, 25 bp, Homo sapien
tcattctgtgtctccaggatgtagt

SEQ ID NO: 4238119 - DNA, 25 bp, Homo sapien
ggagggactcggatgccaccttaca

SEQ ID NO: 4238120 - DNA, 25 bp, Homo sapien
tggagcccggcgtccttaattgcgg

SEQ ID NO: 4238121 - DNA, 25 bp, Homo sapien
ttacaggcctgtcgcacgcgactgt

SEQ ID NO: 4238122 - DNA, 25 bp, Homo sapien
tttggcaaaagacccgaggccgcca

SEQ ID NO: 4238123 - DNA, 25 bp, Homo sapien
tgtgctccgggatgtgcgctgcggg

SEQ ID NO: 4238124 - DNA, 25 bp, Homo sapien
aggcagaatccgcgcggtgtccggg

SEQ ID NO: 4238125 - DNA, 25 bp, Homo sapien
cggatgggggctccggtgcaggcac

SEQ ID NO: 4238126 - DNA, 25 bp, Homo sapien
caggggggtcagtgttgcgggagcc

SEQ ID NO: 4238127 - DNA, 25 bp, Homo sapien
ctgggcgtagtgtcccccgtccagc

SEQ ID NO: 4238128 - DNA, 25 bp, Homo sapien
caaaactgcgctttctgggagtgca

SEQ ID NO: 4238129 - DNA, 25 bp, Homo sapien
cttcagggagcgctgcaggttcgcc

SEQ ID NO: 4238130 - DNA, 25 bp, Homo sapien
ccaataaatccattcaatatgaacc

SEQ ID NO: 4238131 - DNA, 25 bp, Homo sapien
gggagtgcagcttccctctcatctg

SEQ ID NO: 4238132 - DNA, 25 bp, Homo sapien
ttcaggaccccgctagcagctctgc

SEQ ID NO: 4238133 - DNA, 25 bp, Homo sapien
gcacttcaggaccccgctagcagct

SEQ ID NO: 4238134 - DNA, 25 bp, Homo sapien
acttcaggaccccgctagcagctct

SEQ ID NO: 4238135 - DNA, 25 bp, Homo sapien
aggaccccgctagcagctctgccaa

SEQ ID NO: 4238136 - DNA, 25 bp, Homo sapien
atttctgacgtgtacactgatgtgc

SEQ ID NO: 4238137 - DNA, 25 bp, Homo sapien
catattccgaggacatggtttggac

SEQ ID NO: 4238138 - DNA, 25 bp, Homo sapien
catcgctagaaatgggcatattccg

SEQ ID NO: 4238139 - DNA, 25 bp, Homo sapien
tgtaaggtgttacaacatcgctaga

SEQ ID NO: 4238140 - DNA, 25 bp, Homo sapien
agctaatgacaaacaggtgaccctg

SEQ ID NO: 4238141 - DNA, 25 bp, Homo sapien
caggcaccttgcacctgaatgaaac

SEQ ID NO: 4238142 - DNA, 25 bp, Homo sapien
caggtgaccctggaaatgcaatgga

SEQ ID NO: 4238143 - DNA, 25 bp, Homo sapien
gctaatgacaaacaggtgaccctgg

SEQ ID NO: 4238144 - DNA, 25 bp, Homo sapien
agaagcctggatgtgaagaccttga

SEQ ID NO: 4238145 - DNA, 25 bp, Homo sapien
cttagctcattggtggggcttgaga

SEQ ID NO: 4238146 - DNA, 25 bp, Homo sapien
gaagcctggatgtgaagaccttgac

SEQ ID NO: 4238147 - DNA, 25 bp, Homo sapien
tcttggtaactcatccagtgccgtg

SEQ ID NO: 4238148 - DNA, 25 bp, Homo sapien
taaaccttcgcatccactttacagg

SEQ ID NO: 4238149 - DNA, 25 bp, Homo sapien
tcccaagagatataacccaggcctg

SEQ ID NO: 4238150 - DNA, 25 bp, Homo sapien
tgagtgcaagagcaaacctgtgagt

SEQ ID NO: 4238151 - DNA, 25 bp, Homo sapien
gcctgagactgggttgctccatttc

SEQ ID NO: 4238152 - DNA, 25 bp, Homo sapien
gagcctgagactgggttgctccatt

SEQ ID NO: 4238153 - DNA, 25 bp, Homo sapien
ttcagagcctgagactgggttgctc

SEQ ID NO: 4238154 - DNA, 25 bp, Homo sapien
cagagcctgagactgggttgctcca

SEQ ID NO: 4238155 - DNA, 25 bp, Homo sapien
caggctgcagagatagcaagtgtgt

SEQ ID NO: 4238156 - DNA, 25 bp, Homo sapien
cattcatagggtgttgttaagtgca

SEQ ID NO: 4238157 - DNA, 25 bp, Homo sapien
taggtacttgtgaacagcagggaac

SEQ ID NO: 4238158 - DNA, 25 bp, Homo sapien
cacgcccggctgtgcatgtctttta

SEQ ID NO: 4238159 - DNA, 25 bp, Homo sapien
aactgtctgaagatagcctgggggc

SEQ ID NO: 4238160 - DNA, 25 bp, Homo sapien
ttagaactgtctgaagatagcctgg

SEQ ID NO: 4238161 - DNA, 25 bp, Homo sapien
tagaactgtctgaagatagcctggg

SEQ ID NO: 4238162 - DNA, 25 bp, Homo sapien
tgtctgaagatagcctgggggctcc

SEQ ID NO: 4238163 - DNA, 25 bp, Homo sapien
tgtgataatgtggagacaaagcaag

SEQ ID NO: 4238164 - DNA, 25 bp, Homo sapien
tattaaacagggaaagcttgctaca

SEQ ID NO: 4238165 - DNA, 25 bp, Homo sapien
gaatgtataaccaacagtccattta

SEQ ID NO: 4238166 - DNA, 25 bp, Homo sapien
tgtactatttcttgctacctgtgaa

SEQ ID NO: 4238167 - DNA, 25 bp, Homo sapien
tctttaatattgcagggagcctagc

SEQ ID NO: 4238168 - DNA, 25 bp, Homo sapien
gatttcttgaatatgctgagaccca

SEQ ID NO: 4238169 - DNA, 25 bp, Homo sapien
gaaatgatggagtaaacagcaaggc

SEQ ID NO: 4238170 - DNA, 25 bp, Homo sapien
taatagttacaaggtaggttggctc

SEQ ID NO: 4238171 - DNA, 25 bp, Homo sapien
aaaaactttatgatccaattataga

SEQ ID NO: 4238172 - DNA, 25 bp, Homo sapien
tcccattgttgtcaacaattaagtc

SEQ ID NO: 4238173 - DNA, 25 bp, Homo sapien
caattaagtctattcttcttttaga

SEQ ID NO: 4238174 - DNA, 25 bp, Homo sapien
ccagtcactagggttttataagttg

SEQ ID NO: 4238175 - DNA, 25 bp, Homo sapien
gaagttcagtctagatttaggccat

SEQ ID NO: 4238176 - DNA, 25 bp, Homo sapien
gcttggaaaagaggtacccattcat

SEQ ID NO: 4238177 - DNA, 25 bp, Homo sapien
ttgcccaggatcactcagtcaagca

SEQ ID NO: 4238178 - DNA, 25 bp, Homo sapien
gattcttttgccaatgggtggtggc

SEQ ID NO: 4238179 - DNA, 25 bp, Homo sapien
tgtcctaacactggctagtacttac

SEQ ID NO: 4238180 - DNA, 25 bp, Homo sapien
tagtacttactgcaccttactgtgt

SEQ ID NO: 4238181 - DNA, 25 bp, Homo sapien
tggacatagagatagatacaatagc

SEQ ID NO: 4238182 - DNA, 25 bp, Homo sapien
gggtgataatcttctagcagaggta

SEQ ID NO: 4238183 - DNA, 25 bp, Homo sapien
tatttagtgtagagtagaaaatgtg

SEQ ID NO: 4238184 - DNA, 25 bp, Homo sapien
gacggaaagtagatactaattccca

SEQ ID NO: 4238185 - DNA, 25 bp, Homo sapien
aaaatgtgtgcctaactcttgatat

SEQ ID NO: 4238186 - DNA, 25 bp, Homo sapien
caaattttaatcgtagtatattgtg

SEQ ID NO: 4238187 - DNA, 25 bp, Homo sapien
aaagcaaagtgatttgaatcctgag

SEQ ID NO: 4238188 - DNA, 25 bp, Homo sapien
ctgggtcacaggattgtttaaaatg

SEQ ID NO: 4238189 - DNA, 25 bp, Homo sapien
gactctagggtggaaaatatcaaca

SEQ ID NO: 4238190 - DNA, 25 bp, Homo sapien
tgtttgagcaggtataagaggactc

SEQ ID NO: 4238191 - DNA, 25 bp, Homo sapien
aaatagatttggtgagctgggcatg

SEQ ID NO: 4238192 - DNA, 25 bp, Homo sapien
aatagatttggtgagctgggcatgg

SEQ ID NO: 4238193 - DNA, 25 bp, Homo sapien
ctctcgtagattgtaaagcgtttgt

SEQ ID NO: 4238194 - DNA, 25 bp, Homo sapien
tcagaaaattgaacagatgccactt

SEQ ID NO: 4238195 - DNA, 25 bp, Homo sapien
catgttggcaaattcggttgactca

SEQ ID NO: 4238196 - DNA, 25 bp, Homo sapien
taggttatgcttgtgctctcgtaga

SEQ ID NO: 4238197 - DNA, 25 bp, Homo sapien
ccctcgggtcaccttatcgatggca

SEQ ID NO: 4238198 - DNA, 25 bp, Homo sapien
taccctcgggtcaccttatcgatgg

SEQ ID NO: 4238199 - DNA, 25 bp, Homo sapien
accctcgggtcaccttatcgatggc

SEQ ID NO: 4238200 - DNA, 25 bp, Homo sapien
tatgagatattgcttgttcctttgt

SEQ ID NO: 4238201 - DNA, 25 bp, Homo sapien
ctatgagatattgcttgttcctttg

SEQ ID NO: 4238202 - DNA, 25 bp, Homo sapien
atgagatattgcttgttcctttgtt

SEQ ID NO: 4238203 - DNA, 25 bp, Homo sapien
ggtgaatgttcagcctcatcatgtt

SEQ ID NO: 4238204 - DNA, 25 bp, Homo sapien
cactgactttcgacagatttttgaa

SEQ ID NO: 4238205 - DNA, 25 bp, Homo sapien
tagttcttgtccacactgactttcg

SEQ ID NO: 4238206 - DNA, 25 bp, Homo sapien
cacataggtaatcaatgtatagagc

SEQ ID NO: 4238207 - DNA, 25 bp, Homo sapien
tagtttcgttcttctgcagtggagt

SEQ ID NO: 4238208 - DNA, 25 bp, Homo sapien
tcgttcttctgcagtggagttgtct

SEQ ID NO: 4238209 - DNA, 25 bp, Homo sapien
ataaattccttgttagagggataga

SEQ ID NO: 4238210 - DNA, 25 bp, Homo sapien
attccttgttagagggatagattgc

SEQ ID NO: 4238211 - DNA, 25 bp, Homo sapien
caccgtgcccggcccatacttcttt

SEQ ID NO: 4238212 - DNA, 25 bp, Homo sapien
agccaccgtgcccggcccatacttc

SEQ ID NO: 4238213 - DNA, 25 bp, Homo sapien
tttagtaagacaggttttcaccatg

SEQ ID NO: 4238214 - DNA, 25 bp, Homo sapien
ttagtaagacaggttttcaccatgt

SEQ ID NO: 4238215 - DNA, 25 bp, Homo sapien
tgtaagttcgtctttaaatgcttgg

SEQ ID NO: 4238216 - DNA, 25 bp, Homo sapien
taatccttttactatgctgtagaat

SEQ ID NO: 4238217 - DNA, 25 bp, Homo sapien
cttttccagtagtgtctggctttgg

SEQ ID NO: 4238218 - DNA, 25 bp, Homo sapien
cttcatatgttgaattattcttgca

SEQ ID NO: 4238219 - DNA, 25 bp, Homo sapien
tgcaactggacattttgatagatta

SEQ ID NO: 4238220 - DNA, 25 bp, Homo sapien
cacctcgaccagactcaaaaatgtt

SEQ ID NO: 4238221 - DNA, 25 bp, Homo sapien
cttcttttgctagtaattgactttc

SEQ ID NO: 4238222 - DNA, 25 bp, Homo sapien
gaactttcacatggtggtcctggaa

SEQ ID NO: 4238223 - DNA, 25 bp, Homo sapien
gcagtagaatggaattataaagtaa

SEQ ID NO: 4238224 - DNA, 25 bp, Homo sapien
atctcagaagcagtagaatggaatt

SEQ ID NO: 4238225 - DNA, 25 bp, Homo sapien
ctcagaagcagtagaatggaattat

SEQ ID NO: 4238226 - DNA, 25 bp, Homo sapien
gaagcagtagaatggaattataaag

SEQ ID NO: 4238227 - DNA, 25 bp, Homo sapien
gccctctgccggggcggagcgcccc

SEQ ID NO: 4238228 - DNA, 25 bp, Homo sapien
tgaaggactcgccccgcttcaggta

SEQ ID NO: 4238229 - DNA, 25 bp, Homo sapien
ctgtggatttcgaggagtgtctgaa

SEQ ID NO: 4238230 - DNA, 25 bp, Homo sapien
gcgagcggctgttgccgccgtttcc

SEQ ID NO: 4238231 - DNA, 25 bp, Homo sapien
ccgtcttcgcggctgctatgaccag

SEQ ID NO: 4238232 - DNA, 25 bp, Homo sapien
ccttggccgccaggttcgtggctgg

SEQ ID NO: 4238233 - DNA, 25 bp, Homo sapien
gctgctgtcactccccggccgtttc

SEQ ID NO: 4238234 - DNA, 25 bp, Homo sapien
tcagacccgttgcccgggcgcccgc

SEQ ID NO: 4238235 - DNA, 25 bp, Homo sapien
gtgctgccggatgccccgccccttg

SEQ ID NO: 4238236 - DNA, 25 bp, Homo sapien
caacctctcaacatgaaataggcac

SEQ ID NO: 4238237 - DNA, 25 bp, Homo sapien
tcccttcggaaaagatgagttcaca

SEQ ID NO: 4238238 - DNA, 25 bp, Homo sapien
aataaattgaatggatgggcccggc

SEQ ID NO: 4238239 - DNA, 25 bp, Homo sapien
tccttgcatgggataagtgctcagt

SEQ ID NO: 4238240 - DNA, 25 bp, Homo sapien
tgatttcagaggagtaaggcatgcc

SEQ ID NO: 4238241 - DNA, 25 bp, Homo sapien
taaacatttcagctaggaataccac

SEQ ID NO: 4238242 - DNA, 25 bp, Homo sapien
gattaagtctgtacatgtgcgtgca

SEQ ID NO: 4238243 - DNA, 25 bp, Homo sapien
gaatgttcagttctagccaaggtag

SEQ ID NO: 4238244 - DNA, 25 bp, Homo sapien
taacgcagtaagaattaggtggaat

SEQ ID NO: 4238245 - DNA, 25 bp, Homo sapien
ctatgacaaacgtgctttattcttc

SEQ ID NO: 4238246 - DNA, 25 bp, Homo sapien
gtttcatttctagccatacaattga

SEQ ID NO: 4238247 - DNA, 25 bp, Homo sapien
caagtgcaggaaagccctgtgtgtc

SEQ ID NO: 4238248 - DNA, 25 bp, Homo sapien
aaatagtttgagtagcagcagtgct

SEQ ID NO: 4238249 - DNA, 25 bp, Homo sapien
cagcagtgctataggtgggaaatac

SEQ ID NO: 4238250 - DNA, 25 bp, Homo sapien
aatattctaatgtagctatctcgcc

SEQ ID NO: 4238251 - DNA, 25 bp, Homo sapien
tttttggtacactgggcagacttca

SEQ ID NO: 4238252 - DNA, 25 bp, Homo sapien
gttaaactttcaccaatgtctgctc

SEQ ID NO: 4238253 - DNA, 25 bp, Homo sapien
aggttaaactttcaccaatgtctgc

SEQ ID NO: 4238254 - DNA, 25 bp, Homo sapien
ggttaaactttcaccaatgtctgct

SEQ ID NO: 4238255 - DNA, 25 bp, Homo sapien
taaactttcaccaatgtctgctctg

SEQ ID NO: 4238256 - DNA, 25 bp, Homo sapien
tagtactttaccacaaatacagtgt

SEQ ID NO: 4238257 - DNA, 25 bp, Homo sapien
gacttaagtaccaaaatgcatacca

SEQ ID NO: 4238258 - DNA, 25 bp, Homo sapien
agaattaaatgataaacttagagac

SEQ ID NO: 4238259 - DNA, 25 bp, Homo sapien
tacagtgtaatatcatcagtccaaa

SEQ ID NO: 4238260 - DNA, 25 bp, Homo sapien
caggatctactccaagtgaccaaca

SEQ ID NO: 4238261 - DNA, 25 bp, Homo sapien
ctcaatatcaaactagccagacaat

SEQ ID NO: 4238262 - DNA, 25 bp, Homo sapien
tcaatatcaaactagccagacaatt

SEQ ID NO: 4238263 - DNA, 25 bp, Homo sapien
actcaatatcaaactagccagacaa

SEQ ID NO: 4238264 - DNA, 25 bp, Homo sapien
aatatcaaactagccagacaattaa

SEQ ID NO: 4238265 - DNA, 25 bp, Homo sapien
ctagccgcgggtgggagcgatcttt

SEQ ID NO: 4238266 - DNA, 25 bp, Homo sapien
ggcgatgacgtttatcatgcttcct

SEQ ID NO: 4238267 - DNA, 25 bp, Homo sapien
tctttaagaaggctgggcgatgacg

SEQ ID NO: 4238268 - DNA, 25 bp, Homo sapien
gctcgggtgccgctcgagtctcttc

SEQ ID NO: 4238269 - DNA, 25 bp, Homo sapien
ccaaggtttgttacactgcgtgtcc

SEQ ID NO: 4238270 - DNA, 25 bp, Homo sapien
gaagtaattgcctagagtctctgaa

SEQ ID NO: 4238271 - DNA, 25 bp, Homo sapien
tcaggaaacatctagggactaatga

SEQ ID NO: 4238272 - DNA, 25 bp, Homo sapien
aacagtggagcattccatggttgca

SEQ ID NO: 4238273 - DNA, 25 bp, Homo sapien
gcctatactccttatcccattatga

SEQ ID NO: 4238274 - DNA, 25 bp, Homo sapien
gctcccttgcttcttgcaataataa

SEQ ID NO: 4238275 - DNA, 25 bp, Homo sapien
gactgagtgatttctggcaggcaca

SEQ ID NO: 4238276 - DNA, 25 bp, Homo sapien
cacaaggtaaattcatagcttagcc

SEQ ID NO: 4238277 - DNA, 25 bp, Homo sapien
gaagaaagcggagtcctcagaccaa

SEQ ID NO: 4238278 - DNA, 25 bp, Homo sapien
aatttataaactaaggatcattgca

SEQ ID NO: 4238279 - DNA, 25 bp, Homo sapien
taaactaaggatcattgcatatccc

SEQ ID NO: 4238280 - DNA, 25 bp, Homo sapien
tgggcagtgaagaaagcggagtcct

SEQ ID NO: 4238281 - DNA, 25 bp, Homo sapien
tcttctgatgaagtctggcgaagtc

SEQ ID NO: 4238282 - DNA, 25 bp, Homo sapien
tcttttgtgccgtagaatgttctcg

SEQ ID NO: 4238283 - DNA, 25 bp, Homo sapien
ttgcacagatcagaggttcacacag

SEQ ID NO: 4238284 - DNA, 25 bp, Homo sapien
catcaaaaaagagcactggaagcct

SEQ ID NO: 4238285 - DNA, 25 bp, Homo sapien
tgctgaaactgcacaggtcaacctt

SEQ ID NO: 4238286 - DNA, 25 bp, Homo sapien
tacctgctgaaactgcacaggtcaa

SEQ ID NO: 4238287 - DNA, 25 bp, Homo sapien
cctgctgaaactgcacaggtcaacc

SEQ ID NO: 4238288 - DNA, 25 bp, Homo sapien
gtacctgctgaaactgcacaggtca

SEQ ID NO: 4238289 - DNA, 25 bp, Homo sapien
cctcttggaaaggaacgccaacttg

SEQ ID NO: 4238290 - DNA, 25 bp, Homo sapien
gtttatctgcggaggattcctcttg

SEQ ID NO: 4238291 - DNA, 25 bp, Homo sapien
tccagtttatctgcggaggattcct

SEQ ID NO: 4238292 - DNA, 25 bp, Homo sapien
cttggaaaggaacgccaacttgcat

SEQ ID NO: 4238293 - DNA, 25 bp, Homo sapien
gatacaccgtaatggtcttctggaa

SEQ ID NO: 4238294 - DNA, 25 bp, Homo sapien
cagcaagagatacaccgtaatggtc

SEQ ID NO: 4238295 - DNA, 25 bp, Homo sapien
aagagatacaccgtaatggtcttct

SEQ ID NO: 4238296 - DNA, 25 bp, Homo sapien
tatagcagcaagagatacaccgtaa

SEQ ID NO: 4238297 - DNA, 25 bp, Homo sapien
tgttctctttgagcctttctaactt

SEQ ID NO: 4238298 - DNA, 25 bp, Homo sapien
ctctttgagcctttctaacttcggg

SEQ ID NO: 4238299 - DNA, 25 bp, Homo sapien
gatagcttgttctctttgagccttt

SEQ ID NO: 4238300 - DNA, 25 bp, Homo sapien
tgatagcttgttctctttgagcctt

SEQ ID NO: 4238301 - DNA, 25 bp, Homo sapien
taaaaatctaatctgccagtttagt

SEQ ID NO: 4238302 - DNA, 25 bp, Homo sapien
tttgtaggtgccgtagcagcagccc

SEQ ID NO: 4238303 - DNA, 25 bp, Homo sapien
ggtgccgtagcagcagcccttgcag

SEQ ID NO: 4238304 - DNA, 25 bp, Homo sapien
gccgtagcagcagcccttgcagtct

SEQ ID NO: 4238305 - DNA, 25 bp, Homo sapien
gggactgtgatgttgacgggatgcc

SEQ ID NO: 4238306 - DNA, 25 bp, Homo sapien
gaaggttgggactgtgatgttgacg

SEQ ID NO: 4238307 - DNA, 25 bp, Homo sapien
tgggaaggttgggactgtgatgttg

SEQ ID NO: 4238308 - DNA, 25 bp, Homo sapien
gttgggactgtgatgttgacgggat

SEQ ID NO: 4238309 - DNA, 25 bp, Homo sapien
ctggtccatcgggggtcccatgagc

SEQ ID NO: 4238310 - DNA, 25 bp, Homo sapien
tggtccatcgggggtcccatgagct

SEQ ID NO: 4238311 - DNA, 25 bp, Homo sapien
gtccatcgggggtcccatgagcttc

SEQ ID NO: 4238312 - DNA, 25 bp, Homo sapien
ggtccatcgggggtcccatgagctt

SEQ ID NO: 4238313 - DNA, 25 bp, Homo sapien
tcctgtcatacctttctccgtctct

SEQ ID NO: 4238314 - DNA, 25 bp, Homo sapien
ggtatcgtgggcatttgcagctccc

SEQ ID NO: 4238315 - DNA, 25 bp, Homo sapien
gcgccgtgctgttcccgtcttcttg

SEQ ID NO: 4238316 - DNA, 25 bp, Homo sapien
tttgcagctcccagtgcgccgtgct

SEQ ID NO: 4238317 - DNA, 25 bp, Homo sapien
caaggcggggcgctagtgggggaca

SEQ ID NO: 4238318 - DNA, 25 bp, Homo sapien
cggccgggtcaaggcggggcgctag

SEQ ID NO: 4238319 - DNA, 25 bp, Homo sapien
cgcaccacggccgggtcaaggcggg

SEQ ID NO: 4238320 - DNA, 25 bp, Homo sapien
ctgcgcaccacggccgggtcaaggc

SEQ ID NO: 4238321 - DNA, 25 bp, Homo sapien
acccccgacacgtctgtagtcgccg

SEQ ID NO: 4238322 - DNA, 25 bp, Homo sapien
cccgacacgtctgtagtcgccgccg

SEQ ID NO: 4238323 - DNA, 25 bp, Homo sapien
acacgtctgtagtcgccgccgcgca

SEQ ID NO: 4238324 - DNA, 25 bp, Homo sapien
gagcgcttggcaaccgcgacaggcc

SEQ ID NO: 4238325 - DNA, 25 bp, Homo sapien
gggtcctcatcgaataaaatgcacc

SEQ ID NO: 4238326 - DNA, 25 bp, Homo sapien
aatgcacctataaatcatgagcaag

SEQ ID NO: 4238327 - DNA, 25 bp, Homo sapien
ggaatacttagaccttgcttaacaa

SEQ ID NO: 4238328 - DNA, 25 bp, Homo sapien
cattcatatccgaaatctagcaaag

SEQ ID NO: 4238329 - DNA, 25 bp, Homo sapien
caccttcttatgtacccaggtgctc

SEQ ID NO: 4238330 - DNA, 25 bp, Homo sapien
actgttcaccttcttatgtacccag

SEQ ID NO: 4238331 - DNA, 25 bp, Homo sapien
cctgaatcaggagatctgtatcctg

SEQ ID NO: 4238332 - DNA, 25 bp, Homo sapien
acctgaatcaggagatctgtatcct

SEQ ID NO: 4238333 - DNA, 25 bp, Homo sapien
tagcagatgccctctcgttccttca

SEQ ID NO: 4238334 - DNA, 25 bp, Homo sapien
gccctctcgttccttcaacagtgaa

SEQ ID NO: 4238335 - DNA, 25 bp, Homo sapien
tctcgttccttcaacagtgaagtga

SEQ ID NO: 4238336 - DNA, 25 bp, Homo sapien
gatgccctctcgttccttcaacagt

SEQ ID NO: 4238337 - DNA, 25 bp, Homo sapien
tccactactggatactgagcagaaa

SEQ ID NO: 4238338 - DNA, 25 bp, Homo sapien
ccactactggatactgagcagaaat

SEQ ID NO: 4238339 - DNA, 25 bp, Homo sapien
caaagcctgcccctccagcgcctac

SEQ ID NO: 4238340 - DNA, 25 bp, Homo sapien
gcaaagcctgcccctccagcgccta

SEQ ID NO: 4238341 - DNA, 25 bp, Homo sapien
ctcgcaaagcctgcccctccagcgc

SEQ ID NO: 4238342 - DNA, 25 bp, Homo sapien
tcgcaaagcctgcccctccagcgcc

SEQ ID NO: 4238343 - DNA, 25 bp, Homo sapien
gtatcaaactctgcctcggaaaggc

SEQ ID NO: 4238344 - DNA, 25 bp, Homo sapien
tcaaactctgcctcggaaaggccaa

SEQ ID NO: 4238345 - DNA, 25 bp, Homo sapien
ctgtatcaaactctgcctcggaaag

SEQ ID NO: 4238346 - DNA, 25 bp, Homo sapien
atcaaactctgcctcggaaaggcca

SEQ ID NO: 4238347 - DNA, 25 bp, Homo sapien
caccagggacaaatgaaacccttgc

SEQ ID NO: 4238348 - DNA, 25 bp, Homo sapien
agcagcaccagggacaaatgaaacc

SEQ ID NO: 4238349 - DNA, 25 bp, Homo sapien
tgaatcctcctctttagatgatctc

SEQ ID NO: 4238350 - DNA, 25 bp, Homo sapien
tcttccccaacctaaattctgaatc

SEQ ID NO: 4238351 - DNA, 25 bp, Homo sapien
tcttcccaacggcatttacgggcat

SEQ ID NO: 4238352 - DNA, 25 bp, Homo sapien
caacggcatttacgggcatgtgtta

SEQ ID NO: 4238353 - DNA, 25 bp, Homo sapien
acaaatcttcccaacggcatttacg

SEQ ID NO: 4238354 - DNA, 25 bp, Homo sapien
atttacgggcatgtgttaaagatta

SEQ ID NO: 4238355 - DNA, 25 bp, Homo sapien
gaaatgccacctccagttgtcctcc

SEQ ID NO: 4238356 - DNA, 25 bp, Homo sapien
ccgtcacgtagtggatggcatcctg

SEQ ID NO: 4238357 - DNA, 25 bp, Homo sapien
gggcctgctccgtcacgtagtggat

SEQ ID NO: 4238358 - DNA, 25 bp, Homo sapien
gctccgtcacgtagtggatggcatc

SEQ ID NO: 4238359 - DNA, 25 bp, Homo sapien
ctgctccgtcacgtagtggatggca

SEQ ID NO: 4238360 - DNA, 25 bp, Homo sapien
gcaatattgagtggccggtccgatc

SEQ ID NO: 4238361 - DNA, 25 bp, Homo sapien
gtgtgcaatattgagtggccggtcc

SEQ ID NO: 4238362 - DNA, 25 bp, Homo sapien
tgtgcaatattgagtggccggtccg

SEQ ID NO: 4238363 - DNA, 25 bp, Homo sapien
tgcaatattgagtggccggtccgat

SEQ ID NO: 4238364 - DNA, 25 bp, Homo sapien
ggttgcagacgagcagattccggca

SEQ ID NO: 4238365 - DNA, 25 bp, Homo sapien
ttccggcaccgcagaaaggtaggcg

SEQ ID NO: 4238366 - DNA, 25 bp, Homo sapien
tggcagctaccaaagcggacggttg

SEQ ID NO: 4238367 - DNA, 25 bp, Homo sapien
gatgggagctactggcaacacataa

SEQ ID NO: 4238368 - DNA, 25 bp, Homo sapien
tagtattctttgctcttatgcgatg

SEQ ID NO: 4238369 - DNA, 25 bp, Homo sapien
ccgtcctgtatgcacagtgcgaaga

SEQ ID NO: 4238370 - DNA, 25 bp, Homo sapien
caaaacagctggtatcatatcgcag

SEQ ID NO: 4238371 - DNA, 25 bp, Homo sapien
tatgcgatggatggacccgtcctgt

SEQ ID NO: 4238372 - DNA, 25 bp, Homo sapien
tctatcccaggaatcagtataaaca

SEQ ID NO: 4238373 - DNA, 25 bp, Homo sapien
agaagacagacttatctatcccagg

SEQ ID NO: 4238374 - DNA, 25 bp, Homo sapien
cagacttatctatcccaggaatcag

SEQ ID NO: 4238375 - DNA, 25 bp, Homo sapien
gctattctacaatgcctctattttc

SEQ ID NO: 4238376 - DNA, 25 bp, Homo sapien
tataacattaactctagccaccatg

SEQ ID NO: 4238377 - DNA, 25 bp, Homo sapien
tttaatcagcatcgccacagtctgc

SEQ ID NO: 4238378 - DNA, 25 bp, Homo sapien
gctgtataatgttaactctggccac

SEQ ID NO: 4238379 - DNA, 25 bp, Homo sapien
gattttaactgtagccaccatgctg

SEQ ID NO: 4238380 - DNA, 25 bp, Homo sapien
gatagggtctaactcttgtcgccca

SEQ ID NO: 4238381 - DNA, 25 bp, Homo sapien
gagatagggtctaactcttgtcgcc

SEQ ID NO: 4238382 - DNA, 25 bp, Homo sapien
ttgagatagggtctaactcttgtcg

SEQ ID NO: 4238383 - DNA, 25 bp, Homo sapien
atagggtctaactcttgtcgcccag

SEQ ID NO: 4238384 - DNA, 25 bp, Homo sapien
agtggcccacgtccggacctcctgt

SEQ ID NO: 4238385 - DNA, 25 bp, Homo sapien
aacaacagagagcagtgactgcaca

SEQ ID NO: 4238386 - DNA, 25 bp, Homo sapien
acaacagagagcagtgactgcacac

SEQ ID NO: 4238387 - DNA, 25 bp, Homo sapien
tgcacacagtggcccacgtccggac

SEQ ID NO: 4238388 - DNA, 25 bp, Homo sapien
ccctggtgatcatggccgtgccgtc

SEQ ID NO: 4238389 - DNA, 25 bp, Homo sapien
cctggtgatcatggccgtgccgtcg

SEQ ID NO: 4238390 - DNA, 25 bp, Homo sapien
gccctggtgatcatggccgtgccgt

SEQ ID NO: 4238391 - DNA, 25 bp, Homo sapien
gagacaccacatctctagacgccag

SEQ ID NO: 4238392 - DNA, 25 bp, Homo sapien
tccacgacatccttccgtaatgaga

SEQ ID NO: 4238393 - DNA, 25 bp, Homo sapien
ctccataaacctttcgccttgactg

SEQ ID NO: 4238394 - DNA, 25 bp, Homo sapien
cgtaatgagacaaccagcaccatat

SEQ ID NO: 4238395 - DNA, 25 bp, Homo sapien
acttcaggttgggtgcgtgtctctc

SEQ ID NO: 4238396 - DNA, 25 bp, Homo sapien
aaaatatcgcagactaacagacgcc

SEQ ID NO: 4238397 - DNA, 25 bp, Homo sapien
ggcgagcggtgctgaaactcacaga

SEQ ID NO: 4238398 - DNA, 25 bp, Homo sapien
tatcacattaaagaacagggtcagg

SEQ ID NO: 4238399 - DNA, 25 bp, Homo sapien
tagacgtgatctttctcagggccac

SEQ ID NO: 4238400 - DNA, 25 bp, Homo sapien
ctgcaggtagacgtgatctttctca

SEQ ID NO: 4238401 - DNA, 25 bp, Homo sapien
gggaggacagggatcggctccttcg

SEQ ID NO: 4238402 - DNA, 25 bp, Homo sapien
gggatcggctccttcgtgacgtcca

SEQ ID NO: 4238403 - DNA, 25 bp, Homo sapien
cgaggcggttgacaccatgtgcaga

SEQ ID NO: 4238404 - DNA, 25 bp, Homo sapien
cagggcacatgcctgaccagacaac

SEQ ID NO: 4238405 - DNA, 25 bp, Homo sapien
ctgcgatgctcagggcacatgcctg

SEQ ID NO: 4238406 - DNA, 25 bp, Homo sapien
atgctcagggcacatgcctgaccag

SEQ ID NO: 4238407 - DNA, 25 bp, Homo sapien
ctcagggcacatgcctgaccagaca

SEQ ID NO: 4238408 - DNA, 25 bp, Homo sapien
cttctcaaatagtctgggtcctgaa

SEQ ID NO: 4238409 - DNA, 25 bp, Homo sapien
tctcaaatagtctgggtcctgaaga

SEQ ID NO: 4238410 - DNA, 25 bp, Homo sapien
ttctcaaatagtctgggtcctgaag

SEQ ID NO: 4238411 - DNA, 25 bp, Homo sapien
cttttcctgcacattatttgacgct

SEQ ID NO: 4238412 - DNA, 25 bp, Homo sapien
ttcctgcacattatttgacgctatc

SEQ ID NO: 4238413 - DNA, 25 bp, Homo sapien
tttcctgcacattatttgacgctat

SEQ ID NO: 4238414 - DNA, 25 bp, Homo sapien
ttttcctgcacattatttgacgcta

SEQ ID NO: 4238415 - DNA, 25 bp, Homo sapien
tgttcttcgtgcacataagactcac

SEQ ID NO: 4238416 - DNA, 25 bp, Homo sapien
tcatgtttataaggtacggcggtgc

SEQ ID NO: 4238417 - DNA, 25 bp, Homo sapien
tgttctgagcacacgaggctgcatg

SEQ ID NO: 4238418 - DNA, 25 bp, Homo sapien
tggagtgagacaagcacaacctgtg

SEQ ID NO: 4238419 - DNA, 25 bp, Homo sapien
tgagctgtcgtcagatccacagaga

SEQ ID NO: 4238420 - DNA, 25 bp, Homo sapien
ggcctcagttctaccgattttaaca

SEQ ID NO: 4238421 - DNA, 25 bp, Homo sapien
gggagactatgtctaaaaatacaca

SEQ ID NO: 4238422 - DNA, 25 bp, Homo sapien
tggcgtgcacctgatcgtaccactg

SEQ ID NO: 4238423 - DNA, 25 bp, Homo sapien
gagaagtagggatgctacaagcatt

SEQ ID NO: 4238424 - DNA, 25 bp, Homo sapien
cagcatttggtttaattggagggac

SEQ ID NO: 4238425 - DNA, 25 bp, Homo sapien
aagattcgtgacagattcttcccca

SEQ ID NO: 4238426 - DNA, 25 bp, Homo sapien
tgcatgctgagtcgcagttccgatg

SEQ ID NO: 4238427 - DNA, 25 bp, Homo sapien
agttccgatgttcttatgcttcttc

SEQ ID NO: 4238428 - DNA, 25 bp, Homo sapien
ggcacctcacggagcctgggataca

SEQ ID NO: 4238429 - DNA, 25 bp, Homo sapien
agcctcacctgaagaccgaagggca

SEQ ID NO: 4238430 - DNA, 25 bp, Homo sapien
caccttgtttggtgggaacacttct

SEQ ID NO: 4238431 - DNA, 25 bp, Homo sapien
tccgcaagcataggaagctctgttt

SEQ ID NO: 4238432 - DNA, 25 bp, Homo sapien
ctttccagcgggatacagccagggt

SEQ ID NO: 4238433 - DNA, 25 bp, Homo sapien
acccctggcgggactcctgatgtgg

SEQ ID NO: 4238434 - DNA, 25 bp, Homo sapien
tgcctgtgaggcaccacgttccata

SEQ ID NO: 4238435 - DNA, 25 bp, Homo sapien
tctggtggtgaacgtgacacgagcc

SEQ ID NO: 4238436 - DNA, 25 bp, Homo sapien
aattcatagaagcagccataccaag

SEQ ID NO: 4238437 - DNA, 25 bp, Homo sapien
cttttaattcatagaagcagccata

SEQ ID NO: 4238438 - DNA, 25 bp, Homo sapien
attcatagaagcagccataccaaga

SEQ ID NO: 4238439 - DNA, 25 bp, Homo sapien
ttaattcatagaagcagccatacca

SEQ ID NO: 4238440 - DNA, 25 bp, Homo sapien
ctgtggcacaaaatattatttgtaa

SEQ ID NO: 4238441 - DNA, 25 bp, Homo sapien
tgtggcacaaaatattatttgtaaa

SEQ ID NO: 4238442 - DNA, 25 bp, Homo sapien
ccggtcaaacgtcttcagatgcttc

SEQ ID NO: 4238443 - DNA, 25 bp, Homo sapien
cggtcaaacgtcttcagatgcttca

SEQ ID NO: 4238444 - DNA, 25 bp, Homo sapien
ccaacagtgtgcacagagcccactg

SEQ ID NO: 4238445 - DNA, 25 bp, Homo sapien
ctgcagaaggcagggcccaacagtg

SEQ ID NO: 4238446 - DNA, 25 bp, Homo sapien
aacagtgtgcacagagcccactgtc

SEQ ID NO: 4238447 - DNA, 25 bp, Homo sapien
aaggcagggcccaacagtgtgcaca

SEQ ID NO: 4238448 - DNA, 25 bp, Homo sapien
ctggggacacaaaaagttccatcag

SEQ ID NO: 4238449 - DNA, 25 bp, Homo sapien
gggcctgctagtccatggagtcact

SEQ ID NO: 4238450 - DNA, 25 bp, Homo sapien
ggcctgctagtccatggagtcactg

SEQ ID NO: 4238451 - DNA, 25 bp, Homo sapien
gctccattgacggtctgcagcgcac

SEQ ID NO: 4238452 - DNA, 25 bp, Homo sapien
tgacggtctgcagcgcacatagcat

SEQ ID NO: 4238453 - DNA, 25 bp, Homo sapien
ctctgctccattgacggtctgcagc

SEQ ID NO: 4238454 - DNA, 25 bp, Homo sapien
cattgacggtctgcagcgcacatag

SEQ ID NO: 4238455 - DNA, 25 bp, Homo sapien
cacaggacaggctctataatacctt

SEQ ID NO: 4238456 - DNA, 25 bp, Homo sapien
ccttttgccgatgtggtttatcctg

SEQ ID NO: 4238457 - DNA, 25 bp, Homo sapien
gcaggtctgaaacggtgacttactt

SEQ ID NO: 4238458 - DNA, 25 bp, Homo sapien
tctccgtaatcaaaccacaggacag

SEQ ID NO: 4238459 - DNA, 25 bp, Homo sapien
gatgggcttggagtgatcatactca

SEQ ID NO: 4238460 - DNA, 25 bp, Homo sapien
cccctggatgggcttggagtgatca

SEQ ID NO: 4238461 - DNA, 25 bp, Homo sapien
ttggagtgatcatactcatcaatct

SEQ ID NO: 4238462 - DNA, 25 bp, Homo sapien
gagtgatcatactcatcaatctgca

SEQ ID NO: 4238463 - DNA, 25 bp, Homo sapien
gacagggtgtgcttcctccagtgca

SEQ ID NO: 4238464 - DNA, 25 bp, Homo sapien
ttcccagtgccgacgtccacatagg

SEQ ID NO: 4238465 - DNA, 25 bp, Homo sapien
cgacgtccacataggacagggtgtg

SEQ ID NO: 4238466 - DNA, 25 bp, Homo sapien
ctccagtgcacctcaaagggcttct

SEQ ID NO: 4238467 - DNA, 25 bp, Homo sapien
gagagtccaaaggtaacttccacag

SEQ ID NO: 4238468 - DNA, 25 bp, Homo sapien
tgtgctaagcgagtgaagtgtgacc

SEQ ID NO: 4238469 - DNA, 25 bp, Homo sapien
gtttctggtagtggctctgtcccca

SEQ ID NO: 4238470 - DNA, 25 bp, Homo sapien
tggctgttcccaagacgctgtgctt

SEQ ID NO: 4238471 - DNA, 25 bp, Homo sapien
aagttttgtcaattatgggtctata

SEQ ID NO: 4238472 - DNA, 25 bp, Homo sapien
cagtggcacagtcagcctcgttcaa

SEQ ID NO: 4238473 - DNA, 25 bp, Homo sapien
tttgtcaattatgggtctatattcc

SEQ ID NO: 4238474 - DNA, 25 bp, Homo sapien
gtcagcctcgttcaaagttttgtca

SEQ ID NO: 4238475 - DNA, 25 bp, Homo sapien
cacatgcatgagctattatacataa

SEQ ID NO: 4238476 - DNA, 25 bp, Homo sapien
catgcatgagctattatacataatt

SEQ ID NO: 4238477 - DNA, 25 bp, Homo sapien
tgcatgagctattatacataattac

SEQ ID NO: 4238478 - DNA, 25 bp, Homo sapien
gacacatgcatgagctattatacat

SEQ ID NO: 4238479 - DNA, 25 bp, Homo sapien
gctgagactgcaccaaccctgtctc

SEQ ID NO: 4238480 - DNA, 25 bp, Homo sapien
ctgagactgcaccaaccctgtctca

SEQ ID NO: 4238481 - DNA, 25 bp, Homo sapien
acaaatatgacaagtcataacagga

SEQ ID NO: 4238482 - DNA, 25 bp, Homo sapien
caaatatgacaagtcataacaggaa

SEQ ID NO: 4238483 - DNA, 25 bp, Homo sapien
tcacacagtaatctctggcaggggg

SEQ ID NO: 4238484 - DNA, 25 bp, Homo sapien
gggcggagctcacacagtaatctct

SEQ ID NO: 4238485 - DNA, 25 bp, Homo sapien
ctcacacagtaatgctctgacaggg

SEQ ID NO: 4238486 - DNA, 25 bp, Homo sapien
ctcacacagtaatgctctgccaggg

SEQ ID NO: 4238487 - DNA, 25 bp, Homo sapien
cacagtaatactctggcagggggcg

SEQ ID NO: 4238488 - DNA, 25 bp, Homo sapien
ggagctcacacagtaatgctctgac

SEQ ID NO: 4238489 - DNA, 25 bp, Homo sapien
ctcacacagtaatactctggcaggg

SEQ ID NO: 4238490 - DNA, 25 bp, Homo sapien
gcagggggcggagctcacacagtaa

SEQ ID NO: 4238491 - DNA, 25 bp, Homo sapien
cacagtaatactctggcagggggcg

SEQ ID NO: 4238492 - DNA, 25 bp, Homo sapien
acagggggtggagctcacacagtaa

SEQ ID NO: 4238493 - DNA, 25 bp, Homo sapien
tggagctcacacagtaatgctgaca

SEQ ID NO: 4238494 - DNA, 25 bp, Homo sapien
gctcacacagcaatgctctgacagg

SEQ ID NO: 4238495 - DNA, 25 bp, Homo sapien
tggcagggggcggagctcacacagt

SEQ ID NO: 4238496 - DNA, 25 bp, Homo sapien
tctggcagggggcggagctcacaca

SEQ ID NO: 4238497 - DNA, 25 bp, Homo sapien
gctctggcagggggcggagctcaca

SEQ ID NO: 4238498 - DNA, 25 bp, Homo sapien
ctcacacagtaatgctctggcaggg

SEQ ID NO: 4238499 - DNA, 25 bp, Homo sapien
gaaagcaatggcaaatactgcaatt

SEQ ID NO: 4238500 - DNA, 25 bp, Homo sapien
caggggcggagctcacaataatgat

SEQ ID NO: 4238501 - DNA, 25 bp, Homo sapien
acaggggcggagctcacaataatga

SEQ ID NO: 4238502 - DNA, 25 bp, Homo sapien
acggatctgctttccgtcacgtagg

SEQ ID NO: 4238503 - DNA, 25 bp, Homo sapien
ccccatcacatgagcacaactgttt

SEQ ID NO: 4238504 - DNA, 25 bp, Homo sapien
ctttccgtcacgtaggaggcattct

SEQ ID NO: 4238505 - DNA, 25 bp, Homo sapien
tctgctttccgtcacgtaggaggca

SEQ ID NO: 4238506 - DNA, 25 bp, Homo sapien
attcccagcttttttgtggtataat

SEQ ID NO: 4238507 - DNA, 25 bp, Homo sapien
gcatgacagcaaacctgcacgttta

SEQ ID NO: 4238508 - DNA, 25 bp, Homo sapien
gacagcaaacctgcacgtttaccca

SEQ ID NO: 4238509 - DNA, 25 bp, Homo sapien
agcaaacctgcacgtttacccatca

SEQ ID NO: 4238510 - DNA, 25 bp, Homo sapien
catgacagcaaacctgcacgtttac

SEQ ID NO: 4238511 - DNA, 25 bp, Homo sapien
ggccaggctgggacaattcttaaac

SEQ ID NO: 4238512 - DNA, 25 bp, Homo sapien
ttttgtctcagggttggcgcctgta

SEQ ID NO: 4238513 - DNA, 25 bp, Homo sapien
ggtttccctgaattgcaatttgtag

SEQ ID NO: 4238514 - DNA, 25 bp, Homo sapien
cattctttactcacttacttgcagg

SEQ ID NO: 4238515 - DNA, 25 bp, Homo sapien
ggttcctaagtagtagacacacgca

SEQ ID NO: 4238516 - DNA, 25 bp, Homo sapien
tggtctcagtactcatgaaaacggt

SEQ ID NO: 4238517 - DNA, 25 bp, Homo sapien
tactggttgggatgaagctgcctga

SEQ ID NO: 4238518 - DNA, 25 bp, Homo sapien
tggaactttccggtgatggcatcat

SEQ ID NO: 4238519 - DNA, 25 bp, Homo sapien
attgtcttcacaagtcctctccaca

SEQ ID NO: 4238520 - DNA, 25 bp, Homo sapien
tgatgggggttactgcctgagtccc

SEQ ID NO: 4238521 - DNA, 25 bp, Homo sapien
tgtgctgcttgggacaacattgtct

SEQ ID NO: 4238522 - DNA, 25 bp, Homo sapien
aaagctctaactctgaatcctgtca

SEQ ID NO: 4238523 - DNA, 25 bp, Homo sapien
cgcgcccagccccgagcacatgtat

SEQ ID NO: 4238524 - DNA, 25 bp, Homo sapien
gatgtagagaaataggaatagtttt

SEQ ID NO: 4238525 - DNA, 25 bp, Homo sapien
tgaaaaaaactcatcgtcactgatc

SEQ ID NO: 4238526 - DNA, 25 bp, Homo sapien
gtagagaaataggaatagttttaca

SEQ ID NO: 4238527 - DNA, 25 bp, Homo sapien
gcccatgcttacgtcctcaatggtg

SEQ ID NO: 4238528 - DNA, 25 bp, Homo sapien
agtctttgcccatgcttacgtcctc

SEQ ID NO: 4238529 - DNA, 25 bp, Homo sapien
tctttgcccatgcttacgtcctcaa

SEQ ID NO: 4238530 - DNA, 25 bp, Homo sapien
tttgcccatgcttacgtcctcaatg

SEQ ID NO: 4238531 - DNA, 25 bp, Homo sapien
gactcagggatcctctttggcagaa

SEQ ID NO: 4238532 - DNA, 25 bp, Homo sapien
ctacgagggcgaggttaaacataca

SEQ ID NO: 4238533 - DNA, 25 bp, Homo sapien
tttgaaggaggtcccatctgatggc

SEQ ID NO: 4238534 - DNA, 25 bp, Homo sapien
cacttttttgagacgtttagccagg

SEQ ID NO: 4238535 - DNA, 25 bp, Homo sapien
tctggaatctagtccctcagctggt

SEQ ID NO: 4238536 - DNA, 25 bp, Homo sapien
cgtcttaaataggtcagagggcaat

SEQ ID NO: 4238537 - DNA, 25 bp, Homo sapien
taatggccatacactttcgagagga

SEQ ID NO: 4238538 - DNA, 25 bp, Homo sapien
ggacagtcaccgacatatgaggcag

SEQ ID NO: 4238539 - DNA, 25 bp, Homo sapien
tcttacagtgggtaggattactccc

SEQ ID NO: 4238540 - DNA, 25 bp, Homo sapien
caattacgtgtgacattcccaactc

SEQ ID NO: 4238541 - DNA, 25 bp, Homo sapien
ctgtcagctgcaatcaagagtcatg

SEQ ID NO: 4238542 - DNA, 25 bp, Homo sapien
tcatctaaagcaggctgtcatgagt

SEQ ID NO: 4238543 - DNA, 25 bp, Homo sapien
tgactacatcaccaccccagggttc

SEQ ID NO: 4238544 - DNA, 25 bp, Homo sapien
cccatgactacatcaccaccccagg

SEQ ID NO: 4238545 - DNA, 25 bp, Homo sapien
ttggcccatgactacatcaccaccc

SEQ ID NO: 4238546 - DNA, 25 bp, Homo sapien
tacatcaccaccccagggttcttta

SEQ ID NO: 4238547 - DNA, 25 bp, Homo sapien
gaagcgtttccctaatggtatcaaa

SEQ ID NO: 4238548 - DNA, 25 bp, Homo sapien
caaactgcatataggatgcggtccc

SEQ ID NO: 4238549 - DNA, 25 bp, Homo sapien
tagaaggcattgttaccacaggcga

SEQ ID NO: 4238550 - DNA, 25 bp, Homo sapien
gaccctgtgtggatctaggctaaca

SEQ ID NO: 4238551 - DNA, 25 bp, Homo sapien
agagtctcactctatcgcccaggct

SEQ ID NO: 4238552 - DNA, 25 bp, Homo sapien
cagagtctcactctatcgcccaggc

SEQ ID NO: 4238553 - DNA, 25 bp, Homo sapien
gcagattatctaatctttttattta

SEQ ID NO: 4238554 - DNA, 25 bp, Homo sapien
aaaccagagtgacaaaatgacagcg

SEQ ID NO: 4238555 - DNA, 25 bp, Homo sapien
gaaaaaccagagtgacaaaatgaca

SEQ ID NO: 4238556 - DNA, 25 bp, Homo sapien
accagagtgacaaaatgacagcgct

SEQ ID NO: 4238557 - DNA, 25 bp, Homo sapien
aaaaaccagagtgacaaaatgacag

SEQ ID NO: 4238558 - DNA, 25 bp, Homo sapien
tccaaggcctggtctttaaatatcc

SEQ ID NO: 4238559 - DNA, 25 bp, Homo sapien
tggcagcaggcatcaagcagagata

SEQ ID NO: 4238560 - DNA, 25 bp, Homo sapien
cagagatagaagtgctgcagcgtcc

SEQ ID NO: 4238561 - DNA, 25 bp, Homo sapien
agctgcttgaaatagctcacccaag

SEQ ID NO: 4238562 - DNA, 25 bp, Homo sapien
gagtctgcctgttaatctggatctg

SEQ ID NO: 4238563 - DNA, 25 bp, Homo sapien
gaagttctagtaaatgcaactgtat

SEQ ID NO: 4238564 - DNA, 25 bp, Homo sapien
ctgttgtatttccagggatgtttga

SEQ ID NO: 4238565 - DNA, 25 bp, Homo sapien
tgtttgaataaacccagtagactgg

SEQ ID NO: 4238566 - DNA, 25 bp, Homo sapien
ggccaactggtaccttgggttcatc

SEQ ID NO: 4238567 - DNA, 25 bp, Homo sapien
gggttcatcatcctattctctttac

SEQ ID NO: 4238568 - DNA, 25 bp, Homo sapien
aagagcttgagcataatgttgataa

SEQ ID NO: 4238569 - DNA, 25 bp, Homo sapien
ataagagcttgagcataatgttgat

SEQ ID NO: 4238570 - DNA, 25 bp, Homo sapien
cacagtacctggttcgttcaacagc

SEQ ID NO: 4238571 - DNA, 25 bp, Homo sapien
tcgaggtgcgataggaagtacccac

SEQ ID NO: 4238572 - DNA, 25 bp, Homo sapien
gacatggtctcactcggtgcagcag

SEQ ID NO: 4238573 - DNA, 25 bp, Homo sapien
aacccagaaggtaggatatgccgca

SEQ ID NO: 4238574 - DNA, 25 bp, Homo sapien
gctacggagctctgctgttctctaa

SEQ ID NO: 4238575 - DNA, 25 bp, Homo sapien
aaagcctcttgttgcacgtgctacg

SEQ ID NO: 4238576 - DNA, 25 bp, Homo sapien
gccactgatctagagagatgtcctc

SEQ ID NO: 4238577 - DNA, 25 bp, Homo sapien
caccatatcgtgctcagggtcctca

SEQ ID NO: 4238578 - DNA, 25 bp, Homo sapien
tttcaaagttgacacgatcaacagg

SEQ ID NO: 4238579 - DNA, 25 bp, Homo sapien
agggccagcaggtgtccggtagtgt

SEQ ID NO: 4238580 - DNA, 25 bp, Homo sapien
aagttgacacgatcaacagggagca

SEQ ID NO: 4238581 - DNA, 25 bp, Homo sapien
ctctttagggctaaactggagggct

SEQ ID NO: 4238582 - DNA, 25 bp, Homo sapien
caaattgcttcctgttaggttaaca

SEQ ID NO: 4238583 - DNA, 25 bp, Homo sapien
ccacatccagtaggacggctaagat

SEQ ID NO: 4238584 - DNA, 25 bp, Homo sapien
gtaatcacggcacttgggaacactg

SEQ ID NO: 4238585 - DNA, 25 bp, Homo sapien
catccagtaggacggctaagataaa

SEQ ID NO: 4238586 - DNA, 25 bp, Homo sapien
aatcacggcacttgggaacactgag

SEQ ID NO: 4238587 - DNA, 25 bp, Homo sapien
ttcccctcttgcagcggtgatccgt

SEQ ID NO: 4238588 - DNA, 25 bp, Homo sapien
gaattcatcacagtagcaacttccc

SEQ ID NO: 4238589 - DNA, 25 bp, Homo sapien
tgccacatggcagaattcatcacag

SEQ ID NO: 4238590 - DNA, 25 bp, Homo sapien
gcggtgatccgtcccaagacagcaa

SEQ ID NO: 4238591 - DNA, 25 bp, Homo sapien
catcccggctttggcctgaagtgca

SEQ ID NO: 4238592 - DNA, 25 bp, Homo sapien
ggaatcgggcctgtatgtgagttac

SEQ ID NO: 4238593 - DNA, 25 bp, Homo sapien
attgtcagggaccttaggaaccatc

SEQ ID NO: 4238594 - DNA, 25 bp, Homo sapien
ggcaaagggtttgcctctgccagcc

SEQ ID NO: 4238595 - DNA, 25 bp, Homo sapien
caaagctagaaggagcatgtaggca

SEQ ID NO: 4238596 - DNA, 25 bp, Homo sapien
agtagcaggtggcaaggaacatcag

SEQ ID NO: 4238597 - DNA, 25 bp, Homo sapien
tacacggtaccagtcaagagacatc

SEQ ID NO: 4238598 - DNA, 25 bp, Homo sapien
tcatgtctaccacggacagctgaac

SEQ ID NO: 4238599 - DNA, 25 bp, Homo sapien
catgctctgcatccagtctaggtgg

SEQ ID NO: 4238600 - DNA, 25 bp, Homo sapien
tccagtctaggtggctcctagcggg

SEQ ID NO: 4238601 - DNA, 25 bp, Homo sapien
ggcttggtgggttctccatcctcag

SEQ ID NO: 4238602 - DNA, 25 bp, Homo sapien
ttggtgggttctccatcctcagcac

SEQ ID NO: 4238603 - DNA, 25 bp, Homo sapien
tgcactgcttgaggctcactttcgg

SEQ ID NO: 4238604 - DNA, 25 bp, Homo sapien
tcctgggtctcacgagcagaaaagt

SEQ ID NO: 4238605 - DNA, 25 bp, Homo sapien
tcattgcagtggagctctgccctag

SEQ ID NO: 4238606 - DNA, 25 bp, Homo sapien
tgcatattggcttcatggcaccaaa

SEQ ID NO: 4238607 - DNA, 25 bp, Homo sapien
tatagccctatcagacaaactctag

SEQ ID NO: 4238608 - DNA, 25 bp, Homo sapien
tcaattaattctcactatagcccta

SEQ ID NO: 4238609 - DNA, 25 bp, Homo sapien
gttacctcactcaccagtagccagg

SEQ ID NO: 4238610 - DNA, 25 bp, Homo sapien
tctccatacctgatctcagttacct

SEQ ID NO: 4238611 - DNA, 25 bp, Homo sapien
ctcatctcaattcactcactcacca

SEQ ID NO: 4238612 - DNA, 25 bp, Homo sapien
tcatctcaattaactcactcaccag

SEQ ID NO: 4238613 - DNA, 25 bp, Homo sapien
tcaattaactcactcaccaggagac

SEQ ID NO: 4238614 - DNA, 25 bp, Homo sapien
ggagacaggtccctccatacctcat

SEQ ID NO: 4238615 - DNA, 25 bp, Homo sapien
tctcaattaactcactcaccaggag

SEQ ID NO: 4238616 - DNA, 25 bp, Homo sapien
tcaattaactcactcaccaggagac

SEQ ID NO: 4238617 - DNA, 25 bp, Homo sapien
ggtccctccatacctcatctcaatt

SEQ ID NO: 4238618 - DNA, 25 bp, Homo sapien
taactcactcaccaggagccaagtc

SEQ ID NO: 4238619 - DNA, 25 bp, Homo sapien
tccacacagagtctcaattaactca

SEQ ID NO: 4238620 - DNA, 25 bp, Homo sapien
tcaattaactcactcaccaggagcc

SEQ ID NO: 4238621 - DNA, 25 bp, Homo sapien
taactcactcaccaggagccaagtc

SEQ ID NO: 4238622 - DNA, 25 bp, Homo sapien
caattaactcactcaccaggagcca

SEQ ID NO: 4238623 - DNA, 25 bp, Homo sapien
aattaactcactcaccaggagccag

SEQ ID NO: 4238624 - DNA, 25 bp, Homo sapien
tgctccgtggatcctgctggctcag

SEQ ID NO: 4238625 - DNA, 25 bp, Homo sapien
atttgtatggctgattctacgcaca

SEQ ID NO: 4238626 - DNA, 25 bp, Homo sapien
gacagatgacctctgctccgtggat

SEQ ID NO: 4238627 - DNA, 25 bp, Homo sapien
caattgtagatttcggttttcctct

SEQ ID NO: 4238628 - DNA, 25 bp, Homo sapien
ggaggagacttagggcaggaggacc

SEQ ID NO: 4238629 - DNA, 25 bp, Homo sapien
gaggaccggtcagggaggagactta

SEQ ID NO: 4238630 - DNA, 25 bp, Homo sapien
agacttagggcaggaggaccggtca

SEQ ID NO: 4238631 - DNA, 25 bp, Homo sapien
cggtcagggaggagacttagggcag

SEQ ID NO: 4238632 - DNA, 25 bp, Homo sapien
tattctgtatgtgatgggaagccag

SEQ ID NO: 4238633 - DNA, 25 bp, Homo sapien
tataatcgtttactgagaagccagc

SEQ ID NO: 4238634 - DNA, 25 bp, Homo sapien
gggaaccagcaatactcaagctctg

SEQ ID NO: 4238635 - DNA, 25 bp, Homo sapien
tcgttccattcagctgcagcatagg

SEQ ID NO: 4238636 - DNA, 25 bp, Homo sapien
ggaatggaagccgacagacagactc

SEQ ID NO: 4238637 - DNA, 25 bp, Homo sapien
gatggtcctggcttacaatgattgg

SEQ ID NO: 4238638 - DNA, 25 bp, Homo sapien
gaagatcttacaggattgagcaacc

SEQ ID NO: 4238639 - DNA, 25 bp, Homo sapien
caggacaggtggttctcactacatc

SEQ ID NO: 4238640 - DNA, 25 bp, Homo sapien
tttatgttgtaacctacatactgta

SEQ ID NO: 4238641 - DNA, 25 bp, Homo sapien
gcttaagtagcgtataccctgatga

SEQ ID NO: 4238642 - DNA, 25 bp, Homo sapien
gaaacgccagggagcccagtattct

SEQ ID NO: 4238643 - DNA, 25 bp, Homo sapien
tacatactgtaaactacgcccagct

SEQ ID NO: 4238644 - DNA, 25 bp, Homo sapien
gccctctccacaccgaggcttattt

SEQ ID NO: 4238645 - DNA, 25 bp, Homo sapien
cgaaggagacgtggtaagaatcgcc

SEQ ID NO: 4238646 - DNA, 25 bp, Homo sapien
ggagacgtggtaagaatcgcctaca

SEQ ID NO: 4238647 - DNA, 25 bp, Homo sapien
gacgtggtaagaatcgcctacatct

SEQ ID NO: 4238648 - DNA, 25 bp, Homo sapien
cagatgaggcactcggatctctcca

SEQ ID NO: 4238649 - DNA, 25 bp, Homo sapien
cagattatgtggatgagaacttgcc

SEQ ID NO: 4238650 - DNA, 25 bp, Homo sapien
tattaatcccaagtcaagggtcaga

SEQ ID NO: 4238651 - DNA, 25 bp, Homo sapien
tccccactggtttcaaatgttgagc

SEQ ID NO: 4238652 - DNA, 25 bp, Homo sapien
tatgaccacagactgctctaatggg

SEQ ID NO: 4238653 - DNA, 25 bp, Homo sapien
caagtcaggtagagttggtcaaatc

SEQ ID NO: 4238654 - DNA, 25 bp, Homo sapien
gaggaagaaaagtaagtgaaagagc

SEQ ID NO: 4238655 - DNA, 25 bp, Homo sapien
cagaaaccaagcacgtgatttgttg

SEQ ID NO: 4238656 - DNA, 25 bp, Homo sapien
ctgttttactactctaagcggttgt

SEQ ID NO: 4238657 - DNA, 25 bp, Homo sapien
tcataacgtatggagagaaaaagtc

SEQ ID NO: 4238658 - DNA, 25 bp, Homo sapien
agccacaccttcgaattcttgataa

SEQ ID NO: 4238659 - DNA, 25 bp, Homo sapien
tttactactctaagcggttgtcagc

SEQ ID NO: 4238660 - DNA, 25 bp, Homo sapien
tgaccaggtgatcacaaatgtgcag

SEQ ID NO: 4238661 - DNA, 25 bp, Homo sapien
agcctcctgcccaggtgtgtgacca

SEQ ID NO: 4238662 - DNA, 25 bp, Homo sapien
tgtctctcgcgggtaccttttcctg

SEQ ID NO: 4238663 - DNA, 25 bp, Homo sapien
agccggccaccgctgctccacagaa

SEQ ID NO: 4238664 - DNA, 25 bp, Homo sapien
agagaccccaacctcccagcagaag

SEQ ID NO: 4238665 - DNA, 25 bp, Homo sapien
aacctcccagcagaagaagaaaagg

SEQ ID NO: 4238666 - DNA, 25 bp, Homo sapien
gagccagaccccagagacagcccat

SEQ ID NO: 4238667 - DNA, 25 bp, Homo sapien
tcccagagaccccaacctcccagca

SEQ ID NO: 4238668 - DNA, 25 bp, Homo sapien
aagggtggctcatactgaaattcac

SEQ ID NO: 4238669 - DNA, 25 bp, Homo sapien
ttcactcccagagccctactagggg

SEQ ID NO: 4238670 - DNA, 25 bp, Homo sapien
cactcccagagccctactaggggag

SEQ ID NO: 4238671 - DNA, 25 bp, Homo sapien
cccagagccctactaggggagaggc

SEQ ID NO: 4238672 - DNA, 25 bp, Homo sapien
tctccactcgaggtttagagggagc

SEQ ID NO: 4238673 - DNA, 25 bp, Homo sapien
ccactcgaggtttagagggagcata

SEQ ID NO: 4238674 - DNA, 25 bp, Homo sapien
ctcgaggtttagagggagcatagaa

SEQ ID NO: 4238675 - DNA, 25 bp, Homo sapien
ccggcctctccactcgaggtttaga

SEQ ID NO: 4238676 - DNA, 25 bp, Homo sapien
aaagacgagaaaggcctatgattgt

SEQ ID NO: 4238677 - DNA, 25 bp, Homo sapien
gacgagaaaggcctatgattgtgcc

SEQ ID NO: 4238678 - DNA, 25 bp, Homo sapien
cttaaaagacgagaaaggcctatga

SEQ ID NO: 4238679 - DNA, 25 bp, Homo sapien
gcctatgattgtgcctttcggggta

SEQ ID NO: 4238680 - DNA, 25 bp, Homo sapien
tggctatcggcctgcgtctttaaga

SEQ ID NO: 4238681 - DNA, 25 bp, Homo sapien
ctggctatcggcctgcgtctttaag

SEQ ID NO: 4238682 - DNA, 25 bp, Homo sapien
tccaggactcgcagagctttctgaa

SEQ ID NO: 4238683 - DNA, 25 bp, Homo sapien
accagcgtccaggactcgcagagct

SEQ ID NO: 4238684 - DNA, 25 bp, Homo sapien
caggggagtgccgttacctcatttt

SEQ ID NO: 4238685 - DNA, 25 bp, Homo sapien
tcatctacataagcgaacaagaagg

SEQ ID NO: 4238686 - DNA, 25 bp, Homo sapien
tattgcgtttacaccctgggcactt

SEQ ID NO: 4238687 - DNA, 25 bp, Homo sapien
tcacacaagctattgcgtttacacc

SEQ ID NO: 4238688 - DNA, 25 bp, Homo sapien
ctgtgttggttaagactgacttggt

SEQ ID NO: 4238689 - DNA, 25 bp, Homo sapien
tgttggttaagactgacttggtgag

SEQ ID NO: 4238690 - DNA, 25 bp, Homo sapien
gttggttaagactgacttggtgagc

SEQ ID NO: 4238691 - DNA, 25 bp, Homo sapien
tgtgttggttaagactgacttggtg

SEQ ID NO: 4238692 - DNA, 25 bp, Homo sapien
cgtggcccggtgctagagtcatagc

SEQ ID NO: 4238693 - DNA, 25 bp, Homo sapien
ggcacttctgtgtcgtccgttgtca

SEQ ID NO: 4238694 - DNA, 25 bp, Homo sapien
ttgagtttccagagcggcgtggccc

SEQ ID NO: 4238695 - DNA, 25 bp, Homo sapien
tctccacggaggtggcgatcagcac

SEQ ID NO: 4238696 - DNA, 25 bp, Homo sapien
gacaggcccttagcttctgtggagg

SEQ ID NO: 4238697 - DNA, 25 bp, Homo sapien
ggtgtgagccaatgtcaatatgtcc

SEQ ID NO: 4238698 - DNA, 25 bp, Homo sapien
tgtcaatatgtccattgtgagtgtc

SEQ ID NO: 4238699 - DNA, 25 bp, Homo sapien
tgtcatcggtgcaaagggtgtcaaa

SEQ ID NO: 4238700 - DNA, 25 bp, Homo sapien
tgggggctgtcggaagaggcgctgc

SEQ ID NO: 4238701 - DNA, 25 bp, Homo sapien
actggatgggggctgtcggaagagg

SEQ ID NO: 4238702 - DNA, 25 bp, Homo sapien
gctgtcggaagaggcgctgctctct

SEQ ID NO: 4238703 - DNA, 25 bp, Homo sapien
tgatgactggatgggggctgtcgga

SEQ ID NO: 4238704 - DNA, 25 bp, Homo sapien
gactggatgggggccgtcggaagag

SEQ ID NO: 4238705 - DNA, 25 bp, Homo sapien
tgactggatgggggccgtcggaaga

SEQ ID NO: 4238706 - DNA, 25 bp, Homo sapien
tgactggatgggggccgtcggaaga

SEQ ID NO: 4238707 - DNA, 25 bp, Homo sapien
gactggatgggggccgtcggaagag

SEQ ID NO: 4238708 - DNA, 25 bp, Homo sapien
tgactggatgggggccgtcggaaga

SEQ ID NO: 4238709 - DNA, 25 bp, Homo sapien
gactggatgggggccgtcggaagag

SEQ ID NO: 4238710 - DNA, 25 bp, Homo sapien
cgtgacggggtgatgactggatgga

SEQ ID NO: 4238711 - DNA, 25 bp, Homo sapien
tggatggaggccgtcggaagaggcg

SEQ ID NO: 4238712 - DNA, 25 bp, Homo sapien
ggtgatgactggatggaggccgtcg

SEQ ID NO: 4238713 - DNA, 25 bp, Homo sapien
gccgtcggaagaggcgctgctctct

SEQ ID NO: 4238714 - DNA, 25 bp, Homo sapien
tgactggatgggggccgtcggaaga

SEQ ID NO: 4238715 - DNA, 25 bp, Homo sapien
gactggatgggggccgtcggaagag

SEQ ID NO: 4238716 - DNA, 25 bp, Homo sapien
ttccgtggggatgagatctgtgtct

SEQ ID NO: 4238717 - DNA, 25 bp, Homo sapien
cagagctggtggatcggaggtggac

SEQ ID NO: 4238718 - DNA, 25 bp, Homo sapien
gatgctggaagtcgttgtttctatt

SEQ ID NO: 4238719 - DNA, 25 bp, Homo sapien
taacctcgatgtttgtgacagtcac

SEQ ID NO: 4238720 - DNA, 25 bp, Homo sapien
ctaactgtgaccagagctccactga

SEQ ID NO: 4238721 - DNA, 25 bp, Homo sapien
ctgctaactgtgaccagagctccac

SEQ ID NO: 4238722 - DNA, 25 bp, Homo sapien
ttctctttctgtggcgctgttagtg

SEQ ID NO: 4238723 - DNA, 25 bp, Homo sapien
acttctctttctgtggcgctgttag

SEQ ID NO: 4238724 - DNA, 25 bp, Homo sapien
aggtgctgttcgtccctcggctgct

SEQ ID NO: 4238725 - DNA, 25 bp, Homo sapien
tgcgatgtccatggtcggtgtctct

SEQ ID NO: 4238726 - DNA, 25 bp, Homo sapien
agagctcccagcaaaggaagttgtt

SEQ ID NO: 4238727 - DNA, 25 bp, Homo sapien
gctaaggtgctgttcgtccctcggc

SEQ ID NO: 4238728 - DNA, 25 bp, Homo sapien
ccgcaggaggaggaaacctccattt

SEQ ID NO: 4238729 - DNA, 25 bp, Homo sapien
tcttccggggaagccacactcagcc

SEQ ID NO: 4238730 - DNA, 25 bp, Homo sapien
ggtcagtgaggtcttccggggaagc

SEQ ID NO: 4238731 - DNA, 25 bp, Homo sapien
tccggggaagccacactcagccgca

SEQ ID NO: 4238732 - DNA, 25 bp, Homo sapien
gggctctaggagtcacatgtttaca

SEQ ID NO: 4238733 - DNA, 25 bp, Homo sapien
aagaaacgagactcccttccaagcg

SEQ ID NO: 4238734 - DNA, 25 bp, Homo sapien
tcttctgtgtcctgcgggtcttccc

SEQ ID NO: 4238735 - DNA, 25 bp, Homo sapien
tccaagcgcggtagctgctcttctg

SEQ ID NO: 4238736 - DNA, 25 bp, Homo sapien
gagcaaaagagccagctgtcctttc

SEQ ID NO: 4238737 - DNA, 25 bp, Homo sapien
agagcaaaagagccagctgtccttt

SEQ ID NO: 4238738 - DNA, 25 bp, Homo sapien
agtgaggcgcgtgggcgtggagttc

SEQ ID NO: 4238739 - DNA, 25 bp, Homo sapien
ggagacctggaagtgaggcgcgtgg

SEQ ID NO: 4238740 - DNA, 25 bp, Homo sapien
acctggaagtgaggcgcgtgggcgt

SEQ ID NO: 4238741 - DNA, 25 bp, Homo sapien
tgacacgcagtaaggagacctggaa

SEQ ID NO: 4238742 - DNA, 25 bp, Homo sapien
ctctcagcacagtaacgcagctgca

SEQ ID NO: 4238743 - DNA, 25 bp, Homo sapien
cagtaacgcagctgcagtctgtcgg

SEQ ID NO: 4238744 - DNA, 25 bp, Homo sapien
agcacagtaacgcagctgcagtctg

SEQ ID NO: 4238745 - DNA, 25 bp, Homo sapien
gtaacgcagctgcagtctgtcggtg

SEQ ID NO: 4238746 - DNA, 25 bp, Homo sapien
gggcttggacatgctgcccttcatg

SEQ ID NO: 4238747 - DNA, 25 bp, Homo sapien
ggtcctgttgccacatctggggtca

SEQ ID NO: 4238748 - DNA, 25 bp, Homo sapien
gctgcccttcatgggaaccttctgg

SEQ ID NO: 4238749 - DNA, 25 bp, Homo sapien
actccggtggatgtgagcgagggtc

SEQ ID NO: 4238750 - DNA, 25 bp, Homo sapien
agtccaaggacacctctgggaacag

SEQ ID NO: 4238751 - DNA, 25 bp, Homo sapien
ggtgatcaggtctctctttactgaa

SEQ ID NO: 4238752 - DNA, 25 bp, Homo sapien
gatgggtgatcaggtctctctttac

SEQ ID NO: 4238753 - DNA, 25 bp, Homo sapien
gtgccaaggtgagtccaaggacacc

SEQ ID NO: 4238754 - DNA, 25 bp, Homo sapien
cactgagtgaattttaatgcaggat

SEQ ID NO: 4238755 - DNA, 25 bp, Homo sapien
cacactgagtgaattttaatgcagg

SEQ ID NO: 4238756 - DNA, 25 bp, Homo sapien
actgagtgaattttaatgcaggatg

SEQ ID NO: 4238757 - DNA, 25 bp, Homo sapien
acactgagtgaattttaatgcagga

SEQ ID NO: 4238758 - DNA, 25 bp, Homo sapien
gaagggatctgtcaaacgttcagac

SEQ ID NO: 4238759 - DNA, 25 bp, Homo sapien
gatttgaatcctccacggcacatag

SEQ ID NO: 4238760 - DNA, 25 bp, Homo sapien
tgtctaacttcaatccctgggagaa

SEQ ID NO: 4238761 - DNA, 25 bp, Homo sapien
caacatatatgccaagatgagcgaa

SEQ ID NO: 4238762 - DNA, 25 bp, Homo sapien
tactaggagtgtttaagaatgcccg

SEQ ID NO: 4238763 - DNA, 25 bp, Homo sapien
tgtaaacagttaggcacagattcta

SEQ ID NO: 4238764 - DNA, 25 bp, Homo sapien
tctgtagcttgcgtaaaataacgct

SEQ ID NO: 4238765 - DNA, 25 bp, Homo sapien
taaatcagtaacgaaactgctgagt

SEQ ID NO: 4238766 - DNA, 25 bp, Homo sapien
gctctgcagatggtgtaaaaggtag

SEQ ID NO: 4238767 - DNA, 25 bp, Homo sapien
ctggaggtaggaacaggagtagctt

SEQ ID NO: 4238768 - DNA, 25 bp, Homo sapien
tctgcagatggtgtaaaaggtaggt

SEQ ID NO: 4238769 - DNA, 25 bp, Homo sapien
gaacaggagtagctttgatttggga

SEQ ID NO: 4238770 - DNA, 25 bp, Homo sapien
gccgtgacctggagctaagatagtt

SEQ ID NO: 4238771 - DNA, 25 bp, Homo sapien
ggctgaggccatatcatgaagaccc

SEQ ID NO: 4238772 - DNA, 25 bp, Homo sapien
tgaagacccttgcatacgaaggtgg

SEQ ID NO: 4238773 - DNA, 25 bp, Homo sapien
cgctccagatgaaagcaggtgtgcc

SEQ ID NO: 4238774 - DNA, 25 bp, Homo sapien
tgagcgctgtgggtgccctgtgtca

SEQ ID NO: 4238775 - DNA, 25 bp, Homo sapien
accatggaaggcacgtgagcgctgt

SEQ ID NO: 4238776 - DNA, 25 bp, Homo sapien
aaacccaccaggcactattggcaaa

SEQ ID NO: 4238777 - DNA, 25 bp, Homo sapien
gcactattggcaaaggattcacccc

SEQ ID NO: 4238778 - DNA, 25 bp, Homo sapien
gaacgggtaaataacctatggtgca

SEQ ID NO: 4238779 - DNA, 25 bp, Homo sapien
acctatggtgcattcagacgatgga

SEQ ID NO: 4238780 - DNA, 25 bp, Homo sapien
ccttcagcaggtgaacgggtaaata

SEQ ID NO: 4238781 - DNA, 25 bp, Homo sapien
aaataacctatggtgcattcagacg

SEQ ID NO: 4238782 - DNA, 25 bp, Homo sapien
gacattacaagacgactatagacca

SEQ ID NO: 4238783 - DNA, 25 bp, Homo sapien
tccgttacatcaacaggctagagaa

SEQ ID NO: 4238784 - DNA, 25 bp, Homo sapien
tcaaaaatcagctaatgcaatccgt

SEQ ID NO: 4238785 - DNA, 25 bp, Homo sapien
aaatcacatgatcggccaggcatgg

SEQ ID NO: 4238786 - DNA, 25 bp, Homo sapien
tgcgatggctacaagggctacgacc

SEQ ID NO: 4238787 - DNA, 25 bp, Homo sapien
cgcagtaggttaagcagcagggcat

SEQ ID NO: 4238788 - DNA, 25 bp, Homo sapien
cttagagatgacaaggaacctgccc

SEQ ID NO: 4238789 - DNA, 25 bp, Homo sapien
tcccgacagtgaacgtgagcacgct

SEQ ID NO: 4238790 - DNA, 25 bp, Homo sapien
aaaggctccaagcacaagggacgct

SEQ ID NO: 4238791 - DNA, 25 bp, Homo sapien
caaccatgtttacctagccgtgtct

SEQ ID NO: 4238792 - DNA, 25 bp, Homo sapien
taggacccagtagagtgccatcgct

SEQ ID NO: 4238793 - DNA, 25 bp, Homo sapien
tgccagcactaattctgagggtgac

SEQ ID NO: 4238794 - DNA, 25 bp, Homo sapien
ccctcttcctgtcaccaatgcttcc

SEQ ID NO: 4238795 - DNA, 25 bp, Homo sapien
attatccacaggtcacgccacccct

SEQ ID NO: 4238796 - DNA, 25 bp, Homo sapien
accaatgcttcctcattatccacag

SEQ ID NO: 4238797 - DNA, 25 bp, Homo sapien
cagcacttcctcagcatccacaggt

SEQ ID NO: 4238798 - DNA, 25 bp, Homo sapien
ttccacagatgacaccacccgtctt

SEQ ID NO: 4238799 - DNA, 25 bp, Homo sapien
cttccacagatgacaccacccgtct

SEQ ID NO: 4238800 - DNA, 25 bp, Homo sapien
ttgtcaccgacgcttcctcagtatc

SEQ ID NO: 4238801 - DNA, 25 bp, Homo sapien
cacccctcttcttgtcaccgacgct

SEQ ID NO: 4238802 - DNA, 25 bp, Homo sapien
ctcttcctgtcaccgacgcttcctc

SEQ ID NO: 4238803 - DNA, 25 bp, Homo sapien
cctcttcttgtcaccgacgcttcct

SEQ ID NO: 4238804 - DNA, 25 bp, Homo sapien
tgtcaccatcccttcctcagcatcc

SEQ ID NO: 4238805 - DNA, 25 bp, Homo sapien
accatcccttcctcagcatccacag

SEQ ID NO: 4238806 - DNA, 25 bp, Homo sapien
atgtcaccatcccttcctcagcatc

SEQ ID NO: 4238807 - DNA, 25 bp, Homo sapien
tcaccatcccttcctcagcatccac

SEQ ID NO: 4238808 - DNA, 25 bp, Homo sapien
agcatctacaggtcacaccacccct

SEQ ID NO: 4238809 - DNA, 25 bp, Homo sapien
atccacaggtgacaccacccctctt

SEQ ID NO: 4238810 - DNA, 25 bp, Homo sapien
atctacaggtcacaccacccctctt

SEQ ID NO: 4238811 - DNA, 25 bp, Homo sapien
agcccttcctcagcatctacaggtc

SEQ ID NO: 4238812 - DNA, 25 bp, Homo sapien
cttcctgtcaccgacgcttcctcag

SEQ ID NO: 4238813 - DNA, 25 bp, Homo sapien
tcctgtcaccgacgcttcctcagtg

SEQ ID NO: 4238814 - DNA, 25 bp, Homo sapien
tgtcaccgacgcttcctcagtgtcc

SEQ ID NO: 4238815 - DNA, 25 bp, Homo sapien
ctcttcctgtcaccgacgcttcctc

SEQ ID NO: 4238816 - DNA, 25 bp, Homo sapien
tccacaggtcacgccacccctcttc

SEQ ID NO: 4238817 - DNA, 25 bp, Homo sapien
atccacaggtcacgccacctctctt

SEQ ID NO: 4238818 - DNA, 25 bp, Homo sapien
cttcctcagcatccacaggtcacgc

SEQ ID NO: 4238819 - DNA, 25 bp, Homo sapien
agcatccacaggtcacgccacccct

SEQ ID NO: 4238820 - DNA, 25 bp, Homo sapien
atccacaggtcacgccacccctctt

SEQ ID NO: 4238821 - DNA, 25 bp, Homo sapien
ctcagcatccacaggtcacgccacc

SEQ ID NO: 4238822 - DNA, 25 bp, Homo sapien
tcagcatccacaggtcacgccaccc

SEQ ID NO: 4238823 - DNA, 25 bp, Homo sapien
agcatccacaggtcacgccacccct

SEQ ID NO: 4238824 - DNA, 25 bp, Homo sapien
atccacaggtcacgccacccctctt

SEQ ID NO: 4238825 - DNA, 25 bp, Homo sapien
agtatccacaggtcacgccacctct

SEQ ID NO: 4238826 - DNA, 25 bp, Homo sapien
cttgtcaccgacgcttcctcagtat

SEQ ID NO: 4238827 - DNA, 25 bp, Homo sapien
ttgtcaccgacgcttcctcagtatc

SEQ ID NO: 4238828 - DNA, 25 bp, Homo sapien
cttcctcagcatccacaggtcacgc

SEQ ID NO: 4238829 - DNA, 25 bp, Homo sapien
tgtcaccgacgcttcctcagtgtcc

SEQ ID NO: 4238830 - DNA, 25 bp, Homo sapien
ctcagcatccacaggtcacgtcact

SEQ ID NO: 4238831 - DNA, 25 bp, Homo sapien
ttcctcagcatccacaggtcaggcc

SEQ ID NO: 4238832 - DNA, 25 bp, Homo sapien
cttgtcaccgacacttcctcagtat

SEQ ID NO: 4238833 - DNA, 25 bp, Homo sapien
ctcagcatccacaggtcacgtcact

SEQ ID NO: 4238834 - DNA, 25 bp, Homo sapien
ttcctcagcatccacaggtcaggcc

SEQ ID NO: 4238835 - DNA, 25 bp, Homo sapien
cttgtcaccgacacttcctcagtat

SEQ ID NO: 4238836 - DNA, 25 bp, Homo sapien
tgtcaccgacgcttcctcagtgtcc

SEQ ID NO: 4238837 - DNA, 25 bp, Homo sapien
ttggccttgggctcctccgtgtaca

SEQ ID NO: 4238838 - DNA, 25 bp, Homo sapien
attggccttgggctcctccgtgtac

SEQ ID NO: 4238839 - DNA, 25 bp, Homo sapien
gccttgggctcctccgtgtacagag

SEQ ID NO: 4238840 - DNA, 25 bp, Homo sapien
cctggggctcgtagccccggcattg

SEQ ID NO: 4238841 - DNA, 25 bp, Homo sapien
gccaagtcctccagtctccaagtgg

SEQ ID NO: 4238842 - DNA, 25 bp, Homo sapien
tctccaagtggtcgacgacagcagg

SEQ ID NO: 4238843 - DNA, 25 bp, Homo sapien
catgacagagggctcctctatccaa

SEQ ID NO: 4238844 - DNA, 25 bp, Homo sapien
tgacagagggctcctctatccaaat

SEQ ID NO: 4238845 - DNA, 25 bp, Homo sapien
caggacatccatgacggccgattcc

SEQ ID NO: 4238846 - DNA, 25 bp, Homo sapien
aggacatccatgacggccgattcca

SEQ ID NO: 4238847 - DNA, 25 bp, Homo sapien
ggacatccatgacggccgattccat

SEQ ID NO: 4238848 - DNA, 25 bp, Homo sapien
tctcgaatttagctgcagccttgtt

SEQ ID NO: 4238849 - DNA, 25 bp, Homo sapien
gctgtcgccggcgtttcaaccgtcc

SEQ ID NO: 4238850 - DNA, 25 bp, Homo sapien
ggcgtttcaaccgtcctctctggga

SEQ ID NO: 4238851 - DNA, 25 bp, Homo sapien
ctccagggcagagaacttttctggc

SEQ ID NO: 4238852 - DNA, 25 bp, Homo sapien
agtggttagtaacataggcaaagcc

SEQ ID NO: 4238853 - DNA, 25 bp, Homo sapien
cctgaggagtggttagtaacatagg

SEQ ID NO: 4238854 - DNA, 25 bp, Homo sapien
ggttagtaacataggcaaagccaga

SEQ ID NO: 4238855 - DNA, 25 bp, Homo sapien
gaggagtggttagtaacataggcaa

SEQ ID NO: 4238856 - DNA, 25 bp, Homo sapien
gaggtgcgtcctccttttgccagac

SEQ ID NO: 4238857 - DNA, 25 bp, Homo sapien
gaccaagttggaggtgcgtcctcct

SEQ ID NO: 4238858 - DNA, 25 bp, Homo sapien
gctgtatgcagagcgtcgtgatgac

SEQ ID NO: 4238859 - DNA, 25 bp, Homo sapien
tgatgacagtaagagagaaaccacc

SEQ ID NO: 4238860 - DNA, 25 bp, Homo sapien
cacgttgtgctgatgtgatgggtga

SEQ ID NO: 4238861 - DNA, 25 bp, Homo sapien
gatgtgatgggtgagaacggtgaac

SEQ ID NO: 4238862 - DNA, 25 bp, Homo sapien
tgagaacggtgaacgccaggtaggg

SEQ ID NO: 4238863 - DNA, 25 bp, Homo sapien
gtagggacgaaagcgctgcaggtgg

SEQ ID NO: 4238864 - DNA, 25 bp, Homo sapien
ttagtcagcaagctccaggccccaa

SEQ ID NO: 4238865 - DNA, 25 bp, Homo sapien
tctttgcctgttagtcagcaagctc

SEQ ID NO: 4238866 - DNA, 25 bp, Homo sapien
tgcctgttagtcagcaagctccagg

SEQ ID NO: 4238867 - DNA, 25 bp, Homo sapien
gtttctttgcctgttagtcagcaag

SEQ ID NO: 4238868 - DNA, 25 bp, Homo sapien
cagaatgtgacttgtggccttacca

SEQ ID NO: 4238869 - DNA, 25 bp, Homo sapien
tgggacctcctaggactgggccttc

SEQ ID NO: 4238870 - DNA, 25 bp, Homo sapien
gaagttgctgctccggcattcagta

SEQ ID NO: 4238871 - DNA, 25 bp, Homo sapien
gcggagaaagggtgccagaccattc

SEQ ID NO: 4238872 - DNA, 25 bp, Homo sapien
cacactttggttcagtcccggtgcc

SEQ ID NO: 4238873 - DNA, 25 bp, Homo sapien
agcctgtccgtccaccaggagtggg

SEQ ID NO: 4238874 - DNA, 25 bp, Homo sapien
gggcctgcctgaaggaatcacctga

SEQ ID NO: 4238875 - DNA, 25 bp, Homo sapien
caggctctgggtatgacctgcctct

SEQ ID NO: 4238876 - DNA, 25 bp, Homo sapien
gctccgcacagaccgcagagatctt

SEQ ID NO: 4238877 - DNA, 25 bp, Homo sapien
catcgtccgggatggcaagaaggtc

SEQ ID NO: 4238878 - DNA, 25 bp, Homo sapien
agagatcttccaggcgctacagcag

SEQ ID NO: 4238879 - DNA, 25 bp, Homo sapien
cactattacttgctgcccgagcgac

SEQ ID NO: 4238880 - DNA, 25 bp, Homo sapien
tgttagagggatagacactgtgtcc

SEQ ID NO: 4238881 - DNA, 25 bp, Homo sapien
tagagggacagatcctgtgtcctct

SEQ ID NO: 4238882 - DNA, 25 bp, Homo sapien
tcctcttcaaggggcattgctggcg

SEQ ID NO: 4238883 - DNA, 25 bp, Homo sapien
attgctggcgggtggtgttagaggg

SEQ ID NO: 4238884 - DNA, 25 bp, Homo sapien
tgttagagggatagacactgtgtcc

SEQ ID NO: 4238885 - DNA, 25 bp, Homo sapien
tagagggacagatcctgtgtcctct

SEQ ID NO: 4238886 - DNA, 25 bp, Homo sapien
tcctcttcaaggggcattgctggcg

SEQ ID NO: 4238887 - DNA, 25 bp, Homo sapien
attgctggcgggtggtgttagaggg

SEQ ID NO: 4238888 - DNA, 25 bp, Homo sapien
tgtgcagcagccgtgtccttactgc

SEQ ID NO: 4238889 - DNA, 25 bp, Homo sapien
tcccctcagggataacgtgtcacca

SEQ ID NO: 4238890 - DNA, 25 bp, Homo sapien
gaagccgctgtgcagacttccagct

SEQ ID NO: 4238891 - DNA, 25 bp, Homo sapien
agatcacgtgcggtgcattcccagc

SEQ ID NO: 4238892 - DNA, 25 bp, Homo sapien
gggccagttacaggtcttgttctta

SEQ ID NO: 4238893 - DNA, 25 bp, Homo sapien
tcttgttcttactggacatccaagg

SEQ ID NO: 4238894 - DNA, 25 bp, Homo sapien
attactgggccagttacaggtcttg

SEQ ID NO: 4238895 - DNA, 25 bp, Homo sapien
tcttcccgcagctggattactgggc

SEQ ID NO: 4238896 - DNA, 25 bp, Homo sapien
acttctggaggatgctcgaggcccg

SEQ ID NO: 4238897 - DNA, 25 bp, Homo sapien
tgagacgcagtagcggccctgcact

SEQ ID NO: 4238898 - DNA, 25 bp, Homo sapien
gagagatctgcttaccagcgcctgg

SEQ ID NO: 4238899 - DNA, 25 bp, Homo sapien
ccctgaccgcagccgctgggatttg

SEQ ID NO: 4238900 - DNA, 25 bp, Homo sapien
cacaattatgtgctgatacaaagag

SEQ ID NO: 4238901 - DNA, 25 bp, Homo sapien
gaggtatacagaccgctccttcagc

SEQ ID NO: 4238902 - DNA, 25 bp, Homo sapien
agaccacagcagaggtatacagacc

SEQ ID NO: 4238903 - DNA, 25 bp, Homo sapien
acaaagagttacaggaatagtgacc

SEQ ID NO: 4238904 - DNA, 25 bp, Homo sapien
ggagcgatggtccaggagcacatta

SEQ ID NO: 4238905 - DNA, 25 bp, Homo sapien
actgtctctttgtgtcggcgttgac

SEQ ID NO: 4238906 - DNA, 25 bp, Homo sapien
catgtgtggcgtgcatgggagtgag

SEQ ID NO: 4238907 - DNA, 25 bp, Homo sapien
tcggcgttgacactccggtcttcag

SEQ ID NO: 4238908 - DNA, 25 bp, Homo sapien
tcactcagcgtcagtgaatgacatg

SEQ ID NO: 4238909 - DNA, 25 bp, Homo sapien
cagtgaatgacatggtatccactca

SEQ ID NO: 4238910 - DNA, 25 bp, Homo sapien
tccactcagcgagtccaatgtgggt

SEQ ID NO: 4238911 - DNA, 25 bp, Homo sapien
gtcataagacttccgcggggacctc

SEQ ID NO: 4238912 - DNA, 25 bp, Homo sapien
tttgggctttacattgagatctagg

SEQ ID NO: 4238913 - DNA, 25 bp, Homo sapien
gatctaattgatctagtagcaccat

SEQ ID NO: 4238914 - DNA, 25 bp, Homo sapien
tcaaggccaagctggtgaacgtagt

SEQ ID NO: 4238915 - DNA, 25 bp, Homo sapien
aagatgtatctctccactgaattgc

SEQ ID NO: 4238916 - DNA, 25 bp, Homo sapien
tcttttggcctttcatccctggagg

SEQ ID NO: 4238917 - DNA, 25 bp, Homo sapien
agtgcagttttcagcggcaaggcag

SEQ ID NO: 4238918 - DNA, 25 bp, Homo sapien
tggtgcagtcaacacacaagtcctc

SEQ ID NO: 4238919 - DNA, 25 bp, Homo sapien
ttcttagagtctaggcagcaggcgg

SEQ ID NO: 4238920 - DNA, 25 bp, Homo sapien
ggagtcgggcgcagaagagtgcggg

SEQ ID NO: 4238921 - DNA, 25 bp, Homo sapien
ctcagcctgggcgtcgctgaagctg

SEQ ID NO: 4238922 - DNA, 25 bp, Homo sapien
ccggcgggaacctcttctgccgtct

SEQ ID NO: 4238923 - DNA, 25 bp, Homo sapien
tgccgtctcagcctgggcgtcgctg

SEQ ID NO: 4238924 - DNA, 25 bp, Homo sapien
gaggtggtgactggcaggcccgggc

SEQ ID NO: 4238925 - DNA, 25 bp, Homo sapien
ccaggagggagagggacccggcgag

SEQ ID NO: 4238926 - DNA, 25 bp, Homo sapien
aggggctcaggacccggaggcgccg

SEQ ID NO: 4238927 - DNA, 25 bp, Homo sapien
ctgaacgggaaggagccccaggagg

SEQ ID NO: 4238928 - DNA, 25 bp, Homo sapien
cgcccctcgactcggcgggacttct

SEQ ID NO: 4238929 - DNA, 25 bp, Homo sapien
tcctcggcaccgcaggaaggcgcag

SEQ ID NO: 4238930 - DNA, 25 bp, Homo sapien
tccattgcgcccctcgactcggcgg

SEQ ID NO: 4238931 - DNA, 25 bp, Homo sapien
accgctcctcggcaccgcaggaagg

SEQ ID NO: 4238932 - DNA, 25 bp, Homo sapien
caagtcctcatcaggaatcgtcagg

SEQ ID NO: 4238933 - DNA, 25 bp, Homo sapien
cacggtgagattgggactagaaccc

SEQ ID NO: 4238934 - DNA, 25 bp, Homo sapien
gcaacggtagctactcggaatgaga

SEQ ID NO: 4238935 - DNA, 25 bp, Homo sapien
tagatgagggacagtaacaagggct

SEQ ID NO: 4238936 - DNA, 25 bp, Homo sapien
ccgtgaactgttttgttattacatc

SEQ ID NO: 4238937 - DNA, 25 bp, Homo sapien
attgccctactgcgctctggccaag

SEQ ID NO: 4238938 - DNA, 25 bp, Homo sapien
cctacacagtttccgatgtgtctga

SEQ ID NO: 4238939 - DNA, 25 bp, Homo sapien
gatgtgtctgatcttgccacctacc

SEQ ID NO: 4238940 - DNA, 25 bp, Homo sapien
taccagctgtatggcactgaacaag

SEQ ID NO: 4238941 - DNA, 25 bp, Homo sapien
taatttagtagaaagttgccctgcc

SEQ ID NO: 4238942 - DNA, 25 bp, Homo sapien
gtcacttggccatgtagaacctcag

SEQ ID NO: 4238943 - DNA, 25 bp, Homo sapien
aagaatgcgaagtgcagggccttgc

SEQ ID NO: 4238944 - DNA, 25 bp, Homo sapien
gtgtcacggacacatcccagcatag

SEQ ID NO: 4238945 - DNA, 25 bp, Homo sapien
agttctcaaccgcatggcagggacc

SEQ ID NO: 4238946 - DNA, 25 bp, Homo sapien
tagttagtcctgatgcttcctgaag

SEQ ID NO: 4238947 - DNA, 25 bp, Homo sapien
gactggctcaggcacgttaattaga

SEQ ID NO: 4238948 - DNA, 25 bp, Homo sapien
ttctctggaggtatgctgtacgtca

SEQ ID NO: 4238949 - DNA, 25 bp, Homo sapien
tgtaagaatgcaagctttcagcact

SEQ ID NO: 4238950 - DNA, 25 bp, Homo sapien
tccctctaaaaggttgcaacagtag

SEQ ID NO: 4238951 - DNA, 25 bp, Homo sapien
taaaaacaagctgtacgcagtggct

SEQ ID NO: 4238952 - DNA, 25 bp, Homo sapien
aagggcacgctaaaagatatttatt

SEQ ID NO: 4238953 - DNA, 25 bp, Homo sapien
aaagggcacgctaaaagatatttat

SEQ ID NO: 4238954 - DNA, 25 bp, Homo sapien
ggtgctggttatgttccatttcttg

SEQ ID NO: 4238955 - DNA, 25 bp, Homo sapien
gttctggggtgctggttatgttcca

SEQ ID NO: 4238956 - DNA, 25 bp, Homo sapien
cctgatagtcagagtgtggtccatg

SEQ ID NO: 4238957 - DNA, 25 bp, Homo sapien
gactgtctgcatcgaaggccctgat

SEQ ID NO: 4238958 - DNA, 25 bp, Homo sapien
gaagccctgagctagttcgtacagt

SEQ ID NO: 4238959 - DNA, 25 bp, Homo sapien
tgctcaagttgtagccatggctctc

SEQ ID NO: 4238960 - DNA, 25 bp, Homo sapien
tgttggttaccaaccacaactctag

SEQ ID NO: 4238961 - DNA, 25 bp, Homo sapien
ggcaccagagcgcagggctccatga

SEQ ID NO: 4238962 - DNA, 25 bp, Homo sapien
gcaccagagcgcagggctccatgag

SEQ ID NO: 4238963 - DNA, 25 bp, Homo sapien
aaccacaactctaggtgtccaccag

SEQ ID NO: 4238964 - DNA, 25 bp, Homo sapien
ggtagccaagaacggagcaggtatg

SEQ ID NO: 4238965 - DNA, 25 bp, Homo sapien
gagggtagccaagaacggagcaggt

SEQ ID NO: 4238966 - DNA, 25 bp, Homo sapien
ggagagggtagccaagaacggagca

SEQ ID NO: 4238967 - DNA, 25 bp, Homo sapien
tagccaagaacggagcaggtatggg

SEQ ID NO: 4238968 - DNA, 25 bp, Homo sapien
aggaatgctgagtggaaccggggag

SEQ ID NO: 4238969 - DNA, 25 bp, Homo sapien
cactgagcgatgctgcgtggaaccg

SEQ ID NO: 4238970 - DNA, 25 bp, Homo sapien
tgctgagtggaaccggggagcgatg

SEQ ID NO: 4238971 - DNA, 25 bp, Homo sapien
tggaaccggggagcgatgctgcgtg

SEQ ID NO: 4238972 - DNA, 25 bp, Homo sapien
tctttgggtctgctgatagtgaggt

SEQ ID NO: 4238973 - DNA, 25 bp, Homo sapien
gcgttcccctgcgagtgttcctctg

SEQ ID NO: 4238974 - DNA, 25 bp, Homo sapien
gagtgttcctctgggcctaaccacc

SEQ ID NO: 4238975 - DNA, 25 bp, Homo sapien
gaggtgtcttggataactacagcaa

SEQ ID NO: 4238976 - DNA, 25 bp, Homo sapien
actgaaaagtctgctccaagatata

SEQ ID NO: 4238977 - DNA, 25 bp, Homo sapien
tacttggtgttctacaatcttcttg

SEQ ID NO: 4238978 - DNA, 25 bp, Homo sapien
caagatatacgggagctccttatat

SEQ ID NO: 4238979 - DNA, 25 bp, Homo sapien
cttggtgttctacaatcttcttgca

SEQ ID NO: 4238980 - DNA, 25 bp, Homo sapien
tgcacttttcctttattattcctat

SEQ ID NO: 4238981 - DNA, 25 bp, Homo sapien
tattcctattattatgtttttgaga

SEQ ID NO: 4238982 - DNA, 25 bp, Homo sapien
cagtttctgttaagttgtttgaatt

SEQ ID NO: 4238983 - DNA, 25 bp, Homo sapien
tgttaagttgtttgaatttttgcac

SEQ ID NO: 4238984 - DNA, 25 bp, Homo sapien
cacagaaggaccctgtcccagctgg

SEQ ID NO: 4238985 - DNA, 25 bp, Homo sapien
gcagcaggtgtcacagaaggaccct

SEQ ID NO: 4238986 - DNA, 25 bp, Homo sapien
agctggtcctgctccactgctagga

SEQ ID NO: 4238987 - DNA, 25 bp, Homo sapien
ctggtcctgctccactgctaggatg

SEQ ID NO: 4238988 - DNA, 25 bp, Homo sapien
tgtgaggtttcggtgctgatacttc

SEQ ID NO: 4238989 - DNA, 25 bp, Homo sapien
ctggcaattgtgtccgttcacccag

SEQ ID NO: 4238990 - DNA, 25 bp, Homo sapien
tttcggtgctgatacttctattctg

SEQ ID NO: 4238991 - DNA, 25 bp, Homo sapien
tgtgagttctggcaattgtgtccgt

SEQ ID NO: 4238992 - DNA, 25 bp, Homo sapien
agcgcctcctggagcctgtcgacgt

SEQ ID NO: 4238993 - DNA, 25 bp, Homo sapien
ggagccggggaagcgtgtgagagag

SEQ ID NO: 4238994 - DNA, 25 bp, Homo sapien
gagtgagaccgacagagtgagcacc

SEQ ID NO: 4238995 - DNA, 25 bp, Homo sapien
cctccagcacgcaggccaagtgggg

SEQ ID NO: 4238996 - DNA, 25 bp, Homo sapien
catgacaaaaggaactgatccagga

SEQ ID NO: 4238997 - DNA, 25 bp, Homo sapien
tacatgacaaaaggaactgatccag

SEQ ID NO: 4238998 - DNA, 25 bp, Homo sapien
tgacaaaaggaactgatccaggaca

SEQ ID NO: 4238999 - DNA, 25 bp, Homo sapien
ctacatgacaaaaggaactgatcca

SEQ ID NO: 4239000 - DNA, 25 bp, Homo sapien
tctccttggatctgttaacaattca

SEQ ID NO: 4239001 - DNA, 25 bp, Homo sapien
gttcctgtatagtttctccttggat

SEQ ID NO: 4239002 - DNA, 25 bp, Homo sapien
ctgaagaaggataaacacagctaac

SEQ ID NO: 4239003 - DNA, 25 bp, Homo sapien
attcattcgatttaaactattggaa

SEQ ID NO: 4239004 - DNA, 25 bp, Homo sapien
cgattacgtggcctgggtgtcccag

SEQ ID NO: 4239005 - DNA, 25 bp, Homo sapien
tagacctctcagtatagcttggtgc

SEQ ID NO: 4239006 - DNA, 25 bp, Homo sapien
tgtcccaggcccatttatattagac

SEQ ID NO: 4239007 - DNA, 25 bp, Homo sapien
agcttggtgcatttccaggaaacat

SEQ ID NO: 4239008 - DNA, 25 bp, Homo sapien
tgcaaatttgcctctttgctgtctg

SEQ ID NO: 4239009 - DNA, 25 bp, Homo sapien
ggaaacttctgattcagatgtcgaa

SEQ ID NO: 4239010 - DNA, 25 bp, Homo sapien
tgtttatttctcaaagggctcactg

SEQ ID NO: 4239011 - DNA, 25 bp, Homo sapien
tctcaggccacccatttgttgtcat

SEQ ID NO: 4239012 - DNA, 25 bp, Homo sapien
tttctccgacttcgcctttttgtca

SEQ ID NO: 4239013 - DNA, 25 bp, Homo sapien
tatcatgagatgaaggtgatgcttc

SEQ ID NO: 4239014 - DNA, 25 bp, Homo sapien
tctttgtctttatcatgagatgaag

SEQ ID NO: 4239015 - DNA, 25 bp, Homo sapien
atgagatgaaggtgatgcttctgtt

SEQ ID NO: 4239016 - DNA, 25 bp, Homo sapien
ctttatcatgagatgaaggtgatgc

SEQ ID NO: 4239017 - DNA, 25 bp, Homo sapien
caaggagttccatgacgtacagttc

SEQ ID NO: 4239018 - DNA, 25 bp, Homo sapien
cccagcgtcggcattacaaggagtt

SEQ ID NO: 4239019 - DNA, 25 bp, Homo sapien
gacgtacagttctttcacgaaaaca

SEQ ID NO: 4239020 - DNA, 25 bp, Homo sapien
gaaaagcccagcgtcggcattacaa

SEQ ID NO: 4239021 - DNA, 25 bp, Homo sapien
gatgctctgtagttcaaatcacatc

SEQ ID NO: 4239022 - DNA, 25 bp, Homo sapien
tgctctgtagttcaaatcacatccc

SEQ ID NO: 4239023 - DNA, 25 bp, Homo sapien
tgatgctctgtagttcaaatcacat

SEQ ID NO: 4239024 - DNA, 25 bp, Homo sapien
ctgatgctctgtagttcaaatcaca

SEQ ID NO: 4239025 - DNA, 25 bp, Homo sapien
ttctgtttcacggcagtcagaagaa

SEQ ID NO: 4239026 - DNA, 25 bp, Homo sapien
tctgtttcacggcagtcagaagaac

SEQ ID NO: 4239027 - DNA, 25 bp, Homo sapien
cttctgtttcacggcagtcagaaga

SEQ ID NO: 4239028 - DNA, 25 bp, Homo sapien
ctaatttgagtgtggtgcagctgga

SEQ ID NO: 4239029 - DNA, 25 bp, Homo sapien
tcccggagctggactctacgtgagg

SEQ ID NO: 4239030 - DNA, 25 bp, Homo sapien
gaggaaccaatgctgcctctgatgt

SEQ ID NO: 4239031 - DNA, 25 bp, Homo sapien
gttcaaatatgagggtcccggagct

SEQ ID NO: 4239032 - DNA, 25 bp, Homo sapien
tgagttccctacaggtggacaccca

SEQ ID NO: 4239033 - DNA, 25 bp, Homo sapien
gagcttatgttctagatgagggtca

SEQ ID NO: 4239034 - DNA, 25 bp, Homo sapien
acgttctaatttgagttccctacag

SEQ ID NO: 4239035 - DNA, 25 bp, Homo sapien
cttatgttctagatgagggtcatac

SEQ ID NO: 4239036 - DNA, 25 bp, Homo sapien
cctgaagaggagttgatgttcgaga

SEQ ID NO: 4239037 - DNA, 25 bp, Homo sapien
aagaggagttgatgttcgagattga

SEQ ID NO: 4239038 - DNA, 25 bp, Homo sapien
cacctgaagaggagttgatgttcga

SEQ ID NO: 4239039 - DNA, 25 bp, Homo sapien
tgaagaggagttgatgttcgagatt

SEQ ID NO: 4239040 - DNA, 25 bp, Homo sapien
tctagattgagggccctacagctgc

SEQ ID NO: 4239041 - DNA, 25 bp, Homo sapien
ctgatgttctagattgagggcccta

SEQ ID NO: 4239042 - DNA, 25 bp, Homo sapien
gatgttctagattgagggccctaca

SEQ ID NO: 4239043 - DNA, 25 bp, Homo sapien
tgttctagattgagggccctacagc

SEQ ID NO: 4239044 - DNA, 25 bp, Homo sapien
agtttgagggtcatgcagcagaagg

SEQ ID NO: 4239045 - DNA, 25 bp, Homo sapien
tttgagggtcatgcagcagaaggct

SEQ ID NO: 4239046 - DNA, 25 bp, Homo sapien
gagattctagtttgagggtcatgca

SEQ ID NO: 4239047 - DNA, 25 bp, Homo sapien
tgagggtcatgcagcagaaggctca

SEQ ID NO: 4239048 - DNA, 25 bp, Homo sapien
gtcttgcagctgcaaacctggagag

SEQ ID NO: 4239049 - DNA, 25 bp, Homo sapien
tttgagggtcttgcagctgcaaacc

SEQ ID NO: 4239050 - DNA, 25 bp, Homo sapien
tcatgcagctgaagactcgggagga

SEQ ID NO: 4239051 - DNA, 25 bp, Homo sapien
tctagattaagggtcatgcagctga

SEQ ID NO: 4239052 - DNA, 25 bp, Homo sapien
tggagaggagctgatgttctagttt

SEQ ID NO: 4239053 - DNA, 25 bp, Homo sapien
gttctagtttgagggtcatgcaggt

SEQ ID NO: 4239054 - DNA, 25 bp, Homo sapien
agaggagctgatgttctagtttgag

SEQ ID NO: 4239055 - DNA, 25 bp, Homo sapien
ttgagggtcatgcaggtgaagactc

SEQ ID NO: 4239056 - DNA, 25 bp, Homo sapien
tgatgttctactttgagggtcatgc

SEQ ID NO: 4239057 - DNA, 25 bp, Homo sapien
atgttctactttgagggtcatgcag

SEQ ID NO: 4239058 - DNA, 25 bp, Homo sapien
gagaggagctgatgttctactttga

SEQ ID NO: 4239059 - DNA, 25 bp, Homo sapien
gagctgatgttctactttgagggtc

SEQ ID NO: 4239060 - DNA, 25 bp, Homo sapien
ttgagagtcgtgcagctgtacacct

SEQ ID NO: 4239061 - DNA, 25 bp, Homo sapien
tgagagtcgtgcagctgtacacctg

SEQ ID NO: 4239062 - DNA, 25 bp, Homo sapien
attgagagtcgtgcagctgtacacc

SEQ ID NO: 4239063 - DNA, 25 bp, Homo sapien
agctgatgttctagtttgagggtcg

SEQ ID NO: 4239064 - DNA, 25 bp, Homo sapien
gatgttctagattgagggtcgtgga

SEQ ID NO: 4239065 - DNA, 25 bp, Homo sapien
gagggtcgtgcagctgaagacccgg

SEQ ID NO: 4239066 - DNA, 25 bp, Homo sapien
tgatgttctagattgagggtcgtgg

SEQ ID NO: 4239067 - DNA, 25 bp, Homo sapien
cgttgagggtctttcagttggagac

SEQ ID NO: 4239068 - DNA, 25 bp, Homo sapien
gagagaaggtaatgttctagtttta

SEQ ID NO: 4239069 - DNA, 25 bp, Homo sapien
agagaaggtaatgttctagttttag

SEQ ID NO: 4239070 - DNA, 25 bp, Homo sapien
ttgttcgcgttgagggtctttcagt

SEQ ID NO: 4239071 - DNA, 25 bp, Homo sapien
ggctgttctgtgagactcgtggagc

SEQ ID NO: 4239072 - DNA, 25 bp, Homo sapien
gtggctgttctgtgagactcgtgga

SEQ ID NO: 4239073 - DNA, 25 bp, Homo sapien
tggctgttctgtgagactcgtggag

SEQ ID NO: 4239074 - DNA, 25 bp, Homo sapien
gaagaacacacttggacgtggctcc

SEQ ID NO: 4239075 - DNA, 25 bp, Homo sapien
tgaccgaaactgtagtaactcatgg

SEQ ID NO: 4239076 - DNA, 25 bp, Homo sapien
tggtcgcttttccactgaatgaatg

SEQ ID NO: 4239077 - DNA, 25 bp, Homo sapien
gagaaagatgattggcctcttaggg

SEQ ID NO: 4239078 - DNA, 25 bp, Homo sapien
gaaaaccatgaattcatagtggtgg

SEQ ID NO: 4239079 - DNA, 25 bp, Homo sapien
gaaatagaaatataagcgtgaactc

SEQ ID NO: 4239080 - DNA, 25 bp, Homo sapien
acatcaagcacctagaaagtggtct

SEQ ID NO: 4239081 - DNA, 25 bp, Homo sapien
ccagtagcagtagacacatcaagca

SEQ ID NO: 4239082 - DNA, 25 bp, Homo sapien
aggcaggtcttacattatatttaaa

SEQ ID NO: 4239083 - DNA, 25 bp, Homo sapien
cattactgtgtgagctccgccccct

SEQ ID NO: 4239084 - DNA, 25 bp, Homo sapien
agagcattactgtgagctctgcccc

SEQ ID NO: 4239085 - DNA, 25 bp, Homo sapien
ccagagcattactgtgagctctgcc

SEQ ID NO: 4239086 - DNA, 25 bp, Homo sapien
ctgtcatcaatactgtgtgagctcc

SEQ ID NO: 4239087 - DNA, 25 bp, Homo sapien
tgccccctgtcatcaatactgtgtg

SEQ ID NO: 4239088 - DNA, 25 bp, Homo sapien
ccctgccagaacattactgagctcc

SEQ ID NO: 4239089 - DNA, 25 bp, Homo sapien
ctgccagaacattactgagctccgc

SEQ ID NO: 4239090 - DNA, 25 bp, Homo sapien
cctgccagaacattactgagctccg

SEQ ID NO: 4239091 - DNA, 25 bp, Homo sapien
cccctgccagaacattactgagctc

SEQ ID NO: 4239092 - DNA, 25 bp, Homo sapien
cattactgtgtgagctccgccccct

SEQ ID NO: 4239093 - DNA, 25 bp, Homo sapien
gcattactgtgtgagctccgccccc

SEQ ID NO: 4239094 - DNA, 25 bp, Homo sapien
gccccgtcagagcattactgtgtga

SEQ ID NO: 4239095 - DNA, 25 bp, Homo sapien
ccagagcattactgtgagctccgcc

SEQ ID NO: 4239096 - DNA, 25 bp, Homo sapien
actgtgtgagctccgccccgtcaga

SEQ ID NO: 4239097 - DNA, 25 bp, Homo sapien
gcattactgtgtgagctccgccccg

SEQ ID NO: 4239098 - DNA, 25 bp, Homo sapien
gagtaagccaccatttcaagcctgc

SEQ ID NO: 4239099 - DNA, 25 bp, Homo sapien
aagtaagtcaccgtttcagacctgc

SEQ ID NO: 4239100 - DNA, 25 bp, Homo sapien
gagcacacgtgttggattctgcctg

SEQ ID NO: 4239101 - DNA, 25 bp, Homo sapien
tgtggtttgattacggagcctgccc

SEQ ID NO: 4239102 - DNA, 25 bp, Homo sapien
taccaagctgtttcctaccaggtca

SEQ ID NO: 4239103 - DNA, 25 bp, Homo sapien
tccgaggcagagtttgatacagcat

SEQ ID NO: 4239104 - DNA, 25 bp, Homo sapien
gatttctgctcagtatccagtagtg

SEQ ID NO: 4239105 - DNA, 25 bp, Homo sapien
catgtttggcatagtggaacctgtg

SEQ ID NO: 4239106 - DNA, 25 bp, Homo sapien
catcctagaaagaacgaataaacat

SEQ ID NO: 4239107 - DNA, 25 bp, Homo sapien
tgtgtattccacatcaacatcctag

SEQ ID NO: 4239108 - DNA, 25 bp, Homo sapien
catttagtgatctcactgtttctac

SEQ ID NO: 4239109 - DNA, 25 bp, Homo sapien
tggtgctattacctatgttaatggg

SEQ ID NO: 4239110 - DNA, 25 bp, Homo sapien
gtctggacgttcaggccctctcggt

SEQ ID NO: 4239111 - DNA, 25 bp, Homo sapien
gtgcccaacatctccccgaaatagg

SEQ ID NO: 4239112 - DNA, 25 bp, Homo sapien
tcggaggccagaaaccgagggtcac

SEQ ID NO: 4239113 - DNA, 25 bp, Homo sapien
ctcggtctgggagatcccggagaac

SEQ ID NO: 4239114 - DNA, 25 bp, Homo sapien
acctcaattgaagggctcagtacct

SEQ ID NO: 4239115 - DNA, 25 bp, Homo sapien
gtggagggtttagacctcaattgaa

SEQ ID NO: 4239116 - DNA, 25 bp, Homo sapien
tagacctcaattgaagggctcagta

SEQ ID NO: 4239117 - DNA, 25 bp, Homo sapien
ggtttagacctcaattgaagggctc

SEQ ID NO: 4239118 - DNA, 25 bp, Homo sapien
aaggaagctagtttcggtggccaca

SEQ ID NO: 4239119 - DNA, 25 bp, Homo sapien
gctacatgcccggtgaaggaagcta

SEQ ID NO: 4239120 - DNA, 25 bp, Homo sapien
aggtctcccaggctacatgcccggt

SEQ ID NO: 4239121 - DNA, 25 bp, Homo sapien
aggaagctagtttcggtggccacag

SEQ ID NO: 4239122 - DNA, 25 bp, Homo sapien
ggacagtgccagcactaagacgtgc

SEQ ID NO: 4239123 - DNA, 25 bp, Homo sapien
agagcggaccaagaagccaggaaca

SEQ ID NO: 4239124 - DNA, 25 bp, Homo sapien
agaagctcatgggacccccgatgga

SEQ ID NO: 4239125 - DNA, 25 bp, Homo sapien
taagacgtgccctggaactcacagg

SEQ ID NO: 4239126 - DNA, 25 bp, Homo sapien
caggataaacgtgccggatctcctc

SEQ ID NO: 4239127 - DNA, 25 bp, Homo sapien
aggataaacgtgccggatctcctct

SEQ ID NO: 4239128 - DNA, 25 bp, Homo sapien
actccctcgcacaccctccagcacg

SEQ ID NO: 4239129 - DNA, 25 bp, Homo sapien
aaggagctgatccaggacaggacag

SEQ ID NO: 4239130 - DNA, 25 bp, Homo sapien
ggagctgatccaggacaggacagac

SEQ ID NO: 4239131 - DNA, 25 bp, Homo sapien
tggctacatgacaaaggagctgatc

SEQ ID NO: 4239132 - DNA, 25 bp, Homo sapien
cttggctacatgacaaaggagctga

SEQ ID NO: 4239133 - DNA, 25 bp, Homo sapien
ttcagtattcttccctttgttgcat

SEQ ID NO: 4239134 - DNA, 25 bp, Homo sapien
aattgggaccacggaatctgtttct

SEQ ID NO: 4239135 - DNA, 25 bp, Homo sapien
ccctttgttgcatcaaagggaatat

SEQ ID NO: 4239136 - DNA, 25 bp, Homo sapien
ttcttccctttgttgcatcaaaggg

SEQ ID NO: 4239137 - DNA, 25 bp, Homo sapien
gttcctgtatagtttctccttggat

SEQ ID NO: 4239138 - DNA, 25 bp, Homo sapien
tctccttggatctgttaacaattca

SEQ ID NO: 4239139 - DNA, 25 bp, Homo sapien
attcattcgatttaaactattggaa

SEQ ID NO: 4239140 - DNA, 25 bp, Homo sapien
ctgaagaaggataaacacagctaac

SEQ ID NO: 4239141 - DNA, 25 bp, Homo sapien
tttctccgacttcgcctttttgtca

SEQ ID NO: 4239142 - DNA, 25 bp, Homo sapien
gtagttcaaatcacatcccctgaaa

SEQ ID NO: 4239143 - DNA, 25 bp, Homo sapien
ctgatgttctgtagttcaaatcaca

SEQ ID NO: 4239144 - DNA, 25 bp, Homo sapien
tgttctgtagttcaaatcacatccc

SEQ ID NO: 4239145 - DNA, 25 bp, Homo sapien
tctgtagttcaaatcacatcccctg

SEQ ID NO: 4239146 - DNA, 25 bp, Homo sapien
cttctgtttcacggcagtcagaaga

SEQ ID NO: 4239147 - DNA, 25 bp, Homo sapien
tctgtttcacggcagtcagaagaac

SEQ ID NO: 4239148 - DNA, 25 bp, Homo sapien
ttctgtttcacggcagtcagaagaa

SEQ ID NO: 4239149 - DNA, 25 bp, Homo sapien
ttctagattgagggtcgtgcagctg

SEQ ID NO: 4239150 - DNA, 25 bp, Homo sapien
gaggagctaatgttgtttgcattga

SEQ ID NO: 4239151 - DNA, 25 bp, Homo sapien
gagcctttcagctagagactcaggg

SEQ ID NO: 4239152 - DNA, 25 bp, Homo sapien
tcttctagctgcagacgcggagagg

SEQ ID NO: 4239153 - DNA, 25 bp, Homo sapien
tggatcttctagctgcagacgcgga

SEQ ID NO: 4239154 - DNA, 25 bp, Homo sapien
gctcggggagcagctgatgctctac

SEQ ID NO: 4239155 - DNA, 25 bp, Homo sapien
agcagctgatgctctaccttcaggg

SEQ ID NO: 4239156 - DNA, 25 bp, Homo sapien
gggagcagctgatgctctaccttca

SEQ ID NO: 4239157 - DNA, 25 bp, Homo sapien
agctgatgctctaccttcagggccc

SEQ ID NO: 4239158 - DNA, 25 bp, Homo sapien
gaccctgctgcctcgatgcgggcag

SEQ ID NO: 4239159 - DNA, 25 bp, Homo sapien
tgctccttatgttctgccccattgt

SEQ ID NO: 4239160 - DNA, 25 bp, Homo sapien
cccctgagagcttgtggaccctgct

SEQ ID NO: 4239161 - DNA, 25 bp, Homo sapien
tggcccctgagagcttgtggaccct

SEQ ID NO: 4239162 - DNA, 25 bp, Homo sapien
caggctgtgtggtccttcctggagt

SEQ ID NO: 4239163 - DNA, 25 bp, Homo sapien
tggtccttcctggagtgtcctgcac

SEQ ID NO: 4239164 - DNA, 25 bp, Homo sapien
tcaggctgtgtggtccttcctggag

SEQ ID NO: 4239165 - DNA, 25 bp, Homo sapien
gtgtggtccttcctggagtgtcctg

SEQ ID NO: 4239166 - DNA, 25 bp, Homo sapien
aacctcaacccattacctgggagtg

SEQ ID NO: 4239167 - DNA, 25 bp, Homo sapien
gagtgctcttgggaaccagcacttt

SEQ ID NO: 4239168 - DNA, 25 bp, Homo sapien
agtgctcttgggaaccagcactttc

SEQ ID NO: 4239169 - DNA, 25 bp, Homo sapien
cctcaacccattacctgggagtgct

SEQ ID NO: 4239170 - DNA, 25 bp, Homo sapien
cacggggtaagagcacagcgtccac

SEQ ID NO: 4239171 - DNA, 25 bp, Homo sapien
cacatttctttatctagtctatcac

SEQ ID NO: 4239172 - DNA, 25 bp, Homo sapien
gcaattctttgctattgtgactagt

SEQ ID NO: 4239173 - DNA, 25 bp, Homo sapien
acatttctttatctagtctatcact

SEQ ID NO: 4239174 - DNA, 25 bp, Homo sapien
ggttgcaattctttgctattgtgac

SEQ ID NO: 4239175 - DNA, 25 bp, Homo sapien
ctcacaaccatggaagcactccgcc

SEQ ID NO: 4239176 - DNA, 25 bp, Homo sapien
tcctcacaaccatggaagcactccg

SEQ ID NO: 4239177 - DNA, 25 bp, Homo sapien
ttatcctcacaaccatggaagcact

SEQ ID NO: 4239178 - DNA, 25 bp, Homo sapien
cacaaccatggaagcactccgccat

SEQ ID NO: 4239179 - DNA, 25 bp, Homo sapien
gcagacatcacagatgcctcagcgt

SEQ ID NO: 4239180 - DNA, 25 bp, Homo sapien
gggagaaaacacaggttgagtctaa

SEQ ID NO: 4239181 - DNA, 25 bp, Homo sapien
cagcgtttcggatgaggacagtaaa

SEQ ID NO: 4239182 - DNA, 25 bp, Homo sapien
gcttcatgaaaccttcgttttccag

SEQ ID NO: 4239183 - DNA, 25 bp, Homo sapien
tcctgtgactgccaattgctggccc

SEQ ID NO: 4239184 - DNA, 25 bp, Homo sapien
ggttcctcgtcatattctgtgccag

SEQ ID NO: 4239185 - DNA, 25 bp, Homo sapien
tcctgtctcactacttttcctgtga

SEQ ID NO: 4239186 - DNA, 25 bp, Homo sapien
tatggtgggacttcatgctccgcac

SEQ ID NO: 4239187 - DNA, 25 bp, Homo sapien
gattacgggcatccgccaccattcc

SEQ ID NO: 4239188 - DNA, 25 bp, Homo sapien
ctggagtacagaggtggctcactgc

SEQ ID NO: 4239189 - DNA, 25 bp, Homo sapien
ggagtacagaggtggctcactgcaa

SEQ ID NO: 4239190 - DNA, 25 bp, Homo sapien
ttacgggcatccgccaccattcctg

SEQ ID NO: 4239191 - DNA, 25 bp, Homo sapien
tccagacgagcgaaggggaccgtcc

SEQ ID NO: 4239192 - DNA, 25 bp, Homo sapien
tcctccttccagacgagcgaagggg

SEQ ID NO: 4239193 - DNA, 25 bp, Homo sapien
tccttccagacgagcgaaggggacc

SEQ ID NO: 4239194 - DNA, 25 bp, Homo sapien
gggaccgtccggcaggcggcagatg

SEQ ID NO: 4239195 - DNA, 25 bp, Homo sapien
cacctgacgtgatggcagtgacgaa

SEQ ID NO: 4239196 - DNA, 25 bp, Homo sapien
ctgaattcacctgacgtgatggcag

SEQ ID NO: 4239197 - DNA, 25 bp, Homo sapien
tgtggccgtcatatctccgctgaat

SEQ ID NO: 4239198 - DNA, 25 bp, Homo sapien
tcatatctccgctgaattcacctga

SEQ ID NO: 4239199 - DNA, 25 bp, Homo sapien
tgttgtctgcagttaccatagttta

SEQ ID NO: 4239200 - DNA, 25 bp, Homo sapien
tctttcactaagcaatagcatttgt

SEQ ID NO: 4239201 - DNA, 25 bp, Homo sapien
tggtaaccacagatcttactatatc

SEQ ID NO: 4239202 - DNA, 25 bp, Homo sapien
tacagttggaatcagaatatagcct

SEQ ID NO: 4239203 - DNA, 25 bp, Homo sapien
tagaacttgcatgacctttactgtg

SEQ ID NO: 4239204 - DNA, 25 bp, Homo sapien
tatcagactagtgacaagctcctgg

SEQ ID NO: 4239205 - DNA, 25 bp, Homo sapien
tatcaagccagtacgtgctaacagg

SEQ ID NO: 4239206 - DNA, 25 bp, Homo sapien
tcatagctgagattcctggttcggg

SEQ ID NO: 4239207 - DNA, 25 bp, Homo sapien
tcatagggcagttggaaacggcctc

SEQ ID NO: 4239208 - DNA, 25 bp, Homo sapien
cattataaacgtgatgatcagctgt

SEQ ID NO: 4239209 - DNA, 25 bp, Homo sapien
tcgaagctccgtgagtgaaccatca

SEQ ID NO: 4239210 - DNA, 25 bp, Homo sapien
tctgcctacccattcgtggtgatca

SEQ ID NO: 4239211 - DNA, 25 bp, Homo sapien
ggttttagaaaacagccgtcagcca

SEQ ID NO: 4239212 - DNA, 25 bp, Homo sapien
cacattatcgggagcagtgtcttcc

SEQ ID NO: 4239213 - DNA, 25 bp, Homo sapien
gaatataattatcggaagcagtgcc

SEQ ID NO: 4239214 - DNA, 25 bp, Homo sapien
taaaggctgtggtagtactcctgca

SEQ ID NO: 4239215 - DNA, 25 bp, Homo sapien
ccataaggaatgtagctggtttcct

SEQ ID NO: 4239216 - DNA, 25 bp, Homo sapien
tctgctgaaggttgtaagtggtcgc

SEQ ID NO: 4239217 - DNA, 25 bp, Homo sapien
taccaggttgaaagaccttctccaa

SEQ ID NO: 4239218 - DNA, 25 bp, Homo sapien
aatgagatctaagcctttccataag

SEQ ID NO: 4239219 - DNA, 25 bp, Homo sapien
tactactagatgtctttaggcagca

SEQ ID NO: 4239220 - DNA, 25 bp, Homo sapien
gtgctttgtaatgggaactgcctct

SEQ ID NO: 4239221 - DNA, 25 bp, Homo sapien
tacagggtagataacctgtacttca

SEQ ID NO: 4239222 - DNA, 25 bp, Homo sapien
tgtccatgatggaatattcccctat

SEQ ID NO: 4239223 - DNA, 25 bp, Homo sapien
tacaactaagggagtctgcgtgaga

SEQ ID NO: 4239224 - DNA, 25 bp, Homo sapien
tttgagaccaaatttactgcagtgc

SEQ ID NO: 4239225 - DNA, 25 bp, Homo sapien
gctacttactacacctggccatgga

SEQ ID NO: 4239226 - DNA, 25 bp, Homo sapien
taagaagttatacacatgtgctgga

SEQ ID NO: 4239227 - DNA, 25 bp, Homo sapien
ggtgacttggattaaagtatgcaaa

SEQ ID NO: 4239228 - DNA, 25 bp, Homo sapien
cggcctaactgctctgatattttta

SEQ ID NO: 4239229 - DNA, 25 bp, Homo sapien
cgtgcccggcctaactgctctgata

SEQ ID NO: 4239230 - DNA, 25 bp, Homo sapien
tatgcaaactcaaggagtagtacga

SEQ ID NO: 4239231 - DNA, 25 bp, Homo sapien
taaggtggatcatagtccctaagca

SEQ ID NO: 4239232 - DNA, 25 bp, Homo sapien
ttgagacagtggagttactgagccc

SEQ ID NO: 4239233 - DNA, 25 bp, Homo sapien
tactcatgtactgaggcctaacagc

SEQ ID NO: 4239234 - DNA, 25 bp, Homo sapien
tactgagccctagtgcttagtgtgg

SEQ ID NO: 4239235 - DNA, 25 bp, Homo sapien
gggcctagtcttagcttgattcgtt

SEQ ID NO: 4239236 - DNA, 25 bp, Homo sapien
tatgcctttgtttccattagaatgt

SEQ ID NO: 4239237 - DNA, 25 bp, Homo sapien
gaatcatgggttagttctatttact

SEQ ID NO: 4239238 - DNA, 25 bp, Homo sapien
gctttggagaatgcctgacatacat

SEQ ID NO: 4239239 - DNA, 25 bp, Homo sapien
tgtcggagaaactggacagcacaga

SEQ ID NO: 4239240 - DNA, 25 bp, Homo sapien
ttcaagaattatgataggccacggg

SEQ ID NO: 4239241 - DNA, 25 bp, Homo sapien
gacttcaccggcaccatcaagtgag

SEQ ID NO: 4239242 - DNA, 25 bp, Homo sapien
cagcacgtcgcttatattgggatga

SEQ ID NO: 4239243 - DNA, 25 bp, Homo sapien
ggaagcaaatgctacgctagaaaat

SEQ ID NO: 4239244 - DNA, 25 bp, Homo sapien
aaagagagacccatgaattatttca

SEQ ID NO: 4239245 - DNA, 25 bp, Homo sapien
tatccgcaggacactggcggtgcag

SEQ ID NO: 4239246 - DNA, 25 bp, Homo sapien
tcaatacgacgtgcaagtgttttct

SEQ ID NO: 4239247 - DNA, 25 bp, Homo sapien
ctaggaagacaatcatgagtagatt

SEQ ID NO: 4239248 - DNA, 25 bp, Homo sapien
gccactaggaagacaatcatgagta

SEQ ID NO: 4239249 - DNA, 25 bp, Homo sapien
agtgccactaggaagacaatcatga

SEQ ID NO: 4239250 - DNA, 25 bp, Homo sapien
cactaggaagacaatcatgagtaga

SEQ ID NO: 4239251 - DNA, 25 bp, Homo sapien
cgcctcgagcggctgcaggtacacg

SEQ ID NO: 4239252 - DNA, 25 bp, Homo sapien
tcacagagcgacgaatgacgagacc

SEQ ID NO: 4239253 - DNA, 25 bp, Homo sapien
cttgaaggccgcaggccctagtgcg

SEQ ID NO: 4239254 - DNA, 25 bp, Homo sapien
tcgccccagggaacggctgggattc

SEQ ID NO: 4239255 - DNA, 25 bp, Homo sapien
cttaaaaaacactccaagccgatag

SEQ ID NO: 4239256 - DNA, 25 bp, Homo sapien
catcgtcactcttaaaaaacactcc

SEQ ID NO: 4239257 - DNA, 25 bp, Homo sapien
aaaacactccaagccgatagcccgt

SEQ ID NO: 4239258 - DNA, 25 bp, Homo sapien
cccatcgtcactcttaaaaaacact

SEQ ID NO: 4239259 - DNA, 25 bp, Homo sapien
tgtaacaccacaaaacaggttggag

SEQ ID NO: 4239260 - DNA, 25 bp, Homo sapien
cctgctggatatgtgtgggagactc

SEQ ID NO: 4239261 - DNA, 25 bp, Homo sapien
cacactgtggtttatagctccgaga

SEQ ID NO: 4239262 - DNA, 25 bp, Homo sapien
tggttgagctcttgccatgcgccag

SEQ ID NO: 4239263 - DNA, 25 bp, Homo sapien
tggaaatcagcctggtagtgggagg

SEQ ID NO: 4239264 - DNA, 25 bp, Homo sapien
ttaagcctctggaaatcagcctggt

SEQ ID NO: 4239265 - DNA, 25 bp, Homo sapien
aagcctctggaaatcagcctggtag

SEQ ID NO: 4239266 - DNA, 25 bp, Homo sapien
ctctggaaatcagcctggtagtggg

SEQ ID NO: 4239267 - DNA, 25 bp, Homo sapien
aatggtctgaggctgttaggtaaca

SEQ ID NO: 4239268 - DNA, 25 bp, Homo sapien
gctgttggcacccaaatggtctgag

SEQ ID NO: 4239269 - DNA, 25 bp, Homo sapien
gacattctggttccgcaggtacagc

SEQ ID NO: 4239270 - DNA, 25 bp, Homo sapien
aggtcttggccagacattctggttc

SEQ ID NO: 4239271 - DNA, 25 bp, Homo sapien
cccgctccctggctaggtcagccca

SEQ ID NO: 4239272 - DNA, 25 bp, Homo sapien
cgctccctggctaggtcagcccaca

SEQ ID NO: 4239273 - DNA, 25 bp, Homo sapien
cttccccgctccctggctaggtcag

SEQ ID NO: 4239274 - DNA, 25 bp, Homo sapien
ttcacttccccgctccctggctagg

SEQ ID NO: 4239275 - DNA, 25 bp, Homo sapien
tcagagatcatctttacggaggtag

SEQ ID NO: 4239276 - DNA, 25 bp, Homo sapien
agctgagcactcaggtactgtgggt

SEQ ID NO: 4239277 - DNA, 25 bp, Homo sapien
gtagagaagagcttccgtctccggg

SEQ ID NO: 4239278 - DNA, 25 bp, Homo sapien
ggtctttcagaagcgggactgtcca

SEQ ID NO: 4239279 - DNA, 25 bp, Homo sapien
gacatgcattccagcaccctgatgg

SEQ ID NO: 4239280 - DNA, 25 bp, Homo sapien
tgcacgtaatgcagtgtgacatgca

SEQ ID NO: 4239281 - DNA, 25 bp, Homo sapien
cagcgtggatcgtaatgcacgtaat

SEQ ID NO: 4239282 - DNA, 25 bp, Homo sapien
ctctgggctgtcattgcagcgtgga

SEQ ID NO: 4239283 - DNA, 25 bp, Homo sapien
cccggcggcctccagagctccgccc

SEQ ID NO: 4239284 - DNA, 25 bp, Homo sapien
ccggcggcctccagagctccgccca

SEQ ID NO: 4239285 - DNA, 25 bp, Homo sapien
cggcggcctccagagctccgcccat

SEQ ID NO: 4239286 - DNA, 25 bp, Homo sapien
tcgatgtgaacaatggggcttctac

SEQ ID NO: 4239287 - DNA, 25 bp, Homo sapien
tcagcgaggcccgttggctgcacag

SEQ ID NO: 4239288 - DNA, 25 bp, Homo sapien
gggcttctacagtgccggcccagag

SEQ ID NO: 4239289 - DNA, 25 bp, Homo sapien
gtcttgctccttgcggggtgcgaaa

SEQ ID NO: 4239290 - DNA, 25 bp, Homo sapien
tcaggtgttggtgctttatcttgga

SEQ ID NO: 4239291 - DNA, 25 bp, Homo sapien
tgctttatcttggaggcactgggaa

SEQ ID NO: 4239292 - DNA, 25 bp, Homo sapien
cctcaggtgttggtgctttatcttg

SEQ ID NO: 4239293 - DNA, 25 bp, Homo sapien
ctcaggtgttggtgctttatcttgg

SEQ ID NO: 4239294 - DNA, 25 bp, Homo sapien
ccccagggcagattttgtctgaatc

SEQ ID NO: 4239295 - DNA, 25 bp, Homo sapien
tcttcagcaagtcactccatggcct

SEQ ID NO: 4239296 - DNA, 25 bp, Homo sapien
agccacacagagttcccgctgacaa

SEQ ID NO: 4239297 - DNA, 25 bp, Homo sapien
tacatggaatcctatggccatctgg

SEQ ID NO: 4239298 - DNA, 25 bp, Homo sapien
agggttcagtgtatattgctcgggt

SEQ ID NO: 4239299 - DNA, 25 bp, Homo sapien
cacctgtaccccaataacctatggg

SEQ ID NO: 4239300 - DNA, 25 bp, Homo sapien
ctcatgtgagcaaataccacctgta

SEQ ID NO: 4239301 - DNA, 25 bp, Homo sapien
aatttaaaaactgggccgagcgcag

SEQ ID NO: 4239302 - DNA, 25 bp, Homo sapien
caaattagatgtgcgtgtttcaatg

SEQ ID NO: 4239303 - DNA, 25 bp, Homo sapien
ttagatgtgcgtgtttcaatggagg

SEQ ID NO: 4239304 - DNA, 25 bp, Homo sapien
aaggacaaattagatgtgcgtgttt

SEQ ID NO: 4239305 - DNA, 25 bp, Homo sapien
ttcaatggaggggactctcaaaaca

SEQ ID NO: 4239306 - DNA, 25 bp, Homo sapien
catggcacgttcagcgtggagtcca

SEQ ID NO: 4239307 - DNA, 25 bp, Homo sapien
cacgttcagcgtggagtccagcgaa

SEQ ID NO: 4239308 - DNA, 25 bp, Homo sapien
agcatggcacgttcagcgtggagtc

SEQ ID NO: 4239309 - DNA, 25 bp, Homo sapien
gcaatggagcatggcacgttcagcg

SEQ ID NO: 4239310 - DNA, 25 bp, Homo sapien
gaaccagccggttacagtctgcggg

SEQ ID NO: 4239311 - DNA, 25 bp, Homo sapien
tgagataggccccaacagggactgt

SEQ ID NO: 4239312 - DNA, 25 bp, Homo sapien
tctgagaggccgtgtgaaaccggca

SEQ ID NO: 4239313 - DNA, 25 bp, Homo sapien
ggctcaagaggaacccggactgaat

SEQ ID NO: 4239314 - DNA, 25 bp, Homo sapien
aatgtgtagtcagcaatctggaaga

SEQ ID NO: 4239315 - DNA, 25 bp, Homo sapien
tgtgtagtcagcaatctggaagaag

SEQ ID NO: 4239316 - DNA, 25 bp, Homo sapien
tgtagtcagcaatctggaagaagtt

SEQ ID NO: 4239317 - DNA, 25 bp, Homo sapien
ttaatctctgggtgactcaaatgtg

SEQ ID NO: 4239318 - DNA, 25 bp, Homo sapien
caagccagttagtaaaccattagca

SEQ ID NO: 4239319 - DNA, 25 bp, Homo sapien
caactgaagattgtccatgttggca

SEQ ID NO: 4239320 - DNA, 25 bp, Homo sapien
catgttggcagtatttacacgacgg

SEQ ID NO: 4239321 - DNA, 25 bp, Homo sapien
tgatttactcctgatcactgggaaa

SEQ ID NO: 4239322 - DNA, 25 bp, Homo sapien
acagtcaccctcctgatgacagtca

SEQ ID NO: 4239323 - DNA, 25 bp, Homo sapien
acatagcgagggacaggccactgtc

SEQ ID NO: 4239324 - DNA, 25 bp, Homo sapien
cagaaatagggagccgtgacgcatg

SEQ ID NO: 4239325 - DNA, 25 bp, Homo sapien
tgccgtccatcctggcttgtggaaa

SEQ ID NO: 4239326 - DNA, 25 bp, Homo sapien
tacatgaagtgagaaagtagtgtac

SEQ ID NO: 4239327 - DNA, 25 bp, Homo sapien
gatggctggagataggtacacacct

SEQ ID NO: 4239328 - DNA, 25 bp, Homo sapien
caggaggaaatagagtatacataac

SEQ ID NO: 4239329 - DNA, 25 bp, Homo sapien
ctgtagttattgaactgatctgaat

SEQ ID NO: 4239330 - DNA, 25 bp, Homo sapien
ggagtcgaatctagccaaagtcaaa

SEQ ID NO: 4239331 - DNA, 25 bp, Homo sapien
gagtcgaatctagccaaagtcaaag

SEQ ID NO: 4239332 - DNA, 25 bp, Homo sapien
gggagtcgaatctagccaaagtcaa

SEQ ID NO: 4239333 - DNA, 25 bp, Homo sapien
aatatcgccttgtgcaggccaaagg

SEQ ID NO: 4239334 - DNA, 25 bp, Homo sapien
tcagggagaaccaacaatatcgcct

SEQ ID NO: 4239335 - DNA, 25 bp, Homo sapien
tataatgggtgcgtgttgcccctcc

SEQ ID NO: 4239336 - DNA, 25 bp, Homo sapien
tttgtcagtttcctccggcagctca

SEQ ID NO: 4239337 - DNA, 25 bp, Homo sapien
tgcggggtttccagtgcataatagc

SEQ ID NO: 4239338 - DNA, 25 bp, Homo sapien
gcccctctgctatgcggggtttcca

SEQ ID NO: 4239339 - DNA, 25 bp, Homo sapien
ccagtgcataatagcctctggccat

SEQ ID NO: 4239340 - DNA, 25 bp, Homo sapien
tgctatgcggggtttccagtgcata

SEQ ID NO: 4239341 - DNA, 25 bp, Homo sapien
gtccgcagcttacgggctgtcccag

SEQ ID NO: 4239342 - DNA, 25 bp, Homo sapien
cagtagtccgcagcttacgggctgt

SEQ ID NO: 4239343 - DNA, 25 bp, Homo sapien
ctggccagtagtccgcagcttacgg

SEQ ID NO: 4239344 - DNA, 25 bp, Homo sapien
gccagtagtccgcagcttacgggct

SEQ ID NO: 4239345 - DNA, 25 bp, Homo sapien
ctaggtgatattcattctccgctgc

SEQ ID NO: 4239346 - DNA, 25 bp, Homo sapien
gatattcattctccgctgcatccct

SEQ ID NO: 4239347 - DNA, 25 bp, Homo sapien
ccgctgcatccctgggcaggaagcg

SEQ ID NO: 4239348 - DNA, 25 bp, Homo sapien
cctgggcaggaagcgggatgctcgc

SEQ ID NO: 4239349 - DNA, 25 bp, Homo sapien
ccctgggtgccctgatccagtggtc

SEQ ID NO: 4239350 - DNA, 25 bp, Homo sapien
cctgggtgccctgatccagtggtcc

SEQ ID NO: 4239351 - DNA, 25 bp, Homo sapien
gggactgccaagaccctcaatgccc

SEQ ID NO: 4239352 - DNA, 25 bp, Homo sapien
ttgcctgcctcttacaactgtcacg

SEQ ID NO: 4239353 - DNA, 25 bp, Homo sapien
aatgcccattaaatactcttgcctg

SEQ ID NO: 4239354 - DNA, 25 bp, Homo sapien
tgccaagaccctcaatgcccattaa

SEQ ID NO: 4239355 - DNA, 25 bp, Homo sapien
gtgttcctgccccactatggcatac

SEQ ID NO: 4239356 - DNA, 25 bp, Homo sapien
tcctgccccactatggcatacaggg

SEQ ID NO: 4239357 - DNA, 25 bp, Homo sapien
caggtacatggctgaagctgtccag

SEQ ID NO: 4239358 - DNA, 25 bp, Homo sapien
ccactatggcatacagggctgctgc

SEQ ID NO: 4239359 - DNA, 25 bp, Homo sapien
cctggctttggtcccgtggagtgtc

SEQ ID NO: 4239360 - DNA, 25 bp, Homo sapien
ctttggtcccgtggagtgtcaggca

SEQ ID NO: 4239361 - DNA, 25 bp, Homo sapien
tgtcaggcagtttcagacacagaat

SEQ ID NO: 4239362 - DNA, 25 bp, Homo sapien
ttcagacacagaatcggagcaggag

SEQ ID NO: 4239363 - DNA, 25 bp, Homo sapien
tgtaacttactgaacaggcgagata

SEQ ID NO: 4239364 - DNA, 25 bp, Homo sapien
gagataaaccactgctttcagacca

SEQ ID NO: 4239365 - DNA, 25 bp, Homo sapien
aggaattgggtctgtaacttactga

SEQ ID NO: 4239366 - DNA, 25 bp, Homo sapien
tactgaacaggcgagataaaccact

SEQ ID NO: 4239367 - DNA, 25 bp, Homo sapien
ctcggccgtgtttggtgctgtcagc

SEQ ID NO: 4239368 - DNA, 25 bp, Homo sapien
gttccctggtcagcggcccctgaag

SEQ ID NO: 4239369 - DNA, 25 bp, Homo sapien
cagggctgaggcctcggccgtgttt

SEQ ID NO: 4239370 - DNA, 25 bp, Homo sapien
cgcagtgttccctggtcagcggccc

SEQ ID NO: 4239371 - DNA, 25 bp, Homo sapien
tctcagagttcaccccggaggaatt

SEQ ID NO: 4239372 - DNA, 25 bp, Homo sapien
taggctggcggagttccctgtgcct

SEQ ID NO: 4239373 - DNA, 25 bp, Homo sapien
ccaactttctatctcagagttcacc

SEQ ID NO: 4239374 - DNA, 25 bp, Homo sapien
cctataggattttgctgccagtctg

SEQ ID NO: 4239375 - DNA, 25 bp, Homo sapien
gggtcaagctttatctgggtcctgc

SEQ ID NO: 4239376 - DNA, 25 bp, Homo sapien
ggggtcaagctttatctgggtcctg

SEQ ID NO: 4239377 - DNA, 25 bp, Homo sapien
ctggggtcaagctttatctgggtcc

SEQ ID NO: 4239378 - DNA, 25 bp, Homo sapien
tggggtcaagctttatctgggtcct

SEQ ID NO: 4239379 - DNA, 25 bp, Homo sapien
tttcctctgcgaatgccttccacag

SEQ ID NO: 4239380 - DNA, 25 bp, Homo sapien
gattctctccatgcgggtcgggcag

SEQ ID NO: 4239381 - DNA, 25 bp, Homo sapien
tgagtccttacagacggacgggccc

SEQ ID NO: 4239382 - DNA, 25 bp, Homo sapien
gaagggtgagtccttacagacggac

SEQ ID NO: 4239383 - DNA, 25 bp, Homo sapien
ggaggggatgccgtaattggtcttc

SEQ ID NO: 4239384 - DNA, 25 bp, Homo sapien
ctctcaggagttgggctgctgtggg

SEQ ID NO: 4239385 - DNA, 25 bp, Homo sapien
gatgccgtaattggtcttcagcacc

SEQ ID NO: 4239386 - DNA, 25 bp, Homo sapien
gctgagagaagcaggcggaggggat

SEQ ID NO: 4239387 - DNA, 25 bp, Homo sapien
cagtttgaatgagctttgaggccag

SEQ ID NO: 4239388 - DNA, 25 bp, Homo sapien
ccaggtcgcagtgtccgcagtttga

SEQ ID NO: 4239389 - DNA, 25 bp, Homo sapien
cttttgacccactgactccttgagg

SEQ ID NO: 4239390 - DNA, 25 bp, Homo sapien
aacatgacggttgctctccggagcc

SEQ ID NO: 4239391 - DNA, 25 bp, Homo sapien
gacatgggtccagggcggatgccgt

SEQ ID NO: 4239392 - DNA, 25 bp, Homo sapien
gacccgatggggcttggaccacttg

SEQ ID NO: 4239393 - DNA, 25 bp, Homo sapien
cgtaaccaccctctagagtgacatg

SEQ ID NO: 4239394 - DNA, 25 bp, Homo sapien
ttggaccacttgggcaccatcttgg

SEQ ID NO: 4239395 - DNA, 25 bp, Homo sapien
ccttggagagcgtaaaaactgccct

SEQ ID NO: 4239396 - DNA, 25 bp, Homo sapien
tgctctgttctcaaacgcccggagg

SEQ ID NO: 4239397 - DNA, 25 bp, Homo sapien
cgcccggaggagtaacggctctgta

SEQ ID NO: 4239398 - DNA, 25 bp, Homo sapien
tccgtgaaaatctccattccgggta

SEQ ID NO: 4239399 - DNA, 25 bp, Homo sapien
tgacgaccgggactgagcgggagaa

SEQ ID NO: 4239400 - DNA, 25 bp, Homo sapien
ttactggatctaggctcccacccgt

SEQ ID NO: 4239401 - DNA, 25 bp, Homo sapien
cccacccgtgcacaggaatgaggat

SEQ ID NO: 4239402 - DNA, 25 bp, Homo sapien
ggcctgggcttgttcctcggatcga

SEQ ID NO: 4239403 - DNA, 25 bp, Homo sapien
tccagagcagagtccgcctcttgat

SEQ ID NO: 4239404 - DNA, 25 bp, Homo sapien
tgagggcaagttccacagggcccag

SEQ ID NO: 4239405 - DNA, 25 bp, Homo sapien
ccagcaaggtcaggatgctagtgag

SEQ ID NO: 4239406 - DNA, 25 bp, Homo sapien
aagatggcaatggagcccagcgcca

SEQ ID NO: 4239407 - DNA, 25 bp, Homo sapien
ggctccggaagccttttgcggcaag

SEQ ID NO: 4239408 - DNA, 25 bp, Homo sapien
ccttttgcggcaaggacacaggagg

SEQ ID NO: 4239409 - DNA, 25 bp, Homo sapien
cacaggaggcaaaacctacacattc

SEQ ID NO: 4239410 - DNA, 25 bp, Homo sapien
cgaggcagcgttccttaaacgttgc

SEQ ID NO: 4239411 - DNA, 25 bp, Homo sapien
accagcaccagggaacgagggatcc

SEQ ID NO: 4239412 - DNA, 25 bp, Homo sapien
caccagcaccagggaacgagggatc

SEQ ID NO: 4239413 - DNA, 25 bp, Homo sapien
agagaagagggcctacgaggtctgc

SEQ ID NO: 4239414 - DNA, 25 bp, Homo sapien
ggcctacgaggtctgctgccagaga

SEQ ID NO: 4239415 - DNA, 25 bp, Homo sapien
gggctgggcgttctgggtgtgtgac

SEQ ID NO: 4239416 - DNA, 25 bp, Homo sapien
agaggagacggcccacaggactggg

SEQ ID NO: 4239417 - DNA, 25 bp, Homo sapien
accagcatcagcaggtaaaagcaca

SEQ ID NO: 4239418 - DNA, 25 bp, Homo sapien
caggtaaaagcacacggcataaaac

SEQ ID NO: 4239419 - DNA, 25 bp, Homo sapien
cagcaggtaaaagcacacggcataa

SEQ ID NO: 4239420 - DNA, 25 bp, Homo sapien
catcagcaggtaaaagcacacggca

SEQ ID NO: 4239421 - DNA, 25 bp, Homo sapien
tgtccctcagcgtcctcagcactgc

SEQ ID NO: 4239422 - DNA, 25 bp, Homo sapien
gtgtccctcagcgtcctcagcactg

SEQ ID NO: 4239423 - DNA, 25 bp, Homo sapien
gtgagcagcagccgtggacagcagg

SEQ ID NO: 4239424 - DNA, 25 bp, Homo sapien
gcagcagccgtggacagcaggggca

SEQ ID NO: 4239425 - DNA, 25 bp, Homo sapien
ctggtgagcagcagccgtggacagc

SEQ ID NO: 4239426 - DNA, 25 bp, Homo sapien
gagcagcagccgtggacagcagggg

SEQ ID NO: 4239427 - DNA, 25 bp, Homo sapien
tcaagaaggcgtattggaaagggcc

SEQ ID NO: 4239428 - DNA, 25 bp, Homo sapien
accagggtcagcgttatcttcaaga

SEQ ID NO: 4239429 - DNA, 25 bp, Homo sapien
ttggaaagggcccaacatcagcagc

SEQ ID NO: 4239430 - DNA, 25 bp, Homo sapien
tctgctgggtcatagatgccgtcgg

SEQ ID NO: 4239431 - DNA, 25 bp, Homo sapien
ctggcttgacgggaaatgatgccca

SEQ ID NO: 4239432 - DNA, 25 bp, Homo sapien
agccagcagtgtggacacgccaagg

SEQ ID NO: 4239433 - DNA, 25 bp, Homo sapien
gaacagagcaaatttggctcccatg

SEQ ID NO: 4239434 - DNA, 25 bp, Homo sapien
cacgccaaggaaagtgttgatccat

SEQ ID NO: 4239435 - DNA, 25 bp, Homo sapien
tagggaggcgaacaagcaatctgcc

SEQ ID NO: 4239436 - DNA, 25 bp, Homo sapien
ccaccgttggccaagactgagaaga

SEQ ID NO: 4239437 - DNA, 25 bp, Homo sapien
ttttagaggaatagggaggcgaaca

SEQ ID NO: 4239438 - DNA, 25 bp, Homo sapien
aatctgcccaccgttggccaagact

SEQ ID NO: 4239439 - DNA, 25 bp, Homo sapien
tcagcacagtcattagaaaagtctc

SEQ ID NO: 4239440 - DNA, 25 bp, Homo sapien
tcattagaaaagtctccagtatgag

SEQ ID NO: 4239441 - DNA, 25 bp, Homo sapien
tctttccttcggtagtacattcgtg

SEQ ID NO: 4239442 - DNA, 25 bp, Homo sapien
ggtagtacattcgtgtcagcacagt

SEQ ID NO: 4239443 - DNA, 25 bp, Homo sapien
ttaggctttgaggttcaagtccagg

SEQ ID NO: 4239444 - DNA, 25 bp, Homo sapien
ccagcttgtgttgacaagggggaat

SEQ ID NO: 4239445 - DNA, 25 bp, Homo sapien
tcaaggttgagggacagtaaaggaa

SEQ ID NO: 4239446 - DNA, 25 bp, Homo sapien
catctgtagagtcaaatgtatctgc

SEQ ID NO: 4239447 - DNA, 25 bp, Homo sapien
tctaatgagtacagcatcctttcat

SEQ ID NO: 4239448 - DNA, 25 bp, Homo sapien
tcatcttgtttattacaaaacttaa

SEQ ID NO: 4239449 - DNA, 25 bp, Homo sapien
cagacatcatcttgtttattacaaa

SEQ ID NO: 4239450 - DNA, 25 bp, Homo sapien
catcatcttgtttattacaaaactt

SEQ ID NO: 4239451 - DNA, 25 bp, Homo sapien
gacatcatcttgtttattacaaaac

SEQ ID NO: 4239452 - DNA, 25 bp, Homo sapien
gatagcaggcatgagctgtcgcacc

SEQ ID NO: 4239453 - DNA, 25 bp, Homo sapien
caaccttgaagggttaatagtgaca

SEQ ID NO: 4239454 - DNA, 25 bp, Homo sapien
tgaagggttaatagtgacatggaca

SEQ ID NO: 4239455 - DNA, 25 bp, Homo sapien
acctagccagcaatatacaaccttg

SEQ ID NO: 4239456 - DNA, 25 bp, Homo sapien
gacttttacttggactctcggtgcc

SEQ ID NO: 4239457 - DNA, 25 bp, Homo sapien
caagactctgggctggtgctatttc

SEQ ID NO: 4239458 - DNA, 25 bp, Homo sapien
tggtgccgtagtagcacacctgtca

SEQ ID NO: 4239459 - DNA, 25 bp, Homo sapien
catgaccacagtgtcaggagattcc

SEQ ID NO: 4239460 - DNA, 25 bp, Homo sapien
gcttcgtcttgaacgttcgccccat

SEQ ID NO: 4239461 - DNA, 25 bp, Homo sapien
caaaagagtcttggaaaggactgct

SEQ ID NO: 4239462 - DNA, 25 bp, Homo sapien
aaggactgctggcttcgtcttgaac

SEQ ID NO: 4239463 - DNA, 25 bp, Homo sapien
gttcgccccatcaccagtgtgagtc

SEQ ID NO: 4239464 - DNA, 25 bp, Homo sapien
ccaagattttatgttagcgctcgga

SEQ ID NO: 4239465 - DNA, 25 bp, Homo sapien
tttccacagtggttcatagggcgtc

SEQ ID NO: 4239466 - DNA, 25 bp, Homo sapien
gactgccatcggataaagagtggtc

SEQ ID NO: 4239467 - DNA, 25 bp, Homo sapien
gattgaggcagaaaacggaagcacc

SEQ ID NO: 4239468 - DNA, 25 bp, Homo sapien
tgtgagacattagaaggccagagcc

SEQ ID NO: 4239469 - DNA, 25 bp, Homo sapien
gctgatagctagagccaaagaccat

SEQ ID NO: 4239470 - DNA, 25 bp, Homo sapien
ccaaatgtggccaagatgagagagc

SEQ ID NO: 4239471 - DNA, 25 bp, Homo sapien
aaagcagtcaacatgggtgggccaa

SEQ ID NO: 4239472 - DNA, 25 bp, Homo sapien
taaagcaacagccttatcaccttga

SEQ ID NO: 4239473 - DNA, 25 bp, Homo sapien
ttctaaagcaacagccttatcacct

SEQ ID NO: 4239474 - DNA, 25 bp, Homo sapien
agcaacagccttatcaccttgacct

SEQ ID NO: 4239475 - DNA, 25 bp, Homo sapien
aacagccttatcaccttgacctctg

SEQ ID NO: 4239476 - DNA, 25 bp, Homo sapien
gggaaaaatccagtacaataagcag

SEQ ID NO: 4239477 - DNA, 25 bp, Homo sapien
tatttggctacgtgcctgttactgg

SEQ ID NO: 4239478 - DNA, 25 bp, Homo sapien
tctggaatgaggttcgggccatgct

SEQ ID NO: 4239479 - DNA, 25 bp, Homo sapien
tggtaagaccaacgagtatcatcat

SEQ ID NO: 4239480 - DNA, 25 bp, Homo sapien
gcagataaaccctagctcttgttaa

SEQ ID NO: 4239481 - DNA, 25 bp, Homo sapien
ggcagataaaccctagctcttgtta

SEQ ID NO: 4239482 - DNA, 25 bp, Homo sapien
aggcagataaaccctagctcttgtt

SEQ ID NO: 4239483 - DNA, 25 bp, Homo sapien
gagagatatgaagtccactgaggcc

SEQ ID NO: 4239484 - DNA, 25 bp, Homo sapien
gtttataagcacatcaaggaggcag

SEQ ID NO: 4239485 - DNA, 25 bp, Homo sapien
cagagtgagggtaacagttctagca

SEQ ID NO: 4239486 - DNA, 25 bp, Homo sapien
ggccctattgaccacagcaagatga

SEQ ID NO: 4239487 - DNA, 25 bp, Homo sapien
tggtcctcagcatagtgtatctgat

SEQ ID NO: 4239488 - DNA, 25 bp, Homo sapien
tcagcctcagcatagtgtatctggt

SEQ ID NO: 4239489 - DNA, 25 bp, Homo sapien
tgtatctggtcctcagcatagtgta

SEQ ID NO: 4239490 - DNA, 25 bp, Homo sapien
agcctcagcatagtgtatctggtcc

SEQ ID NO: 4239491 - DNA, 25 bp, Homo sapien
gaaagttgctgatactcctttcagc

SEQ ID NO: 4239492 - DNA, 25 bp, Homo sapien
tttgatagatacgacctaattgccc

SEQ ID NO: 4239493 - DNA, 25 bp, Homo sapien
gctgggccacagctataagcatttg

SEQ ID NO: 4239494 - DNA, 25 bp, Homo sapien
taattcccagaattagaaaagctgg

SEQ ID NO: 4239495 - DNA, 25 bp, Homo sapien
ggattcagcccaatcatgatacgat

SEQ ID NO: 4239496 - DNA, 25 bp, Homo sapien
taagggagcaatttcatgccaaaaa

SEQ ID NO: 4239497 - DNA, 25 bp, Homo sapien
tttcctagaaagagacaagttgcaa

SEQ ID NO: 4239498 - DNA, 25 bp, Homo sapien
cgatctttttagaacggaacatcac

SEQ ID NO: 4239499 - DNA, 25 bp, Homo sapien
acggcacttggaccgaggaagtatg

SEQ ID NO: 4239500 - DNA, 25 bp, Homo sapien
cacttggaccgaggaagtatgaggc

SEQ ID NO: 4239501 - DNA, 25 bp, Homo sapien
ctgcgacggcacttggaccgaggaa

SEQ ID NO: 4239502 - DNA, 25 bp, Homo sapien
gggctgcgacggcacttggaccgag

SEQ ID NO: 4239503 - DNA, 25 bp, Homo sapien
tccgtctccggtctctggtatttct

SEQ ID NO: 4239504 - DNA, 25 bp, Homo sapien
ccgtctccggtctctggtatttctg

SEQ ID NO: 4239505 - DNA, 25 bp, Homo sapien
cggttccgggtggaggctgaccctg

SEQ ID NO: 4239506 - DNA, 25 bp, Homo sapien
tccgtatcccacttcaaggagacgt

SEQ ID NO: 4239507 - DNA, 25 bp, Homo sapien
gacgtcttcgctgcatcctccggtt

SEQ ID NO: 4239508 - DNA, 25 bp, Homo sapien
cttgggccggttcacatccgtatcc

SEQ ID NO: 4239509 - DNA, 25 bp, Homo sapien
cggacacagcccgagttggacacgg

SEQ ID NO: 4239510 - DNA, 25 bp, Homo sapien
acagcccgagttggacacgggagca

SEQ ID NO: 4239511 - DNA, 25 bp, Homo sapien
agcagccgggcagcgcgtcttgacg

SEQ ID NO: 4239512 - DNA, 25 bp, Homo sapien
tgggcggacacagcccgagttggac

SEQ ID NO: 4239513 - DNA, 25 bp, Homo sapien
taaaagctaacgctgcggcgaggca

SEQ ID NO: 4239514 - DNA, 25 bp, Homo sapien
ctcctgcacgttggctgcccgggtg

SEQ ID NO: 4239515 - DNA, 25 bp, Homo sapien
ccacaggttttcagcggactgggct

SEQ ID NO: 4239516 - DNA, 25 bp, Homo sapien
ggctggcggtcgcaaattcccctta

SEQ ID NO: 4239517 - DNA, 25 bp, Homo sapien
gagccaacgtgggtcagaaaaagga

SEQ ID NO: 4239518 - DNA, 25 bp, Homo sapien
catctacggaatcaaaagggatcct

SEQ ID NO: 4239519 - DNA, 25 bp, Homo sapien
actggctcccagtggatccctaggg

SEQ ID NO: 4239520 - DNA, 25 bp, Homo sapien
catacaccctgcgacacgtgtctta

SEQ ID NO: 4239521 - DNA, 25 bp, Homo sapien
tgcaggtccaggttgaagatacaca

SEQ ID NO: 4239522 - DNA, 25 bp, Homo sapien
caaaaagatgggagaagttgcggta

SEQ ID NO: 4239523 - DNA, 25 bp, Homo sapien
gagtcaccgactggatgttcacaaa

SEQ ID NO: 4239524 - DNA, 25 bp, Homo sapien
tcaggccctctgtggttaaagactg

SEQ ID NO: 4239525 - DNA, 25 bp, Homo sapien
gactgcggcgcggctgatactgcct

SEQ ID NO: 4239526 - DNA, 25 bp, Homo sapien
tctatttcctccgactgcggcgcgg

SEQ ID NO: 4239527 - DNA, 25 bp, Homo sapien
cgcgtctatttcctccgactgcggc

SEQ ID NO: 4239528 - DNA, 25 bp, Homo sapien
tcaggccccgcgtctatttcctccg

SEQ ID NO: 4239529 - DNA, 25 bp, Homo sapien
tcttgacaatcccataaagttggcc

SEQ ID NO: 4239530 - DNA, 25 bp, Homo sapien
tatagtccataaaatatcctccagc

SEQ ID NO: 4239531 - DNA, 25 bp, Homo sapien
ttgttacacatagagaagttgaggc

SEQ ID NO: 4239532 - DNA, 25 bp, Homo sapien
ttgtaaacttccaggtgatccatgg

SEQ ID NO: 4239533 - DNA, 25 bp, Homo sapien
aagcatgggtgttttcatcatcggc

SEQ ID NO: 4239534 - DNA, 25 bp, Homo sapien
caggcagaaccttcacttgcaagca

SEQ ID NO: 4239535 - DNA, 25 bp, Homo sapien
ctgcgagaagtgacaggcagaacct

SEQ ID NO: 4239536 - DNA, 25 bp, Homo sapien
catcatcggctgtcttgaatccttt

SEQ ID NO: 4239537 - DNA, 25 bp, Homo sapien
gcacagactgatggccaagaaagct

SEQ ID NO: 4239538 - DNA, 25 bp, Homo sapien
aaagaatccaatatgggccgggcac

SEQ ID NO: 4239539 - DNA, 25 bp, Homo sapien
caaatggagcagtaacggtcaccct

SEQ ID NO: 4239540 - DNA, 25 bp, Homo sapien
tcaggcgaactcacggtcagggaga

SEQ ID NO: 4239541 - DNA, 25 bp, Homo sapien
caacaggactgcgttcatgtgagct

SEQ ID NO: 4239542 - DNA, 25 bp, Homo sapien
tccttgatgggctggagatacggct

SEQ ID NO: 4239543 - DNA, 25 bp, Homo sapien
tcaggctcgtcatacaaatgtgggt

SEQ ID NO: 4239544 - DNA, 25 bp, Homo sapien
catccacagcgttagatcaggctcg

SEQ ID NO: 4239545 - DNA, 25 bp, Homo sapien
gaaataatcactggctgtaatagag

SEQ ID NO: 4239546 - DNA, 25 bp, Homo sapien
tctgaccctggaaggtggcggtttc

SEQ ID NO: 4239547 - DNA, 25 bp, Homo sapien
aatagaagtggagacaatggacatc

SEQ ID NO: 4239548 - DNA, 25 bp, Homo sapien
gtttccctcacccatgatatgctgc

SEQ ID NO: 4239549 - DNA, 25 bp, Homo sapien
tgggatgtccagttctggcatgtct

SEQ ID NO: 4239550 - DNA, 25 bp, Homo sapien
atgtccagttctggcatgtcttcat

SEQ ID NO: 4239551 - DNA, 25 bp, Homo sapien
ggatgtccagttctggcatgtcttc

SEQ ID NO: 4239552 - DNA, 25 bp, Homo sapien
ctgggatgtccagttctggcatgtc

SEQ ID NO: 4239553 - DNA, 25 bp, Homo sapien
gctggttccatagtgcccgtcacga

SEQ ID NO: 4239554 - DNA, 25 bp, Homo sapien
gagtgaaagtagtgcgtggcctcca

SEQ ID NO: 4239555 - DNA, 25 bp, Homo sapien
tagactgcttacactcagctggatg

SEQ ID NO: 4239556 - DNA, 25 bp, Homo sapien
tgggttcgtcccttcagctggaaag

SEQ ID NO: 4239557 - DNA, 25 bp, Homo sapien
tataagattcacacctggttttggc

SEQ ID NO: 4239558 - DNA, 25 bp, Homo sapien
caaatatgacactaacgctggcact

SEQ ID NO: 4239559 - DNA, 25 bp, Homo sapien
gctcttaatcttactgcgatgactg

SEQ ID NO: 4239560 - DNA, 25 bp, Homo sapien
aacttaatgctgtgtgcctaatcag

SEQ ID NO: 4239561 - DNA, 25 bp, Homo sapien
tgtgaaagtaaaattgccacgtggc

SEQ ID NO: 4239562 - DNA, 25 bp, Homo sapien
tgtgggatttgcactatgcctatac

SEQ ID NO: 4239563 - DNA, 25 bp, Homo sapien
gaacttattcaggactcatagctag

SEQ ID NO: 4239564 - DNA, 25 bp, Homo sapien
tctcccgaagaatcgtacaaaatgt

SEQ ID NO: 4239565 - DNA, 25 bp, Homo sapien
tgaacctatcgtggtgactgggata

SEQ ID NO: 4239566 - DNA, 25 bp, Homo sapien
tattgatcctgctagtccaagaatg

SEQ ID NO: 4239567 - DNA, 25 bp, Homo sapien
tgtaagtccccgtgtttagcaggga

SEQ ID NO: 4239568 - DNA, 25 bp, Homo sapien
ccaagaatggacatgaagtgaacct

SEQ ID NO: 4239569 - DNA, 25 bp, Homo sapien
ctacttccgggaggtaattatattg

SEQ ID NO: 4239570 - DNA, 25 bp, Homo sapien
ccgggaggtaattatattgatgtcg

SEQ ID NO: 4239571 - DNA, 25 bp, Homo sapien
ttccgggaggtaattatattgatgt

SEQ ID NO: 4239572 - DNA, 25 bp, Homo sapien
ggaggtaattatattgatgtcgagc

SEQ ID NO: 4239573 - DNA, 25 bp, Homo sapien
ccacgcctggcttataggtattttt

SEQ ID NO: 4239574 - DNA, 25 bp, Homo sapien
tatttttttcaatcctcgccctcca

SEQ ID NO: 4239575 - DNA, 25 bp, Homo sapien
tcaatcctcgccctccaccctcaac

SEQ ID NO: 4239576 - DNA, 25 bp, Homo sapien
gcctggcttataggtatttttttca

SEQ ID NO: 4239577 - DNA, 25 bp, Homo sapien
tctgtcttgtttctctctgatggtg

SEQ ID NO: 4239578 - DNA, 25 bp, Homo sapien
gcctggaggaaaggccctaaagcca

SEQ ID NO: 4239579 - DNA, 25 bp, Homo sapien
ggccctaaagccattctatgaattc

SEQ ID NO: 4239580 - DNA, 25 bp, Homo sapien
agccattctatgaattctctctgtc

SEQ ID NO: 4239581 - DNA, 25 bp, Homo sapien
taagatagggatggcggcagaaact

SEQ ID NO: 4239582 - DNA, 25 bp, Homo sapien
aaatctgtttctgggtgtcggtatc

SEQ ID NO: 4239583 - DNA, 25 bp, Homo sapien
aaatcataaagacggagacgatggc

SEQ ID NO: 4239584 - DNA, 25 bp, Homo sapien
tcctagtagcgtggagggagatccc

SEQ ID NO: 4239585 - DNA, 25 bp, Homo sapien
tcggaatctaggaatcgacaccgcg

SEQ ID NO: 4239586 - DNA, 25 bp, Homo sapien
taaccgttaccagcgttttgagcac

SEQ ID NO: 4239587 - DNA, 25 bp, Homo sapien
ccctaacgggagacgtgatggccaa

SEQ ID NO: 4239588 - DNA, 25 bp, Homo sapien
gaagaactatctgccgagaccgaag

SEQ ID NO: 4239589 - DNA, 25 bp, Homo sapien
tctgtttcagtagccatgagtgagg

SEQ ID NO: 4239590 - DNA, 25 bp, Homo sapien
tagaatgagctgtttgttcccattg

SEQ ID NO: 4239591 - DNA, 25 bp, Homo sapien
ttggtagcaatctcctgtaaaatca

SEQ ID NO: 4239592 - DNA, 25 bp, Homo sapien
aaactcctagacaattgggctccag

SEQ ID NO: 4239593 - DNA, 25 bp, Homo sapien
tgctatttaagctagctaaatttcg

SEQ ID NO: 4239594 - DNA, 25 bp, Homo sapien
ctatttaagctagctaaatttcgtt

SEQ ID NO: 4239595 - DNA, 25 bp, Homo sapien
gctatttaagctagctaaatttcgt

SEQ ID NO: 4239596 - DNA, 25 bp, Homo sapien
cttgctatttaagctagctaaattt

SEQ ID NO: 4239597 - DNA, 25 bp, Homo sapien
tctactgtaggggagttgagtctcc

SEQ ID NO: 4239598 - DNA, 25 bp, Homo sapien
actgcagagttcagcctgtattgta

SEQ ID NO: 4239599 - DNA, 25 bp, Homo sapien
tgtattgtgcgagttgagtctgcat

SEQ ID NO: 4239600 - DNA, 25 bp, Homo sapien
tgggataggtgagtctgtattgcag

SEQ ID NO: 4239601 - DNA, 25 bp, Homo sapien
caagtggaaaggttgctaggactac

SEQ ID NO: 4239602 - DNA, 25 bp, Homo sapien
aaaacagagtcatgtcgtgcaggag

SEQ ID NO: 4239603 - DNA, 25 bp, Homo sapien
ggcccagtaactgacatgagtttga

SEQ ID NO: 4239604 - DNA, 25 bp, Homo sapien
cttgtgtgaccttgcgggaactagt

SEQ ID NO: 4239605 - DNA, 25 bp, Homo sapien
cagttttagggtggacattcttgaa

SEQ ID NO: 4239606 - DNA, 25 bp, Homo sapien
tagtctgtgaccaaaaaggagggtg

SEQ ID NO: 4239607 - DNA, 25 bp, Homo sapien
tatggtgtgatatatttgggattta

SEQ ID NO: 4239608 - DNA, 25 bp, Homo sapien
tactctgcctaccatgtatgccttt

SEQ ID NO: 4239609 - DNA, 25 bp, Homo sapien
tagctcagagactattgatcttttg

SEQ ID NO: 4239610 - DNA, 25 bp, Homo sapien
aaaatgtcctggagctaattctagc

SEQ ID NO: 4239611 - DNA, 25 bp, Homo sapien
aatttgcctcttaaggtgattgtcc

SEQ ID NO: 4239612 - DNA, 25 bp, Homo sapien
gcttgcaactatactatcacatggg

SEQ ID NO: 4239613 - DNA, 25 bp, Homo sapien
gcttttcacaccctactatcaggca

SEQ ID NO: 4239614 - DNA, 25 bp, Homo sapien
caccctactatcaggcatcagaatc

SEQ ID NO: 4239615 - DNA, 25 bp, Homo sapien
cagcttttcacaccctactatcagg

SEQ ID NO: 4239616 - DNA, 25 bp, Homo sapien
ttcacaccctactatcaggcatcag

SEQ ID NO: 4239617 - DNA, 25 bp, Homo sapien
aactggtccactatgacgcagcagg

SEQ ID NO: 4239618 - DNA, 25 bp, Homo sapien
tgacagtccagatcattgaaacaga

SEQ ID NO: 4239619 - DNA, 25 bp, Homo sapien
gaattagttgccagaaaggaaactg

SEQ ID NO: 4239620 - DNA, 25 bp, Homo sapien
taggtcgtcagaaacgggtccagac

SEQ ID NO: 4239621 - DNA, 25 bp, Homo sapien
tgcccagccatgttacagatatctt

SEQ ID NO: 4239622 - DNA, 25 bp, Homo sapien
ccagccatgttacagatatctttaa

SEQ ID NO: 4239623 - DNA, 25 bp, Homo sapien
cccagccatgttacagatatcttta

SEQ ID NO: 4239624 - DNA, 25 bp, Homo sapien
gcccagccatgttacagatatcttt

SEQ ID NO: 4239625 - DNA, 25 bp, Homo sapien
caccagcttcacttagaatgttaca

SEQ ID NO: 4239626 - DNA, 25 bp, Homo sapien
gcttcacttagaatgttacaagatg

SEQ ID NO: 4239627 - DNA, 25 bp, Homo sapien
tgttacaagatggagctgaatgcgg

SEQ ID NO: 4239628 - DNA, 25 bp, Homo sapien
ttacaagatggagctgaatgcggtg

SEQ ID NO: 4239629 - DNA, 25 bp, Homo sapien
tagttaatcaaacaccctgtctgag

SEQ ID NO: 4239630 - DNA, 25 bp, Homo sapien
tttgacaccgaaatctcagtttggg

SEQ ID NO: 4239631 - DNA, 25 bp, Homo sapien
tgagtcctcttaggctcacctagag

SEQ ID NO: 4239632 - DNA, 25 bp, Homo sapien
tccatgagccatagattactgatcc

SEQ ID NO: 4239633 - DNA, 25 bp, Homo sapien
tcaagcagcaactagatgtctcatg

SEQ ID NO: 4239634 - DNA, 25 bp, Homo sapien
cctaatagtaaagcaggaggcggga

SEQ ID NO: 4239635 - DNA, 25 bp, Homo sapien
cagaggcagtgcttgtaagcgagac

SEQ ID NO: 4239636 - DNA, 25 bp, Homo sapien
gccatatgtaagcttggaaccacat

SEQ ID NO: 4239637 - DNA, 25 bp, Homo sapien
gtgccggtttgagcagacgcgacaa

SEQ ID NO: 4239638 - DNA, 25 bp, Homo sapien
taatgaaaccgacatccttcgcgta

SEQ ID NO: 4239639 - DNA, 25 bp, Homo sapien
cggatcagaccgtgccggtttgagc

SEQ ID NO: 4239640 - DNA, 25 bp, Homo sapien
aattttcgcgcgtggctccagtaca

SEQ ID NO: 4239641 - DNA, 25 bp, Homo sapien
gatgccttggataaccctttgaagg

SEQ ID NO: 4239642 - DNA, 25 bp, Homo sapien
ggataaccctttgaaggaagatcat

SEQ ID NO: 4239643 - DNA, 25 bp, Homo sapien
cattgagtagatgccttggataacc

SEQ ID NO: 4239644 - DNA, 25 bp, Homo sapien
acaaagaatgatcatggtttttcat

SEQ ID NO: 4239645 - DNA, 25 bp, Homo sapien
cagtcaggtgcatactgctgaggcg

SEQ ID NO: 4239646 - DNA, 25 bp, Homo sapien
caaataggaacttcagtggtcaccc

SEQ ID NO: 4239647 - DNA, 25 bp, Homo sapien
gtcacccctcggaagcaagctttca

SEQ ID NO: 4239648 - DNA, 25 bp, Homo sapien
tggcagggtaagcaaaagaagcacc

SEQ ID NO: 4239649 - DNA, 25 bp, Homo sapien
cagcgccacagcccttcaatcattt

SEQ ID NO: 4239650 - DNA, 25 bp, Homo sapien
gcgccacagcccttcaatcattttg

SEQ ID NO: 4239651 - DNA, 25 bp, Homo sapien
tcattttggttgctatccagcttct

SEQ ID NO: 4239652 - DNA, 25 bp, Homo sapien
attttggttgctatccagcttctcc

SEQ ID NO: 4239653 - DNA, 25 bp, Homo sapien
cagcggaggccgtctttacctggtc

SEQ ID NO: 4239654 - DNA, 25 bp, Homo sapien
tgaggttatcactaggcgccgagga

SEQ ID NO: 4239655 - DNA, 25 bp, Homo sapien
tgccttcgcaaagtaaggtggctgc

SEQ ID NO: 4239656 - DNA, 25 bp, Homo sapien
tatcggcacttagcgaacgtctgtc

SEQ ID NO: 4239657 - DNA, 25 bp, Homo sapien
ggcacgaagcaagggcgcacgccca

SEQ ID NO: 4239658 - DNA, 25 bp, Homo sapien
cagcggctccgccatgcgggttgag

SEQ ID NO: 4239659 - DNA, 25 bp, Homo sapien
ttgagggcacgaagcaagggcgcac

SEQ ID NO: 4239660 - DNA, 25 bp, Homo sapien
catgcgggttgagggcacgaagcaa

SEQ ID NO: 4239661 - DNA, 25 bp, Homo sapien
gcgtcctccgcccctcctccgcggc

SEQ ID NO: 4239662 - DNA, 25 bp, Homo sapien
tgcaggggcgtcctccgcccctcct

SEQ ID NO: 4239663 - DNA, 25 bp, Homo sapien
gctgcaggggcgtcctccgcccctc

SEQ ID NO: 4239664 - DNA, 25 bp, Homo sapien
cggctgcaggggcgtcctccgcccc

SEQ ID NO: 4239665 - DNA, 25 bp, Homo sapien
cccgcctcactgagggcagacgcac

SEQ ID NO: 4239666 - DNA, 25 bp, Homo sapien
ctgtcagtgccaaccgccggcgcct

SEQ ID NO: 4239667 - DNA, 25 bp, Homo sapien
tcccgccgtctctgctcggaaggcc

SEQ ID NO: 4239668 - DNA, 25 bp, Homo sapien
ccggagaccggagcggctcgctcac

SEQ ID NO: 4239669 - DNA, 25 bp, Homo sapien
gtaccagtgcttgcacaccagggcg

SEQ ID NO: 4239670 - DNA, 25 bp, Homo sapien
tccaggtaagagaacaccaactcca

SEQ ID NO: 4239671 - DNA, 25 bp, Homo sapien
tcgctgttctcatcgccgtgcaggc

SEQ ID NO: 4239672 - DNA, 25 bp, Homo sapien
gttgcacaggatgtccgtgcgcaga

SEQ ID NO: 4239673 - DNA, 25 bp, Homo sapien
tatgtagtagattattgtccaccag

SEQ ID NO: 4239674 - DNA, 25 bp, Homo sapien
ggagcagtcattagtgctgaaggca

SEQ ID NO: 4239675 - DNA, 25 bp, Homo sapien
taatgtagacattcctggagcagtc

SEQ ID NO: 4239676 - DNA, 25 bp, Homo sapien
ggcccgttttgtggcaattccaatc

SEQ ID NO: 4239677 - DNA, 25 bp, Homo sapien
gattataacccctactattgtcatt

SEQ ID NO: 4239678 - DNA, 25 bp, Homo sapien
gatgttgcatctacaaaattggaaa

SEQ ID NO: 4239679 - DNA, 25 bp, Homo sapien
cagaaagtcctaatgtttgcaatca

SEQ ID NO: 4239680 - DNA, 25 bp, Homo sapien
ggatctaagaacctccaaatcatca

SEQ ID NO: 4239681 - DNA, 25 bp, Homo sapien
aagctatctagaaaaatcagaaggg

SEQ ID NO: 4239682 - DNA, 25 bp, Homo sapien
gaaaatctgccaagggtgtagctag

SEQ ID NO: 4239683 - DNA, 25 bp, Homo sapien
atcaaaaggttagaagaaaatctgc

SEQ ID NO: 4239684 - DNA, 25 bp, Homo sapien
tggtggcgcaaagctggtatcgcac

SEQ ID NO: 4239685 - DNA, 25 bp, Homo sapien
ccaagatgactcgaattctttctcc

SEQ ID NO: 4239686 - DNA, 25 bp, Homo sapien
aacccccaggaactcatatccacgt

SEQ ID NO: 4239687 - DNA, 25 bp, Homo sapien
aagatgactcgaattctttctccta

SEQ ID NO: 4239688 - DNA, 25 bp, Homo sapien
catatccacgttcaaaagctaaagt

SEQ ID NO: 4239689 - DNA, 25 bp, Homo sapien
cttctgtgttgccatatacagcaga

SEQ ID NO: 4239690 - DNA, 25 bp, Homo sapien
aagtcacttctgtgttgccatatac

SEQ ID NO: 4239691 - DNA, 25 bp, Homo sapien
gcagaaactgctgggtataagcaga

SEQ ID NO: 4239692 - DNA, 25 bp, Homo sapien
tgttgccatatacagcagaaactgc

SEQ ID NO: 4239693 - DNA, 25 bp, Homo sapien
tacactcaatcttcaggcgcaactg

SEQ ID NO: 4239694 - DNA, 25 bp, Homo sapien
ggcgcaactgtcttctaccgaaatg

SEQ ID NO: 4239695 - DNA, 25 bp, Homo sapien
tatagccccaataacgagtttgagg

SEQ ID NO: 4239696 - DNA, 25 bp, Homo sapien
tgctaacttagagacaacatcgggt

SEQ ID NO: 4239697 - DNA, 25 bp, Homo sapien
tggcaactatgaaatgacattaacc

SEQ ID NO: 4239698 - DNA, 25 bp, Homo sapien
ggcagaaaatgcctaatcactgaac

SEQ ID NO: 4239699 - DNA, 25 bp, Homo sapien
tagggctctgctatttttgaaactc

SEQ ID NO: 4239700 - DNA, 25 bp, Homo sapien
cactttatgtgaatgagggagatga

SEQ ID NO: 4239701 - DNA, 25 bp, Homo sapien
tcctaataaaggcttccaagtggtc

SEQ ID NO: 4239702 - DNA, 25 bp, Homo sapien
tattgggcttacatgttgtggcaca

SEQ ID NO: 4239703 - DNA, 25 bp, Homo sapien
gagtccgttagagatcctgtcccag

SEQ ID NO: 4239704 - DNA, 25 bp, Homo sapien
tatgtgagcacctgcctattgggct

SEQ ID NO: 4239705 - DNA, 25 bp, Homo sapien
gggagtcctcaaatgtgctattcct

SEQ ID NO: 4239706 - DNA, 25 bp, Homo sapien
gagtcctcaaatgtgctattcctca

SEQ ID NO: 4239707 - DNA, 25 bp, Homo sapien
agcctcctttgtcgtttttcttctg

SEQ ID NO: 4239708 - DNA, 25 bp, Homo sapien
tcttctggggagtcctcaaatgtgc

SEQ ID NO: 4239709 - DNA, 25 bp, Homo sapien
tatttatcgtctgtgagcctcagtg

SEQ ID NO: 4239710 - DNA, 25 bp, Homo sapien
gatctaggctgaaacaagactctga

SEQ ID NO: 4239711 - DNA, 25 bp, Homo sapien
ggatgtttatctgcgacacgtctgc

SEQ ID NO: 4239712 - DNA, 25 bp, Homo sapien
aaatgtatctactgactctccaggc

SEQ ID NO: 4239713 - DNA, 25 bp, Homo sapien
tgctccacaaagttccttggaccct

SEQ ID NO: 4239714 - DNA, 25 bp, Homo sapien
ttacttgtctatgccggcctgtcag

SEQ ID NO: 4239715 - DNA, 25 bp, Homo sapien
tacaactatttagaaaggtctcggc

SEQ ID NO: 4239716 - DNA, 25 bp, Homo sapien
cccgcaaatgccctcatgtggcgtt

SEQ ID NO: 4239717 - DNA, 25 bp, Homo sapien
tgccttgcaatgtgtcatactagaa

SEQ ID NO: 4239718 - DNA, 25 bp, Homo sapien
gaccaggcatttacttacaccaaaa

SEQ ID NO: 4239719 - DNA, 25 bp, Homo sapien
ttatttcccgaatgtgtgaccaggc

SEQ ID NO: 4239720 - DNA, 25 bp, Homo sapien
tacaatctggactaatgaggactct

SEQ ID NO: 4239721 - DNA, 25 bp, Homo sapien
aacatgaagacatcctggaagtaac

SEQ ID NO: 4239722 - DNA, 25 bp, Homo sapien
aaagcctgtctgcacgaatcgtccg

SEQ ID NO: 4239723 - DNA, 25 bp, Homo sapien
agtgactgtaagatggtccacaggt

SEQ ID NO: 4239724 - DNA, 25 bp, Homo sapien
taagatggtccacaggcgggaagaa

SEQ ID NO: 4239725 - DNA, 25 bp, Homo sapien
gtcacacctgtgaagccctgctcat

SEQ ID NO: 4239726 - DNA, 25 bp, Homo sapien
cgtctttaccaagatcagtcacacc

SEQ ID NO: 4239727 - DNA, 25 bp, Homo sapien
taccaagatcagtcacacctgtgaa

SEQ ID NO: 4239728 - DNA, 25 bp, Homo sapien
gatcagtcacacctgtgaagccctg

SEQ ID NO: 4239729 - DNA, 25 bp, Homo sapien
ctggtccagggccgaaaggaccttg

SEQ ID NO: 4239730 - DNA, 25 bp, Homo sapien
aaatgggcacgcggtgctgggagag

SEQ ID NO: 4239731 - DNA, 25 bp, Homo sapien
ggaaaatgggcacgcggtgctggga

SEQ ID NO: 4239732 - DNA, 25 bp, Homo sapien
catggtctggtccagggccgaaagg

SEQ ID NO: 4239733 - DNA, 25 bp, Homo sapien
tcagtgccagggcgtggagtgggac

SEQ ID NO: 4239734 - DNA, 25 bp, Homo sapien
cagtgccagggcgtggagtgggaca

SEQ ID NO: 4239735 - DNA, 25 bp, Homo sapien
gaggagagcccaccgcccacattgg

SEQ ID NO: 4239736 - DNA, 25 bp, Homo sapien
gaaagaggagagcccaccgcccaca

SEQ ID NO: 4239737 - DNA, 25 bp, Homo sapien
gcccacattggtaccactcaacgcc

SEQ ID NO: 4239738 - DNA, 25 bp, Homo sapien
caccgcccacattggtaccactcaa

SEQ ID NO: 4239739 - DNA, 25 bp, Homo sapien
cagcggaaggaacggacggaaactg

SEQ ID NO: 4239740 - DNA, 25 bp, Homo sapien
ctgaagtcacatggagagcgggctg

SEQ ID NO: 4239741 - DNA, 25 bp, Homo sapien
gcaccagcggaaggaacggacggaa

SEQ ID NO: 4239742 - DNA, 25 bp, Homo sapien
ctgtggggcatcagattattttagc

SEQ ID NO: 4239743 - DNA, 25 bp, Homo sapien
ctccggcctcctcgagagcagccga

SEQ ID NO: 4239744 - DNA, 25 bp, Homo sapien
ctcctcgagagcagccgaacgcggg

SEQ ID NO: 4239745 - DNA, 25 bp, Homo sapien
cggcctcctcgagagcagccgaacg

SEQ ID NO: 4239746 - DNA, 25 bp, Homo sapien
cgaacgcggggctgggctacctcct

SEQ ID NO: 4239747 - DNA, 25 bp, Homo sapien
gacgcccccacgcgggaaatactca

SEQ ID NO: 4239748 - DNA, 25 bp, Homo sapien
ttagtctccctctgataagccatgg

SEQ ID NO: 4239749 - DNA, 25 bp, Homo sapien
gcacacaggaaagcatggagggcca

SEQ ID NO: 4239750 - DNA, 25 bp, Homo sapien
tacgagagtctggtgcacactgtgc

SEQ ID NO: 4239751 - DNA, 25 bp, Homo sapien
taatctcctttagggactctcgggc

SEQ ID NO: 4239752 - DNA, 25 bp, Homo sapien
cacaggcaccagatcactacagatc

SEQ ID NO: 4239753 - DNA, 25 bp, Homo sapien
cacccagcctgatcgtgcatttcaa

SEQ ID NO: 4239754 - DNA, 25 bp, Homo sapien
tcaaagtacattgcagtcattgata

SEQ ID NO: 4239755 - DNA, 25 bp, Homo sapien
tgcatatcaagtgatttaacttttt

SEQ ID NO: 4239756 - DNA, 25 bp, Homo sapien
cgcccttctcgataagaaggagcag

SEQ ID NO: 4239757 - DNA, 25 bp, Homo sapien
tgccaccgcccttctcgataagaag

SEQ ID NO: 4239758 - DNA, 25 bp, Homo sapien
gccaccgcccttctcgataagaagg

SEQ ID NO: 4239759 - DNA, 25 bp, Homo sapien
caccgcccttctcgataagaaggag

SEQ ID NO: 4239760 - DNA, 25 bp, Homo sapien
gaattcagagcttgtgatttgcttc

SEQ ID NO: 4239761 - DNA, 25 bp, Homo sapien
tcaaagaccttgaaagtctggattc

SEQ ID NO: 4239762 - DNA, 25 bp, Homo sapien
tgattcaatgactcaagttctagga

SEQ ID NO: 4239763 - DNA, 25 bp, Homo sapien
aactgtctcacaccctgcaggtaga

SEQ ID NO: 4239764 - DNA, 25 bp, Homo sapien
cccatttggaacactgctgcattct

SEQ ID NO: 4239765 - DNA, 25 bp, Homo sapien
gccaaccttgtctatgaagatgtgg

SEQ ID NO: 4239766 - DNA, 25 bp, Homo sapien
tgagtctactccatagccaaccttg

SEQ ID NO: 4239767 - DNA, 25 bp, Homo sapien
tctaactagttatcatggaatgctg

SEQ ID NO: 4239768 - DNA, 25 bp, Homo sapien
cagacaaagtctccaagactcagag

SEQ ID NO: 4239769 - DNA, 25 bp, Homo sapien
gcagcaggatatcatgggaagatca

SEQ ID NO: 4239770 - DNA, 25 bp, Homo sapien
tcagagaatccgtctacaaaatggg

SEQ ID NO: 4239771 - DNA, 25 bp, Homo sapien
cagagttgcatgagaataaccagtc

SEQ ID NO: 4239772 - DNA, 25 bp, Homo sapien
cggaggcccagtgtctgccctccca

SEQ ID NO: 4239773 - DNA, 25 bp, Homo sapien
ggaggcccagtgtctgccctcccat

SEQ ID NO: 4239774 - DNA, 25 bp, Homo sapien
gtattatcggcagaaggagccagtt

SEQ ID NO: 4239775 - DNA, 25 bp, Homo sapien
agagaaggacatcccagagggctgt

SEQ ID NO: 4239776 - DNA, 25 bp, Homo sapien
aggtgcagcccacaggatactcaga

SEQ ID NO: 4239777 - DNA, 25 bp, Homo sapien
caattctatgtggtcttggagctct

SEQ ID NO: 4239778 - DNA, 25 bp, Homo sapien
tcaggaagtgaaaacccaggcagag

SEQ ID NO: 4239779 - DNA, 25 bp, Homo sapien
aggaagtgaaaacccaggcagagcc

SEQ ID NO: 4239780 - DNA, 25 bp, Homo sapien
caggaagtgaaaacccaggcagagc

SEQ ID NO: 4239781 - DNA, 25 bp, Homo sapien
gtggctgttccgcttctgttcctcc

SEQ ID NO: 4239782 - DNA, 25 bp, Homo sapien
cagccgacagatcagggttcaaggg

SEQ ID NO: 4239783 - DNA, 25 bp, Homo sapien
ttccaaatggaccaagccttgtcag

SEQ ID NO: 4239784 - DNA, 25 bp, Homo sapien
acaggagcagccgacagatcagggt

SEQ ID NO: 4239785 - DNA, 25 bp, Homo sapien
ccttcctgatggacaatctgtcagc

SEQ ID NO: 4239786 - DNA, 25 bp, Homo sapien
tcttgttccgggaggatgccctagg

SEQ ID NO: 4239787 - DNA, 25 bp, Homo sapien
ttcttgttccgggaggatgccctag

SEQ ID NO: 4239788 - DNA, 25 bp, Homo sapien
ttgttcttgttccgggaggatgccc

SEQ ID NO: 4239789 - DNA, 25 bp, Homo sapien
ttgttccgggaggatgccctaggct

SEQ ID NO: 4239790 - DNA, 25 bp, Homo sapien
ctggatctttcgtaagatattacct

SEQ ID NO: 4239791 - DNA, 25 bp, Homo sapien
ctttctggatctttcgtaagatatt

SEQ ID NO: 4239792 - DNA, 25 bp, Homo sapien
ttctggatctttcgtaagatattac

SEQ ID NO: 4239793 - DNA, 25 bp, Homo sapien
gatctttcgtaagatattacctacc

SEQ ID NO: 4239794 - DNA, 25 bp, Homo sapien
tctgccctcggcagtcagcggctcc

SEQ ID NO: 4239795 - DNA, 25 bp, Homo sapien
ggctgctgggcaccgaagcgaggct

SEQ ID NO: 4239796 - DNA, 25 bp, Homo sapien
gcaccgaagcgaggctctgccctcg

SEQ ID NO: 4239797 - DNA, 25 bp, Homo sapien
ggctctgccctcggcagtcagcggc

SEQ ID NO: 4239798 - DNA, 25 bp, Homo sapien
agggtcttgagagggttggcatcca

SEQ ID NO: 4239799 - DNA, 25 bp, Homo sapien
ccaggagagggtaaggctggaggga

SEQ ID NO: 4239800 - DNA, 25 bp, Homo sapien
aaggcgccgcggctgatgcgctcca

SEQ ID NO: 4239801 - DNA, 25 bp, Homo sapien
aggagagggtaaggctggagggagt

SEQ ID NO: 4239802 - DNA, 25 bp, Homo sapien
tctccaggagagggtaaggctggag

SEQ ID NO: 4239803 - DNA, 25 bp, Homo sapien
gaagcccatgttgttgtcgcgcagc

SEQ ID NO: 4239804 - DNA, 25 bp, Homo sapien
caggagggtccgcaacttgctgtac

SEQ ID NO: 4239805 - DNA, 25 bp, Homo sapien
tgttgtacaggtcccggtagaagcc

SEQ ID NO: 4239806 - DNA, 25 bp, Homo sapien
acgttgtagctgacgttgaggaccc

SEQ ID NO: 4239807 - DNA, 25 bp, Homo sapien
tcccgaatgtgaagcgtcatcaggc

SEQ ID NO: 4239808 - DNA, 25 bp, Homo sapien
taaaagtgaggacgatgacagtgca

SEQ ID NO: 4239809 - DNA, 25 bp, Homo sapien
tgttcctagcattggcgaagaggcc

SEQ ID NO: 4239810 - DNA, 25 bp, Homo sapien
tcagtaaacggaggaccagtggcag

SEQ ID NO: 4239811 - DNA, 25 bp, Homo sapien
cacatcttgaaagctggcagagaaa

SEQ ID NO: 4239812 - DNA, 25 bp, Homo sapien
agtgtcctgttgtgtgcggaccgaa

SEQ ID NO: 4239813 - DNA, 25 bp, Homo sapien
caattcgtcagacttggcctctgca

SEQ ID NO: 4239814 - DNA, 25 bp, Homo sapien
aaaaatatttatgagacacgttgcc

SEQ ID NO: 4239815 - DNA, 25 bp, Homo sapien
tctggcatgtggcaaccggaaatgg

SEQ ID NO: 4239816 - DNA, 25 bp, Homo sapien
ttgatccctaacttaaatgcctcca

SEQ ID NO: 4239817 - DNA, 25 bp, Homo sapien
ggcatgtggcaaccggaaatggccc

SEQ ID NO: 4239818 - DNA, 25 bp, Homo sapien
atcaattgatccctaacttaaatgc

SEQ ID NO: 4239819 - DNA, 25 bp, Homo sapien
aggcttaacaaagaagccgtggcgg

SEQ ID NO: 4239820 - DNA, 25 bp, Homo sapien
catcaaaacccaggtaccgcttaag

SEQ ID NO: 4239821 - DNA, 25 bp, Homo sapien
aacaaagaagccgtggcggtcgcca

SEQ ID NO: 4239822 - DNA, 25 bp, Homo sapien
caacatcaaaacccaggtaccgctt

SEQ ID NO: 4239823 - DNA, 25 bp, Homo sapien
taaaatgccctctgagaatgaacaa

SEQ ID NO: 4239824 - DNA, 25 bp, Homo sapien
aaatgccctctgagaatgaacaaac

SEQ ID NO: 4239825 - DNA, 25 bp, Homo sapien
aaaatgccctctgagaatgaacaaa

SEQ ID NO: 4239826 - DNA, 25 bp, Homo sapien
ttaaaatgccctctgagaatgaaca

SEQ ID NO: 4239827 - DNA, 25 bp, Homo sapien
agaacctccagtacactgttgggta

SEQ ID NO: 4239828 - DNA, 25 bp, Homo sapien
cagactttctatgtatgtcgtcacg

SEQ ID NO: 4239829 - DNA, 25 bp, Homo sapien
cattaccatgtttctgatgtcaggg

SEQ ID NO: 4239830 - DNA, 25 bp, Homo sapien
tgtatactgaccttccttctagcaa

SEQ ID NO: 4239831 - DNA, 25 bp, Homo sapien
gacagtggtgctgtgtgggcaaagc

SEQ ID NO: 4239832 - DNA, 25 bp, Homo sapien
tgtgggcaaagcagcgtgggcagca

SEQ ID NO: 4239833 - DNA, 25 bp, Homo sapien
ggaatgggtgtgttcactcccgaag

SEQ ID NO: 4239834 - DNA, 25 bp, Homo sapien
tgggtgtgttcactcccgaagccca

SEQ ID NO: 4239835 - DNA, 25 bp, Homo sapien
ccattggcgtttttcaagctgcctt

SEQ ID NO: 4239836 - DNA, 25 bp, Homo sapien
aaccattggcgtttttcaagctgcc

SEQ ID NO: 4239837 - DNA, 25 bp, Homo sapien
taaccattggcgtttttcaagctgc

SEQ ID NO: 4239838 - DNA, 25 bp, Homo sapien
ttaaccattggcgtttttcaagctg

SEQ ID NO: 4239839 - DNA, 25 bp, Homo sapien
tggcctggcccttgaaatagtagtg

SEQ ID NO: 4239840 - DNA, 25 bp, Homo sapien
tactaaagacattgcgaaacgctga

SEQ ID NO: 4239841 - DNA, 25 bp, Homo sapien
taaatgaacaataggcactgccagt

SEQ ID NO: 4239842 - DNA, 25 bp, Homo sapien
tcatgaatggatctgcaagacagca

SEQ ID NO: 4239843 - DNA, 25 bp, Homo sapien
agatttatcggctgggaccgagtgc

SEQ ID NO: 4239844 - DNA, 25 bp, Homo sapien
gagcgcgcggcggtgaaggccgcgg

SEQ ID NO: 4239845 - DNA, 25 bp, Homo sapien
accgagtgctgggtgcgcgcgccta

SEQ ID NO: 4239846 - DNA, 25 bp, Homo sapien
gcccgcggttcccagctgcctgcag

SEQ ID NO: 4239847 - DNA, 25 bp, Homo sapien
gccccttggtgatcagaagcttcgt

SEQ ID NO: 4239848 - DNA, 25 bp, Homo sapien
gaacaactagcagtttgccacggag

SEQ ID NO: 4239849 - DNA, 25 bp, Homo sapien
tctcagtagtacaagcagtttgcca

SEQ ID NO: 4239850 - DNA, 25 bp, Homo sapien
cacggagtcctacattcagtttggg

SEQ ID NO: 4239851 - DNA, 25 bp, Homo sapien
aaccatctttcaaaacttcttgcct

SEQ ID NO: 4239852 - DNA, 25 bp, Homo sapien
tttcaaaacttcttgcctcaaaata

SEQ ID NO: 4239853 - DNA, 25 bp, Homo sapien
tctttcaaaacttcttgcctcaaaa

SEQ ID NO: 4239854 - DNA, 25 bp, Homo sapien
ctgtggaaaccatctttcaaaactt

SEQ ID NO: 4239855 - DNA, 25 bp, Homo sapien
ttttggaaacagcttggtcatttag

SEQ ID NO: 4239856 - DNA, 25 bp, Homo sapien
tttaaagatcttcaatatgggcaaa

SEQ ID NO: 4239857 - DNA, 25 bp, Homo sapien
tggaaacagcttggtcatttagaat

SEQ ID NO: 4239858 - DNA, 25 bp, Homo sapien
taaagatcttcaatatgggcaaata

SEQ ID NO: 4239859 - DNA, 25 bp, Homo sapien
caatatcaagtagtctagtatacat

SEQ ID NO: 4239860 - DNA, 25 bp, Homo sapien
cagcaacagaaactacccacactga

SEQ ID NO: 4239861 - DNA, 25 bp, Homo sapien
gaaactacccacactgaagcacaga

SEQ ID NO: 4239862 - DNA, 25 bp, Homo sapien
tcagtgacttggagacacagcaaca

SEQ ID NO: 4239863 - DNA, 25 bp, Homo sapien
tgtcctgtttaattaagagacggca

SEQ ID NO: 4239864 - DNA, 25 bp, Homo sapien
caggtgtgcaagtcctcaatgcttt

SEQ ID NO: 4239865 - DNA, 25 bp, Homo sapien
tatgtttctctctcgtaatgaagcc

SEQ ID NO: 4239866 - DNA, 25 bp, Homo sapien
taatgaagccaactcatacggatcc

SEQ ID NO: 4239867 - DNA, 25 bp, Homo sapien
ttatcagaaggcaaccatagccgcc

SEQ ID NO: 4239868 - DNA, 25 bp, Homo sapien
cactagggatccttcaattatcaga

SEQ ID NO: 4239869 - DNA, 25 bp, Homo sapien
acaatgtctgcaataaattcgttcc

SEQ ID NO: 4239870 - DNA, 25 bp, Homo sapien
atagccgccgccatgaagtcttctc

SEQ ID NO: 4239871 - DNA, 25 bp, Homo sapien
cgatgatagcggcagtgcacaggca

SEQ ID NO: 4239872 - DNA, 25 bp, Homo sapien
catcttcactgtgcggccgatgata

SEQ ID NO: 4239873 - DNA, 25 bp, Homo sapien
gcactgtgaatctcgtctggcataa

SEQ ID NO: 4239874 - DNA, 25 bp, Homo sapien
tattgaccacaatcgaggcttctcc

SEQ ID NO: 4239875 - DNA, 25 bp, Homo sapien
tcaacccttagaaaacacttgcagc

SEQ ID NO: 4239876 - DNA, 25 bp, Homo sapien
ttcaacccttagaaaacacttgcag

SEQ ID NO: 4239877 - DNA, 25 bp, Homo sapien
caacccttagaaaacacttgcagcc

SEQ ID NO: 4239878 - DNA, 25 bp, Homo sapien
tttcaacccttagaaaacacttgca

SEQ ID NO: 4239879 - DNA, 25 bp, Homo sapien
caaaggaatcaaaccggaatctgat

SEQ ID NO: 4239880 - DNA, 25 bp, Homo sapien
gaatcaaaccggaatctgatcattc

SEQ ID NO: 4239881 - DNA, 25 bp, Homo sapien
tatagttttgtcaaaggaatcaaac

SEQ ID NO: 4239882 - DNA, 25 bp, Homo sapien
aggaatcaaaccggaatctgatcat

SEQ ID NO: 4239883 - DNA, 25 bp, Homo sapien
atcttgttccattggcagatatcct

SEQ ID NO: 4239884 - DNA, 25 bp, Homo sapien
catcttgttccattggcagatatcc

SEQ ID NO: 4239885 - DNA, 25 bp, Homo sapien
cttgttccattggcagatatcctca

SEQ ID NO: 4239886 - DNA, 25 bp, Homo sapien
tcttgttccattggcagatatcctc

SEQ ID NO: 4239887 - DNA, 25 bp, Homo sapien
cttgtagaatcacattcttatatac

SEQ ID NO: 4239888 - DNA, 25 bp, Homo sapien
ggaacttgtagaatcacattcttat

SEQ ID NO: 4239889 - DNA, 25 bp, Homo sapien
ctggaacttgtagaatcacattctt

SEQ ID NO: 4239890 - DNA, 25 bp, Homo sapien
aacttgtagaatcacattcttatat

SEQ ID NO: 4239891 - DNA, 25 bp, Homo sapien
aaaactgctacaaggatcaatgtag

SEQ ID NO: 4239892 - DNA, 25 bp, Homo sapien
cacaggattgtaatgagcagagtca

SEQ ID NO: 4239893 - DNA, 25 bp, Homo sapien
tagagaggtatgtacagtcagtccc

SEQ ID NO: 4239894 - DNA, 25 bp, Homo sapien
tacaaggatcaatgtagagcacagg

SEQ ID NO: 4239895 - DNA, 25 bp, Homo sapien
tagaagaacacctctcgtcagaaat

SEQ ID NO: 4239896 - DNA, 25 bp, Homo sapien
caaggatccatgcaatagagcacta

SEQ ID NO: 4239897 - DNA, 25 bp, Homo sapien
ggcatctgatgcttgaggattacca

SEQ ID NO: 4239898 - DNA, 25 bp, Homo sapien
cagaattaagtttccccttatggca

SEQ ID NO: 4239899 - DNA, 25 bp, Homo sapien
aattagcctatggcacttactttat

SEQ ID NO: 4239900 - DNA, 25 bp, Homo sapien
taattagcctatggcacttacttta

SEQ ID NO: 4239901 - DNA, 25 bp, Homo sapien
ttttaattagcctatggcacttact

SEQ ID NO: 4239902 - DNA, 25 bp, Homo sapien
tttaattagcctatggcacttactt

SEQ ID NO: 4239903 - DNA, 25 bp, Homo sapien
taaccatattccaaaacgttgcctg

SEQ ID NO: 4239904 - DNA, 25 bp, Homo sapien
gagtaaatggctgaaccacattcca

SEQ ID NO: 4239905 - DNA, 25 bp, Homo sapien
tgttttggaacatgcttgccctaag

SEQ ID NO: 4239906 - DNA, 25 bp, Homo sapien
tacaagatgtagtcccatgaaaaca

SEQ ID NO: 4239907 - DNA, 25 bp, Homo sapien
ggagggagccttcggcaatggcgac

SEQ ID NO: 4239908 - DNA, 25 bp, Homo sapien
ggaagcggaacaaccgccgccgctg

SEQ ID NO: 4239909 - DNA, 25 bp, Homo sapien
cagcgaggcgcctcggtcagagctc

SEQ ID NO: 4239910 - DNA, 25 bp, Homo sapien
tggagcagccgctgctaccgctagg

SEQ ID NO: 4239911 - DNA, 25 bp, Homo sapien
gccagctgagactaaggtaattttg

SEQ ID NO: 4239912 - DNA, 25 bp, Homo sapien
tagaggtgccactatatgtcatgat

SEQ ID NO: 4239913 - DNA, 25 bp, Homo sapien
tgttacaatggttctgccagctgag

SEQ ID NO: 4239914 - DNA, 25 bp, Homo sapien
tattaacagcgggtaggtacttcta

SEQ ID NO: 4239915 - DNA, 25 bp, Homo sapien
gaaaagacacggaagaacctcagat

SEQ ID NO: 4239916 - DNA, 25 bp, Homo sapien
gtagtaaaaggatcagcggttgcca

SEQ ID NO: 4239917 - DNA, 25 bp, Homo sapien
tgaatgctggttcactgactgtgcc

SEQ ID NO: 4239918 - DNA, 25 bp, Homo sapien
taaggtgcggaaaccagtcggtatg

SEQ ID NO: 4239919 - DNA, 25 bp, Homo sapien
aaacaatgataacatgacatgctgg

SEQ ID NO: 4239920 - DNA, 25 bp, Homo sapien
gctcaacatcactaactgctagaga

SEQ ID NO: 4239921 - DNA, 25 bp, Homo sapien
gtccacccgaaaacctacacatgag

SEQ ID NO: 4239922 - DNA, 25 bp, Homo sapien
aacactactacctattggaatgggt

SEQ ID NO: 4239923 - DNA, 25 bp, Homo sapien
ttcacctccatggtgagcttgggac

SEQ ID NO: 4239924 - DNA, 25 bp, Homo sapien
cacctccatggtgagcttgggacaa

SEQ ID NO: 4239925 - DNA, 25 bp, Homo sapien
aagaagatggaattagaaacatgaa

SEQ ID NO: 4239926 - DNA, 25 bp, Homo sapien
tggctcatgcttttactaccagccc

SEQ ID NO: 4239927 - DNA, 25 bp, Homo sapien
tgtaaaagatgtaactctcttgagt

SEQ ID NO: 4239928 - DNA, 25 bp, Homo sapien
acaaagctggtaatggtcagctgaa

SEQ ID NO: 4239929 - DNA, 25 bp, Homo sapien
gtaaaaaatagcacgaacaagcaaa

SEQ ID NO: 4239930 - DNA, 25 bp, Homo sapien
tggtactaccaaaagctactggtct

SEQ ID NO: 4239931 - DNA, 25 bp, Homo sapien
ggtttcaaactgtgattggctgaca

SEQ ID NO: 4239932 - DNA, 25 bp, Homo sapien
aggtttcaaactgtgattggctgac

SEQ ID NO: 4239933 - DNA, 25 bp, Homo sapien
agatgattttatgcctgggcttttt

SEQ ID NO: 4239934 - DNA, 25 bp, Homo sapien
tatggagatgattttatgcctgggc

SEQ ID NO: 4239935 - DNA, 25 bp, Homo sapien
tcccagagttgctgagggtgctcag

SEQ ID NO: 4239936 - DNA, 25 bp, Homo sapien
tcttctgtgggtgagaatgtacact

SEQ ID NO: 4239937 - DNA, 25 bp, Homo sapien
caattaacccgaaaagatgctcagt

SEQ ID NO: 4239938 - DNA, 25 bp, Homo sapien
caatgggaacgctcatcttctgtgg

SEQ ID NO: 4239939 - DNA, 25 bp, Homo sapien
accacgcccggcccaggaattatat

SEQ ID NO: 4239940 - DNA, 25 bp, Homo sapien
cacgcccggcccaggaattatattt

SEQ ID NO: 4239941 - DNA, 25 bp, Homo sapien
ccacgcccggcccaggaattatatt

SEQ ID NO: 4239942 - DNA, 25 bp, Homo sapien
ggaaactgttaagcctggattctct

SEQ ID NO: 4239943 - DNA, 25 bp, Homo sapien
taacttaaaagagatctggtcacag

SEQ ID NO: 4239944 - DNA, 25 bp, Homo sapien
gcttctgtatgtggtcaacatgctg

SEQ ID NO: 4239945 - DNA, 25 bp, Homo sapien
taagactggaaatgttaccgtatgc

SEQ ID NO: 4239946 - DNA, 25 bp, Homo sapien
gaattctccagtaacagcatcaaag

SEQ ID NO: 4239947 - DNA, 25 bp, Homo sapien
cagcatcaaagccaacatggatggt

SEQ ID NO: 4239948 - DNA, 25 bp, Homo sapien
catggatggtgtgctcaaaatcaga

SEQ ID NO: 4239949 - DNA, 25 bp, Homo sapien
gtgtgctcaaaatcagatggaggag

SEQ ID NO: 4239950 - DNA, 25 bp, Homo sapien
gtagaactttaggacatccagcaca

SEQ ID NO: 4239951 - DNA, 25 bp, Homo sapien
gagtcgtagaactttaggacatcca

SEQ ID NO: 4239952 - DNA, 25 bp, Homo sapien
tcgtagaactttaggacatccagca

SEQ ID NO: 4239953 - DNA, 25 bp, Homo sapien
tgttggagtcgtagaactttaggac

SEQ ID NO: 4239954 - DNA, 25 bp, Homo sapien
gttccagaaggaaagccatctttct

SEQ ID NO: 4239955 - DNA, 25 bp, Homo sapien
tgttccagaaggaaagccatctttc

SEQ ID NO: 4239956 - DNA, 25 bp, Homo sapien
tgctggtgttccagaaggaaagcca

SEQ ID NO: 4239957 - DNA, 25 bp, Homo sapien
tggtgttccagaaggaaagccatct

SEQ ID NO: 4239958 - DNA, 25 bp, Homo sapien
tcctctgtcactactgcgggtgctt

SEQ ID NO: 4239959 - DNA, 25 bp, Homo sapien
ggaggagcagtctcttcatcatcat

SEQ ID NO: 4239960 - DNA, 25 bp, Homo sapien
tgatttcgtatgatccggtcgcggg

SEQ ID NO: 4239961 - DNA, 25 bp, Homo sapien
tcgcggggcaataacgggaggagca

SEQ ID NO: 4239962 - DNA, 25 bp, Homo sapien
aatttcattctcaactgccttttga

SEQ ID NO: 4239963 - DNA, 25 bp, Homo sapien
tcaactgccttttgaatgacagcaa

SEQ ID NO: 4239964 - DNA, 25 bp, Homo sapien
aactgccttttgaatgacagcaagg

SEQ ID NO: 4239965 - DNA, 25 bp, Homo sapien
ggttaggaatttcattctcaactgc

SEQ ID NO: 4239966 - DNA, 25 bp, Homo sapien
aggaacagggtcaattacagaccgt

SEQ ID NO: 4239967 - DNA, 25 bp, Homo sapien
ggtcaattacagaccgtgtgtaaat

SEQ ID NO: 4239968 - DNA, 25 bp, Homo sapien
cttcatctgtcatcttagtcttctt

SEQ ID NO: 4239969 - DNA, 25 bp, Homo sapien
tttctgtttgtctaaagacttggca

SEQ ID NO: 4239970 - DNA, 25 bp, Homo sapien
ctgggccaaatgttttaagagccgt

SEQ ID NO: 4239971 - DNA, 25 bp, Homo sapien
tgtaagttaaaatccatctgggcca

SEQ ID NO: 4239972 - DNA, 25 bp, Homo sapien
gccgtgaacaatttaacaatgatgt

SEQ ID NO: 4239973 - DNA, 25 bp, Homo sapien
tgtaaagtgtaagttaaaatccatc

SEQ ID NO: 4239974 - DNA, 25 bp, Homo sapien
aaataattcttatatgctcatagag

SEQ ID NO: 4239975 - DNA, 25 bp, Homo sapien
cttatatgctcatagagtaacagag

SEQ ID NO: 4239976 - DNA, 25 bp, Homo sapien
aattcttatatgctcatagagtaac

SEQ ID NO: 4239977 - DNA, 25 bp, Homo sapien
tatgctcatagagtaacagagcagg

SEQ ID NO: 4239978 - DNA, 25 bp, Homo sapien
ttttcttagggtcacctatgctcac

SEQ ID NO: 4239979 - DNA, 25 bp, Homo sapien
ttttttcttagggtcacctatgctc

SEQ ID NO: 4239980 - DNA, 25 bp, Homo sapien
tttttcttagggtcacctatgctca

SEQ ID NO: 4239981 - DNA, 25 bp, Homo sapien
caagggtaccactcacagaatacta

SEQ ID NO: 4239982 - DNA, 25 bp, Homo sapien
taaacatcatgctataaagccagga

SEQ ID NO: 4239983 - DNA, 25 bp, Homo sapien
tataagtacttgatgtcggcaggca

SEQ ID NO: 4239984 - DNA, 25 bp, Homo sapien
ccctctaattatcacagatgggaaa

SEQ ID NO: 4239985 - DNA, 25 bp, Homo sapien
cagtgcaacgtcagtagcagtgaaa

SEQ ID NO: 4239986 - DNA, 25 bp, Homo sapien
agtgcaacgtcagtagcagtgaaaa

SEQ ID NO: 4239987 - DNA, 25 bp, Homo sapien
caccagaatctcgttaatgatcagt

SEQ ID NO: 4239988 - DNA, 25 bp, Homo sapien
cgtttgcgatgagtataaacaccac

SEQ ID NO: 4239989 - DNA, 25 bp, Homo sapien
taaacaccaccagctatggccttca

SEQ ID NO: 4239990 - DNA, 25 bp, Homo sapien
ccattcatgtgttcgcttcaggtcg

SEQ ID NO: 4239991 - DNA, 25 bp, Homo sapien
tcagtcaagacacgaatcacagcca

SEQ ID NO: 4239992 - DNA, 25 bp, Homo sapien
caataaaactagagctggtagcttg

SEQ ID NO: 4239993 - DNA, 25 bp, Homo sapien
tatttttcctaaacacatggtattc

SEQ ID NO: 4239994 - DNA, 25 bp, Homo sapien
aactggaaagctgctacgtaacagc

SEQ ID NO: 4239995 - DNA, 25 bp, Homo sapien
taactgaagttatgatcctgaatca

SEQ ID NO: 4239996 - DNA, 25 bp, Homo sapien
tctgttaccacatcagtgagtgacc

SEQ ID NO: 4239997 - DNA, 25 bp, Homo sapien
gtttctgttaccacatcagtgagtg

SEQ ID NO: 4239998 - DNA, 25 bp, Homo sapien
tgttaccacatcagtgagtgacccc

SEQ ID NO: 4239999 - DNA, 25 bp, Homo sapien
ttctgttaccacatcagtgagtgac

SEQ ID NO: 4240000 - DNA, 25 bp, Homo sapien
caccataacatatcaagaaggaggc

SEQ ID NO: 4240001 - DNA, 25 bp, Homo sapien
gtgaatctggatcttcaaaggtcca

SEQ ID NO: 4240002 - DNA, 25 bp, Homo sapien
caataacaattacctgtgcagaaaa

SEQ ID NO: 4240003 - DNA, 25 bp, Homo sapien
taaatgatcatcatcactctaccag

SEQ ID NO: 4240004 - DNA, 25 bp, Homo sapien
accacttccagctaagtggtgtatt

SEQ ID NO: 4240005 - DNA, 25 bp, Homo sapien
acttccagctaagtggtgtatttct

SEQ ID NO: 4240006 - DNA, 25 bp, Homo sapien
cacttccagctaagtggtgtatttc

SEQ ID NO: 4240007 - DNA, 25 bp, Homo sapien
ccacttccagctaagtggtgtattt

SEQ ID NO: 4240008 - DNA, 25 bp, Homo sapien
gtctctgtggatcacttgattagca

SEQ ID NO: 4240009 - DNA, 25 bp, Homo sapien
atgtctctgtggatcacttgattag

SEQ ID NO: 4240010 - DNA, 25 bp, Homo sapien
gtggatcacttgattagcatgtaaa

SEQ ID NO: 4240011 - DNA, 25 bp, Homo sapien
ctctgtggatcacttgattagcatg

SEQ ID NO: 4240012 - DNA, 25 bp, Homo sapien
gattagttaaaaccctcagaggatc

SEQ ID NO: 4240013 - DNA, 25 bp, Homo sapien
taatccttgcattggtcaagaaaag

SEQ ID NO: 4240014 - DNA, 25 bp, Homo sapien
gacaagacaagacattacctaataa

SEQ ID NO: 4240015 - DNA, 25 bp, Homo sapien
taggtaatgtcttatccagcgagtc

SEQ ID NO: 4240016 - DNA, 25 bp, Homo sapien
caggatactctgtaaactttggtaa

SEQ ID NO: 4240017 - DNA, 25 bp, Homo sapien
caatctcacctgtaatggaggtgca

SEQ ID NO: 4240018 - DNA, 25 bp, Homo sapien
ggtcaggtcatggaaactactttgt

SEQ ID NO: 4240019 - DNA, 25 bp, Homo sapien
agagcctaaggtcgccaccagcatt

SEQ ID NO: 4240020 - DNA, 25 bp, Homo sapien
accatatgtcgactttagggccata

SEQ ID NO: 4240021 - DNA, 25 bp, Homo sapien
gaccatatgtcgactttagggccat

SEQ ID NO: 4240022 - DNA, 25 bp, Homo sapien
tacccagagaccatatgtcgacttt

SEQ ID NO: 4240023 - DNA, 25 bp, Homo sapien
cagagaccatatgtcgactttaggg

SEQ ID NO: 4240024 - DNA, 25 bp, Homo sapien
ttgcaatgaacgagatttctagttt

SEQ ID NO: 4240025 - DNA, 25 bp, Homo sapien
cacacagaattgtcaagttgttttc

SEQ ID NO: 4240026 - DNA, 25 bp, Homo sapien
cttcacacagaattgtcaagttgtt

SEQ ID NO: 4240027 - DNA, 25 bp, Homo sapien
gaacgagatttctagtttccttatc

SEQ ID NO: 4240028 - DNA, 25 bp, Homo sapien
catcgatttaagaaatcccgaaata

SEQ ID NO: 4240029 - DNA, 25 bp, Homo sapien
cgatttaagaaatcccgaaatattg

SEQ ID NO: 4240030 - DNA, 25 bp, Homo sapien
acatcgatttaagaaatcccgaaat

SEQ ID NO: 4240031 - DNA, 25 bp, Homo sapien
atcgatttaagaaatcccgaaatat

SEQ ID NO: 4240032 - DNA, 25 bp, Homo sapien
tgccatgatcagtggtgtcaagcta

SEQ ID NO: 4240033 - DNA, 25 bp, Homo sapien
gatcagtggtgtcaagctagataac

SEQ ID NO: 4240034 - DNA, 25 bp, Homo sapien
ttgcttctttagctgccatgatcag

SEQ ID NO: 4240035 - DNA, 25 bp, Homo sapien
taacggttactcttcattgcttctt

SEQ ID NO: 4240036 - DNA, 25 bp, Homo sapien
actaaaaggcttcttgtagaaaatg

SEQ ID NO: 4240037 - DNA, 25 bp, Homo sapien
cttctttcattcaggttatgcagac

SEQ ID NO: 4240038 - DNA, 25 bp, Homo sapien
tcatatactaaaaggcttcttgtag

SEQ ID NO: 4240039 - DNA, 25 bp, Homo sapien
caggttatgcagaccatttctttaa

SEQ ID NO: 4240040 - DNA, 25 bp, Homo sapien
gggatctattacaacaaagtcagca

SEQ ID NO: 4240041 - DNA, 25 bp, Homo sapien
ggctgtttgctgaaagacctaaggc

SEQ ID NO: 4240042 - DNA, 25 bp, Homo sapien
gaagtctacagtcaatgggaatctt

SEQ ID NO: 4240043 - DNA, 25 bp, Homo sapien
tgggaagaagtctacagtcaatggg

SEQ ID NO: 4240044 - DNA, 25 bp, Homo sapien
gcctctgctgctagtcccaaatatt

SEQ ID NO: 4240045 - DNA, 25 bp, Homo sapien
tgtatcagagctcaccaaggttcac

SEQ ID NO: 4240046 - DNA, 25 bp, Homo sapien
tgatttatactactgcaggatggca

SEQ ID NO: 4240047 - DNA, 25 bp, Homo sapien
ggttcacatctcttactgcctctgc

SEQ ID NO: 4240048 - DNA, 25 bp, Homo sapien
taagtgctctaaatatgtttcatta

SEQ ID NO: 4240049 - DNA, 25 bp, Homo sapien
taaaatttggaactcaggtggcact

SEQ ID NO: 4240050 - DNA, 25 bp, Homo sapien
gtagaaggccaatatattccagaga

SEQ ID NO: 4240051 - DNA, 25 bp, Homo sapien
ttcagtaatagctgtagaaggccaa

SEQ ID NO: 4240052 - DNA, 25 bp, Homo sapien
gcctctgagtacatgaggatcacag

SEQ ID NO: 4240053 - DNA, 25 bp, Homo sapien
gaagtgcctctgagtacatgaggat

SEQ ID NO: 4240054 - DNA, 25 bp, Homo sapien
gagtacatgaggatcacagtcttct

SEQ ID NO: 4240055 - DNA, 25 bp, Homo sapien
tcacagtcttctcatctcgttggtt

SEQ ID NO: 4240056 - DNA, 25 bp, Homo sapien
gaaacgaggcgttggcacatagtca

SEQ ID NO: 4240057 - DNA, 25 bp, Homo sapien
aaacgaggcgttggcacatagtcag

SEQ ID NO: 4240058 - DNA, 25 bp, Homo sapien
ctgaaacgaggcgttggcacatagt

SEQ ID NO: 4240059 - DNA, 25 bp, Homo sapien
tgaaacgaggcgttggcacatagtc

SEQ ID NO: 4240060 - DNA, 25 bp, Homo sapien
aagaagtcgcaactacaaatcccaa

SEQ ID NO: 4240061 - DNA, 25 bp, Homo sapien
aactatcgaagaagtcgcaactaca

SEQ ID NO: 4240062 - DNA, 25 bp, Homo sapien
tcgaagaagtcgcaactacaaatcc

SEQ ID NO: 4240063 - DNA, 25 bp, Homo sapien
gaagtcgcaactacaaatcccaaac

SEQ ID NO: 4240064 - DNA, 25 bp, Homo sapien
cattctaaagtgatgacaaaaaggg

SEQ ID NO: 4240065 - DNA, 25 bp, Homo sapien
tttctgttagaggttagtttatcca

SEQ ID NO: 4240066 - DNA, 25 bp, Homo sapien
cacaagaggactattaaggtaactt

SEQ ID NO: 4240067 - DNA, 25 bp, Homo sapien
aagaataaaccacagcgtagctccc

SEQ ID NO: 4240068 - DNA, 25 bp, Homo sapien
aaatgttccatgtttcatagtttcc

SEQ ID NO: 4240069 - DNA, 25 bp, Homo sapien
gttccatgtttcatagtttcccagt

SEQ ID NO: 4240070 - DNA, 25 bp, Homo sapien
tttcaggtaggataaaatgttccat

SEQ ID NO: 4240071 - DNA, 25 bp, Homo sapien
gataaaatgttccatgtttcatagt

SEQ ID NO: 4240072 - DNA, 25 bp, Homo sapien
cagcggagacaggaagacaatctgc

SEQ ID NO: 4240073 - DNA, 25 bp, Homo sapien
caatacctactgtgggagcagcgga

SEQ ID NO: 4240074 - DNA, 25 bp, Homo sapien
tagaatcgcttgttagaggcacagg

SEQ ID NO: 4240075 - DNA, 25 bp, Homo sapien
tactagactgtacgcagctggacac

SEQ ID NO: 4240076 - DNA, 25 bp, Homo sapien
atattcttttacgctgatcaaaaga

SEQ ID NO: 4240077 - DNA, 25 bp, Homo sapien
tattcttttacgctgatcaaaagaa

SEQ ID NO: 4240078 - DNA, 25 bp, Homo sapien
aaatattcttttacgctgatcaaaa

SEQ ID NO: 4240079 - DNA, 25 bp, Homo sapien
gacactacggaaatgggacagagca

SEQ ID NO: 4240080 - DNA, 25 bp, Homo sapien
agacccatgataacaccttgaccag

SEQ ID NO: 4240081 - DNA, 25 bp, Homo sapien
gaacgtgcagcaacaaacactcgtg

SEQ ID NO: 4240082 - DNA, 25 bp, Homo sapien
gcaggcgcataatggaacaccgttt

SEQ ID NO: 4240083 - DNA, 25 bp, Homo sapien
gcgctggcctatcgcgtcacctcct

SEQ ID NO: 4240084 - DNA, 25 bp, Homo sapien
tcctccgcgcccttccgcctgcgag

SEQ ID NO: 4240085 - DNA, 25 bp, Homo sapien
cgacgccggcgctggcctatcgcgt

SEQ ID NO: 4240086 - DNA, 25 bp, Homo sapien
gccggcgctggcctatcgcgtcacc

SEQ ID NO: 4240087 - DNA, 25 bp, Homo sapien
ggaccccgccttcgtcagctccaag

SEQ ID NO: 4240088 - DNA, 25 bp, Homo sapien
gtccggcctgttcgccgcggccaca

SEQ ID NO: 4240089 - DNA, 25 bp, Homo sapien
ccacagccgccgagcttcctctgaa

SEQ ID NO: 4240090 - DNA, 25 bp, Homo sapien
tgctaccctcgttcctggcagctgc

SEQ ID NO: 4240091 - DNA, 25 bp, Homo sapien
taggatatcctttgtcatctggttg

SEQ ID NO: 4240092 - DNA, 25 bp, Homo sapien
tatcctttgtcatctggttgtagaa

SEQ ID NO: 4240093 - DNA, 25 bp, Homo sapien
gatatcctttgtcatctggttgtag

SEQ ID NO: 4240094 - DNA, 25 bp, Homo sapien
tttaggatatcctttgtcatctggt

SEQ ID NO: 4240095 - DNA, 25 bp, Homo sapien
ctgatgcataatgagatctggatgc

SEQ ID NO: 4240096 - DNA, 25 bp, Homo sapien
tctgatgcataatgagatctggatg

SEQ ID NO: 4240097 - DNA, 25 bp, Homo sapien
gatgcataatgagatctggatgcag

SEQ ID NO: 4240098 - DNA, 25 bp, Homo sapien
tttctgatgcataatgagatctgga

SEQ ID NO: 4240099 - DNA, 25 bp, Homo sapien
taccctggaaatgtctcaactgtct

SEQ ID NO: 4240100 - DNA, 25 bp, Homo sapien
ttgaacttggtcttagcacaaaggg

SEQ ID NO: 4240101 - DNA, 25 bp, Homo sapien
tctcagaaaaggctaagtggattcc

SEQ ID NO: 4240102 - DNA, 25 bp, Homo sapien
gggttcatccttgatccacgttttc

SEQ ID NO: 4240103 - DNA, 25 bp, Homo sapien
ctaggtctgtgaccattggcctgac

SEQ ID NO: 4240104 - DNA, 25 bp, Homo sapien
tgtcctaggtctgtgaccattggcc

SEQ ID NO: 4240105 - DNA, 25 bp, Homo sapien
tgtgggtctgtcctaggtctgtgac

SEQ ID NO: 4240106 - DNA, 25 bp, Homo sapien
aaggttgtgggtctgtcctaggtct

SEQ ID NO: 4240107 - DNA, 25 bp, Homo sapien
ttgagtccactgcacaccaagggag

SEQ ID NO: 4240108 - DNA, 25 bp, Homo sapien
tgactggtcccaggcgtttgtggca

SEQ ID NO: 4240109 - DNA, 25 bp, Homo sapien
tatctggaaagtacggctgatgccg

SEQ ID NO: 4240110 - DNA, 25 bp, Homo sapien
gctgatgccgacaagaagggtcttt

SEQ ID NO: 4240111 - DNA, 25 bp, Homo sapien
tctgtactttgtgtctttctatgag

SEQ ID NO: 4240112 - DNA, 25 bp, Homo sapien
actctgtactttgtgtctttctatg

SEQ ID NO: 4240113 - DNA, 25 bp, Homo sapien
actttgtgtctttctatgaggaaga

SEQ ID NO: 4240114 - DNA, 25 bp, Homo sapien
tgtactttgtgtctttctatgagga

SEQ ID NO: 4240115 - DNA, 25 bp, Homo sapien
aattagctaaccatcagtctgacgg

SEQ ID NO: 4240116 - DNA, 25 bp, Homo sapien
ggccacccaggacattatttctaag

SEQ ID NO: 4240117 - DNA, 25 bp, Homo sapien
ggttgttcaccaatgctgaatgggc

SEQ ID NO: 4240118 - DNA, 25 bp, Homo sapien
gcaaggcttagacgctcacagaagt

SEQ ID NO: 4240119 - DNA, 25 bp, Homo sapien
acccagctagtgaagcacattttaa

SEQ ID NO: 4240120 - DNA, 25 bp, Homo sapien
gaactatcatcgaggggtttcaccg

SEQ ID NO: 4240121 - DNA, 25 bp, Homo sapien
gggcatagtaacacaatcatagctc

SEQ ID NO: 4240122 - DNA, 25 bp, Homo sapien
gatggggtctctttctatcatccca

SEQ ID NO: 4240123 - DNA, 25 bp, Homo sapien
ttcactgagtggaaccaaactgcca

SEQ ID NO: 4240124 - DNA, 25 bp, Homo sapien
tttcactgagtggaaccaaactgcc

SEQ ID NO: 4240125 - DNA, 25 bp, Homo sapien
caggtcgtccatatccagcatgtgt

SEQ ID NO: 4240126 - DNA, 25 bp, Homo sapien
gaagatacggaagttacatttttga

SEQ ID NO: 4240127 - DNA, 25 bp, Homo sapien
tgaccatccagagtcgccaggtcgt

SEQ ID NO: 4240128 - DNA, 25 bp, Homo sapien
tctggcccgatagtttgttatttcc

SEQ ID NO: 4240129 - DNA, 25 bp, Homo sapien
tatcagctcaccatacatattaatg

SEQ ID NO: 4240130 - DNA, 25 bp, Homo sapien
tgggactgcatccattatcagctca

SEQ ID NO: 4240131 - DNA, 25 bp, Homo sapien
gcatccattatcagctcaccataca

SEQ ID NO: 4240132 - DNA, 25 bp, Homo sapien
tgtctgggactgcatccattatcag

SEQ ID NO: 4240133 - DNA, 25 bp, Homo sapien
tatatcctttggttaccagctgtct

SEQ ID NO: 4240134 - DNA, 25 bp, Homo sapien
cattatatcctttggttaccagctg

SEQ ID NO: 4240135 - DNA, 25 bp, Homo sapien
tactccattatatcctttggttacc

SEQ ID NO: 4240136 - DNA, 25 bp, Homo sapien
cctttggttaccagctgtctatgaa

SEQ ID NO: 4240137 - DNA, 25 bp, Homo sapien
ggtcactggtttagtcaatcgccta

SEQ ID NO: 4240138 - DNA, 25 bp, Homo sapien
gaagctaaaggttaaccaatggtca

SEQ ID NO: 4240139 - DNA, 25 bp, Homo sapien
cagctgctaggtggctttaggataa

SEQ ID NO: 4240140 - DNA, 25 bp, Homo sapien
tggaggtcctagagaatccctgtgc

SEQ ID NO: 4240141 - DNA, 25 bp, Homo sapien
gaacaatcctctactagttgtccta

SEQ ID NO: 4240142 - DNA, 25 bp, Homo sapien
agcttttcctgcttaagtagcatcc

SEQ ID NO: 4240143 - DNA, 25 bp, Homo sapien
gtaaatacaaccataggccgtccag

SEQ ID NO: 4240144 - DNA, 25 bp, Homo sapien
tgtgcccggcccatcgttcattatc

SEQ ID NO: 4240145 - DNA, 25 bp, Homo sapien
taatgaaacaactcacatatttgac

SEQ ID NO: 4240146 - DNA, 25 bp, Homo sapien
acacccctgatctagaggaaggaat

SEQ ID NO: 4240147 - DNA, 25 bp, Homo sapien
tgaaacaactcacatatttgacttt

SEQ ID NO: 4240148 - DNA, 25 bp, Homo sapien
tatttaatgaaacaactcacatatt

SEQ ID NO: 4240149 - DNA, 25 bp, Homo sapien
ctgcagatgtgagacacagcgccca

SEQ ID NO: 4240150 - DNA, 25 bp, Homo sapien
gctcttgcttctctatttccttgtt

SEQ ID NO: 4240151 - DNA, 25 bp, Homo sapien
tcaccacgcccagccgcttctctag

SEQ ID NO: 4240152 - DNA, 25 bp, Homo sapien
cacgcccagccgcttctctagttct

SEQ ID NO: 4240153 - DNA, 25 bp, Homo sapien
accacgcccagccgcttctctagtt

SEQ ID NO: 4240154 - DNA, 25 bp, Homo sapien
tattgagaatttttcgcaccgatgt

SEQ ID NO: 4240155 - DNA, 25 bp, Homo sapien
ttcgattagagagtgtcacagtaat

SEQ ID NO: 4240156 - DNA, 25 bp, Homo sapien
tgagagaccagtggacttccaggtg

SEQ ID NO: 4240157 - DNA, 25 bp, Homo sapien
aaataattcgattagagagtgtcac

SEQ ID NO: 4240158 - DNA, 25 bp, Homo sapien
taattcgattagagagtgtcacagt

SEQ ID NO: 4240159 - DNA, 25 bp, Homo sapien
aatccaagtggagtatctcagaggg

SEQ ID NO: 4240160 - DNA, 25 bp, Homo sapien
ttcttggtagtgcaggaaaatccgg

SEQ ID NO: 4240161 - DNA, 25 bp, Homo sapien
tcttcctagggcatattcctgggtt

SEQ ID NO: 4240162 - DNA, 25 bp, Homo sapien
ggagttattttgcagatacaggcca

SEQ ID NO: 4240163 - DNA, 25 bp, Homo sapien
ggtcaccggcactcaaaatgtactg

SEQ ID NO: 4240164 - DNA, 25 bp, Homo sapien
gggacactagtgaataaagctcttg

SEQ ID NO: 4240165 - DNA, 25 bp, Homo sapien
tactgagcatctctaagggttcaag

SEQ ID NO: 4240166 - DNA, 25 bp, Homo sapien
tacaggccccttagttaagagccac

SEQ ID NO: 4240167 - DNA, 25 bp, Homo sapien
gaggttatgtgaataacccacccca

SEQ ID NO: 4240168 - DNA, 25 bp, Homo sapien
tgtgcgtctctctccacatcaagag

SEQ ID NO: 4240169 - DNA, 25 bp, Homo sapien
tgatacactccttatttttgagggc

SEQ ID NO: 4240170 - DNA, 25 bp, Homo sapien
gtccactgttgaactatctaccaag

SEQ ID NO: 4240171 - DNA, 25 bp, Homo sapien
ctggcttcagtcagcaaatactttc

SEQ ID NO: 4240172 - DNA, 25 bp, Homo sapien
accctgaagaaattcaggtctattt

SEQ ID NO: 4240173 - DNA, 25 bp, Homo sapien
ttcgtaacagcagtctgccaaccct

SEQ ID NO: 4240174 - DNA, 25 bp, Homo sapien
gcttcagtcagcaaatactttctta

SEQ ID NO: 4240175 - DNA, 25 bp, Homo sapien
catcattagcaacttcctcagggag

SEQ ID NO: 4240176 - DNA, 25 bp, Homo sapien
tctctgggtctatatgggtcatctg

SEQ ID NO: 4240177 - DNA, 25 bp, Homo sapien
gatgcaagaggcaagtgccacccaa

SEQ ID NO: 4240178 - DNA, 25 bp, Homo sapien
gactgaagtgatttgctcccgggaa

SEQ ID NO: 4240179 - DNA, 25 bp, Homo sapien
gcttatccctaaatgacctgcctac

SEQ ID NO: 4240180 - DNA, 25 bp, Homo sapien
gacgatgcttatccctaaatgacct

SEQ ID NO: 4240181 - DNA, 25 bp, Homo sapien
aaataaagacgatgcttatccctaa

SEQ ID NO: 4240182 - DNA, 25 bp, Homo sapien
caacacagcccaccatcaatgaaga

SEQ ID NO: 4240183 - DNA, 25 bp, Homo sapien
gatggcgacaactccgctgagcagt

SEQ ID NO: 4240184 - DNA, 25 bp, Homo sapien
tctaattttatggaggcacctggcc

SEQ ID NO: 4240185 - DNA, 25 bp, Homo sapien
gcctctggatgctaggatggcgaca

SEQ ID NO: 4240186 - DNA, 25 bp, Homo sapien
ggtggcaaccccaatttataggaca

SEQ ID NO: 4240187 - DNA, 25 bp, Homo sapien
gtcactgtcgtttttctgttgtgga

SEQ ID NO: 4240188 - DNA, 25 bp, Homo sapien
cacacattgtaagttccgaaaagca

SEQ ID NO: 4240189 - DNA, 25 bp, Homo sapien
cagtgagacatggatgacacccaca

SEQ ID NO: 4240190 - DNA, 25 bp, Homo sapien
ggcttactaataacctccagtgaga

SEQ ID NO: 4240191 - DNA, 25 bp, Homo sapien
gaaagtactccgttgctcgtaccta

SEQ ID NO: 4240192 - DNA, 25 bp, Homo sapien
ttgtaaatcctcttccgcactcggg

SEQ ID NO: 4240193 - DNA, 25 bp, Homo sapien
aggctgctctaaggcgaggcacttg

SEQ ID NO: 4240194 - DNA, 25 bp, Homo sapien
tggaaaggctgctctaaggcgaggc

SEQ ID NO: 4240195 - DNA, 25 bp, Homo sapien
gaaaggctgctctaaggcgaggcac

SEQ ID NO: 4240196 - DNA, 25 bp, Homo sapien
gaggtaacaatagtggcccaacacc

SEQ ID NO: 4240197 - DNA, 25 bp, Homo sapien
aaagcctttatgagatgtatgccac

SEQ ID NO: 4240198 - DNA, 25 bp, Homo sapien
ttcaaaaggaatggactgcactctc

SEQ ID NO: 4240199 - DNA, 25 bp, Homo sapien
taacttcttccaattgggaggcaac

SEQ ID NO: 4240200 - DNA, 25 bp, Homo sapien
cctacgcgggcataaactcgagaat

SEQ ID NO: 4240201 - DNA, 25 bp, Homo sapien
caacatgtcacgaaaggctggatta

SEQ ID NO: 4240202 - DNA, 25 bp, Homo sapien
agacgtaccctgcatgttactgagg

SEQ ID NO: 4240203 - DNA, 25 bp, Homo sapien
cagctaagtgtatggacaagggcca

SEQ ID NO: 4240204 - DNA, 25 bp, Homo sapien
gcaattacgtgtgctgaaaccaagt

SEQ ID NO: 4240205 - DNA, 25 bp, Homo sapien
cggcgttgattttcttacaggaaca

SEQ ID NO: 4240206 - DNA, 25 bp, Homo sapien
ggaagcaattactgcaaacatcagg

SEQ ID NO: 4240207 - DNA, 25 bp, Homo sapien
tgggcagctctctctcggcgttgat

SEQ ID NO: 4240208 - DNA, 25 bp, Homo sapien
ttaattatctagaggccaggaggca

SEQ ID NO: 4240209 - DNA, 25 bp, Homo sapien
tcttaactaggcagagcaggtcatc

SEQ ID NO: 4240210 - DNA, 25 bp, Homo sapien
agaaccccgttatggctagcccagg

SEQ ID NO: 4240211 - DNA, 25 bp, Homo sapien
tcatgggcacccaaacagttcagtg

SEQ ID NO: 4240212 - DNA, 25 bp, Homo sapien
ctagaagggttgagtactgtaattt

SEQ ID NO: 4240213 - DNA, 25 bp, Homo sapien
ctttgctagaagggttgagtactgt

SEQ ID NO: 4240214 - DNA, 25 bp, Homo sapien
tttgctagaagggttgagtactgta

SEQ ID NO: 4240215 - DNA, 25 bp, Homo sapien
tgctagaagggttgagtactgtaat

SEQ ID NO: 4240216 - DNA, 25 bp, Homo sapien
agtacatgttactcaagacgagaga

SEQ ID NO: 4240217 - DNA, 25 bp, Homo sapien
cagtacatgttactcaagacgagag

SEQ ID NO: 4240218 - DNA, 25 bp, Homo sapien
tacatgttactcaagacgagagaac

SEQ ID NO: 4240219 - DNA, 25 bp, Homo sapien
aacagtacatgttactcaagacgag

SEQ ID NO: 4240220 - DNA, 25 bp, Homo sapien
tccaatagtccgtgaaagttggggc

SEQ ID NO: 4240221 - DNA, 25 bp, Homo sapien
tgaaagttggggctgaagtacctaa

SEQ ID NO: 4240222 - DNA, 25 bp, Homo sapien
tgaagtacctaagtgtgaatgtctc

SEQ ID NO: 4240223 - DNA, 25 bp, Homo sapien
tgtctctcccgttaaactgagtgta

SEQ ID NO: 4240224 - DNA, 25 bp, Homo sapien
catgcttagaggtcaaggaccttcc

SEQ ID NO: 4240225 - DNA, 25 bp, Homo sapien
gcaagggtttgtcatagagggaacc

SEQ ID NO: 4240226 - DNA, 25 bp, Homo sapien
tctgtgaattctaacctctaaaggc

SEQ ID NO: 4240227 - DNA, 25 bp, Homo sapien
aacactgccttgacatgaggaccag

SEQ ID NO: 4240228 - DNA, 25 bp, Homo sapien
gattgggtccaatgagatgctcgcc

SEQ ID NO: 4240229 - DNA, 25 bp, Homo sapien
gctgaaatccgcaaacgccaagtgg

SEQ ID NO: 4240230 - DNA, 25 bp, Homo sapien
tctgcactatgtcgggtggcctcct

SEQ ID NO: 4240231 - DNA, 25 bp, Homo sapien
ggaagggcgcttggatatcactgaa

SEQ ID NO: 4240232 - DNA, 25 bp, Homo sapien
aaggccgtgagctgcgccgcacgtc

SEQ ID NO: 4240233 - DNA, 25 bp, Homo sapien
ggcgtctctaaatcgctcagcgcgg

SEQ ID NO: 4240234 - DNA, 25 bp, Homo sapien
gcctgcagcagtgcgaaggccgtga

SEQ ID NO: 4240235 - DNA, 25 bp, Homo sapien
taggccgcgactctgacagacgttc

SEQ ID NO: 4240236 - DNA, 25 bp, Homo sapien
taaatgtttgcgccagggcccctct

SEQ ID NO: 4240237 - DNA, 25 bp, Homo sapien
ttaaatgtttgcgccagggcccctc

SEQ ID NO: 4240238 - DNA, 25 bp, Homo sapien
atcacaagacttcaacggagcgggc

SEQ ID NO: 4240239 - DNA, 25 bp, Homo sapien
cctaggctcttatgcgtgggatgtc

SEQ ID NO: 4240240 - DNA, 25 bp, Homo sapien
acattgatgccactgtagagcccgg

SEQ ID NO: 4240241 - DNA, 25 bp, Homo sapien
caagagtttcagtcccacttgcaga

SEQ ID NO: 4240242 - DNA, 25 bp, Homo sapien
ggaattaactgtcctgctataccag

SEQ ID NO: 4240243 - DNA, 25 bp, Homo sapien
gctataccagtcagattgagcagca

SEQ ID NO: 4240244 - DNA, 25 bp, Homo sapien
catcttgcctgagaagtatcacact

SEQ ID NO: 4240245 - DNA, 25 bp, Homo sapien
tattattaccataggcctacagtcc

SEQ ID NO: 4240246 - DNA, 25 bp, Homo sapien
tagagtgcaatgagcaagtcccagc

SEQ ID NO: 4240247 - DNA, 25 bp, Homo sapien
tgcagtggctgggataagacacaac

SEQ ID NO: 4240248 - DNA, 25 bp, Homo sapien
tctgcaagactttgggcaacttaag

SEQ ID NO: 4240249 - DNA, 25 bp, Homo sapien
cagagctgtgttaaggacttaggcc

SEQ ID NO: 4240250 - DNA, 25 bp, Homo sapien
cacgctgtgagggacggtcaggtct

SEQ ID NO: 4240251 - DNA, 25 bp, Homo sapien
cctttacgggtgtcacgctgtgagg

SEQ ID NO: 4240252 - DNA, 25 bp, Homo sapien
cagggggccggcattcagcagacga

SEQ ID NO: 4240253 - DNA, 25 bp, Homo sapien
ttcagcagacgaggatcccgccggc

SEQ ID NO: 4240254 - DNA, 25 bp, Homo sapien
gtctgccggctaacattgtgtcatt

SEQ ID NO: 4240255 - DNA, 25 bp, Homo sapien
aaagctcttcaagcatggaagtggg

SEQ ID NO: 4240256 - DNA, 25 bp, Homo sapien
tggttattatgcaaacaagtaatgt

SEQ ID NO: 4240257 - DNA, 25 bp, Homo sapien
aagtgggagttgtgttgtacttcat

SEQ ID NO: 4240258 - DNA, 25 bp, Homo sapien
cagcaagtaaccaagttactcagca

SEQ ID NO: 4240259 - DNA, 25 bp, Homo sapien
gaaccatcagactccttagcaaata

SEQ ID NO: 4240260 - DNA, 25 bp, Homo sapien
tagacactgccagaaataatgttct

SEQ ID NO: 4240261 - DNA, 25 bp, Homo sapien
atctctccctgaaatacccttatag

SEQ ID NO: 4240262 - DNA, 25 bp, Homo sapien
tgagccacctgacattacacctgag

SEQ ID NO: 4240263 - DNA, 25 bp, Homo sapien
gcaacatcactatttctggaggagg

SEQ ID NO: 4240264 - DNA, 25 bp, Homo sapien
cagtgatgctgtggacttacagatc

SEQ ID NO: 4240265 - DNA, 25 bp, Homo sapien
tatcaagaagtcagggcaacatcac

SEQ ID NO: 4240266 - DNA, 25 bp, Homo sapien
aacacaattctggtgacgattataa

SEQ ID NO: 4240267 - DNA, 25 bp, Homo sapien
gaagaaattcgcaaaatcaacacaa

SEQ ID NO: 4240268 - DNA, 25 bp, Homo sapien
gaatgcacaagtaaaccaatattag

SEQ ID NO: 4240269 - DNA, 25 bp, Homo sapien
tctggtgacgattataaagaaagaa

SEQ ID NO: 4240270 - DNA, 25 bp, Homo sapien
ggaattgggagttaacaagctacca

SEQ ID NO: 4240271 - DNA, 25 bp, Homo sapien
gaacaaaaatgcatcccaagtagga

SEQ ID NO: 4240272 - DNA, 25 bp, Homo sapien
caagctaccaaagttgcaaccctga

SEQ ID NO: 4240273 - DNA, 25 bp, Homo sapien
ttaaagacaaccagagtgaaagggc

SEQ ID NO: 4240274 - DNA, 25 bp, Homo sapien
tcccaaggtggccaaagctctcgca

SEQ ID NO: 4240275 - DNA, 25 bp, Homo sapien
gcaggctgccgtgtcctctgcaatg

SEQ ID NO: 4240276 - DNA, 25 bp, Homo sapien
gagcaggctgccgtgtcctctgcaa

SEQ ID NO: 4240277 - DNA, 25 bp, Homo sapien
gaggtgtagttgagcgtgatgagca

SEQ ID NO: 4240278 - DNA, 25 bp, Homo sapien
cgcaggccgcggccaggccgtccca

SEQ ID NO: 4240279 - DNA, 25 bp, Homo sapien
gccgcggccaggccgtcccaggagg

SEQ ID NO: 4240280 - DNA, 25 bp, Homo sapien
gcggccaggccgtcccaggaggccc

SEQ ID NO: 4240281 - DNA, 25 bp, Homo sapien
caggccgtcccaggaggccccggcg

SEQ ID NO: 4240282 - DNA, 25 bp, Homo sapien
ctgcggcgagttcggtcccgaaaga

SEQ ID NO: 4240283 - DNA, 25 bp, Homo sapien
ggctgcggcgagttcggtcccgaaa

SEQ ID NO: 4240284 - DNA, 25 bp, Homo sapien
ggcgagttcggtcccgaaagatgcc

SEQ ID NO: 4240285 - DNA, 25 bp, Homo sapien
ggaggctgcggcgagttcggtcccg

SEQ ID NO: 4240286 - DNA, 25 bp, Homo sapien
gtgtgaacgctcaaaacggcggcgc

SEQ ID NO: 4240287 - DNA, 25 bp, Homo sapien
gccacggcagagacatgcgtgtgct

SEQ ID NO: 4240288 - DNA, 25 bp, Homo sapien
ctgggtaatgagtgtgaacgctcaa

SEQ ID NO: 4240289 - DNA, 25 bp, Homo sapien
cagagacatgcgtgtgctgcctttc

SEQ ID NO: 4240290 - DNA, 25 bp, Homo sapien
ttcaccccagaaccctgagggagcg

SEQ ID NO: 4240291 - DNA, 25 bp, Homo sapien
tgtcccgggaggattttggccagga

SEQ ID NO: 4240292 - DNA, 25 bp, Homo sapien
tctcagcagtgctcgggcgcaggta

SEQ ID NO: 4240293 - DNA, 25 bp, Homo sapien
gtggaggcccgttcgcagcagtcca

SEQ ID NO: 4240294 - DNA, 25 bp, Homo sapien
gggttcaaaatgttcgactcctcca

SEQ ID NO: 4240295 - DNA, 25 bp, Homo sapien
tgcttttcaaggatgccaccgtccg

SEQ ID NO: 4240296 - DNA, 25 bp, Homo sapien
tgcctgtcggagagaaaaccaccta

SEQ ID NO: 4240297 - DNA, 25 bp, Homo sapien
gacgaccacaataagaacgggttca

SEQ ID NO: 4240298 - DNA, 25 bp, Homo sapien
taaagcaatttgcagctagcggcac

SEQ ID NO: 4240299 - DNA, 25 bp, Homo sapien
aggtcgtctgcctgcggtgcttcca

SEQ ID NO: 4240300 - DNA, 25 bp, Homo sapien
tgaacgcctcttccagtggcacctg

SEQ ID NO: 4240301 - DNA, 25 bp, Homo sapien
gctggagcaccgcagtgcttctgaa

SEQ ID NO: 4240302 - DNA, 25 bp, Homo sapien
cccacaccatccctcatttctgggt

SEQ ID NO: 4240303 - DNA, 25 bp, Homo sapien
acaccatccctcatttctgggtctt

SEQ ID NO: 4240304 - DNA, 25 bp, Homo sapien
aggcctagcagaacgctcaggaatc

SEQ ID NO: 4240305 - DNA, 25 bp, Homo sapien
gcaggcctagcagaacgctcaggaa

SEQ ID NO: 4240306 - DNA, 25 bp, Homo sapien
caagtccctctcgaaattgtttagg

SEQ ID NO: 4240307 - DNA, 25 bp, Homo sapien
tgggtcagtgaagacacgcccagct

SEQ ID NO: 4240308 - DNA, 25 bp, Homo sapien
ttctagtgattctgagcagggtgga

SEQ ID NO: 4240309 - DNA, 25 bp, Homo sapien
gccacagaacggtcattctagtgat

SEQ ID NO: 4240310 - DNA, 25 bp, Homo sapien
gagtccctctgtcgcctctgcaggg

SEQ ID NO: 4240311 - DNA, 25 bp, Homo sapien
ggagagatactacgactacagcggg

SEQ ID NO: 4240312 - DNA, 25 bp, Homo sapien
aggagagaccagttactctgagtcc

SEQ ID NO: 4240313 - DNA, 25 bp, Homo sapien
gtgtgtgacaagagccccctggaga

SEQ ID NO: 4240314 - DNA, 25 bp, Homo sapien
agaagcgcgggctgaggcgtggtgg

SEQ ID NO: 4240315 - DNA, 25 bp, Homo sapien
ttccgacgctccaaggagaagcgcg

SEQ ID NO: 4240316 - DNA, 25 bp, Homo sapien
aggcggcctcgaacacccgaggctt

SEQ ID NO: 4240317 - DNA, 25 bp, Homo sapien
gaactagcactgaagcgcagacggg

SEQ ID NO: 4240318 - DNA, 25 bp, Homo sapien
ttgtacttacccatgtcagagagag

SEQ ID NO: 4240319 - DNA, 25 bp, Homo sapien
gagcctttctatcctcgtggtcagg

SEQ ID NO: 4240320 - DNA, 25 bp, Homo sapien
gcttttgcccgcctgcgacagtggt

SEQ ID NO: 4240321 - DNA, 25 bp, Homo sapien
gacgaactcgcccagggtctgtaag

SEQ ID NO: 4240322 - DNA, 25 bp, Homo sapien
cagcaagtgtaacaccctttgatat

SEQ ID NO: 4240323 - DNA, 25 bp, Homo sapien
aggtgctaacgtcccaaccagtcgg

SEQ ID NO: 4240324 - DNA, 25 bp, Homo sapien
tcagattaagcagtcagcaagtgta

SEQ ID NO: 4240325 - DNA, 25 bp, Homo sapien
cagatgctgacaccccaacccgtca

SEQ ID NO: 4240326 - DNA, 25 bp, Homo sapien
cttttattaataggaaggcaggcaa

SEQ ID NO: 4240327 - DNA, 25 bp, Homo sapien
aagtgtgggcatattctcctctttt

SEQ ID NO: 4240328 - DNA, 25 bp, Homo sapien
tagacttatcttccttaatcatgtg

SEQ ID NO: 4240329 - DNA, 25 bp, Homo sapien
tttctttacatagttgcgcacacac

SEQ ID NO: 4240330 - DNA, 25 bp, Homo sapien
tatcgcctcccagatatgatggact

SEQ ID NO: 4240331 - DNA, 25 bp, Homo sapien
cggagactaaggagactttacaact

SEQ ID NO: 4240332 - DNA, 25 bp, Homo sapien
tgtaacctgccatccgagagtgagt

SEQ ID NO: 4240333 - DNA, 25 bp, Homo sapien
gaactgtgtcagattgacggagact

SEQ ID NO: 4240334 - DNA, 25 bp, Homo sapien
gttttacctgtcactttggcagact

SEQ ID NO: 4240335 - DNA, 25 bp, Homo sapien
aaactgggcaagagtgctcagaaga

SEQ ID NO: 4240336 - DNA, 25 bp, Homo sapien
tccctagtagtgataagcaaaatgt

SEQ ID NO: 4240337 - DNA, 25 bp, Homo sapien
gaaaacccatgacggagagagtgct

SEQ ID NO: 4240338 - DNA, 25 bp, Homo sapien
ttcaaggacgttacttgtggcctca

SEQ ID NO: 4240339 - DNA, 25 bp, Homo sapien
tataaggcagttgacaaggtgccca

SEQ ID NO: 4240340 - DNA, 25 bp, Homo sapien
tcatcaggccttattggaacaaaac

SEQ ID NO: 4240341 - DNA, 25 bp, Homo sapien
taagtgcaacttaatgtaggtagtc

SEQ ID NO: 4240342 - DNA, 25 bp, Homo sapien
taatcttcatgtaaagcttcacaca

SEQ ID NO: 4240343 - DNA, 25 bp, Homo sapien
tttctagctagttacttaatcttca

SEQ ID NO: 4240344 - DNA, 25 bp, Homo sapien
cacagggtctagtatgtagaagaca

SEQ ID NO: 4240345 - DNA, 25 bp, Homo sapien
tttttcctttagctaagatgttgcc

SEQ ID NO: 4240346 - DNA, 25 bp, Homo sapien
tggattgatacccagccttctaggg

SEQ ID NO: 4240347 - DNA, 25 bp, Homo sapien
tggccaggctgtcacaattgttgca

SEQ ID NO: 4240348 - DNA, 25 bp, Homo sapien
tgagttcctagcaaaataaagtgtg

SEQ ID NO: 4240349 - DNA, 25 bp, Homo sapien
tgttgcacaatatcgacctgaaggt

SEQ ID NO: 4240350 - DNA, 25 bp, Homo sapien
ggcagtgcttctagagtgacctttc

SEQ ID NO: 4240351 - DNA, 25 bp, Homo sapien
tggcttatctagtctttaatctctt

SEQ ID NO: 4240352 - DNA, 25 bp, Homo sapien
ttctaatagtgcctatttaaggccg

SEQ ID NO: 4240353 - DNA, 25 bp, Homo sapien
aaagagggaaactgtaatagtgaat

SEQ ID NO: 4240354 - DNA, 25 bp, Homo sapien
gaggcttggtaaattgtccttagga

SEQ ID NO: 4240355 - DNA, 25 bp, Homo sapien
ataggaggattcattgaagagcctg

SEQ ID NO: 4240356 - DNA, 25 bp, Homo sapien
taatcagccatgtaagatagccaca

SEQ ID NO: 4240357 - DNA, 25 bp, Homo sapien
tcagcctgttgataaccatgttagc

SEQ ID NO: 4240358 - DNA, 25 bp, Homo sapien
taaggctgcttcagtctgttacagc

SEQ ID NO: 4240359 - DNA, 25 bp, Homo sapien
tgccctctgaaactttgtaaggctg

SEQ ID NO: 4240360 - DNA, 25 bp, Homo sapien
gcagcaatcactacaagatcctttg

SEQ ID NO: 4240361 - DNA, 25 bp, Homo sapien
taaaatttgggtgagccatgtgccc

SEQ ID NO: 4240362 - DNA, 25 bp, Homo sapien
cttgggcccaatcgattctcccgcc

SEQ ID NO: 4240363 - DNA, 25 bp, Homo sapien
catatattgtatgcccaaaaacaga

SEQ ID NO: 4240364 - DNA, 25 bp, Homo sapien
aatgcgttcgtttcttaaattatgt

SEQ ID NO: 4240365 - DNA, 25 bp, Homo sapien
gattttcgttatttaccaatattga

SEQ ID NO: 4240366 - DNA, 25 bp, Homo sapien
ccaccaaagtgcacaaggattccaa

SEQ ID NO: 4240367 - DNA, 25 bp, Homo sapien
gcatccagccagttgtagaatttta

SEQ ID NO: 4240368 - DNA, 25 bp, Homo sapien
caattccagtgtctcgcttttagcc

SEQ ID NO: 4240369 - DNA, 25 bp, Homo sapien
tttcttcatagtagccaggctagtg

SEQ ID NO: 4240370 - DNA, 25 bp, Homo sapien
ccttgtagtggtgaagtaatctctc

SEQ ID NO: 4240371 - DNA, 25 bp, Homo sapien
gaaattattcaagctcttcacacat

SEQ ID NO: 4240372 - DNA, 25 bp, Homo sapien
atcttttcgtgtgctaattggccac

SEQ ID NO: 4240373 - DNA, 25 bp, Homo sapien
tcacttgcttggtaatgccctttgg

SEQ ID NO: 4240374 - DNA, 25 bp, Homo sapien
aatttataaactgttcgtactgata

SEQ ID NO: 4240375 - DNA, 25 bp, Homo sapien
aagcagcgatagagaaaggcactca

SEQ ID NO: 4240376 - DNA, 25 bp, Homo sapien
tggaaaagtataattcagaataaag

SEQ ID NO: 4240377 - DNA, 25 bp, Homo sapien
tgtcataagcaatgtcccatataat

SEQ ID NO: 4240378 - DNA, 25 bp, Homo sapien
aaccagactaaggtgcctaactttg

SEQ ID NO: 4240379 - DNA, 25 bp, Homo sapien
tagaaatagattgcatagaggtgtg

SEQ ID NO: 4240380 - DNA, 25 bp, Homo sapien
atttatgccataggccttctcagct

SEQ ID NO: 4240381 - DNA, 25 bp, Homo sapien
tgtgtacaagttaacggagtaagaa

SEQ ID NO: 4240382 - DNA, 25 bp, Homo sapien
gaagctgagcgttttttcctctaag

SEQ ID NO: 4240383 - DNA, 25 bp, Homo sapien
gattactggatcaaggagtgaaaac

SEQ ID NO: 4240384 - DNA, 25 bp, Homo sapien
ggcttggcgtaggaatgatcctgtc

SEQ ID NO: 4240385 - DNA, 25 bp, Homo sapien
tagtaccaataggtagccatccacc

SEQ ID NO: 4240386 - DNA, 25 bp, Homo sapien
tgtgtaaccaactgaataaggcaga

SEQ ID NO: 4240387 - DNA, 25 bp, Homo sapien
ttaagactcagcgtgtacaacctac

SEQ ID NO: 4240388 - DNA, 25 bp, Homo sapien
taagagcacaggctaagtggacatg

SEQ ID NO: 4240389 - DNA, 25 bp, Homo sapien
gacatgtgccaaataatgtgcttgc

SEQ ID NO: 4240390 - DNA, 25 bp, Homo sapien
tgaatgatcgagtttttccacatcc

SEQ ID NO: 4240391 - DNA, 25 bp, Homo sapien
tccaacagcaatgtgtgaatgatcg

SEQ ID NO: 4240392 - DNA, 25 bp, Homo sapien
tgctaaaccgctttccagagtagct

SEQ ID NO: 4240393 - DNA, 25 bp, Homo sapien
tcattgtcatcgatgtgtagccaca

SEQ ID NO: 4240394 - DNA, 25 bp, Homo sapien
caaactgtagctaacgaggagaagc

SEQ ID NO: 4240395 - DNA, 25 bp, Homo sapien
catctgaagaagcagtggactcttg

SEQ ID NO: 4240396 - DNA, 25 bp, Homo sapien
tggactcttgtggaataaaccctga

SEQ ID NO: 4240397 - DNA, 25 bp, Homo sapien
tgtagggcacgtgacagactctggt

SEQ ID NO: 4240398 - DNA, 25 bp, Homo sapien
aagaggcggcctcaggtctaggctc

SEQ ID NO: 4240399 - DNA, 25 bp, Homo sapien
gagagtttggaagccgacttctgtc

SEQ ID NO: 4240400 - DNA, 25 bp, Homo sapien
ggaaaagctttccacgttgacagac

SEQ ID NO: 4240401 - DNA, 25 bp, Homo sapien
tttcaaataggctgcgagggttttc

SEQ ID NO: 4240402 - DNA, 25 bp, Homo sapien
tcagcggccgcccttttaagcgaag

SEQ ID NO: 4240403 - DNA, 25 bp, Homo sapien
gccacctgtggagtccgagtgttaa

SEQ ID NO: 4240404 - DNA, 25 bp, Homo sapien
tctctgccgcggagttggaaacggc

SEQ ID NO: 4240405 - DNA, 25 bp, Homo sapien
tttagttcggaactgcgggacgcgc

SEQ ID NO: 4240406 - DNA, 25 bp, Homo sapien
accgtcagagtttgggtaacacctg

SEQ ID NO: 4240407 - DNA, 25 bp, Homo sapien
gcgcgactccgggtgagttcttaaa

SEQ ID NO: 4240408 - DNA, 25 bp, Homo sapien
agtttgggtaacacctgcgatgctg

SEQ ID NO: 4240409 - DNA, 25 bp, Homo sapien
gccgagggcggctcagcttcggagg

SEQ ID NO: 4240410 - DNA, 25 bp, Homo sapien
tggtctcagaggtcacgtggttcaa

SEQ ID NO: 4240411 - DNA, 25 bp, Homo sapien
gatagaccagtttacacgggaggca

SEQ ID NO: 4240412 - DNA, 25 bp, Homo sapien
cctatcatggagatggtcaactgtc

SEQ ID NO: 4240413 - DNA, 25 bp, Homo sapien
taggctctcatggaggtctgaccaa

SEQ ID NO: 4240414 - DNA, 25 bp, Homo sapien
tgtcctggcagctccagtgatgagg

SEQ ID NO: 4240415 - DNA, 25 bp, Homo sapien
tattgccaaaaataggtattggctt

SEQ ID NO: 4240416 - DNA, 25 bp, Homo sapien
ccgggcttttacaaatgcttgataa

SEQ ID NO: 4240417 - DNA, 25 bp, Homo sapien
tgccaaaaataggtattggcttagg

SEQ ID NO: 4240418 - DNA, 25 bp, Homo sapien
cgaggaacttaacgtcaagacaatc

SEQ ID NO: 4240419 - DNA, 25 bp, Homo sapien
gtcaagacaatcagctcccgtgcca

SEQ ID NO: 4240420 - DNA, 25 bp, Homo sapien
cgtgccatccgaacagctctccgag

SEQ ID NO: 4240421 - DNA, 25 bp, Homo sapien
atccgaacagctctccgagcaccgg

SEQ ID NO: 4240422 - DNA, 25 bp, Homo sapien
tccacactcttaacttgatccgcca

SEQ ID NO: 4240423 - DNA, 25 bp, Homo sapien
ccccatgccagtccactcagtgaca

SEQ ID NO: 4240424 - DNA, 25 bp, Homo sapien
actcagtgacacatggtcctaatgg

SEQ ID NO: 4240425 - DNA, 25 bp, Homo sapien
tcctaatggcacatgcaccacggac

SEQ ID NO: 4240426 - DNA, 25 bp, Homo sapien
aagcacagtccatgggtacagaatt

SEQ ID NO: 4240427 - DNA, 25 bp, Homo sapien
caaacacatcctgggttggagagga

SEQ ID NO: 4240428 - DNA, 25 bp, Homo sapien
tggcccgaagccgtgaagctctgcc

SEQ ID NO: 4240429 - DNA, 25 bp, Homo sapien
agtagcaggcaccagtttctttcca

SEQ ID NO: 4240430 - DNA, 25 bp, Homo sapien
cctcgctacccgtcagagtgatgta

SEQ ID NO: 4240431 - DNA, 25 bp, Homo sapien
cactgttaccagttcctcagatccg

SEQ ID NO: 4240432 - DNA, 25 bp, Homo sapien
tagcgggaccggcttctcaggttct

SEQ ID NO: 4240433 - DNA, 25 bp, Homo sapien
tgtggttggcaatttctcagtcgcc

SEQ ID NO: 4240434 - DNA, 25 bp, Homo sapien
ttactcaggaatgcttcaaagaccc

SEQ ID NO: 4240435 - DNA, 25 bp, Homo sapien
tgtctattcctagtgggcaaagttg

SEQ ID NO: 4240436 - DNA, 25 bp, Homo sapien
tatggatttcccgacatcttcattg

SEQ ID NO: 4240437 - DNA, 25 bp, Homo sapien
tgaatgctgtctattcctagtgggc

SEQ ID NO: 4240438 - DNA, 25 bp, Homo sapien
ggcaaagttgtatggatttcccgac

SEQ ID NO: 4240439 - DNA, 25 bp, Homo sapien
ttttccatcagacatccctgttttc

SEQ ID NO: 4240440 - DNA, 25 bp, Homo sapien
attttccatcagacatccctgtttt

SEQ ID NO: 4240441 - DNA, 25 bp, Homo sapien
tttccatcagacatccctgttttcc

SEQ ID NO: 4240442 - DNA, 25 bp, Homo sapien
atcgtttatccatgtagatatttgc

SEQ ID NO: 4240443 - DNA, 25 bp, Homo sapien
tttcagctgctaaatatcgtttatc

SEQ ID NO: 4240444 - DNA, 25 bp, Homo sapien
gctgctaaatatcgtttatccatgt

SEQ ID NO: 4240445 - DNA, 25 bp, Homo sapien
gctaaatatcgtttatccatgtaga

SEQ ID NO: 4240446 - DNA, 25 bp, Homo sapien
tcttctctagcacacttcaagagaa

SEQ ID NO: 4240447 - DNA, 25 bp, Homo sapien
tagcacacttcaagagaagggagcc

SEQ ID NO: 4240448 - DNA, 25 bp, Homo sapien
cttcatccagagcaaccctgggttg

SEQ ID NO: 4240449 - DNA, 25 bp, Homo sapien
tccagagcaaccctgggttgccaga

SEQ ID NO: 4240450 - DNA, 25 bp, Homo sapien
ctaaatgaaggggttaattgccagg

SEQ ID NO: 4240451 - DNA, 25 bp, Homo sapien
tgaaggggttaattgccaggttgaa

SEQ ID NO: 4240452 - DNA, 25 bp, Homo sapien
atgaaggggttaattgccaggttga

SEQ ID NO: 4240453 - DNA, 25 bp, Homo sapien
aatgaaggggttaattgccaggttg

SEQ ID NO: 4240454 - DNA, 25 bp, Homo sapien
ctttgttcagaatcagggtgttggc

SEQ ID NO: 4240455 - DNA, 25 bp, Homo sapien
ttcagaatcagggtgttggcctttg

SEQ ID NO: 4240456 - DNA, 25 bp, Homo sapien
gcctttgccccaatgacctgtgtgg

SEQ ID NO: 4240457 - DNA, 25 bp, Homo sapien
tggcctttgccccaatgacctgtgt

SEQ ID NO: 4240458 - DNA, 25 bp, Homo sapien
tgagaggggtctggttcaagggtgc

SEQ ID NO: 4240459 - DNA, 25 bp, Homo sapien
ggtctggttcaagggtgcaagggca

SEQ ID NO: 4240460 - DNA, 25 bp, Homo sapien
tcaagggtgcaagggcagtcctgca

SEQ ID NO: 4240461 - DNA, 25 bp, Homo sapien
caggttcctgagaggggtctggttc

SEQ ID NO: 4240462 - DNA, 25 bp, Homo sapien
tagacacttgtctgggcctttttct

SEQ ID NO: 4240463 - DNA, 25 bp, Homo sapien
gaaattcagtagacacttgtctggg

SEQ ID NO: 4240464 - DNA, 25 bp, Homo sapien
aaaacaaggaaattcagtagacact

SEQ ID NO: 4240465 - DNA, 25 bp, Homo sapien
tcagtagacacttgtctgggccttt

SEQ ID NO: 4240466 - DNA, 25 bp, Homo sapien
ttctgctttgtacagacccacttcc

SEQ ID NO: 4240467 - DNA, 25 bp, Homo sapien
tgagcctcacgcaagggtgctgact

SEQ ID NO: 4240468 - DNA, 25 bp, Homo sapien
cagctgtttggccaattaaagaaga

SEQ ID NO: 4240469 - DNA, 25 bp, Homo sapien
aggtgaccctggaccgtattcccag

SEQ ID NO: 4240470 - DNA, 25 bp, Homo sapien
agagctgcgtctcttggggcttcca

SEQ ID NO: 4240471 - DNA, 25 bp, Homo sapien
caaagtatattgtgcttccaaagct

SEQ ID NO: 4240472 - DNA, 25 bp, Homo sapien
tggtgtcttcggagctgtgtctagc

SEQ ID NO: 4240473 - DNA, 25 bp, Homo sapien
tcctgtggtgtcttcggagctgtgt

SEQ ID NO: 4240474 - DNA, 25 bp, Homo sapien
gagtccctggataactgctaatgcc

SEQ ID NO: 4240475 - DNA, 25 bp, Homo sapien
gagtccaaaagtcaaagtccagtgt

SEQ ID NO: 4240476 - DNA, 25 bp, Homo sapien
tgtgaagacgccaagcaagccattg

SEQ ID NO: 4240477 - DNA, 25 bp, Homo sapien
gtagatacccgctgggagtccctgg

SEQ ID NO: 4240478 - DNA, 25 bp, Homo sapien
tccttcttaatgttgtgtgccgaaa

SEQ ID NO: 4240479 - DNA, 25 bp, Homo sapien
gtgtgcacggtatgtgtctgcaagc

SEQ ID NO: 4240480 - DNA, 25 bp, Homo sapien
gtatgtgtctgcaagccttttacat

SEQ ID NO: 4240481 - DNA, 25 bp, Homo sapien
gccgaaatttggtgtgcacggtatg

SEQ ID NO: 4240482 - DNA, 25 bp, Homo sapien
tgtagttctgcatcggaagcagaga

SEQ ID NO: 4240483 - DNA, 25 bp, Homo sapien
gcatctcctgtagttctgcatcgga

SEQ ID NO: 4240484 - DNA, 25 bp, Homo sapien
cagagagggcatacacggactccct

SEQ ID NO: 4240485 - DNA, 25 bp, Homo sapien
gccattgtgaaatatggcatctcct

SEQ ID NO: 4240486 - DNA, 25 bp, Homo sapien
gtgacagctaccaccagcaggtact

SEQ ID NO: 4240487 - DNA, 25 bp, Homo sapien
acgtcccgtactgcgccaagaccat

SEQ ID NO: 4240488 - DNA, 25 bp, Homo sapien
agcaggtacttcacacacgtcccgt

SEQ ID NO: 4240489 - DNA, 25 bp, Homo sapien
atgccaacagtgacagctaccacca

SEQ ID NO: 4240490 - DNA, 25 bp, Homo sapien
aatccaagccagatggggtctcctc

SEQ ID NO: 4240491 - DNA, 25 bp, Homo sapien
agggcgtagccagtctgatcaggac

SEQ ID NO: 4240492 - DNA, 25 bp, Homo sapien
aaggagggcgtagccagtctgatca

SEQ ID NO: 4240493 - DNA, 25 bp, Homo sapien
tcagctaaggagggcgtagccagtc

SEQ ID NO: 4240494 - DNA, 25 bp, Homo sapien
gctaaggagggcgtagccagtctga

SEQ ID NO: 4240495 - DNA, 25 bp, Homo sapien
cagaagcctgcaatgtgggaggcag

SEQ ID NO: 4240496 - DNA, 25 bp, Homo sapien
tcagaagcctgcaatgtgggaggca

SEQ ID NO: 4240497 - DNA, 25 bp, Homo sapien
gaagcctgcaatgtgggaggcagtg

SEQ ID NO: 4240498 - DNA, 25 bp, Homo sapien
agaagcctgcaatgtgggaggcagt

SEQ ID NO: 4240499 - DNA, 25 bp, Homo sapien
tggtcgctgagggtgagtgacgcag

SEQ ID NO: 4240500 - DNA, 25 bp, Homo sapien
tgtgcggatcgcgccgccgttcatg

SEQ ID NO: 4240501 - DNA, 25 bp, Homo sapien
cggtcgtctcctcgcctgtgcggat

SEQ ID NO: 4240502 - DNA, 25 bp, Homo sapien
tgacgcagccgtgcgtccggctgtc

SEQ ID NO: 4240503 - DNA, 25 bp, Homo sapien
gagttttgctattacaggtcgagta

SEQ ID NO: 4240504 - DNA, 25 bp, Homo sapien
gctccaaggcagcttaaatgcaggt

SEQ ID NO: 4240505 - DNA, 25 bp, Homo sapien
ctcaaccggtattaacaaagcctgg

SEQ ID NO: 4240506 - DNA, 25 bp, Homo sapien
aagtgaagtcttcccaatctcttgc

SEQ ID NO: 4240507 - DNA, 25 bp, Homo sapien
gccagcccctgaaggatacatactg

SEQ ID NO: 4240508 - DNA, 25 bp, Homo sapien
ggagcactacctagcaataacaagg

SEQ ID NO: 4240509 - DNA, 25 bp, Homo sapien
ttaagcaaattgtcatacccctgtg

SEQ ID NO: 4240510 - DNA, 25 bp, Homo sapien
tattgtatccgtgtcagtatcctgg

SEQ ID NO: 4240511 - DNA, 25 bp, Homo sapien
cgtgtagaagcgtccgggtggcgga

SEQ ID NO: 4240512 - DNA, 25 bp, Homo sapien
gcaggccgcaggagtgctggtggag

SEQ ID NO: 4240513 - DNA, 25 bp, Homo sapien
ccagcgcgcgcttcgcgtgtagaag

SEQ ID NO: 4240514 - DNA, 25 bp, Homo sapien
gagagcctcggcgagccctctgcag

SEQ ID NO: 4240515 - DNA, 25 bp, Homo sapien
cacaattgagattaattatgggaga

SEQ ID NO: 4240516 - DNA, 25 bp, Homo sapien
gtcacccagggacgcctttcgctgg

SEQ ID NO: 4240517 - DNA, 25 bp, Homo sapien
ccagggacgcctttcgctggaaaga

SEQ ID NO: 4240518 - DNA, 25 bp, Homo sapien
ttgcagggggtcaactccccagacg

SEQ ID NO: 4240519 - DNA, 25 bp, Homo sapien
ccataaaaccaataaggtgctctaa

SEQ ID NO: 4240520 - DNA, 25 bp, Homo sapien
gcacaaagactgtattacttccatt

SEQ ID NO: 4240521 - DNA, 25 bp, Homo sapien
tttgccagcttgcaagaaaaaccca

SEQ ID NO: 4240522 - DNA, 25 bp, Homo sapien
acttttactccagtactttagccat

SEQ ID NO: 4240523 - DNA, 25 bp, Homo sapien
gcacctgtaacactgcctcaagcgg

SEQ ID NO: 4240524 - DNA, 25 bp, Homo sapien
ctgtaacactgcctcaagcggtcct

SEQ ID NO: 4240525 - DNA, 25 bp, Homo sapien
tagagagacatgagaagcaatcaac

SEQ ID NO: 4240526 - DNA, 25 bp, Homo sapien
ctgcctcaagcggtcctgacgacat

SEQ ID NO: 4240527 - DNA, 25 bp, Homo sapien
ctggaggagataagctccccagcct

SEQ ID NO: 4240528 - DNA, 25 bp, Homo sapien
cacagccattccccagtctcttctc

SEQ ID NO: 4240529 - DNA, 25 bp, Homo sapien
gccattccccagtctcttctcttca

SEQ ID NO: 4240530 - DNA, 25 bp, Homo sapien
tggaggagataagctccccagcctc

SEQ ID NO: 4240531 - DNA, 25 bp, Homo sapien
tttgccctgaatgcgcggcatgcca

SEQ ID NO: 4240532 - DNA, 25 bp, Homo sapien
aggagctgagtgacgtcctggccac

SEQ ID NO: 4240533 - DNA, 25 bp, Homo sapien
tggccacaatgaggaaagcagctgc

SEQ ID NO: 4240534 - DNA, 25 bp, Homo sapien
agaggtgcgtggctttgccctgaat

SEQ ID NO: 4240535 - DNA, 25 bp, Homo sapien
caggggagcagttggcgtcttttct

SEQ ID NO: 4240536 - DNA, 25 bp, Homo sapien
ggggagcagttggcgtcttttctcc

SEQ ID NO: 4240537 - DNA, 25 bp, Homo sapien
gggagcagttggcgtcttttctcca

SEQ ID NO: 4240538 - DNA, 25 bp, Homo sapien
agcgtggagatgccctttgagcaca

SEQ ID NO: 4240539 - DNA, 25 bp, Homo sapien
tagaatggatttagcagcgtggaga

SEQ ID NO: 4240540 - DNA, 25 bp, Homo sapien
ttttggtgtagaatggatttagcag

SEQ ID NO: 4240541 - DNA, 25 bp, Homo sapien
tggtgtagaatggatttagcagcgt

SEQ ID NO: 4240542 - DNA, 25 bp, Homo sapien
tcactgttctgtggtccgggcgatg

SEQ ID NO: 4240543 - DNA, 25 bp, Homo sapien
cactgcccgtctgagagagggcacg

SEQ ID NO: 4240544 - DNA, 25 bp, Homo sapien
gggcacgcaggtacttagccacggt

SEQ ID NO: 4240545 - DNA, 25 bp, Homo sapien
tacacgtggcttccgcagtgccttt

SEQ ID NO: 4240546 - DNA, 25 bp, Homo sapien
ggccagagtttagtggtgcacaatc

SEQ ID NO: 4240547 - DNA, 25 bp, Homo sapien
gtagtcactccattgtcctatcaaa

SEQ ID NO: 4240548 - DNA, 25 bp, Homo sapien
ggagtatccgtcagctcaagcactg

SEQ ID NO: 4240549 - DNA, 25 bp, Homo sapien
atctccacgggctcaattgttttga

SEQ ID NO: 4240550 - DNA, 25 bp, Homo sapien
tccagtgggtattcctaaaatcatg

SEQ ID NO: 4240551 - DNA, 25 bp, Homo sapien
tcctgtcagccagatcgtgagcatc

SEQ ID NO: 4240552 - DNA, 25 bp, Homo sapien
tacctcagggtacagcctggtctta

SEQ ID NO: 4240553 - DNA, 25 bp, Homo sapien
cgtgagcatcgtacacaagcaattt

SEQ ID NO: 4240554 - DNA, 25 bp, Homo sapien
tcataggacatgaggattctcaacc

SEQ ID NO: 4240555 - DNA, 25 bp, Homo sapien
tgtgagagaccagacgaaacctgag

SEQ ID NO: 4240556 - DNA, 25 bp, Homo sapien
caagacccatctgcctaggaataaa

SEQ ID NO: 4240557 - DNA, 25 bp, Homo sapien
ggaataaaccatcccagctgtgaga

SEQ ID NO: 4240558 - DNA, 25 bp, Homo sapien
taccaagctgtttcctaccaggtca

SEQ ID NO: 4240559 - DNA, 25 bp, Homo sapien
tccgaggcagagtttgatacagcat

SEQ ID NO: 4240560 - DNA, 25 bp, Homo sapien
catgtttggcatagtggaacctgtg

SEQ ID NO: 4240561 - DNA, 25 bp, Homo sapien
gatttctgctcagtatccagtagtg

SEQ ID NO: 4240562 - DNA, 25 bp, Homo sapien
ggatggcgtgatgatttgttcaaga

SEQ ID NO: 4240563 - DNA, 25 bp, Homo sapien
taattggcacaaaagactagttttg

SEQ ID NO: 4240564 - DNA, 25 bp, Homo sapien
cagatgagatttagatgcagagggt

SEQ ID NO: 4240565 - DNA, 25 bp, Homo sapien
ttcaagattgtgttatagtagctgc

SEQ ID NO: 4240566 - DNA, 25 bp, Homo sapien
tcagggtaagctagcagaaaggcgt

SEQ ID NO: 4240567 - DNA, 25 bp, Homo sapien
agggtaagctagcagaaaggcgtat

SEQ ID NO: 4240568 - DNA, 25 bp, Homo sapien
cagggtaagctagcagaaaggcgta

SEQ ID NO: 4240569 - DNA, 25 bp, Homo sapien
atcagggtaagctagcagaaaggcg

SEQ ID NO: 4240570 - DNA, 25 bp, Homo sapien
tgtgagagacggagaaaggtatgac

SEQ ID NO: 4240571 - DNA, 25 bp, Homo sapien
ggaacagcacggcgcactgggagct

SEQ ID NO: 4240572 - DNA, 25 bp, Homo sapien
gagagacggagaaaggtatgacagg

SEQ ID NO: 4240573 - DNA, 25 bp, Homo sapien
ccaagaagacgggaacagcacggcg

SEQ ID NO: 4240574 - DNA, 25 bp, Homo sapien
tgccaccatgctattgaatgcatct

SEQ ID NO: 4240575 - DNA, 25 bp, Homo sapien
caccatgctattgaatgcatcttgt

SEQ ID NO: 4240576 - DNA, 25 bp, Homo sapien
atctgccaccatgctattgaatgca

SEQ ID NO: 4240577 - DNA, 25 bp, Homo sapien
gcatcttgtttataactgtcttcta

SEQ ID NO: 4240578 - DNA, 25 bp, Homo sapien
tcatttcttggagaagcgatggatg

SEQ ID NO: 4240579 - DNA, 25 bp, Homo sapien
gacagagattaatctgagagttact

SEQ ID NO: 4240580 - DNA, 25 bp, Homo sapien
gagattaatctgagagttactatta

SEQ ID NO: 4240581 - DNA, 25 bp, Homo sapien
tttcttggagaagcgatggatgaca

SEQ ID NO: 4240582 - DNA, 25 bp, Homo sapien
aaggaactgatccaggacaggacag

SEQ ID NO: 4240583 - DNA, 25 bp, Homo sapien
caaaggaactgatccaggacaggac

SEQ ID NO: 4240584 - DNA, 25 bp, Homo sapien
ctacatgacaaaggaactgatccag

SEQ ID NO: 4240585 - DNA, 25 bp, Homo sapien
ggaactgatccaggacaggacagac

SEQ ID NO: 4240586 - DNA, 25 bp, Homo sapien
gttcctgtatagtttctccttggat

SEQ ID NO: 4240587 - DNA, 25 bp, Homo sapien
tctccttggatctgttaacaattca

SEQ ID NO: 4240588 - DNA, 25 bp, Homo sapien
ctgaagaaggataaacacagctaac

SEQ ID NO: 4240589 - DNA, 25 bp, Homo sapien
attcattcgatttaaactattggaa

SEQ ID NO: 4240590 - DNA, 25 bp, Homo sapien
tttctccgacttcgcctttttgtca

SEQ ID NO: 4240591 - DNA, 25 bp, Homo sapien
ctttatcgtgagatgaaggtgatgc

SEQ ID NO: 4240592 - DNA, 25 bp, Homo sapien
ttctttgtctttatcgtgagatgaa

SEQ ID NO: 4240593 - DNA, 25 bp, Homo sapien
ttgtctttatcgtgagatgaaggtg

SEQ ID NO: 4240594 - DNA, 25 bp, Homo sapien
tctttgtctttatcgtgagatgaag

SEQ ID NO: 4240595 - DNA, 25 bp, Homo sapien
tcatcttcttctgaacgcgctgccg

SEQ ID NO: 4240596 - DNA, 25 bp, Homo sapien
ttcatcttcttctgaacgcgctgcc

SEQ ID NO: 4240597 - DNA, 25 bp, Homo sapien
atcttcttctgaacgcgctgccggg

SEQ ID NO: 4240598 - DNA, 25 bp, Homo sapien
tcttcatcttcttctgaacgcgctg

SEQ ID NO: 4240599 - DNA, 25 bp, Homo sapien
atgttctgtagttcaaatcacatcc

SEQ ID NO: 4240600 - DNA, 25 bp, Homo sapien
ctgatgttctgtagttcaaatcaca

SEQ ID NO: 4240601 - DNA, 25 bp, Homo sapien
tgttctgtagttcaaatcacatccc

SEQ ID NO: 4240602 - DNA, 25 bp, Homo sapien
gatgttctgtagttcaaatcacatc

SEQ ID NO: 4240603 - DNA, 25 bp, Homo sapien
attttatattcaaaatacctccaca

SEQ ID NO: 4240604 - DNA, 25 bp, Homo sapien
tattcaaaatacctccacagttaag

SEQ ID NO: 4240605 - DNA, 25 bp, Homo sapien
tttatattcaaaatacctccacagt

SEQ ID NO: 4240606 - DNA, 25 bp, Homo sapien
tatattcaaaatacctccacagtta

SEQ ID NO: 4240607 - DNA, 25 bp, Homo sapien
ttctgtttcacggcagtcagaagaa

SEQ ID NO: 4240608 - DNA, 25 bp, Homo sapien
cttctgtttcacggcagtcagaaga

SEQ ID NO: 4240609 - DNA, 25 bp, Homo sapien
tctgtttcacggcagtcagaagaac

SEQ ID NO: 4240610 - DNA, 25 bp, Homo sapien
tattttacaacctgctttacttgta

SEQ ID NO: 4240611 - DNA, 25 bp, Homo sapien
tatccataaagtactttattttaca

SEQ ID NO: 4240612 - DNA, 25 bp, Homo sapien
tgttgcaggttgagggccgttcatc

SEQ ID NO: 4240613 - DNA, 25 bp, Homo sapien
gccccggggtggagctgatattcca

SEQ ID NO: 4240614 - DNA, 25 bp, Homo sapien
cagggagctcatgttccagtttgca

SEQ ID NO: 4240615 - DNA, 25 bp, Homo sapien
tgagggtttcggagctgatgttcca

SEQ ID NO: 4240616 - DNA, 25 bp, Homo sapien
tgttcgttttgagggtgtttcagct

SEQ ID NO: 4240617 - DNA, 25 bp, Homo sapien
ttgcagctgcagacctgtagaggaa

SEQ ID NO: 4240618 - DNA, 25 bp, Homo sapien
gacgttctagattgagggtcttgca

SEQ ID NO: 4240619 - DNA, 25 bp, Homo sapien
gactcagggaggagctgacgttcta

SEQ ID NO: 4240620 - DNA, 25 bp, Homo sapien
ggaggagctgttcgtgtatttttag

SEQ ID NO: 4240621 - DNA, 25 bp, Homo sapien
gggaggagctgttcgtgtattttta

SEQ ID NO: 4240622 - DNA, 25 bp, Homo sapien
gagctgttcgtgtatttttagggtc

SEQ ID NO: 4240623 - DNA, 25 bp, Homo sapien
ggaaatctgtacaggagctgatgtt

SEQ ID NO: 4240624 - DNA, 25 bp, Homo sapien
gacccggagagtatctgatcttcga

SEQ ID NO: 4240625 - DNA, 25 bp, Homo sapien
gtatctgatcttcgagattgagggt

SEQ ID NO: 4240626 - DNA, 25 bp, Homo sapien
tgagggccctacagttggaaatctg

SEQ ID NO: 4240627 - DNA, 25 bp, Homo sapien
ctagtttgagggtcgtgcagcagaa

SEQ ID NO: 4240628 - DNA, 25 bp, Homo sapien
tcgggaggagctgagattctagttt

SEQ ID NO: 4240629 - DNA, 25 bp, Homo sapien
agtttgagggtcgtgcagcagaaga

SEQ ID NO: 4240630 - DNA, 25 bp, Homo sapien
attctagtttgagggtcgtgcagca

SEQ ID NO: 4240631 - DNA, 25 bp, Homo sapien
agtttgagggtcgtgcagctgaaga

SEQ ID NO: 4240632 - DNA, 25 bp, Homo sapien
gtttgagggtcgtgcagctgaagac

SEQ ID NO: 4240633 - DNA, 25 bp, Homo sapien
aggagctgaggttctagtttgaggg

SEQ ID NO: 4240634 - DNA, 25 bp, Homo sapien
agggaggagctgaggttctagtttg

SEQ ID NO: 4240635 - DNA, 25 bp, Homo sapien
tctagattaagggtcatgcagctga

SEQ ID NO: 4240636 - DNA, 25 bp, Homo sapien
agctgatgttgtagtttgatggtct

SEQ ID NO: 4240637 - DNA, 25 bp, Homo sapien
tgcagatgaagactcggggaggaac

SEQ ID NO: 4240638 - DNA, 25 bp, Homo sapien
tttgatggtcttgcagctgcaaacc

SEQ ID NO: 4240639 - DNA, 25 bp, Homo sapien
tagattgagggtcgtgcagctgcac

SEQ ID NO: 4240640 - DNA, 25 bp, Homo sapien
tctagattgatggtcttgcagctgc

SEQ ID NO: 4240641 - DNA, 25 bp, Homo sapien
agattgatggtcttgcagctgcaga

SEQ ID NO: 4240642 - DNA, 25 bp, Homo sapien
gatgttctagattgatggtcttgca

SEQ ID NO: 4240643 - DNA, 25 bp, Homo sapien
gctgatgttctagttagtggatctt

SEQ ID NO: 4240644 - DNA, 25 bp, Homo sapien
tgatgttgttcgtgttgagggtctt

SEQ ID NO: 4240645 - DNA, 25 bp, Homo sapien
gataatcttgattaagggtcatgga

SEQ ID NO: 4240646 - DNA, 25 bp, Homo sapien
tcgagggtcatgcagttgaggactt

SEQ ID NO: 4240647 - DNA, 25 bp, Homo sapien
gttctaattttaggttcttgcagct

SEQ ID NO: 4240648 - DNA, 25 bp, Homo sapien
gcagctgcagacctggagaggagct

SEQ ID NO: 4240649 - DNA, 25 bp, Homo sapien
tgcagctgcagacctggagaggagc

SEQ ID NO: 4240650 - DNA, 25 bp, Homo sapien
ctaattttaggttcttgcagctgca

SEQ ID NO: 4240651 - DNA, 25 bp, Homo sapien
aggagctgacaatcttgactgaggt

SEQ ID NO: 4240652 - DNA, 25 bp, Homo sapien
gacaatcttgactgaggttcatgga

SEQ ID NO: 4240653 - DNA, 25 bp, Homo sapien
catgcagttgaggacttcgggagga

SEQ ID NO: 4240654 - DNA, 25 bp, Homo sapien
gatgttctagctagtggatcttcca

SEQ ID NO: 4240655 - DNA, 25 bp, Homo sapien
ctgatgttctagattgagagtcctg

SEQ ID NO: 4240656 - DNA, 25 bp, Homo sapien
ctagactgagggtcgtgcagctgca

SEQ ID NO: 4240657 - DNA, 25 bp, Homo sapien
tgatgttctagactgagggtcgtgc

SEQ ID NO: 4240658 - DNA, 25 bp, Homo sapien
atgttctagattgagagtcctgcag

SEQ ID NO: 4240659 - DNA, 25 bp, Homo sapien
aggagctttagttgttcgcgttgag

SEQ ID NO: 4240660 - DNA, 25 bp, Homo sapien
tggagacctggacagaagttgatgt

SEQ ID NO: 4240661 - DNA, 25 bp, Homo sapien
tctagatttagggtcacggaactgg

SEQ ID NO: 4240662 - DNA, 25 bp, Homo sapien
cctggacagaagttgatgttctagt

SEQ ID NO: 4240663 - DNA, 25 bp, Homo sapien
tgcagctgcagacctgtagaggagc

SEQ ID NO: 4240664 - DNA, 25 bp, Homo sapien
gtcgtgcagctgcagacctgtagag

SEQ ID NO: 4240665 - DNA, 25 bp, Homo sapien
gcagctgcagacctgtagaggagct

SEQ ID NO: 4240666 - DNA, 25 bp, Homo sapien
cgtgcagctgcagacctgtagagga

SEQ ID NO: 4240667 - DNA, 25 bp, Homo sapien
cagacctggagaggagctgatgttc

SEQ ID NO: 4240668 - DNA, 25 bp, Homo sapien
gctgcagacctggagaggagctgat

SEQ ID NO: 4240669 - DNA, 25 bp, Homo sapien
cttgcagctgcagacctggagagga

SEQ ID NO: 4240670 - DNA, 25 bp, Homo sapien
tgcagacctggagaggagctgatgt

SEQ ID NO: 4240671 - DNA, 25 bp, Homo sapien
ggaggagctgatgttctagtttgag

SEQ ID NO: 4240672 - DNA, 25 bp, Homo sapien
gaggagctgatgttctagtttgagg

SEQ ID NO: 4240673 - DNA, 25 bp, Homo sapien
agagaaggtaatgttctagttttag

SEQ ID NO: 4240674 - DNA, 25 bp, Homo sapien
gagagaaggtaatgttctagtttta

SEQ ID NO: 4240675 - DNA, 25 bp, Homo sapien
agaggagctgatgttctagtttgag

SEQ ID NO: 4240676 - DNA, 25 bp, Homo sapien
agtttgagggtcatgcagctgaaga

SEQ ID NO: 4240677 - DNA, 25 bp, Homo sapien
gctgcagacctggagaggagctgat

SEQ ID NO: 4240678 - DNA, 25 bp, Homo sapien
agattgagggtcgtgcagctgcaga

SEQ ID NO: 4240679 - DNA, 25 bp, Homo sapien
cagacccggggaggagctgatgttc

SEQ ID NO: 4240680 - DNA, 25 bp, Homo sapien
gacccggggaggagctgatgttcta

SEQ ID NO: 4240681 - DNA, 25 bp, Homo sapien
agacccggggaggagctgatgttct

SEQ ID NO: 4240682 - DNA, 25 bp, Homo sapien
gcagacccggggaggagctgatgtt

SEQ ID NO: 4240683 - DNA, 25 bp, Homo sapien
gagctgatgttctagtttgagggtc

SEQ ID NO: 4240684 - DNA, 25 bp, Homo sapien
tgcagacccggggaggagctgatgt

SEQ ID NO: 4240685 - DNA, 25 bp, Homo sapien
ggaggagctgatgttctagtttgag

SEQ ID NO: 4240686 - DNA, 25 bp, Homo sapien
gaggagctgatgttctagtttgagg

SEQ ID NO: 4240687 - DNA, 25 bp, Homo sapien
gagaggagctgatgttctagattga

SEQ ID NO: 4240688 - DNA, 25 bp, Homo sapien
ctagattgagggtcgtgcagctgca

SEQ ID NO: 4240689 - DNA, 25 bp, Homo sapien
gatgttctagattgagggtcgtgca

SEQ ID NO: 4240690 - DNA, 25 bp, Homo sapien
agaggagctgatgttctagattgag

SEQ ID NO: 4240691 - DNA, 25 bp, Homo sapien
tctagattgagggtcttgcagctgc

SEQ ID NO: 4240692 - DNA, 25 bp, Homo sapien
ggtcgtgcagctgcagacccggaga

SEQ ID NO: 4240693 - DNA, 25 bp, Homo sapien
tctagattgagggtcgtgcagctgc

SEQ ID NO: 4240694 - DNA, 25 bp, Homo sapien
cagacccggagaggagctgatgttc

SEQ ID NO: 4240695 - DNA, 25 bp, Homo sapien
agaggagctgatgttctagtttgag

SEQ ID NO: 4240696 - DNA, 25 bp, Homo sapien
ctgcagacctggagaggagctgatg

SEQ ID NO: 4240697 - DNA, 25 bp, Homo sapien
agtttgagggtcatgcagctgaaga

SEQ ID NO: 4240698 - DNA, 25 bp, Homo sapien
tctagtttgagggtcatgcagctga

SEQ ID NO: 4240699 - DNA, 25 bp, Homo sapien
atgttctagattgagggtcgtgcag

SEQ ID NO: 4240700 - DNA, 25 bp, Homo sapien
gctgatgttctagattgagggtcgt

SEQ ID NO: 4240701 - DNA, 25 bp, Homo sapien
gaggagctgatgttctagattgagg

SEQ ID NO: 4240702 - DNA, 25 bp, Homo sapien
tgatgttctagattgagggtcgtgc

SEQ ID NO: 4240703 - DNA, 25 bp, Homo sapien
gctgcagacctggagaggagctgat

SEQ ID NO: 4240704 - DNA, 25 bp, Homo sapien
gctgatgttctagattgagggtcgt

SEQ ID NO: 4240705 - DNA, 25 bp, Homo sapien
agctgatgttctagtttgagggtcg

SEQ ID NO: 4240706 - DNA, 25 bp, Homo sapien
ctagattgagggtcgtgcagctgca

SEQ ID NO: 4240707 - DNA, 25 bp, Homo sapien
tctagattgagggtcgtgcagctgc

SEQ ID NO: 4240708 - DNA, 25 bp, Homo sapien
gtcatgcagctgcagacccggagag

SEQ ID NO: 4240709 - DNA, 25 bp, Homo sapien
cagacccggagaggagctgatgttc

SEQ ID NO: 4240710 - DNA, 25 bp, Homo sapien
tctagattgagggtcatgcagctga

SEQ ID NO: 4240711 - DNA, 25 bp, Homo sapien
gttctagattgagggtcatgcagct

SEQ ID NO: 4240712 - DNA, 25 bp, Homo sapien
agaggagctgatgttctagattgag

SEQ ID NO: 4240713 - DNA, 25 bp, Homo sapien
ctagattgagggtcgtgcagctgca

SEQ ID NO: 4240714 - DNA, 25 bp, Homo sapien
tgatgttctagattgagggtcatgc

SEQ ID NO: 4240715 - DNA, 25 bp, Homo sapien
tctagattgagggtcgtgcagctgc

SEQ ID NO: 4240716 - DNA, 25 bp, Homo sapien
tttgagggtcatgcagctgaagacc

SEQ ID NO: 4240717 - DNA, 25 bp, Homo sapien
ggtcatgcagctgcagacccggaga

SEQ ID NO: 4240718 - DNA, 25 bp, Homo sapien
cagacccggagaggagctgatgttc

SEQ ID NO: 4240719 - DNA, 25 bp, Homo sapien
tgttctagattgagggtcgtgcagc

SEQ ID NO: 4240720 - DNA, 25 bp, Homo sapien
tctagattgagggtcgtgcagctgc

SEQ ID NO: 4240721 - DNA, 25 bp, Homo sapien
tagattgagggtcgtgcagctgcag

SEQ ID NO: 4240722 - DNA, 25 bp, Homo sapien
ctagattgagggtcgtgcagctgca

SEQ ID NO: 4240723 - DNA, 25 bp, Homo sapien
gtgtcatgcagctgcagacctggag

SEQ ID NO: 4240724 - DNA, 25 bp, Homo sapien
atgttctagtttgagtgtcatgcag

SEQ ID NO: 4240725 - DNA, 25 bp, Homo sapien
ctaatgttctagtttgagtgtcatg

SEQ ID NO: 4240726 - DNA, 25 bp, Homo sapien
tgagtgtcatgcagctgcagacccg

SEQ ID NO: 4240727 - DNA, 25 bp, Homo sapien
ggctgttctgtgagactcgtggagc

SEQ ID NO: 4240728 - DNA, 25 bp, Homo sapien
gtggctgttctgtgagactcgtgga

SEQ ID NO: 4240729 - DNA, 25 bp, Homo sapien
tggctgttctgtgagactcgtggag

SEQ ID NO: 4240730 - DNA, 25 bp, Homo sapien
tgactgctgaatttcatgagaaggg

SEQ ID NO: 4240731 - DNA, 25 bp, Homo sapien
ggtgctaccgctgttcaaatctgag

SEQ ID NO: 4240732 - DNA, 25 bp, Homo sapien
attgttcagggagggacgtggggct

SEQ ID NO: 4240733 - DNA, 25 bp, Homo sapien
tattcatttacttccgctgcagatt

SEQ ID NO: 4240734 - DNA, 25 bp, Homo sapien
tggacataagtagattgcaaggcta

SEQ ID NO: 4240735 - DNA, 25 bp, Homo sapien
agattgcaaggctaatggaaagtag

SEQ ID NO: 4240736 - DNA, 25 bp, Homo sapien
caaggctaatggaaagtagaaaagt

SEQ ID NO: 4240737 - DNA, 25 bp, Homo sapien
ttggacataagtagattgcaaggct

SEQ ID NO: 4240738 - DNA, 25 bp, Homo sapien
agttttgtgtcctcgccgttactgg

SEQ ID NO: 4240739 - DNA, 25 bp, Homo sapien
tattgaggaaatgcatgcgaggtgc

SEQ ID NO: 4240740 - DNA, 25 bp, Homo sapien
tactactattcttggctaacaagcc

SEQ ID NO: 4240741 - DNA, 25 bp, Homo sapien
cgaggtgcttccgtgattcctggca

SEQ ID NO: 4240742 - DNA, 25 bp, Homo sapien
gaagaacacacttggacgtggctcc

SEQ ID NO: 4240743 - DNA, 25 bp, Homo sapien
tggtcgcttttccactgaatgaatg

SEQ ID NO: 4240744 - DNA, 25 bp, Homo sapien
tgaccgaaactgtagtaactcatgg

SEQ ID NO: 4240745 - DNA, 25 bp, Homo sapien
gagaaagatgattggcctcttaggg

SEQ ID NO: 4240746 - DNA, 25 bp, Homo sapien
atcttcacagacatgccgtccttga

SEQ ID NO: 4240747 - DNA, 25 bp, Homo sapien
catcttcacagacatgccgtccttg

SEQ ID NO: 4240748 - DNA, 25 bp, Homo sapien
acatgcacacagacgctccgtcctc

SEQ ID NO: 4240749 - DNA, 25 bp, Homo sapien
cacatgcacacagacgctccgtcct

SEQ ID NO: 4240750 - DNA, 25 bp, Homo sapien
tgttgaagaactgcccgttccgcac

SEQ ID NO: 4240751 - DNA, 25 bp, Homo sapien
ttccgcaccccgggccctagacaca

SEQ ID NO: 4240752 - DNA, 25 bp, Homo sapien
tgtgttgaagaactgcccgttccgc

SEQ ID NO: 4240753 - DNA, 25 bp, Homo sapien
caccccgggccctagacacacggct

SEQ ID NO: 4240754 - DNA, 25 bp, Homo sapien
caaaatgccctccacggagacaagg

SEQ ID NO: 4240755 - DNA, 25 bp, Homo sapien
ctgagaaccttcgggacgcccgctg

SEQ ID NO: 4240756 - DNA, 25 bp, Homo sapien
cagaggcatcaacgccctcctgcta

SEQ ID NO: 4240757 - DNA, 25 bp, Homo sapien
cagacgcatctgttctcgcctggct

SEQ ID NO: 4240758 - DNA, 25 bp, Homo sapien
cagcaaagcagacggtgggtcgctc

SEQ ID NO: 4240759 - DNA, 25 bp, Homo sapien
gcagacggtgggtcgctctgtatct

SEQ ID NO: 4240760 - DNA, 25 bp, Homo sapien
caaagcagacggtgggtcgctctgt

SEQ ID NO: 4240761 - DNA, 25 bp, Homo sapien
tcccagcaaagcagacggtgggtcg

SEQ ID NO: 4240762 - DNA, 25 bp, Homo sapien
tttctcaccccgaaaatcagagact

SEQ ID NO: 4240763 - DNA, 25 bp, Homo sapien
ttttctcaccccgaaaatcagagac

SEQ ID NO: 4240764 - DNA, 25 bp, Homo sapien
ttctcaccccgaaaatcagagactg

SEQ ID NO: 4240765 - DNA, 25 bp, Homo sapien
aggagccgctgtgcgcgttcaggca

SEQ ID NO: 4240766 - DNA, 25 bp, Homo sapien
tctgtcttccgtcacccatggaggc

SEQ ID NO: 4240767 - DNA, 25 bp, Homo sapien
tacgcgtccagctgttgatcgccca

SEQ ID NO: 4240768 - DNA, 25 bp, Homo sapien
cctgtagaagacctggtcagcccct

SEQ ID NO: 4240769 - DNA, 25 bp, Homo sapien
tctttgaagctcaggcaggtccctg

SEQ ID NO: 4240770 - DNA, 25 bp, Homo sapien
ccctgatgccatcctaaggtgagga

SEQ ID NO: 4240771 - DNA, 25 bp, Homo sapien
tagcgtgtccctgatgactctgtcc

SEQ ID NO: 4240772 - DNA, 25 bp, Homo sapien
gcttctgagtaaaagtacaacccga

SEQ ID NO: 4240773 - DNA, 25 bp, Homo sapien
tgacttgtctgacgtctgtgtgcag

SEQ ID NO: 4240774 - DNA, 25 bp, Homo sapien
gagaataggactacgtcatgggcat

SEQ ID NO: 4240775 - DNA, 25 bp, Homo sapien
tgacatgcgggtccttcagtgaagc

SEQ ID NO: 4240776 - DNA, 25 bp, Homo sapien
cagctgtgaatgtccctatgttgcc

SEQ ID NO: 4240777 - DNA, 25 bp, Homo sapien
aaccgaccagagagtgatgagggct

SEQ ID NO: 4240778 - DNA, 25 bp, Homo sapien
agagccttgcctccgaagctgggtg

SEQ ID NO: 4240779 - DNA, 25 bp, Homo sapien
tcagtagggtttcacccgtgtcaac

SEQ ID NO: 4240780 - DNA, 25 bp, Homo sapien
tcatggcccctttgacgagtgtgct

SEQ ID NO: 4240781 - DNA, 25 bp, Homo sapien
tgaggagacctaagaacactgctcc

SEQ ID NO: 4240782 - DNA, 25 bp, Homo sapien
gcttcccagatagtagtaccttcta

SEQ ID NO: 4240783 - DNA, 25 bp, Homo sapien
ttcctgcatcagaaatacctgcctt

SEQ ID NO: 4240784 - DNA, 25 bp, Homo sapien
gaatactcatcctagagtcgctccg

SEQ ID NO: 4240785 - DNA, 25 bp, Homo sapien
taagtaaaggctgaatggccacatg

SEQ ID NO: 4240786 - DNA, 25 bp, Homo sapien
ttaccaaggcatcgtggcgactact

SEQ ID NO: 4240787 - DNA, 25 bp, Homo sapien
tcctcagttcagtaggaaggaacag

SEQ ID NO: 4240788 - DNA, 25 bp, Homo sapien
gccagggctaccagaagtctttgag

SEQ ID NO: 4240789 - DNA, 25 bp, Homo sapien
taactgaatacttcctatggattac

SEQ ID NO: 4240790 - DNA, 25 bp, Homo sapien
ctgtggtcttagatatacttgcatg

SEQ ID NO: 4240791 - DNA, 25 bp, Homo sapien
taacaccagaatgtattttatcccc

SEQ ID NO: 4240792 - DNA, 25 bp, Homo sapien
caccccattccagctattgcatagg

SEQ ID NO: 4240793 - DNA, 25 bp, Homo sapien
ctgtcgccgcccgggtgtagcgcat

SEQ ID NO: 4240794 - DNA, 25 bp, Homo sapien
tggccgggatagaagccgcagccca

SEQ ID NO: 4240795 - DNA, 25 bp, Homo sapien
aggcggcggtccctcccgctgtcgc

SEQ ID NO: 4240796 - DNA, 25 bp, Homo sapien
gggggtggccgggatagaagccgca

SEQ ID NO: 4240797 - DNA, 25 bp, Homo sapien
caagctgtgtttggcctgtgcaaag

SEQ ID NO: 4240798 - DNA, 25 bp, Homo sapien
caaccgctgctgtagtttaagcctg

SEQ ID NO: 4240799 - DNA, 25 bp, Homo sapien
tgcaaactagcaactcaagggccac

SEQ ID NO: 4240800 - DNA, 25 bp, Homo sapien
ttcacggagttattcttgatcgctc

SEQ ID NO: 4240801 - DNA, 25 bp, Homo sapien
gacaggtcccctatacttcggtaca

SEQ ID NO: 4240802 - DNA, 25 bp, Homo sapien
tatacttcggtacacacgagccttt

SEQ ID NO: 4240803 - DNA, 25 bp, Homo sapien
ccgtgtccttcgagtccctcctgct

SEQ ID NO: 4240804 - DNA, 25 bp, Homo sapien
tgccttcagtgatataatcctccgt

SEQ ID NO: 4240805 - DNA, 25 bp, Homo sapien
ctcctagcggccctcgcaggatcgg

SEQ ID NO: 4240806 - DNA, 25 bp, Homo sapien
gacaaggccggagtcgcaggcctgc

SEQ ID NO: 4240807 - DNA, 25 bp, Homo sapien
ccgcgccgtgactcgctcctagcgg

SEQ ID NO: 4240808 - DNA, 25 bp, Homo sapien
ggctggagacgtcgcgccgagagcg

SEQ ID NO: 4240809 - DNA, 25 bp, Homo sapien
cattgctgcgggccttcggcggcgg

SEQ ID NO: 4240810 - DNA, 25 bp, Homo sapien
ggcggcgaagaagtcgccgtggctc

SEQ ID NO: 4240811 - DNA, 25 bp, Homo sapien
cggcgaagaagtcgccgtggctccc

SEQ ID NO: 4240812 - DNA, 25 bp, Homo sapien
ggccttcggcggcggcgaagaagtc

SEQ ID NO: 4240813 - DNA, 25 bp, Homo sapien
agacatatctattttgtcgaggttt

SEQ ID NO: 4240814 - DNA, 25 bp, Homo sapien
ttcccataatcacagaaggctccat

SEQ ID NO: 4240815 - DNA, 25 bp, Homo sapien
ttcccaaaaacacagaagcctccat

SEQ ID NO: 4240816 - DNA, 25 bp, Homo sapien
attctgttggattccccatcgcact

SEQ ID NO: 4240817 - DNA, 25 bp, Homo sapien
ccactttgctggaggagtcttctat

SEQ ID NO: 4240818 - DNA, 25 bp, Homo sapien
cccatcgcactctcatcctgaattg

SEQ ID NO: 4240819 - DNA, 25 bp, Homo sapien
cctttcgattcaacttgatgatatc

SEQ ID NO: 4240820 - DNA, 25 bp, Homo sapien
ggattacaagcacgaacctcttcat

SEQ ID NO: 4240821 - DNA, 25 bp, Homo sapien
cttcatatgcttaacaattgaggac

SEQ ID NO: 4240822 - DNA, 25 bp, Homo sapien
cacgctggtcctgaagtccttggct

SEQ ID NO: 4240823 - DNA, 25 bp, Homo sapien
ggtcctgaagtccttggcttaagca

SEQ ID NO: 4240824 - DNA, 25 bp, Homo sapien
caggcctatatgattcgttctccca

SEQ ID NO: 4240825 - DNA, 25 bp, Homo sapien
caccagagcagtagtttaaaaccag

SEQ ID NO: 4240826 - DNA, 25 bp, Homo sapien
aaccagttaggtatcagaatcatcc

SEQ ID NO: 4240827 - DNA, 25 bp, Homo sapien
gcagagttccagagtacccacattc

SEQ ID NO: 4240828 - DNA, 25 bp, Homo sapien
ggtggacgattcataggactaattc

SEQ ID NO: 4240829 - DNA, 25 bp, Homo sapien
tccattaggacgtctctttccaggc

SEQ ID NO: 4240830 - DNA, 25 bp, Homo sapien
gcattactcttcctctacgattcag

SEQ ID NO: 4240831 - DNA, 25 bp, Homo sapien
gtcgttttcctagctgcaaggccag

SEQ ID NO: 4240832 - DNA, 25 bp, Homo sapien
tcttgagaactgctactggtttcct

SEQ ID NO: 4240833 - DNA, 25 bp, Homo sapien
ggctaggtctcttgagaactgctac

SEQ ID NO: 4240834 - DNA, 25 bp, Homo sapien
gcttagctggctaggtctcttgaga

SEQ ID NO: 4240835 - DNA, 25 bp, Homo sapien
tttctgcttagctggctaggtctct

SEQ ID NO: 4240836 - DNA, 25 bp, Homo sapien
acctcattccaggttttttttgctg

SEQ ID NO: 4240837 - DNA, 25 bp, Homo sapien
caggttttttttgctgacttatctt

SEQ ID NO: 4240838 - DNA, 25 bp, Homo sapien
tcattccaggttttttttgctgact

SEQ ID NO: 4240839 - DNA, 25 bp, Homo sapien
tccaggttttttttgctgacttatc

SEQ ID NO: 4240840 - DNA, 25 bp, Homo sapien
cacaaaaggtactatcaagtgattc

SEQ ID NO: 4240841 - DNA, 25 bp, Homo sapien
aaaggtactatcaagtgattcccaa

SEQ ID NO: 4240842 - DNA, 25 bp, Homo sapien
tcccctttcacaaaaggtactatca

SEQ ID NO: 4240843 - DNA, 25 bp, Homo sapien
ctttcacaaaaggtactatcaagtg

SEQ ID NO: 4240844 - DNA, 25 bp, Homo sapien
gcctgacgagtatctttctgatgat

SEQ ID NO: 4240845 - DNA, 25 bp, Homo sapien
tttccactcctggtaaaattagctg

SEQ ID NO: 4240846 - DNA, 25 bp, Homo sapien
cctcttctgaaaagaaaagttgcct

SEQ ID NO: 4240847 - DNA, 25 bp, Homo sapien
tatttccactcctggtaaaattagc

SEQ ID NO: 4240848 - DNA, 25 bp, Homo sapien
tacatcgtctagcagttgttctgta

SEQ ID NO: 4240849 - DNA, 25 bp, Homo sapien
gctactacatcgtctagcagttgtt

SEQ ID NO: 4240850 - DNA, 25 bp, Homo sapien
tctttgctactacatcgtctagcag

SEQ ID NO: 4240851 - DNA, 25 bp, Homo sapien
tcgtctagcagttgttctgtattca

SEQ ID NO: 4240852 - DNA, 25 bp, Homo sapien
atggtatgcactggcgatcgagcta

SEQ ID NO: 4240853 - DNA, 25 bp, Homo sapien
gatggtatgcactggcgatcgagct

SEQ ID NO: 4240854 - DNA, 25 bp, Homo sapien
tgtgcactggcgatcgagctatgct

SEQ ID NO: 4240855 - DNA, 25 bp, Homo sapien
gcactggcgatcgagctatgctgct

SEQ ID NO: 4240856 - DNA, 25 bp, Homo sapien
gattgtcaatagatacagtcaaaat

SEQ ID NO: 4240857 - DNA, 25 bp, Homo sapien
caatagatacagtcaaaatccctcc

SEQ ID NO: 4240858 - DNA, 25 bp, Homo sapien
gcactgctccaggattgtcaataga

SEQ ID NO: 4240859 - DNA, 25 bp, Homo sapien
gatacagtcaaaatccctccatttg

SEQ ID NO: 4240860 - DNA, 25 bp, Homo sapien
aatgaaggtacagcagtacgagtta

SEQ ID NO: 4240861 - DNA, 25 bp, Homo sapien
gaactttcttgacgtcactttgctc

SEQ ID NO: 4240862 - DNA, 25 bp, Homo sapien
tacgagttaatcgtggtttctgagt

SEQ ID NO: 4240863 - DNA, 25 bp, Homo sapien
tgttttccgacactgtttatgtcaa

SEQ ID NO: 4240864 - DNA, 25 bp, Homo sapien
ctatcccacggtgacaaagcggctt

SEQ ID NO: 4240865 - DNA, 25 bp, Homo sapien
tgttccttcaggatcccaaaccgct

SEQ ID NO: 4240866 - DNA, 25 bp, Homo sapien
aaccgctcattcaacgtcatccctg

SEQ ID NO: 4240867 - DNA, 25 bp, Homo sapien
ccccctttgttgtatgtgagagtgg

SEQ ID NO: 4240868 - DNA, 25 bp, Homo sapien
ctgtctgagccaaccatgaaatctt

SEQ ID NO: 4240869 - DNA, 25 bp, Homo sapien
agtcatcactcaaaagttcctttga

SEQ ID NO: 4240870 - DNA, 25 bp, Homo sapien
aataagagttatttagccttgtgaa

SEQ ID NO: 4240871 - DNA, 25 bp, Homo sapien
cttgaatttccgtgatgaactcttc

SEQ ID NO: 4240872 - DNA, 25 bp, Homo sapien
catgtttatgaagaccaggatttac

SEQ ID NO: 4240873 - DNA, 25 bp, Homo sapien
caggatttaccatgacaaagtctaa

SEQ ID NO: 4240874 - DNA, 25 bp, Homo sapien
tgacaaagtctaaaacacgggcaaa

SEQ ID NO: 4240875 - DNA, 25 bp, Homo sapien
ctaaaacacgggcaaaggtgatgag

SEQ ID NO: 4240876 - DNA, 25 bp, Homo sapien
tactgatagctttccatggcgagca

SEQ ID NO: 4240877 - DNA, 25 bp, Homo sapien
tgtggacgctagactcaagactatg

SEQ ID NO: 4240878 - DNA, 25 bp, Homo sapien
aaatctagtatacaatgcagggcag

SEQ ID NO: 4240879 - DNA, 25 bp, Homo sapien
gcagggcaggccaagaacgatgtct

SEQ ID NO: 4240880 - DNA, 25 bp, Homo sapien
tactgttcctagaccaaatacaggc

SEQ ID NO: 4240881 - DNA, 25 bp, Homo sapien
gagttcttggcctatatgaaaagca

SEQ ID NO: 4240882 - DNA, 25 bp, Homo sapien
gaaaagcatcaaatagctaaggaga

SEQ ID NO: 4240883 - DNA, 25 bp, Homo sapien
aatacaggcattcatccttgcaaaa

SEQ ID NO: 4240884 - DNA, 25 bp, Homo sapien
gaactgaacaaggattacaaccaca

SEQ ID NO: 4240885 - DNA, 25 bp, Homo sapien
caaaaagtacagtgtaaagcacctc

SEQ ID NO: 4240886 - DNA, 25 bp, Homo sapien
caatatgtgaccaccaagagtttta

SEQ ID NO: 4240887 - DNA, 25 bp, Homo sapien
tttcatttggtgatgcacggcacca

SEQ ID NO: 4240888 - DNA, 25 bp, Homo sapien
gaagagtctacagtgatttaccaat

SEQ ID NO: 4240889 - DNA, 25 bp, Homo sapien
tgttggagctacaaatgaaatcatc

SEQ ID NO: 4240890 - DNA, 25 bp, Homo sapien
ttctgcattgcaaagtatactggat

SEQ ID NO: 4240891 - DNA, 25 bp, Homo sapien
aactggattagtctctaaaggctca

SEQ ID NO: 4240892 - DNA, 25 bp, Homo sapien
tatgcacactaggagaataacttcc

SEQ ID NO: 4240893 - DNA, 25 bp, Homo sapien
taaacactggtatacctcatctgaa

SEQ ID NO: 4240894 - DNA, 25 bp, Homo sapien
taaactccaagcagtatgaatccca

SEQ ID NO: 4240895 - DNA, 25 bp, Homo sapien
acctacttacgaggctgagggacaa

SEQ ID NO: 4240896 - DNA, 25 bp, Homo sapien
tgaaagttaactcattcaacacagg

SEQ ID NO: 4240897 - DNA, 25 bp, Homo sapien
tatcatgcaaaggttatgtcctccc

SEQ ID NO: 4240898 - DNA, 25 bp, Homo sapien
tagaaacatatcatggtcactcctt

SEQ ID NO: 4240899 - DNA, 25 bp, Homo sapien
agaatccacttttagggcgggcgtg

SEQ ID NO: 4240900 - DNA, 25 bp, Homo sapien
gcaaagtggcttacagggatctgta

SEQ ID NO: 4240901 - DNA, 25 bp, Homo sapien
cagtgttagcaattgatacagtgta

SEQ ID NO: 4240902 - DNA, 25 bp, Homo sapien
caggcagcgcaggttattcagtgtt

SEQ ID NO: 4240903 - DNA, 25 bp, Homo sapien
ggtgacagcgtcttatgagaaagag

SEQ ID NO: 4240904 - DNA, 25 bp, Homo sapien
cacatctacactaaattctgtcaag

SEQ ID NO: 4240905 - DNA, 25 bp, Homo sapien
ttcaaatgcaccattgtcatctgat

SEQ ID NO: 4240906 - DNA, 25 bp, Homo sapien
gtcatctgattgcttattaccttcc

SEQ ID NO: 4240907 - DNA, 25 bp, Homo sapien
gcttattaccttccacatctacact

SEQ ID NO: 4240908 - DNA, 25 bp, Homo sapien
tcagaaagttcgtgtcagagagcaa

SEQ ID NO: 4240909 - DNA, 25 bp, Homo sapien
taacatgtggaggatacgaaggcca

SEQ ID NO: 4240910 - DNA, 25 bp, Homo sapien
tagaagaggctgtcaggtacaatcc

SEQ ID NO: 4240911 - DNA, 25 bp, Homo sapien
tagacctcacttatattgcagccag

SEQ ID NO: 4240912 - DNA, 25 bp, Homo sapien
cgccagctcagcgcatgcgcggccg

SEQ ID NO: 4240913 - DNA, 25 bp, Homo sapien
ccgccagctcagcgcatgcgcggcc

SEQ ID NO: 4240914 - DNA, 25 bp, Homo sapien
acgctaccgtgccagagtactcggc

SEQ ID NO: 4240915 - DNA, 25 bp, Homo sapien
tccgtcaggtcgtggttggccgctc

SEQ ID NO: 4240916 - DNA, 25 bp, Homo sapien
ggctcgatcgagagagcggctccac

SEQ ID NO: 4240917 - DNA, 25 bp, Homo sapien
agtttccggccgctcaggctcagca

SEQ ID NO: 4240918 - DNA, 25 bp, Homo sapien
tacgggacgagctgctgtaactccc

SEQ ID NO: 4240919 - DNA, 25 bp, Homo sapien
gcaagggtctacctccgccgtggca

SEQ ID NO: 4240920 - DNA, 25 bp, Homo sapien
tcctcagaaagcctaaaaaatcatc

SEQ ID NO: 4240921 - DNA, 25 bp, Homo sapien
aaaatcatccatcaatcactccggc

SEQ ID NO: 4240922 - DNA, 25 bp, Homo sapien
gtcttagcaggtccattcggcaccc

SEQ ID NO: 4240923 - DNA, 25 bp, Homo sapien
cattcggcaccccaaatccgaaagg

SEQ ID NO: 4240924 - DNA, 25 bp, Homo sapien
tactctgatctgtgaagagctcgcg

SEQ ID NO: 4240925 - DNA, 25 bp, Homo sapien
gagctcgcgctaacgttcccgtctt

SEQ ID NO: 4240926 - DNA, 25 bp, Homo sapien
aaactccagggctgagaccgaccct

SEQ ID NO: 4240927 - DNA, 25 bp, Homo sapien
aactccagggctgagaccgaccctt

SEQ ID NO: 4240928 - DNA, 25 bp, Homo sapien
gacccttcctgacaatgcagctcgt

SEQ ID NO: 4240929 - DNA, 25 bp, Homo sapien
tcctgacaatgcagctcgtccagac

SEQ ID NO: 4240930 - DNA, 25 bp, Homo sapien
gatggaggcgaagaaagacgttcca

SEQ ID NO: 4240931 - DNA, 25 bp, Homo sapien
ccagcgttcgggttcacttcacaca

SEQ ID NO: 4240932 - DNA, 25 bp, Homo sapien
tttgtaagtcaactagatggaggcg

SEQ ID NO: 4240933 - DNA, 25 bp, Homo sapien
gagtcggaaagtgggctctagttat

SEQ ID NO: 4240934 - DNA, 25 bp, Homo sapien
cgttcccaataagttcaaaatcatg

SEQ ID NO: 4240935 - DNA, 25 bp, Homo sapien
ctaggatacgaatttgaaggacaac

SEQ ID NO: 4240936 - DNA, 25 bp, Homo sapien
ggcaatatatgctgttccctaggat

SEQ ID NO: 4240937 - DNA, 25 bp, Homo sapien
aaacagcacagaaagtcccaagaaa

SEQ ID NO: 4240938 - DNA, 25 bp, Homo sapien
cctccacttccagggttcaagaaat

SEQ ID NO: 4240939 - DNA, 25 bp, Homo sapien
tccacttccagggttcaagaaattc

SEQ ID NO: 4240940 - DNA, 25 bp, Homo sapien
gagttttgctcgttgcccagtctgg

SEQ ID NO: 4240941 - DNA, 25 bp, Homo sapien
aggcgtgtgctaccatgcccagcaa

SEQ ID NO: 4240942 - DNA, 25 bp, Homo sapien
tctagtaatctcacccagggatgcg

SEQ ID NO: 4240943 - DNA, 25 bp, Homo sapien
tctatgcacaacactaaagcctgag

SEQ ID NO: 4240944 - DNA, 25 bp, Homo sapien
tcctaggaacatagaacctcccgag

SEQ ID NO: 4240945 - DNA, 25 bp, Homo sapien
ttcttattccgagatgaggcctgca

SEQ ID NO: 4240946 - DNA, 25 bp, Homo sapien
gcagctgagcaagtaacagtctttt

SEQ ID NO: 4240947 - DNA, 25 bp, Homo sapien
aatgtctgtagttctcctcgtgtta

SEQ ID NO: 4240948 - DNA, 25 bp, Homo sapien
ctgtgatggtcactgttgattggac

SEQ ID NO: 4240949 - DNA, 25 bp, Homo sapien
cgtgttactaaacattgtcttcaca

SEQ ID NO: 4240950 - DNA, 25 bp, Homo sapien
aaaattgcctctggaatataacgaa

SEQ ID NO: 4240951 - DNA, 25 bp, Homo sapien
gaatataacgaatacaattttggta

SEQ ID NO: 4240952 - DNA, 25 bp, Homo sapien
agaatgttagagcttgtaggtttaa

SEQ ID NO: 4240953 - DNA, 25 bp, Homo sapien
tctgaaaggcgatttcgcgacaggt

SEQ ID NO: 4240954 - DNA, 25 bp, Homo sapien
ccggcaatgttgacagttggttccg

SEQ ID NO: 4240955 - DNA, 25 bp, Homo sapien
tccatcaaatgtctaaggtgtccaa

SEQ ID NO: 4240956 - DNA, 25 bp, Homo sapien
aagtgacaccaatttgttattacta

SEQ ID NO: 4240957 - DNA, 25 bp, Homo sapien
tgttattactagcaattaagacttt

SEQ ID NO: 4240958 - DNA, 25 bp, Homo sapien
tcgagtctgagccaaaaggtaatag

SEQ ID NO: 4240959 - DNA, 25 bp, Homo sapien
gaatggagagctttagggacactca

SEQ ID NO: 4240960 - DNA, 25 bp, Homo sapien
tgttgctgaacaaccatcagatggg

SEQ ID NO: 4240961 - DNA, 25 bp, Homo sapien
cctggctgggacactaattcttatt

SEQ ID NO: 4240962 - DNA, 25 bp, Homo sapien
aggcaaatgtactaggtgatttctt

SEQ ID NO: 4240963 - DNA, 25 bp, Homo sapien
ctcaaggcctccaggttaccaattt

SEQ ID NO: 4240964 - DNA, 25 bp, Homo sapien
gtactaggtgatttcttcttacatt

SEQ ID NO: 4240965 - DNA, 25 bp, Homo sapien
tcaaggcctccaggttaccaatttg

SEQ ID NO: 4240966 - DNA, 25 bp, Homo sapien
aagtttgaggcaggggaacgacact

SEQ ID NO: 4240967 - DNA, 25 bp, Homo sapien
gaggcaggggaacgacactatttaa

SEQ ID NO: 4240968 - DNA, 25 bp, Homo sapien
ggaacgacactatttaagattcttg

SEQ ID NO: 4240969 - DNA, 25 bp, Homo sapien
actatttaagattcttggctgggca

SEQ ID NO: 4240970 - DNA, 25 bp, Homo sapien
ttttattgcatgagaagtctaaccg

SEQ ID NO: 4240971 - DNA, 25 bp, Homo sapien
ggtgcctgaggttccgataacaaac

SEQ ID NO: 4240972 - DNA, 25 bp, Homo sapien
tctagggtgatcgtctgtaggtgcc

SEQ ID NO: 4240973 - DNA, 25 bp, Homo sapien
cgtatcaaaggcaactccgccagct

SEQ ID NO: 4240974 - DNA, 25 bp, Homo sapien
tgtggactttgccttttatacatat

SEQ ID NO: 4240975 - DNA, 25 bp, Homo sapien
gatctggagcaatcttacaagcttg

SEQ ID NO: 4240976 - DNA, 25 bp, Homo sapien
ggtctcctatcataatccggcagat

SEQ ID NO: 4240977 - DNA, 25 bp, Homo sapien
caagcttgtatgttcaggtatttaa

SEQ ID NO: 4240978 - DNA, 25 bp, Homo sapien
cagaatagcatgagacctcatgtac

SEQ ID NO: 4240979 - DNA, 25 bp, Homo sapien
caattcttgttcgtccaatgaggcg

SEQ ID NO: 4240980 - DNA, 25 bp, Homo sapien
caagaaatgtggcagtcacttaact

SEQ ID NO: 4240981 - DNA, 25 bp, Homo sapien
gcttcaaaacaatcacacctctgca

SEQ ID NO: 4240982 - DNA, 25 bp, Homo sapien
cacactattgaagcctgaatcaagg

SEQ ID NO: 4240983 - DNA, 25 bp, Homo sapien
gcgacttgagtacagttcttcatgg

SEQ ID NO: 4240984 - DNA, 25 bp, Homo sapien
tgtccacactattgaagcctgaatc

SEQ ID NO: 4240985 - DNA, 25 bp, Homo sapien
gaatcaagggctccataagggcgac

SEQ ID NO: 4240986 - DNA, 25 bp, Homo sapien
gactgcttgagccatggtcgtgcca

SEQ ID NO: 4240987 - DNA, 25 bp, Homo sapien
aaagccggtaaggacgcagaatgcc

SEQ ID NO: 4240988 - DNA, 25 bp, Homo sapien
gcggaaatccacgtgacagaaagcc

SEQ ID NO: 4240989 - DNA, 25 bp, Homo sapien
aatacttgggatgttgaggcgagac

SEQ ID NO: 4240990 - DNA, 25 bp, Homo sapien
actggctttctcttcgtagtctttg

SEQ ID NO: 4240991 - DNA, 25 bp, Homo sapien
gttctttagtaatctctgctactcg

SEQ ID NO: 4240992 - DNA, 25 bp, Homo sapien
caaactgccgcggttctcttggtac

SEQ ID NO: 4240993 - DNA, 25 bp, Homo sapien
taatctctgctactcgaagaggcag

SEQ ID NO: 4240994 - DNA, 25 bp, Homo sapien
tagtggctatcataccggcacagat

SEQ ID NO: 4240995 - DNA, 25 bp, Homo sapien
gcaaacactttagctgtcaccggaa

SEQ ID NO: 4240996 - DNA, 25 bp, Homo sapien
gaaaatcaagagtctgcttcggaag

SEQ ID NO: 4240997 - DNA, 25 bp, Homo sapien
tctcctcggataagcaataggtttc

SEQ ID NO: 4240998 - DNA, 25 bp, Homo sapien
attttgaaagtgggagggatgataa

SEQ ID NO: 4240999 - DNA, 25 bp, Homo sapien
ttttgaaagtgggagggatgataaa

SEQ ID NO: 4241000 - DNA, 25 bp, Homo sapien
gcggtgcagctgtctatgtagtcaa

SEQ ID NO: 4241001 - DNA, 25 bp, Homo sapien
tcaatatacgccataaactgtgaac

SEQ ID NO: 4241002 - DNA, 25 bp, Homo sapien
ctcatgagagattcgccgctgttca

SEQ ID NO: 4241003 - DNA, 25 bp, Homo sapien
tcaatctgatccagatcatgttcca

SEQ ID NO: 4241004 - DNA, 25 bp, Homo sapien
atttaggcttcaatctgtgtactac

SEQ ID NO: 4241005 - DNA, 25 bp, Homo sapien
atatttaggcttcaatctgtgtact

SEQ ID NO: 4241006 - DNA, 25 bp, Homo sapien
tatttaggcttcaatctgtgtacta

SEQ ID NO: 4241007 - DNA, 25 bp, Homo sapien
taaacctaaagcctacttgaggctg

SEQ ID NO: 4241008 - DNA, 25 bp, Homo sapien
caaggccttaacagtacctagactt

SEQ ID NO: 4241009 - DNA, 25 bp, Homo sapien
cttccaaggccttaacagtacctag

SEQ ID NO: 4241010 - DNA, 25 bp, Homo sapien
ctaaagcctacttgaggctgctgtc

SEQ ID NO: 4241011 - DNA, 25 bp, Homo sapien
gataatatcactctacaacatgtcc

SEQ ID NO: 4241012 - DNA, 25 bp, Homo sapien
gtcccacttgaaatgattattctct

SEQ ID NO: 4241013 - DNA, 25 bp, Homo sapien
tgctgacaagatagactgaagaatg

SEQ ID NO: 4241014 - DNA, 25 bp, Homo sapien
tctaaaaggataatacatcattctc

SEQ ID NO: 4241015 - DNA, 25 bp, Homo sapien
aaatagttagttgccccttgctcca

SEQ ID NO: 4241016 - DNA, 25 bp, Homo sapien
tctgggctgtaggactttgacttat

SEQ ID NO: 4241017 - DNA, 25 bp, Homo sapien
taaagactaccatacgtaacaggca

SEQ ID NO: 4241018 - DNA, 25 bp, Homo sapien
gagtgtttaacacctcacataggtt

SEQ ID NO: 4241019 - DNA, 25 bp, Homo sapien
gaaactccctaatggctactggctt

SEQ ID NO: 4241020 - DNA, 25 bp, Homo sapien
tgaaactccctaatggctactggct

SEQ ID NO: 4241021 - DNA, 25 bp, Homo sapien
ggtgtgtgtcaaccaacccaggctt

SEQ ID NO: 4241022 - DNA, 25 bp, Homo sapien
tggcctcaagcgataatatcgcctc

SEQ ID NO: 4241023 - DNA, 25 bp, Homo sapien
gcgataatatcgcctcagcctttcg

SEQ ID NO: 4241024 - DNA, 25 bp, Homo sapien
caggtgtgtgtcaaccaacccaggc

SEQ ID NO: 4241025 - DNA, 25 bp, Homo sapien
tgtgacttgctgatagtgacaggag

SEQ ID NO: 4241026 - DNA, 25 bp, Homo sapien
acttgctgatagtgacaggagggaa

SEQ ID NO: 4241027 - DNA, 25 bp, Homo sapien
caggagggaagatggctcagctgga

SEQ ID NO: 4241028 - DNA, 25 bp, Homo sapien
ctgattgtgacttgctgatagtgac

SEQ ID NO: 4241029 - DNA, 25 bp, Homo sapien
tccgagtgcgctctactaactgctc

SEQ ID NO: 4241030 - DNA, 25 bp, Homo sapien
aagctgagcctctctccgagtgcgc

SEQ ID NO: 4241031 - DNA, 25 bp, Homo sapien
ctgcttggtccttattttctcctcc

SEQ ID NO: 4241032 - DNA, 25 bp, Homo sapien
tctccgagtgcgctctactaactgc

SEQ ID NO: 4241033 - DNA, 25 bp, Homo sapien
agagagaaaaatggtcgacatttta

SEQ ID NO: 4241034 - DNA, 25 bp, Homo sapien
ggtcgacattttaatggacaataaa

SEQ ID NO: 4241035 - DNA, 25 bp, Homo sapien
gaaaaatggtcgacattttaatgga

SEQ ID NO: 4241036 - DNA, 25 bp, Homo sapien
aaatggtcgacattttaatggacaa

SEQ ID NO: 4241037 - DNA, 25 bp, Homo sapien
atcaggtaaaacagtaaaacagaca

SEQ ID NO: 4241038 - DNA, 25 bp, Homo sapien
caggtaaaacagtaaaacagacata

SEQ ID NO: 4241039 - DNA, 25 bp, Homo sapien
aaaacagtaaaacagacatacgcat

SEQ ID NO: 4241040 - DNA, 25 bp, Homo sapien
gtaaaacagtaaaacagacatacgc

SEQ ID NO: 4241041 - DNA, 25 bp, Homo sapien
aacctccgtttcctaggctcagaca

SEQ ID NO: 4241042 - DNA, 25 bp, Homo sapien
gagagttaaacgtcattgccaaggg

SEQ ID NO: 4241043 - DNA, 25 bp, Homo sapien
ggctcagacaattcctccacttcag

SEQ ID NO: 4241044 - DNA, 25 bp, Homo sapien
acacccggccagatttgcctgcatt

SEQ ID NO: 4241045 - DNA, 25 bp, Homo sapien
ggaagttggttagagcctggaacac

SEQ ID NO: 4241046 - DNA, 25 bp, Homo sapien
gaacactgcaaataacaaattctat

SEQ ID NO: 4241047 - DNA, 25 bp, Homo sapien
tatagcatttttctagatttactag

SEQ ID NO: 4241048 - DNA, 25 bp, Homo sapien
ctagatttactagttagaaaatgtt

SEQ ID NO: 4241049 - DNA, 25 bp, Homo sapien
cgccatctaggagcgggtgctgttt

SEQ ID NO: 4241050 - DNA, 25 bp, Homo sapien
tttgtggactttgtgatgctttttg

SEQ ID NO: 4241051 - DNA, 25 bp, Homo sapien
caccatctacgccatctaggagcgg

SEQ ID NO: 4241052 - DNA, 25 bp, Homo sapien
tctacgccatctaggagcgggtgct

SEQ ID NO: 4241053 - DNA, 25 bp, Homo sapien
tgaagacgttgacatagaggaccac

SEQ ID NO: 4241054 - DNA, 25 bp, Homo sapien
aagacgttgacatagaggaccacat

SEQ ID NO: 4241055 - DNA, 25 bp, Homo sapien
ttttgaagacgttgacatagaggac

SEQ ID NO: 4241056 - DNA, 25 bp, Homo sapien
tttgaagacgttgacatagaggacc

SEQ ID NO: 4241057 - DNA, 25 bp, Homo sapien
catgcacaaggcactatcatcagtg

SEQ ID NO: 4241058 - DNA, 25 bp, Homo sapien
cacaaggcactatcatcagtgtgct

SEQ ID NO: 4241059 - DNA, 25 bp, Homo sapien
aggcactatcatcagtgtgctgaga

SEQ ID NO: 4241060 - DNA, 25 bp, Homo sapien
cactatcatcagtgtgctgagacct

SEQ ID NO: 4241061 - DNA, 25 bp, Homo sapien
gatgtggattcccagccttgcactt

SEQ ID NO: 4241062 - DNA, 25 bp, Homo sapien
ggtgtttaatgcaggttctcccatc

SEQ ID NO: 4241063 - DNA, 25 bp, Homo sapien
taaaggccgtctaatttggaggatc

SEQ ID NO: 4241064 - DNA, 25 bp, Homo sapien
tgacaaacggccgaagggaatttca

SEQ ID NO: 4241065 - DNA, 25 bp, Homo sapien
cacctaatatatcccaggaactgtg

SEQ ID NO: 4241066 - DNA, 25 bp, Homo sapien
tagggatggagtgtattaaggtaca

SEQ ID NO: 4241067 - DNA, 25 bp, Homo sapien
ccttatgatatcgttcatcagacct

SEQ ID NO: 4241068 - DNA, 25 bp, Homo sapien
tcatttcaaatcgtaagtttcaagg

SEQ ID NO: 4241069 - DNA, 25 bp, Homo sapien
gtagcccgaagacaatgtcagtgta

SEQ ID NO: 4241070 - DNA, 25 bp, Homo sapien
gtaaactgatattaacaggagcttg

SEQ ID NO: 4241071 - DNA, 25 bp, Homo sapien
gggtagcccgaagacaatgtcagtg

SEQ ID NO: 4241072 - DNA, 25 bp, Homo sapien
taaactgatattaacaggagcttga

SEQ ID NO: 4241073 - DNA, 25 bp, Homo sapien
tgatatagacgaaagcaacaggagt

SEQ ID NO: 4241074 - DNA, 25 bp, Homo sapien
ctgatatagacgaaagcaacaggag

SEQ ID NO: 4241075 - DNA, 25 bp, Homo sapien
caaaagcagcatgtaacacacaatg

SEQ ID NO: 4241076 - DNA, 25 bp, Homo sapien
gaactactgccaatgtcaaatataa

SEQ ID NO: 4241077 - DNA, 25 bp, Homo sapien
taatcaaaggtactggaactactgc

SEQ ID NO: 4241078 - DNA, 25 bp, Homo sapien
gagcaaaactgtgacaatggtaata

SEQ ID NO: 4241079 - DNA, 25 bp, Homo sapien
cttaagaggcgtgaaggcagaagaa

SEQ ID NO: 4241080 - DNA, 25 bp, Homo sapien
ccacttgattcaaccctgacagcga

SEQ ID NO: 4241081 - DNA, 25 bp, Homo sapien
cagggtagcagcacagcccacttga

SEQ ID NO: 4241082 - DNA, 25 bp, Homo sapien
aatgaggcagggtagcagcacagcc

SEQ ID NO: 4241083 - DNA, 25 bp, Homo sapien
cacgcccggcctagttgtgtttata

SEQ ID NO: 4241084 - DNA, 25 bp, Homo sapien
gacagtccattatttaacaagctct

SEQ ID NO: 4241085 - DNA, 25 bp, Homo sapien
ccggcctagttgtgtttatataaag

SEQ ID NO: 4241086 - DNA, 25 bp, Homo sapien
cattatttaacaagctcttcctaag

SEQ ID NO: 4241087 - DNA, 25 bp, Homo sapien
acttaatagagcattaggtctgtca

SEQ ID NO: 4241088 - DNA, 25 bp, Homo sapien
caggtgaacttaatagagcattagg

SEQ ID NO: 4241089 - DNA, 25 bp, Homo sapien
tgttgcaggtgaacttaatagagca

SEQ ID NO: 4241090 - DNA, 25 bp, Homo sapien
aatagagcattaggtctgtcatcac

SEQ ID NO: 4241091 - DNA, 25 bp, Homo sapien
gaaaagaatatgcaggggaatgatg

SEQ ID NO: 4241092 - DNA, 25 bp, Homo sapien
gctttcagggcgctgaggctgattt

SEQ ID NO: 4241093 - DNA, 25 bp, Homo sapien
agctttcagggcgctgaggctgatt

SEQ ID NO: 4241094 - DNA, 25 bp, Homo sapien
aagctttcagggcgctgaggctgat

SEQ ID NO: 4241095 - DNA, 25 bp, Homo sapien
ggaagctttcagggcgctgaggctg

SEQ ID NO: 4241096 - DNA, 25 bp, Homo sapien
gcaatcgcgcaatcttgactcactt

SEQ ID NO: 4241097 - DNA, 25 bp, Homo sapien
aggcctgcaccaccatgcctttttt

SEQ ID NO: 4241098 - DNA, 25 bp, Homo sapien
tcgcgcaatcttgactcacttcagc

SEQ ID NO: 4241099 - DNA, 25 bp, Homo sapien
caggcctgcaccaccatgccttttt

SEQ ID NO: 4241100 - DNA, 25 bp, Homo sapien
cagcagtgcatctgtagtttgactt

SEQ ID NO: 4241101 - DNA, 25 bp, Homo sapien
tttaaatcttactgtgaatgcatct

SEQ ID NO: 4241102 - DNA, 25 bp, Homo sapien
gaggctgactgataacagtcttcca

SEQ ID NO: 4241103 - DNA, 25 bp, Homo sapien
gactgataacagtcttccatgcttt

SEQ ID NO: 4241104 - DNA, 25 bp, Homo sapien
agaggctgactgataacagtcttcc

SEQ ID NO: 4241105 - DNA, 25 bp, Homo sapien
gctgactgataacagtcttccatgc

SEQ ID NO: 4241106 - DNA, 25 bp, Homo sapien
cacaaatcgtaagcacagtgctcaa

SEQ ID NO: 4241107 - DNA, 25 bp, Homo sapien
tacccagttgactcaactacttttg

SEQ ID NO: 4241108 - DNA, 25 bp, Homo sapien
tacacaacagagaatagtatagaaa

SEQ ID NO: 4241109 - DNA, 25 bp, Homo sapien
tttgtttgattacatccacttaaaa

SEQ ID NO: 4241110 - DNA, 25 bp, Homo sapien
caagtacagtatattgctttccact

SEQ ID NO: 4241111 - DNA, 25 bp, Homo sapien
ctgcaagtacagtatattgctttcc

SEQ ID NO: 4241112 - DNA, 25 bp, Homo sapien
agtacagtatattgctttccacttt

SEQ ID NO: 4241113 - DNA, 25 bp, Homo sapien
gcaagtacagtatattgctttccac

SEQ ID NO: 4241114 - DNA, 25 bp, Homo sapien
gcaagtacagtatattggtttctac

SEQ ID NO: 4241115 - DNA, 25 bp, Homo sapien
agtacagtatattggtttctacttc

SEQ ID NO: 4241116 - DNA, 25 bp, Homo sapien
caagtacagtatattggtttctact

SEQ ID NO: 4241117 - DNA, 25 bp, Homo sapien
ctgcaagtacagtatattggtttct

SEQ ID NO: 4241118 - DNA, 25 bp, Homo sapien
gcaggtacagtgcacggctttctac

SEQ ID NO: 4241119 - DNA, 25 bp, Homo sapien
gcaggtacagtgcatcgctttctac

SEQ ID NO: 4241120 - DNA, 25 bp, Homo sapien
gcaggtacagtgcaccgctttctac

SEQ ID NO: 4241121 - DNA, 25 bp, Homo sapien
tcctgcgggtacagtgcatcgcttt

SEQ ID NO: 4241122 - DNA, 25 bp, Homo sapien
tttctacctcctgcgggtacagtgc

SEQ ID NO: 4241123 - DNA, 25 bp, Homo sapien
gcaggtacagtgcatcgctttctac

SEQ ID NO: 4241124 - DNA, 25 bp, Homo sapien
gcgggtacagtgcatcgctttctac

SEQ ID NO: 4241125 - DNA, 25 bp, Homo sapien
ggtacagtgcatggctttctacctc

SEQ ID NO: 4241126 - DNA, 25 bp, Homo sapien
ttgaattctgtcctgttatggaatc

SEQ ID NO: 4241127 - DNA, 25 bp, Homo sapien
atctgtagaatcagtggtaggtgca

SEQ ID NO: 4241128 - DNA, 25 bp, Homo sapien
ctgtcttgaattctgtcctgttatg

SEQ ID NO: 4241129 - DNA, 25 bp, Homo sapien
gaatctgtagaatcagtggtaggtg

SEQ ID NO: 4241130 - DNA, 25 bp, Homo sapien
tacagctggtgagggaacatgaatg

SEQ ID NO: 4241131 - DNA, 25 bp, Homo sapien
agctgctccgagatcacaaggtaga

SEQ ID NO: 4241132 - DNA, 25 bp, Homo sapien
aatgcttgggacagatcgaggtcgc

SEQ ID NO: 4241133 - DNA, 25 bp, Homo sapien
tcgaggtcgcacatgattggccaaa

SEQ ID NO: 4241134 - DNA, 25 bp, Homo sapien
caaatgtctgatgaatagccaaggc

SEQ ID NO: 4241135 - DNA, 25 bp, Homo sapien
ttctcgagtagaagtgagaccagga

SEQ ID NO: 4241136 - DNA, 25 bp, Homo sapien
taagaaatgtctgtccactgtgctt

SEQ ID NO: 4241137 - DNA, 25 bp, Homo sapien
tatccttaatatctagcacaatgct

SEQ ID NO: 4241138 - DNA, 25 bp, Homo sapien
tgggcatctttgtagtgtaccacct

SEQ ID NO: 4241139 - DNA, 25 bp, Homo sapien
catttgtattacaaccctgtgcacg

SEQ ID NO: 4241140 - DNA, 25 bp, Homo sapien
tctgtactagggtaaacgtccttca

SEQ ID NO: 4241141 - DNA, 25 bp, Homo sapien
tcataaggcctttgtaccacggccc

SEQ ID NO: 4241142 - DNA, 25 bp, Homo sapien
cctgagtagcaggtgcacgcctaat

SEQ ID NO: 4241143 - DNA, 25 bp, Homo sapien
cgtcactggctatgggcttaaggga

SEQ ID NO: 4241144 - DNA, 25 bp, Homo sapien
acgacactccctccttgaggtagga

SEQ ID NO: 4241145 - DNA, 25 bp, Homo sapien
gcttcagcttgatcccacagggagc

SEQ ID NO: 4241146 - DNA, 25 bp, Homo sapien
tccacatttcgcctgcatttcgcca

SEQ ID NO: 4241147 - DNA, 25 bp, Homo sapien
catttcgcctgcatttcgccattgt

SEQ ID NO: 4241148 - DNA, 25 bp, Homo sapien
ctgcatttcgccattgttaatttag

SEQ ID NO: 4241149 - DNA, 25 bp, Homo sapien
tcgcctgcatttcgccattgttaat

SEQ ID NO: 4241150 - DNA, 25 bp, Homo sapien
gcaggacaacagcttagaaatggcc

SEQ ID NO: 4241151 - DNA, 25 bp, Homo sapien
ctgagctggaggcaataaatcctca

SEQ ID NO: 4241152 - DNA, 25 bp, Homo sapien
cagactccaaagaaccagagcttca

SEQ ID NO: 4241153 - DNA, 25 bp, Homo sapien
gaaatggcctgttgcatgccagact

SEQ ID NO: 4241154 - DNA, 25 bp, Homo sapien
gctaggaagccgtgtaaaactggca

SEQ ID NO: 4241155 - DNA, 25 bp, Homo sapien
caggctggcccataacaaacatggt

SEQ ID NO: 4241156 - DNA, 25 bp, Homo sapien
gaatcatgttttcctccttgcaggc

SEQ ID NO: 4241157 - DNA, 25 bp, Homo sapien
caatggtggagctgttgatgagccc

SEQ ID NO: 4241158 - DNA, 25 bp, Homo sapien
cataacataacgactctgggacaaa

SEQ ID NO: 4241159 - DNA, 25 bp, Homo sapien
aagtccagctcgagaatgtgttcaa

SEQ ID NO: 4241160 - DNA, 25 bp, Homo sapien
tggacttgacaacagggagacagac

SEQ ID NO: 4241161 - DNA, 25 bp, Homo sapien
gcagagctgttaagggcctcagaga

SEQ ID NO: 4241162 - DNA, 25 bp, Homo sapien
acaaagtcagtggatcagaaatgca

SEQ ID NO: 4241163 - DNA, 25 bp, Homo sapien
gatcatctcagtcatattcacatat

SEQ ID NO: 4241164 - DNA, 25 bp, Homo sapien
aagaatacaatacacaggccgggcg

SEQ ID NO: 4241165 - DNA, 25 bp, Homo sapien
tgagcctgatcttactactaaatag

SEQ ID NO: 4241166 - DNA, 25 bp, Homo sapien
gagaaaggagcgtttcaacagttct

SEQ ID NO: 4241167 - DNA, 25 bp, Homo sapien
aaactggattcttctgagtgtgccc

SEQ ID NO: 4241168 - DNA, 25 bp, Homo sapien
ggtttagctgaaggatgtcggaagg

SEQ ID NO: 4241169 - DNA, 25 bp, Homo sapien
ttcaacagttcttttaacgctgagg

SEQ ID NO: 4241170 - DNA, 25 bp, Homo sapien
caccggagtgcaatctttcagcgag

SEQ ID NO: 4241171 - DNA, 25 bp, Homo sapien
taaacagaatgctgggagtgaacct

SEQ ID NO: 4241172 - DNA, 25 bp, Homo sapien
gcttatatggacctgtgcctaccga

SEQ ID NO: 4241173 - DNA, 25 bp, Homo sapien
cagaaatctaagtaaccgggtgcgg

SEQ ID NO: 4241174 - DNA, 25 bp, Homo sapien
aattctacacccagatgttatgctc

SEQ ID NO: 4241175 - DNA, 25 bp, Homo sapien
caggctgaattctacacccagatgt

SEQ ID NO: 4241176 - DNA, 25 bp, Homo sapien
ctcaggctgaattctacacccagat

SEQ ID NO: 4241177 - DNA, 25 bp, Homo sapien
tctacacccagatgttatgctcctc

SEQ ID NO: 4241178 - DNA, 25 bp, Homo sapien
ggtttccagaccagatagggcaaga

SEQ ID NO: 4241179 - DNA, 25 bp, Homo sapien
gaagagacgtgctttctccaaggct

SEQ ID NO: 4241180 - DNA, 25 bp, Homo sapien
tattccagggaactactatgtaagc

SEQ ID NO: 4241181 - DNA, 25 bp, Homo sapien
taccgcagggtgaaagcaacatcct

SEQ ID NO: 4241182 - DNA, 25 bp, Homo sapien
gacctcagtgtaaatatgagttaga

SEQ ID NO: 4241183 - DNA, 25 bp, Homo sapien
aaaataagcacttctccccttcaca

SEQ ID NO: 4241184 - DNA, 25 bp, Homo sapien
ctgaaagggacaacgtaacatgaaa

SEQ ID NO: 4241185 - DNA, 25 bp, Homo sapien
cttagatatgaaaattagtacctgg

SEQ ID NO: 4241186 - DNA, 25 bp, Homo sapien
agagcctggaccgtcactgcaacct

SEQ ID NO: 4241187 - DNA, 25 bp, Homo sapien
gagcctggaccgtcactgcaacctg

SEQ ID NO: 4241188 - DNA, 25 bp, Homo sapien
tgcaacctggctcaaacctttctct

SEQ ID NO: 4241189 - DNA, 25 bp, Homo sapien
gagagcctggaccgtcactgcaacc

SEQ ID NO: 4241190 - DNA, 25 bp, Homo sapien
aacagcagataactggtgctgctgt

SEQ ID NO: 4241191 - DNA, 25 bp, Homo sapien
aaacagcagataactggtgctgctg

SEQ ID NO: 4241192 - DNA, 25 bp, Homo sapien
cagcagataactggtgctgctgttg

SEQ ID NO: 4241193 - DNA, 25 bp, Homo sapien
acagcagataactggtgctgctgtt

SEQ ID NO: 4241194 - DNA, 25 bp, Homo sapien
tgctttctggcacgtgaaacacgcc

SEQ ID NO: 4241195 - DNA, 25 bp, Homo sapien
agtttagaaaccagcagaccagttg

SEQ ID NO: 4241196 - DNA, 25 bp, Homo sapien
tgttaggaatcatgggaacggtccc

SEQ ID NO: 4241197 - DNA, 25 bp, Homo sapien
taaaaacaatggcacagcatgcttg

SEQ ID NO: 4241198 - DNA, 25 bp, Homo sapien
gcctgggcgactgagcagaactcct

SEQ ID NO: 4241199 - DNA, 25 bp, Homo sapien
gggcgactgagcagaactccttctc

SEQ ID NO: 4241200 - DNA, 25 bp, Homo sapien
ctagcctgggcgactgagcagaact

SEQ ID NO: 4241201 - DNA, 25 bp, Homo sapien
tgggcgactgagcagaactccttct

SEQ ID NO: 4241202 - DNA, 25 bp, Homo sapien
tgaaaaacacgtgcaatgggccggg

SEQ ID NO: 4241203 - DNA, 25 bp, Homo sapien
gaaaaacacgtgcaatgggccgggc

SEQ ID NO: 4241204 - DNA, 25 bp, Homo sapien
aaacacgtgcaatgggccgggcgcc

SEQ ID NO: 4241205 - DNA, 25 bp, Homo sapien
catgaaaaacacgtgcaatgggccg

SEQ ID NO: 4241206 - DNA, 25 bp, Homo sapien
gaaactaggcttttccgagctagaa

SEQ ID NO: 4241207 - DNA, 25 bp, Homo sapien
gaagactatgcaaaacctaggcctt

SEQ ID NO: 4241208 - DNA, 25 bp, Homo sapien
tatgactgcagttgaagggaggcct

SEQ ID NO: 4241209 - DNA, 25 bp, Homo sapien
gaccaagtgcgctatcagcttcaga

SEQ ID NO: 4241210 - DNA, 25 bp, Homo sapien
gctaggaagatgctgtaagtgctta

SEQ ID NO: 4241211 - DNA, 25 bp, Homo sapien
gatgctgtaagtgcttaaattcagc

SEQ ID NO: 4241212 - DNA, 25 bp, Homo sapien
ccacacccagctaggaagatgctgt

SEQ ID NO: 4241213 - DNA, 25 bp, Homo sapien
tgtaagtgcttaaattcagccacag

SEQ ID NO: 4241214 - DNA, 25 bp, Homo sapien
tttcctccacccatcattgagtata

SEQ ID NO: 4241215 - DNA, 25 bp, Homo sapien
tgaacaccaaaggatatcaccaaca

SEQ ID NO: 4241216 - DNA, 25 bp, Homo sapien
aacttgagtaaaggctcctgtgcgg

SEQ ID NO: 4241217 - DNA, 25 bp, Homo sapien
gaaggaaaactagctgaaacttgag

SEQ ID NO: 4241218 - DNA, 25 bp, Homo sapien
gctacatttacctgataaaaagagg

SEQ ID NO: 4241219 - DNA, 25 bp, Homo sapien
tcaacatgatttgatccaaagctac

SEQ ID NO: 4241220 - DNA, 25 bp, Homo sapien
cattactttgaccaggtattcaaca

SEQ ID NO: 4241221 - DNA, 25 bp, Homo sapien
tgtttctctgcaagaacaaggaaga

SEQ ID NO: 4241222 - DNA, 25 bp, Homo sapien
gccaggctggcttgcgtatgttaaa

SEQ ID NO: 4241223 - DNA, 25 bp, Homo sapien
tataatttggagactgtactgaggc

SEQ ID NO: 4241224 - DNA, 25 bp, Homo sapien
tgttctataagattgggcattgaag

SEQ ID NO: 4241225 - DNA, 25 bp, Homo sapien
taaaaatgcacatggctaaattcta

SEQ ID NO: 4241226 - DNA, 25 bp, Homo sapien
tattacacgccactgaagtgttggc

SEQ ID NO: 4241227 - DNA, 25 bp, Homo sapien
gaaaatctctgtacgtggcaagggc

SEQ ID NO: 4241228 - DNA, 25 bp, Homo sapien
tccagacctggctattacaagagaa

SEQ ID NO: 4241229 - DNA, 25 bp, Homo sapien
tcttacactggagtcaagcaaagct

SEQ ID NO: 4241230 - DNA, 25 bp, Homo sapien
ctgtgtgtcactcttgcgcaggagc

SEQ ID NO: 4241231 - DNA, 25 bp, Homo sapien
cgaatctgtgtgtcactcttgcgca

SEQ ID NO: 4241232 - DNA, 25 bp, Homo sapien
gcttcacgaatctgtgtgtcactct

SEQ ID NO: 4241233 - DNA, 25 bp, Homo sapien
aatctgtgtgtcactcttgcgcagg

SEQ ID NO: 4241234 - DNA, 25 bp, Homo sapien
gatgtaagagatgtgacagcaccaa

SEQ ID NO: 4241235 - DNA, 25 bp, Homo sapien
gcaccaaactgacatgttgttctaa

SEQ ID NO: 4241236 - DNA, 25 bp, Homo sapien
caaactgacatgttgttctaacata

SEQ ID NO: 4241237 - DNA, 25 bp, Homo sapien
aagatgtaagagatgtgacagcacc

SEQ ID NO: 4241238 - DNA, 25 bp, Homo sapien
tgttgaattgctgtcagagttatgc

SEQ ID NO: 4241239 - DNA, 25 bp, Homo sapien
ccttattttgtgttgtcttgtggca

SEQ ID NO: 4241240 - DNA, 25 bp, Homo sapien
ggattctaggtacctgccgccacag

SEQ ID NO: 4241241 - DNA, 25 bp, Homo sapien
tccacaagtgagattaacctgtagg

SEQ ID NO: 4241242 - DNA, 25 bp, Homo sapien
tctgctttccacatgcggaggagcc

SEQ ID NO: 4241243 - DNA, 25 bp, Homo sapien
tgctcatggccactactaccacagg

SEQ ID NO: 4241244 - DNA, 25 bp, Homo sapien
caaggactctccagtcagtttgtgg

SEQ ID NO: 4241245 - DNA, 25 bp, Homo sapien
tagaagtctaccttatgctctaaac

SEQ ID NO: 4241246 - DNA, 25 bp, Homo sapien
gcactctggtgaccggacagtgaga

SEQ ID NO: 4241247 - DNA, 25 bp, Homo sapien
taggtcataacgtgtttggccagca

SEQ ID NO: 4241248 - DNA, 25 bp, Homo sapien
tgcgcggtctcagtaaaacgtgtgg

SEQ ID NO: 4241249 - DNA, 25 bp, Homo sapien
agtgagacgccctcctgtcgtgtgc

SEQ ID NO: 4241250 - DNA, 25 bp, Homo sapien
ggcccccccataacgctaggatgat

SEQ ID NO: 4241251 - DNA, 25 bp, Homo sapien
aaaggtcactaggaggtggaaggat

SEQ ID NO: 4241252 - DNA, 25 bp, Homo sapien
tgtaagtttatatggaagaattgtt

SEQ ID NO: 4241253 - DNA, 25 bp, Homo sapien
tgcactgggcctgagaatattgtaa

SEQ ID NO: 4241254 - DNA, 25 bp, Homo sapien
ttcgactccgccctcaatttaggca

SEQ ID NO: 4241255 - DNA, 25 bp, Homo sapien
ggccttgtgggattaaacatctttc

SEQ ID NO: 4241256 - DNA, 25 bp, Homo sapien
ggcatcttctccaaacgccagaaaa

SEQ ID NO: 4241257 - DNA, 25 bp, Homo sapien
ggaaatcggcttcgcactgaaataa

SEQ ID NO: 4241258 - DNA, 25 bp, Homo sapien
tggcggtaagagaaggacgaggccc

SEQ ID NO: 4241259 - DNA, 25 bp, Homo sapien
gcgactcgccaaggcacaggaacaa

SEQ ID NO: 4241260 - DNA, 25 bp, Homo sapien
ggcgactcgccaaggcacaggaaca

SEQ ID NO: 4241261 - DNA, 25 bp, Homo sapien
cggcgactcgccaaggcacaggaac

SEQ ID NO: 4241262 - DNA, 25 bp, Homo sapien
caatggctggcagagactccgatac

SEQ ID NO: 4241263 - DNA, 25 bp, Homo sapien
aaaacatcgtttcactccgttcagg

SEQ ID NO: 4241264 - DNA, 25 bp, Homo sapien
aaaatgcatgccgttatcagtaggc

SEQ ID NO: 4241265 - DNA, 25 bp, Homo sapien
ggaagcactgcctcatggacaactg

SEQ ID NO: 4241266 - DNA, 25 bp, Homo sapien
tttagaagtcccgttcccagcaggc

SEQ ID NO: 4241267 - DNA, 25 bp, Homo sapien
cttttagaagtcccgttcccagcag

SEQ ID NO: 4241268 - DNA, 25 bp, Homo sapien
atctcgggcgtaaacaccttcaatt

SEQ ID NO: 4241269 - DNA, 25 bp, Homo sapien
tgtttcatctcgggcgtaaacacct

SEQ ID NO: 4241270 - DNA, 25 bp, Homo sapien
gttccggagaccccgcttatagcca

SEQ ID NO: 4241271 - DNA, 25 bp, Homo sapien
ttccggagaccccgcttatagccag

SEQ ID NO: 4241272 - DNA, 25 bp, Homo sapien
tggttcgagcaatgtacaaaggata

SEQ ID NO: 4241273 - DNA, 25 bp, Homo sapien
gacgggcttttactgaatgagagaa

SEQ ID NO: 4241274 - DNA, 25 bp, Homo sapien
taaaggaacacattggctgtagaag

SEQ ID NO: 4241275 - DNA, 25 bp, Homo sapien
tgagagaaactactgtggttcgagc

SEQ ID NO: 4241276 - DNA, 25 bp, Homo sapien
tttaaatagccaaggaaggtctcac

SEQ ID NO: 4241277 - DNA, 25 bp, Homo sapien
tgtcctggccggaagaaagactgaa

SEQ ID NO: 4241278 - DNA, 25 bp, Homo sapien
atcacgggatgactagcgcaggcac

SEQ ID NO: 4241279 - DNA, 25 bp, Homo sapien
gggaaatgccatgaagtgatcacgg

SEQ ID NO: 4241280 - DNA, 25 bp, Homo sapien
tatcgagtaactattgtatgccagg

SEQ ID NO: 4241281 - DNA, 25 bp, Homo sapien
gaaactttaaatgcctagaacacca

SEQ ID NO: 4241282 - DNA, 25 bp, Homo sapien
caaggtgacctctacacgagtggct

SEQ ID NO: 4241283 - DNA, 25 bp, Homo sapien
tggttacccacttcatcacctgaga

SEQ ID NO: 4241284 - DNA, 25 bp, Homo sapien
gcccgagttacttttccccagatga

SEQ ID NO: 4241285 - DNA, 25 bp, Homo sapien
ttggtttgccgccaggagtgactgt

SEQ ID NO: 4241286 - DNA, 25 bp, Homo sapien
tttgccgccaggagtgactgtgttg

SEQ ID NO: 4241287 - DNA, 25 bp, Homo sapien
actgtttccatgggcccgagttact

SEQ ID NO: 4241288 - DNA, 25 bp, Homo sapien
tcagacgtccattttgctaaaaacc

SEQ ID NO: 4241289 - DNA, 25 bp, Homo sapien
gacgtccattttgctaaaaaccata

SEQ ID NO: 4241290 - DNA, 25 bp, Homo sapien
cgtccattttgctaaaaaccatact

SEQ ID NO: 4241291 - DNA, 25 bp, Homo sapien
ccattttgctaaaaaccatactcac

SEQ ID NO: 4241292 - DNA, 25 bp, Homo sapien
tgccactgcaccccagcctgggtga

SEQ ID NO: 4241293 - DNA, 25 bp, Homo sapien
tcgaggctgcaataagctgtgatta

SEQ ID NO: 4241294 - DNA, 25 bp, Homo sapien
gtcgaggctgcaataagctgtgatt

SEQ ID NO: 4241295 - DNA, 25 bp, Homo sapien
caaagtgagaccctgtctcccccca

SEQ ID NO: 4241296 - DNA, 25 bp, Homo sapien
tcaccagaaaactatttattcaagg

SEQ ID NO: 4241297 - DNA, 25 bp, Homo sapien
aactatttattcaaggctggctgtg

SEQ ID NO: 4241298 - DNA, 25 bp, Homo sapien
atcttcaccagaaaactatttattc

SEQ ID NO: 4241299 - DNA, 25 bp, Homo sapien
actatttattcaaggctggctgtgg

SEQ ID NO: 4241300 - DNA, 25 bp, Homo sapien
tagccttcagtctctacgtgaacat

SEQ ID NO: 4241301 - DNA, 25 bp, Homo sapien
tatacgtctacaaatcaagaaccgt

SEQ ID NO: 4241302 - DNA, 25 bp, Homo sapien
tgaacataccgtaagaaccggcact

SEQ ID NO: 4241303 - DNA, 25 bp, Homo sapien
tctctgaaaggctaccaattacatg

SEQ ID NO: 4241304 - DNA, 25 bp, Homo sapien
gccagcataggcaagagtcagaccc

SEQ ID NO: 4241305 - DNA, 25 bp, Homo sapien
tgtccagtcacaagtcccaagagct

SEQ ID NO: 4241306 - DNA, 25 bp, Homo sapien
tatccaaatgaactgccaaagccca

SEQ ID NO: 4241307 - DNA, 25 bp, Homo sapien
tgcatagtatcacaaagcacttggc

SEQ ID NO: 4241308 - DNA, 25 bp, Homo sapien
cgggcctgagcccgagtaacccact

SEQ ID NO: 4241309 - DNA, 25 bp, Homo sapien
gcctgagcccgagtaacccactcct

SEQ ID NO: 4241310 - DNA, 25 bp, Homo sapien
tgagcccgagtaacccactcctccg

SEQ ID NO: 4241311 - DNA, 25 bp, Homo sapien
ccgctccagcgccaccggctccggc

SEQ ID NO: 4241312 - DNA, 25 bp, Homo sapien
taaaacgcttcggacccacacagac

SEQ ID NO: 4241313 - DNA, 25 bp, Homo sapien
cgcccaacaggagtaaaacgcttcg

SEQ ID NO: 4241314 - DNA, 25 bp, Homo sapien
gacgggagtagatgtggcgctggcc

SEQ ID NO: 4241315 - DNA, 25 bp, Homo sapien
tgtcagaggggacgtggtgccggca

SEQ ID NO: 4241316 - DNA, 25 bp, Homo sapien
tgaccacatgatttgccttaagatg

SEQ ID NO: 4241317 - DNA, 25 bp, Homo sapien
catgatttgccttaagatgaacttt

SEQ ID NO: 4241318 - DNA, 25 bp, Homo sapien
gattcttaaatgctcatcaacatct

SEQ ID NO: 4241319 - DNA, 25 bp, Homo sapien
cacttttatcatagacagtcttgat

SEQ ID NO: 4241320 - DNA, 25 bp, Homo sapien
ttccattttgaagctacactagtcc

SEQ ID NO: 4241321 - DNA, 25 bp, Homo sapien
ggtctgttactgtccacatccaagt

SEQ ID NO: 4241322 - DNA, 25 bp, Homo sapien
taaagactttaatcatatcccatgg

SEQ ID NO: 4241323 - DNA, 25 bp, Homo sapien
tgggccagacctctttctggtaaca

SEQ ID NO: 4241324 - DNA, 25 bp, Homo sapien
caagattctttttctcagggagcaa

SEQ ID NO: 4241325 - DNA, 25 bp, Homo sapien
ctttacaagattctttttctcaggg

SEQ ID NO: 4241326 - DNA, 25 bp, Homo sapien
aagattctttttctcagggagcaac

SEQ ID NO: 4241327 - DNA, 25 bp, Homo sapien
taagaaatcgcttgtgggaaaagct

SEQ ID NO: 4241328 - DNA, 25 bp, Homo sapien
gtcgacggacctgaaaagtcttctc

SEQ ID NO: 4241329 - DNA, 25 bp, Homo sapien
ctctaaataagaaatcgcttgtggg

SEQ ID NO: 4241330 - DNA, 25 bp, Homo sapien
tgctaagtaagatagtgcccgcagg

SEQ ID NO: 4241331 - DNA, 25 bp, Homo sapien
tactaaacggctgaagaaaatgatc

SEQ ID NO: 4241332 - DNA, 25 bp, Homo sapien
aataccttgcagttaggtccctaag

SEQ ID NO: 4241333 - DNA, 25 bp, Homo sapien
cactgtatccacatgaaagagggaa

SEQ ID NO: 4241334 - DNA, 25 bp, Homo sapien
catggaaaccaactggtagctgcta

SEQ ID NO: 4241335 - DNA, 25 bp, Homo sapien
cccggtgcagtacctgtgaggatcg

SEQ ID NO: 4241336 - DNA, 25 bp, Homo sapien
tgtgaggatcgttttccttccggag

SEQ ID NO: 4241337 - DNA, 25 bp, Homo sapien
tcaggaacaataacggggccgcact

SEQ ID NO: 4241338 - DNA, 25 bp, Homo sapien
cgcactttgtgtgtgcggcacactc

SEQ ID NO: 4241339 - DNA, 25 bp, Homo sapien
caccaacgtaaagaacaaagtctgc

SEQ ID NO: 4241340 - DNA, 25 bp, Homo sapien
ggctgcataagagatgatgttttca

SEQ ID NO: 4241341 - DNA, 25 bp, Homo sapien
atgaggccacttacccccacggtag

SEQ ID NO: 4241342 - DNA, 25 bp, Homo sapien
gctgacaataggctgcataagagat

SEQ ID NO: 4241343 - DNA, 25 bp, Homo sapien
taataacagtctaatcacggtctcc

SEQ ID NO: 4241344 - DNA, 25 bp, Homo sapien
agcatgctattcctgtctaccagag

SEQ ID NO: 4241345 - DNA, 25 bp, Homo sapien
tggcaaatgcaagattcctgtaatc

SEQ ID NO: 4241346 - DNA, 25 bp, Homo sapien
gctttaagagttcccacattagatc

SEQ ID NO: 4241347 - DNA, 25 bp, Homo sapien
gatcatatttggacacaggttagca

SEQ ID NO: 4241348 - DNA, 25 bp, Homo sapien
caggttagcatatcctgctattggc

SEQ ID NO: 4241349 - DNA, 25 bp, Homo sapien
cagggcatgaataacctcatgtttc

SEQ ID NO: 4241350 - DNA, 25 bp, Homo sapien
tcactgtggacagcatcccaacaaa

SEQ ID NO: 4241351 - DNA, 25 bp, Homo sapien
aaaatgtcttcaagtgaaaaacatc

SEQ ID NO: 4241352 - DNA, 25 bp, Homo sapien
agagcactgatactaacgggaacgt

SEQ ID NO: 4241353 - DNA, 25 bp, Homo sapien
aaaacatcaaggctgattacaggcc

SEQ ID NO: 4241354 - DNA, 25 bp, Homo sapien
tacaggcctgcgatcaaaagagagc

SEQ ID NO: 4241355 - DNA, 25 bp, Homo sapien
ttccatctttatcatggtagaatgc

SEQ ID NO: 4241356 - DNA, 25 bp, Homo sapien
attaaaaggtgggaggccatctgca

SEQ ID NO: 4241357 - DNA, 25 bp, Homo sapien
tcatggtagaatgcaaacagcccag

SEQ ID NO: 4241358 - DNA, 25 bp, Homo sapien
tttccatctttatcatggtagaatg

SEQ ID NO: 4241359 - DNA, 25 bp, Homo sapien
ggagatacacagtgtgacgaactat

SEQ ID NO: 4241360 - DNA, 25 bp, Homo sapien
tatcactccattgatataatcccag

SEQ ID NO: 4241361 - DNA, 25 bp, Homo sapien
caacacgaggcgttaccaggagata

SEQ ID NO: 4241362 - DNA, 25 bp, Homo sapien
tatcttattatctcgaacatcccat

SEQ ID NO: 4241363 - DNA, 25 bp, Homo sapien
ccaattttagtctttgtgctgccaa

SEQ ID NO: 4241364 - DNA, 25 bp, Homo sapien
aattttagtctttgtgctgccaaag

SEQ ID NO: 4241365 - DNA, 25 bp, Homo sapien
tccaattttagtctttgtgctgcca

SEQ ID NO: 4241366 - DNA, 25 bp, Homo sapien
ttttagtctttgtgctgccaaagcg

SEQ ID NO: 4241367 - DNA, 25 bp, Homo sapien
gattttcaagttccattccctctag

SEQ ID NO: 4241368 - DNA, 25 bp, Homo sapien
caatcaaaatgttttcgtgcttcct

SEQ ID NO: 4241369 - DNA, 25 bp, Homo sapien
ccctctagaactggacaatcaaaat

SEQ ID NO: 4241370 - DNA, 25 bp, Homo sapien
caatggttgagctcagtgcccacac

SEQ ID NO: 4241371 - DNA, 25 bp, Homo sapien
caattcagcgtgtgtttgcacacac

SEQ ID NO: 4241372 - DNA, 25 bp, Homo sapien
aatagacaattcagcgtgtgtttgc

SEQ ID NO: 4241373 - DNA, 25 bp, Homo sapien
gtaaggagtgactgtatctggaaag

SEQ ID NO: 4241374 - DNA, 25 bp, Homo sapien
aaaagtaaggagtgactgtatctgg

SEQ ID NO: 4241375 - DNA, 25 bp, Homo sapien
gtggtcttgtgctctggtacttgag

SEQ ID NO: 4241376 - DNA, 25 bp, Homo sapien
ttgtggtcttgtgctctggtacttg

SEQ ID NO: 4241377 - DNA, 25 bp, Homo sapien
tattgtggtcttgtgctctggtact

SEQ ID NO: 4241378 - DNA, 25 bp, Homo sapien
ctattgtggtcttgtgctctggtac

SEQ ID NO: 4241379 - DNA, 25 bp, Homo sapien
gccagagtgattcgagagagtactc

SEQ ID NO: 4241380 - DNA, 25 bp, Homo sapien
agagagtactcgattctgagtgtga

SEQ ID NO: 4241381 - DNA, 25 bp, Homo sapien
gattcgagagagtactcgattctga

SEQ ID NO: 4241382 - DNA, 25 bp, Homo sapien
agtgattcgagagagtactcgattc

SEQ ID NO: 4241383 - DNA, 25 bp, Homo sapien
tgacaaagtcacagcccattcctcg

SEQ ID NO: 4241384 - DNA, 25 bp, Homo sapien
tctctgctgatcaatccagaattta

SEQ ID NO: 4241385 - DNA, 25 bp, Homo sapien
ggccccagtctaacttctcagccat

SEQ ID NO: 4241386 - DNA, 25 bp, Homo sapien
gatcaatccagaatttacagctctt

SEQ ID NO: 4241387 - DNA, 25 bp, Homo sapien
gagcttcaaccgcaaagcactcagt

SEQ ID NO: 4241388 - DNA, 25 bp, Homo sapien
gaaacacgtaaaatacttgccacag

SEQ ID NO: 4241389 - DNA, 25 bp, Homo sapien
ggtgtctcagcatacatctttaggg

SEQ ID NO: 4241390 - DNA, 25 bp, Homo sapien
tttgaagtcgtcacacaggtctggg

SEQ ID NO: 4241391 - DNA, 25 bp, Homo sapien
tggtaaaggcttagggaacttctgc

SEQ ID NO: 4241392 - DNA, 25 bp, Homo sapien
agcgtgtcacagtaagggctcagca

SEQ ID NO: 4241393 - DNA, 25 bp, Homo sapien
tggtcctgtctgcaagttagctgca

SEQ ID NO: 4241394 - DNA, 25 bp, Homo sapien
cagtgggttacttctgagcgtgtca

SEQ ID NO: 4241395 - DNA, 25 bp, Homo sapien
tttccacggagccaccataataagg

SEQ ID NO: 4241396 - DNA, 25 bp, Homo sapien
gcaaatcttctgcaggtattccact

SEQ ID NO: 4241397 - DNA, 25 bp, Homo sapien
tctacaatctgagctgcgctgatat

SEQ ID NO: 4241398 - DNA, 25 bp, Homo sapien
ggcagtagtcagcaatttccacgga

SEQ ID NO: 4241399 - DNA, 25 bp, Homo sapien
cacttctccataacgaatgctgatt

SEQ ID NO: 4241400 - DNA, 25 bp, Homo sapien
tctccataacgaatgctgatttctg

SEQ ID NO: 4241401 - DNA, 25 bp, Homo sapien
ggtccatacttttcagcgccatagt

SEQ ID NO: 4241402 - DNA, 25 bp, Homo sapien
tctgaattagacaaacggaatgagg

SEQ ID NO: 4241403 - DNA, 25 bp, Homo sapien
tttatccataatcaccactgggagg

SEQ ID NO: 4241404 - DNA, 25 bp, Homo sapien
taatgattgcatgctaccaggcgcc

SEQ ID NO: 4241405 - DNA, 25 bp, Homo sapien
tatagtcgagattagcacaggccag

SEQ ID NO: 4241406 - DNA, 25 bp, Homo sapien
tcgagatcccaagatgccagctgtg

SEQ ID NO: 4241407 - DNA, 25 bp, Homo sapien
gaggacagagctcacagaagtccca

SEQ ID NO: 4241408 - DNA, 25 bp, Homo sapien
gagcaggtttccatcgtgaatccag

SEQ ID NO: 4241409 - DNA, 25 bp, Homo sapien
ccattcatctggatactgacaggga

SEQ ID NO: 4241410 - DNA, 25 bp, Homo sapien
tgcccagcccgactacacaaatatg

SEQ ID NO: 4241411 - DNA, 25 bp, Homo sapien
tgcaagggagaggaccatcaataat

SEQ ID NO: 4241412 - DNA, 25 bp, Homo sapien
aatgacaacaggcagacggactgtg

SEQ ID NO: 4241413 - DNA, 25 bp, Homo sapien
aaatgatgtatccactatgtcaagg

SEQ ID NO: 4241414 - DNA, 25 bp, Homo sapien
ttgtaccttctaagtagggtgacca

SEQ ID NO: 4241415 - DNA, 25 bp, Homo sapien
agcagaggaaacagattgcctagca

SEQ ID NO: 4241416 - DNA, 25 bp, Homo sapien
caccaggctcgaggaacaggaacaa

SEQ ID NO: 4241417 - DNA, 25 bp, Homo sapien
gccatatacacagaagaaatccagc

SEQ ID NO: 4241418 - DNA, 25 bp, Homo sapien
aaacagattgcctagcagaagccag

SEQ ID NO: 4241419 - DNA, 25 bp, Homo sapien
tgcttcaaggtctgatggtcgtcaa

SEQ ID NO: 4241420 - DNA, 25 bp, Homo sapien
ggtcgtcaattcttccaagccaaag

SEQ ID NO: 4241421 - DNA, 25 bp, Homo sapien
cagggtctaactctatcgtgcaggc

SEQ ID NO: 4241422 - DNA, 25 bp, Homo sapien
tggcaaaaagggcaagcacggttaa

SEQ ID NO: 4241423 - DNA, 25 bp, Homo sapien
agttctgccgtaaactgccacatag

SEQ ID NO: 4241424 - DNA, 25 bp, Homo sapien
cagcacagtgatagcagttctggaa

SEQ ID NO: 4241425 - DNA, 25 bp, Homo sapien
acagcagttctgccgtaaactgcca

SEQ ID NO: 4241426 - DNA, 25 bp, Homo sapien
gcacagtgatagcagttctggaagc

SEQ ID NO: 4241427 - DNA, 25 bp, Homo sapien
ggagaatacaaccagaagctgagct

SEQ ID NO: 4241428 - DNA, 25 bp, Homo sapien
ctctgaagagggatgaatacagagg

SEQ ID NO: 4241429 - DNA, 25 bp, Homo sapien
agaatacaaccagaagctgagctct

SEQ ID NO: 4241430 - DNA, 25 bp, Homo sapien
tcatggagaatacaaccagaagctg

SEQ ID NO: 4241431 - DNA, 25 bp, Homo sapien
gagagaaagaatgggcatcgcctat

SEQ ID NO: 4241432 - DNA, 25 bp, Homo sapien
gaccggaatctatgtagtaacagga

SEQ ID NO: 4241433 - DNA, 25 bp, Homo sapien
ggataggctctacaccaaacttata

SEQ ID NO: 4241434 - DNA, 25 bp, Homo sapien
tacagtggacgctactggataggct

SEQ ID NO: 4241435 - DNA, 25 bp, Homo sapien
ttacaatgccatggaggaataggag

SEQ ID NO: 4241436 - DNA, 25 bp, Homo sapien
gtggttacaatgccatggaggaata

SEQ ID NO: 4241437 - DNA, 25 bp, Homo sapien
tacaatgccatggaggaataggagg

SEQ ID NO: 4241438 - DNA, 25 bp, Homo sapien
ggttacaatgccatggaggaatagg

SEQ ID NO: 4241439 - DNA, 25 bp, Homo sapien
ttacaatgccatggaggaataggag

SEQ ID NO: 4241440 - DNA, 25 bp, Homo sapien
tacaatgccatggaggaataggagg

SEQ ID NO: 4241441 - DNA, 25 bp, Homo sapien
gttacaatgccatggaggaatagga

SEQ ID NO: 4241442 - DNA, 25 bp, Homo sapien
ttacaatgccatggaggagtaggag

SEQ ID NO: 4241443 - DNA, 25 bp, Homo sapien
cataatttcttcaatggagtactga

SEQ ID NO: 4241444 - DNA, 25 bp, Homo sapien
tcttcaatggagtactgaatagcta

SEQ ID NO: 4241445 - DNA, 25 bp, Homo sapien
caatggagtactgaatagctatatg

SEQ ID NO: 4241446 - DNA, 25 bp, Homo sapien
gcataatttcttcaatggagtactg

SEQ ID NO: 4241447 - DNA, 25 bp, Homo sapien
ggcgaccaggttcccaagcttaata

SEQ ID NO: 4241448 - DNA, 25 bp, Homo sapien
gatggcctcagtcagtaagtcttct

SEQ ID NO: 4241449 - DNA, 25 bp, Homo sapien
cttactgaagaggacgggagacatc

SEQ ID NO: 4241450 - DNA, 25 bp, Homo sapien
tggcccgcagaccattacgcaggtt

SEQ ID NO: 4241451 - DNA, 25 bp, Homo sapien
aaggcaccgagcacagacactgtga

SEQ ID NO: 4241452 - DNA, 25 bp, Homo sapien
cacgacgactcatgtgccctgagag

SEQ ID NO: 4241453 - DNA, 25 bp, Homo sapien
tagtgtccactgtgacaagggtctg

SEQ ID NO: 4241454 - DNA, 25 bp, Homo sapien
gacacggacagtggtaaggcaccga

SEQ ID NO: 4241455 - DNA, 25 bp, Homo sapien
tcaggagtgcctgacattgacattg

SEQ ID NO: 4241456 - DNA, 25 bp, Homo sapien
tagtgacccattcggatcaggagtg

SEQ ID NO: 4241457 - DNA, 25 bp, Homo sapien
tcaagcaagtttgtaccacccagag

SEQ ID NO: 4241458 - DNA, 25 bp, Homo sapien
gaagccagtctctcttaattcagag

SEQ ID NO: 4241459 - DNA, 25 bp, Homo sapien
gaagctatttggtcataaatctttc

SEQ ID NO: 4241460 - DNA, 25 bp, Homo sapien
ttcaaatgttaggtagactcaccag

SEQ ID NO: 4241461 - DNA, 25 bp, Homo sapien
gtgtctttctagcaattcatccatt

SEQ ID NO: 4241462 - DNA, 25 bp, Homo sapien
cacacattttgtcggaaaagtttgg

SEQ ID NO: 4241463 - DNA, 25 bp, Homo sapien
ctgctacttaaattgtagagaccct

SEQ ID NO: 4241464 - DNA, 25 bp, Homo sapien
cttatccctctgctacttaaattgt

SEQ ID NO: 4241465 - DNA, 25 bp, Homo sapien
gaaaggtgcgctgtcttatccctct

SEQ ID NO: 4241466 - DNA, 25 bp, Homo sapien
gtgaaaggtgcgctgtcttatccct

SEQ ID NO: 4241467 - DNA, 25 bp, Homo sapien
tcctttgaacggtttcttctcatct

SEQ ID NO: 4241468 - DNA, 25 bp, Homo sapien
ttcctttgaacggtttcttctcatc

SEQ ID NO: 4241469 - DNA, 25 bp, Homo sapien
tatgtgcttctcactggaatgggaa

SEQ ID NO: 4241470 - DNA, 25 bp, Homo sapien
tgggaagaggcggtcttgccttttc

SEQ ID NO: 4241471 - DNA, 25 bp, Homo sapien
gctgcgttcctcttctggacagttc

SEQ ID NO: 4241472 - DNA, 25 bp, Homo sapien
ctgcgttcctcttctggacagttcc

SEQ ID NO: 4241473 - DNA, 25 bp, Homo sapien
caagctgcgttcctcttctggacag

SEQ ID NO: 4241474 - DNA, 25 bp, Homo sapien
aagctgcgttcctcttctggacagt

SEQ ID NO: 4241475 - DNA, 25 bp, Homo sapien
gatggccttatggttaagaaatgag

SEQ ID NO: 4241476 - DNA, 25 bp, Homo sapien
caaagatggccttatggttaagaaa

SEQ ID NO: 4241477 - DNA, 25 bp, Homo sapien
atcaaagatggccttatggttaaga

SEQ ID NO: 4241478 - DNA, 25 bp, Homo sapien
tggccttatggttaagaaatgagag

SEQ ID NO: 4241479 - DNA, 25 bp, Homo sapien
ccgccattaggtagcggccgtgacg

SEQ ID NO: 4241480 - DNA, 25 bp, Homo sapien
ccatcagctccgtgtcttcggtgta

SEQ ID NO: 4241481 - DNA, 25 bp, Homo sapien
cgtgtcttcggtgtagcgtcccttg

SEQ ID NO: 4241482 - DNA, 25 bp, Homo sapien
gctccgtgtcttcggtgtagcgtcc

SEQ ID NO: 4241483 - DNA, 25 bp, Homo sapien
tgggatgtcacagacggctgttttt

SEQ ID NO: 4241484 - DNA, 25 bp, Homo sapien
tagcccccagggtgggatgtcacag

SEQ ID NO: 4241485 - DNA, 25 bp, Homo sapien
ttttagcccccagggtgggatgtca

SEQ ID NO: 4241486 - DNA, 25 bp, Homo sapien
gggatgtcacagacggctgttttta

SEQ ID NO: 4241487 - DNA, 25 bp, Homo sapien
gccgcattattcccaacgaaggtgg

SEQ ID NO: 4241488 - DNA, 25 bp, Homo sapien
cattattcccaacgaaggtggcgac

SEQ ID NO: 4241489 - DNA, 25 bp, Homo sapien
gcattattcccaacgaaggtggcga

SEQ ID NO: 4241490 - DNA, 25 bp, Homo sapien
tggatggccgcattattcccaacga

SEQ ID NO: 4241491 - DNA, 25 bp, Homo sapien
actgctctgagacacgcttgaagag

SEQ ID NO: 4241492 - DNA, 25 bp, Homo sapien
tgctgtaaactgctctgagacacgc

SEQ ID NO: 4241493 - DNA, 25 bp, Homo sapien
tgtaaactgctctgagacacgcttg

SEQ ID NO: 4241494 - DNA, 25 bp, Homo sapien
tagaggaaggccttgcacctgaaca

SEQ ID NO: 4241495 - DNA, 25 bp, Homo sapien
cctcctcctcggcatactcctcatc

SEQ ID NO: 4241496 - DNA, 25 bp, Homo sapien
ctcctcggccgtggcatcctgatat

SEQ ID NO: 4241497 - DNA, 25 bp, Homo sapien
atcctgatattgctgatattcagac

SEQ ID NO: 4241498 - DNA, 25 bp, Homo sapien
ctcctcggcatactcctcatcctcc

SEQ ID NO: 4241499 - DNA, 25 bp, Homo sapien
accaagagaccatcacacaggccgt

SEQ ID NO: 4241500 - DNA, 25 bp, Homo sapien
ttaccaagagaccatcacacaggcc

SEQ ID NO: 4241501 - DNA, 25 bp, Homo sapien
caagagaccatcacacaggccgtgg

SEQ ID NO: 4241502 - DNA, 25 bp, Homo sapien
agagaccatcacacaggccgtggac

SEQ ID NO: 4241503 - DNA, 25 bp, Homo sapien
gggcagccaaacagctggcagaggc

SEQ ID NO: 4241504 - DNA, 25 bp, Homo sapien
ggcagccaaacagctggcagaggcc

SEQ ID NO: 4241505 - DNA, 25 bp, Homo sapien
cgtggaagaaggtgacaccaggcag

SEQ ID NO: 4241506 - DNA, 25 bp, Homo sapien
gagcccgtatcagagcagagtggcc

SEQ ID NO: 4241507 - DNA, 25 bp, Homo sapien
agaaggtgacaccaggcagaaacca

SEQ ID NO: 4241508 - DNA, 25 bp, Homo sapien
agagcccgtatcagagcagagtggc

SEQ ID NO: 4241509 - DNA, 25 bp, Homo sapien
atccgtttgtacattttgctctcgt

SEQ ID NO: 4241510 - DNA, 25 bp, Homo sapien
gaatataaggagatccgtttgtaca

SEQ ID NO: 4241511 - DNA, 25 bp, Homo sapien
cttgaatataaggagatccgtttgt

SEQ ID NO: 4241512 - DNA, 25 bp, Homo sapien
cgtttgtacattttgctctcgtgca

SEQ ID NO: 4241513 - DNA, 25 bp, Homo sapien
tctgaagggatgcacggattcacga

SEQ ID NO: 4241514 - DNA, 25 bp, Homo sapien
cgcatcggaaggcagtcgtctgaag

SEQ ID NO: 4241515 - DNA, 25 bp, Homo sapien
aaggcagtcgtctgaagggatgcac

SEQ ID NO: 4241516 - DNA, 25 bp, Homo sapien
cagtcgtctgaagggatgcacggat

SEQ ID NO: 4241517 - DNA, 25 bp, Homo sapien
gttctctgatgtagctgaaggtttc

SEQ ID NO: 4241518 - DNA, 25 bp, Homo sapien
tctacgtgtttcttgggcagaggac

SEQ ID NO: 4241519 - DNA, 25 bp, Homo sapien
cagctgtcgcactgccatgggttct

SEQ ID NO: 4241520 - DNA, 25 bp, Homo sapien
tgggacaagtgtgcctgatcatggt

SEQ ID NO: 4241521 - DNA, 25 bp, Homo sapien
tcaacgggacagacatgggacaagt

SEQ ID NO: 4241522 - DNA, 25 bp, Homo sapien
tcgaatcacaggtttataaaatcca

SEQ ID NO: 4241523 - DNA, 25 bp, Homo sapien
gcaagctgtcccagagttcatggag

SEQ ID NO: 4241524 - DNA, 25 bp, Homo sapien
ttcatggagcggaaaggctcgagaa

SEQ ID NO: 4241525 - DNA, 25 bp, Homo sapien
gcaactgaggatgctcgaatcacag

SEQ ID NO: 4241526 - DNA, 25 bp, Homo sapien
ttttgtttgcgaggccacagggaaa

SEQ ID NO: 4241527 - DNA, 25 bp, Homo sapien
ttttttgtttgcgaggccacaggga

SEQ ID NO: 4241528 - DNA, 25 bp, Homo sapien
ttcttttttgtttgcgaggccacag

SEQ ID NO: 4241529 - DNA, 25 bp, Homo sapien
tcttttttgtttgcgaggccacagg

SEQ ID NO: 4241530 - DNA, 25 bp, Homo sapien
tggtgtaaccagaatgaaaatgccc

SEQ ID NO: 4241531 - DNA, 25 bp, Homo sapien
taaacagctttacccaggaatgccc

SEQ ID NO: 4241532 - DNA, 25 bp, Homo sapien
tgagaacaactgtcaagccagcatg

SEQ ID NO: 4241533 - DNA, 25 bp, Homo sapien
tccgagaccggcaatactgggaggc

SEQ ID NO: 4241534 - DNA, 25 bp, Homo sapien
cacccatggaccgaagcatcttgtt

SEQ ID NO: 4241535 - DNA, 25 bp, Homo sapien
tggcaaacgcgagcagatgaaggtc

SEQ ID NO: 4241536 - DNA, 25 bp, Homo sapien
agcatcttgttagatgagggccgcc

SEQ ID NO: 4241537 - DNA, 25 bp, Homo sapien
tgaaggtcatgtaggagacgaaaga

SEQ ID NO: 4241538 - DNA, 25 bp, Homo sapien
gacttccgtgggaaaccaccatctc

SEQ ID NO: 4241539 - DNA, 25 bp, Homo sapien
cagaggcgtcacttagggaccagac

SEQ ID NO: 4241540 - DNA, 25 bp, Homo sapien
ctgggagattctgatgtaggcagca

SEQ ID NO: 4241541 - DNA, 25 bp, Homo sapien
cctgagtctgcaccacatgacggga

SEQ ID NO: 4241542 - DNA, 25 bp, Homo sapien
ccctccggtggatctccgaagttca

SEQ ID NO: 4241543 - DNA, 25 bp, Homo sapien
catgacttttgaaaaacctgctgag

SEQ ID NO: 4241544 - DNA, 25 bp, Homo sapien
atgctcaggtgctcgcggtcgagct

SEQ ID NO: 4241545 - DNA, 25 bp, Homo sapien
ttcggacaattacacgccatgactt

SEQ ID NO: 4241546 - DNA, 25 bp, Homo sapien
tgtccctgtagggatgacggcgcct

SEQ ID NO: 4241547 - DNA, 25 bp, Homo sapien
cacggtccccaggtgttcctagaga

SEQ ID NO: 4241548 - DNA, 25 bp, Homo sapien
aggctgggccctctcaggtgtccct

SEQ ID NO: 4241549 - DNA, 25 bp, Homo sapien
aggctgggtcgtccctggccacggt

SEQ ID NO: 4241550 - DNA, 25 bp, Homo sapien
cagcttccccagtcgttcctgagga

SEQ ID NO: 4241551 - DNA, 25 bp, Homo sapien
gcagcctcggggaccatgaagccac

SEQ ID NO: 4241552 - DNA, 25 bp, Homo sapien
agcctcggggaccatgaagccacag

SEQ ID NO: 4241553 - DNA, 25 bp, Homo sapien
cacagcttccccagtcgttcctgag

SEQ ID NO: 4241554 - DNA, 25 bp, Homo sapien
ggttcagcacagacgctcttgctca

SEQ ID NO: 4241555 - DNA, 25 bp, Homo sapien
cgccatggttcagcacagacgctct

SEQ ID NO: 4241556 - DNA, 25 bp, Homo sapien
agcacagacgctcttgctcacagtt

SEQ ID NO: 4241557 - DNA, 25 bp, Homo sapien
ctctggtggcgccatggttcagcac

SEQ ID NO: 4241558 - DNA, 25 bp, Homo sapien
tgctttcagtacaacataccggagt

SEQ ID NO: 4241559 - DNA, 25 bp, Homo sapien
tgggacactgcaaatctggtacagc

SEQ ID NO: 4241560 - DNA, 25 bp, Homo sapien
cataccggagtattttgtgggacac

SEQ ID NO: 4241561 - DNA, 25 bp, Homo sapien
tagttacctgggagagtgtccatgc

SEQ ID NO: 4241562 - DNA, 25 bp, Homo sapien
cattagcatacgaaagacacattac

SEQ ID NO: 4241563 - DNA, 25 bp, Homo sapien
cattacttcgtacattcccaaggct

SEQ ID NO: 4241564 - DNA, 25 bp, Homo sapien
tcatgacaaggttgcttcccttggc

SEQ ID NO: 4241565 - DNA, 25 bp, Homo sapien
gctctgtttcaggacactgcagcag

SEQ ID NO: 4241566 - DNA, 25 bp, Homo sapien
tagctgaagggaacatacaggctct

SEQ ID NO: 4241567 - DNA, 25 bp, Homo sapien
cagaccaaatcttgggtaccagctg

SEQ ID NO: 4241568 - DNA, 25 bp, Homo sapien
tcagtcctaggaatacacgtcatgc

SEQ ID NO: 4241569 - DNA, 25 bp, Homo sapien
caggctcttgccttaagggaagcgc

SEQ ID NO: 4241570 - DNA, 25 bp, Homo sapien
ggggtctacagtagtatttgaagga

SEQ ID NO: 4241571 - DNA, 25 bp, Homo sapien
tgaataaacactggggtctacagta

SEQ ID NO: 4241572 - DNA, 25 bp, Homo sapien
cactggggtctacagtagtatttga

SEQ ID NO: 4241573 - DNA, 25 bp, Homo sapien
taaacactggggtctacagtagtat

SEQ ID NO: 4241574 - DNA, 25 bp, Homo sapien
tttttctgccctcttgggcttctga

SEQ ID NO: 4241575 - DNA, 25 bp, Homo sapien
tgccctcttgggcttctgaaatgaa

SEQ ID NO: 4241576 - DNA, 25 bp, Homo sapien
ttctttttctgccctcttgggcttc

SEQ ID NO: 4241577 - DNA, 25 bp, Homo sapien
gccctcttgggcttctgaaatgaaa

SEQ ID NO: 4241578 - DNA, 25 bp, Homo sapien
attttccgttccccagcattggcgg

SEQ ID NO: 4241579 - DNA, 25 bp, Homo sapien
cagagttgaactccctcattttccg

SEQ ID NO: 4241580 - DNA, 25 bp, Homo sapien
ctcattttccgttccccagcattgg

SEQ ID NO: 4241581 - DNA, 25 bp, Homo sapien
ctccctcattttccgttccccagca

SEQ ID NO: 4241582 - DNA, 25 bp, Homo sapien
aggagcatggcccctgtccacagat

SEQ ID NO: 4241583 - DNA, 25 bp, Homo sapien
agatgcacctggcatgaggcgtgcc

SEQ ID NO: 4241584 - DNA, 25 bp, Homo sapien
gatgagtttcgtctcctccactgga

SEQ ID NO: 4241585 - DNA, 25 bp, Homo sapien
acagaggcagatgagtttcgtctcc

SEQ ID NO: 4241586 - DNA, 25 bp, Homo sapien
tcacaccaagacatgcacctggcca

SEQ ID NO: 4241587 - DNA, 25 bp, Homo sapien
cacaccaagacatgcacctggccac

SEQ ID NO: 4241588 - DNA, 25 bp, Homo sapien
gcagagcctcggaagctaccgaccc

SEQ ID NO: 4241589 - DNA, 25 bp, Homo sapien
cccgcagagcctcggaagctaccga

SEQ ID NO: 4241590 - DNA, 25 bp, Homo sapien
ccaccttgactcagtaggacttact

SEQ ID NO: 4241591 - DNA, 25 bp, Homo sapien
tactgtagaattctggccttcagac

SEQ ID NO: 4241592 - DNA, 25 bp, Homo sapien
tactcaggaggctgaggcaggagaa

SEQ ID NO: 4241593 - DNA, 25 bp, Homo sapien
cacgccactgccagcctggatgaca

SEQ ID NO: 4241594 - DNA, 25 bp, Homo sapien
cgggcgcctgtagtcccagctactc

SEQ ID NO: 4241595 - DNA, 25 bp, Homo sapien
aatacaaaacagcagggcatggtgg

SEQ ID NO: 4241596 - DNA, 25 bp, Homo sapien
acgtagatcagcgatacgatgattc

SEQ ID NO: 4241597 - DNA, 25 bp, Homo sapien
gtagatcagcgatacgatgattcca

SEQ ID NO: 4241598 - DNA, 25 bp, Homo sapien
gtttacgtagatcagcgatacgatg

SEQ ID NO: 4241599 - DNA, 25 bp, Homo sapien
ttacgtagatcagcgatacgatgat

SEQ ID NO: 4241600 - DNA, 25 bp, Homo sapien
ggcaccttggtgagtactgaacatt

SEQ ID NO: 4241601 - DNA, 25 bp, Homo sapien
gatagaatagtatcagggcaatgat

SEQ ID NO: 4241602 - DNA, 25 bp, Homo sapien
taaaggtggcttcaggatagaatag

SEQ ID NO: 4241603 - DNA, 25 bp, Homo sapien
tttgatgtataccaacagagagagg

SEQ ID NO: 4241604 - DNA, 25 bp, Homo sapien
ttgatttatcaagttgtaaatcttc

SEQ ID NO: 4241605 - DNA, 25 bp, Homo sapien
agttgatttatcaagttgtaaatct

SEQ ID NO: 4241606 - DNA, 25 bp, Homo sapien
ctgacaaagttgatttatcaagttg

SEQ ID NO: 4241607 - DNA, 25 bp, Homo sapien
gatttatcaagttgtaaatcttcac

SEQ ID NO: 4241608 - DNA, 25 bp, Homo sapien
aaaagggtatgggatcatcaccgga

SEQ ID NO: 4241609 - DNA, 25 bp, Homo sapien
aaagggtatgggatcatcaccggac

SEQ ID NO: 4241610 - DNA, 25 bp, Homo sapien
gaaaaaagggtatgggatcatcacc

SEQ ID NO: 4241611 - DNA, 25 bp, Homo sapien
gactggaaaaaagggtatgggatca

SEQ ID NO: 4241612 - DNA, 25 bp, Homo sapien
tgatatcaggagtcgaggcgggaag

SEQ ID NO: 4241613 - DNA, 25 bp, Homo sapien
tccttctaaagtaacatcctctcaa

SEQ ID NO: 4241614 - DNA, 25 bp, Homo sapien
tctaaagtaacatcctctcaaggcc

SEQ ID NO: 4241615 - DNA, 25 bp, Homo sapien
tcacttgatatcaggagtcgaggcg

SEQ ID NO: 4241616 - DNA, 25 bp, Homo sapien
ggacagtacttgttctcaagggaat

SEQ ID NO: 4241617 - DNA, 25 bp, Homo sapien
acttaagtatgtgtgctactgaggc

SEQ ID NO: 4241618 - DNA, 25 bp, Homo sapien
tcacagaggccgtgccaatctctct

SEQ ID NO: 4241619 - DNA, 25 bp, Homo sapien
taagtatgtgtgctactgaggcaag

SEQ ID NO: 4241620 - DNA, 25 bp, Homo sapien
gtatgtgtgctactgaggcaagcat

SEQ ID NO: 4241621 - DNA, 25 bp, Homo sapien
taaacaaaaggtcatatgcacaaac

SEQ ID NO: 4241622 - DNA, 25 bp, Homo sapien
taagaatgctcatgccctgtgactc

SEQ ID NO: 4241623 - DNA, 25 bp, Homo sapien
tttacatcgagggtaataagaatgc

SEQ ID NO: 4241624 - DNA, 25 bp, Homo sapien
tacagacagtgactcattatactgc

SEQ ID NO: 4241625 - DNA, 25 bp, Homo sapien
ataggaggtctttcatttatcacac

SEQ ID NO: 4241626 - DNA, 25 bp, Homo sapien
aggtctttcatttatcacacagaaa

SEQ ID NO: 4241627 - DNA, 25 bp, Homo sapien
taggaggtctttcatttatcacaca

SEQ ID NO: 4241628 - DNA, 25 bp, Homo sapien
ggaggtctttcatttatcacacaga

SEQ ID NO: 4241629 - DNA, 25 bp, Homo sapien
cagacagacatcagcacttaaaagt

SEQ ID NO: 4241630 - DNA, 25 bp, Homo sapien
cagacatcagcacttaaaagtttta

SEQ ID NO: 4241631 - DNA, 25 bp, Homo sapien
aaatgtaggagggaaggtgttactg

SEQ ID NO: 4241632 - DNA, 25 bp, Homo sapien
cacagacagacatcagcacttaaaa

SEQ ID NO: 4241633 - DNA, 25 bp, Homo sapien
cagtttctcttcctggattcagaag

SEQ ID NO: 4241634 - DNA, 25 bp, Homo sapien
cagaagtctttcatggtaggtccag

SEQ ID NO: 4241635 - DNA, 25 bp, Homo sapien
tcagaagtctttcatggtaggtcca

SEQ ID NO: 4241636 - DNA, 25 bp, Homo sapien
tttctcttcctggattcagaagtct

SEQ ID NO: 4241637 - DNA, 25 bp, Homo sapien
caacctgggcaacataagaagaccc

SEQ ID NO: 4241638 - DNA, 25 bp, Homo sapien
tgagcctaggaatttgagaccaacc

SEQ ID NO: 4241639 - DNA, 25 bp, Homo sapien
acctgggcaacataagaagacccca

SEQ ID NO: 4241640 - DNA, 25 bp, Homo sapien
cctgggcaacataagaagaccccat

SEQ ID NO: 4241641 - DNA, 25 bp, Homo sapien
ctcatggccttaaaacatactccca

SEQ ID NO: 4241642 - DNA, 25 bp, Homo sapien
gatttcttttatctagcatccttta

SEQ ID NO: 4241643 - DNA, 25 bp, Homo sapien
atggccttaaaacatactcccatct

SEQ ID NO: 4241644 - DNA, 25 bp, Homo sapien
ctctcaaactgttggaactataggt

SEQ ID NO: 4241645 - DNA, 25 bp, Homo sapien
gggagactgaagtgagagaaccact

SEQ ID NO: 4241646 - DNA, 25 bp, Homo sapien
tgggagactgaagtgagagaaccac

SEQ ID NO: 4241647 - DNA, 25 bp, Homo sapien
tgtcactgtactgtagcctaagcaa

SEQ ID NO: 4241648 - DNA, 25 bp, Homo sapien
tcatgtcactgtactgtagcctaag

SEQ ID NO: 4241649 - DNA, 25 bp, Homo sapien
ctcctggtacccttcctagcatcaa

SEQ ID NO: 4241650 - DNA, 25 bp, Homo sapien
tctcctggtacccttcctagcatca

SEQ ID NO: 4241651 - DNA, 25 bp, Homo sapien
atctcctggtacccttcctagcatc

SEQ ID NO: 4241652 - DNA, 25 bp, Homo sapien
ctgaataacatgttgcccagtcagt

SEQ ID NO: 4241653 - DNA, 25 bp, Homo sapien
taacatgttgcccagtcagtctctc

SEQ ID NO: 4241654 - DNA, 25 bp, Homo sapien
cagtctctcttcctggattcacaag

SEQ ID NO: 4241655 - DNA, 25 bp, Homo sapien
tcagtctctcttcctggattcacaa

SEQ ID NO: 4241656 - DNA, 25 bp, Homo sapien
ccttcacaatgaaccagtaatagga

SEQ ID NO: 4241657 - DNA, 25 bp, Homo sapien
gcatgcacgtctctttcattgactg

SEQ ID NO: 4241658 - DNA, 25 bp, Homo sapien
gtttctgagatgtatccttcacaat

SEQ ID NO: 4241659 - DNA, 25 bp, Homo sapien
actgcatccagcatgcacgtctctt

SEQ ID NO: 4241660 - DNA, 25 bp, Homo sapien
tataaccttcataacatacttgaga

SEQ ID NO: 4241661 - DNA, 25 bp, Homo sapien
atataaccttcataacatacttgag

SEQ ID NO: 4241662 - DNA, 25 bp, Homo sapien
acatataaccttcataacatacttg

SEQ ID NO: 4241663 - DNA, 25 bp, Homo sapien
taacatataaccttcataacatact

SEQ ID NO: 4241664 - DNA, 25 bp, Homo sapien
ccatttcccactggcaaagagctca

SEQ ID NO: 4241665 - DNA, 25 bp, Homo sapien
aaccaaacctatgcccaaatcccat

SEQ ID NO: 4241666 - DNA, 25 bp, Homo sapien
cagcactgccccctgggaaaccaaa

SEQ ID NO: 4241667 - DNA, 25 bp, Homo sapien
tcactgtgaggtcacctactggaaa

SEQ ID NO: 4241668 - DNA, 25 bp, Homo sapien
ttccctcactccctcactcgacacc

SEQ ID NO: 4241669 - DNA, 25 bp, Homo sapien
tcactccctcactcgacaccgctca

SEQ ID NO: 4241670 - DNA, 25 bp, Homo sapien
cgaagcttccctcactccctcactc

SEQ ID NO: 4241671 - DNA, 25 bp, Homo sapien
gacgaagcttccctcactccctcac

SEQ ID NO: 4241672 - DNA, 25 bp, Homo sapien
caataggtattagactctcataagg

SEQ ID NO: 4241673 - DNA, 25 bp, Homo sapien
acagatcaataggtattagactctc

SEQ ID NO: 4241674 - DNA, 25 bp, Homo sapien
taggtattagactctcataaggaca

SEQ ID NO: 4241675 - DNA, 25 bp, Homo sapien
gtattagactctcataaggacagcg

SEQ ID NO: 4241676 - DNA, 25 bp, Homo sapien
ttttcctgcaactggatgttcccac

SEQ ID NO: 4241677 - DNA, 25 bp, Homo sapien
gaatcagtgggcgtgttaagcttgt

SEQ ID NO: 4241678 - DNA, 25 bp, Homo sapien
tagaatcagtgggcgtgttaagctt

SEQ ID NO: 4241679 - DNA, 25 bp, Homo sapien
tgtagaatcagtgggcgtgttaagc

SEQ ID NO: 4241680 - DNA, 25 bp, Homo sapien
tagggtatgggcctaaataggccat

SEQ ID NO: 4241681 - DNA, 25 bp, Homo sapien
agggtatgggcctaaataggccatt

SEQ ID NO: 4241682 - DNA, 25 bp, Homo sapien
gtagggtatgggcctaaataggcca

SEQ ID NO: 4241683 - DNA, 25 bp, Homo sapien
gggtatgggcctaaataggccattg

SEQ ID NO: 4241684 - DNA, 25 bp, Homo sapien
cctctagaatccacgtatacgaaaa

SEQ ID NO: 4241685 - DNA, 25 bp, Homo sapien
agaatccacgtatacgaaaattcca

SEQ ID NO: 4241686 - DNA, 25 bp, Homo sapien
tctagaatccacgtatacgaaaatt

SEQ ID NO: 4241687 - DNA, 25 bp, Homo sapien
acccctctagaatccacgtatacga

SEQ ID NO: 4241688 - DNA, 25 bp, Homo sapien
tgtagaattagtgggcgtgtcaagc

SEQ ID NO: 4241689 - DNA, 25 bp, Homo sapien
gaattagtgggcgtgtcaagcttgt

SEQ ID NO: 4241690 - DNA, 25 bp, Homo sapien
tagaattagtgggcgtgtcaagctt

SEQ ID NO: 4241691 - DNA, 25 bp, Homo sapien
taatgtagaattagtgggcgtgtca

SEQ ID NO: 4241692 - DNA, 25 bp, Homo sapien
gtagggtatgggcctaaataggcca

SEQ ID NO: 4241693 - DNA, 25 bp, Homo sapien
agggtatgggcctaaataggccatt

SEQ ID NO: 4241694 - DNA, 25 bp, Homo sapien
tagggtatgggcctaaataggccat

SEQ ID NO: 4241695 - DNA, 25 bp, Homo sapien
gggtatgggcctaaataggccattg

SEQ ID NO: 4241696 - DNA, 25 bp, Homo sapien
tgggcctggagaggctgcaaagaag

SEQ ID NO: 4241697 - DNA, 25 bp, Homo sapien
gctgggcctggagaggctgcaaaga

SEQ ID NO: 4241698 - DNA, 25 bp, Homo sapien
ctgggcctggagaggctgcaaagaa

SEQ ID NO: 4241699 - DNA, 25 bp, Homo sapien
agctgggcctggagaggctgcaaag

SEQ ID NO: 4241700 - DNA, 25 bp, Homo sapien
atgctgggcgtgaagaatctgctgt

SEQ ID NO: 4241701 - DNA, 25 bp, Homo sapien
cgttgggactgtagaggctgacggg

SEQ ID NO: 4241702 - DNA, 25 bp, Homo sapien
tagatgctgggcgtgaagaatctgc

SEQ ID NO: 4241703 - DNA, 25 bp, Homo sapien
cacagtgaggtagatgctgggcgtg

SEQ ID NO: 4241704 - DNA, 25 bp, Homo sapien
gggcaggagttgagccaaaagagct

SEQ ID NO: 4241705 - DNA, 25 bp, Homo sapien
ccctcagagcttggctggagaaagt

SEQ ID NO: 4241706 - DNA, 25 bp, Homo sapien
aagagcttgcttacttgctgggagg

SEQ ID NO: 4241707 - DNA, 25 bp, Homo sapien
ctacaaaggcggttgggagctgggc

SEQ ID NO: 4241708 - DNA, 25 bp, Homo sapien
agcagcccgagtgcgatcctgttcc

SEQ ID NO: 4241709 - DNA, 25 bp, Homo sapien
ccagcagcccgagtgcgatcctgtt

SEQ ID NO: 4241710 - DNA, 25 bp, Homo sapien
cccagcagcccgagtgcgatcctgt

SEQ ID NO: 4241711 - DNA, 25 bp, Homo sapien
cagcagcccgagtgcgatcctgttc

SEQ ID NO: 4241712 - DNA, 25 bp, Homo sapien
cctgcagatgtcatcggagggccag

SEQ ID NO: 4241713 - DNA, 25 bp, Homo sapien
gcctgcagatgtcatcggagggcca

SEQ ID NO: 4241714 - DNA, 25 bp, Homo sapien
gggactgatgactgcatgatcttct

SEQ ID NO: 4241715 - DNA, 25 bp, Homo sapien
tgggactgatgactgcatgatcttc

SEQ ID NO: 4241716 - DNA, 25 bp, Homo sapien
cactgcttctgcccgagagtcacgt

SEQ ID NO: 4241717 - DNA, 25 bp, Homo sapien
ctgcttctgcccgagagtcacgtga

SEQ ID NO: 4241718 - DNA, 25 bp, Homo sapien
tggctcagactcttgacgctgccct

SEQ ID NO: 4241719 - DNA, 25 bp, Homo sapien
gcttctgcccgagagtcacgtgagg

SEQ ID NO: 4241720 - DNA, 25 bp, Homo sapien
ctgtgggggtcctgaccgcacctca

SEQ ID NO: 4241721 - DNA, 25 bp, Homo sapien
cctgtgggggtcctgaccgcacctc

SEQ ID NO: 4241722 - DNA, 25 bp, Homo sapien
tgtgggggtcctgaccgcacctcac

SEQ ID NO: 4241723 - DNA, 25 bp, Homo sapien
ccaaagcccaacacccccaagtgtg

SEQ ID NO: 4241724 - DNA, 25 bp, Homo sapien
caaagcccaacacccccaagtgtgc

SEQ ID NO: 4241725 - DNA, 25 bp, Homo sapien
tcatcacagtagagcacgatcttaa

SEQ ID NO: 4241726 - DNA, 25 bp, Homo sapien
actcaggagtaaacactcagatatg

SEQ ID NO: 4241727 - DNA, 25 bp, Homo sapien
agcagtgtggctgaacacctaaaag

SEQ ID NO: 4241728 - DNA, 25 bp, Homo sapien
tcaaacaaacccaaatcatcacagt

SEQ ID NO: 4241729 - DNA, 25 bp, Homo sapien
tctttgtatcggtgctcagctgagt

SEQ ID NO: 4241730 - DNA, 25 bp, Homo sapien
tgtctttctttgtatcggtgctcag

SEQ ID NO: 4241731 - DNA, 25 bp, Homo sapien
ttgaatcattttaagatgctcgaac

SEQ ID NO: 4241732 - DNA, 25 bp, Homo sapien
tctttctttgtatcggtgctcagct

SEQ ID NO: 4241733 - DNA, 25 bp, Homo sapien
gatgggatgtagaatgataaggctc

SEQ ID NO: 4241734 - DNA, 25 bp, Homo sapien
aaagacaaactcacaggaagatggg

SEQ ID NO: 4241735 - DNA, 25 bp, Homo sapien
gccctgctaggagttcacgctttag

SEQ ID NO: 4241736 - DNA, 25 bp, Homo sapien
tgagaactgcaattagagttaaatg

SEQ ID NO: 4241737 - DNA, 25 bp, Homo sapien
ataagctcaccaatatactatgtac

SEQ ID NO: 4241738 - DNA, 25 bp, Homo sapien
acagctgataatttattagttaggc

SEQ ID NO: 4241739 - DNA, 25 bp, Homo sapien
tagactacacaatgagttaagaatg

SEQ ID NO: 4241740 - DNA, 25 bp, Homo sapien
cccaacgtttagactacacaatgag

SEQ ID NO: 4241741 - DNA, 25 bp, Homo sapien
aaatgacttcttccggcaatcacag

SEQ ID NO: 4241742 - DNA, 25 bp, Homo sapien
caagttcttcgaagaatgaaatgac

SEQ ID NO: 4241743 - DNA, 25 bp, Homo sapien
attccaccaagttcttcgaagaatg

SEQ ID NO: 4241744 - DNA, 25 bp, Homo sapien
aatgaaatgacttcttccggcaatc

SEQ ID NO: 4241745 - DNA, 25 bp, Homo sapien
ttgctttggcattaacgctgggctt

SEQ ID NO: 4241746 - DNA, 25 bp, Homo sapien
acttgctttggcattaacgctgggc

SEQ ID NO: 4241747 - DNA, 25 bp, Homo sapien
gctttggcattaacgctgggcttct

SEQ ID NO: 4241748 - DNA, 25 bp, Homo sapien
tggcattaacgctgggcttctcttg

SEQ ID NO: 4241749 - DNA, 25 bp, Homo sapien
tgcctttcaaatgagcttgagaaaa

SEQ ID NO: 4241750 - DNA, 25 bp, Homo sapien
aatcaattatggagagatcaacaac

SEQ ID NO: 4241751 - DNA, 25 bp, Homo sapien
ttgcctttcaaatgagcttgagaaa

SEQ ID NO: 4241752 - DNA, 25 bp, Homo sapien
attatggagagatcaacaaccattt

SEQ ID NO: 4241753 - DNA, 25 bp, Homo sapien
gtcaaggtatttggccacggaacca

SEQ ID NO: 4241754 - DNA, 25 bp, Homo sapien
tgttccaaggtagctttctgacaga

SEQ ID NO: 4241755 - DNA, 25 bp, Homo sapien
tagactggcaaaagaaggtttatcc

SEQ ID NO: 4241756 - DNA, 25 bp, Homo sapien
catcaaatgtggttattagactggc

SEQ ID NO: 4241757 - DNA, 25 bp, Homo sapien
caggtgtatctctccgcatttgaag

SEQ ID NO: 4241758 - DNA, 25 bp, Homo sapien
aggtgtatctctccgcatttgaagt

SEQ ID NO: 4241759 - DNA, 25 bp, Homo sapien
gcaggtgtatctctccgcatttgaa

SEQ ID NO: 4241760 - DNA, 25 bp, Homo sapien
tgtgggattcagatgtgataatgga

SEQ ID NO: 4241761 - DNA, 25 bp, Homo sapien
ctgtgggattcagatgtgataatgg

SEQ ID NO: 4241762 - DNA, 25 bp, Homo sapien
gttctgagtggcctggggaaatctc

SEQ ID NO: 4241763 - DNA, 25 bp, Homo sapien
agtggcctggggaaatctcctgcgc

SEQ ID NO: 4241764 - DNA, 25 bp, Homo sapien
tctgagtggcctggggaaatctcct

SEQ ID NO: 4241765 - DNA, 25 bp, Homo sapien
tggcctggggaaatctcctgcgctc

SEQ ID NO: 4241766 - DNA, 25 bp, Homo sapien
tccagtccttgagtcctactccaat

SEQ ID NO: 4241767 - DNA, 25 bp, Homo sapien
tccctcttcaatccagtccttgagt

SEQ ID NO: 4241768 - DNA, 25 bp, Homo sapien
ccttgagtcctactccaatcagaca

SEQ ID NO: 4241769 - DNA, 25 bp, Homo sapien
gagtcctactccaatcagacaaacc

SEQ ID NO: 4241770 - DNA, 25 bp, Homo sapien
gaacaactctgacaccctggcatta

SEQ ID NO: 4241771 - DNA, 25 bp, Homo sapien
ggcttcctcagccagaggtttacca

SEQ ID NO: 4241772 - DNA, 25 bp, Homo sapien
taccagttgccaccaataaggaatc

SEQ ID NO: 4241773 - DNA, 25 bp, Homo sapien
tctctccctgttagaccatataagg

SEQ ID NO: 4241774 - DNA, 25 bp, Homo sapien
aggccttatagacatgggcagagct

SEQ ID NO: 4241775 - DNA, 25 bp, Homo sapien
cacagggtgtgttgctctggaactg

SEQ ID NO: 4241776 - DNA, 25 bp, Homo sapien
tgacccacataaaagtagcaccaga

SEQ ID NO: 4241777 - DNA, 25 bp, Homo sapien
tagcaccagaggctttccgaatcat

SEQ ID NO: 4241778 - DNA, 25 bp, Homo sapien
tgagacgtgcgagtatgctcctagg

SEQ ID NO: 4241779 - DNA, 25 bp, Homo sapien
ttttgaccaattggtatgaggtgtc

SEQ ID NO: 4241780 - DNA, 25 bp, Homo sapien
ttgatatccactctgtacttggaaa

SEQ ID NO: 4241781 - DNA, 25 bp, Homo sapien
cactctgtacttggaaatcgatttt

SEQ ID NO: 4241782 - DNA, 25 bp, Homo sapien
ttttttgaccaattggtatgaggtg

SEQ ID NO: 4241783 - DNA, 25 bp, Homo sapien
caaatctgagttgacggtgctgcag

SEQ ID NO: 4241784 - DNA, 25 bp, Homo sapien
ttgcaaatctgagttgacggtgctg

SEQ ID NO: 4241785 - DNA, 25 bp, Homo sapien
agttgacggtgctgcagtgtgctcc

SEQ ID NO: 4241786 - DNA, 25 bp, Homo sapien
gttgacggtgctgcagtgtgctcca

SEQ ID NO: 4241787 - DNA, 25 bp, Homo sapien
ggtgagaagtaaaagattcagccat

SEQ ID NO: 4241788 - DNA, 25 bp, Homo sapien
gtggtgagaagtaaaagattcagcc

SEQ ID NO: 4241789 - DNA, 25 bp, Homo sapien
gcaggtggtgagaagtaaaagattc

SEQ ID NO: 4241790 - DNA, 25 bp, Homo sapien
caggtggtgagaagtaaaagattca

SEQ ID NO: 4241791 - DNA, 25 bp, Homo sapien
ttttctctgacattagaggaggcat

SEQ ID NO: 4241792 - DNA, 25 bp, Homo sapien
catgagttgccttcgcttttgctgc

SEQ ID NO: 4241793 - DNA, 25 bp, Homo sapien
gctcccggtggtggcatccaactct

SEQ ID NO: 4241794 - DNA, 25 bp, Homo sapien
gaggatagctcatccaactctgagg

SEQ ID NO: 4241795 - DNA, 25 bp, Homo sapien
gattgcttctgaggcagaatcatga

SEQ ID NO: 4241796 - DNA, 25 bp, Homo sapien
agaggacttgcattcaacaggattt

SEQ ID NO: 4241797 - DNA, 25 bp, Homo sapien
acaaagaggacttgcattcaacagg

SEQ ID NO: 4241798 - DNA, 25 bp, Homo sapien
caacaaagaggacttgcattcaaca

SEQ ID NO: 4241799 - DNA, 25 bp, Homo sapien
aaagaggacttgcattcaacaggat

SEQ ID NO: 4241800 - DNA, 25 bp, Homo sapien
ctctaagacgcagcaatgggagaaa

SEQ ID NO: 4241801 - DNA, 25 bp, Homo sapien
ggcaccacacccctctaagacgcag

SEQ ID NO: 4241802 - DNA, 25 bp, Homo sapien
acacccctctaagacgcagcaatgg

SEQ ID NO: 4241803 - DNA, 25 bp, Homo sapien
ccctctaagacgcagcaatgggaga

SEQ ID NO: 4241804 - DNA, 25 bp, Homo sapien
ctcttttgaccggagatgttgaaaa

SEQ ID NO: 4241805 - DNA, 25 bp, Homo sapien
caaagtttttggcttggtctcttgc

SEQ ID NO: 4241806 - DNA, 25 bp, Homo sapien
gatgttgaaaagcacgaccaaagtt

SEQ ID NO: 4241807 - DNA, 25 bp, Homo sapien
ccacaacgagataaagtctgaagcc

SEQ ID NO: 4241808 - DNA, 25 bp, Homo sapien
agggagggaagataagcggcgtggg

SEQ ID NO: 4241809 - DNA, 25 bp, Homo sapien
tgtcccgcgggagcgtgcaaaggga

SEQ ID NO: 4241810 - DNA, 25 bp, Homo sapien
gagcagaggcgagagccagcctccg

SEQ ID NO: 4241811 - DNA, 25 bp, Homo sapien
gcgtagaccccggtgccagccagaa

SEQ ID NO: 4241812 - DNA, 25 bp, Homo sapien
acagatcgcgtttcggaggcggcgc

SEQ ID NO: 4241813 - DNA, 25 bp, Homo sapien
tcgcgtttcggaggcggcgcaggtg

SEQ ID NO: 4241814 - DNA, 25 bp, Homo sapien
ggcgccggacagatcgcgtttcgga

SEQ ID NO: 4241815 - DNA, 25 bp, Homo sapien
gggaggcgccggacagatcgcgttt

SEQ ID NO: 4241816 - DNA, 25 bp, Homo sapien
ctccgggaggggtccactcgttatg

SEQ ID NO: 4241817 - DNA, 25 bp, Homo sapien
cggtcagggtccctcgtccgcagtg

SEQ ID NO: 4241818 - DNA, 25 bp, Homo sapien
ctggcatctctcgtgccggcgctgg

SEQ ID NO: 4241819 - DNA, 25 bp, Homo sapien
ccactcgttatggaaaggaagcggg

SEQ ID NO: 4241820 - DNA, 25 bp, Homo sapien
cgaggccggattcggacagctcggg

SEQ ID NO: 4241821 - DNA, 25 bp, Homo sapien
gacagctcggggtcagtcgacggag

SEQ ID NO: 4241822 - DNA, 25 bp, Homo sapien
tggccgaggccggattcggacagct

SEQ ID NO: 4241823 - DNA, 25 bp, Homo sapien
gctcggggtcagtcgacggagcaca

SEQ ID NO: 4241824 - DNA, 25 bp, Homo sapien
gcccgaatccgccgggtcccactca

SEQ ID NO: 4241825 - DNA, 25 bp, Homo sapien
gtaggttggccctcccgcttccagc

SEQ ID NO: 4241826 - DNA, 25 bp, Homo sapien
ctcccgcttccagcctccgccaccc

SEQ ID NO: 4241827 - DNA, 25 bp, Homo sapien
taggttggccctcccgcttccagcc

SEQ ID NO: 4241828 - DNA, 25 bp, Homo sapien
ccgcttccagcctccgccaccccat

SEQ ID NO: 4241829 - DNA, 25 bp, Homo sapien
gcttttctcctctgatctatttagg

SEQ ID NO: 4241830 - DNA, 25 bp, Homo sapien
gatctatttaggtttatccttactc

SEQ ID NO: 4241831 - DNA, 25 bp, Homo sapien
cagggtgggcttttcggatgctttt

SEQ ID NO: 4241832 - DNA, 25 bp, Homo sapien
ccatttatctgggaagtgacttggg

SEQ ID NO: 4241833 - DNA, 25 bp, Homo sapien
taccatcacgttcttccttctgtgg

SEQ ID NO: 4241834 - DNA, 25 bp, Homo sapien
gacagcagtagagctttcttgagct

SEQ ID NO: 4241835 - DNA, 25 bp, Homo sapien
tcctgcagtgttatgagagcacaga

SEQ ID NO: 4241836 - DNA, 25 bp, Homo sapien
gctgccatgtctggtgtgggttcaa

SEQ ID NO: 4241837 - DNA, 25 bp, Homo sapien
atttggcaggaagacaagtcatggc

SEQ ID NO: 4241838 - DNA, 25 bp, Homo sapien
catctccttaactgagaaggttttg

SEQ ID NO: 4241839 - DNA, 25 bp, Homo sapien
tgacgagacgttatgcttggaattc

SEQ ID NO: 4241840 - DNA, 25 bp, Homo sapien
gcaacaactgatggctgacgagacg

SEQ ID NO: 4241841 - DNA, 25 bp, Homo sapien
caagcacagggaacgatcaatcagt

SEQ ID NO: 4241842 - DNA, 25 bp, Homo sapien
tcaatcagtgttgacagctctaatg

SEQ ID NO: 4241843 - DNA, 25 bp, Homo sapien
gaacgatcaatcagtgttgacagct

SEQ ID NO: 4241844 - DNA, 25 bp, Homo sapien
tcttctcatacaagcacagggaacg

SEQ ID NO: 4241845 - DNA, 25 bp, Homo sapien
ttattgcaagaactacagggtatgc

SEQ ID NO: 4241846 - DNA, 25 bp, Homo sapien
caaagctaactcaaggtaatggtaa

SEQ ID NO: 4241847 - DNA, 25 bp, Homo sapien
catcctattttaagaggcagccagg

SEQ ID NO: 4241848 - DNA, 25 bp, Homo sapien
gaattgtcacatgggttcagtctgt

SEQ ID NO: 4241849 - DNA, 25 bp, Homo sapien
agaggctgcatactagtcttctagg

SEQ ID NO: 4241850 - DNA, 25 bp, Homo sapien
atggaaaccactctaagtaaccgag

SEQ ID NO: 4241851 - DNA, 25 bp, Homo sapien
gctactgacttttcatgtaacatgt

SEQ ID NO: 4241852 - DNA, 25 bp, Homo sapien
taaccgaggaagaattgcatgggct

SEQ ID NO: 4241853 - DNA, 25 bp, Homo sapien
aaacattaacatacagagcacttag

SEQ ID NO: 4241854 - DNA, 25 bp, Homo sapien
cattaacatacagagcacttagaaa

SEQ ID NO: 4241855 - DNA, 25 bp, Homo sapien
taacatacagagcacttagaaaata

SEQ ID NO: 4241856 - DNA, 25 bp, Homo sapien
tgtgatttgtactgctaatttcttc

SEQ ID NO: 4241857 - DNA, 25 bp, Homo sapien
gggactgttcatgactgtaggcaaa

SEQ ID NO: 4241858 - DNA, 25 bp, Homo sapien
tatactgataactaggagggcgtgg

SEQ ID NO: 4241859 - DNA, 25 bp, Homo sapien
tgaaatggagcatggctatgaaacc

SEQ ID NO: 4241860 - DNA, 25 bp, Homo sapien
tccttggcaccaaataggagctgct

SEQ ID NO: 4241861 - DNA, 25 bp, Homo sapien
tagggagaagtcagcctagccagcc

SEQ ID NO: 4241862 - DNA, 25 bp, Homo sapien
caggtatgcaggttctcacatcagg

SEQ ID NO: 4241863 - DNA, 25 bp, Homo sapien
tagccagccgtcagaccatcatgaa

SEQ ID NO: 4241864 - DNA, 25 bp, Homo sapien
taccagttcagggtcatagccgtga

SEQ ID NO: 4241865 - DNA, 25 bp, Homo sapien
cagaaaaatatcttgaacccgggag

SEQ ID NO: 4241866 - DNA, 25 bp, Homo sapien
gtggaggttacagtgagttgagatc

SEQ ID NO: 4241867 - DNA, 25 bp, Homo sapien
gaggttacagtgagttgagatcatg

SEQ ID NO: 4241868 - DNA, 25 bp, Homo sapien
gaggcagaaaaatatcttgaacccg

SEQ ID NO: 4241869 - DNA, 25 bp, Homo sapien
tacatgtcggtcaagttcagcgctc

SEQ ID NO: 4241870 - DNA, 25 bp, Homo sapien
taatttatgggctcaggatctgacc

SEQ ID NO: 4241871 - DNA, 25 bp, Homo sapien
tttataatagtcagcgcaggaatgc

SEQ ID NO: 4241872 - DNA, 25 bp, Homo sapien
gaacctcacgagtcatccagaatgt

SEQ ID NO: 4241873 - DNA, 25 bp, Homo sapien
cacaatggaattatgctggaagtct

SEQ ID NO: 4241874 - DNA, 25 bp, Homo sapien
ggtagtatatatcctagtgttccta

SEQ ID NO: 4241875 - DNA, 25 bp, Homo sapien
gatgcacccgtgtttgtaaaaatgt

SEQ ID NO: 4241876 - DNA, 25 bp, Homo sapien
tattctatcggtataaaggcattga

SEQ ID NO: 4241877 - DNA, 25 bp, Homo sapien
ggaaatttgattgggatattatgtt

SEQ ID NO: 4241878 - DNA, 25 bp, Homo sapien
tttgattgggatattatgtttgatt

SEQ ID NO: 4241879 - DNA, 25 bp, Homo sapien
aaatttgattgggatattatgtttg

SEQ ID NO: 4241880 - DNA, 25 bp, Homo sapien
aatttgattgggatattatgtttga

SEQ ID NO: 4241881 - DNA, 25 bp, Homo sapien
tctttgtcagacactaaagcaggaa

SEQ ID NO: 4241882 - DNA, 25 bp, Homo sapien
cactctgatgggtctctatctcaaa

SEQ ID NO: 4241883 - DNA, 25 bp, Homo sapien
cgggttccctgatctttcactctga

SEQ ID NO: 4241884 - DNA, 25 bp, Homo sapien
ggacagaatcccaatgccttctttg

SEQ ID NO: 4241885 - DNA, 25 bp, Homo sapien
tggtaagatcatggatgcacactct

SEQ ID NO: 4241886 - DNA, 25 bp, Homo sapien
taagatcatggatgcacactctggt

SEQ ID NO: 4241887 - DNA, 25 bp, Homo sapien
gtaagatcatggatgcacactctgg

SEQ ID NO: 4241888 - DNA, 25 bp, Homo sapien
gatcatggatgcacactctggtcat

SEQ ID NO: 4241889 - DNA, 25 bp, Homo sapien
gatttgaacccttcaggcaaaacca

SEQ ID NO: 4241890 - DNA, 25 bp, Homo sapien
tgcaatccagaaagtgtcatgctgt

SEQ ID NO: 4241891 - DNA, 25 bp, Homo sapien
tgaattgcccctgccaaatcaggaa

SEQ ID NO: 4241892 - DNA, 25 bp, Homo sapien
catgatgttagccatctaggtaggg

SEQ ID NO: 4241893 - DNA, 25 bp, Homo sapien
cctgaactcctgtaatttggcactg

SEQ ID NO: 4241894 - DNA, 25 bp, Homo sapien
ggtcagaatcttcgcaacagttagt

SEQ ID NO: 4241895 - DNA, 25 bp, Homo sapien
tgctagcatgagctcaaccctcaag

SEQ ID NO: 4241896 - DNA, 25 bp, Homo sapien
acttctgccaaagatgagtgggcca

SEQ ID NO: 4241897 - DNA, 25 bp, Homo sapien
acatgtctttaagaacagaaggagg

SEQ ID NO: 4241898 - DNA, 25 bp, Homo sapien
caaacatgtctttaagaacagaagg

SEQ ID NO: 4241899 - DNA, 25 bp, Homo sapien
aaacatgtctttaagaacagaagga

SEQ ID NO: 4241900 - DNA, 25 bp, Homo sapien
aacatgtctttaagaacagaaggag

SEQ ID NO: 4241901 - DNA, 25 bp, Homo sapien
cattgtgatagtccgggtcaatcac

SEQ ID NO: 4241902 - DNA, 25 bp, Homo sapien
actgatttcattgtgatagtccggg

SEQ ID NO: 4241903 - DNA, 25 bp, Homo sapien
ttgacttaaaagtaagaggagtcca

SEQ ID NO: 4241904 - DNA, 25 bp, Homo sapien
tgacttaaaagtaagaggagtccaa

SEQ ID NO: 4241905 - DNA, 25 bp, Homo sapien
gtagagccatttcaaattccgcatg

SEQ ID NO: 4241906 - DNA, 25 bp, Homo sapien
gcactcatgcacaagcagggcagat

SEQ ID NO: 4241907 - DNA, 25 bp, Homo sapien
cgcatgatgcgtatctatgtgtgtc

SEQ ID NO: 4241908 - DNA, 25 bp, Homo sapien
caacagcaccatgcctacagtgtgg

SEQ ID NO: 4241909 - DNA, 25 bp, Homo sapien
tcctgtatccttggagaaactctca

SEQ ID NO: 4241910 - DNA, 25 bp, Homo sapien
ttaacttgcactagcacaagtagat

SEQ ID NO: 4241911 - DNA, 25 bp, Homo sapien
gcatttccgcctttgggtcgtgcga

SEQ ID NO: 4241912 - DNA, 25 bp, Homo sapien
tatgtgatgccatctgcatttccgc

SEQ ID NO: 4241913 - DNA, 25 bp, Homo sapien
attgtatctaattgtgttgtactca

SEQ ID NO: 4241914 - DNA, 25 bp, Homo sapien
gcacaagctttctgctcccattgta

SEQ ID NO: 4241915 - DNA, 25 bp, Homo sapien
gttgcacaagctttctgctcccatt

SEQ ID NO: 4241916 - DNA, 25 bp, Homo sapien
gctttctgctcccattgtatctaat

SEQ ID NO: 4241917 - DNA, 25 bp, Homo sapien
cttttgaccacagatcctcctggaa

SEQ ID NO: 4241918 - DNA, 25 bp, Homo sapien
ccttttgaccacagatcctcctgga

SEQ ID NO: 4241919 - DNA, 25 bp, Homo sapien
ctactgcttgttatctgggtccttt

SEQ ID NO: 4241920 - DNA, 25 bp, Homo sapien
tttgaccacagatcctcctggaatc

SEQ ID NO: 4241921 - DNA, 25 bp, Homo sapien
gaatcttctaacctctcgttttgtc

SEQ ID NO: 4241922 - DNA, 25 bp, Homo sapien
atcttctaacctctcgttttgtctt

SEQ ID NO: 4241923 - DNA, 25 bp, Homo sapien
tctaacctctcgttttgtcttttga

SEQ ID NO: 4241924 - DNA, 25 bp, Homo sapien
tggaatcttctaacctctcgttttg

SEQ ID NO: 4241925 - DNA, 25 bp, Homo sapien
aacgcaattgataggggtgagcaac

SEQ ID NO: 4241926 - DNA, 25 bp, Homo sapien
gactacgtaatgttgctgaaattgc

SEQ ID NO: 4241927 - DNA, 25 bp, Homo sapien
taaaatatgcaggtccattgtaatt

SEQ ID NO: 4241928 - DNA, 25 bp, Homo sapien
gcaactggtcaatgactggcctgat

SEQ ID NO: 4241929 - DNA, 25 bp, Homo sapien
gaagcaatcttaatgtccattgatg

SEQ ID NO: 4241930 - DNA, 25 bp, Homo sapien
tcagtcataaagttcataaaggtgg

SEQ ID NO: 4241931 - DNA, 25 bp, Homo sapien
tgaagctgcacacctggaaagtcga

SEQ ID NO: 4241932 - DNA, 25 bp, Homo sapien
gagcccacatgattcctgatatgaa

SEQ ID NO: 4241933 - DNA, 25 bp, Homo sapien
atttttcttggttctcatagctggt

SEQ ID NO: 4241934 - DNA, 25 bp, Homo sapien
ctttccatttttcttggttctcata

SEQ ID NO: 4241935 - DNA, 25 bp, Homo sapien
ccatttttcttggttctcatagctg

SEQ ID NO: 4241936 - DNA, 25 bp, Homo sapien
ttccatttttcttggttctcatagc

SEQ ID NO: 4241937 - DNA, 25 bp, Homo sapien
gcaattgagtccgtagagctgcact

SEQ ID NO: 4241938 - DNA, 25 bp, Homo sapien
gcattctggatagggcaattgagtc

SEQ ID NO: 4241939 - DNA, 25 bp, Homo sapien
tcatactgagacttgcctgcattct

SEQ ID NO: 4241940 - DNA, 25 bp, Homo sapien
aatggaacagactcatactgagact

SEQ ID NO: 4241941 - DNA, 25 bp, Homo sapien
ttccattaatgagtgctttgaagta

SEQ ID NO: 4241942 - DNA, 25 bp, Homo sapien
cctcattttcagtaattcttcttgt

SEQ ID NO: 4241943 - DNA, 25 bp, Homo sapien
tatggagatagctttcctcattttc

SEQ ID NO: 4241944 - DNA, 25 bp, Homo sapien
aatgagtgctttgaagtatgtatgg

SEQ ID NO: 4241945 - DNA, 25 bp, Homo sapien
tgtccgatgttcatatctttcatgc

SEQ ID NO: 4241946 - DNA, 25 bp, Homo sapien
tccaaagagatatttggcaaggaca

SEQ ID NO: 4241947 - DNA, 25 bp, Homo sapien
atcttctgctcccaggtataaaagg

SEQ ID NO: 4241948 - DNA, 25 bp, Homo sapien
tgtccaactagagctcttccaaaga

SEQ ID NO: 4241949 - DNA, 25 bp, Homo sapien
atagagtaatgatagtcaggttaac

SEQ ID NO: 4241950 - DNA, 25 bp, Homo sapien
catagagtaatgatagtcaggttaa

SEQ ID NO: 4241951 - DNA, 25 bp, Homo sapien
tcatagagtaatgatagtcaggtta

SEQ ID NO: 4241952 - DNA, 25 bp, Homo sapien
ggattcctggacgacctgacattga

SEQ ID NO: 4241953 - DNA, 25 bp, Homo sapien
tggacgacctgacattgacatcagc

SEQ ID NO: 4241954 - DNA, 25 bp, Homo sapien
ccaggattcctggacgacctgacat

SEQ ID NO: 4241955 - DNA, 25 bp, Homo sapien
agccctgagatcagtaaccagaagc

SEQ ID NO: 4241956 - DNA, 25 bp, Homo sapien
cttagacgtggtcataacatcatca

SEQ ID NO: 4241957 - DNA, 25 bp, Homo sapien
ttaatggaggagctttgcatcatgt

SEQ ID NO: 4241958 - DNA, 25 bp, Homo sapien
ctatttgcttgctacgtctgttggc

SEQ ID NO: 4241959 - DNA, 25 bp, Homo sapien
ggtcataacatcatcacttagctgg

SEQ ID NO: 4241960 - DNA, 25 bp, Homo sapien
gtatcgcccatctgtggcatcaaca

SEQ ID NO: 4241961 - DNA, 25 bp, Homo sapien
gcccatctgtggcatcaacacttgg

SEQ ID NO: 4241962 - DNA, 25 bp, Homo sapien
aagggcattctttataatacgggtg

SEQ ID NO: 4241963 - DNA, 25 bp, Homo sapien
cattctttataatacgggtgcaaga

SEQ ID NO: 4241964 - DNA, 25 bp, Homo sapien
tttgtggattctagagacgttgaga

SEQ ID NO: 4241965 - DNA, 25 bp, Homo sapien
acgttgagaggtgctttattagctc

SEQ ID NO: 4241966 - DNA, 25 bp, Homo sapien
cttgaggattgcagggggtgtttgg

SEQ ID NO: 4241967 - DNA, 25 bp, Homo sapien
tctcaggtgtaatgagattcatttt

SEQ ID NO: 4241968 - DNA, 25 bp, Homo sapien
tttcccatggaaactccacctgcct

SEQ ID NO: 4241969 - DNA, 25 bp, Homo sapien
tcccatggaaactccacctgcctgt

SEQ ID NO: 4241970 - DNA, 25 bp, Homo sapien
catggaaactccacctgcctgtaga

SEQ ID NO: 4241971 - DNA, 25 bp, Homo sapien
acttttcccactcaatggccaaact

SEQ ID NO: 4241972 - DNA, 25 bp, Homo sapien
aaggacatggagtctgctgtgctca

SEQ ID NO: 4241973 - DNA, 25 bp, Homo sapien
aaaggacatggagtctgctgtgctc

SEQ ID NO: 4241974 - DNA, 25 bp, Homo sapien
ctgtatcttccacattttgtgcaaa

SEQ ID NO: 4241975 - DNA, 25 bp, Homo sapien
ttgtgcaaatgcatcccattggcag

SEQ ID NO: 4241976 - DNA, 25 bp, Homo sapien
catcccattggcagatagaaattga

SEQ ID NO: 4241977 - DNA, 25 bp, Homo sapien
ccattggcagatagaaattgaatcc

SEQ ID NO: 4241978 - DNA, 25 bp, Homo sapien
tcttgctaatttctggtgactgctg

SEQ ID NO: 4241979 - DNA, 25 bp, Homo sapien
catttgccaagaataactgtgttag

SEQ ID NO: 4241980 - DNA, 25 bp, Homo sapien
gatatatccaggagcaaatcccttg

SEQ ID NO: 4241981 - DNA, 25 bp, Homo sapien
gaatcactccttgactcttgctaat

SEQ ID NO: 4241982 - DNA, 25 bp, Homo sapien
aaaaataggctttgctcccaggcgc

SEQ ID NO: 4241983 - DNA, 25 bp, Homo sapien
taaggttagagccaaaatttgagcc

SEQ ID NO: 4241984 - DNA, 25 bp, Homo sapien
tgagtagttattgtaggaagccagc

SEQ ID NO: 4241985 - DNA, 25 bp, Homo sapien
gcaagtcggctgttgtgatgcacag

SEQ ID NO: 4241986 - DNA, 25 bp, Homo sapien
gcatctgcactggcaataatttgga

SEQ ID NO: 4241987 - DNA, 25 bp, Homo sapien
tgcactggcaataatttggaagatc

SEQ ID NO: 4241988 - DNA, 25 bp, Homo sapien
ggcaataatttggaagatcaaaatc

SEQ ID NO: 4241989 - DNA, 25 bp, Homo sapien
tcatagggcatctgcactggcaata

SEQ ID NO: 4241990 - DNA, 25 bp, Homo sapien
gactgattatgcaggtgaaccaaaa

SEQ ID NO: 4241991 - DNA, 25 bp, Homo sapien
ggagttttgcagtcctcaagccatg

SEQ ID NO: 4241992 - DNA, 25 bp, Homo sapien
tttatgtgcgaggaattttgaggga

SEQ ID NO: 4241993 - DNA, 25 bp, Homo sapien
tgtccctgtttcaactgtgaatatc

SEQ ID NO: 4241994 - DNA, 25 bp, Homo sapien
gcttcacacctatgagtaattctct

SEQ ID NO: 4241995 - DNA, 25 bp, Homo sapien
tttaaccgtacaccttcaatcaaca

SEQ ID NO: 4241996 - DNA, 25 bp, Homo sapien
gaaacttggcttcacacctatgagt

SEQ ID NO: 4241997 - DNA, 25 bp, Homo sapien
taaccgtacaccttcaatcaacagc

SEQ ID NO: 4241998 - DNA, 25 bp, Homo sapien
gaggcttgataaagctgaactttat

SEQ ID NO: 4241999 - DNA, 25 bp, Homo sapien
aatatacgttgctacaggtctctca

SEQ ID NO: 4242000 - DNA, 25 bp, Homo sapien
atacatgccactcattagggggcag

SEQ ID NO: 4242001 - DNA, 25 bp, Homo sapien
tttctgtgaccaagtagaggcttga

SEQ ID NO: 4242002 - DNA, 25 bp, Homo sapien
tatcaccggtctaagagaaacgtgc

SEQ ID NO: 4242003 - DNA, 25 bp, Homo sapien
tcaacagagtaagctcttgtggcct

SEQ ID NO: 4242004 - DNA, 25 bp, Homo sapien
gacaagccaatggtatgtgaaagag

SEQ ID NO: 4242005 - DNA, 25 bp, Homo sapien
gaaccgaccttctattatatcaccg

SEQ ID NO: 4242006 - DNA, 25 bp, Homo sapien
taccaggggcccaagtagaaacatg

SEQ ID NO: 4242007 - DNA, 25 bp, Homo sapien
agtagaaacatgtggtatgcatgac

SEQ ID NO: 4242008 - DNA, 25 bp, Homo sapien
gggcccaagtagaaacatgtggtat

SEQ ID NO: 4242009 - DNA, 25 bp, Homo sapien
tcaatttgcaacatctaccaggggc

SEQ ID NO: 4242010 - DNA, 25 bp, Homo sapien
taaacaaacctcaaacatccaacag

SEQ ID NO: 4242011 - DNA, 25 bp, Homo sapien
ttgagaaacactaggcggatgcaca

SEQ ID NO: 4242012 - DNA, 25 bp, Homo sapien
aacagctacttcagctcagcacagg

SEQ ID NO: 4242013 - DNA, 25 bp, Homo sapien
aaaatggcacctggcagaacaaagc

SEQ ID NO: 4242014 - DNA, 25 bp, Homo sapien
aatctttgcacgtattttttctggt

SEQ ID NO: 4242015 - DNA, 25 bp, Homo sapien
tcaaatctttgcacgtattttttct

SEQ ID NO: 4242016 - DNA, 25 bp, Homo sapien
aaatctttgcacgtattttttctgg

SEQ ID NO: 4242017 - DNA, 25 bp, Homo sapien
tctttgcacgtattttttctggttc

SEQ ID NO: 4242018 - DNA, 25 bp, Homo sapien
ggcaatggtccctctggtgtatata

SEQ ID NO: 4242019 - DNA, 25 bp, Homo sapien
tccttgactcgagttgctgacaggg

SEQ ID NO: 4242020 - DNA, 25 bp, Homo sapien
caatggtccctctggtgtatataga

SEQ ID NO: 4242021 - DNA, 25 bp, Homo sapien
tctggtgtatatagaggaacccttc

SEQ ID NO: 4242022 - DNA, 25 bp, Homo sapien
tcctgcagccgataactgttttcca

SEQ ID NO: 4242023 - DNA, 25 bp, Homo sapien
tcactacttcctgcagccgataact

SEQ ID NO: 4242024 - DNA, 25 bp, Homo sapien
cctgcagccgataactgttttccat

SEQ ID NO: 4242025 - DNA, 25 bp, Homo sapien
ctacttcctgcagccgataactgtt

SEQ ID NO: 4242026 - DNA, 25 bp, Homo sapien
tttcatagcaaaagagacagccact

SEQ ID NO: 4242027 - DNA, 25 bp, Homo sapien
gaaacaagaggactttcatagcaaa

SEQ ID NO: 4242028 - DNA, 25 bp, Homo sapien
catagcaaaagagacagccactgta

SEQ ID NO: 4242029 - DNA, 25 bp, Homo sapien
aaatgtatgaaacaagaggactttc

SEQ ID NO: 4242030 - DNA, 25 bp, Homo sapien
gaaatgcgagctatgaaatcatctg

SEQ ID NO: 4242031 - DNA, 25 bp, Homo sapien
aatcatctgaggatgaggcaacaga

SEQ ID NO: 4242032 - DNA, 25 bp, Homo sapien
gaaatcacataagaagtcttttcgg

SEQ ID NO: 4242033 - DNA, 25 bp, Homo sapien
caggagcatcaaatacatagaaatc

SEQ ID NO: 4242034 - DNA, 25 bp, Homo sapien
ttgttcagccagtggtaagttgcac

SEQ ID NO: 4242035 - DNA, 25 bp, Homo sapien
ggtaagttgcactatcttccaggtt

SEQ ID NO: 4242036 - DNA, 25 bp, Homo sapien
tgcactatcttccaggtttacttca

SEQ ID NO: 4242037 - DNA, 25 bp, Homo sapien
tcagccagtggtaagttgcactatc

SEQ ID NO: 4242038 - DNA, 25 bp, Homo sapien
attatattcattatgcccactgctg

SEQ ID NO: 4242039 - DNA, 25 bp, Homo sapien
ttgtcctctgggtaaattatattca

SEQ ID NO: 4242040 - DNA, 25 bp, Homo sapien
tatattcattatgcccactgctgca

SEQ ID NO: 4242041 - DNA, 25 bp, Homo sapien
tgctgcagcacgcataaaccaacac

SEQ ID NO: 4242042 - DNA, 25 bp, Homo sapien
taacagccaaggttgggcaactgaa

SEQ ID NO: 4242043 - DNA, 25 bp, Homo sapien
tgccttttgctctgcggagactgcg

SEQ ID NO: 4242044 - DNA, 25 bp, Homo sapien
tcataacagccaaggttgggcaact

SEQ ID NO: 4242045 - DNA, 25 bp, Homo sapien
gctctgcggagactgcgtaatatga

SEQ ID NO: 4242046 - DNA, 25 bp, Homo sapien
tatccagcaactagctcagctacct

SEQ ID NO: 4242047 - DNA, 25 bp, Homo sapien
tgatgatggtcgtttctgccgccgg

SEQ ID NO: 4242048 - DNA, 25 bp, Homo sapien
gaacatgttctcatattgatgatgg

SEQ ID NO: 4242049 - DNA, 25 bp, Homo sapien
tggaggacagcatttcccgtgatcc

SEQ ID NO: 4242050 - DNA, 25 bp, Homo sapien
tatgaaacaaccatggccttggagg

SEQ ID NO: 4242051 - DNA, 25 bp, Homo sapien
tgtgtaactttgacaagggacctga

SEQ ID NO: 4242052 - DNA, 25 bp, Homo sapien
tactttcttagcatcctggcatatg

SEQ ID NO: 4242053 - DNA, 25 bp, Homo sapien
tctcaaaagtgcaaactgtgtctac

SEQ ID NO: 4242054 - DNA, 25 bp, Homo sapien
tgtgcaaaaatattccacgaactaa

SEQ ID NO: 4242055 - DNA, 25 bp, Homo sapien
tccacgaactaagtaaggacattgc

SEQ ID NO: 4242056 - DNA, 25 bp, Homo sapien
gacattgctatcgtattatccagca

SEQ ID NO: 4242057 - DNA, 25 bp, Homo sapien
gtaccgctccttaattgtgcaaaaa

SEQ ID NO: 4242058 - DNA, 25 bp, Homo sapien
tttactgaactcttgaacttcttaa

SEQ ID NO: 4242059 - DNA, 25 bp, Homo sapien
accttacagggaattgttgccattt

SEQ ID NO: 4242060 - DNA, 25 bp, Homo sapien
cataattgttttcaaaccttacagg

SEQ ID NO: 4242061 - DNA, 25 bp, Homo sapien
gtcaatccaaagtggtcctttaaca

SEQ ID NO: 4242062 - DNA, 25 bp, Homo sapien
gggacatagatcagtcccgtgtctg

SEQ ID NO: 4242063 - DNA, 25 bp, Homo sapien
gggtataggctccagggacatagat

SEQ ID NO: 4242064 - DNA, 25 bp, Homo sapien
ttccagggatataggttggtccctc

SEQ ID NO: 4242065 - DNA, 25 bp, Homo sapien
gtgtctgggatataagttccaggga

SEQ ID NO: 4242066 - DNA, 25 bp, Homo sapien
tccacttctgacctaggctaattca

SEQ ID NO: 4242067 - DNA, 25 bp, Homo sapien
cctaattagtatagcaaactgcagc

SEQ ID NO: 4242068 - DNA, 25 bp, Homo sapien
ggctaattcacacccctaggcaagc

SEQ ID NO: 4242069 - DNA, 25 bp, Homo sapien
gataccaaacttattgtggataacc

SEQ ID NO: 4242070 - DNA, 25 bp, Homo sapien
gaccagagaagagccacgcaatact

SEQ ID NO: 4242071 - DNA, 25 bp, Homo sapien
gaactgattgtctggctccgacagg

SEQ ID NO: 4242072 - DNA, 25 bp, Homo sapien
gagcgtatttcatgcttaagaccag

SEQ ID NO: 4242073 - DNA, 25 bp, Homo sapien
tactcagtggataaaaggcttgcag

SEQ ID NO: 4242074 - DNA, 25 bp, Homo sapien
tcactgaagacggagggtttttgct

SEQ ID NO: 4242075 - DNA, 25 bp, Homo sapien
actaacattttcactgaagacggag

SEQ ID NO: 4242076 - DNA, 25 bp, Homo sapien
gaaatgggcttcaagtcgtgttttg

SEQ ID NO: 4242077 - DNA, 25 bp, Homo sapien
ttttttatctgcaccacgaccactg

SEQ ID NO: 4242078 - DNA, 25 bp, Homo sapien
tcttacttcatattcaaccaaagtg

SEQ ID NO: 4242079 - DNA, 25 bp, Homo sapien
ttacttcatattcaaccaaagtgtt

SEQ ID NO: 4242080 - DNA, 25 bp, Homo sapien
ttcttacttcatattcaaccaaagt

SEQ ID NO: 4242081 - DNA, 25 bp, Homo sapien
cttacttcatattcaaccaaagtgt

SEQ ID NO: 4242082 - DNA, 25 bp, Homo sapien
ctgacaaatgagcattagaagccat

SEQ ID NO: 4242083 - DNA, 25 bp, Homo sapien
caaatgagcattagaagccattaaa

SEQ ID NO: 4242084 - DNA, 25 bp, Homo sapien
gacaaatgagcattagaagccatta

SEQ ID NO: 4242085 - DNA, 25 bp, Homo sapien
atgagcattagaagccattaaatta

SEQ ID NO: 4242086 - DNA, 25 bp, Homo sapien
tttgctacttgaagctcccaccttg

SEQ ID NO: 4242087 - DNA, 25 bp, Homo sapien
tttgtattagggaatggctgaccac

SEQ ID NO: 4242088 - DNA, 25 bp, Homo sapien
ccttttaaattgagtgagcacagtc

SEQ ID NO: 4242089 - DNA, 25 bp, Homo sapien
actagaattacacaattggcttccg

SEQ ID NO: 4242090 - DNA, 25 bp, Homo sapien
cacagagtacttggagtgcctgcgg

SEQ ID NO: 4242091 - DNA, 25 bp, Homo sapien
aaaaataccactctggccaggacat

SEQ ID NO: 4242092 - DNA, 25 bp, Homo sapien
tatgaatatcttgaaagtagtcaca

SEQ ID NO: 4242093 - DNA, 25 bp, Homo sapien
aaaaatgtagccgtatatcattggc

SEQ ID NO: 4242094 - DNA, 25 bp, Homo sapien
tatgagtcggtaacattcagtgctc

SEQ ID NO: 4242095 - DNA, 25 bp, Homo sapien
ttaccacttacccacagaaagtctc

SEQ ID NO: 4242096 - DNA, 25 bp, Homo sapien
gaaagagaagtataacttatgagtc

SEQ ID NO: 4242097 - DNA, 25 bp, Homo sapien
cacattaccacttacccacagaaag

SEQ ID NO: 4242098 - DNA, 25 bp, Homo sapien
gggcagctcattggcatcaactgtt

SEQ ID NO: 4242099 - DNA, 25 bp, Homo sapien
cttggatcctggcatgcaggggcag

SEQ ID NO: 4242100 - DNA, 25 bp, Homo sapien
cattggcatcaactgttctaagtac

SEQ ID NO: 4242101 - DNA, 25 bp, Homo sapien
tcagtgcgttgcttggatcctggca

SEQ ID NO: 4242102 - DNA, 25 bp, Homo sapien
ggatacaaatcagttaagccacttg

SEQ ID NO: 4242103 - DNA, 25 bp, Homo sapien
aagctctgaggcatatagtcacaaa

SEQ ID NO: 4242104 - DNA, 25 bp, Homo sapien
tctgagtgggaaatagttcaacctc

SEQ ID NO: 4242105 - DNA, 25 bp, Homo sapien
cacaaatatgggcagtaaggagtta

SEQ ID NO: 4242106 - DNA, 25 bp, Homo sapien
tgctatttggagatgttctctctct

SEQ ID NO: 4242107 - DNA, 25 bp, Homo sapien
tcttgctatttggagatgttctctc

SEQ ID NO: 4242108 - DNA, 25 bp, Homo sapien
ctatttggagatgttctctctcttc

SEQ ID NO: 4242109 - DNA, 25 bp, Homo sapien
cttgctatttggagatgttctctct

SEQ ID NO: 4242110 - DNA, 25 bp, Homo sapien
ctctccaggcataccgtaaggagag

SEQ ID NO: 4242111 - DNA, 25 bp, Homo sapien
tctccaggcataccgtaaggagagg

SEQ ID NO: 4242112 - DNA, 25 bp, Homo sapien
tccaggcataccgtaaggagaggac

SEQ ID NO: 4242113 - DNA, 25 bp, Homo sapien
caggcataccgtaaggagaggacat

SEQ ID NO: 4242114 - DNA, 25 bp, Homo sapien
tttcaaggaggtactccaggtagct

SEQ ID NO: 4242115 - DNA, 25 bp, Homo sapien
aaggaggtactccaggtagctgact

SEQ ID NO: 4242116 - DNA, 25 bp, Homo sapien
ggtactccaggtagctgactttcca

SEQ ID NO: 4242117 - DNA, 25 bp, Homo sapien
gatttcaaggaggtactccaggtag

SEQ ID NO: 4242118 - DNA, 25 bp, Homo sapien
aacagcatttggcatttgctcaggc

SEQ ID NO: 4242119 - DNA, 25 bp, Homo sapien
ttggagatgggcattgcttaacagc

SEQ ID NO: 4242120 - DNA, 25 bp, Homo sapien
ggagatgggcattgcttaacagcat

SEQ ID NO: 4242121 - DNA, 25 bp, Homo sapien
tcctttaaccttggtgactgaatca

SEQ ID NO: 4242122 - DNA, 25 bp, Homo sapien
ctttccttctttagtgtagtaatct

SEQ ID NO: 4242123 - DNA, 25 bp, Homo sapien
cgtgagagtaagagccttctttcct

SEQ ID NO: 4242124 - DNA, 25 bp, Homo sapien
agccttctttccttctttagtgtag

SEQ ID NO: 4242125 - DNA, 25 bp, Homo sapien
agagccttctttccttctttagtgt

SEQ ID NO: 4242126 - DNA, 25 bp, Homo sapien
catctgtggtacctctaaagctaca

SEQ ID NO: 4242127 - DNA, 25 bp, Homo sapien
gccatctgtggtacctctaaagcta

SEQ ID NO: 4242128 - DNA, 25 bp, Homo sapien
ctgtggtacctctaaagctacagta

SEQ ID NO: 4242129 - DNA, 25 bp, Homo sapien
tgtgtagttgaatcttggtggatgg

SEQ ID NO: 4242130 - DNA, 25 bp, Homo sapien
tgattaacaattgtctgtgcctgtg

SEQ ID NO: 4242131 - DNA, 25 bp, Homo sapien
tggtccctcgatcatgtctctcttg

SEQ ID NO: 4242132 - DNA, 25 bp, Homo sapien
ggtacagtggccagatttaggtttg

SEQ ID NO: 4242133 - DNA, 25 bp, Homo sapien
tgctgaaagtgtgatctacgttact

SEQ ID NO: 4242134 - DNA, 25 bp, Homo sapien
catctctgtctcttttgcttttttt

SEQ ID NO: 4242135 - DNA, 25 bp, Homo sapien
ttcatctctgtctcttttgcttttt

SEQ ID NO: 4242136 - DNA, 25 bp, Homo sapien
cacttcatctctgtctcttttgctt

SEQ ID NO: 4242137 - DNA, 25 bp, Homo sapien
tctctgtctcttttgctttttttca

SEQ ID NO: 4242138 - DNA, 25 bp, Homo sapien
tgccaattgctcagtgccatttgat

SEQ ID NO: 4242139 - DNA, 25 bp, Homo sapien
gccaattgctcagtgccatttgatc

SEQ ID NO: 4242140 - DNA, 25 bp, Homo sapien
aatgccaattgctcagtgccatttg

SEQ ID NO: 4242141 - DNA, 25 bp, Homo sapien
caattgctcagtgccatttgatctt

SEQ ID NO: 4242142 - DNA, 25 bp, Homo sapien
tctttgtggatagagtccccttgaa

SEQ ID NO: 4242143 - DNA, 25 bp, Homo sapien
ttggtgcagacccaactggctgctg

SEQ ID NO: 4242144 - DNA, 25 bp, Homo sapien
cagacgctgccatttcatagggtag

SEQ ID NO: 4242145 - DNA, 25 bp, Homo sapien
ccttgaaggctgtccatggatgacc

SEQ ID NO: 4242146 - DNA, 25 bp, Homo sapien
tcatggcactaagctggtgaactag

SEQ ID NO: 4242147 - DNA, 25 bp, Homo sapien
tgtccttgaaccactctcagtctgc

SEQ ID NO: 4242148 - DNA, 25 bp, Homo sapien
tttcagctgtcatgaactatgagca

SEQ ID NO: 4242149 - DNA, 25 bp, Homo sapien
taatccatttatgaacctatctggc

SEQ ID NO: 4242150 - DNA, 25 bp, Homo sapien
gaccctggctgatacctccaccatg

SEQ ID NO: 4242151 - DNA, 25 bp, Homo sapien
tatctgatttcatgtctaccacctg

SEQ ID NO: 4242152 - DNA, 25 bp, Homo sapien
atctgatttcatgtctaccacctgg

SEQ ID NO: 4242153 - DNA, 25 bp, Homo sapien
gctcatttgctataatcagcttaac

SEQ ID NO: 4242154 - DNA, 25 bp, Homo sapien
taatcagcttaacttcatctgctag

SEQ ID NO: 4242155 - DNA, 25 bp, Homo sapien
gattttcaatagctcatttgctata

SEQ ID NO: 4242156 - DNA, 25 bp, Homo sapien
gctagaaaacgaacttctaattcca

SEQ ID NO: 4242157 - DNA, 25 bp, Homo sapien
gcagcccattgaggaagtgctcgga

SEQ ID NO: 4242158 - DNA, 25 bp, Homo sapien
ctgggcagcccattgaggaagtgct

SEQ ID NO: 4242159 - DNA, 25 bp, Homo sapien
ggagctcattgagtgggtgaggatc

SEQ ID NO: 4242160 - DNA, 25 bp, Homo sapien
tgaggaagtgctcggagctcattga

SEQ ID NO: 4242161 - DNA, 25 bp, Homo sapien
gatgcctacatgtgactgtgataac

SEQ ID NO: 4242162 - DNA, 25 bp, Homo sapien
ctggatgcctacatgtgactgtgat

SEQ ID NO: 4242163 - DNA, 25 bp, Homo sapien
tgactggatgcctacatgtgactgt

SEQ ID NO: 4242164 - DNA, 25 bp, Homo sapien
agaatgactggatgcctacatgtga

SEQ ID NO: 4242165 - DNA, 25 bp, Homo sapien
tggaaatgtcaactgcagtgacttg

SEQ ID NO: 4242166 - DNA, 25 bp, Homo sapien
gaaatgtcaactgcagtgacttgcc

SEQ ID NO: 4242167 - DNA, 25 bp, Homo sapien
tatgtttcagtgtatcccttttgga

SEQ ID NO: 4242168 - DNA, 25 bp, Homo sapien
gggaactgcccctctatgtttcagt

SEQ ID NO: 4242169 - DNA, 25 bp, Homo sapien
atttagctgttcttcggcactggaa

SEQ ID NO: 4242170 - DNA, 25 bp, Homo sapien
cacagctttggtcactgctgtccac

SEQ ID NO: 4242171 - DNA, 25 bp, Homo sapien
tcacagctttggtcactgctgtcca

SEQ ID NO: 4242172 - DNA, 25 bp, Homo sapien
ttcttcggcactggaaattttcttc

SEQ ID NO: 4242173 - DNA, 25 bp, Homo sapien
gccacgtgtttagagacgccagcca

SEQ ID NO: 4242174 - DNA, 25 bp, Homo sapien
tgagagccccttattcttcacgcag

SEQ ID NO: 4242175 - DNA, 25 bp, Homo sapien
tgacagcatgctctcagtacacaac

SEQ ID NO: 4242176 - DNA, 25 bp, Homo sapien
gcgattgcatgtctcaaccaccagg

SEQ ID NO: 4242177 - DNA, 25 bp, Homo sapien
tatagtactatactggtaaagaggc

SEQ ID NO: 4242178 - DNA, 25 bp, Homo sapien
tattatttaaaaacgctgagcatcc

SEQ ID NO: 4242179 - DNA, 25 bp, Homo sapien
gatattgtcaattaccaggtagact

SEQ ID NO: 4242180 - DNA, 25 bp, Homo sapien
catcctctattggtgatattgtcaa

SEQ ID NO: 4242181 - DNA, 25 bp, Homo sapien
gtctgtttccatctaaaatgatgac

SEQ ID NO: 4242182 - DNA, 25 bp, Homo sapien
tagtctgtttccatctaaaatgatg

SEQ ID NO: 4242183 - DNA, 25 bp, Homo sapien
gtgtagtctgtttccatctaaaatg

SEQ ID NO: 4242184 - DNA, 25 bp, Homo sapien
ctgtttccatctaaaatgatgacct

SEQ ID NO: 4242185 - DNA, 25 bp, Homo sapien
tccaaggtagggggtgatagtattc

SEQ ID NO: 4242186 - DNA, 25 bp, Homo sapien
caaggtagggggtgatagtattcat

SEQ ID NO: 4242187 - DNA, 25 bp, Homo sapien
ccaaggtagggggtgatagtattca

SEQ ID NO: 4242188 - DNA, 25 bp, Homo sapien
ctgtgcacaccattctctggtccat

SEQ ID NO: 4242189 - DNA, 25 bp, Homo sapien
gatagcaaggttctggtaattattc

SEQ ID NO: 4242190 - DNA, 25 bp, Homo sapien
tgtagatagcaaggttctggtaatt

SEQ ID NO: 4242191 - DNA, 25 bp, Homo sapien
ttaaatgtgtagatagcaaggttct

SEQ ID NO: 4242192 - DNA, 25 bp, Homo sapien
aatgtgtagatagcaaggttctggt

SEQ ID NO: 4242193 - DNA, 25 bp, Homo sapien
gtcatcatcgcatagatcatcagat

SEQ ID NO: 4242194 - DNA, 25 bp, Homo sapien
gcaagtcatcatcgcatagatcatc

SEQ ID NO: 4242195 - DNA, 25 bp, Homo sapien
cagcaagtcatcatcgcatagatca

SEQ ID NO: 4242196 - DNA, 25 bp, Homo sapien
aagtcatcatcgcatagatcatcag

SEQ ID NO: 4242197 - DNA, 25 bp, Homo sapien
gaaatgatggtctatcttatctcca

SEQ ID NO: 4242198 - DNA, 25 bp, Homo sapien
gcaacacggaaatgatggtctatct

SEQ ID NO: 4242199 - DNA, 25 bp, Homo sapien
actctgagcaacacggaaatgatgg

SEQ ID NO: 4242200 - DNA, 25 bp, Homo sapien
cacggaaatgatggtctatcttatc

SEQ ID NO: 4242201 - DNA, 25 bp, Homo sapien
tcttggaaatgatccgcgtgcccac

SEQ ID NO: 4242202 - DNA, 25 bp, Homo sapien
tctttcccgaggttcattagcaggg

SEQ ID NO: 4242203 - DNA, 25 bp, Homo sapien
ggcaaaatcaccgtctgaagtcatt

SEQ ID NO: 4242204 - DNA, 25 bp, Homo sapien
gcgtgcccactggaaactttgagaa

SEQ ID NO: 4242205 - DNA, 25 bp, Homo sapien
ttcttctttctgctgcgtgaattga

SEQ ID NO: 4242206 - DNA, 25 bp, Homo sapien
gtaataaacgaataacgtctggcca

SEQ ID NO: 4242207 - DNA, 25 bp, Homo sapien
taataaacgaataacgtctggccac

SEQ ID NO: 4242208 - DNA, 25 bp, Homo sapien
taaacgaataacgtctggccacgta

SEQ ID NO: 4242209 - DNA, 25 bp, Homo sapien
aataaacgaataacgtctggccacg

SEQ ID NO: 4242210 - DNA, 25 bp, Homo sapien
cagatagctttggtttggccggcat

SEQ ID NO: 4242211 - DNA, 25 bp, Homo sapien
gcagatagctttggtttggccggca

SEQ ID NO: 4242212 - DNA, 25 bp, Homo sapien
tcaaaaatacctgatatattaaatc

SEQ ID NO: 4242213 - DNA, 25 bp, Homo sapien
cgtcaaaaatacctgatatattaaa

SEQ ID NO: 4242214 - DNA, 25 bp, Homo sapien
caaaaatacctgatatattaaatcc

SEQ ID NO: 4242215 - DNA, 25 bp, Homo sapien
gtcaaaaatacctgatatattaaat

SEQ ID NO: 4242216 - DNA, 25 bp, Homo sapien
tttctgaggcaaaacacatgtaagg

SEQ ID NO: 4242217 - DNA, 25 bp, Homo sapien
ttttgtactatgcattaatgcagac

SEQ ID NO: 4242218 - DNA, 25 bp, Homo sapien
tactgtatcggacccagttgtcttc

SEQ ID NO: 4242219 - DNA, 25 bp, Homo sapien
tagggttgaattccattatgaatgc

SEQ ID NO: 4242220 - DNA, 25 bp, Homo sapien
tcaccaaggtgagaggtcatcagtg

SEQ ID NO: 4242221 - DNA, 25 bp, Homo sapien
tctgaagtctaatgatcaaattaca

SEQ ID NO: 4242222 - DNA, 25 bp, Homo sapien
caaagttcatgaggatagcgttcaa

SEQ ID NO: 4242223 - DNA, 25 bp, Homo sapien
tcatcacgctttaagtctccttctt

SEQ ID NO: 4242224 - DNA, 25 bp, Homo sapien
tatgtaggcaattctacacccactc

SEQ ID NO: 4242225 - DNA, 25 bp, Homo sapien
caagcctagaattgttatcagactc

SEQ ID NO: 4242226 - DNA, 25 bp, Homo sapien
tagtatgctagactttgggaacaca

SEQ ID NO: 4242227 - DNA, 25 bp, Homo sapien
ggttcttgcagccaatatgtaggca

SEQ ID NO: 4242228 - DNA, 25 bp, Homo sapien
atccctgagttgtcctttatgacat

SEQ ID NO: 4242229 - DNA, 25 bp, Homo sapien
cctttatgacattggcagacaattt

SEQ ID NO: 4242230 - DNA, 25 bp, Homo sapien
tcttctctccatcaggtcgaatcag

SEQ ID NO: 4242231 - DNA, 25 bp, Homo sapien
tctctccatcaggtcgaatcagggt

SEQ ID NO: 4242232 - DNA, 25 bp, Homo sapien
gtttgcaacatccaaagcatcataa

SEQ ID NO: 4242233 - DNA, 25 bp, Homo sapien
tctccatcaggtcgaatcagggtgt

SEQ ID NO: 4242234 - DNA, 25 bp, Homo sapien
atatttgaacggcctccagagtccc

SEQ ID NO: 4242235 - DNA, 25 bp, Homo sapien
agagtcccagtgtcttgggcctcca

SEQ ID NO: 4242236 - DNA, 25 bp, Homo sapien
tatggccaactcagtgatcagagga

SEQ ID NO: 4242237 - DNA, 25 bp, Homo sapien
tccaaggatatttgaacggcctcca

SEQ ID NO: 4242238 - DNA, 25 bp, Homo sapien
tcccttgggcttcagctttaggagg

SEQ ID NO: 4242239 - DNA, 25 bp, Homo sapien
gcaggaacttccttcttcgcttttg

SEQ ID NO: 4242240 - DNA, 25 bp, Homo sapien
tcttggcatttaaagccttcccttg

SEQ ID NO: 4242241 - DNA, 25 bp, Homo sapien
ggaacttccttcttcgcttttggca

SEQ ID NO: 4242242 - DNA, 25 bp, Homo sapien
gctgatctgtaccatttggcggatt

SEQ ID NO: 4242243 - DNA, 25 bp, Homo sapien
taccatttggcggattggaactatt

SEQ ID NO: 4242244 - DNA, 25 bp, Homo sapien
tatttgcattgtctccccggataga

SEQ ID NO: 4242245 - DNA, 25 bp, Homo sapien
agaagaatgtttagccagaagtttc

SEQ ID NO: 4242246 - DNA, 25 bp, Homo sapien
tgcacacttcagttcattaacagag

SEQ ID NO: 4242247 - DNA, 25 bp, Homo sapien
ttaacagagacagaaactctttttc

SEQ ID NO: 4242248 - DNA, 25 bp, Homo sapien
cagaaactctttttctgatactcat

SEQ ID NO: 4242249 - DNA, 25 bp, Homo sapien
ctgcacacttcagttcattaacaga

SEQ ID NO: 4242250 - DNA, 25 bp, Homo sapien
tctccttcagttttaacttcagctc

SEQ ID NO: 4242251 - DNA, 25 bp, Homo sapien
cttctccttcagttttaacttcagc

SEQ ID NO: 4242252 - DNA, 25 bp, Homo sapien
ccttcagttttaacttcagctccaa

SEQ ID NO: 4242253 - DNA, 25 bp, Homo sapien
tccttcagttttaacttcagctcca

SEQ ID NO: 4242254 - DNA, 25 bp, Homo sapien
tactctgggtcaggtaccgcctgca

SEQ ID NO: 4242255 - DNA, 25 bp, Homo sapien
actctgggtcaggtaccgcctgcag

SEQ ID NO: 4242256 - DNA, 25 bp, Homo sapien
gggtcaggtaccgcctgcagagcat

SEQ ID NO: 4242257 - DNA, 25 bp, Homo sapien
tctgggtcaggtaccgcctgcagag

SEQ ID NO: 4242258 - DNA, 25 bp, Homo sapien
aatagacggcaagagcagatacgca

SEQ ID NO: 4242259 - DNA, 25 bp, Homo sapien
taggcggcaagagcagatacgcagc

SEQ ID NO: 4242260 - DNA, 25 bp, Homo sapien
tagacggcaagagcagatacgcagc

SEQ ID NO: 4242261 - DNA, 25 bp, Homo sapien
taagggatacaataggcggcaagag

SEQ ID NO: 4242262 - DNA, 25 bp, Homo sapien
tcctaaggcgcttttccatgtgagg

SEQ ID NO: 4242263 - DNA, 25 bp, Homo sapien
ttgctgtaaaatgagtccatggctg

SEQ ID NO: 4242264 - DNA, 25 bp, Homo sapien
ggtccatttgcattgagcaaatggt

SEQ ID NO: 4242265 - DNA, 25 bp, Homo sapien
atggtaagccctcctaaggcgcttt

SEQ ID NO: 4242266 - DNA, 25 bp, Homo sapien
taggaagtatagagaagcatctaaa

SEQ ID NO: 4242267 - DNA, 25 bp, Homo sapien
ggaagtatagagaagcatctaaaat

SEQ ID NO: 4242268 - DNA, 25 bp, Homo sapien
cttgtgacttgtaggaagtatagag

SEQ ID NO: 4242269 - DNA, 25 bp, Homo sapien
aagtatagagaagcatctaaaatgc

SEQ ID NO: 4242270 - DNA, 25 bp, Homo sapien
tgcagctccgagtgggacagacatt

SEQ ID NO: 4242271 - DNA, 25 bp, Homo sapien
tctctgttactgcagctccgagtgg

SEQ ID NO: 4242272 - DNA, 25 bp, Homo sapien
ccagtaacttttacccatgattgat

SEQ ID NO: 4242273 - DNA, 25 bp, Homo sapien
tgggacagacattggtataccagca

SEQ ID NO: 4242274 - DNA, 25 bp, Homo sapien
tgaaattgaaagctaatccattatc

SEQ ID NO: 4242275 - DNA, 25 bp, Homo sapien
attgaaagctaatccattatctcct

SEQ ID NO: 4242276 - DNA, 25 bp, Homo sapien
aattgaaagctaatccattatctcc

SEQ ID NO: 4242277 - DNA, 25 bp, Homo sapien
ctccttcccgccaaccaacagccat

SEQ ID NO: 4242278 - DNA, 25 bp, Homo sapien
ttccgtaatccggggcattttatga

SEQ ID NO: 4242279 - DNA, 25 bp, Homo sapien
cgtaatccggggcattttatgaata

SEQ ID NO: 4242280 - DNA, 25 bp, Homo sapien
tcacagttccgtaatccggggcatt

SEQ ID NO: 4242281 - DNA, 25 bp, Homo sapien
cacagttccgtaatccggggcattt

SEQ ID NO: 4242282 - DNA, 25 bp, Homo sapien
catgcatgatgatagacaatttggg

SEQ ID NO: 4242283 - DNA, 25 bp, Homo sapien
gataaagggttaggatggccacagc

SEQ ID NO: 4242284 - DNA, 25 bp, Homo sapien
acactcttcacttattctgagagca

SEQ ID NO: 4242285 - DNA, 25 bp, Homo sapien
tatcttcttgtggagaccgcaggcc

SEQ ID NO: 4242286 - DNA, 25 bp, Homo sapien
ctattatccataaagcgcccatgta

SEQ ID NO: 4242287 - DNA, 25 bp, Homo sapien
tctacttctaattgtagtaatttca

SEQ ID NO: 4242288 - DNA, 25 bp, Homo sapien
aagcgcccatgtattctacttctaa

SEQ ID NO: 4242289 - DNA, 25 bp, Homo sapien
ccataaagcgcccatgtattctact

SEQ ID NO: 4242290 - DNA, 25 bp, Homo sapien
agaagcagcaccaattcctacacca

SEQ ID NO: 4242291 - DNA, 25 bp, Homo sapien
gaagcagcaccaattcctacaccag

SEQ ID NO: 4242292 - DNA, 25 bp, Homo sapien
tcaacctagttgagaatagatagtc

SEQ ID NO: 4242293 - DNA, 25 bp, Homo sapien
cgaagcagtctaagagcagagatag

SEQ ID NO: 4242294 - DNA, 25 bp, Homo sapien
gaatagatagtccagttaacaaaaa

SEQ ID NO: 4242295 - DNA, 25 bp, Homo sapien
gaagcagtctaagagcagagatagc

SEQ ID NO: 4242296 - DNA, 25 bp, Homo sapien
taataggaagaataatacgttgaca

SEQ ID NO: 4242297 - DNA, 25 bp, Homo sapien
tcggattgcaaacctgctttgtgca

SEQ ID NO: 4242298 - DNA, 25 bp, Homo sapien
cgttgacaccaaagaaacaggtttg

SEQ ID NO: 4242299 - DNA, 25 bp, Homo sapien
gttaaaatctccgatgtcggattgc

SEQ ID NO: 4242300 - DNA, 25 bp, Homo sapien
attattttaagataccttccatcca

SEQ ID NO: 4242301 - DNA, 25 bp, Homo sapien
ttattttaagataccttccatccat

SEQ ID NO: 4242302 - DNA, 25 bp, Homo sapien
cttccatccatacctagattattga

SEQ ID NO: 4242303 - DNA, 25 bp, Homo sapien
taccttccatccatacctagattat

SEQ ID NO: 4242304 - DNA, 25 bp, Homo sapien
tcatgtgtaacagccaagtgcagag

SEQ ID NO: 4242305 - DNA, 25 bp, Homo sapien
gaaccatccagaagagttgcttgca

SEQ ID NO: 4242306 - DNA, 25 bp, Homo sapien
caaaagctgtactcatgtcctggga

SEQ ID NO: 4242307 - DNA, 25 bp, Homo sapien
tactccccgttaaccagatgtgctg

SEQ ID NO: 4242308 - DNA, 25 bp, Homo sapien
gtatcttttctgctatattaggctt

SEQ ID NO: 4242309 - DNA, 25 bp, Homo sapien
atcttttctgctatattaggcttca

SEQ ID NO: 4242310 - DNA, 25 bp, Homo sapien
tatcttttctgctatattaggcttc

SEQ ID NO: 4242311 - DNA, 25 bp, Homo sapien
tcttttctgctatattaggcttcat

SEQ ID NO: 4242312 - DNA, 25 bp, Homo sapien
caggggacttgacaccagatggcca

SEQ ID NO: 4242313 - DNA, 25 bp, Homo sapien
gggacttgacaccagatggccactg

SEQ ID NO: 4242314 - DNA, 25 bp, Homo sapien
ttgacaccagatggccactgcccta

SEQ ID NO: 4242315 - DNA, 25 bp, Homo sapien
gccactgccctaatttgataacccc

SEQ ID NO: 4242316 - DNA, 25 bp, Homo sapien
ttttcgataggcccaaatccggctg

SEQ ID NO: 4242317 - DNA, 25 bp, Homo sapien
tttcgataggcccaaatccggctgc

SEQ ID NO: 4242318 - DNA, 25 bp, Homo sapien
gaatgctttcgaggtaagatgctct

SEQ ID NO: 4242319 - DNA, 25 bp, Homo sapien
ctcttcaggttggtaaagtgggact

SEQ ID NO: 4242320 - DNA, 25 bp, Homo sapien
tgatgaatgctttcgaggtaagatg

SEQ ID NO: 4242321 - DNA, 25 bp, Homo sapien
ggtaagatgctcttcaggttggtaa

SEQ ID NO: 4242322 - DNA, 25 bp, Homo sapien
aaatgtaattcattggacaggccac

SEQ ID NO: 4242323 - DNA, 25 bp, Homo sapien
cacacgatgaattggtttcacagtc

SEQ ID NO: 4242324 - DNA, 25 bp, Homo sapien
aagcacctttcagaattgggagtaa

SEQ ID NO: 4242325 - DNA, 25 bp, Homo sapien
cctttcagaattgggagtaaatgta

SEQ ID NO: 4242326 - DNA, 25 bp, Homo sapien
ccaatccaggtgaacagggctgaga

SEQ ID NO: 4242327 - DNA, 25 bp, Homo sapien
ttcctcctccaatccaggtgaacag

SEQ ID NO: 4242328 - DNA, 25 bp, Homo sapien
tcctccaatccaggtgaacagggct

SEQ ID NO: 4242329 - DNA, 25 bp, Homo sapien
caatccaggtgaacagggctgagaa

SEQ ID NO: 4242330 - DNA, 25 bp, Homo sapien
caacatagtaaatctctgaaaaagc

SEQ ID NO: 4242331 - DNA, 25 bp, Homo sapien
taaatctctgaaaaagccaccttct

SEQ ID NO: 4242332 - DNA, 25 bp, Homo sapien
cttcttggcatttcctaaactgcac

SEQ ID NO: 4242333 - DNA, 25 bp, Homo sapien
aaaagccaccttcttggcatttcct

SEQ ID NO: 4242334 - DNA, 25 bp, Homo sapien
tccataatgacccatccaatacttc

SEQ ID NO: 4242335 - DNA, 25 bp, Homo sapien
tgaggaattccataatgacccatcc

SEQ ID NO: 4242336 - DNA, 25 bp, Homo sapien
gaattccataatgacccatccaata

SEQ ID NO: 4242337 - DNA, 25 bp, Homo sapien
gaggaattccataatgacccatcca

SEQ ID NO: 4242338 - DNA, 25 bp, Homo sapien
gaacagcacagcttcctagatttat

SEQ ID NO: 4242339 - DNA, 25 bp, Homo sapien
aattgtgaacagcacagcttcctag

SEQ ID NO: 4242340 - DNA, 25 bp, Homo sapien
tgaggtcaaattgtgaacagcacag

SEQ ID NO: 4242341 - DNA, 25 bp, Homo sapien
ctgtgggtgaggtcaaattgtgaac

SEQ ID NO: 4242342 - DNA, 25 bp, Homo sapien
ctctcttcttttactctccaggtgc

SEQ ID NO: 4242343 - DNA, 25 bp, Homo sapien
cttcttttactctccaggtgctcca

SEQ ID NO: 4242344 - DNA, 25 bp, Homo sapien
cctccacatccggattcttctctct

SEQ ID NO: 4242345 - DNA, 25 bp, Homo sapien
ccctccacatccggattcttctctc

SEQ ID NO: 4242346 - DNA, 25 bp, Homo sapien
cacgtaatgccatctccttttccaa

SEQ ID NO: 4242347 - DNA, 25 bp, Homo sapien
cctgtgaatgtgtactgttctaata

SEQ ID NO: 4242348 - DNA, 25 bp, Homo sapien
atgtgtactgttctaatatcttcca

SEQ ID NO: 4242349 - DNA, 25 bp, Homo sapien
tcagtttctggaacaagtgtacacg

SEQ ID NO: 4242350 - DNA, 25 bp, Homo sapien
tatccacgatactagtaccggccgg

SEQ ID NO: 4242351 - DNA, 25 bp, Homo sapien
gctgttatccacgatactagtaccg

SEQ ID NO: 4242352 - DNA, 25 bp, Homo sapien
tgattgctgttatccacgatactag

SEQ ID NO: 4242353 - DNA, 25 bp, Homo sapien
tagtgattgctgttatccacgatac

SEQ ID NO: 4242354 - DNA, 25 bp, Homo sapien
ttaagatttgtagatagaaggaaag

SEQ ID NO: 4242355 - DNA, 25 bp, Homo sapien
agtgcttactccagcacagtggaca

SEQ ID NO: 4242356 - DNA, 25 bp, Homo sapien
cagtgcttactccagcacagtggac

SEQ ID NO: 4242357 - DNA, 25 bp, Homo sapien
agggttcttgatccattacgtgtga

SEQ ID NO: 4242358 - DNA, 25 bp, Homo sapien
ggtgttgaaataccttcaggacttg

SEQ ID NO: 4242359 - DNA, 25 bp, Homo sapien
gaactggtgttgaaataccttcagg

SEQ ID NO: 4242360 - DNA, 25 bp, Homo sapien
ccattacgtgtgaactggtgttgaa

SEQ ID NO: 4242361 - DNA, 25 bp, Homo sapien
gcctgattctgcatctaacatcgga

SEQ ID NO: 4242362 - DNA, 25 bp, Homo sapien
ttggtaacgttacatctgatatgaa

SEQ ID NO: 4242363 - DNA, 25 bp, Homo sapien
taacatcggagttggattggtaacg

SEQ ID NO: 4242364 - DNA, 25 bp, Homo sapien
tcatattgcattgggtaaaaatcat

SEQ ID NO: 4242365 - DNA, 25 bp, Homo sapien
tactggtggttggattatgaaagcc

SEQ ID NO: 4242366 - DNA, 25 bp, Homo sapien
ggccacacaagatctaacaaaggtt

SEQ ID NO: 4242367 - DNA, 25 bp, Homo sapien
ccttgcaacaggagtgtgaatgaca

SEQ ID NO: 4242368 - DNA, 25 bp, Homo sapien
tctggaactattaccaacatggtag

SEQ ID NO: 4242369 - DNA, 25 bp, Homo sapien
gctgattttccagactgtaacaact

SEQ ID NO: 4242370 - DNA, 25 bp, Homo sapien
cagtatagttaagagctttacagcc

SEQ ID NO: 4242371 - DNA, 25 bp, Homo sapien
gctttacagcccacctgttaaacag

SEQ ID NO: 4242372 - DNA, 25 bp, Homo sapien
gtaacaactttataatttgagcaac

SEQ ID NO: 4242373 - DNA, 25 bp, Homo sapien
tgccagctttttgcttcaatttcat

SEQ ID NO: 4242374 - DNA, 25 bp, Homo sapien
tggcagatgccagctttttgcttca

SEQ ID NO: 4242375 - DNA, 25 bp, Homo sapien
gatgccagctttttgcttcaatttc

SEQ ID NO: 4242376 - DNA, 25 bp, Homo sapien
cttggcagatgccagctttttgctt

SEQ ID NO: 4242377 - DNA, 25 bp, Homo sapien
gagttcctctagattaatatctaac

SEQ ID NO: 4242378 - DNA, 25 bp, Homo sapien
ttttgctctttatttgatccccaat

SEQ ID NO: 4242379 - DNA, 25 bp, Homo sapien
gatccccaatgatttcttgcttcct

SEQ ID NO: 4242380 - DNA, 25 bp, Homo sapien
caggctcttctgacactttgtttgt

SEQ ID NO: 4242381 - DNA, 25 bp, Homo sapien
tgccattagttagagtggaatacac

SEQ ID NO: 4242382 - DNA, 25 bp, Homo sapien
gctacttaatggacagtgatatccc

SEQ ID NO: 4242383 - DNA, 25 bp, Homo sapien
ttgcattacaggatatattcttagc

SEQ ID NO: 4242384 - DNA, 25 bp, Homo sapien
gtgatatcccacagcccgtaaatat

SEQ ID NO: 4242385 - DNA, 25 bp, Homo sapien
gtgtaaattttccatggtggtcacc

SEQ ID NO: 4242386 - DNA, 25 bp, Homo sapien
aggggtgtgtaaattttccatggtg

SEQ ID NO: 4242387 - DNA, 25 bp, Homo sapien
ggtgtgtaaattttccatggtggtc

SEQ ID NO: 4242388 - DNA, 25 bp, Homo sapien
ccataatgaaaggggtgtgtaaatt

SEQ ID NO: 4242389 - DNA, 25 bp, Homo sapien
cagaagcacaaacgctaagtaaggg

SEQ ID NO: 4242390 - DNA, 25 bp, Homo sapien
taaattgggactgggtttagcttca

SEQ ID NO: 4242391 - DNA, 25 bp, Homo sapien
gatactatcgctaagaggatgaggg

SEQ ID NO: 4242392 - DNA, 25 bp, Homo sapien
gaactgaatgtgctaatctgcttaa

SEQ ID NO: 4242393 - DNA, 25 bp, Homo sapien
ttactctagcgctcctctgccgaaa

SEQ ID NO: 4242394 - DNA, 25 bp, Homo sapien
cctcttgaatctctgcaaaagtgaa

SEQ ID NO: 4242395 - DNA, 25 bp, Homo sapien
agaggagctgccaagcagttgtgat

SEQ ID NO: 4242396 - DNA, 25 bp, Homo sapien
ctcttgaatctctgcaaaagtgaac

SEQ ID NO: 4242397 - DNA, 25 bp, Homo sapien
tcagaggagctgccaagcagttgtg

SEQ ID NO: 4242398 - DNA, 25 bp, Homo sapien
gagggtccaaagtatgaaacagttc

SEQ ID NO: 4242399 - DNA, 25 bp, Homo sapien
actggagggtccaaagtatgaaaca

SEQ ID NO: 4242400 - DNA, 25 bp, Homo sapien
tggagggtccaaagtatgaaacagt

SEQ ID NO: 4242401 - DNA, 25 bp, Homo sapien
ggtccaaagtatgaaacagttccat

SEQ ID NO: 4242402 - DNA, 25 bp, Homo sapien
tttaactagagcagatcgaatttga

SEQ ID NO: 4242403 - DNA, 25 bp, Homo sapien
actttaactagagcagatcgaattt

SEQ ID NO: 4242404 - DNA, 25 bp, Homo sapien
aactagagcagatcgaatttgaacc

SEQ ID NO: 4242405 - DNA, 25 bp, Homo sapien
ctagagcagatcgaatttgaaccat

SEQ ID NO: 4242406 - DNA, 25 bp, Homo sapien
cctcctctacgtggtatggtcatcc

SEQ ID NO: 4242407 - DNA, 25 bp, Homo sapien
ctcctctacgtggtatggtcatcct

SEQ ID NO: 4242408 - DNA, 25 bp, Homo sapien
tcctcctctacgtggtatggtcatc

SEQ ID NO: 4242409 - DNA, 25 bp, Homo sapien
accggtcctcctctacgtggtatgg

SEQ ID NO: 4242410 - DNA, 25 bp, Homo sapien
ggagcttccgcaagaggctttctat

SEQ ID NO: 4242411 - DNA, 25 bp, Homo sapien
gatcaagaaacggacacgcagtcgg

SEQ ID NO: 4242412 - DNA, 25 bp, Homo sapien
tgctactcaggctaaacgggcagga

SEQ ID NO: 4242413 - DNA, 25 bp, Homo sapien
tcatgcaatgatacagagctgggtc

SEQ ID NO: 4242414 - DNA, 25 bp, Homo sapien
cgtggatgagacttcaggtgtgtaa

SEQ ID NO: 4242415 - DNA, 25 bp, Homo sapien
aacctgaaagcactttgcgtggatg

SEQ ID NO: 4242416 - DNA, 25 bp, Homo sapien
aggtgtgtaacgcagcctgtccagc

SEQ ID NO: 4242417 - DNA, 25 bp, Homo sapien
ttacagcaactgttccctctgacct

SEQ ID NO: 4242418 - DNA, 25 bp, Homo sapien
cgaattccgcgtctcccggaggcca

SEQ ID NO: 4242419 - DNA, 25 bp, Homo sapien
taaagggaggagacatcgcctcggc

SEQ ID NO: 4242420 - DNA, 25 bp, Homo sapien
gggaatccggctgataatctcctct

SEQ ID NO: 4242421 - DNA, 25 bp, Homo sapien
tcctcgtgccccgatactcgggttg

SEQ ID NO: 4242422 - DNA, 25 bp, Homo sapien
cgcggggcaggtgctgcgtccccag

SEQ ID NO: 4242423 - DNA, 25 bp, Homo sapien
gggcaggtgctgcgtccccagcgct

SEQ ID NO: 4242424 - DNA, 25 bp, Homo sapien
taatttcgcgcgctggggacctggg

SEQ ID NO: 4242425 - DNA, 25 bp, Homo sapien
acctggggctgccgcctctcggccg

SEQ ID NO: 4242426 - DNA, 25 bp, Homo sapien
cttgaatacctaccaggatcaggag

SEQ ID NO: 4242427 - DNA, 25 bp, Homo sapien
gaatggaattagatatgatacagct

SEQ ID NO: 4242428 - DNA, 25 bp, Homo sapien
atgatacagctttatcttgaatacc

SEQ ID NO: 4242429 - DNA, 25 bp, Homo sapien
tcaatacttttcttatttaagccac

SEQ ID NO: 4242430 - DNA, 25 bp, Homo sapien
gagcctcacatcctgagaattttgc

SEQ ID NO: 4242431 - DNA, 25 bp, Homo sapien
ctgagcctcacatcctgagaatttt

SEQ ID NO: 4242432 - DNA, 25 bp, Homo sapien
cctcacatcctgagaattttgcttt

SEQ ID NO: 4242433 - DNA, 25 bp, Homo sapien
gcctcacatcctgagaattttgctt

SEQ ID NO: 4242434 - DNA, 25 bp, Homo sapien
tgtacttgtttccatgccactgata

SEQ ID NO: 4242435 - DNA, 25 bp, Homo sapien
aaaccaggaaagtcttgatcaagcc

SEQ ID NO: 4242436 - DNA, 25 bp, Homo sapien
taaagaatggctccgtcacctgtac

SEQ ID NO: 4242437 - DNA, 25 bp, Homo sapien
agctctcatttaacatgccactcgg

SEQ ID NO: 4242438 - DNA, 25 bp, Homo sapien
gttcattgtttcaacattctttgcc

SEQ ID NO: 4242439 - DNA, 25 bp, Homo sapien
gtgttgagaccgacactggtgacct

SEQ ID NO: 4242440 - DNA, 25 bp, Homo sapien
catattataatctttcgctttggtg

SEQ ID NO: 4242441 - DNA, 25 bp, Homo sapien
ctagccttttccacttgctgttttc

SEQ ID NO: 4242442 - DNA, 25 bp, Homo sapien
taaacttcattcaaaatcctgtgct

SEQ ID NO: 4242443 - DNA, 25 bp, Homo sapien
aaatcctgtgcttagaatacagcat

SEQ ID NO: 4242444 - DNA, 25 bp, Homo sapien
cttcattcaaaatcctgtgcttaga

SEQ ID NO: 4242445 - DNA, 25 bp, Homo sapien
ctgtagtacaataaacttcattcaa

SEQ ID NO: 4242446 - DNA, 25 bp, Homo sapien
gggacatccacagcacgagacacac

SEQ ID NO: 4242447 - DNA, 25 bp, Homo sapien
tcctcttagctttctgttagggaca

SEQ ID NO: 4242448 - DNA, 25 bp, Homo sapien
cgagacacacaagttagcttttcag

SEQ ID NO: 4242449 - DNA, 25 bp, Homo sapien
atcctcttaaacagcccatggcatt

SEQ ID NO: 4242450 - DNA, 25 bp, Homo sapien
gccctttgtcgggttcccatcacag

SEQ ID NO: 4242451 - DNA, 25 bp, Homo sapien
cacctgataccctgtggatcagctg

SEQ ID NO: 4242452 - DNA, 25 bp, Homo sapien
cagctgccctttgtcgggttcccat

SEQ ID NO: 4242453 - DNA, 25 bp, Homo sapien
gctggagtccacctgataccctgtg

SEQ ID NO: 4242454 - DNA, 25 bp, Homo sapien
aaagaatgagtctcagtagcaacac

SEQ ID NO: 4242455 - DNA, 25 bp, Homo sapien
gggaaagaatgagtctcagtagcaa

SEQ ID NO: 4242456 - DNA, 25 bp, Homo sapien
tcaggtgatggagtatcaggcccag

SEQ ID NO: 4242457 - DNA, 25 bp, Homo sapien
agggaattaatacgaagggtatcag

SEQ ID NO: 4242458 - DNA, 25 bp, Homo sapien
aaacacgaggggcaataatccacgg

SEQ ID NO: 4242459 - DNA, 25 bp, Homo sapien
tccccgtagtttgttatccaatagc

SEQ ID NO: 4242460 - DNA, 25 bp, Homo sapien
tatccaatagcagatatccagaaac

SEQ ID NO: 4242461 - DNA, 25 bp, Homo sapien
taatccacggtaataagtcactagg

SEQ ID NO: 4242462 - DNA, 25 bp, Homo sapien
tcaaagagaggcagacaggttgatg

SEQ ID NO: 4242463 - DNA, 25 bp, Homo sapien
gataggatccagtctgacacatgga

SEQ ID NO: 4242464 - DNA, 25 bp, Homo sapien
gacaggttgatggatgataggatcc

SEQ ID NO: 4242465 - DNA, 25 bp, Homo sapien
catctgaaaactgccgcttttcaaa

SEQ ID NO: 4242466 - DNA, 25 bp, Homo sapien
gaaggagcaaaatgagtgctctatg

SEQ ID NO: 4242467 - DNA, 25 bp, Homo sapien
ggagcaaaatgagtgctctatggcc

SEQ ID NO: 4242468 - DNA, 25 bp, Homo sapien
gcaaaatgagtgctctatggcctta

SEQ ID NO: 4242469 - DNA, 25 bp, Homo sapien
aaaatgagtgctctatggccttaac

SEQ ID NO: 4242470 - DNA, 25 bp, Homo sapien
tacgtaagcgatttttctcaaggtc

SEQ ID NO: 4242471 - DNA, 25 bp, Homo sapien
aactggattcaaacgtatgtcatgc

SEQ ID NO: 4242472 - DNA, 25 bp, Homo sapien
gtcactgggagcaccacgttcactg

SEQ ID NO: 4242473 - DNA, 25 bp, Homo sapien
tctggatggttcactgtactgccgt

SEQ ID NO: 4242474 - DNA, 25 bp, Homo sapien
gtgggactggagcaattgccatgaa

SEQ ID NO: 4242475 - DNA, 25 bp, Homo sapien
ttcacaattttagtgtggcctgtga

SEQ ID NO: 4242476 - DNA, 25 bp, Homo sapien
ctagtaagccttcatgatttaggta

SEQ ID NO: 4242477 - DNA, 25 bp, Homo sapien
caattttagtgtggcctgtgatctg

SEQ ID NO: 4242478 - DNA, 25 bp, Homo sapien
aagcaatggcagtgatcggattcct

SEQ ID NO: 4242479 - DNA, 25 bp, Homo sapien
ccaccgtgtggcagcagtaagcaat

SEQ ID NO: 4242480 - DNA, 25 bp, Homo sapien
tcattgcagcaatggtcccgcgcct

SEQ ID NO: 4242481 - DNA, 25 bp, Homo sapien
tgcataaacctgtatacagcagagt

SEQ ID NO: 4242482 - DNA, 25 bp, Homo sapien
atgaaaatggttgggccggatgtcc

SEQ ID NO: 4242483 - DNA, 25 bp, Homo sapien
ctcttagatgaaaatggttgggccg

SEQ ID NO: 4242484 - DNA, 25 bp, Homo sapien
ttgggccggatgtcctcctattgtt

SEQ ID NO: 4242485 - DNA, 25 bp, Homo sapien
ggatgtcctcctattgtttgctctt

SEQ ID NO: 4242486 - DNA, 25 bp, Homo sapien
tctgacctatatcgggttctttttc

SEQ ID NO: 4242487 - DNA, 25 bp, Homo sapien
cctatatcgggttctttttcaagct

SEQ ID NO: 4242488 - DNA, 25 bp, Homo sapien
aaggtgacacaaaagccagttcaac

SEQ ID NO: 4242489 - DNA, 25 bp, Homo sapien
ctgacctatatcgggttctttttca

SEQ ID NO: 4242490 - DNA, 25 bp, Homo sapien
atattggaaaagaattgcaggggtc

SEQ ID NO: 4242491 - DNA, 25 bp, Homo sapien
aatattggaaaagaattgcaggggt

SEQ ID NO: 4242492 - DNA, 25 bp, Homo sapien
ctgagcattgggaaaggatacaaaa

SEQ ID NO: 4242493 - DNA, 25 bp, Homo sapien
tgagcattgggaaaggatacaaaag

SEQ ID NO: 4242494 - DNA, 25 bp, Homo sapien
acttgtctccccagtgcacttcttg

SEQ ID NO: 4242495 - DNA, 25 bp, Homo sapien
aatactactggcacacttgtctccc

SEQ ID NO: 4242496 - DNA, 25 bp, Homo sapien
gacccatcagaaatactactggcac

SEQ ID NO: 4242497 - DNA, 25 bp, Homo sapien
cttgtctccccagtgcacttcttgg

SEQ ID NO: 4242498 - DNA, 25 bp, Homo sapien
ggccatattcttctcgcctccatgt

SEQ ID NO: 4242499 - DNA, 25 bp, Homo sapien
taccctgagagaggagtcagccaag

SEQ ID NO: 4242500 - DNA, 25 bp, Homo sapien
aatcagtttgatccatggaatgggc

SEQ ID NO: 4242501 - DNA, 25 bp, Homo sapien
tgagagagattgataccctgagaga

SEQ ID NO: 4242502 - DNA, 25 bp, Homo sapien
agctttctgcggatgctctgtttac

SEQ ID NO: 4242503 - DNA, 25 bp, Homo sapien
aactttcttgaagttatagcgacta

SEQ ID NO: 4242504 - DNA, 25 bp, Homo sapien
ctttctagctttctgcggatgctct

SEQ ID NO: 4242505 - DNA, 25 bp, Homo sapien
tagcgactattaaggaacctttaca

SEQ ID NO: 4242506 - DNA, 25 bp, Homo sapien
ccagccgagggccacattggtgaca

SEQ ID NO: 4242507 - DNA, 25 bp, Homo sapien
gggctattccaatataccagccgag

SEQ ID NO: 4242508 - DNA, 25 bp, Homo sapien
tattccaatataccagccgagggcc

SEQ ID NO: 4242509 - DNA, 25 bp, Homo sapien
ttttatgttctcatcccattcaggg

SEQ ID NO: 4242510 - DNA, 25 bp, Homo sapien
ggcatgtgagatgtgaggagcatct

SEQ ID NO: 4242511 - DNA, 25 bp, Homo sapien
agcatctgttagagagaatgccgga

SEQ ID NO: 4242512 - DNA, 25 bp, Homo sapien
tcaagaaacgataagctttgggctc

SEQ ID NO: 4242513 - DNA, 25 bp, Homo sapien
aggtgtgagaggtttcaagaaacga

SEQ ID NO: 4242514 - DNA, 25 bp, Homo sapien
aaacttattctttactgtgctgctc

SEQ ID NO: 4242515 - DNA, 25 bp, Homo sapien
ctttttactgttcacgtctgccttg

SEQ ID NO: 4242516 - DNA, 25 bp, Homo sapien
ttctattctcgtcagcatgggcctc

SEQ ID NO: 4242517 - DNA, 25 bp, Homo sapien
tccacaagcactccatttaaagtca

SEQ ID NO: 4242518 - DNA, 25 bp, Homo sapien
gccatcagctagctcacatctgacc

SEQ ID NO: 4242519 - DNA, 25 bp, Homo sapien
ctagctcacatctgaccccactcat

SEQ ID NO: 4242520 - DNA, 25 bp, Homo sapien
catcagctagctcacatctgacccc

SEQ ID NO: 4242521 - DNA, 25 bp, Homo sapien
tcagctagctcacatctgaccccac

SEQ ID NO: 4242522 - DNA, 25 bp, Homo sapien
ttatcatggatagggctattaagtt

SEQ ID NO: 4242523 - DNA, 25 bp, Homo sapien
caaatatttatcatggatagggcta

SEQ ID NO: 4242524 - DNA, 25 bp, Homo sapien
tatttatcatggatagggctattaa

SEQ ID NO: 4242525 - DNA, 25 bp, Homo sapien
tcatggatagggctattaagttctt

SEQ ID NO: 4242526 - DNA, 25 bp, Homo sapien
tggtcgatcaagaagcctttgcctg

SEQ ID NO: 4242527 - DNA, 25 bp, Homo sapien
tatattctgcattctccgttagggc

SEQ ID NO: 4242528 - DNA, 25 bp, Homo sapien
taatgtcagtagatggcattctcca

SEQ ID NO: 4242529 - DNA, 25 bp, Homo sapien
ggcctctacataacctcttaagtgg

SEQ ID NO: 4242530 - DNA, 25 bp, Homo sapien
tctttccactggagctcatccagaa

SEQ ID NO: 4242531 - DNA, 25 bp, Homo sapien
tttactcaaggtcactaccgtcagc

SEQ ID NO: 4242532 - DNA, 25 bp, Homo sapien
tgcctcccaattagactgtgtactt

SEQ ID NO: 4242533 - DNA, 25 bp, Homo sapien
ccagaacacattgctttgtgaccaa

SEQ ID NO: 4242534 - DNA, 25 bp, Homo sapien
gccgttgcagtgactgcaataattc

SEQ ID NO: 4242535 - DNA, 25 bp, Homo sapien
tgttgataagctattgccgttgcag

SEQ ID NO: 4242536 - DNA, 25 bp, Homo sapien
gactgcaataattcttgagcatgcc

SEQ ID NO: 4242537 - DNA, 25 bp, Homo sapien
ccagcgaattctgttgataagctat

SEQ ID NO: 4242538 - DNA, 25 bp, Homo sapien
gctaactgatgaaacactgccagag

SEQ ID NO: 4242539 - DNA, 25 bp, Homo sapien
gagcccacttggactgtttcgcaac

SEQ ID NO: 4242540 - DNA, 25 bp, Homo sapien
aagctctcatgctgaggtaaggcaa

SEQ ID NO: 4242541 - DNA, 25 bp, Homo sapien
taaggcaaacagtccatgtaggttc

SEQ ID NO: 4242542 - DNA, 25 bp, Homo sapien
tatcagccacctgcatgcaaacagc

SEQ ID NO: 4242543 - DNA, 25 bp, Homo sapien
gccacctgcatgcaaacagcattat

SEQ ID NO: 4242544 - DNA, 25 bp, Homo sapien
cagccacctgcatgcaaacagcatt

SEQ ID NO: 4242545 - DNA, 25 bp, Homo sapien
cacctgcatgcaaacagcattatgt

SEQ ID NO: 4242546 - DNA, 25 bp, Homo sapien
ccctcttgccaacgttcacagctgg

SEQ ID NO: 4242547 - DNA, 25 bp, Homo sapien
agctcctcttgtgttacaacagaga

SEQ ID NO: 4242548 - DNA, 25 bp, Homo sapien
gctcctcttgtgttacaacagagaa

SEQ ID NO: 4242549 - DNA, 25 bp, Homo sapien
acagagaaacgactaatctcagaat

SEQ ID NO: 4242550 - DNA, 25 bp, Homo sapien
ttacaacagagaaacgactaatctc

SEQ ID NO: 4242551 - DNA, 25 bp, Homo sapien
taaatccggatttgtattaagccat

SEQ ID NO: 4242552 - DNA, 25 bp, Homo sapien
taagccatccttgctatgtccttga

SEQ ID NO: 4242553 - DNA, 25 bp, Homo sapien
tgaaatatctcaatccgccagatgt

SEQ ID NO: 4242554 - DNA, 25 bp, Homo sapien
ttgatccttctttgaatccattgca

SEQ ID NO: 4242555 - DNA, 25 bp, Homo sapien
atacaatctcaaacacatcacagat

SEQ ID NO: 4242556 - DNA, 25 bp, Homo sapien
gatacaatctcaaacacatcacaga

SEQ ID NO: 4242557 - DNA, 25 bp, Homo sapien
aatgatacaatctcaaacacatcac

SEQ ID NO: 4242558 - DNA, 25 bp, Homo sapien
cccatgtggaagaacatctaatgat

SEQ ID NO: 4242559 - DNA, 25 bp, Homo sapien
tgatattgatcactttgtcccatgt

SEQ ID NO: 4242560 - DNA, 25 bp, Homo sapien
tgtcccatgtggaagaacatctaat

SEQ ID NO: 4242561 - DNA, 25 bp, Homo sapien
ccactttagatgctaaggtgatatt

SEQ ID NO: 4242562 - DNA, 25 bp, Homo sapien
cagattgtctcggaggtcttgatgt

SEQ ID NO: 4242563 - DNA, 25 bp, Homo sapien
tgttagacgacctagtatctcaggt

SEQ ID NO: 4242564 - DNA, 25 bp, Homo sapien
caattgaattaatacatggatgtgg

SEQ ID NO: 4242565 - DNA, 25 bp, Homo sapien
ttagtcttgtcaaagccagattgtc

SEQ ID NO: 4242566 - DNA, 25 bp, Homo sapien
tacaaatcacttatgtcagtggaaa

SEQ ID NO: 4242567 - DNA, 25 bp, Homo sapien
agtgccaaattgtgagcctctcagg

SEQ ID NO: 4242568 - DNA, 25 bp, Homo sapien
cagtggaaatgttttctgccaagaa

SEQ ID NO: 4242569 - DNA, 25 bp, Homo sapien
ttctgccaagaagtgccaaattgtg

SEQ ID NO: 4242570 - DNA, 25 bp, Homo sapien
ttctctttggcattgctctttgctc

SEQ ID NO: 4242571 - DNA, 25 bp, Homo sapien
gctctttgctccgtggtagctaact

SEQ ID NO: 4242572 - DNA, 25 bp, Homo sapien
ttgctccgtggtagctaactgacct

SEQ ID NO: 4242573 - DNA, 25 bp, Homo sapien
tctttggcattgctctttgctccgt

SEQ ID NO: 4242574 - DNA, 25 bp, Homo sapien
aggtcagtgcaagctgctccacaag

SEQ ID NO: 4242575 - DNA, 25 bp, Homo sapien
tccacaaggtccctctcctccagca

SEQ ID NO: 4242576 - DNA, 25 bp, Homo sapien
agctgctccacaaggtccctctcct

SEQ ID NO: 4242577 - DNA, 25 bp, Homo sapien
agtgcaagctgctccacaaggtccc

SEQ ID NO: 4242578 - DNA, 25 bp, Homo sapien
actgttccagggttggcttttctct

SEQ ID NO: 4242579 - DNA, 25 bp, Homo sapien
caactgttccagggttggcttttct

SEQ ID NO: 4242580 - DNA, 25 bp, Homo sapien
gctggcagctgggttgtgccctctg

SEQ ID NO: 4242581 - DNA, 25 bp, Homo sapien
gaccaaggcccagcgggcaattcct

SEQ ID NO: 4242582 - DNA, 25 bp, Homo sapien
atgaccaaggcccagcgggcaattc

SEQ ID NO: 4242583 - DNA, 25 bp, Homo sapien
cctgggggtgtagccccaaccatct

SEQ ID NO: 4242584 - DNA, 25 bp, Homo sapien
tagccccaaccatcttctgtgggat

SEQ ID NO: 4242585 - DNA, 25 bp, Homo sapien
gaagcccattcctcggattaaccag

SEQ ID NO: 4242586 - DNA, 25 bp, Homo sapien
aggtggctccataggctcctgtgca

SEQ ID NO: 4242587 - DNA, 25 bp, Homo sapien
actccttgtgtgtaagaagatagca

SEQ ID NO: 4242588 - DNA, 25 bp, Homo sapien
gcttcttggacacctactccttgtg

SEQ ID NO: 4242589 - DNA, 25 bp, Homo sapien
taacctctgaactgaccaaggaccc

SEQ ID NO: 4242590 - DNA, 25 bp, Homo sapien
tctgaactgaccaaggaccctagac

SEQ ID NO: 4242591 - DNA, 25 bp, Homo sapien
tgaccaaggaccctagacctgggtg

SEQ ID NO: 4242592 - DNA, 25 bp, Homo sapien
gctttaacctctgaactgaccaagg

SEQ ID NO: 4242593 - DNA, 25 bp, Homo sapien
tgcgtagttcctacgtttaacctgc

SEQ ID NO: 4242594 - DNA, 25 bp, Homo sapien
tacgtttaacctgcctgaaacacag

SEQ ID NO: 4242595 - DNA, 25 bp, Homo sapien
tgcactccctgcgtagttcctacgt

SEQ ID NO: 4242596 - DNA, 25 bp, Homo sapien
atctgcactccctgcgtagttccta

SEQ ID NO: 4242597 - DNA, 25 bp, Homo sapien
ctggcttttagagcctgacaggaat

SEQ ID NO: 4242598 - DNA, 25 bp, Homo sapien
gctagctggcttttagagcctgaca

SEQ ID NO: 4242599 - DNA, 25 bp, Homo sapien
gcttttagagcctgacaggaatgtt

SEQ ID NO: 4242600 - DNA, 25 bp, Homo sapien
ttagagcctgacaggaatgttttta

SEQ ID NO: 4242601 - DNA, 25 bp, Homo sapien
gcatgtggcaaacccgtgaacctct

SEQ ID NO: 4242602 - DNA, 25 bp, Homo sapien
atgcatgtggcaaacccgtgaacct

SEQ ID NO: 4242603 - DNA, 25 bp, Homo sapien
tgcatgtggcaaacccgtgaacctc

SEQ ID NO: 4242604 - DNA, 25 bp, Homo sapien
atgtggcaaacccgtgaacctctgt

SEQ ID NO: 4242605 - DNA, 25 bp, Homo sapien
tcttgctaacatgataaaatggcca

SEQ ID NO: 4242606 - DNA, 25 bp, Homo sapien
cagaatccgagaagcacctttgttt

SEQ ID NO: 4242607 - DNA, 25 bp, Homo sapien
aatataataaccagcatccaatcaa

SEQ ID NO: 4242608 - DNA, 25 bp, Homo sapien
aaaatggccagaatccgagaagcac

SEQ ID NO: 4242609 - DNA, 25 bp, Homo sapien
gtttagattccttatcaccagccat

SEQ ID NO: 4242610 - DNA, 25 bp, Homo sapien
gttagtttagattccttatcaccag

SEQ ID NO: 4242611 - DNA, 25 bp, Homo sapien
tctgggttagtttagattccttatc

SEQ ID NO: 4242612 - DNA, 25 bp, Homo sapien
tgcccttactctgggttagtttaga

SEQ ID NO: 4242613 - DNA, 25 bp, Homo sapien
ccctctcttggaatgctttagaaga

SEQ ID NO: 4242614 - DNA, 25 bp, Homo sapien
aatgacagatttttactgccgtaaa

SEQ ID NO: 4242615 - DNA, 25 bp, Homo sapien
gaaaaactctgaagcgtgaagcgta

SEQ ID NO: 4242616 - DNA, 25 bp, Homo sapien
ggtggcttctagtacacactttgaa

SEQ ID NO: 4242617 - DNA, 25 bp, Homo sapien
tatttctcctctgacgtacatgacc

SEQ ID NO: 4242618 - DNA, 25 bp, Homo sapien
tgaatgcttgataccaccatcagca

SEQ ID NO: 4242619 - DNA, 25 bp, Homo sapien
cctttgggctcaaatattaaggaga

SEQ ID NO: 4242620 - DNA, 25 bp, Homo sapien
ggaactttgccatgactgctacctc

SEQ ID NO: 4242621 - DNA, 25 bp, Homo sapien
gtttcgctttgggtagactgaatgg

SEQ ID NO: 4242622 - DNA, 25 bp, Homo sapien
tttcgctttgggtagactgaatggc

SEQ ID NO: 4242623 - DNA, 25 bp, Homo sapien
tttttgcttccttatcgcatcttga

SEQ ID NO: 4242624 - DNA, 25 bp, Homo sapien
tccttatcgcatcttgagactcttg

SEQ ID NO: 4242625 - DNA, 25 bp, Homo sapien
gcttccttatcgcatcttgagactc

SEQ ID NO: 4242626 - DNA, 25 bp, Homo sapien
gagactcttgtgcattctggagcaa

SEQ ID NO: 4242627 - DNA, 25 bp, Homo sapien
gatatttcctattttatcttcaata

SEQ ID NO: 4242628 - DNA, 25 bp, Homo sapien
tatttcctattttatcttcaataat

SEQ ID NO: 4242629 - DNA, 25 bp, Homo sapien
ttagatatttcctattttatcttca

SEQ ID NO: 4242630 - DNA, 25 bp, Homo sapien
tagatatttcctattttatcttcaa

SEQ ID NO: 4242631 - DNA, 25 bp, Homo sapien
caatgtagtagcttcgttcacccat

SEQ ID NO: 4242632 - DNA, 25 bp, Homo sapien
agcaatgtagtagcttcgttcaccc

SEQ ID NO: 4242633 - DNA, 25 bp, Homo sapien
agatttgggtaacaaatgaagcaat

SEQ ID NO: 4242634 - DNA, 25 bp, Homo sapien
atgaagcaatgtagtagcttcgttc

SEQ ID NO: 4242635 - DNA, 25 bp, Homo sapien
tcctgcaggcttatcatggatctgg

SEQ ID NO: 4242636 - DNA, 25 bp, Homo sapien
cattggaactgagatgtcatacccg

SEQ ID NO: 4242637 - DNA, 25 bp, Homo sapien
tctaattcaggtctgcgaggcctca

SEQ ID NO: 4242638 - DNA, 25 bp, Homo sapien
gcagtaatctaaagacattggaact

SEQ ID NO: 4242639 - DNA, 25 bp, Homo sapien
ccttgatgaatgctggcggagagcc

SEQ ID NO: 4242640 - DNA, 25 bp, Homo sapien
agcaatccataagggcctgttctgc

SEQ ID NO: 4242641 - DNA, 25 bp, Homo sapien
gtcccagctgagaatatggtcccat

SEQ ID NO: 4242642 - DNA, 25 bp, Homo sapien
atgcagcgcgcagcggagagcagtt

SEQ ID NO: 4242643 - DNA, 25 bp, Homo sapien
ctgtaacatgtaaagcgaaactggg

SEQ ID NO: 4242644 - DNA, 25 bp, Homo sapien
taacatgtaaagcgaaactgggaca

SEQ ID NO: 4242645 - DNA, 25 bp, Homo sapien
tgtaacatgtaaagcgaaactggga

SEQ ID NO: 4242646 - DNA, 25 bp, Homo sapien
gtaacatgtaaagcgaaactgggac

SEQ ID NO: 4242647 - DNA, 25 bp, Homo sapien
cactcctccctccaatgatctgtat

SEQ ID NO: 4242648 - DNA, 25 bp, Homo sapien
atgatctgtattaccccaaatagtc

SEQ ID NO: 4242649 - DNA, 25 bp, Homo sapien
aatgtctgtgtttctgatcccccac

SEQ ID NO: 4242650 - DNA, 25 bp, Homo sapien
ttgatccttctaccaatgtctgtgt

SEQ ID NO: 4242651 - DNA, 25 bp, Homo sapien
tatttcacttgagaaacattcttga

SEQ ID NO: 4242652 - DNA, 25 bp, Homo sapien
aaagtgatagactgaactatttcac

SEQ ID NO: 4242653 - DNA, 25 bp, Homo sapien
tcagaatgttcatgtaaagtgatag

SEQ ID NO: 4242654 - DNA, 25 bp, Homo sapien
tgatgttgtacatgacagtcttcgg

SEQ ID NO: 4242655 - DNA, 25 bp, Homo sapien
tcagaggcgcaaaagtaatcgtgct

SEQ ID NO: 4242656 - DNA, 25 bp, Homo sapien
tctaagctttggtaaagtggtcctg

SEQ ID NO: 4242657 - DNA, 25 bp, Homo sapien
tcactaaagagagttggctctaagc

SEQ ID NO: 4242658 - DNA, 25 bp, Homo sapien
cagagggctcaacactgtggagtga

SEQ ID NO: 4242659 - DNA, 25 bp, Homo sapien
gtagctcttcttgataagatcagca

SEQ ID NO: 4242660 - DNA, 25 bp, Homo sapien
tatttttagcctggacataacagct

SEQ ID NO: 4242661 - DNA, 25 bp, Homo sapien
tgaaatagctgcagccaactggcct

SEQ ID NO: 4242662 - DNA, 25 bp, Homo sapien
gaagtaagactgactgtgaaatagc

SEQ ID NO: 4242663 - DNA, 25 bp, Homo sapien
gatgattggagaccaggctcttgat

SEQ ID NO: 4242664 - DNA, 25 bp, Homo sapien
ggcctcaagtccagaatctttaata

SEQ ID NO: 4242665 - DNA, 25 bp, Homo sapien
tctttaatatacgttcaaagatgat

SEQ ID NO: 4242666 - DNA, 25 bp, Homo sapien
ctggcctcaagtccagaatctttaa

SEQ ID NO: 4242667 - DNA, 25 bp, Homo sapien
tttgctacagccactgttggataag

SEQ ID NO: 4242668 - DNA, 25 bp, Homo sapien
cttgcaaagcatagtgcattcccct

SEQ ID NO: 4242669 - DNA, 25 bp, Homo sapien
ggtccaccagtgttaagcctatctt

SEQ ID NO: 4242670 - DNA, 25 bp, Homo sapien
caggttggttcatgcctaatcagaa

SEQ ID NO: 4242671 - DNA, 25 bp, Homo sapien
ggaatttctacctgaggtccaccag

SEQ ID NO: 4242672 - DNA, 25 bp, Homo sapien
ctttgggatgatatttagctgttac

SEQ ID NO: 4242673 - DNA, 25 bp, Homo sapien
tatttagctgttactgtggagcttc

SEQ ID NO: 4242674 - DNA, 25 bp, Homo sapien
ctaggctttgggatgatatttagct

SEQ ID NO: 4242675 - DNA, 25 bp, Homo sapien
tttagctgttactgtggagcttcct

SEQ ID NO: 4242676 - DNA, 25 bp, Homo sapien
ccaccactctggataactgttaaaa

SEQ ID NO: 4242677 - DNA, 25 bp, Homo sapien
ttcctttccctctatatctccttga

SEQ ID NO: 4242678 - DNA, 25 bp, Homo sapien
gcctgttacatctgatgggtcaatc

SEQ ID NO: 4242679 - DNA, 25 bp, Homo sapien
tatatctccttgaaaaatagcctgt

SEQ ID NO: 4242680 - DNA, 25 bp, Homo sapien
tttgttcctgctattccttcctcac

SEQ ID NO: 4242681 - DNA, 25 bp, Homo sapien
tcatggaacctacaagacaagcacc

SEQ ID NO: 4242682 - DNA, 25 bp, Homo sapien
tagtcagtcatttggttcgatcaga

SEQ ID NO: 4242683 - DNA, 25 bp, Homo sapien
caaggacaccacataggtagtcagt

SEQ ID NO: 4242684 - DNA, 25 bp, Homo sapien
gcctcctcttagcatataatctggg

SEQ ID NO: 4242685 - DNA, 25 bp, Homo sapien
gcagataatgaaaggggactgctgt

SEQ ID NO: 4242686 - DNA, 25 bp, Homo sapien
tgctgtggggcatggcattgaaact

SEQ ID NO: 4242687 - DNA, 25 bp, Homo sapien
ttgaaactgaatccaaagcccactg

SEQ ID NO: 4242688 - DNA, 25 bp, Homo sapien
gcatggcattgaaactgaatccaaa

SEQ ID NO: 4242689 - DNA, 25 bp, Homo sapien
gaggttttgcgtttgtgaattgaaa

SEQ ID NO: 4242690 - DNA, 25 bp, Homo sapien
agggtacattgaatttaagattagt

SEQ ID NO: 4242691 - DNA, 25 bp, Homo sapien
ggatcagctgcatgaaaacaagatg

SEQ ID NO: 4242692 - DNA, 25 bp, Homo sapien
tcagggtacattgaatttaagatta

SEQ ID NO: 4242693 - DNA, 25 bp, Homo sapien
tgtggtatcagtggaacggatgctt

SEQ ID NO: 4242694 - DNA, 25 bp, Homo sapien
caacgtggcgtgtggtatcagtgga

SEQ ID NO: 4242695 - DNA, 25 bp, Homo sapien
catctgccttttttcgaaggttagt

SEQ ID NO: 4242696 - DNA, 25 bp, Homo sapien
ggaacggatgctttcatctgccttt

SEQ ID NO: 4242697 - DNA, 25 bp, Homo sapien
tgatgattatggatgacattcgatc

SEQ ID NO: 4242698 - DNA, 25 bp, Homo sapien
gcgcattatgtgatgtctctgaggg

SEQ ID NO: 4242699 - DNA, 25 bp, Homo sapien
tctggtcattcagcgcattatgtga

SEQ ID NO: 4242700 - DNA, 25 bp, Homo sapien
gcatggaagtgtgatgattatggat

SEQ ID NO: 4242701 - DNA, 25 bp, Homo sapien
catcattcagagtgattgagatctg

SEQ ID NO: 4242702 - DNA, 25 bp, Homo sapien
tcattcagagtgattgagatctgtc

SEQ ID NO: 4242703 - DNA, 25 bp, Homo sapien
atcattcagagtgattgagatctgt

SEQ ID NO: 4242704 - DNA, 25 bp, Homo sapien
tcaccactcgtacttgtcgtcactg

SEQ ID NO: 4242705 - DNA, 25 bp, Homo sapien
cactcgtacttgtcgtcactgagtt

SEQ ID NO: 4242706 - DNA, 25 bp, Homo sapien
actcgtacttgtcgtcactgagttt

SEQ ID NO: 4242707 - DNA, 25 bp, Homo sapien
accactcgtacttgtcgtcactgag

SEQ ID NO: 4242708 - DNA, 25 bp, Homo sapien
tctagtttattaatcacagaaatat

SEQ ID NO: 4242709 - DNA, 25 bp, Homo sapien
gtctagtttattaatcacagaaata

SEQ ID NO: 4242710 - DNA, 25 bp, Homo sapien
tgtctagtttattaatcacagaaat

SEQ ID NO: 4242711 - DNA, 25 bp, Homo sapien
aattgttctctgtacttcagctcac

SEQ ID NO: 4242712 - DNA, 25 bp, Homo sapien
tagtaataacatagctgaaccaggt

SEQ ID NO: 4242713 - DNA, 25 bp, Homo sapien
actcaagctgtgaaagcagtgaaac

SEQ ID NO: 4242714 - DNA, 25 bp, Homo sapien
aatcaagaggagcaatagtaataac

SEQ ID NO: 4242715 - DNA, 25 bp, Homo sapien
ctctcatgagaatccagttgtgcct

SEQ ID NO: 4242716 - DNA, 25 bp, Homo sapien
tgaggtgaggctgtaccttggcact

SEQ ID NO: 4242717 - DNA, 25 bp, Homo sapien
gccaaagctctcatgagaatccagt

SEQ ID NO: 4242718 - DNA, 25 bp, Homo sapien
ttgatgccaaagctctcatgagaat

SEQ ID NO: 4242719 - DNA, 25 bp, Homo sapien
tgcgtatcatatctggattgtaaac

SEQ ID NO: 4242720 - DNA, 25 bp, Homo sapien
actgatgtgcgtatcatatctggat

SEQ ID NO: 4242721 - DNA, 25 bp, Homo sapien
catatctggattgtaaacgtcttga

SEQ ID NO: 4242722 - DNA, 25 bp, Homo sapien
gattgtaaacgtcttgagatcaggg

SEQ ID NO: 4242723 - DNA, 25 bp, Homo sapien
gcgtgtatatttgacgatggtttta

SEQ ID NO: 4242724 - DNA, 25 bp, Homo sapien
gatgaatgaacacgtagcttgcgtg

SEQ ID NO: 4242725 - DNA, 25 bp, Homo sapien
ctaaatcgatgatgaatgaacacgt

SEQ ID NO: 4242726 - DNA, 25 bp, Homo sapien
cgtagcttgcgtgtatatttgacga

SEQ ID NO: 4242727 - DNA, 25 bp, Homo sapien
tagctatgatgcaaagcatgtccag

SEQ ID NO: 4242728 - DNA, 25 bp, Homo sapien
catgtccagtttcttaggagcaatg

SEQ ID NO: 4242729 - DNA, 25 bp, Homo sapien
taaaatagctatgatgcaaagcatg

SEQ ID NO: 4242730 - DNA, 25 bp, Homo sapien
ccctaaaatagctatgatgcaaagc

SEQ ID NO: 4242731 - DNA, 25 bp, Homo sapien
tttccaaggcttttctgtagattac

SEQ ID NO: 4242732 - DNA, 25 bp, Homo sapien
gtatggctcgtagatttgtagtctc

SEQ ID NO: 4242733 - DNA, 25 bp, Homo sapien
tactgactttatcatggcctcttga

SEQ ID NO: 4242734 - DNA, 25 bp, Homo sapien
gaagcagggtttttcatgaccaatt

SEQ ID NO: 4242735 - DNA, 25 bp, Homo sapien
gttcatggctgcagaattagaggct

SEQ ID NO: 4242736 - DNA, 25 bp, Homo sapien
taagtgtattaaggatttccatagt

SEQ ID NO: 4242737 - DNA, 25 bp, Homo sapien
gatttccatagtgatgttcatggct

SEQ ID NO: 4242738 - DNA, 25 bp, Homo sapien
aaataagtgtattaaggatttccat

SEQ ID NO: 4242739 - DNA, 25 bp, Homo sapien
cttgagctgtgctgacattcctgac

SEQ ID NO: 4242740 - DNA, 25 bp, Homo sapien
cagttccttgagctgtgctgacatt

SEQ ID NO: 4242741 - DNA, 25 bp, Homo sapien
gctctattagaaatggcgtgcacat

SEQ ID NO: 4242742 - DNA, 25 bp, Homo sapien
taagctctattagaaatggcgtgca

SEQ ID NO: 4242743 - DNA, 25 bp, Homo sapien
gccagtaaaatgtagagggaagatg

SEQ ID NO: 4242744 - DNA, 25 bp, Homo sapien
tcagtggtccgcagcctgcaagtgg

SEQ ID NO: 4242745 - DNA, 25 bp, Homo sapien
tttcaacaaagtcccatgtacccag

SEQ ID NO: 4242746 - DNA, 25 bp, Homo sapien
catgctttagttggtagcagatacc

SEQ ID NO: 4242747 - DNA, 25 bp, Homo sapien
cagactaatgattccctgctgacta

SEQ ID NO: 4242748 - DNA, 25 bp, Homo sapien
tgaaagttgcaaagtctgacatccg

SEQ ID NO: 4242749 - DNA, 25 bp, Homo sapien
aataatggactgtcccgccgtaagc

SEQ ID NO: 4242750 - DNA, 25 bp, Homo sapien
gaccgcttttgcttttatgtgccac

SEQ ID NO: 4242751 - DNA, 25 bp, Homo sapien
tgttccggtaaggacgcctcgatgg

SEQ ID NO: 4242752 - DNA, 25 bp, Homo sapien
tgagggacacctacagaaacgatct

SEQ ID NO: 4242753 - DNA, 25 bp, Homo sapien
tgtactggttcatatggactgggca

SEQ ID NO: 4242754 - DNA, 25 bp, Homo sapien
tgtgtgttcactcagctgttccggt

SEQ ID NO: 4242755 - DNA, 25 bp, Homo sapien
tctcttcattccttccgtaatgcat

SEQ ID NO: 4242756 - DNA, 25 bp, Homo sapien
ctgactttctggataaacagtctct

SEQ ID NO: 4242757 - DNA, 25 bp, Homo sapien
caccctttaactgactttctggata

SEQ ID NO: 4242758 - DNA, 25 bp, Homo sapien
tctggataaacagtctcttcattcc

SEQ ID NO: 4242759 - DNA, 25 bp, Homo sapien
tcatattttcagtaataaactggca

SEQ ID NO: 4242760 - DNA, 25 bp, Homo sapien
aataaactggcagctttcagatcca

SEQ ID NO: 4242761 - DNA, 25 bp, Homo sapien
aaactggcagctttcagatccatag

SEQ ID NO: 4242762 - DNA, 25 bp, Homo sapien
ttcagatccatagctttatcatttc

SEQ ID NO: 4242763 - DNA, 25 bp, Homo sapien
gacctcaatctcaataatatgagag

SEQ ID NO: 4242764 - DNA, 25 bp, Homo sapien
tctcaataatatgagagtcaaggtc

SEQ ID NO: 4242765 - DNA, 25 bp, Homo sapien
atcttctgaaagtctggtcatgggg

SEQ ID NO: 4242766 - DNA, 25 bp, Homo sapien
ctttgacctcaatctcaataatatg

SEQ ID NO: 4242767 - DNA, 25 bp, Homo sapien
gaggccgtgtataccgcacttctca

SEQ ID NO: 4242768 - DNA, 25 bp, Homo sapien
cagaggtctgaggccgtgtataccg

SEQ ID NO: 4242769 - DNA, 25 bp, Homo sapien
acttctcactataacaccagtgcct

SEQ ID NO: 4242770 - DNA, 25 bp, Homo sapien
cgtgtataccgcacttctcactata

SEQ ID NO: 4242771 - DNA, 25 bp, Homo sapien
gatgcactcgaccatccagagttcc

SEQ ID NO: 4242772 - DNA, 25 bp, Homo sapien
tcttgttaagtaactttttgtctga

SEQ ID NO: 4242773 - DNA, 25 bp, Homo sapien
ttcccagtttggttgatgcactcga

SEQ ID NO: 4242774 - DNA, 25 bp, Homo sapien
cagacaaagtgaggtgaagaacttg

SEQ ID NO: 4242775 - DNA, 25 bp, Homo sapien
catcaacttccccttggaattagga

SEQ ID NO: 4242776 - DNA, 25 bp, Homo sapien
tttcggtcatcaacttccccttgga

SEQ ID NO: 4242777 - DNA, 25 bp, Homo sapien
ggtcatcaacttccccttggaatta

SEQ ID NO: 4242778 - DNA, 25 bp, Homo sapien
tttaatagtaagagcttcctgctcc

SEQ ID NO: 4242779 - DNA, 25 bp, Homo sapien
gaaatgaaatcgctttctttgctac

SEQ ID NO: 4242780 - DNA, 25 bp, Homo sapien
gaataaaggctcttcgttgaaatga

SEQ ID NO: 4242781 - DNA, 25 bp, Homo sapien
agttctttttagatggtttgtctga

SEQ ID NO: 4242782 - DNA, 25 bp, Homo sapien
tcttcgttgaaatgaaatcgctttc

SEQ ID NO: 4242783 - DNA, 25 bp, Homo sapien
aatgtaagtaaagcttggattctac

SEQ ID NO: 4242784 - DNA, 25 bp, Homo sapien
caaaagtagaactgcttataaatgt

SEQ ID NO: 4242785 - DNA, 25 bp, Homo sapien
ctctctcttcaaaagtagaactgct

SEQ ID NO: 4242786 - DNA, 25 bp, Homo sapien
gcttataaatgtaagtaaagcttgg

SEQ ID NO: 4242787 - DNA, 25 bp, Homo sapien
gacaaaactgttcaaatctgcagca

SEQ ID NO: 4242788 - DNA, 25 bp, Homo sapien
cagcacgtcttgttgtgtactaggt

SEQ ID NO: 4242789 - DNA, 25 bp, Homo sapien
cacaaatcaatgctctcagcagaca

SEQ ID NO: 4242790 - DNA, 25 bp, Homo sapien
tatgttgtttactattgtgcatgta

SEQ ID NO: 4242791 - DNA, 25 bp, Homo sapien
tgtactttatcaaggaatagatgtg

SEQ ID NO: 4242792 - DNA, 25 bp, Homo sapien
tagatgtgatttctcatgtatctga

SEQ ID NO: 4242793 - DNA, 25 bp, Homo sapien
tctgagtaacttgtactttatcaag

SEQ ID NO: 4242794 - DNA, 25 bp, Homo sapien
catgtatctgattaaccctccctgt

SEQ ID NO: 4242795 - DNA, 25 bp, Homo sapien
tcagtctgcactaagctcctttttt

SEQ ID NO: 4242796 - DNA, 25 bp, Homo sapien
ctgcactaagctccttttttatggc

SEQ ID NO: 4242797 - DNA, 25 bp, Homo sapien
tttatggccagtttaggaaaaatgc

SEQ ID NO: 4242798 - DNA, 25 bp, Homo sapien
aaaaatgctaatgcctcgtatccag

SEQ ID NO: 4242799 - DNA, 25 bp, Homo sapien
gggctgcacggcttcaaacttcgtc

SEQ ID NO: 4242800 - DNA, 25 bp, Homo sapien
ggcttcaaacttcgtcattacagaa

SEQ ID NO: 4242801 - DNA, 25 bp, Homo sapien
ttcgtcattacagaatcaccagcgt

SEQ ID NO: 4242802 - DNA, 25 bp, Homo sapien
tcaccagcgtctttcttggtatgat

SEQ ID NO: 4242803 - DNA, 25 bp, Homo sapien
gagcgtcttcctctcactaaatttt

SEQ ID NO: 4242804 - DNA, 25 bp, Homo sapien
tagagtcgcgatatttctttggaga

SEQ ID NO: 4242805 - DNA, 25 bp, Homo sapien
taaagtcgaggcacattttgtcctg

SEQ ID NO: 4242806 - DNA, 25 bp, Homo sapien
tctttggagattcatgtgagcgtct

SEQ ID NO: 4242807 - DNA, 25 bp, Homo sapien
caccacggtggtgtattctgcagaa

SEQ ID NO: 4242808 - DNA, 25 bp, Homo sapien
ggtttttcaggagaccgatgtccag

SEQ ID NO: 4242809 - DNA, 25 bp, Homo sapien
tgatgcctctagatacgtgttcagg

SEQ ID NO: 4242810 - DNA, 25 bp, Homo sapien
cggccctacggtaaaatgatctgga

SEQ ID NO: 4242811 - DNA, 25 bp, Homo sapien
cacacagtcttcgttacctttggag

SEQ ID NO: 4242812 - DNA, 25 bp, Homo sapien
tgctctcgggatgcctctcacacag

SEQ ID NO: 4242813 - DNA, 25 bp, Homo sapien
aagatgatgctcagaatgggaccat

SEQ ID NO: 4242814 - DNA, 25 bp, Homo sapien
gagttcgtctatgttgttttaaaga

SEQ ID NO: 4242815 - DNA, 25 bp, Homo sapien
tatccccattgggtatggtttccaa

SEQ ID NO: 4242816 - DNA, 25 bp, Homo sapien
tatcttcttaggttaaatattggag

SEQ ID NO: 4242817 - DNA, 25 bp, Homo sapien
tgacattgcaaatatccccattggg

SEQ ID NO: 4242818 - DNA, 25 bp, Homo sapien
cttaggttaaatattggagacatga

SEQ ID NO: 4242819 - DNA, 25 bp, Homo sapien
tcttccgccttatagtagacacacg

SEQ ID NO: 4242820 - DNA, 25 bp, Homo sapien
ttgttggtgtcttccgccttatagt

SEQ ID NO: 4242821 - DNA, 25 bp, Homo sapien
ggtgtcttccgccttatagtagaca

SEQ ID NO: 4242822 - DNA, 25 bp, Homo sapien
gccttatagtagacacacggcacct

SEQ ID NO: 4242823 - DNA, 25 bp, Homo sapien
gatcagagagaccaggaattgaaat

SEQ ID NO: 4242824 - DNA, 25 bp, Homo sapien
catttgtccctgatcacacagttga

SEQ ID NO: 4242825 - DNA, 25 bp, Homo sapien
tagggccctactccaaaacattaga

SEQ ID NO: 4242826 - DNA, 25 bp, Homo sapien
gaggttgacaggttcacatttgtcc

SEQ ID NO: 4242827 - DNA, 25 bp, Homo sapien
gcttcagtctgctctaaagtggctc

SEQ ID NO: 4242828 - DNA, 25 bp, Homo sapien
caaatgttgttttttgcgtgttcgt

SEQ ID NO: 4242829 - DNA, 25 bp, Homo sapien
cgtgttcgttgtccttgacttcagg

SEQ ID NO: 4242830 - DNA, 25 bp, Homo sapien
taaactccggctacccttcaagatc

SEQ ID NO: 4242831 - DNA, 25 bp, Homo sapien
gctgttggcaaatgtgaccttcacc

SEQ ID NO: 4242832 - DNA, 25 bp, Homo sapien
gatggtcctgacacatagaagtctc

SEQ ID NO: 4242833 - DNA, 25 bp, Homo sapien
tttggcagcaaaaacatccaggttg

SEQ ID NO: 4242834 - DNA, 25 bp, Homo sapien
catgtttgttctgatcccgtggctg

SEQ ID NO: 4242835 - DNA, 25 bp, Homo sapien
cagataacggtaccagctcagggaa

SEQ ID NO: 4242836 - DNA, 25 bp, Homo sapien
ggagttcccaatccaccaaggaggc

SEQ ID NO: 4242837 - DNA, 25 bp, Homo sapien
tatgaggcccagaatgagaatccag

SEQ ID NO: 4242838 - DNA, 25 bp, Homo sapien
tacaatgcagtagctctaacacggg

SEQ ID NO: 4242839 - DNA, 25 bp, Homo sapien
cagattactataagacagtgcaggc

SEQ ID NO: 4242840 - DNA, 25 bp, Homo sapien
ccaccgatggatcaaaactgactaa

SEQ ID NO: 4242841 - DNA, 25 bp, Homo sapien
tatggtagtcagtgtgtccccaccg

SEQ ID NO: 4242842 - DNA, 25 bp, Homo sapien
aagatgtttctgtgcctattaccca

SEQ ID NO: 4242843 - DNA, 25 bp, Homo sapien
caagcaaattgcaaagattggcagg

SEQ ID NO: 4242844 - DNA, 25 bp, Homo sapien
cctcagatggtagctgagtgctaca

SEQ ID NO: 4242845 - DNA, 25 bp, Homo sapien
gaagtaaatacagctggacgttagc

SEQ ID NO: 4242846 - DNA, 25 bp, Homo sapien
ttaaacagccaaacgggcacagcca

SEQ ID NO: 4242847 - DNA, 25 bp, Homo sapien
ttggatgagtcaacttccctgctgt

SEQ ID NO: 4242848 - DNA, 25 bp, Homo sapien
tgaacacctcttagccaagagccag

SEQ ID NO: 4242849 - DNA, 25 bp, Homo sapien
gtgaggcgatttggatgaagcatcc

SEQ ID NO: 4242850 - DNA, 25 bp, Homo sapien
cttcgcaggtaaattgagtgttgcc

SEQ ID NO: 4242851 - DNA, 25 bp, Homo sapien
tataacagatgacttcaatttccgt

SEQ ID NO: 4242852 - DNA, 25 bp, Homo sapien
ctccaggcttctctatataacagat

SEQ ID NO: 4242853 - DNA, 25 bp, Homo sapien
aatcctccagggtctcaactccagg

SEQ ID NO: 4242854 - DNA, 25 bp, Homo sapien
tcaatttccgtctcactggacccag

SEQ ID NO: 4242855 - DNA, 25 bp, Homo sapien
gtcagctgaatctaagatgtatatg

SEQ ID NO: 4242856 - DNA, 25 bp, Homo sapien
cagctgaatctaagatgtatatgaa

SEQ ID NO: 4242857 - DNA, 25 bp, Homo sapien
aattgtcagctgaatctaagatgta

SEQ ID NO: 4242858 - DNA, 25 bp, Homo sapien
ttgtcagctgaatctaagatgtata

SEQ ID NO: 4242859 - DNA, 25 bp, Homo sapien
tggtggaaacaacttgatccataaa

SEQ ID NO: 4242860 - DNA, 25 bp, Homo sapien
ttggtggaaacaacttgatccataa

SEQ ID NO: 4242861 - DNA, 25 bp, Homo sapien
attggtggaaacaacttgatccata

SEQ ID NO: 4242862 - DNA, 25 bp, Homo sapien
gctgtcgacaacttcaggtaggagt

SEQ ID NO: 4242863 - DNA, 25 bp, Homo sapien
cctagacagccaaggaccgagtgga

SEQ ID NO: 4242864 - DNA, 25 bp, Homo sapien
gactgagaaggaatcaaaagaaacc

SEQ ID NO: 4242865 - DNA, 25 bp, Homo sapien
aacccgcaagtagaaaccttcacag

SEQ ID NO: 4242866 - DNA, 25 bp, Homo sapien
cgagagaattaacaagatgaagcag

SEQ ID NO: 4242867 - DNA, 25 bp, Homo sapien
gacaaaccactctctcaagggcttg

SEQ ID NO: 4242868 - DNA, 25 bp, Homo sapien
gatgaagcagatggttgccataatc

SEQ ID NO: 4242869 - DNA, 25 bp, Homo sapien
gatggttgccataatcacaatgaca

SEQ ID NO: 4242870 - DNA, 25 bp, Homo sapien
aattcagcaagtggtacatcagcag

SEQ ID NO: 4242871 - DNA, 25 bp, Homo sapien
catgctcgtaaccattatgcaagta

SEQ ID NO: 4242872 - DNA, 25 bp, Homo sapien
gaaactgcaggtttatagacaccgg

SEQ ID NO: 4242873 - DNA, 25 bp, Homo sapien
caggtttatagacaccggatgcaaa

SEQ ID NO: 4242874 - DNA, 25 bp, Homo sapien
ttatttcagatacggtgtggggcag

SEQ ID NO: 4242875 - DNA, 25 bp, Homo sapien
atttcagatacggtgtggggcagga

SEQ ID NO: 4242876 - DNA, 25 bp, Homo sapien
ttcagatacggtgtggggcaggaaa

SEQ ID NO: 4242877 - DNA, 25 bp, Homo sapien
ttttatttcagatacggtgtggggc

SEQ ID NO: 4242878 - DNA, 25 bp, Homo sapien
cattttaagacccacgagtgaacgg

SEQ ID NO: 4242879 - DNA, 25 bp, Homo sapien
gagttggcgctaatgagaagcctag

SEQ ID NO: 4242880 - DNA, 25 bp, Homo sapien
tttttgatcacaaggaaggctgcca

SEQ ID NO: 4242881 - DNA, 25 bp, Homo sapien
tgaaaaggcagtagaccgagagaaa

SEQ ID NO: 4242882 - DNA, 25 bp, Homo sapien
cataaataggttggctccactcact

SEQ ID NO: 4242883 - DNA, 25 bp, Homo sapien
ctctcacttgaacatcgtacttaga

SEQ ID NO: 4242884 - DNA, 25 bp, Homo sapien
agaaagatcatcaattattgagatg

SEQ ID NO: 4242885 - DNA, 25 bp, Homo sapien
agatgaatgcattggtcatcaattt

SEQ ID NO: 4242886 - DNA, 25 bp, Homo sapien
ccatctctagctgtactggcttttc

SEQ ID NO: 4242887 - DNA, 25 bp, Homo sapien
acagattccgttcaattcctctctg

SEQ ID NO: 4242888 - DNA, 25 bp, Homo sapien
atccttacagattccgttcaattcc

SEQ ID NO: 4242889 - DNA, 25 bp, Homo sapien
ccccatctctagctgtactggcttt

SEQ ID NO: 4242890 - DNA, 25 bp, Homo sapien
actggtttctcccattggatagaga

SEQ ID NO: 4242891 - DNA, 25 bp, Homo sapien
tgtgacattcagtggaggatttatt

SEQ ID NO: 4242892 - DNA, 25 bp, Homo sapien
tagagagacgagttccttcaatctc

SEQ ID NO: 4242893 - DNA, 25 bp, Homo sapien
tcaaagcaatggattggaaaagcag

SEQ ID NO: 4242894 - DNA, 25 bp, Homo sapien
tggcgtgaagggcaaacagctgatc

SEQ ID NO: 4242895 - DNA, 25 bp, Homo sapien
ctggagccgttaacaagcaccgcaa

SEQ ID NO: 4242896 - DNA, 25 bp, Homo sapien
cagtcacgccctttgctgaggataa

SEQ ID NO: 4242897 - DNA, 25 bp, Homo sapien
tcaaagggcctgatagcagagtgct

SEQ ID NO: 4242898 - DNA, 25 bp, Homo sapien
caggtgcagtgaagggaaacttggt

SEQ ID NO: 4242899 - DNA, 25 bp, Homo sapien
tagagaaaatactgcgtgtcctcag

SEQ ID NO: 4242900 - DNA, 25 bp, Homo sapien
catctgtgccaacaagccaggtgca

SEQ ID NO: 4242901 - DNA, 25 bp, Homo sapien
gggcatctgtgccaacaagccaggt

SEQ ID NO: 4242902 - DNA, 25 bp, Homo sapien
gtagtgtttgtggtgcaagttaaat

SEQ ID NO: 4242903 - DNA, 25 bp, Homo sapien
taaattcacaattgaggttccagga

SEQ ID NO: 4242904 - DNA, 25 bp, Homo sapien
gtggtgcaagttaaattcacaattg

SEQ ID NO: 4242905 - DNA, 25 bp, Homo sapien
attcacaattgaggttccaggagac

SEQ ID NO: 4242906 - DNA, 25 bp, Homo sapien
tgtggaggatggttacacatttgct

SEQ ID NO: 4242907 - DNA, 25 bp, Homo sapien
ctgcaggatggtccgcacacttgct

SEQ ID NO: 4242908 - DNA, 25 bp, Homo sapien
ccagctgctggccagtagtgagtgg

SEQ ID NO: 4242909 - DNA, 25 bp, Homo sapien
tagtgagtggtcgttctgcaggatg

SEQ ID NO: 4242910 - DNA, 25 bp, Homo sapien
cttttggagcgtttattttcacttg

SEQ ID NO: 4242911 - DNA, 25 bp, Homo sapien
ttttggagcgtttattttcacttga

SEQ ID NO: 4242912 - DNA, 25 bp, Homo sapien
gtcatcttcttttggagcgtttatt

SEQ ID NO: 4242913 - DNA, 25 bp, Homo sapien
tcatcttcttttggagcgtttattt

SEQ ID NO: 4242914 - DNA, 25 bp, Homo sapien
tggtgaaattgacaggtgggagaag

SEQ ID NO: 4242915 - DNA, 25 bp, Homo sapien
taatggtgaaattgacaggtgggag

SEQ ID NO: 4242916 - DNA, 25 bp, Homo sapien
aatggtgaaattgacaggtgggaga

SEQ ID NO: 4242917 - DNA, 25 bp, Homo sapien
ggtgaaattgacaggtgggagaagt

SEQ ID NO: 4242918 - DNA, 25 bp, Homo sapien
cagcttgcagtatctcagtggcccc

SEQ ID NO: 4242919 - DNA, 25 bp, Homo sapien
ggaagtaagtcagcttgcagtatct

SEQ ID NO: 4242920 - DNA, 25 bp, Homo sapien
tgagtaatacatgcgccacgatgat

SEQ ID NO: 4242921 - DNA, 25 bp, Homo sapien
ccccaaaaggatgagtaatacatgc

SEQ ID NO: 4242922 - DNA, 25 bp, Homo sapien
tttaaagatgagtgaacatgacagg

SEQ ID NO: 4242923 - DNA, 25 bp, Homo sapien
ggaaacttcaatctaaaacaatctg

SEQ ID NO: 4242924 - DNA, 25 bp, Homo sapien
catgacaggaaacttcaatctaaaa

SEQ ID NO: 4242925 - DNA, 25 bp, Homo sapien
agatgagtgaacatgacaggaaact

SEQ ID NO: 4242926 - DNA, 25 bp, Homo sapien
gttatacatgatggaaatcccttcc

SEQ ID NO: 4242927 - DNA, 25 bp, Homo sapien
gatttggtaccagacacatgtggct

SEQ ID NO: 4242928 - DNA, 25 bp, Homo sapien
catgtggctgttatacatgatggaa

SEQ ID NO: 4242929 - DNA, 25 bp, Homo sapien
acgtgctccccccagagatttggta

SEQ ID NO: 4242930 - DNA, 25 bp, Homo sapien
gacgatcctcttgttccgaccagta

SEQ ID NO: 4242931 - DNA, 25 bp, Homo sapien
gaccagtactcaacagaagatggcg

SEQ ID NO: 4242932 - DNA, 25 bp, Homo sapien
tcaggcacaggaccaatgctcaatg

SEQ ID NO: 4242933 - DNA, 25 bp, Homo sapien
gcatctagcatagcgtcaggcacag

SEQ ID NO: 4242934 - DNA, 25 bp, Homo sapien
tgagaaatgcggtggccatgcgatg

SEQ ID NO: 4242935 - DNA, 25 bp, Homo sapien
aaatgcggtggccatgcgatgagaa

SEQ ID NO: 4242936 - DNA, 25 bp, Homo sapien
gccatgcgatgagaagcagcggcag

SEQ ID NO: 4242937 - DNA, 25 bp, Homo sapien
tggccatgcgatgagaagcagcggc

SEQ ID NO: 4242938 - DNA, 25 bp, Homo sapien
catcatcacggctgtaatggttaaa

SEQ ID NO: 4242939 - DNA, 25 bp, Homo sapien
gatgggatggcaacacgttttctct

SEQ ID NO: 4242940 - DNA, 25 bp, Homo sapien
tgctgtcaaacgaaagaatctctcg

SEQ ID NO: 4242941 - DNA, 25 bp, Homo sapien
tgtacagagcaactgtgcaggagct

SEQ ID NO: 4242942 - DNA, 25 bp, Homo sapien
tttaggcagactttaagtagagggc

SEQ ID NO: 4242943 - DNA, 25 bp, Homo sapien
tacgtgccagagataaatggcccag

SEQ ID NO: 4242944 - DNA, 25 bp, Homo sapien
gatgatggctttttaggtacgtgcc

SEQ ID NO: 4242945 - DNA, 25 bp, Homo sapien
gcacagaagatagacgaaccattac

SEQ ID NO: 4242946 - DNA, 25 bp, Homo sapien
gaagatcttggataaacttggtaaa

SEQ ID NO: 4242947 - DNA, 25 bp, Homo sapien
cgcatgactagttttgtgggtagca

SEQ ID NO: 4242948 - DNA, 25 bp, Homo sapien
tccgaattggctagtttatgtcaag

SEQ ID NO: 4242949 - DNA, 25 bp, Homo sapien
tgggtagcaatgatgtttaaatgtc

SEQ ID NO: 4242950 - DNA, 25 bp, Homo sapien
gattccgcgaaatatactccagggt

SEQ ID NO: 4242951 - DNA, 25 bp, Homo sapien
gaaacacatgcacgttagggcttcc

SEQ ID NO: 4242952 - DNA, 25 bp, Homo sapien
tccagggtgcgcaactagatgagtc

SEQ ID NO: 4242953 - DNA, 25 bp, Homo sapien
cactttggaccgctgatgaattcat

SEQ ID NO: 4242954 - DNA, 25 bp, Homo sapien
aagttttgtcgtgagtagggaagag

SEQ ID NO: 4242955 - DNA, 25 bp, Homo sapien
cgtgagtagggaagagctcaaagac

SEQ ID NO: 4242956 - DNA, 25 bp, Homo sapien
ttgtcgtgagtagggaagagctcaa

SEQ ID NO: 4242957 - DNA, 25 bp, Homo sapien
gagtagggaagagctcaaagacagc

SEQ ID NO: 4242958 - DNA, 25 bp, Homo sapien
taggaaagctaaaaggattcagtga

SEQ ID NO: 4242959 - DNA, 25 bp, Homo sapien
cccttatctagtctttgcaacttgg

SEQ ID NO: 4242960 - DNA, 25 bp, Homo sapien
aaggaagctcagccccttatctagt

SEQ ID NO: 4242961 - DNA, 25 bp, Homo sapien
taatgtagcctctatctaataggaa

SEQ ID NO: 4242962 - DNA, 25 bp, Homo sapien
taaagtcaggaatttgtgattagaa

SEQ ID NO: 4242963 - DNA, 25 bp, Homo sapien
cactacccctggaactcttgatgta

SEQ ID NO: 4242964 - DNA, 25 bp, Homo sapien
tagaaagagtatgccttgtgagtct

SEQ ID NO: 4242965 - DNA, 25 bp, Homo sapien
gggtggatcttgtatcagtgtaaag

SEQ ID NO: 4242966 - DNA, 25 bp, Homo sapien
gatatgagtggttttttatccccac

SEQ ID NO: 4242967 - DNA, 25 bp, Homo sapien
tggtttttcaccaaagccagtgact

SEQ ID NO: 4242968 - DNA, 25 bp, Homo sapien
tacaggtttacctgctaatgcaagt

SEQ ID NO: 4242969 - DNA, 25 bp, Homo sapien
tgaggttgaagatcgcaaaagagga

SEQ ID NO: 4242970 - DNA, 25 bp, Homo sapien
tacaacagttgcgagaacagtggaa

SEQ ID NO: 4242971 - DNA, 25 bp, Homo sapien
ggaacctgatgcaactactcgtgta

SEQ ID NO: 4242972 - DNA, 25 bp, Homo sapien
tgacacgtagtctagggaacctgat

SEQ ID NO: 4242973 - DNA, 25 bp, Homo sapien
gcaacagatagttcagacccattga

SEQ ID NO: 4242974 - DNA, 25 bp, Homo sapien
caagctatgcttcagtatgtggttg

SEQ ID NO: 4242975 - DNA, 25 bp, Homo sapien
aacttgagggtcactattgagccta

SEQ ID NO: 4242976 - DNA, 25 bp, Homo sapien
tgatttctttatgcatgcagagcct

SEQ ID NO: 4242977 - DNA, 25 bp, Homo sapien
caggatttgttctagcaagctatgc

SEQ ID NO: 4242978 - DNA, 25 bp, Homo sapien
gctataatttcagctgctatactga

SEQ ID NO: 4242979 - DNA, 25 bp, Homo sapien
tcctttctgtgtagccagtcataac

SEQ ID NO: 4242980 - DNA, 25 bp, Homo sapien
gagcaaatagtaattttggaccttg

SEQ ID NO: 4242981 - DNA, 25 bp, Homo sapien
ctctaaagatttgagtcctaaatgc

SEQ ID NO: 4242982 - DNA, 25 bp, Homo sapien
ggaacatgtacttgtcaccctagct

SEQ ID NO: 4242983 - DNA, 25 bp, Homo sapien
gaaatgacaactattcgtgggctca

SEQ ID NO: 4242984 - DNA, 25 bp, Homo sapien
gattccacaggataatggcaccaag

SEQ ID NO: 4242985 - DNA, 25 bp, Homo sapien
ttagagcactggtacagatacgctg

SEQ ID NO: 4242986 - DNA, 25 bp, Homo sapien
tttggtggccgtaaacttccatcca

SEQ ID NO: 4242987 - DNA, 25 bp, Homo sapien
ttccatccaatatggcttgcacaga

SEQ ID NO: 4242988 - DNA, 25 bp, Homo sapien
tacactgggcaacagtccaggcata

SEQ ID NO: 4242989 - DNA, 25 bp, Homo sapien
gcagatcgcgttaagccccaaaatt

SEQ ID NO: 4242990 - DNA, 25 bp, Homo sapien
tacatagtcctaaccccagagtagc

SEQ ID NO: 4242991 - DNA, 25 bp, Homo sapien
gttttagtcctcacatagggtgcca

SEQ ID NO: 4242992 - DNA, 25 bp, Homo sapien
gagatttgatccatacagttccctg

SEQ ID NO: 4242993 - DNA, 25 bp, Homo sapien
tagggcaatccaagatacatagtcc

SEQ ID NO: 4242994 - DNA, 25 bp, Homo sapien
tctccggttttacattactacagaa

SEQ ID NO: 4242995 - DNA, 25 bp, Homo sapien
cagaatatggtccagatataaagtt

SEQ ID NO: 4242996 - DNA, 25 bp, Homo sapien
cattctccggttttacattactaca

SEQ ID NO: 4242997 - DNA, 25 bp, Homo sapien
tttacattactacagaatatggtcc

SEQ ID NO: 4242998 - DNA, 25 bp, Homo sapien
tttttattataaagattgtggcaac

SEQ ID NO: 4242999 - DNA, 25 bp, Homo sapien
taaagattgtggcaactctgcttag

SEQ ID NO: 4243000 - DNA, 25 bp, Homo sapien
attataaagattgtggcaactctgc

SEQ ID NO: 4243001 - DNA, 25 bp, Homo sapien
agattgtggcaactctgcttaggac

SEQ ID NO: 4243002 - DNA, 25 bp, Homo sapien
gtgtctcatgcacatatccatgagg

SEQ ID NO: 4243003 - DNA, 25 bp, Homo sapien
gccggcctatcagattcaagttgca

SEQ ID NO: 4243004 - DNA, 25 bp, Homo sapien
tgttctgtagaaggccggcctatca

SEQ ID NO: 4243005 - DNA, 25 bp, Homo sapien
gcaagccttatacacagtaagtgtc

SEQ ID NO: 4243006 - DNA, 25 bp, Homo sapien
ataagctgccatcggcccacataag

SEQ ID NO: 4243007 - DNA, 25 bp, Homo sapien
cataagctgccatcggcccacataa

SEQ ID NO: 4243008 - DNA, 25 bp, Homo sapien
tgccatcggcccacataaggataaa

SEQ ID NO: 4243009 - DNA, 25 bp, Homo sapien
agctgccatcggcccacataaggat

SEQ ID NO: 4243010 - DNA, 25 bp, Homo sapien
tctgagtacccaatctggaagatgg

SEQ ID NO: 4243011 - DNA, 25 bp, Homo sapien
gagcatcagtatgtgttcagaagca

SEQ ID NO: 4243012 - DNA, 25 bp, Homo sapien
tcagaagcatgtcctactttggccc

SEQ ID NO: 4243013 - DNA, 25 bp, Homo sapien
tgttagggcctaattgaagacagtc

SEQ ID NO: 4243014 - DNA, 25 bp, Homo sapien
tcttgacattgtttacagcaaaggg

SEQ ID NO: 4243015 - DNA, 25 bp, Homo sapien
cattgtttacagcaaagggaagtac

SEQ ID NO: 4243016 - DNA, 25 bp, Homo sapien
tgacattgtttacagcaaagggaag

SEQ ID NO: 4243017 - DNA, 25 bp, Homo sapien
cttgacattgtttacagcaaaggga

SEQ ID NO: 4243018 - DNA, 25 bp, Homo sapien
taaagatggagcacgaaagtcactg

SEQ ID NO: 4243019 - DNA, 25 bp, Homo sapien
ttggtaggaaaaactggcattcact

SEQ ID NO: 4243020 - DNA, 25 bp, Homo sapien
tcactgaaactgagatctgccacat

SEQ ID NO: 4243021 - DNA, 25 bp, Homo sapien
agagcatcctagttctccagcctga

SEQ ID NO: 4243022 - DNA, 25 bp, Homo sapien
gcgaagtcgctggatagcactgcca

SEQ ID NO: 4243023 - DNA, 25 bp, Homo sapien
catcaataggaagacaagcagctac

SEQ ID NO: 4243024 - DNA, 25 bp, Homo sapien
tattcataatgtctaattcacagcg

SEQ ID NO: 4243025 - DNA, 25 bp, Homo sapien
atcatcaataggaagacaagcagct

SEQ ID NO: 4243026 - DNA, 25 bp, Homo sapien
tcaagacatggtttttcaagtttta

SEQ ID NO: 4243027 - DNA, 25 bp, Homo sapien
cttcaagacatggtttttcaagttt

SEQ ID NO: 4243028 - DNA, 25 bp, Homo sapien
tatctataattaaggcaagtcctgg

SEQ ID NO: 4243029 - DNA, 25 bp, Homo sapien
taaaggcaccttgaagaacagggaa

SEQ ID NO: 4243030 - DNA, 25 bp, Homo sapien
ttttggatgacagccacttcctgca

SEQ ID NO: 4243031 - DNA, 25 bp, Homo sapien
tagaagatatgattggatcgcatcc

SEQ ID NO: 4243032 - DNA, 25 bp, Homo sapien
ttttcatcccattcacgtagctgtt

SEQ ID NO: 4243033 - DNA, 25 bp, Homo sapien
tttcatcccattcacgtagctgttt

SEQ ID NO: 4243034 - DNA, 25 bp, Homo sapien
taacccagcggtatatgctcccaac

SEQ ID NO: 4243035 - DNA, 25 bp, Homo sapien
gctaaagagcggagatcaactgcag

SEQ ID NO: 4243036 - DNA, 25 bp, Homo sapien
gagaagtaatttgctccaggcccac

SEQ ID NO: 4243037 - DNA, 25 bp, Homo sapien
tattaggccatttctgacccagtcc

SEQ ID NO: 4243038 - DNA, 25 bp, Homo sapien
atataaggaatacagccagcgaggc

SEQ ID NO: 4243039 - DNA, 25 bp, Homo sapien
tataaggaatacagccagcgaggcc

SEQ ID NO: 4243040 - DNA, 25 bp, Homo sapien
taatcccatgacgtgactatctatg

SEQ ID NO: 4243041 - DNA, 25 bp, Homo sapien
gtccagtatctgaagtgaaaacctc

SEQ ID NO: 4243042 - DNA, 25 bp, Homo sapien
cagctgaatcactataagggcaaac

SEQ ID NO: 4243043 - DNA, 25 bp, Homo sapien
gctggaatgagcaacatctgaaaaa

SEQ ID NO: 4243044 - DNA, 25 bp, Homo sapien
ctagtcatatgatcttgcaagtgcc

SEQ ID NO: 4243045 - DNA, 25 bp, Homo sapien
tgatcttgcaagtgccggagtaaga

SEQ ID NO: 4243046 - DNA, 25 bp, Homo sapien
catacctagtcatatgatcttgcaa

SEQ ID NO: 4243047 - DNA, 25 bp, Homo sapien
ggtatgtttcatacctagtcatatg

SEQ ID NO: 4243048 - DNA, 25 bp, Homo sapien
ggatcagagctttccacggaaaagt

SEQ ID NO: 4243049 - DNA, 25 bp, Homo sapien
ttatatcaggatcaactgcacaagg

SEQ ID NO: 4243050 - DNA, 25 bp, Homo sapien
taaagcttacaaggaactcccaaga

SEQ ID NO: 4243051 - DNA, 25 bp, Homo sapien
tcaacaagccgtagaaaaatgggca

SEQ ID NO: 4243052 - DNA, 25 bp, Homo sapien
cccttggcaactctgaatatgaaaa

SEQ ID NO: 4243053 - DNA, 25 bp, Homo sapien
cttagcatcgtctctttagcccttg

SEQ ID NO: 4243054 - DNA, 25 bp, Homo sapien
ttctcattccttagcatcgtctctt

SEQ ID NO: 4243055 - DNA, 25 bp, Homo sapien
gcccttggcaactctgaatatgaaa

SEQ ID NO: 4243056 - DNA, 25 bp, Homo sapien
gaactagctgtacagagcacttgag

SEQ ID NO: 4243057 - DNA, 25 bp, Homo sapien
ttaagccagtggcaacccagttgca

SEQ ID NO: 4243058 - DNA, 25 bp, Homo sapien
taagccatcttggtgcggaagaact

SEQ ID NO: 4243059 - DNA, 25 bp, Homo sapien
tgcaggatcctacaggcaggtcaca

SEQ ID NO: 4243060 - DNA, 25 bp, Homo sapien
gccacgtatttcagtagcaaaccag

SEQ ID NO: 4243061 - DNA, 25 bp, Homo sapien
ggccacatactgacagtgatcactg

SEQ ID NO: 4243062 - DNA, 25 bp, Homo sapien
cacatagggaacaacttgatgcagt

SEQ ID NO: 4243063 - DNA, 25 bp, Homo sapien
tgactatgggagcaaaatttctcac

SEQ ID NO: 4243064 - DNA, 25 bp, Homo sapien
ctggaggaattctactgcaagaaca

SEQ ID NO: 4243065 - DNA, 25 bp, Homo sapien
tagatacctggttataaccctgatg

SEQ ID NO: 4243066 - DNA, 25 bp, Homo sapien
cacactgtaccatgaaacagatcag

SEQ ID NO: 4243067 - DNA, 25 bp, Homo sapien
taactgagataaagaccaggaagtc

SEQ ID NO: 4243068 - DNA, 25 bp, Homo sapien
aatcaaaagcgattaatatagctga

SEQ ID NO: 4243069 - DNA, 25 bp, Homo sapien
agcataataacaaggataccttaca

SEQ ID NO: 4243070 - DNA, 25 bp, Homo sapien
taagcataataacaaggatacctta

SEQ ID NO: 4243071 - DNA, 25 bp, Homo sapien
aaaatcaaaagcgattaatatagct

SEQ ID NO: 4243072 - DNA, 25 bp, Homo sapien
aaggtggctgggtaatgaatcatga

SEQ ID NO: 4243073 - DNA, 25 bp, Homo sapien
ggaatattgccatacaaggtggctg

SEQ ID NO: 4243074 - DNA, 25 bp, Homo sapien
caaggtggctgggtaatgaatcatg

SEQ ID NO: 4243075 - DNA, 25 bp, Homo sapien
gctggaatattgccatacaaggtgg

SEQ ID NO: 4243076 - DNA, 25 bp, Homo sapien
cacacattcgggaagaatttgcact

SEQ ID NO: 4243077 - DNA, 25 bp, Homo sapien
gagggattctaattgaactgcagac

SEQ ID NO: 4243078 - DNA, 25 bp, Homo sapien
tatgaacattggtcttctcttgaga

SEQ ID NO: 4243079 - DNA, 25 bp, Homo sapien
tatctggcacttattgagggattct

SEQ ID NO: 4243080 - DNA, 25 bp, Homo sapien
aaacagtaacattattgatcccctg

SEQ ID NO: 4243081 - DNA, 25 bp, Homo sapien
tagagctcattagaaacaaaatctc

SEQ ID NO: 4243082 - DNA, 25 bp, Homo sapien
gaaaatttgtctacatgacttcgga

SEQ ID NO: 4243083 - DNA, 25 bp, Homo sapien
gaactatgctttacccaactattgt

SEQ ID NO: 4243084 - DNA, 25 bp, Homo sapien
tctgcactcaaattgccttgtgact

SEQ ID NO: 4243085 - DNA, 25 bp, Homo sapien
tgcagaactgcttcaatggaaagac

SEQ ID NO: 4243086 - DNA, 25 bp, Homo sapien
gaaagtctacagtcatctccaatct

SEQ ID NO: 4243087 - DNA, 25 bp, Homo sapien
taggtacagactactctaataggaa

SEQ ID NO: 4243088 - DNA, 25 bp, Homo sapien
tccaagtcttgtccacctgtatcag

SEQ ID NO: 4243089 - DNA, 25 bp, Homo sapien
gacatacccttatgagaggccttaa

SEQ ID NO: 4243090 - DNA, 25 bp, Homo sapien
tttggaagtcatgggacctagaacc

SEQ ID NO: 4243091 - DNA, 25 bp, Homo sapien
tccagtgaaggtggttacagggcca

SEQ ID NO: 4243092 - DNA, 25 bp, Homo sapien
ggtaaggctatcaaagtttgcacag

SEQ ID NO: 4243093 - DNA, 25 bp, Homo sapien
tcaggacagtgcaatgtggtaaggc

SEQ ID NO: 4243094 - DNA, 25 bp, Homo sapien
ggtcattgttctcaagcagcttatc

SEQ ID NO: 4243095 - DNA, 25 bp, Homo sapien
gcttatctattgagggagacgtaca

SEQ ID NO: 4243096 - DNA, 25 bp, Homo sapien
tgtcctggtgagcacacgaacagct

SEQ ID NO: 4243097 - DNA, 25 bp, Homo sapien
tcacactggagagggacacgaaata

SEQ ID NO: 4243098 - DNA, 25 bp, Homo sapien
gagcagtaggcagatgtaaccagtg

SEQ ID NO: 4243099 - DNA, 25 bp, Homo sapien
tgatgcatagcaaggttggaaacca

SEQ ID NO: 4243100 - DNA, 25 bp, Homo sapien
tcaaagagcattaaggtatatgtta

SEQ ID NO: 4243101 - DNA, 25 bp, Homo sapien
ttcaaagagcattaaggtatatgtt

SEQ ID NO: 4243102 - DNA, 25 bp, Homo sapien
cctgttcttctcgataggcatatat

SEQ ID NO: 4243103 - DNA, 25 bp, Homo sapien
cactatctcaattccaaaatcctgt

SEQ ID NO: 4243104 - DNA, 25 bp, Homo sapien
atatctctgctgttgttccaaactg

SEQ ID NO: 4243105 - DNA, 25 bp, Homo sapien
ctgactgtgttcttagctcaaggac

SEQ ID NO: 4243106 - DNA, 25 bp, Homo sapien
gctgtcgtcatcgtgcaaagtcctg

SEQ ID NO: 4243107 - DNA, 25 bp, Homo sapien
tggaatcacctgacagctgtcgtca

SEQ ID NO: 4243108 - DNA, 25 bp, Homo sapien
gaagaggtaatgtctgtccgggaat

SEQ ID NO: 4243109 - DNA, 25 bp, Homo sapien
ccatactgacttcttgagggtgaaa

SEQ ID NO: 4243110 - DNA, 25 bp, Homo sapien
tgatgtcggcagactggtgtcaaaa

SEQ ID NO: 4243111 - DNA, 25 bp, Homo sapien
tatgtgatgtcggcagactggtgtc

SEQ ID NO: 4243112 - DNA, 25 bp, Homo sapien
tgtgatgtcggcagactggtgtcaa

SEQ ID NO: 4243113 - DNA, 25 bp, Homo sapien
gatgtcggcagactggtgtcaaaat

SEQ ID NO: 4243114 - DNA, 25 bp, Homo sapien
tagtacagaatgctcccgtgtgtca

SEQ ID NO: 4243115 - DNA, 25 bp, Homo sapien
catttgccacaacgaaggaatcagt

SEQ ID NO: 4243116 - DNA, 25 bp, Homo sapien
tatctagtctttttgcgttccagga

SEQ ID NO: 4243117 - DNA, 25 bp, Homo sapien
cccatgattagactgaggatacgtg

SEQ ID NO: 4243118 - DNA, 25 bp, Homo sapien
gggctggctcgccaggcttggcgcc

SEQ ID NO: 4243119 - DNA, 25 bp, Homo sapien
cgagggccgacgtgaagcagctttc

SEQ ID NO: 4243120 - DNA, 25 bp, Homo sapien
gaaagcgccgcgactccatcgctgg

SEQ ID NO: 4243121 - DNA, 25 bp, Homo sapien
caacagagcagcgaagaaagcgccg

SEQ ID NO: 4243122 - DNA, 25 bp, Homo sapien
ggcaggagcggcaggtggttgccca

SEQ ID NO: 4243123 - DNA, 25 bp, Homo sapien
caggcaggagcggcaggtggttgcc

SEQ ID NO: 4243124 - DNA, 25 bp, Homo sapien
aggcaggagcggcaggtggttgccc

SEQ ID NO: 4243125 - DNA, 25 bp, Homo sapien
gcaggagcggcaggtggttgcccat

SEQ ID NO: 4243126 - DNA, 25 bp, Homo sapien
cctgctgatctccttcgccggccat

SEQ ID NO: 4243127 - DNA, 25 bp, Homo sapien
gttgtgcgcagcgtcctgctgatct

SEQ ID NO: 4243128 - DNA, 25 bp, Homo sapien
gtcctgctgatctccttcgccggcc

SEQ ID NO: 4243129 - DNA, 25 bp, Homo sapien
tcctgctgatctccttcgccggcca

SEQ ID NO: 4243130 - DNA, 25 bp, Homo sapien
agcagacggcggcgcgtacccaagc

SEQ ID NO: 4243131 - DNA, 25 bp, Homo sapien
ggtgccgaagactccgagggagggc

SEQ ID NO: 4243132 - DNA, 25 bp, Homo sapien
cagggcggtgccgaagactccgagg

SEQ ID NO: 4243133 - DNA, 25 bp, Homo sapien
gagggagggcccgtgtcgcgcggct

SEQ ID NO: 4243134 - DNA, 25 bp, Homo sapien
gcatgaagaggatttgggtccccaa

SEQ ID NO: 4243135 - DNA, 25 bp, Homo sapien
taactgagaagacctatactgtatg

SEQ ID NO: 4243136 - DNA, 25 bp, Homo sapien
aactgacattagcttaccatttgta

SEQ ID NO: 4243137 - DNA, 25 bp, Homo sapien
taccatttgtatatgaggaaacaga

SEQ ID NO: 4243138 - DNA, 25 bp, Homo sapien
ccctgggtgaatgaggctaataagc

SEQ ID NO: 4243139 - DNA, 25 bp, Homo sapien
tagaggagctaactgaaaagtcgta

SEQ ID NO: 4243140 - DNA, 25 bp, Homo sapien
cactatatgtctcctatgcaccggg

SEQ ID NO: 4243141 - DNA, 25 bp, Homo sapien
cagaagagtccattaccctgggtga

SEQ ID NO: 4243142 - DNA, 25 bp, Homo sapien
gacagaagaaacagggcgatattga

SEQ ID NO: 4243143 - DNA, 25 bp, Homo sapien
taaaagtagtatagacctccagtcc

SEQ ID NO: 4243144 - DNA, 25 bp, Homo sapien
tgaatccaacaacctacatgtgtgg

SEQ ID NO: 4243145 - DNA, 25 bp, Homo sapien
tggttgaggttagaaaccacgcctc

SEQ ID NO: 4243146 - DNA, 25 bp, Homo sapien
ccctggcattagaacgaatagcctc

SEQ ID NO: 4243147 - DNA, 25 bp, Homo sapien
ctggcattagaacgaatagcctcat

SEQ ID NO: 4243148 - DNA, 25 bp, Homo sapien
cctggcattagaacgaatagcctca

SEQ ID NO: 4243149 - DNA, 25 bp, Homo sapien
tggcattagaacgaatagcctcatt

SEQ ID NO: 4243150 - DNA, 25 bp, Homo sapien
gaagcagaatcttcacctgccagct

SEQ ID NO: 4243151 - DNA, 25 bp, Homo sapien
ccagcttgtttggtgagtaatgcat

SEQ ID NO: 4243152 - DNA, 25 bp, Homo sapien
cacctgccagcttgtttggtgagta

SEQ ID NO: 4243153 - DNA, 25 bp, Homo sapien
gaatcttcacctgccagcttgtttg

SEQ ID NO: 4243154 - DNA, 25 bp, Homo sapien
ttctccagatgcaatcagtggagcc

SEQ ID NO: 4243155 - DNA, 25 bp, Homo sapien
caggttctccagatgcaatcagtgg

SEQ ID NO: 4243156 - DNA, 25 bp, Homo sapien
ctcaggttctccagatgcaatcagt

SEQ ID NO: 4243157 - DNA, 25 bp, Homo sapien
ctccagatgcaatcagtggagccat

SEQ ID NO: 4243158 - DNA, 25 bp, Homo sapien
tgctgcgcgggtctaatgacaacat

SEQ ID NO: 4243159 - DNA, 25 bp, Homo sapien
tgatccttcatgctagctacacgga

SEQ ID NO: 4243160 - DNA, 25 bp, Homo sapien
gctacacggattcttacagccctgg

SEQ ID NO: 4243161 - DNA, 25 bp, Homo sapien
tcttggtaaggcaaatgctgcgcgg

SEQ ID NO: 4243162 - DNA, 25 bp, Homo sapien
cctagctaggtttactgtgcagttc

SEQ ID NO: 4243163 - DNA, 25 bp, Homo sapien
tacagtgcaggtttcaagggtacag

SEQ ID NO: 4243164 - DNA, 25 bp, Homo sapien
gatatgggactccagtacagtgcag

SEQ ID NO: 4243165 - DNA, 25 bp, Homo sapien
gaatttacttgcaggaagatcagcc

SEQ ID NO: 4243166 - DNA, 25 bp, Homo sapien
tggctccattaccactttgcaccat

SEQ ID NO: 4243167 - DNA, 25 bp, Homo sapien
taaagggctctcaatcaccctttcc

SEQ ID NO: 4243168 - DNA, 25 bp, Homo sapien
ctagaaagcataaagggctctcaat

SEQ ID NO: 4243169 - DNA, 25 bp, Homo sapien
cacctggctccattaccactttgca

SEQ ID NO: 4243170 - DNA, 25 bp, Homo sapien
ccgacaccaaggacttggaattcca

SEQ ID NO: 4243171 - DNA, 25 bp, Homo sapien
cgacaccaaggacttggaattccat

SEQ ID NO: 4243172 - DNA, 25 bp, Homo sapien
tcaccgacaccaaggacttggaatt

SEQ ID NO: 4243173 - DNA, 25 bp, Homo sapien
cttcaccgacaccaaggacttggaa

SEQ ID NO: 4243174 - DNA, 25 bp, Homo sapien
atcaagtcgagactgacatagagcc

SEQ ID NO: 4243175 - DNA, 25 bp, Homo sapien
tatcaagtcgagactgacatagagc

SEQ ID NO: 4243176 - DNA, 25 bp, Homo sapien
gtatcaagtcgagactgacatagag

SEQ ID NO: 4243177 - DNA, 25 bp, Homo sapien
tgtatcaagtcgagactgacataga

SEQ ID NO: 4243178 - DNA, 25 bp, Homo sapien
gaagtcatgggatacaacacagaag

SEQ ID NO: 4243179 - DNA, 25 bp, Homo sapien
cagaagctggctaaagtttagagtc

SEQ ID NO: 4243180 - DNA, 25 bp, Homo sapien
caaaattttacctctgattgagaag

SEQ ID NO: 4243181 - DNA, 25 bp, Homo sapien
gaagtaccaattaattatctgcagg

SEQ ID NO: 4243182 - DNA, 25 bp, Homo sapien
taatcatcccaacagagatcggatt

SEQ ID NO: 4243183 - DNA, 25 bp, Homo sapien
aacagagatcggatttcttctgtgc

SEQ ID NO: 4243184 - DNA, 25 bp, Homo sapien
cccaacagagatcggatttcttctg

SEQ ID NO: 4243185 - DNA, 25 bp, Homo sapien
tcatcccaacagagatcggatttct

SEQ ID NO: 4243186 - DNA, 25 bp, Homo sapien
cactggtttttgtgatacgtgtgag

SEQ ID NO: 4243187 - DNA, 25 bp, Homo sapien
gcaatttgcgaatgccttctttttc

SEQ ID NO: 4243188 - DNA, 25 bp, Homo sapien
aacattaccccactcatgacacagg

SEQ ID NO: 4243189 - DNA, 25 bp, Homo sapien
gaaaatatgacaaacgggcaatttg

SEQ ID NO: 4243190 - DNA, 25 bp, Homo sapien
tgttgtccataagtaaagtctgaga

SEQ ID NO: 4243191 - DNA, 25 bp, Homo sapien
cattctggctgcaagtgctttgcaa

SEQ ID NO: 4243192 - DNA, 25 bp, Homo sapien
taattagcattctggctgcaagtgc

SEQ ID NO: 4243193 - DNA, 25 bp, Homo sapien
caaaacaatacgttggtgttgaacg

SEQ ID NO: 4243194 - DNA, 25 bp, Homo sapien
ggaactgagcaagggaatatgccac

SEQ ID NO: 4243195 - DNA, 25 bp, Homo sapien
tgagcaagggaatatgccacccaca

SEQ ID NO: 4243196 - DNA, 25 bp, Homo sapien
gcggaacctccagggaactgagcaa

SEQ ID NO: 4243197 - DNA, 25 bp, Homo sapien
tagcaatggataagtggcggaacct

SEQ ID NO: 4243198 - DNA, 25 bp, Homo sapien
caaatccttgaagtagtgtggcttt

SEQ ID NO: 4243199 - DNA, 25 bp, Homo sapien
acaaatccttgaagtagtgtggctt

SEQ ID NO: 4243200 - DNA, 25 bp, Homo sapien
aatccttgaagtagtgtggcttttc

SEQ ID NO: 4243201 - DNA, 25 bp, Homo sapien
atccttgaagtagtgtggcttttct

SEQ ID NO: 4243202 - DNA, 25 bp, Homo sapien
atggccacatttcacagggctagaa

SEQ ID NO: 4243203 - DNA, 25 bp, Homo sapien
acatggccacatttcacagggctag

SEQ ID NO: 4243204 - DNA, 25 bp, Homo sapien
aaacacatggccacatttcacaggg

SEQ ID NO: 4243205 - DNA, 25 bp, Homo sapien
ctgttaaacacatggccacatttca

SEQ ID NO: 4243206 - DNA, 25 bp, Homo sapien
tatgcatcagggtgagagtctccgg

SEQ ID NO: 4243207 - DNA, 25 bp, Homo sapien
tcagggtgagagtctccgggacttc

SEQ ID NO: 4243208 - DNA, 25 bp, Homo sapien
agagtctccgggacttccttgctta

SEQ ID NO: 4243209 - DNA, 25 bp, Homo sapien
tcttatgcatcagggtgagagtctc

SEQ ID NO: 4243210 - DNA, 25 bp, Homo sapien
tttccgtgcaccttgtaaaatcatc

SEQ ID NO: 4243211 - DNA, 25 bp, Homo sapien
taattcaatacagtcctttccgtgc

SEQ ID NO: 4243212 - DNA, 25 bp, Homo sapien
gggtcaggtaagaagctcatccaac

SEQ ID NO: 4243213 - DNA, 25 bp, Homo sapien
actttgcctcaatgtagaaactggg

SEQ ID NO: 4243214 - DNA, 25 bp, Homo sapien
gatatttgtttataattccagaagg

SEQ ID NO: 4243215 - DNA, 25 bp, Homo sapien
ttccagaaggttctgaaagtcaaac

SEQ ID NO: 4243216 - DNA, 25 bp, Homo sapien
agatatttgtttataattccagaag

SEQ ID NO: 4243217 - DNA, 25 bp, Homo sapien
ttaagatatttgtttataattccag

SEQ ID NO: 4243218 - DNA, 25 bp, Homo sapien
ttcctgcaggtcataattaacttta

SEQ ID NO: 4243219 - DNA, 25 bp, Homo sapien
aatgaggtgagggtttttcagtaat

SEQ ID NO: 4243220 - DNA, 25 bp, Homo sapien
agttcccccagatgcttgagataaa

SEQ ID NO: 4243221 - DNA, 25 bp, Homo sapien
caaccttgatatactggagctatgt

SEQ ID NO: 4243222 - DNA, 25 bp, Homo sapien
catctctcagtactgccagtaagag

SEQ ID NO: 4243223 - DNA, 25 bp, Homo sapien
gcatctctcagtactgccagtaaga

SEQ ID NO: 4243224 - DNA, 25 bp, Homo sapien
tctctcagtactgccagtaagagtt

SEQ ID NO: 4243225 - DNA, 25 bp, Homo sapien
tctcagtactgccagtaagagttac

SEQ ID NO: 4243226 - DNA, 25 bp, Homo sapien
gattcagtaggtatagagaagagcc

SEQ ID NO: 4243227 - DNA, 25 bp, Homo sapien
ttcccctttgcacccaatgtctgat

SEQ ID NO: 4243228 - DNA, 25 bp, Homo sapien
taaagacagactgtagtgttcccct

SEQ ID NO: 4243229 - DNA, 25 bp, Homo sapien
cttgagggctccttaaagacagact

SEQ ID NO: 4243230 - DNA, 25 bp, Homo sapien
tcccacaggtgctggggagctgctg

SEQ ID NO: 4243231 - DNA, 25 bp, Homo sapien
acaggtgctggggagctgctgccat

SEQ ID NO: 4243232 - DNA, 25 bp, Homo sapien
cccacaggtgctggggagctgctgc

SEQ ID NO: 4243233 - DNA, 25 bp, Homo sapien
ctttggagatcccacaggtgctggg

SEQ ID NO: 4243234 - DNA, 25 bp, Homo sapien
gcttctaggaagacggaagactccc

SEQ ID NO: 4243235 - DNA, 25 bp, Homo sapien
gtttcaggacagataacaccaggcc

SEQ ID NO: 4243236 - DNA, 25 bp, Homo sapien
tagatcaatcagctgggcacactag

SEQ ID NO: 4243237 - DNA, 25 bp, Homo sapien
gaagtgacctcatagcgttcagcag

SEQ ID NO: 4243238 - DNA, 25 bp, Homo sapien
aatgagacgaagcatgcaaggcacc

SEQ ID NO: 4243239 - DNA, 25 bp, Homo sapien
tatgattggatgcttggtagtaccc

SEQ ID NO: 4243240 - DNA, 25 bp, Homo sapien
tactgaacggcagtgacaactctgg

SEQ ID NO: 4243241 - DNA, 25 bp, Homo sapien
taagtgatatgccagaggtcccagt

SEQ ID NO: 4243242 - DNA, 25 bp, Homo sapien
ctggagctttccatcgtatcggaag

SEQ ID NO: 4243243 - DNA, 25 bp, Homo sapien
ttgagcgcaaggtaagccccaccat

SEQ ID NO: 4243244 - DNA, 25 bp, Homo sapien
agagtaaattcttgagcgcaaggta

SEQ ID NO: 4243245 - DNA, 25 bp, Homo sapien
tattcccatggtttggaggggcaca

SEQ ID NO: 4243246 - DNA, 25 bp, Homo sapien
agggatgcttccaaagatcagctgg

SEQ ID NO: 4243247 - DNA, 25 bp, Homo sapien
aagaatattaagcaagagagcctgc

SEQ ID NO: 4243248 - DNA, 25 bp, Homo sapien
agatcagctggagaatatattactt

SEQ ID NO: 4243249 - DNA, 25 bp, Homo sapien
tattaagcaagagagcctgccaagg

SEQ ID NO: 4243250 - DNA, 25 bp, Homo sapien
tttatcattctttcactctttgtct

SEQ ID NO: 4243251 - DNA, 25 bp, Homo sapien
ccttttatcattctttcactctttg

SEQ ID NO: 4243252 - DNA, 25 bp, Homo sapien
tatcattctttcactctttgtctct

SEQ ID NO: 4243253 - DNA, 25 bp, Homo sapien
ttccttttatcattctttcactctt

SEQ ID NO: 4243254 - DNA, 25 bp, Homo sapien
tggggagcaaggaacatgaaagaac

SEQ ID NO: 4243255 - DNA, 25 bp, Homo sapien
agagccacaaaaggagccttgggga

SEQ ID NO: 4243256 - DNA, 25 bp, Homo sapien
cagatcgagccttccttcttaccat

SEQ ID NO: 4243257 - DNA, 25 bp, Homo sapien
agccttggggagcaaggaacatgaa

SEQ ID NO: 4243258 - DNA, 25 bp, Homo sapien
tgtttctgaacaaaggagtgaagct

SEQ ID NO: 4243259 - DNA, 25 bp, Homo sapien
tttctgaacaaaggagtgaagctga

SEQ ID NO: 4243260 - DNA, 25 bp, Homo sapien
gtttctgaacaaaggagtgaagctg

SEQ ID NO: 4243261 - DNA, 25 bp, Homo sapien
cacagcctctgcaagtcttgtaaat

SEQ ID NO: 4243262 - DNA, 25 bp, Homo sapien
tatcaaattagagattcaagcacag

SEQ ID NO: 4243263 - DNA, 25 bp, Homo sapien
catctgtagttcttatgtgcaatgt

SEQ ID NO: 4243264 - DNA, 25 bp, Homo sapien
aagacttccacctatgcaggtgagt

SEQ ID NO: 4243265 - DNA, 25 bp, Homo sapien
cccctctgtcgctttctccactagg

SEQ ID NO: 4243266 - DNA, 25 bp, Homo sapien
agttatcatgtacccctctgtcgct

SEQ ID NO: 4243267 - DNA, 25 bp, Homo sapien
atcatgtacccctctgtcgctttct

SEQ ID NO: 4243268 - DNA, 25 bp, Homo sapien
gtacccctctgtcgctttctccact

SEQ ID NO: 4243269 - DNA, 25 bp, Homo sapien
gagtctttcagcttaatcaggatca

SEQ ID NO: 4243270 - DNA, 25 bp, Homo sapien
agggcttaactgtagtatggtcatc

SEQ ID NO: 4243271 - DNA, 25 bp, Homo sapien
tcatcttttatagtatcctgcaggg

SEQ ID NO: 4243272 - DNA, 25 bp, Homo sapien
tctctgttgccatctagattctgaa

SEQ ID NO: 4243273 - DNA, 25 bp, Homo sapien
tcagcacccaatactttcatgagaa

SEQ ID NO: 4243274 - DNA, 25 bp, Homo sapien
aaagtcagcacccaatactttcatg

SEQ ID NO: 4243275 - DNA, 25 bp, Homo sapien
agtcagcacccaatactttcatgag

SEQ ID NO: 4243276 - DNA, 25 bp, Homo sapien
gcccaaagtcagcacccaatacttt

SEQ ID NO: 4243277 - DNA, 25 bp, Homo sapien
cagtttacgcagatttcatccctct

SEQ ID NO: 4243278 - DNA, 25 bp, Homo sapien
agtttacgcagatttcatccctctc

SEQ ID NO: 4243279 - DNA, 25 bp, Homo sapien
tcagtttacgcagatttcatccctc

SEQ ID NO: 4243280 - DNA, 25 bp, Homo sapien
gcggactccatcgtgcacatgcaag

SEQ ID NO: 4243281 - DNA, 25 bp, Homo sapien
gaccttagaaatgcagcggactcca

SEQ ID NO: 4243282 - DNA, 25 bp, Homo sapien
ttccacctgccagttactgtgacct

SEQ ID NO: 4243283 - DNA, 25 bp, Homo sapien
gccttcctcaaagttgatagcacgg

SEQ ID NO: 4243284 - DNA, 25 bp, Homo sapien
aatctatggttcagttcaagttcca

SEQ ID NO: 4243285 - DNA, 25 bp, Homo sapien
tctttgtttgaaatctatggttcag

SEQ ID NO: 4243286 - DNA, 25 bp, Homo sapien
ttgtttgaaatctatggttcagttc

SEQ ID NO: 4243287 - DNA, 25 bp, Homo sapien
tgaaatctatggttcagttcaagtt

SEQ ID NO: 4243288 - DNA, 25 bp, Homo sapien
gaagagatatttgcatagccgtgat

SEQ ID NO: 4243289 - DNA, 25 bp, Homo sapien
gagatatttgcatagccgtgatcat

SEQ ID NO: 4243290 - DNA, 25 bp, Homo sapien
agagatatttgcatagccgtgatca

SEQ ID NO: 4243291 - DNA, 25 bp, Homo sapien
gatatttgcatagccgtgatcatag

SEQ ID NO: 4243292 - DNA, 25 bp, Homo sapien
catccccaacccttggcggtggaga

SEQ ID NO: 4243293 - DNA, 25 bp, Homo sapien
tcatgatcacagtcagttctactga

SEQ ID NO: 4243294 - DNA, 25 bp, Homo sapien
cccttggcggtggagaaaatttcat

SEQ ID NO: 4243295 - DNA, 25 bp, Homo sapien
tctactgatatcataggccagcctc

SEQ ID NO: 4243296 - DNA, 25 bp, Homo sapien
gttgacagtatcttccaccctcctc

SEQ ID NO: 4243297 - DNA, 25 bp, Homo sapien
ttgacagtatcttccaccctcctct

SEQ ID NO: 4243298 - DNA, 25 bp, Homo sapien
tgttgacagtatcttccaccctcct

SEQ ID NO: 4243299 - DNA, 25 bp, Homo sapien
ccctcctctggagccttctcaacat

SEQ ID NO: 4243300 - DNA, 25 bp, Homo sapien
tatacatcattccttatatggcagc

SEQ ID NO: 4243301 - DNA, 25 bp, Homo sapien
tatggcagcttagtattctagtagg

SEQ ID NO: 4243302 - DNA, 25 bp, Homo sapien
tgctaatataaataacgtcctgacc

SEQ ID NO: 4243303 - DNA, 25 bp, Homo sapien
ggaatgaaaccacatatactatcct

SEQ ID NO: 4243304 - DNA, 25 bp, Homo sapien
ctttccccttgatcctgggcctgag

SEQ ID NO: 4243305 - DNA, 25 bp, Homo sapien
tttccccttgatcctgggcctgagg

SEQ ID NO: 4243306 - DNA, 25 bp, Homo sapien
actttccccttgatcctgggcctga

SEQ ID NO: 4243307 - DNA, 25 bp, Homo sapien
ttccccttgatcctgggcctgaggc

SEQ ID NO: 4243308 - DNA, 25 bp, Homo sapien
tacttgagagatacggtcacagcca

SEQ ID NO: 4243309 - DNA, 25 bp, Homo sapien
caacgtgcggtcctgtactacttga

SEQ ID NO: 4243310 - DNA, 25 bp, Homo sapien
cctgtactacttgagagatacggtc

SEQ ID NO: 4243311 - DNA, 25 bp, Homo sapien
tgagagatacggtcacagccattaa

SEQ ID NO: 4243312 - DNA, 25 bp, Homo sapien
ctgtagagaatgtttcgagatagac

SEQ ID NO: 4243313 - DNA, 25 bp, Homo sapien
gctaaagcaaggtgttttgttctct

SEQ ID NO: 4243314 - DNA, 25 bp, Homo sapien
ttttgttctctggaatggccctgag

SEQ ID NO: 4243315 - DNA, 25 bp, Homo sapien
tctctggaatggccctgagcactct

SEQ ID NO: 4243316 - DNA, 25 bp, Homo sapien
actgatgctaaagcaaggtgttttg

SEQ ID NO: 4243317 - DNA, 25 bp, Homo sapien
atgctgcaggtgtgatgatcagaat

SEQ ID NO: 4243318 - DNA, 25 bp, Homo sapien
tgtattaatattagttcctcttggg

SEQ ID NO: 4243319 - DNA, 25 bp, Homo sapien
ttgtattaatattagttcctcttgg

SEQ ID NO: 4243320 - DNA, 25 bp, Homo sapien
tgttgtattaatattagttcctctt

SEQ ID NO: 4243321 - DNA, 25 bp, Homo sapien
aatgtaaagccaaatattgagtact

SEQ ID NO: 4243322 - DNA, 25 bp, Homo sapien
ctctctccgtggtgttgaaggccag

SEQ ID NO: 4243323 - DNA, 25 bp, Homo sapien
tccgtggtgttgaaggccagtagct

SEQ ID NO: 4243324 - DNA, 25 bp, Homo sapien
ggccagtagctgaaatgtaaagcca

SEQ ID NO: 4243325 - DNA, 25 bp, Homo sapien
cattttgacgtggataaagaggaca

SEQ ID NO: 4243326 - DNA, 25 bp, Homo sapien
gaataggtcaatagcttagggagca

SEQ ID NO: 4243327 - DNA, 25 bp, Homo sapien
cacctagtggcatatctgcattgag

SEQ ID NO: 4243328 - DNA, 25 bp, Homo sapien
cattgagaggataatcattttgacg

SEQ ID NO: 4243329 - DNA, 25 bp, Homo sapien
attgcatgttgcaattacgggctgc

SEQ ID NO: 4243330 - DNA, 25 bp, Homo sapien
gaataattgcgaattgcatgttgca

SEQ ID NO: 4243331 - DNA, 25 bp, Homo sapien
catgttgcaattacgggctgctcca

SEQ ID NO: 4243332 - DNA, 25 bp, Homo sapien
ttctgaaagaataattgcgaattgc

SEQ ID NO: 4243333 - DNA, 25 bp, Homo sapien
taatgacacacttcaggcagaaaca

SEQ ID NO: 4243334 - DNA, 25 bp, Homo sapien
caattccagtcaggtaatgacacac

SEQ ID NO: 4243335 - DNA, 25 bp, Homo sapien
tgctgctcagggctaagtttccaat

SEQ ID NO: 4243336 - DNA, 25 bp, Homo sapien
ggctaagtttccaattccagtcagg

SEQ ID NO: 4243337 - DNA, 25 bp, Homo sapien
atggcttacaaagacaagcatctgc

SEQ ID NO: 4243338 - DNA, 25 bp, Homo sapien
tggcttacaaagacaagcatctgct

SEQ ID NO: 4243339 - DNA, 25 bp, Homo sapien
aatggcttacaaagacaagcatctg

SEQ ID NO: 4243340 - DNA, 25 bp, Homo sapien
ggaaaggcagtaataattgagtatc

SEQ ID NO: 4243341 - DNA, 25 bp, Homo sapien
agtgcgtggaaaggcagtaataatt

SEQ ID NO: 4243342 - DNA, 25 bp, Homo sapien
gttaaatgatcagtgcgtggaaagg

SEQ ID NO: 4243343 - DNA, 25 bp, Homo sapien
agactgttaaatgatcagtgcgtgg

SEQ ID NO: 4243344 - DNA, 25 bp, Homo sapien
ttatattctgtattgatcttcttag

SEQ ID NO: 4243345 - DNA, 25 bp, Homo sapien
atattctgtattgatcttcttagtg

SEQ ID NO: 4243346 - DNA, 25 bp, Homo sapien
tattctgtattgatcttcttagtgt

SEQ ID NO: 4243347 - DNA, 25 bp, Homo sapien
ttctgtattgatcttcttagtgtac

SEQ ID NO: 4243348 - DNA, 25 bp, Homo sapien
gagttccttatcaatgctccccact

SEQ ID NO: 4243349 - DNA, 25 bp, Homo sapien
tagttttcttcacctacgtggccag

SEQ ID NO: 4243350 - DNA, 25 bp, Homo sapien
ttgtagttttcttcacctacgtggc

SEQ ID NO: 4243351 - DNA, 25 bp, Homo sapien
ttcttcacctacgtggccagcattc

SEQ ID NO: 4243352 - DNA, 25 bp, Homo sapien
ttacaagtccttgtaggacactgag

SEQ ID NO: 4243353 - DNA, 25 bp, Homo sapien
gaagtgactatagatcatcttgatg

SEQ ID NO: 4243354 - DNA, 25 bp, Homo sapien
cttggagcgaagtgactatagatca

SEQ ID NO: 4243355 - DNA, 25 bp, Homo sapien
caagatgaaactgttggaagcgtct

SEQ ID NO: 4243356 - DNA, 25 bp, Homo sapien
gatgtctggtccctgagttcaggca

SEQ ID NO: 4243357 - DNA, 25 bp, Homo sapien
cagagccagcatttaggaatttcag

SEQ ID NO: 4243358 - DNA, 25 bp, Homo sapien
gatctccactggtctgcaaggacta

SEQ ID NO: 4243359 - DNA, 25 bp, Homo sapien
gacagattatgcgtcctgcctagac

SEQ ID NO: 4243360 - DNA, 25 bp, Homo sapien
tagtcagtgtgttgatttgcacctt

SEQ ID NO: 4243361 - DNA, 25 bp, Homo sapien
ctttcaggggtagatccgactatag

SEQ ID NO: 4243362 - DNA, 25 bp, Homo sapien
gcacctttacttcaaagccttgaga

SEQ ID NO: 4243363 - DNA, 25 bp, Homo sapien
atgctcttgcctgtatgtatgatgt

SEQ ID NO: 4243364 - DNA, 25 bp, Homo sapien
ccacagcgccctgtgagttgccatg

SEQ ID NO: 4243365 - DNA, 25 bp, Homo sapien
tggatggatgctcaagcttcgggtc

SEQ ID NO: 4243366 - DNA, 25 bp, Homo sapien
tcgggtccatcggatgtttctgatc

SEQ ID NO: 4243367 - DNA, 25 bp, Homo sapien
tttctgatctgcataaacaccacag

SEQ ID NO: 4243368 - DNA, 25 bp, Homo sapien
tcttctcactgacatagatttgaag

SEQ ID NO: 4243369 - DNA, 25 bp, Homo sapien
tgtcctctgtggaacgtcttctcac

SEQ ID NO: 4243370 - DNA, 25 bp, Homo sapien
ccagcagaattgatgctgttcttta

SEQ ID NO: 4243371 - DNA, 25 bp, Homo sapien
gaaagggaggtccagcagaattgat

SEQ ID NO: 4243372 - DNA, 25 bp, Homo sapien
catgctgatataaagaacctttgtc

SEQ ID NO: 4243373 - DNA, 25 bp, Homo sapien
agcatgctgatataaagaacctttg

SEQ ID NO: 4243374 - DNA, 25 bp, Homo sapien
ggtagcatgctgatataaagaacct

SEQ ID NO: 4243375 - DNA, 25 bp, Homo sapien
tataaagaacctttgtcatagatac

SEQ ID NO: 4243376 - DNA, 25 bp, Homo sapien
gcaacttgggtttgtaatggccacc

SEQ ID NO: 4243377 - DNA, 25 bp, Homo sapien
tcaatctcgtcttcagggaatagcc

SEQ ID NO: 4243378 - DNA, 25 bp, Homo sapien
catagactgcagaaccaccagggaa

SEQ ID NO: 4243379 - DNA, 25 bp, Homo sapien
aatggccaccataaagctctgactg

SEQ ID NO: 4243380 - DNA, 25 bp, Homo sapien
catcagttattcgtgggtgtctggg

SEQ ID NO: 4243381 - DNA, 25 bp, Homo sapien
tagatgatcgcgtgtgtgttaagca

SEQ ID NO: 4243382 - DNA, 25 bp, Homo sapien
tacatttataaagcagagagatcac

SEQ ID NO: 4243383 - DNA, 25 bp, Homo sapien
taaacgcacgtgtaactccagagag

SEQ ID NO: 4243384 - DNA, 25 bp, Homo sapien
ccccacaaaggttatcctctgagtt

SEQ ID NO: 4243385 - DNA, 25 bp, Homo sapien
tccccacaaaggttatcctctgagt

SEQ ID NO: 4243386 - DNA, 25 bp, Homo sapien
cccacaaaggttatcctctgagttt

SEQ ID NO: 4243387 - DNA, 25 bp, Homo sapien
ccacaaaggttatcctctgagtttg

SEQ ID NO: 4243388 - DNA, 25 bp, Homo sapien
catcgccaaggcctttatatgtaag

SEQ ID NO: 4243389 - DNA, 25 bp, Homo sapien
ctttatatgtaagaagattatcaaa

SEQ ID NO: 4243390 - DNA, 25 bp, Homo sapien
gtaatacatcgccaaggcctttata

SEQ ID NO: 4243391 - DNA, 25 bp, Homo sapien
tcagtaatacatcgccaaggccttt

SEQ ID NO: 4243392 - DNA, 25 bp, Homo sapien
cacctcaactctgcggcgtggagaa

SEQ ID NO: 4243393 - DNA, 25 bp, Homo sapien
cagggaagcacaaagcctcagaagt

SEQ ID NO: 4243394 - DNA, 25 bp, Homo sapien
cagaatgtagctgactggagcctgc

SEQ ID NO: 4243395 - DNA, 25 bp, Homo sapien
tgtctgggttccgatgtccacctca

SEQ ID NO: 4243396 - DNA, 25 bp, Homo sapien
gttgccaacagggaaccagtagtga

SEQ ID NO: 4243397 - DNA, 25 bp, Homo sapien
actagaaagttgtcctgcacatggg

SEQ ID NO: 4243398 - DNA, 25 bp, Homo sapien
catgtacgcaaagtagatcaaaatc

SEQ ID NO: 4243399 - DNA, 25 bp, Homo sapien
tccactttttatgatcaccttttgc

SEQ ID NO: 4243400 - DNA, 25 bp, Homo sapien
caagggttgcatcttagctccatta

SEQ ID NO: 4243401 - DNA, 25 bp, Homo sapien
tgctctatggccatgttcactgggc

SEQ ID NO: 4243402 - DNA, 25 bp, Homo sapien
tcttccaacgtgtaatagaggatgg

SEQ ID NO: 4243403 - DNA, 25 bp, Homo sapien
taatagagcgagtgcaggctttgat

SEQ ID NO: 4243404 - DNA, 25 bp, Homo sapien
ctgcacacaactttcgttggtgaaa

SEQ ID NO: 4243405 - DNA, 25 bp, Homo sapien
cctatctcacggcatgtttctctct

SEQ ID NO: 4243406 - DNA, 25 bp, Homo sapien
gcacacaactttcgttggtgaaaaa

SEQ ID NO: 4243407 - DNA, 25 bp, Homo sapien
ctcatagttacaatgcccagtttgc

SEQ ID NO: 4243408 - DNA, 25 bp, Homo sapien
tgttgttcagaacaatggctgcatt

SEQ ID NO: 4243409 - DNA, 25 bp, Homo sapien
agccaaggatgagctgtgtcatgtt

SEQ ID NO: 4243410 - DNA, 25 bp, Homo sapien
gccaaggatgagctgtgtcatgttg

SEQ ID NO: 4243411 - DNA, 25 bp, Homo sapien
aagccaaggatgagctgtgtcatgt

SEQ ID NO: 4243412 - DNA, 25 bp, Homo sapien
cctaagagattagttgggccccact

SEQ ID NO: 4243413 - DNA, 25 bp, Homo sapien
atgcctaagaaaccctttcaattct

SEQ ID NO: 4243414 - DNA, 25 bp, Homo sapien
aaagtacagcaacagctgacacgct

SEQ ID NO: 4243415 - DNA, 25 bp, Homo sapien
gatctttccagacaacaccctagtt

SEQ ID NO: 4243416 - DNA, 25 bp, Homo sapien
ttgcattaatgtccagtcttcctga

SEQ ID NO: 4243417 - DNA, 25 bp, Homo sapien
gatttcaactcgtctgttagggtgg

SEQ ID NO: 4243418 - DNA, 25 bp, Homo sapien
aaattggcaggatttgccaccataa

SEQ ID NO: 4243419 - DNA, 25 bp, Homo sapien
tcaaggaagtggtcagagacagccc

SEQ ID NO: 4243420 - DNA, 25 bp, Homo sapien
aaagactgagtgaaaaattgtgaca

SEQ ID NO: 4243421 - DNA, 25 bp, Homo sapien
tccaatacactgtccagtgttacag

SEQ ID NO: 4243422 - DNA, 25 bp, Homo sapien
gatttaagtgcccagctgatcaggc

SEQ ID NO: 4243423 - DNA, 25 bp, Homo sapien
cattcgtgaacaggccagaaaacag

SEQ ID NO: 4243424 - DNA, 25 bp, Homo sapien
gtgttacagctaccccaacggaatg

SEQ ID NO: 4243425 - DNA, 25 bp, Homo sapien
agcagtttctgacgctgctcccttc

SEQ ID NO: 4243426 - DNA, 25 bp, Homo sapien
tttctgacgctgctcccttcaacca

SEQ ID NO: 4243427 - DNA, 25 bp, Homo sapien
ttgttttcctcccactgtgctaaag

SEQ ID NO: 4243428 - DNA, 25 bp, Homo sapien
taaagcagtttctgacgctgctccc

SEQ ID NO: 4243429 - DNA, 25 bp, Homo sapien
ctgcagggtaaaaaaatgaagcttt

SEQ ID NO: 4243430 - DNA, 25 bp, Homo sapien
aaaatgaagctttttcttcctccat

SEQ ID NO: 4243431 - DNA, 25 bp, Homo sapien
cctcctgccattgcacctactcggg

SEQ ID NO: 4243432 - DNA, 25 bp, Homo sapien
ctgccattgcacctactcgggcctt

SEQ ID NO: 4243433 - DNA, 25 bp, Homo sapien
gccattgcacctactcgggccttct

SEQ ID NO: 4243434 - DNA, 25 bp, Homo sapien
tcctgccattgcacctactcgggcc

SEQ ID NO: 4243435 - DNA, 25 bp, Homo sapien
tgaagcacatcgtgagctagtccat

SEQ ID NO: 4243436 - DNA, 25 bp, Homo sapien
gggataagtgaagcacatcgtgagc

SEQ ID NO: 4243437 - DNA, 25 bp, Homo sapien
catcgtgagctagtccattagaatc

SEQ ID NO: 4243438 - DNA, 25 bp, Homo sapien
aagtgaagcacatcgtgagctagtc

SEQ ID NO: 4243439 - DNA, 25 bp, Homo sapien
ggcatgcatgttccatgagtgggac

SEQ ID NO: 4243440 - DNA, 25 bp, Homo sapien
gcactttaaccatcagggccgtcat

SEQ ID NO: 4243441 - DNA, 25 bp, Homo sapien
aagttttgctggcatgcatgttcca

SEQ ID NO: 4243442 - DNA, 25 bp, Homo sapien
gtgggacctgggcactttaaccatc

SEQ ID NO: 4243443 - DNA, 25 bp, Homo sapien
agttgtaatccattccaggtcaggg

SEQ ID NO: 4243444 - DNA, 25 bp, Homo sapien
ggctggccacagaggtacattcatt

SEQ ID NO: 4243445 - DNA, 25 bp, Homo sapien
gactccatagtttgcaagatcggta

SEQ ID NO: 4243446 - DNA, 25 bp, Homo sapien
actcttcggaagtcatgggcatcaa

SEQ ID NO: 4243447 - DNA, 25 bp, Homo sapien
gctagagatgtgtggagtggaagct

SEQ ID NO: 4243448 - DNA, 25 bp, Homo sapien
acaccaaccccgctgcagttcactt

SEQ ID NO: 4243449 - DNA, 25 bp, Homo sapien
gaagctgaacaccaaccccgctgca

SEQ ID NO: 4243450 - DNA, 25 bp, Homo sapien
agtcagctagagatgtgtggagtgg

SEQ ID NO: 4243451 - DNA, 25 bp, Homo sapien
gctcaggagacatatctgacttgtc

SEQ ID NO: 4243452 - DNA, 25 bp, Homo sapien
tcatcggctgccacactgatagatg

SEQ ID NO: 4243453 - DNA, 25 bp, Homo sapien
acactgatagatgccaccagcctgg

SEQ ID NO: 4243454 - DNA, 25 bp, Homo sapien
agctcaggagacatatctgacttgt

SEQ ID NO: 4243455 - DNA, 25 bp, Homo sapien
ttgacgcatagagcttgggttctaa

SEQ ID NO: 4243456 - DNA, 25 bp, Homo sapien
ctgttcagggtttgacgcatagagc

SEQ ID NO: 4243457 - DNA, 25 bp, Homo sapien
ggtttgacgcatagagcttgggttc

SEQ ID NO: 4243458 - DNA, 25 bp, Homo sapien
ttcagggtttgacgcatagagcttg

SEQ ID NO: 4243459 - DNA, 25 bp, Homo sapien
ttcagaggctgaggccaacagatca

SEQ ID NO: 4243460 - DNA, 25 bp, Homo sapien
cgaggtcaggagatcaagaccatcc

SEQ ID NO: 4243461 - DNA, 25 bp, Homo sapien
tttcagaggctgaggccaacagatc

SEQ ID NO: 4243462 - DNA, 25 bp, Homo sapien
agaccatcctggccaatgtggtgaa

SEQ ID NO: 4243463 - DNA, 25 bp, Homo sapien
ggcccataaaaagcccttaggcaga

SEQ ID NO: 4243464 - DNA, 25 bp, Homo sapien
gcagagagatgcaggctcttgaggt

SEQ ID NO: 4243465 - DNA, 25 bp, Homo sapien
cataaaaagcccttaggcagagaag

SEQ ID NO: 4243466 - DNA, 25 bp, Homo sapien
ggctgtctggcccataaaaagccct

SEQ ID NO: 4243467 - DNA, 25 bp, Homo sapien
gaaggaatatgctacacacacgtga

SEQ ID NO: 4243468 - DNA, 25 bp, Homo sapien
tgccgcatgggtctctgattagaaa

SEQ ID NO: 4243469 - DNA, 25 bp, Homo sapien
acacacgtgactggaagctttcagg

SEQ ID NO: 4243470 - DNA, 25 bp, Homo sapien
gaaagttcaaacaaggtgccgcatg

SEQ ID NO: 4243471 - DNA, 25 bp, Homo sapien
aaaggagaagcaagctaagaccttc

SEQ ID NO: 4243472 - DNA, 25 bp, Homo sapien
tatgaggattgaagcgggaagagcc

SEQ ID NO: 4243473 - DNA, 25 bp, Homo sapien
tcactaccacgagatgagaacagcg

SEQ ID NO: 4243474 - DNA, 25 bp, Homo sapien
aagcctaaccatattaccctcccat

SEQ ID NO: 4243475 - DNA, 25 bp, Homo sapien
ccaatggggactgctggtgcagcta

SEQ ID NO: 4243476 - DNA, 25 bp, Homo sapien
ctccctctgcttaatccacttgttc

SEQ ID NO: 4243477 - DNA, 25 bp, Homo sapien
cctctgcttaatccacttgttcccc

SEQ ID NO: 4243478 - DNA, 25 bp, Homo sapien
tgcttaatccacttgttcccctctt

SEQ ID NO: 4243479 - DNA, 25 bp, Homo sapien
ctggcacatgcaggaggccctgggc

SEQ ID NO: 4243480 - DNA, 25 bp, Homo sapien
gcaggaggccctgggcttggctcaa

SEQ ID NO: 4243481 - DNA, 25 bp, Homo sapien
gaggccctgggcttggctcaaacac

SEQ ID NO: 4243482 - DNA, 25 bp, Homo sapien
ggaggccctgggcttggctcaaaca

SEQ ID NO: 4243483 - DNA, 25 bp, Homo sapien
tcacgggacagaggagcatttgcaa

SEQ ID NO: 4243484 - DNA, 25 bp, Homo sapien
taacaactgctaacaccatttggtg

SEQ ID NO: 4243485 - DNA, 25 bp, Homo sapien
aaattctatgaatccctactgggtc

SEQ ID NO: 4243486 - DNA, 25 bp, Homo sapien
ttagcccctgcacgacacaaagggt

SEQ ID NO: 4243487 - DNA, 25 bp, Homo sapien
tccagttctgccatcaggtgctcag

SEQ ID NO: 4243488 - DNA, 25 bp, Homo sapien
tgcagtgtgttaaatgaaaccctcc

SEQ ID NO: 4243489 - DNA, 25 bp, Homo sapien
gaacagtaaattgccctgcacggca

SEQ ID NO: 4243490 - DNA, 25 bp, Homo sapien
tatcagaggttcacacgcacactaa

SEQ ID NO: 4243491 - DNA, 25 bp, Homo sapien
tggctccctgcgttttccctgcatg

SEQ ID NO: 4243492 - DNA, 25 bp, Homo sapien
tgcctcaccagctaacccatgcctt

SEQ ID NO: 4243493 - DNA, 25 bp, Homo sapien
tgctggctggtttacaaagaagtcc

SEQ ID NO: 4243494 - DNA, 25 bp, Homo sapien
cttcaaaggctttgcaatgattttc

SEQ ID NO: 4243495 - DNA, 25 bp, Homo sapien
agaagtaatcttcccctcccttcat

SEQ ID NO: 4243496 - DNA, 25 bp, Homo sapien
cagaagtaatcttcccctcccttca

SEQ ID NO: 4243497 - DNA, 25 bp, Homo sapien
tcctgtgattgtgtatttttctctt

SEQ ID NO: 4243498 - DNA, 25 bp, Homo sapien
ctcttttgggattcctgctttcttc

SEQ ID NO: 4243499 - DNA, 25 bp, Homo sapien
tatttttctcttttgggattcctgc

SEQ ID NO: 4243500 - DNA, 25 bp, Homo sapien
tttctcttttgggattcctgctttc

SEQ ID NO: 4243501 - DNA, 25 bp, Homo sapien
gccaagtcaagatttcaacacaggt

SEQ ID NO: 4243502 - DNA, 25 bp, Homo sapien
tatccaggctaagcatgttacatgc

SEQ ID NO: 4243503 - DNA, 25 bp, Homo sapien
taaactagctcagggtaacagccac

SEQ ID NO: 4243504 - DNA, 25 bp, Homo sapien
cacagctgttcagtggccaagtcaa

SEQ ID NO: 4243505 - DNA, 25 bp, Homo sapien
gaccaaccattgagaacctgaagat

SEQ ID NO: 4243506 - DNA, 25 bp, Homo sapien
taaactcagtgctaaaggcatcagg

SEQ ID NO: 4243507 - DNA, 25 bp, Homo sapien
ggaaactcagagaacgatcttgcat

SEQ ID NO: 4243508 - DNA, 25 bp, Homo sapien
ggatctcagcaccaagtggatcact

SEQ ID NO: 4243509 - DNA, 25 bp, Homo sapien
aatgaccagcttcaagaacaccatg

SEQ ID NO: 4243510 - DNA, 25 bp, Homo sapien
tgtacattggaaagggaagctagat

SEQ ID NO: 4243511 - DNA, 25 bp, Homo sapien
tctaagtagtacagcctaatggtta

SEQ ID NO: 4243512 - DNA, 25 bp, Homo sapien
gaaatttacttggagatactcggga

SEQ ID NO: 4243513 - DNA, 25 bp, Homo sapien
caggggccattagccctgaagctgc

SEQ ID NO: 4243514 - DNA, 25 bp, Homo sapien
ctctccgacttcctgtgggaaaggg

SEQ ID NO: 4243515 - DNA, 25 bp, Homo sapien
catctctgctaaacaccagcccagg

SEQ ID NO: 4243516 - DNA, 25 bp, Homo sapien
aacaagcagcctctccgacttcctg

SEQ ID NO: 4243517 - DNA, 25 bp, Homo sapien
agcatgcaaatcacacgagacttta

SEQ ID NO: 4243518 - DNA, 25 bp, Homo sapien
gcatgcaaatcacacgagactttag

SEQ ID NO: 4243519 - DNA, 25 bp, Homo sapien
ctctgaagcagaatcctctattata

SEQ ID NO: 4243520 - DNA, 25 bp, Homo sapien
aagcagaatcctctattataaattt

SEQ ID NO: 4243521 - DNA, 25 bp, Homo sapien
ccatgaagagtctctctgaagcaga

SEQ ID NO: 4243522 - DNA, 25 bp, Homo sapien
ctctctgaagcagaatcctctatta

SEQ ID NO: 4243523 - DNA, 25 bp, Homo sapien
aactgagtaatatcaggacatcctg

SEQ ID NO: 4243524 - DNA, 25 bp, Homo sapien
ctgagtaatatcaggacatcctgga

SEQ ID NO: 4243525 - DNA, 25 bp, Homo sapien
tgaaactgagtaatatcaggacatc

SEQ ID NO: 4243526 - DNA, 25 bp, Homo sapien
gaaactgagtaatatcaggacatcc

SEQ ID NO: 4243527 - DNA, 25 bp, Homo sapien
tacagtatccaatctcagaaagcaa

SEQ ID NO: 4243528 - DNA, 25 bp, Homo sapien
caagaatattcctcgggtaatgcct

SEQ ID NO: 4243529 - DNA, 25 bp, Homo sapien
gaacaaatatgagttacgagacacg

SEQ ID NO: 4243530 - DNA, 25 bp, Homo sapien
tctcgtaacgagttgatccagcaat

SEQ ID NO: 4243531 - DNA, 25 bp, Homo sapien
gcaagggtttactatggacgacact

SEQ ID NO: 4243532 - DNA, 25 bp, Homo sapien
tattcaagatcttaggcaagcccag

SEQ ID NO: 4243533 - DNA, 25 bp, Homo sapien
gatggccaggagatatggaccctca

SEQ ID NO: 4243534 - DNA, 25 bp, Homo sapien
caacactgtttgctcgaaggccagg

SEQ ID NO: 4243535 - DNA, 25 bp, Homo sapien
gtattctaaagagtggtcggcagcc

SEQ ID NO: 4243536 - DNA, 25 bp, Homo sapien
gaaggaactcgtggacagcatctgg

SEQ ID NO: 4243537 - DNA, 25 bp, Homo sapien
tgtagacagtatgcgacggacagac

SEQ ID NO: 4243538 - DNA, 25 bp, Homo sapien
tatactaacattcatcctggagagg

SEQ ID NO: 4243539 - DNA, 25 bp, Homo sapien
ctcgatggggatgtggatacagcta

SEQ ID NO: 4243540 - DNA, 25 bp, Homo sapien
agagagtatgtgggatgccaaacca

SEQ ID NO: 4243541 - DNA, 25 bp, Homo sapien
cagcagatgaggctcgatggggatg

SEQ ID NO: 4243542 - DNA, 25 bp, Homo sapien
agagtatgtgggatgccaaaccagc

SEQ ID NO: 4243543 - DNA, 25 bp, Homo sapien
tgcttggttttgcagtagatacttg

SEQ ID NO: 4243544 - DNA, 25 bp, Homo sapien
gattgaatgagatataatctctgcc

SEQ ID NO: 4243545 - DNA, 25 bp, Homo sapien
ttttgcagtagatacttgagataga

SEQ ID NO: 4243546 - DNA, 25 bp, Homo sapien
tacttgagatagaagattgaatgag

SEQ ID NO: 4243547 - DNA, 25 bp, Homo sapien
tgtcctgttgtgcaaattctgtctt

SEQ ID NO: 4243548 - DNA, 25 bp, Homo sapien
gtcctgttgtgcaaattctgtcttt

SEQ ID NO: 4243549 - DNA, 25 bp, Homo sapien
ttgtcctgttgtgcaaattctgtct

SEQ ID NO: 4243550 - DNA, 25 bp, Homo sapien
gttgaggaggtggagaatccaggca

SEQ ID NO: 4243551 - DNA, 25 bp, Homo sapien
gggttgaggaggtggagaatccagg

SEQ ID NO: 4243552 - DNA, 25 bp, Homo sapien
tggggttgaggaggtggagaatcca

SEQ ID NO: 4243553 - DNA, 25 bp, Homo sapien
ctggggttgaggaggtggagaatcc

SEQ ID NO: 4243554 - DNA, 25 bp, Homo sapien
ttgagagaggcaatatttaaaaatg

SEQ ID NO: 4243555 - DNA, 25 bp, Homo sapien
tgagagaggcaatatttaaaaatga

SEQ ID NO: 4243556 - DNA, 25 bp, Homo sapien
tgagtccactatgaatccaccctgg

SEQ ID NO: 4243557 - DNA, 25 bp, Homo sapien
taatgaggctagtccacctacatgg

SEQ ID NO: 4243558 - DNA, 25 bp, Homo sapien
tcaagtcagcaagtagaatccaggg

SEQ ID NO: 4243559 - DNA, 25 bp, Homo sapien
caacccagtgagagagcacgtgcat

SEQ ID NO: 4243560 - DNA, 25 bp, Homo sapien
cacgataggccgtcttcaagttgaa

SEQ ID NO: 4243561 - DNA, 25 bp, Homo sapien
taatcacgaggtaaagtctcacgat

SEQ ID NO: 4243562 - DNA, 25 bp, Homo sapien
gcgctcctgccaaaacactggtgta

SEQ ID NO: 4243563 - DNA, 25 bp, Homo sapien
aaaggcccgagcgctcctgccaaaa

SEQ ID NO: 4243564 - DNA, 25 bp, Homo sapien
tttagtcgtttgtcccatagtctgc

SEQ ID NO: 4243565 - DNA, 25 bp, Homo sapien
tctggagggcatttagtcgtttgtc

SEQ ID NO: 4243566 - DNA, 25 bp, Homo sapien
tcccatagtctgctggcagttctgt

SEQ ID NO: 4243567 - DNA, 25 bp, Homo sapien
gactctggaacgtctggagggcatt

SEQ ID NO: 4243568 - DNA, 25 bp, Homo sapien
actatcccagtatcatgataaaatg

SEQ ID NO: 4243569 - DNA, 25 bp, Homo sapien
ccagtatcatgataaaatggtctac

SEQ ID NO: 4243570 - DNA, 25 bp, Homo sapien
tatcccagtatcatgataaaatggt

SEQ ID NO: 4243571 - DNA, 25 bp, Homo sapien
tcccagtatcatgataaaatggtct

SEQ ID NO: 4243572 - DNA, 25 bp, Homo sapien
cctagtctatgagctggtcacatca

SEQ ID NO: 4243573 - DNA, 25 bp, Homo sapien
gactggcagagttcctcttctaggg

SEQ ID NO: 4243574 - DNA, 25 bp, Homo sapien
tatatggtctagctttcagtgcagg

SEQ ID NO: 4243575 - DNA, 25 bp, Homo sapien
tattacatggtataggccctagtct

SEQ ID NO: 4243576 - DNA, 25 bp, Homo sapien
cagtcatcaccctctaagagcttgg

SEQ ID NO: 4243577 - DNA, 25 bp, Homo sapien
tggaaagaactctgactaccggtac

SEQ ID NO: 4243578 - DNA, 25 bp, Homo sapien
gataatgttccttcaaaccaaagct

SEQ ID NO: 4243579 - DNA, 25 bp, Homo sapien
cccgagaagaacaggaactacgtat

SEQ ID NO: 4243580 - DNA, 25 bp, Homo sapien
aaacttgggcaagggtctagactca

SEQ ID NO: 4243581 - DNA, 25 bp, Homo sapien
tagagactccctaagaaacctgcat

SEQ ID NO: 4243582 - DNA, 25 bp, Homo sapien
tctgcacgaccttctagcccaagtg

SEQ ID NO: 4243583 - DNA, 25 bp, Homo sapien
tatcagagacctaagcgaaacgcca

SEQ ID NO: 4243584 - DNA, 25 bp, Homo sapien
gcagtttccgaagacctattccgtc

SEQ ID NO: 4243585 - DNA, 25 bp, Homo sapien
ctgagacgcaggttcacgcgcagtt

SEQ ID NO: 4243586 - DNA, 25 bp, Homo sapien
cctgcttccggctggcgactttgaa

SEQ ID NO: 4243587 - DNA, 25 bp, Homo sapien
taatgatgctttcgcttaaagccga

SEQ ID NO: 4243588 - DNA, 25 bp, Homo sapien
tgcgcccgcggctgcaagcgcccgc

SEQ ID NO: 4243589 - DNA, 25 bp, Homo sapien
ggcaacgagccggtgaacgaggcga

SEQ ID NO: 4243590 - DNA, 25 bp, Homo sapien
gggagaggggccgacggcgtcagcc

SEQ ID NO: 4243591 - DNA, 25 bp, Homo sapien
gccggtgaacgaggcgaggcccgtg

SEQ ID NO: 4243592 - DNA, 25 bp, Homo sapien
gatctaccgaactctcggcggtcca

SEQ ID NO: 4243593 - DNA, 25 bp, Homo sapien
aattgacaaggcactgaaagtattg

SEQ ID NO: 4243594 - DNA, 25 bp, Homo sapien
aagtcagagccttgggaaggatcta

SEQ ID NO: 4243595 - DNA, 25 bp, Homo sapien
gggtataattgacaaggcactgaaa

SEQ ID NO: 4243596 - DNA, 25 bp, Homo sapien
ccttgagctccacgcggggacagac

SEQ ID NO: 4243597 - DNA, 25 bp, Homo sapien
gccttgagctccacgcggggacaga

SEQ ID NO: 4243598 - DNA, 25 bp, Homo sapien
gagccttgagctccacgcggggaca

SEQ ID NO: 4243599 - DNA, 25 bp, Homo sapien
agccttgagctccacgcggggacag

SEQ ID NO: 4243600 - DNA, 25 bp, Homo sapien
ccttgagctccacgcggggacagac

SEQ ID NO: 4243601 - DNA, 25 bp, Homo sapien
gagccttgagctccacgcggggaca

SEQ ID NO: 4243602 - DNA, 25 bp, Homo sapien
gccttgagctccacgcggggacaga

SEQ ID NO: 4243603 - DNA, 25 bp, Homo sapien
agccttgagctccacgcggggacag

SEQ ID NO: 4243604 - DNA, 25 bp, Homo sapien
gcagcctcaggacgtttgccaggtg

SEQ ID NO: 4243605 - DNA, 25 bp, Homo sapien
cctcaggacgtttgccaggtggcct

SEQ ID NO: 4243606 - DNA, 25 bp, Homo sapien
cagcccgtgagccttgagcccagaa

SEQ ID NO: 4243607 - DNA, 25 bp, Homo sapien
ggtggcctggaatgtgagggaagcc

SEQ ID NO: 4243608 - DNA, 25 bp, Homo sapien
tcagaagcgaggaaagtttgccggc

SEQ ID NO: 4243609 - DNA, 25 bp, Homo sapien
agagcctggccgtgagtgaacgact

SEQ ID NO: 4243610 - DNA, 25 bp, Homo sapien
aggaacagagctggcgctgagttcc

SEQ ID NO: 4243611 - DNA, 25 bp, Homo sapien
gtttgccggcgagtgtcctttgtgc

SEQ ID NO: 4243612 - DNA, 25 bp, Homo sapien
ccacaaggcttctggttaggaccag

SEQ ID NO: 4243613 - DNA, 25 bp, Homo sapien
catcttgtatcttgaccaaaccaca

SEQ ID NO: 4243614 - DNA, 25 bp, Homo sapien
ccagattagaacagtgcagtttaac

SEQ ID NO: 4243615 - DNA, 25 bp, Homo sapien
taattcttagtatcatcgtcatcat

SEQ ID NO: 4243616 - DNA, 25 bp, Homo sapien
tcacctctgagaacactctgatgag

SEQ ID NO: 4243617 - DNA, 25 bp, Homo sapien
gacttcaagagtttgagtcacctct

SEQ ID NO: 4243618 - DNA, 25 bp, Homo sapien
tagagcaaagccatggctacctctg

SEQ ID NO: 4243619 - DNA, 25 bp, Homo sapien
tctgtctttgcagttaccaggcccc

SEQ ID NO: 4243620 - DNA, 25 bp, Homo sapien
caactgacactagatttcatcagag

SEQ ID NO: 4243621 - DNA, 25 bp, Homo sapien
tcaactgacactagatttcatcaga

SEQ ID NO: 4243622 - DNA, 25 bp, Homo sapien
aactgacactagatttcatcagagt

SEQ ID NO: 4243623 - DNA, 25 bp, Homo sapien
gaagggttggattttgaaggcagcc

SEQ ID NO: 4243624 - DNA, 25 bp, Homo sapien
gccacttgatactggggagtttgca

SEQ ID NO: 4243625 - DNA, 25 bp, Homo sapien
gagtttgcaagttgagccttcctga

SEQ ID NO: 4243626 - DNA, 25 bp, Homo sapien
tcaaaaatgacatggcctttgaaaa

SEQ ID NO: 4243627 - DNA, 25 bp, Homo sapien
gggagaagaagactttgctgtgcac

SEQ ID NO: 4243628 - DNA, 25 bp, Homo sapien
ggggagaagaagactttgctgtgca

SEQ ID NO: 4243629 - DNA, 25 bp, Homo sapien
cggggggagaagaagactttgctgt

SEQ ID NO: 4243630 - DNA, 25 bp, Homo sapien
gggggagaagaagactttgctgtgc

SEQ ID NO: 4243631 - DNA, 25 bp, Homo sapien
gttaagtatcacaatcagcactggg

SEQ ID NO: 4243632 - DNA, 25 bp, Homo sapien
catctgaaagcccttgttaagtatc

SEQ ID NO: 4243633 - DNA, 25 bp, Homo sapien
ccttcagggacaggaggatccttct

SEQ ID NO: 4243634 - DNA, 25 bp, Homo sapien
cagaagccgcattcttaactttatg

SEQ ID NO: 4243635 - DNA, 25 bp, Homo sapien
atcttgcctcatggagtagctacag

SEQ ID NO: 4243636 - DNA, 25 bp, Homo sapien
tggtgttgaggcaatctatttttct

SEQ ID NO: 4243637 - DNA, 25 bp, Homo sapien
catggagtagctacaggcaatgttg

SEQ ID NO: 4243638 - DNA, 25 bp, Homo sapien
tagctacaggcaatgttggtgttga

SEQ ID NO: 4243639 - DNA, 25 bp, Homo sapien
gcactatagcaagacaaacaccagg

SEQ ID NO: 4243640 - DNA, 25 bp, Homo sapien
tgccagcaggtgagcagtacatacc

SEQ ID NO: 4243641 - DNA, 25 bp, Homo sapien
tactttagcaagtgaatggcccagt

SEQ ID NO: 4243642 - DNA, 25 bp, Homo sapien
gaaagcaagacaaacactggatcca

SEQ ID NO: 4243643 - DNA, 25 bp, Homo sapien
tactagatttgcgagtgactatgcc

SEQ ID NO: 4243644 - DNA, 25 bp, Homo sapien
agatactttgtagcctttagcaccc

SEQ ID NO: 4243645 - DNA, 25 bp, Homo sapien
taactgagctagaaaagcattggct

SEQ ID NO: 4243646 - DNA, 25 bp, Homo sapien
tgaaataattcatgccacggacctg

SEQ ID NO: 4243647 - DNA, 25 bp, Homo sapien
gtttgattctacacccaacctggaa

SEQ ID NO: 4243648 - DNA, 25 bp, Homo sapien
gcaataacatcgcaaagactgtgga

SEQ ID NO: 4243649 - DNA, 25 bp, Homo sapien
tactaacattaaggaggtcgggctg

SEQ ID NO: 4243650 - DNA, 25 bp, Homo sapien
gaagccaccactgttgattgcaatg

SEQ ID NO: 4243651 - DNA, 25 bp, Homo sapien
gaagccatccgtagaaagtactttg

SEQ ID NO: 4243652 - DNA, 25 bp, Homo sapien
ggctagacttgttaccttcgttgaa

SEQ ID NO: 4243653 - DNA, 25 bp, Homo sapien
gtagcatgaccccttctgaagccat

SEQ ID NO: 4243654 - DNA, 25 bp, Homo sapien
taacatacggttttgaagcagcatt

SEQ ID NO: 4243655 - DNA, 25 bp, Homo sapien
cagaatcaccatccggaggtctaga

SEQ ID NO: 4243656 - DNA, 25 bp, Homo sapien
gattcagaatcaccatccggaggtc

SEQ ID NO: 4243657 - DNA, 25 bp, Homo sapien
catccggaggtctagaataattttg

SEQ ID NO: 4243658 - DNA, 25 bp, Homo sapien
ttggtgattcagaatcaccatccgg

SEQ ID NO: 4243659 - DNA, 25 bp, Homo sapien
cccatgtcgtccctatgttagagaa

SEQ ID NO: 4243660 - DNA, 25 bp, Homo sapien
gttgtgcatctaaccctctgctagg

SEQ ID NO: 4243661 - DNA, 25 bp, Homo sapien
tagtgtttactcagcctcacagagc

SEQ ID NO: 4243662 - DNA, 25 bp, Homo sapien
tgaatcctttcagttgcccatgtcg

SEQ ID NO: 4243663 - DNA, 25 bp, Homo sapien
ggaggcaccgcatctggtcctattt

SEQ ID NO: 4243664 - DNA, 25 bp, Homo sapien
ggcaccgcatctggtcctatttcct

SEQ ID NO: 4243665 - DNA, 25 bp, Homo sapien
ggcaggaggcaccgcatctggtcct

SEQ ID NO: 4243666 - DNA, 25 bp, Homo sapien
caggaggcaccgcatctggtcctat

SEQ ID NO: 4243667 - DNA, 25 bp, Homo sapien
gtgctcccaacccgatatgtctcat

SEQ ID NO: 4243668 - DNA, 25 bp, Homo sapien
tcactcgccaaatgggtgctcccaa

SEQ ID NO: 4243669 - DNA, 25 bp, Homo sapien
ttctcactcgccaaatgggtgctcc

SEQ ID NO: 4243670 - DNA, 25 bp, Homo sapien
gggtgctcccaacccgatatgtctc

SEQ ID NO: 4243671 - DNA, 25 bp, Homo sapien
cttgtttcagccatgacttgtcaaa

SEQ ID NO: 4243672 - DNA, 25 bp, Homo sapien
ttgtttcagccatgacttgtcaaat

SEQ ID NO: 4243673 - DNA, 25 bp, Homo sapien
tgctcataaccaggatctgtctcat

SEQ ID NO: 4243674 - DNA, 25 bp, Homo sapien
tgtgatatgctcataaccaggatct

SEQ ID NO: 4243675 - DNA, 25 bp, Homo sapien
tcaccctgtgatatgctcataacca

SEQ ID NO: 4243676 - DNA, 25 bp, Homo sapien
cataaccaggatctgtctcataatc

SEQ ID NO: 4243677 - DNA, 25 bp, Homo sapien
tgggttcttgttatgctcatcagcg

SEQ ID NO: 4243678 - DNA, 25 bp, Homo sapien
gatttcccctcttcacataggtaca

SEQ ID NO: 4243679 - DNA, 25 bp, Homo sapien
tatggatgctgcagttgggttcttg

SEQ ID NO: 4243680 - DNA, 25 bp, Homo sapien
tcctgaatgagtctagatttcccct

SEQ ID NO: 4243681 - DNA, 25 bp, Homo sapien
agatgacacattagtgggtgcagcg

SEQ ID NO: 4243682 - DNA, 25 bp, Homo sapien
caccagcatggcacatgtatacata

SEQ ID NO: 4243683 - DNA, 25 bp, Homo sapien
catgtaccctaaaacttagagtata

SEQ ID NO: 4243684 - DNA, 25 bp, Homo sapien
tgtaactaacctgcacaatgtgcac

SEQ ID NO: 4243685 - DNA, 25 bp, Homo sapien
ccctggatgtcaagggaacttggct

SEQ ID NO: 4243686 - DNA, 25 bp, Homo sapien
tcagatatggtgcaaaagcatgacc

SEQ ID NO: 4243687 - DNA, 25 bp, Homo sapien
tactaatggaaactaccgctattca

SEQ ID NO: 4243688 - DNA, 25 bp, Homo sapien
gcgaagcaggctttagtctcaaact

SEQ ID NO: 4243689 - DNA, 25 bp, Homo sapien
tagaacacataccaccctgagatcc

SEQ ID NO: 4243690 - DNA, 25 bp, Homo sapien
attagcaataaagcactgtgacagg

SEQ ID NO: 4243691 - DNA, 25 bp, Homo sapien
cacttccactgcattgcaattggga

SEQ ID NO: 4243692 - DNA, 25 bp, Homo sapien
gagcagaggcagtcaatttggtttg

SEQ ID NO: 4243693 - DNA, 25 bp, Homo sapien
gctgaagactgaagcactttatgag

SEQ ID NO: 4243694 - DNA, 25 bp, Homo sapien
gttctgacaacagttgtagctgaag

SEQ ID NO: 4243695 - DNA, 25 bp, Homo sapien
aagactgaagcactttatgagaaag

SEQ ID NO: 4243696 - DNA, 25 bp, Homo sapien
gacaacagttgtagctgaagactga

SEQ ID NO: 4243697 - DNA, 25 bp, Homo sapien
cagtaccaaaatcatatttggatat

SEQ ID NO: 4243698 - DNA, 25 bp, Homo sapien
ggcagtacacactgctccaaattct

SEQ ID NO: 4243699 - DNA, 25 bp, Homo sapien
tgtggcagtacacactgctccaaat

SEQ ID NO: 4243700 - DNA, 25 bp, Homo sapien
cagttattgtggcagtacacactgc

SEQ ID NO: 4243701 - DNA, 25 bp, Homo sapien
tattgtggcagtacacactgctcca

SEQ ID NO: 4243702 - DNA, 25 bp, Homo sapien
tttgttcatgatctgtaaaatctcc

SEQ ID NO: 4243703 - DNA, 25 bp, Homo sapien
cacctggtccaacaaatttttctca

SEQ ID NO: 4243704 - DNA, 25 bp, Homo sapien
ttttaagttatatccacctggtcca

SEQ ID NO: 4243705 - DNA, 25 bp, Homo sapien
cattttgataatggaacctgaacag

SEQ ID NO: 4243706 - DNA, 25 bp, Homo sapien
agatcggttttggtggccaatccca

SEQ ID NO: 4243707 - DNA, 25 bp, Homo sapien
caattcccagaatatctgttagcaa

SEQ ID NO: 4243708 - DNA, 25 bp, Homo sapien
ttggtggccaatcccattgctacac

SEQ ID NO: 4243709 - DNA, 25 bp, Homo sapien
ttcaattcccagaatatctgttagc

SEQ ID NO: 4243710 - DNA, 25 bp, Homo sapien
ttaaattggaagccctgaatccatt

SEQ ID NO: 4243711 - DNA, 25 bp, Homo sapien
aaattggaagccctgaatccattaa

SEQ ID NO: 4243712 - DNA, 25 bp, Homo sapien
attggaagccctgaatccattaatg

SEQ ID NO: 4243713 - DNA, 25 bp, Homo sapien
gaatccattaatgctaaacttccac

SEQ ID NO: 4243714 - DNA, 25 bp, Homo sapien
catagaagatgacccatttgactct

SEQ ID NO: 4243715 - DNA, 25 bp, Homo sapien
tagaagatgacccatttgactctag

SEQ ID NO: 4243716 - DNA, 25 bp, Homo sapien
ccatagaagatgacccatttgactc

SEQ ID NO: 4243717 - DNA, 25 bp, Homo sapien
ttatctcatatagatcgacctctgg

SEQ ID NO: 4243718 - DNA, 25 bp, Homo sapien
ttatattccgaagtaaagtcaaatc

SEQ ID NO: 4243719 - DNA, 25 bp, Homo sapien
gaggaaactcatagtgcagcatgaa

SEQ ID NO: 4243720 - DNA, 25 bp, Homo sapien
taactcgatccaacttaatactgga

SEQ ID NO: 4243721 - DNA, 25 bp, Homo sapien
aaaaactgcatagagtctctccata

SEQ ID NO: 4243722 - DNA, 25 bp, Homo sapien
aaaactgcatagagtctctccatag

SEQ ID NO: 4243723 - DNA, 25 bp, Homo sapien
taaaaactgcatagagtctctccat

SEQ ID NO: 4243724 - DNA, 25 bp, Homo sapien
gtaaaaactgcatagagtctctcca

SEQ ID NO: 4243725 - DNA, 25 bp, Homo sapien
tgaggtgtcctcttggtaacaccaa

SEQ ID NO: 4243726 - DNA, 25 bp, Homo sapien
atctcttgtgaaggggtaaataact

SEQ ID NO: 4243727 - DNA, 25 bp, Homo sapien
tgtgaaggggtaaataacttctgag

SEQ ID NO: 4243728 - DNA, 25 bp, Homo sapien
ccaatttcttttaccagctgctgga

SEQ ID NO: 4243729 - DNA, 25 bp, Homo sapien
ctgaattatttgctgggtatatttc

SEQ ID NO: 4243730 - DNA, 25 bp, Homo sapien
gaattatttgctgggtatatttcac

SEQ ID NO: 4243731 - DNA, 25 bp, Homo sapien
tatttgctgggtatatttcactccc

SEQ ID NO: 4243732 - DNA, 25 bp, Homo sapien
tttgctgggtatatttcactcccac

SEQ ID NO: 4243733 - DNA, 25 bp, Homo sapien
tttgatagcgtggcaaaagtcctgc

SEQ ID NO: 4243734 - DNA, 25 bp, Homo sapien
atagcgtggcaaaagtcctgctgta

SEQ ID NO: 4243735 - DNA, 25 bp, Homo sapien
aaagtcctgctgtaaaatgttctct

SEQ ID NO: 4243736 - DNA, 25 bp, Homo sapien
gtggcaaaagtcctgctgtaaaatg

SEQ ID NO: 4243737 - DNA, 25 bp, Homo sapien
tctgacttttaggtgctccagcaac

SEQ ID NO: 4243738 - DNA, 25 bp, Homo sapien
tgacttttaggtgctccagcaacca

SEQ ID NO: 4243739 - DNA, 25 bp, Homo sapien
ctgacttttaggtgctccagcaacc

SEQ ID NO: 4243740 - DNA, 25 bp, Homo sapien
ctacatttaaagtactagaagacat

SEQ ID NO: 4243741 - DNA, 25 bp, Homo sapien
ttcttgttgggttaacaacacattc

SEQ ID NO: 4243742 - DNA, 25 bp, Homo sapien
atttaaagtactagaagacatttct

SEQ ID NO: 4243743 - DNA, 25 bp, Homo sapien
ttaacaacacattctccatcagtca

SEQ ID NO: 4243744 - DNA, 25 bp, Homo sapien
taatgagagggctacagaggttgcc

SEQ ID NO: 4243745 - DNA, 25 bp, Homo sapien
tcaacgtgtaagaatttctttatca

SEQ ID NO: 4243746 - DNA, 25 bp, Homo sapien
gccagctggaaagataggtctaact

SEQ ID NO: 4243747 - DNA, 25 bp, Homo sapien
gaacaatctactattcaacgtgtaa

SEQ ID NO: 4243748 - DNA, 25 bp, Homo sapien
ctactgcagcagccttttgtccgta

SEQ ID NO: 4243749 - DNA, 25 bp, Homo sapien
gcagccttttgtccgtagtcaacca

SEQ ID NO: 4243750 - DNA, 25 bp, Homo sapien
tgcagcagccttttgtccgtagtca

SEQ ID NO: 4243751 - DNA, 25 bp, Homo sapien
cagcagccttttgtccgtagtcaac

SEQ ID NO: 4243752 - DNA, 25 bp, Homo sapien
gactgtattacagcagagccatttg

SEQ ID NO: 4243753 - DNA, 25 bp, Homo sapien
tgagaccctgtgctactcaatagtg

SEQ ID NO: 4243754 - DNA, 25 bp, Homo sapien
taatttcctgttgcccaagtccatg

SEQ ID NO: 4243755 - DNA, 25 bp, Homo sapien
ccatggccacagcttgagaccctgt

SEQ ID NO: 4243756 - DNA, 25 bp, Homo sapien
aactggatgagtgcccgatcccacc

SEQ ID NO: 4243757 - DNA, 25 bp, Homo sapien
tgcaactggatgagtgcccgatccc

SEQ ID NO: 4243758 - DNA, 25 bp, Homo sapien
gcaactggatgagtgcccgatccca

SEQ ID NO: 4243759 - DNA, 25 bp, Homo sapien
ctgcaactggatgagtgcccgatcc

SEQ ID NO: 4243760 - DNA, 25 bp, Homo sapien
acatgaattgcacccggagcccaca

SEQ ID NO: 4243761 - DNA, 25 bp, Homo sapien
cagcctcttccactactgactgagc

SEQ ID NO: 4243762 - DNA, 25 bp, Homo sapien
gattaatggaaccacaacaccgaca

SEQ ID NO: 4243763 - DNA, 25 bp, Homo sapien
tgagctcttccatcaaacgactgat

SEQ ID NO: 4243764 - DNA, 25 bp, Homo sapien
ggacagtagcatcggaaagttcatt

SEQ ID NO: 4243765 - DNA, 25 bp, Homo sapien
ctggacagtagcatcggaaagttca

SEQ ID NO: 4243766 - DNA, 25 bp, Homo sapien
acagtagcatcggaaagttcattac

SEQ ID NO: 4243767 - DNA, 25 bp, Homo sapien
gacagtagcatcggaaagttcatta

SEQ ID NO: 4243768 - DNA, 25 bp, Homo sapien
gagagtctctgcacaactttccaca

SEQ ID NO: 4243769 - DNA, 25 bp, Homo sapien
ttccacatttggaacccaaggacat

SEQ ID NO: 4243770 - DNA, 25 bp, Homo sapien
cagctttggaaagcggaaaacttct

SEQ ID NO: 4243771 - DNA, 25 bp, Homo sapien
tacaacagcgagtgacaaatgcagc

SEQ ID NO: 4243772 - DNA, 25 bp, Homo sapien
ctttgcgaaagatagggcacaggca

SEQ ID NO: 4243773 - DNA, 25 bp, Homo sapien
gaatggaggacaagacatttcagcc

SEQ ID NO: 4243774 - DNA, 25 bp, Homo sapien
caagcatcctgtattctggaacatt

SEQ ID NO: 4243775 - DNA, 25 bp, Homo sapien
tactgtcaccaaggcacatattttc

SEQ ID NO: 4243776 - DNA, 25 bp, Homo sapien
gctgtccaaggttctttgaaagtag

SEQ ID NO: 4243777 - DNA, 25 bp, Homo sapien
acagtgtgcttgtttgcctggttgt

SEQ ID NO: 4243778 - DNA, 25 bp, Homo sapien
tctctcattgtctctggtaggaaca

SEQ ID NO: 4243779 - DNA, 25 bp, Homo sapien
tgtctgtttaactgatctgtaggga

SEQ ID NO: 4243780 - DNA, 25 bp, Homo sapien
tgaggtctatgttcaaacaggagcc

SEQ ID NO: 4243781 - DNA, 25 bp, Homo sapien
ggaagactgagagaatcatacccaa

SEQ ID NO: 4243782 - DNA, 25 bp, Homo sapien
caggagcctggacatgactgagata

SEQ ID NO: 4243783 - DNA, 25 bp, Homo sapien
caaacccagctttacagtttggaag

SEQ ID NO: 4243784 - DNA, 25 bp, Homo sapien
ggttttgtccagtgatgcacagcct

SEQ ID NO: 4243785 - DNA, 25 bp, Homo sapien
ctcgctcaagtgtgcgatccaagga

SEQ ID NO: 4243786 - DNA, 25 bp, Homo sapien
cccaagaaagtggttttgtccagtg

SEQ ID NO: 4243787 - DNA, 25 bp, Homo sapien
tctactgtccacactcgctcaagtg

SEQ ID NO: 4243788 - DNA, 25 bp, Homo sapien
agtcctcaaggacaagtctcaattc

SEQ ID NO: 4243789 - DNA, 25 bp, Homo sapien
aaggacaagtctcaattccaggaca

SEQ ID NO: 4243790 - DNA, 25 bp, Homo sapien
gtctcaattccaggacactagccat

SEQ ID NO: 4243791 - DNA, 25 bp, Homo sapien
catctttgacagtcctcaaggacaa

SEQ ID NO: 4243792 - DNA, 25 bp, Homo sapien
cagatatcaactgaaggtctgccat

SEQ ID NO: 4243793 - DNA, 25 bp, Homo sapien
tgcagatatcaactgaaggtctgcc

SEQ ID NO: 4243794 - DNA, 25 bp, Homo sapien
tcaatgcagatatcaactgaaggtc

SEQ ID NO: 4243795 - DNA, 25 bp, Homo sapien
gtgctcaatgcagatatcaactgaa

SEQ ID NO: 4243796 - DNA, 25 bp, Homo sapien
gggcatttgggacaacatactggaa

SEQ ID NO: 4243797 - DNA, 25 bp, Homo sapien
tcaatgcaaggtctacagtcagatg

SEQ ID NO: 4243798 - DNA, 25 bp, Homo sapien
gaacaggcttggttcctcaaaagac

SEQ ID NO: 4243799 - DNA, 25 bp, Homo sapien
gagctttcatgggacagatttctag

SEQ ID NO: 4243800 - DNA, 25 bp, Homo sapien
cttccgcatttcaagatgctttttc

SEQ ID NO: 4243801 - DNA, 25 bp, Homo sapien
ccatctcagaaggtactgtgcaaag

SEQ ID NO: 4243802 - DNA, 25 bp, Homo sapien
gaaggtactgtgcaaagccactgtg

SEQ ID NO: 4243803 - DNA, 25 bp, Homo sapien
taatagtttcttccgcatttcaaga

SEQ ID NO: 4243804 - DNA, 25 bp, Homo sapien
tgctcatcttgatacctatgcttca

SEQ ID NO: 4243805 - DNA, 25 bp, Homo sapien
tctccatctgctcatcttgatacct

SEQ ID NO: 4243806 - DNA, 25 bp, Homo sapien
atcttgatacctatgcttcactggg

SEQ ID NO: 4243807 - DNA, 25 bp, Homo sapien
catctgctcatcttgatacctatgc

SEQ ID NO: 4243808 - DNA, 25 bp, Homo sapien
tactttaacacaatatgttcaaaat

SEQ ID NO: 4243809 - DNA, 25 bp, Homo sapien
taataatatactttaacacaatatg

SEQ ID NO: 4243810 - DNA, 25 bp, Homo sapien
tacattatttatttcatactaagtc

SEQ ID NO: 4243811 - DNA, 25 bp, Homo sapien
acattatttatttcatactaagtct

SEQ ID NO: 4243812 - DNA, 25 bp, Homo sapien
acatgtcaaacgttcaatagctgca

SEQ ID NO: 4243813 - DNA, 25 bp, Homo sapien
tagctgcatattgctgatgcctacg

SEQ ID NO: 4243814 - DNA, 25 bp, Homo sapien
ctagagatgagaaggccttccacct

SEQ ID NO: 4243815 - DNA, 25 bp, Homo sapien
gatgcctacgtattgagcagcatgg

SEQ ID NO: 4243816 - DNA, 25 bp, Homo sapien
cactaaccgcgaattcaagatcagc

SEQ ID NO: 4243817 - DNA, 25 bp, Homo sapien
agcccttcccacactaaccgcgaat

SEQ ID NO: 4243818 - DNA, 25 bp, Homo sapien
tcagcccaagaagtaacaacatcca

SEQ ID NO: 4243819 - DNA, 25 bp, Homo sapien
ttcccacactaaccgcgaattcaag

SEQ ID NO: 4243820 - DNA, 25 bp, Homo sapien
aaagcagaggagtgtattggaactg

SEQ ID NO: 4243821 - DNA, 25 bp, Homo sapien
gacgttgcaacacctcggcatcaac

SEQ ID NO: 4243822 - DNA, 25 bp, Homo sapien
ggcactgtgtggctgacgttgcaac

SEQ ID NO: 4243823 - DNA, 25 bp, Homo sapien
tgtgtggctgacgttgcaacacctc

SEQ ID NO: 4243824 - DNA, 25 bp, Homo sapien
gcttcgtcacacttcaacagaggat

SEQ ID NO: 4243825 - DNA, 25 bp, Homo sapien
tacagcctgcttcgtcacacttcaa

SEQ ID NO: 4243826 - DNA, 25 bp, Homo sapien
caacagaggattaacgtctggtggg

SEQ ID NO: 4243827 - DNA, 25 bp, Homo sapien
ctgaagtccaatgtacagcctgctt

SEQ ID NO: 4243828 - DNA, 25 bp, Homo sapien
cccactaggaagctttccacccatc

SEQ ID NO: 4243829 - DNA, 25 bp, Homo sapien
caggaacccactaggaagctttcca

SEQ ID NO: 4243830 - DNA, 25 bp, Homo sapien
acccactaggaagctttccacccat

SEQ ID NO: 4243831 - DNA, 25 bp, Homo sapien
tatcttactgtactatgtctcaaaa

SEQ ID NO: 4243832 - DNA, 25 bp, Homo sapien
tctgtgtgtacttactactaccagt

SEQ ID NO: 4243833 - DNA, 25 bp, Homo sapien
gtgtgtacttactactaccagtaag

SEQ ID NO: 4243834 - DNA, 25 bp, Homo sapien
attacagtgtaatactattctgtgg

SEQ ID NO: 4243835 - DNA, 25 bp, Homo sapien
tagactgctagggtttccgggtcac

SEQ ID NO: 4243836 - DNA, 25 bp, Homo sapien
agactgctagggtttccgggtcact

SEQ ID NO: 4243837 - DNA, 25 bp, Homo sapien
ctccactcttctcccggtagactgc

SEQ ID NO: 4243838 - DNA, 25 bp, Homo sapien
tctcccggtagactgctagggtttc

SEQ ID NO: 4243839 - DNA, 25 bp, Homo sapien
agaaaatctctccaatgtatctctc

SEQ ID NO: 4243840 - DNA, 25 bp, Homo sapien
gaaaatctctccaatgtatctctca

SEQ ID NO: 4243841 - DNA, 25 bp, Homo sapien
aaatctctccaatgtatctctcaaa

SEQ ID NO: 4243842 - DNA, 25 bp, Homo sapien
atctctccaatgtatctctcaaaga

SEQ ID NO: 4243843 - DNA, 25 bp, Homo sapien
tcttgtactgacatccaggatactg

SEQ ID NO: 4243844 - DNA, 25 bp, Homo sapien
gatattctggttttcttgtactgac

SEQ ID NO: 4243845 - DNA, 25 bp, Homo sapien
ggttttcttgtactgacatccagga

SEQ ID NO: 4243846 - DNA, 25 bp, Homo sapien
tgacatccaggatactgtccttgga

SEQ ID NO: 4243847 - DNA, 25 bp, Homo sapien
gagtggggaagaccatatattttcc

SEQ ID NO: 4243848 - DNA, 25 bp, Homo sapien
aaggagtggggaagaccatatattt

SEQ ID NO: 4243849 - DNA, 25 bp, Homo sapien
ggagtggggaagaccatatattttc

SEQ ID NO: 4243850 - DNA, 25 bp, Homo sapien
agtggggaagaccatatattttcca

SEQ ID NO: 4243851 - DNA, 25 bp, Homo sapien
aagtcgaagatttgccctaggtcta

SEQ ID NO: 4243852 - DNA, 25 bp, Homo sapien
cgtgatctgagtctaggtcccagtg

SEQ ID NO: 4243853 - DNA, 25 bp, Homo sapien
gcatgacgtctctccaagtgaagtc

SEQ ID NO: 4243854 - DNA, 25 bp, Homo sapien
tatgaatccagtccccgtgatctga

SEQ ID NO: 4243855 - DNA, 25 bp, Homo sapien
aatataaaactctttagccttgagt

SEQ ID NO: 4243856 - DNA, 25 bp, Homo sapien
ttgagttctgagcctttaataatgt

SEQ ID NO: 4243857 - DNA, 25 bp, Homo sapien
taaaactctttagccttgagttctg

SEQ ID NO: 4243858 - DNA, 25 bp, Homo sapien
aaaactttcgatgacacagatttgc

SEQ ID NO: 4243859 - DNA, 25 bp, Homo sapien
ccacactggaagtaccagaagcaaa

SEQ ID NO: 4243860 - DNA, 25 bp, Homo sapien
gaagcaaatgtcttgccttggatat

SEQ ID NO: 4243861 - DNA, 25 bp, Homo sapien
ccttggatatctcaaactcactttg

SEQ ID NO: 4243862 - DNA, 25 bp, Homo sapien
gaaaaacttccttatagtggcagga

SEQ ID NO: 4243863 - DNA, 25 bp, Homo sapien
tccaacagattagctcaaactgcct

SEQ ID NO: 4243864 - DNA, 25 bp, Homo sapien
taccctttggatcactgctgacacc

SEQ ID NO: 4243865 - DNA, 25 bp, Homo sapien
gactatgtgcctattcttttgctgg

SEQ ID NO: 4243866 - DNA, 25 bp, Homo sapien
ttttgctggtctaaaatgttcctcc

SEQ ID NO: 4243867 - DNA, 25 bp, Homo sapien
tcaaccctctcccgctgagtctcac

SEQ ID NO: 4243868 - DNA, 25 bp, Homo sapien
actcaaccctctcccgctgagtctc

SEQ ID NO: 4243869 - DNA, 25 bp, Homo sapien
tcactcaaccctctcccgctgagtc

SEQ ID NO: 4243870 - DNA, 25 bp, Homo sapien
cactcaaccctctcccgctgagtct

SEQ ID NO: 4243871 - DNA, 25 bp, Homo sapien
tgaagaagagactcagcatatgctg

SEQ ID NO: 4243872 - DNA, 25 bp, Homo sapien
ggcaactgtctccactgaagaagag

SEQ ID NO: 4243873 - DNA, 25 bp, Homo sapien
tgctgtaatgtacatctgctctggg

SEQ ID NO: 4243874 - DNA, 25 bp, Homo sapien
cttcgctggcaactgtctccactga

SEQ ID NO: 4243875 - DNA, 25 bp, Homo sapien
gatcttcctctactgaacgcctgta

SEQ ID NO: 4243876 - DNA, 25 bp, Homo sapien
caagcacaagatacggttctcatca

SEQ ID NO: 4243877 - DNA, 25 bp, Homo sapien
ggtcaataaatacgggtgtctccat

SEQ ID NO: 4243878 - DNA, 25 bp, Homo sapien
gcctttggccagcaccatactgtga

SEQ ID NO: 4243879 - DNA, 25 bp, Homo sapien
tgctggtacagacactacactcaaa

SEQ ID NO: 4243880 - DNA, 25 bp, Homo sapien
gatatggttacaacacatccgtctc

SEQ ID NO: 4243881 - DNA, 25 bp, Homo sapien
gatccatcggctttcatctatccag

SEQ ID NO: 4243882 - DNA, 25 bp, Homo sapien
cacaagggaaactgtagtggagatc

SEQ ID NO: 4243883 - DNA, 25 bp, Homo sapien
ggaactgactacagagctggcctgc

SEQ ID NO: 4243884 - DNA, 25 bp, Homo sapien
cattgcccgctggtgattagctcaa

SEQ ID NO: 4243885 - DNA, 25 bp, Homo sapien
tgctaatagctaggcacaatcgagt

SEQ ID NO: 4243886 - DNA, 25 bp, Homo sapien
ccaagggctttaggacctgtgtaca

SEQ ID NO: 4243887 - DNA, 25 bp, Homo sapien
gaacacaaacagaccaccagtggcc

SEQ ID NO: 4243888 - DNA, 25 bp, Homo sapien
accagtggccgtggcagttcatgtg

SEQ ID NO: 4243889 - DNA, 25 bp, Homo sapien
gacatgggatcaagaacacaaacag

SEQ ID NO: 4243890 - DNA, 25 bp, Homo sapien
agagccctgacatgggatcaagaac

SEQ ID NO: 4243891 - DNA, 25 bp, Homo sapien
gcacatcatcacatgctttacagag

SEQ ID NO: 4243892 - DNA, 25 bp, Homo sapien
atggaagtcaaaatatcagcactaa

SEQ ID NO: 4243893 - DNA, 25 bp, Homo sapien
tcctctgatggtcctaggcaaagca

SEQ ID NO: 4243894 - DNA, 25 bp, Homo sapien
gctgattccaaacttcgtggatgat

SEQ ID NO: 4243895 - DNA, 25 bp, Homo sapien
tttggctgtttgtcttattggtgta

SEQ ID NO: 4243896 - DNA, 25 bp, Homo sapien
ttgacttggccacacgggctctttt

SEQ ID NO: 4243897 - DNA, 25 bp, Homo sapien
taggattgacttggccacacgggct

SEQ ID NO: 4243898 - DNA, 25 bp, Homo sapien
atgatttggctgtttgtcttattgg

SEQ ID NO: 4243899 - DNA, 25 bp, Homo sapien
cacatggacacaggagggggaacat

SEQ ID NO: 4243900 - DNA, 25 bp, Homo sapien
ctcacaggtgggaactgaacaatgg

SEQ ID NO: 4243901 - DNA, 25 bp, Homo sapien
acaggtgggaactgaacaatgggaa

SEQ ID NO: 4243902 - DNA, 25 bp, Homo sapien
ggagggggaacatcacactctgggg

SEQ ID NO: 4243903 - DNA, 25 bp, Homo sapien
tattacttcccatgatcacaatagc

SEQ ID NO: 4243904 - DNA, 25 bp, Homo sapien
tacttcccctgtttacatacacaga

SEQ ID NO: 4243905 - DNA, 25 bp, Homo sapien
tggcacaggaaacactactacatac

SEQ ID NO: 4243906 - DNA, 25 bp, Homo sapien
tacacagttgtgtgatagcttctgt

SEQ ID NO: 4243907 - DNA, 25 bp, Homo sapien
gggaagtgaacatacctctggaaac

SEQ ID NO: 4243908 - DNA, 25 bp, Homo sapien
tccttgcctcatactgctgtacagc

SEQ ID NO: 4243909 - DNA, 25 bp, Homo sapien
tgcaaatcatagcatgctccggtag

SEQ ID NO: 4243910 - DNA, 25 bp, Homo sapien
taaggaaactgttcataggtctaaa

SEQ ID NO: 4243911 - DNA, 25 bp, Homo sapien
tcagtgaaaataacgataccagcgc

SEQ ID NO: 4243912 - DNA, 25 bp, Homo sapien
agtaactacttggtactgcgagtgg

SEQ ID NO: 4243913 - DNA, 25 bp, Homo sapien
taacatgaatggctcttagaccaca

SEQ ID NO: 4243914 - DNA, 25 bp, Homo sapien
gattgactactctgctcagtgaaaa

SEQ ID NO: 4243915 - DNA, 25 bp, Homo sapien
tcatacagtacctcataatgcctca

SEQ ID NO: 4243916 - DNA, 25 bp, Homo sapien
tgtaatagattacaagctctctgag

SEQ ID NO: 4243917 - DNA, 25 bp, Homo sapien
aggatgcattttgggccttacacat

SEQ ID NO: 4243918 - DNA, 25 bp, Homo sapien
taagtgatcagtactgtatgaggga

SEQ ID NO: 4243919 - DNA, 25 bp, Homo sapien
caatgcaatattcagttccaaaacc

SEQ ID NO: 4243920 - DNA, 25 bp, Homo sapien
ggataactgaacctatgaaatgtca

SEQ ID NO: 4243921 - DNA, 25 bp, Homo sapien
gcctggccgtgatagttcttattag

SEQ ID NO: 4243922 - DNA, 25 bp, Homo sapien
gtacatcccagaatattaagctcag

SEQ ID NO: 4243923 - DNA, 25 bp, Homo sapien
tgtgtggactgcaagcactattccc

SEQ ID NO: 4243924 - DNA, 25 bp, Homo sapien
tatagcttctgagaggcaaggcttc

SEQ ID NO: 4243925 - DNA, 25 bp, Homo sapien
tcatgatctcccctgctaaaagtaa

SEQ ID NO: 4243926 - DNA, 25 bp, Homo sapien
ccaccctctgggagaacaaacagct

SEQ ID NO: 4243927 - DNA, 25 bp, Homo sapien
gaccaggggtttattatcatgcagg

SEQ ID NO: 4243928 - DNA, 25 bp, Homo sapien
gtggttgggatatggcttagtttta

SEQ ID NO: 4243929 - DNA, 25 bp, Homo sapien
gagcatggaccatgacacagccatc

SEQ ID NO: 4243930 - DNA, 25 bp, Homo sapien
acttaggaatgccttgggtaagata

SEQ ID NO: 4243931 - DNA, 25 bp, Homo sapien
aattaaaagcaagatagctacttcc

SEQ ID NO: 4243932 - DNA, 25 bp, Homo sapien
gtaaaattaaaagcaagatagctac

SEQ ID NO: 4243933 - DNA, 25 bp, Homo sapien
taaaagcaagatagctacttcctag

SEQ ID NO: 4243934 - DNA, 25 bp, Homo sapien
aaattaaaagcaagatagctacttc

SEQ ID NO: 4243935 - DNA, 25 bp, Homo sapien
tacttctactagatgccctaaatta

SEQ ID NO: 4243936 - DNA, 25 bp, Homo sapien
tagaaattacttctactagatgccc

SEQ ID NO: 4243937 - DNA, 25 bp, Homo sapien
gttctgcaaatctaatgcagggtca

SEQ ID NO: 4243938 - DNA, 25 bp, Homo sapien
tgcagggtcaaaatgccactagtct

SEQ ID NO: 4243939 - DNA, 25 bp, Homo sapien
attttggtagtgaaacatcacatac

SEQ ID NO: 4243940 - DNA, 25 bp, Homo sapien
gatagtatctaatcaatagactcag

SEQ ID NO: 4243941 - DNA, 25 bp, Homo sapien
tcatagaagcaagttttatgcctta

SEQ ID NO: 4243942 - DNA, 25 bp, Homo sapien
tatagacaagttaggtatcaaaaca

SEQ ID NO: 4243943 - DNA, 25 bp, Homo sapien
gcagctgcagggatttcagttgaca

SEQ ID NO: 4243944 - DNA, 25 bp, Homo sapien
cataagaggggaccagaagttggtc

SEQ ID NO: 4243945 - DNA, 25 bp, Homo sapien
gctgcagggatttcagttgacataa

SEQ ID NO: 4243946 - DNA, 25 bp, Homo sapien
cagttgacataagaggggaccagaa

SEQ ID NO: 4243947 - DNA, 25 bp, Homo sapien
gaataactatctctaccatgtacca

SEQ ID NO: 4243948 - DNA, 25 bp, Homo sapien
aacttttcttagtcctctggtccag

SEQ ID NO: 4243949 - DNA, 25 bp, Homo sapien
taagggcagccaattgcaaactgct

SEQ ID NO: 4243950 - DNA, 25 bp, Homo sapien
caaactgctgatcccacgaattcca

SEQ ID NO: 4243951 - DNA, 25 bp, Homo sapien
attgctggcatttcccatattccat

SEQ ID NO: 4243952 - DNA, 25 bp, Homo sapien
gacttacaaggctacatgcaagaga

SEQ ID NO: 4243953 - DNA, 25 bp, Homo sapien
tagctattagacttcttgccttgct

SEQ ID NO: 4243954 - DNA, 25 bp, Homo sapien
tgccttgctcacctagacactgtca

SEQ ID NO: 4243955 - DNA, 25 bp, Homo sapien
caaagatcaaatggattcactcccc

SEQ ID NO: 4243956 - DNA, 25 bp, Homo sapien
ccaactggcttactattactcgaga

SEQ ID NO: 4243957 - DNA, 25 bp, Homo sapien
ggtagactcactagtgaccctcagg

SEQ ID NO: 4243958 - DNA, 25 bp, Homo sapien
tacaacaggtttatgtcaagggagc

SEQ ID NO: 4243959 - DNA, 25 bp, Homo sapien
tgcagtcacagaaccatcaaggtag

SEQ ID NO: 4243960 - DNA, 25 bp, Homo sapien
tcagacggatgaattgacagtaggc

SEQ ID NO: 4243961 - DNA, 25 bp, Homo sapien
catcaagggcgcagaactgaatgga

SEQ ID NO: 4243962 - DNA, 25 bp, Homo sapien
tgtcaatagccaaatacagcaagcg

SEQ ID NO: 4243963 - DNA, 25 bp, Homo sapien
tacgatgagctaaaggaacatgttc

SEQ ID NO: 4243964 - DNA, 25 bp, Homo sapien
cgcacatgtatgctccttgcagcac

SEQ ID NO: 4243965 - DNA, 25 bp, Homo sapien
gagaagtaggaacgtgtttacattg

SEQ ID NO: 4243966 - DNA, 25 bp, Homo sapien
cacgcacatgtatgctccttgcagc

SEQ ID NO: 4243967 - DNA, 25 bp, Homo sapien
acgcacatgtatgctccttgcagca

SEQ ID NO: 4243968 - DNA, 25 bp, Homo sapien
tatatacatgtagtataaatgtttg

SEQ ID NO: 4243969 - DNA, 25 bp, Homo sapien
accatgttgttcagggtgttttcaa

SEQ ID NO: 4243970 - DNA, 25 bp, Homo sapien
tttaaaagtctggaaagatagactg

SEQ ID NO: 4243971 - DNA, 25 bp, Homo sapien
gagccaccactttctgtgtgtgtat

SEQ ID NO: 4243972 - DNA, 25 bp, Homo sapien
gaccgcgcaggatcaggtatttcca

SEQ ID NO: 4243973 - DNA, 25 bp, Homo sapien
cacaatataggtagcgataaccagg

SEQ ID NO: 4243974 - DNA, 25 bp, Homo sapien
tgagaacttcgtgggacagaccgac

SEQ ID NO: 4243975 - DNA, 25 bp, Homo sapien
ggaagcacttatcccagtatctggg

SEQ ID NO: 4243976 - DNA, 25 bp, Homo sapien
cagccatggacgagaacagagcagt

SEQ ID NO: 4243977 - DNA, 25 bp, Homo sapien
caccttaaagtcgactgatggagaa

SEQ ID NO: 4243978 - DNA, 25 bp, Homo sapien
acgcttagaacaggcctcgctcatg

SEQ ID NO: 4243979 - DNA, 25 bp, Homo sapien
tggaaactggataactgagcaactc

SEQ ID NO: 4243980 - DNA, 25 bp, Homo sapien
taccggataccctgaatatagctca

SEQ ID NO: 4243981 - DNA, 25 bp, Homo sapien
caaagcatcggatattccacagcca

SEQ ID NO: 4243982 - DNA, 25 bp, Homo sapien
tattacaaaataccggataccctga

SEQ ID NO: 4243983 - DNA, 25 bp, Homo sapien
tccacagccaacaaggtttcctatt

SEQ ID NO: 4243984 - DNA, 25 bp, Homo sapien
acaggtttccccgtttagcgcacat

SEQ ID NO: 4243985 - DNA, 25 bp, Homo sapien
gcgcacatttcacgttcgctgaagg

SEQ ID NO: 4243986 - DNA, 25 bp, Homo sapien
cgtttagcgcacatttcacgttcgc

SEQ ID NO: 4243987 - DNA, 25 bp, Homo sapien
tccctatatctagaattaaacaggt

SEQ ID NO: 4243988 - DNA, 25 bp, Homo sapien
tgaacttcagcataccatcaccggc

SEQ ID NO: 4243989 - DNA, 25 bp, Homo sapien
cataaagcacatgcactgacccagg

SEQ ID NO: 4243990 - DNA, 25 bp, Homo sapien
ggaaacagagcttatgactgcccct

SEQ ID NO: 4243991 - DNA, 25 bp, Homo sapien
gaatataaaggagtcaccacacccc

SEQ ID NO: 4243992 - DNA, 25 bp, Homo sapien
tggccattgggcaggtatgtaaccc

SEQ ID NO: 4243993 - DNA, 25 bp, Homo sapien
gccattgggcaggtatgtaacccac

SEQ ID NO: 4243994 - DNA, 25 bp, Homo sapien
tttggccattgggcaggtatgtaac

SEQ ID NO: 4243995 - DNA, 25 bp, Homo sapien
ggccattgggcaggtatgtaaccca

SEQ ID NO: 4243996 - DNA, 25 bp, Homo sapien
gctccttggactggggaagactttc

SEQ ID NO: 4243997 - DNA, 25 bp, Homo sapien
catgggatcgttcaaagttctgaga

SEQ ID NO: 4243998 - DNA, 25 bp, Homo sapien
tgagaaaagcccaatgtaggtcaga

SEQ ID NO: 4243999 - DNA, 25 bp, Homo sapien
taggtcagacacgactgctccttgg

SEQ ID NO: 4244000 - DNA, 25 bp, Homo sapien
tcagtccatagtgggcaggcggtcg

SEQ ID NO: 4244001 - DNA, 25 bp, Homo sapien
tgcacagcggaatcccagattcgaa

SEQ ID NO: 4244002 - DNA, 25 bp, Homo sapien
caggtgtgttctggctccgagcagc

SEQ ID NO: 4244003 - DNA, 25 bp, Homo sapien
ttcgaagcagagctatcaggtgtgt

SEQ ID NO: 4244004 - DNA, 25 bp, Homo sapien
aaccctgcctgtatggatacttaac

SEQ ID NO: 4244005 - DNA, 25 bp, Homo sapien
tcagctgaaggctctaacccatcag

SEQ ID NO: 4244006 - DNA, 25 bp, Homo sapien
catcagatgcatattgcaccggctg

SEQ ID NO: 4244007 - DNA, 25 bp, Homo sapien
gggcagcacattcaagaactaacca

SEQ ID NO: 4244008 - DNA, 25 bp, Homo sapien
agactttgggctgacacaatggggt

SEQ ID NO: 4244009 - DNA, 25 bp, Homo sapien
taaggagactttgggctgacacaat

SEQ ID NO: 4244010 - DNA, 25 bp, Homo sapien
cttaaggagactttgggctgacaca

SEQ ID NO: 4244011 - DNA, 25 bp, Homo sapien
ggagactttgggctgacacaatggg

SEQ ID NO: 4244012 - DNA, 25 bp, Homo sapien
gatctgcatgcaatggaagctctca

SEQ ID NO: 4244013 - DNA, 25 bp, Homo sapien
tgagagcttacaatatgccagatgc

SEQ ID NO: 4244014 - DNA, 25 bp, Homo sapien
ttgagaggatagcaaggccagagcc

SEQ ID NO: 4244015 - DNA, 25 bp, Homo sapien
tactcgtcgggctgctgtgaaacaa

SEQ ID NO: 4244016 - DNA, 25 bp, Homo sapien
cttgtaaccaaatttgagatgactg

SEQ ID NO: 4244017 - DNA, 25 bp, Homo sapien
aaagttatatacacccacccctgtg

SEQ ID NO: 4244018 - DNA, 25 bp, Homo sapien
cagttcgtgggacaacaaaggtctc

SEQ ID NO: 4244019 - DNA, 25 bp, Homo sapien
tggttgacaataggtcattcacaac

SEQ ID NO: 4244020 - DNA, 25 bp, Homo sapien
atggcacatgtaggatccacctttc

SEQ ID NO: 4244021 - DNA, 25 bp, Homo sapien
cttcactcggtctttcccagaaggg

SEQ ID NO: 4244022 - DNA, 25 bp, Homo sapien
ctttcttcactcggtctttcccaga

SEQ ID NO: 4244023 - DNA, 25 bp, Homo sapien
cctatggcacatgtaggatccacct

SEQ ID NO: 4244024 - DNA, 25 bp, Homo sapien
tgcactctgtgtagtcaagagacat

SEQ ID NO: 4244025 - DNA, 25 bp, Homo sapien
caacgactgcactctgtgtagtcaa

SEQ ID NO: 4244026 - DNA, 25 bp, Homo sapien
atttttcacagcacaacgactgcac

SEQ ID NO: 4244027 - DNA, 25 bp, Homo sapien
ttcacagcacaacgactgcactctg

SEQ ID NO: 4244028 - DNA, 25 bp, Homo sapien
ggcctgtcagggggtcagagactag

SEQ ID NO: 4244029 - DNA, 25 bp, Homo sapien
gtcagggggtcagagactaggggag

SEQ ID NO: 4244030 - DNA, 25 bp, Homo sapien
aaaaaagagatcagggccgggcgca

SEQ ID NO: 4244031 - DNA, 25 bp, Homo sapien
gggtcagagactaggggagggatag

SEQ ID NO: 4244032 - DNA, 25 bp, Homo sapien
taaaatatcctctggtcgtggtggt

SEQ ID NO: 4244033 - DNA, 25 bp, Homo sapien
tttgtgtaaccaacagtctcagaag

SEQ ID NO: 4244034 - DNA, 25 bp, Homo sapien
catccttatgggatttgggagacaa

SEQ ID NO: 4244035 - DNA, 25 bp, Homo sapien
gattctccggctgtgacaaagacct

SEQ ID NO: 4244036 - DNA, 25 bp, Homo sapien
tccaagtcagggatatatgcagcaa

SEQ ID NO: 4244037 - DNA, 25 bp, Homo sapien
acttcctttgtctacacctgttagc

SEQ ID NO: 4244038 - DNA, 25 bp, Homo sapien
taggactctgaggtcttcagccact

SEQ ID NO: 4244039 - DNA, 25 bp, Homo sapien
gggttgcttgcttccctagctccaa

SEQ ID NO: 4244040 - DNA, 25 bp, Homo sapien
ttgactcacagttggcgtattttat

SEQ ID NO: 4244041 - DNA, 25 bp, Homo sapien
ggcgtattttatagcaactattcaa

SEQ ID NO: 4244042 - DNA, 25 bp, Homo sapien
tctgctcttgtgttcaactagggaa

SEQ ID NO: 4244043 - DNA, 25 bp, Homo sapien
aatctagcatctgggcctacttggg

SEQ ID NO: 4244044 - DNA, 25 bp, Homo sapien
gtaattaggatcacaacaagaatgg

SEQ ID NO: 4244045 - DNA, 25 bp, Homo sapien
tattctcacccattcttggccaaag

SEQ ID NO: 4244046 - DNA, 25 bp, Homo sapien
tcagttccaagcaagaacgccacat

SEQ ID NO: 4244047 - DNA, 25 bp, Homo sapien
gaatcacttgacctcttacattgca

SEQ ID NO: 4244048 - DNA, 25 bp, Homo sapien
tgaattcctcaaaaggctggaccct

SEQ ID NO: 4244049 - DNA, 25 bp, Homo sapien
tcctcaaaaggctggaccctgtctt

SEQ ID NO: 4244050 - DNA, 25 bp, Homo sapien
aggctggaccctgtcttcttcatct

SEQ ID NO: 4244051 - DNA, 25 bp, Homo sapien
cctgaattcctcaaaaggctggacc

SEQ ID NO: 4244052 - DNA, 25 bp, Homo sapien
aacaagtcagcatggtaccttggta

SEQ ID NO: 4244053 - DNA, 25 bp, Homo sapien
ctgaacaagtcagcatggtaccttg

SEQ ID NO: 4244054 - DNA, 25 bp, Homo sapien
tcacatcatcaactgaacaagtcag

SEQ ID NO: 4244055 - DNA, 25 bp, Homo sapien
ccatcctgtcacatcatcaactgaa

SEQ ID NO: 4244056 - DNA, 25 bp, Homo sapien
taaccaggcatgtgagaaaacaaga

SEQ ID NO: 4244057 - DNA, 25 bp, Homo sapien
cagaaacagatcaacatggtggcca

SEQ ID NO: 4244058 - DNA, 25 bp, Homo sapien
cataaaatgtctgctagtcagccaa

SEQ ID NO: 4244059 - DNA, 25 bp, Homo sapien
gacatgactgaaagccaagaacaac

SEQ ID NO: 4244060 - DNA, 25 bp, Homo sapien
tgggttaagcgtttcttcaacagaa

SEQ ID NO: 4244061 - DNA, 25 bp, Homo sapien
catgcgttccccactatgttgtata

SEQ ID NO: 4244062 - DNA, 25 bp, Homo sapien
gaacagtccaccagtctgaagtcca

SEQ ID NO: 4244063 - DNA, 25 bp, Homo sapien
cataaccattgggagggaaggcatc

SEQ ID NO: 4244064 - DNA, 25 bp, Homo sapien
accctcctgcagaggtctcattact

SEQ ID NO: 4244065 - DNA, 25 bp, Homo sapien
cctcctgcagaggtctcattactca

SEQ ID NO: 4244066 - DNA, 25 bp, Homo sapien
ctcctgcagaggtctcattactcac

SEQ ID NO: 4244067 - DNA, 25 bp, Homo sapien
caccctcctgcagaggtctcattac

SEQ ID NO: 4244068 - DNA, 25 bp, Homo sapien
ggcgcagttccttggaagccatcct

SEQ ID NO: 4244069 - DNA, 25 bp, Homo sapien
cagtgttggtcaccggaaactcgcc

SEQ ID NO: 4244070 - DNA, 25 bp, Homo sapien
gttggcataatgctggcctttgggc

SEQ ID NO: 4244071 - DNA, 25 bp, Homo sapien
gaaactcgccctgccaaatgttggc

SEQ ID NO: 4244072 - DNA, 25 bp, Homo sapien
tgcccaagtgcagtaggcaaccgca

SEQ ID NO: 4244073 - DNA, 25 bp, Homo sapien
actcagcttccgtgggcagccgctt

SEQ ID NO: 4244074 - DNA, 25 bp, Homo sapien
tattatgcaggcctcctcgacagct

SEQ ID NO: 4244075 - DNA, 25 bp, Homo sapien
aaccgcatcattccaggacacatgg

SEQ ID NO: 4244076 - DNA, 25 bp, Homo sapien
cttctgggtgtctccagttagcgcc

SEQ ID NO: 4244077 - DNA, 25 bp, Homo sapien
agttagcgcctttcacaggtaacca

SEQ ID NO: 4244078 - DNA, 25 bp, Homo sapien
gcagaatagtagagtcaggcccttc

SEQ ID NO: 4244079 - DNA, 25 bp, Homo sapien
tgtgcagaatagtagagtcaggccc

SEQ ID NO: 4244080 - DNA, 25 bp, Homo sapien
ccttttgtgccacttcgtgggccat

SEQ ID NO: 4244081 - DNA, 25 bp, Homo sapien
gaccctcttccgcataaacatcaat

SEQ ID NO: 4244082 - DNA, 25 bp, Homo sapien
taaatagtctttcagtgggatatcc

SEQ ID NO: 4244083 - DNA, 25 bp, Homo sapien
gggtgaccctcttccgcataaacat

SEQ ID NO: 4244084 - DNA, 25 bp, Homo sapien
ttttcccacagaggccgacgataca

SEQ ID NO: 4244085 - DNA, 25 bp, Homo sapien
ggccgacgatacagagtccaatatt

SEQ ID NO: 4244086 - DNA, 25 bp, Homo sapien
atattcgaggggcagggaacatcag

SEQ ID NO: 4244087 - DNA, 25 bp, Homo sapien
cgatacagagtccaatattcgaggg

SEQ ID NO: 4244088 - DNA, 25 bp, Homo sapien
aagaaagatgcacctcattaatgac

SEQ ID NO: 4244089 - DNA, 25 bp, Homo sapien
gaaagcttgtacacctatatagtag

SEQ ID NO: 4244090 - DNA, 25 bp, Homo sapien
ttgactaaactctaatgaggctcct

SEQ ID NO: 4244091 - DNA, 25 bp, Homo sapien
ttaatttcaatagctataagagcaa

SEQ ID NO: 4244092 - DNA, 25 bp, Homo sapien
tatttatgaaagttgacccctggta

SEQ ID NO: 4244093 - DNA, 25 bp, Homo sapien
tttcagggaccaatatcataagggc

SEQ ID NO: 4244094 - DNA, 25 bp, Homo sapien
aaatgatagcaaaatagctgcacgc

SEQ ID NO: 4244095 - DNA, 25 bp, Homo sapien
ccctggtaggtgctaaagacagccc

SEQ ID NO: 4244096 - DNA, 25 bp, Homo sapien
tccagctgtgaaaccgtactatagt

SEQ ID NO: 4244097 - DNA, 25 bp, Homo sapien
gggtgaaaggtacaccagatctctc

SEQ ID NO: 4244098 - DNA, 25 bp, Homo sapien
gggtcatatgaatgctcaattttcc

SEQ ID NO: 4244099 - DNA, 25 bp, Homo sapien
tcttacactgcatgagaacatataa

SEQ ID NO: 4244100 - DNA, 25 bp, Homo sapien
acccttttcaatgagccttagagaa

SEQ ID NO: 4244101 - DNA, 25 bp, Homo sapien
ttttcaatgagccttagagaaatac

SEQ ID NO: 4244102 - DNA, 25 bp, Homo sapien
ccttttcaatgagccttagagaaat

SEQ ID NO: 4244103 - DNA, 25 bp, Homo sapien
tcaatgagccttagagaaatacagg

SEQ ID NO: 4244104 - DNA, 25 bp, Homo sapien
tgctcactcaacatgccttcaaaga

SEQ ID NO: 4244105 - DNA, 25 bp, Homo sapien
ttgctcactcaacatgccttcaaag

SEQ ID NO: 4244106 - DNA, 25 bp, Homo sapien
cttttccggagtggaggctgccatc

SEQ ID NO: 4244107 - DNA, 25 bp, Homo sapien
tccttttccggagtggaggctgcca

SEQ ID NO: 4244108 - DNA, 25 bp, Homo sapien
ttgtgacactgccatgactaactac

SEQ ID NO: 4244109 - DNA, 25 bp, Homo sapien
ctgcattcccttgtgacactgccat

SEQ ID NO: 4244110 - DNA, 25 bp, Homo sapien
cattgtaaatactccagcagggatg

SEQ ID NO: 4244111 - DNA, 25 bp, Homo sapien
caatagtaactctcctcgcaggtgc

SEQ ID NO: 4244112 - DNA, 25 bp, Homo sapien
ttatctgaggatcatctgtgcccat

SEQ ID NO: 4244113 - DNA, 25 bp, Homo sapien
caaatagccagttgagttcacaaac

SEQ ID NO: 4244114 - DNA, 25 bp, Homo sapien
ctggaataacagtcaccaagccgct

SEQ ID NO: 4244115 - DNA, 25 bp, Homo sapien
aacaggtctggaataacagtcacca

SEQ ID NO: 4244116 - DNA, 25 bp, Homo sapien
cactggaaacaggtctggaataaca

SEQ ID NO: 4244117 - DNA, 25 bp, Homo sapien
ataacagtcaccaagccgctaacgg

SEQ ID NO: 4244118 - DNA, 25 bp, Homo sapien
caagataacccagtcctaaaaggag

SEQ ID NO: 4244119 - DNA, 25 bp, Homo sapien
gcctagcatggtgcatggtccacag

SEQ ID NO: 4244120 - DNA, 25 bp, Homo sapien
tcaaggaccgaactaggttgtccat

SEQ ID NO: 4244121 - DNA, 25 bp, Homo sapien
actatactctaagtgctgggacaca

SEQ ID NO: 4244122 - DNA, 25 bp, Homo sapien
ggcactgctattttggtccatccgg

SEQ ID NO: 4244123 - DNA, 25 bp, Homo sapien
tcttaagctttctaagtggcccagg

SEQ ID NO: 4244124 - DNA, 25 bp, Homo sapien
catatgtgggctacacacttaggcc

SEQ ID NO: 4244125 - DNA, 25 bp, Homo sapien
aaatagcctggatcactctgagtgg

SEQ ID NO: 4244126 - DNA, 25 bp, Homo sapien
cgcctcggaggaatcgatggagcac

SEQ ID NO: 4244127 - DNA, 25 bp, Homo sapien
ccgcctcggaggaatcgatggagca

SEQ ID NO: 4244128 - DNA, 25 bp, Homo sapien
ttagcctcccgcgagtatcggtgag

SEQ ID NO: 4244129 - DNA, 25 bp, Homo sapien
ctcccgcgagtatcggtgagcggct

SEQ ID NO: 4244130 - DNA, 25 bp, Homo sapien
ggcccggagcgttagcctcccgcga

SEQ ID NO: 4244131 - DNA, 25 bp, Homo sapien
gagcgttagcctcccgcgagtatcg

SEQ ID NO: 4244132 - DNA, 25 bp, Homo sapien
tggggcgtgccgcagccgcaagaac

SEQ ID NO: 4244133 - DNA, 25 bp, Homo sapien
gggcgtgccgcagccgcaagaaccc

SEQ ID NO: 4244134 - DNA, 25 bp, Homo sapien
gcagccgcaagaacccgcaagggac

SEQ ID NO: 4244135 - DNA, 25 bp, Homo sapien
gtgccgcagccgcaagaacccgcaa

SEQ ID NO: 4244136 - DNA, 25 bp, Homo sapien
cagcagcaagaggacgagacccagc

SEQ ID NO: 4244137 - DNA, 25 bp, Homo sapien
agcagcaagaggacgagacccagct

SEQ ID NO: 4244138 - DNA, 25 bp, Homo sapien
gcagcaagaggacgagacccagctc

SEQ ID NO: 4244139 - DNA, 25 bp, Homo sapien
tccctgccgctccacacagcagcga

SEQ ID NO: 4244140 - DNA, 25 bp, Homo sapien
gttgtcccgcgggccatgtgacccg

SEQ ID NO: 4244141 - DNA, 25 bp, Homo sapien
ctcagggtctttgtacttgctgttc

SEQ ID NO: 4244142 - DNA, 25 bp, Homo sapien
cagggtctttgtacttgctgttcct

SEQ ID NO: 4244143 - DNA, 25 bp, Homo sapien
gggtctttgtacttgctgttccttc

SEQ ID NO: 4244144 - DNA, 25 bp, Homo sapien
tctttgtacttgctgttccttctac

SEQ ID NO: 4244145 - DNA, 25 bp, Homo sapien
tgtgacatacaacattgcttggtgc

SEQ ID NO: 4244146 - DNA, 25 bp, Homo sapien
tggtgcataagaatagctcaagagt

SEQ ID NO: 4244147 - DNA, 25 bp, Homo sapien
tgagtgtcaactagtagccaagcac

SEQ ID NO: 4244148 - DNA, 25 bp, Homo sapien
tttctttggactgtctttggagccc

SEQ ID NO: 4244149 - DNA, 25 bp, Homo sapien
cccaagtcagaaggctagtaggtgg

SEQ ID NO: 4244150 - DNA, 25 bp, Homo sapien
tattgcgatcctccaaatgcctcgg

SEQ ID NO: 4244151 - DNA, 25 bp, Homo sapien
ttcgggactgtacaccgggacatca

SEQ ID NO: 4244152 - DNA, 25 bp, Homo sapien
tcttgaacctctgcagtctggtggt

SEQ ID NO: 4244153 - DNA, 25 bp, Homo sapien
gcacccagctggctatatcttaact

SEQ ID NO: 4244154 - DNA, 25 bp, Homo sapien
gctggctatatcttaacttaattaa

SEQ ID NO: 4244155 - DNA, 25 bp, Homo sapien
cagggtcacctagtttgtttataat

SEQ ID NO: 4244156 - DNA, 25 bp, Homo sapien
gtgaatgaattttgcttaatatata

SEQ ID NO: 4244157 - DNA, 25 bp, Homo sapien
tctcctttatatggcagatgcggca

SEQ ID NO: 4244158 - DNA, 25 bp, Homo sapien
tacatacaggcggagaaaataggct

SEQ ID NO: 4244159 - DNA, 25 bp, Homo sapien
gaagcagcttaacgtattaggcact

SEQ ID NO: 4244160 - DNA, 25 bp, Homo sapien
gctacgaggtgttgcatgctccaaa

SEQ ID NO: 4244161 - DNA, 25 bp, Homo sapien
tctctgagccctggattgtgcacct

SEQ ID NO: 4244162 - DNA, 25 bp, Homo sapien
tacgtcatttgaggcaagacagggc

SEQ ID NO: 4244163 - DNA, 25 bp, Homo sapien
taacagatctttaggcggcgtcagg

SEQ ID NO: 4244164 - DNA, 25 bp, Homo sapien
cctcacgggcgataaaagacaagca

SEQ ID NO: 4244165 - DNA, 25 bp, Homo sapien
gattaaataaagacacctcgcgcct

SEQ ID NO: 4244166 - DNA, 25 bp, Homo sapien
ggtttctcgtgcaaacccgagcagg

SEQ ID NO: 4244167 - DNA, 25 bp, Homo sapien
tttaatccttgaccgcaaacactgg

SEQ ID NO: 4244168 - DNA, 25 bp, Homo sapien
gggtgactttgaacggctggctcca

SEQ ID NO: 4244169 - DNA, 25 bp, Homo sapien
agccaaggaacaggctcagcagcct

SEQ ID NO: 4244170 - DNA, 25 bp, Homo sapien
cagccaaggaacaggctcagcagcc

SEQ ID NO: 4244171 - DNA, 25 bp, Homo sapien
ctaccgaccccagccaaggaacagg

SEQ ID NO: 4244172 - DNA, 25 bp, Homo sapien
gaccccagccaaggaacaggctcag

SEQ ID NO: 4244173 - DNA, 25 bp, Homo sapien
gcaccaaggtagcggctggggccgg

SEQ ID NO: 4244174 - DNA, 25 bp, Homo sapien
ggcaccaaggtagcggctggggccg

SEQ ID NO: 4244175 - DNA, 25 bp, Homo sapien
gctccccgggcaccaaggtagcggc

SEQ ID NO: 4244176 - DNA, 25 bp, Homo sapien
ctccccgggcaccaaggtagcggct

SEQ ID NO: 4244177 - DNA, 25 bp, Homo sapien
tgggtgctcatagagccaaggatta

SEQ ID NO: 4244178 - DNA, 25 bp, Homo sapien
tcatagagccaaggattaggcccag

SEQ ID NO: 4244179 - DNA, 25 bp, Homo sapien
gctgtgtgggtgctcatagagccaa

SEQ ID NO: 4244180 - DNA, 25 bp, Homo sapien
tgctcatagagccaaggattaggcc

SEQ ID NO: 4244181 - DNA, 25 bp, Homo sapien
gtttgctttgcagccagttgtgcag

SEQ ID NO: 4244182 - DNA, 25 bp, Homo sapien
gttgtgcagacgtttttgttctcca

SEQ ID NO: 4244183 - DNA, 25 bp, Homo sapien
tgctttgcagccagttgtgcagacg

SEQ ID NO: 4244184 - DNA, 25 bp, Homo sapien
gcagccagttgtgcagacgtttttg

SEQ ID NO: 4244185 - DNA, 25 bp, Homo sapien
tttaagagatatttacaaggaggac

SEQ ID NO: 4244186 - DNA, 25 bp, Homo sapien
caccctgcgttgtatccagtgtcgt

SEQ ID NO: 4244187 - DNA, 25 bp, Homo sapien
tgtatccagtgtcgttttaagagat

SEQ ID NO: 4244188 - DNA, 25 bp, Homo sapien
aggactaatattctgctctccagca

SEQ ID NO: 4244189 - DNA, 25 bp, Homo sapien
agtccttgtcatttagtggttcctt

SEQ ID NO: 4244190 - DNA, 25 bp, Homo sapien
tcagtccttgtcatttagtggttcc

SEQ ID NO: 4244191 - DNA, 25 bp, Homo sapien
cagtccttgtcatttagtggttcct

SEQ ID NO: 4244192 - DNA, 25 bp, Homo sapien
ggctgaagctgacctttgtactttt

SEQ ID NO: 4244193 - DNA, 25 bp, Homo sapien
gtggaaaggtaggctaatcaccaac

SEQ ID NO: 4244194 - DNA, 25 bp, Homo sapien
aggctgaagctgacctttgtacttt

SEQ ID NO: 4244195 - DNA, 25 bp, Homo sapien
ccatgagaccaaatgtcagtgcggg

SEQ ID NO: 4244196 - DNA, 25 bp, Homo sapien
tggccttgaagaatagaagccatga

SEQ ID NO: 4244197 - DNA, 25 bp, Homo sapien
ttggccttgaagaatagaagccatg

SEQ ID NO: 4244198 - DNA, 25 bp, Homo sapien
tgagaccaaatgtcagtgcgggcat

SEQ ID NO: 4244199 - DNA, 25 bp, Homo sapien
tttttgagaaataactttgtagata

SEQ ID NO: 4244200 - DNA, 25 bp, Homo sapien
agaaataactttgtagatattgtac

SEQ ID NO: 4244201 - DNA, 25 bp, Homo sapien
gagaaataactttgtagatattgta

SEQ ID NO: 4244202 - DNA, 25 bp, Homo sapien
ttgagaaataactttgtagatattg

SEQ ID NO: 4244203 - DNA, 25 bp, Homo sapien
tggacagatgttaccatatcaataa

SEQ ID NO: 4244204 - DNA, 25 bp, Homo sapien
tgcagggagccccttagtttcagaa

SEQ ID NO: 4244205 - DNA, 25 bp, Homo sapien
atcaagaggccagtcatggctccaa

SEQ ID NO: 4244206 - DNA, 25 bp, Homo sapien
tcacatcaagaggccagtcatggct

SEQ ID NO: 4244207 - DNA, 25 bp, Homo sapien
ttccagtgactcttgacagacagga

SEQ ID NO: 4244208 - DNA, 25 bp, Homo sapien
ccagtgactcttgacagacaggagg

SEQ ID NO: 4244209 - DNA, 25 bp, Homo sapien
acagacaggaggaagttattgccaa

SEQ ID NO: 4244210 - DNA, 25 bp, Homo sapien
gaagttattgccaatctgctctttc

SEQ ID NO: 4244211 - DNA, 25 bp, Homo sapien
atgttttgtgctgctaaaattatat

SEQ ID NO: 4244212 - DNA, 25 bp, Homo sapien
tttgtgctgctaaaattatatgtgt

SEQ ID NO: 4244213 - DNA, 25 bp, Homo sapien
tgttttgtgctgctaaaattatatg

SEQ ID NO: 4244214 - DNA, 25 bp, Homo sapien
ttttgtgctgctaaaattatatgtg

SEQ ID NO: 4244215 - DNA, 25 bp, Homo sapien
cctagacctataacttggagtgctg

SEQ ID NO: 4244216 - DNA, 25 bp, Homo sapien
catcagtagcctctggccctttttt

SEQ ID NO: 4244217 - DNA, 25 bp, Homo sapien
caagtgccttaggtgctgtcttcca

SEQ ID NO: 4244218 - DNA, 25 bp, Homo sapien
tgggttttcatcagtagcctctggc

SEQ ID NO: 4244219 - DNA, 25 bp, Homo sapien
tctgagtagtaatctgtggctttca

SEQ ID NO: 4244220 - DNA, 25 bp, Homo sapien
gctaaagcttttgacagacctctga

SEQ ID NO: 4244221 - DNA, 25 bp, Homo sapien
tagtgtagggatatgactcagaagc

SEQ ID NO: 4244222 - DNA, 25 bp, Homo sapien
ccttttgactgtgttcagctgggcc

SEQ ID NO: 4244223 - DNA, 25 bp, Homo sapien
gatgggagagcctgaaggcgcagac

SEQ ID NO: 4244224 - DNA, 25 bp, Homo sapien
cgtaattaaggtgagagtgctgctc

SEQ ID NO: 4244225 - DNA, 25 bp, Homo sapien
gctcagtagattatttatcaggtat

SEQ ID NO: 4244226 - DNA, 25 bp, Homo sapien
tctatgccaaagtcggtgcagtgag

SEQ ID NO: 4244227 - DNA, 25 bp, Homo sapien
cactggtaaagcgtgtcaaggatgt

SEQ ID NO: 4244228 - DNA, 25 bp, Homo sapien
ttgccttgccgtcccaggtgttgtt

SEQ ID NO: 4244229 - DNA, 25 bp, Homo sapien
ccgtcccaggtgttgttcatagtcc

SEQ ID NO: 4244230 - DNA, 25 bp, Homo sapien
tgttcatagtcctccactactgtcc

SEQ ID NO: 4244231 - DNA, 25 bp, Homo sapien
taccaagaagtgcatttgccagtct

SEQ ID NO: 4244232 - DNA, 25 bp, Homo sapien
ttgttcgaacatgccaaagaaaccg

SEQ ID NO: 4244233 - DNA, 25 bp, Homo sapien
agacttgaatactcggtgctcccgt

SEQ ID NO: 4244234 - DNA, 25 bp, Homo sapien
tctgagctcagaggttagataccgc

SEQ ID NO: 4244235 - DNA, 25 bp, Homo sapien
ctgtgcgtgcttcagggaagctgct

SEQ ID NO: 4244236 - DNA, 25 bp, Homo sapien
cctctgctttagtatgtctgtgctc

SEQ ID NO: 4244237 - DNA, 25 bp, Homo sapien
agctctgtgcgtgcttcagggaagc

SEQ ID NO: 4244238 - DNA, 25 bp, Homo sapien
gggctggtggcacgttgtctgagac

SEQ ID NO: 4244239 - DNA, 25 bp, Homo sapien
ttcctgatacctggaacagtgtctg

SEQ ID NO: 4244240 - DNA, 25 bp, Homo sapien
gtgtctggccataagcagatgatga

SEQ ID NO: 4244241 - DNA, 25 bp, Homo sapien
agttggccctggttggacagaagca

SEQ ID NO: 4244242 - DNA, 25 bp, Homo sapien
tgagagtagtcagtggttgactgca

SEQ ID NO: 4244243 - DNA, 25 bp, Homo sapien
ctgttggtttcatgggtgatattta

SEQ ID NO: 4244244 - DNA, 25 bp, Homo sapien
gatatttattctgaagtttcgtgaa

SEQ ID NO: 4244245 - DNA, 25 bp, Homo sapien
agtttcgtgaacttagacatgccat

SEQ ID NO: 4244246 - DNA, 25 bp, Homo sapien
tcatgggtgatatttattctgaagt

SEQ ID NO: 4244247 - DNA, 25 bp, Homo sapien
gattaatgtgttggtgagtggtgga

SEQ ID NO: 4244248 - DNA, 25 bp, Homo sapien
tgattaatgtgttggtgagtggtgg

SEQ ID NO: 4244249 - DNA, 25 bp, Homo sapien
ttgattaatgtgttggtgagtggtg

SEQ ID NO: 4244250 - DNA, 25 bp, Homo sapien
attaatgtgttggtgagtggtggac

SEQ ID NO: 4244251 - DNA, 25 bp, Homo sapien
tttgacttataccagttgccactca

SEQ ID NO: 4244252 - DNA, 25 bp, Homo sapien
tataccagttgccactcacagtagt

SEQ ID NO: 4244253 - DNA, 25 bp, Homo sapien
cttataccagttgccactcacagta

SEQ ID NO: 4244254 - DNA, 25 bp, Homo sapien
gacttataccagttgccactcacag

SEQ ID NO: 4244255 - DNA, 25 bp, Homo sapien
ggcagggcaaaatcagcaaggctaa

SEQ ID NO: 4244256 - DNA, 25 bp, Homo sapien
ggcatcatgaatccaccctgagtgt

SEQ ID NO: 4244257 - DNA, 25 bp, Homo sapien
ccctttgttaggtgacgtgcttgac

SEQ ID NO: 4244258 - DNA, 25 bp, Homo sapien
gcaatactctgtttcgcccaaggaa

SEQ ID NO: 4244259 - DNA, 25 bp, Homo sapien
tgtgtgaccatagcaagtttttgag

SEQ ID NO: 4244260 - DNA, 25 bp, Homo sapien
tagtgccctgcattccgaggctaat

SEQ ID NO: 4244261 - DNA, 25 bp, Homo sapien
cataaaagccacatgaatggtgcct

SEQ ID NO: 4244262 - DNA, 25 bp, Homo sapien
catattaaagatgtgctcattccac

SEQ ID NO: 4244263 - DNA, 25 bp, Homo sapien
ggaactgatggccagtctccagtgg

SEQ ID NO: 4244264 - DNA, 25 bp, Homo sapien
ccctagtgtcttaaagttatctaca

SEQ ID NO: 4244265 - DNA, 25 bp, Homo sapien
attcccaccagccaatacgatgttg

SEQ ID NO: 4244266 - DNA, 25 bp, Homo sapien
attttggacagccactttgcctttg

SEQ ID NO: 4244267 - DNA, 25 bp, Homo sapien
tgttgtacactaaagtgacctgtgg

SEQ ID NO: 4244268 - DNA, 25 bp, Homo sapien
cagccaggtgttgtgtagagttaat

SEQ ID NO: 4244269 - DNA, 25 bp, Homo sapien
gatgtgtctactaacgcacagggtg

SEQ ID NO: 4244270 - DNA, 25 bp, Homo sapien
ttgagtatgtggagtctgttgttct

SEQ ID NO: 4244271 - DNA, 25 bp, Homo sapien
tgcgaggatgtgtctggaccgccaa

SEQ ID NO: 4244272 - DNA, 25 bp, Homo sapien
tcaggccagctggatgtcgatctca

SEQ ID NO: 4244273 - DNA, 25 bp, Homo sapien
cctatgacctcagggcgtccttctg

SEQ ID NO: 4244274 - DNA, 25 bp, Homo sapien
tgtctgacgagaacctgccctatga

SEQ ID NO: 4244275 - DNA, 25 bp, Homo sapien
cgaagtagtttaatgccctggatct

SEQ ID NO: 4244276 - DNA, 25 bp, Homo sapien
tctttgccgaagtagtttaatgccc

SEQ ID NO: 4244277 - DNA, 25 bp, Homo sapien
tcatgcaggaaaggtcgtctgtcca

SEQ ID NO: 4244278 - DNA, 25 bp, Homo sapien
gagtgagcaacccttgttgtctttg

SEQ ID NO: 4244279 - DNA, 25 bp, Homo sapien
caggtgatccagcagggttgcctca

SEQ ID NO: 4244280 - DNA, 25 bp, Homo sapien
tgtccttgagtgttggtctctggac

SEQ ID NO: 4244281 - DNA, 25 bp, Homo sapien
tgctgaagcccacttcggcaggtga

SEQ ID NO: 4244282 - DNA, 25 bp, Homo sapien
gtggcccacgagatgcaagtgccat

SEQ ID NO: 4244283 - DNA, 25 bp, Homo sapien
gacaaaatggtaatgtgagatccct

SEQ ID NO: 4244284 - DNA, 25 bp, Homo sapien
tgcttgattgcagactgaccagggt

SEQ ID NO: 4244285 - DNA, 25 bp, Homo sapien
ggagttcctgttcctggcgtccacg

SEQ ID NO: 4244286 - DNA, 25 bp, Homo sapien
ccagtctgcataaatgtggagttcc

SEQ ID NO: 4244287 - DNA, 25 bp, Homo sapien
agctttaccagtttgagaaatccca

SEQ ID NO: 4244288 - DNA, 25 bp, Homo sapien
tacgatgctatgtctcaaggatgac

SEQ ID NO: 4244289 - DNA, 25 bp, Homo sapien
gatgacatttagtgccctccaagaa

SEQ ID NO: 4244290 - DNA, 25 bp, Homo sapien
cctctaacaaggatacgtggatgtg

SEQ ID NO: 4244291 - DNA, 25 bp, Homo sapien
taacggaggactatacacctggcag

SEQ ID NO: 4244292 - DNA, 25 bp, Homo sapien
ggttcatatataggagcagtgcagc

SEQ ID NO: 4244293 - DNA, 25 bp, Homo sapien
tcatattccatggtagagagggccc

SEQ ID NO: 4244294 - DNA, 25 bp, Homo sapien
tcccaaggaggcagtctaagaatta

SEQ ID NO: 4244295 - DNA, 25 bp, Homo sapien
gacaggatgtcacaaacagagaccc

SEQ ID NO: 4244296 - DNA, 25 bp, Homo sapien
tttactgtacctatgttatatgtca

SEQ ID NO: 4244297 - DNA, 25 bp, Homo sapien
gactctgaaccttgctgggactaaa

SEQ ID NO: 4244298 - DNA, 25 bp, Homo sapien
agagaccctgtcactccttgcacca

SEQ ID NO: 4244299 - DNA, 25 bp, Homo sapien
taaatgttggctgaaatggcgtctg

SEQ ID NO: 4244300 - DNA, 25 bp, Homo sapien
agtcagaggccccattcggttctgg

SEQ ID NO: 4244301 - DNA, 25 bp, Homo sapien
ttctgggcttggcatcgggatgacc

SEQ ID NO: 4244302 - DNA, 25 bp, Homo sapien
tctgattagacgtggaagagaagtc

SEQ ID NO: 4244303 - DNA, 25 bp, Homo sapien
ccttgccaatttctatgttccttcc

SEQ ID NO: 4244304 - DNA, 25 bp, Homo sapien
tcatatccgtccttcgagtccttgc

SEQ ID NO: 4244305 - DNA, 25 bp, Homo sapien
cttcgagtccttgccaatttctatg

SEQ ID NO: 4244306 - DNA, 25 bp, Homo sapien
tccgtccttcgagtccttgccaatt

SEQ ID NO: 4244307 - DNA, 25 bp, Homo sapien
ggcggaaagggcaatttgatttgcc

SEQ ID NO: 4244308 - DNA, 25 bp, Homo sapien
aaatggaaggccagtttgtgaggaa

SEQ ID NO: 4244309 - DNA, 25 bp, Homo sapien
caaagagatgagggcggaaagggca

SEQ ID NO: 4244310 - DNA, 25 bp, Homo sapien
gaaatggaaggccagtttgtgagga

SEQ ID NO: 4244311 - DNA, 25 bp, Homo sapien
taacaagtgctcatgtaccacgggc

SEQ ID NO: 4244312 - DNA, 25 bp, Homo sapien
gatggacagtagtggtaacaagtgc

SEQ ID NO: 4244313 - DNA, 25 bp, Homo sapien
tacatgtcaacttggagaaatagcc

SEQ ID NO: 4244314 - DNA, 25 bp, Homo sapien
ggaattgatctgagcccatgggaaa

SEQ ID NO: 4244315 - DNA, 25 bp, Homo sapien
ttcaaggactttgcgtctgtttgcc

SEQ ID NO: 4244316 - DNA, 25 bp, Homo sapien
ggcacagacatggccgcttcaagga

SEQ ID NO: 4244317 - DNA, 25 bp, Homo sapien
gccgcttcaaggactttgcgtctgt

SEQ ID NO: 4244318 - DNA, 25 bp, Homo sapien
cagacatggccgcttcaaggacttt

SEQ ID NO: 4244319 - DNA, 25 bp, Homo sapien
aaggcagctcgagtggtcagtgtat

SEQ ID NO: 4244320 - DNA, 25 bp, Homo sapien
aggcagctcgagtggtcagtgtatt

SEQ ID NO: 4244321 - DNA, 25 bp, Homo sapien
ttgctttgtttataaggtctgccca

SEQ ID NO: 4244322 - DNA, 25 bp, Homo sapien
tgtttataaggtctgcccatgaatt

SEQ ID NO: 4244323 - DNA, 25 bp, Homo sapien
agaggagagcttgtccccgacagaa

SEQ ID NO: 4244324 - DNA, 25 bp, Homo sapien
ggtagcttcctcacaattgttagag

SEQ ID NO: 4244325 - DNA, 25 bp, Homo sapien
cccaagtgttaagagaacgcggtgt

SEQ ID NO: 4244326 - DNA, 25 bp, Homo sapien
aacactccctcggttatcagctgca

SEQ ID NO: 4244327 - DNA, 25 bp, Homo sapien
agtttttggagtatgtttctacatt

SEQ ID NO: 4244328 - DNA, 25 bp, Homo sapien
agaccctcgctgttcgtactgtaga

SEQ ID NO: 4244329 - DNA, 25 bp, Homo sapien
tgtattggttcccagcagaccctcg

SEQ ID NO: 4244330 - DNA, 25 bp, Homo sapien
caacattgctgcactgggacgcgaa

SEQ ID NO: 4244331 - DNA, 25 bp, Homo sapien
gactcttgtcctgtcccaacaacag

SEQ ID NO: 4244332 - DNA, 25 bp, Homo sapien
ccagagcatctcttgctgaggtgac

SEQ ID NO: 4244333 - DNA, 25 bp, Homo sapien
ttaaccccgaagacatttgcattgg

SEQ ID NO: 4244334 - DNA, 25 bp, Homo sapien
gagcacttgcagaaccataatggca

SEQ ID NO: 4244335 - DNA, 25 bp, Homo sapien
aatcccgtagtaggagtgatagcca

SEQ ID NO: 4244336 - DNA, 25 bp, Homo sapien
gaatgcttgctagggaaaagttccc

SEQ ID NO: 4244337 - DNA, 25 bp, Homo sapien
gaagtcaaaatcatggagctcagca

SEQ ID NO: 4244338 - DNA, 25 bp, Homo sapien
catcaacaggttagacaggaagtca

SEQ ID NO: 4244339 - DNA, 25 bp, Homo sapien
gaagcaccctgttcataagccctga

SEQ ID NO: 4244340 - DNA, 25 bp, Homo sapien
caacaaagagatgttatataacttc

SEQ ID NO: 4244341 - DNA, 25 bp, Homo sapien
tcaacaaagagatgttatataactt

SEQ ID NO: 4244342 - DNA, 25 bp, Homo sapien
acttctatttatatcctccttgctc

SEQ ID NO: 4244343 - DNA, 25 bp, Homo sapien
tatttatatcctccttgctcactat

SEQ ID NO: 4244344 - DNA, 25 bp, Homo sapien
tcaaatgcgtcagtaaagaatctgg

SEQ ID NO: 4244345 - DNA, 25 bp, Homo sapien
ggaaccagcttgttctcaaatgcgt

SEQ ID NO: 4244346 - DNA, 25 bp, Homo sapien
gcttgttctcaaatgcgtcagtaaa

SEQ ID NO: 4244347 - DNA, 25 bp, Homo sapien
tctcaaatgcgtcagtaaagaatct

SEQ ID NO: 4244348 - DNA, 25 bp, Homo sapien
agctcccccattgtgtagccccggg

SEQ ID NO: 4244349 - DNA, 25 bp, Homo sapien
ttcctaagtgctcagctcccccatt

SEQ ID NO: 4244350 - DNA, 25 bp, Homo sapien
cattgtgtagccccgggacatcaga

SEQ ID NO: 4244351 - DNA, 25 bp, Homo sapien
tagccccgggacatcagaagttgtt

SEQ ID NO: 4244352 - DNA, 25 bp, Homo sapien
tgagaaccctatggctgcccaggga

SEQ ID NO: 4244353 - DNA, 25 bp, Homo sapien
cctgggtgaagcaatgacgtctctg

SEQ ID NO: 4244354 - DNA, 25 bp, Homo sapien
catcagattctcagcagggacgacg

SEQ ID NO: 4244355 - DNA, 25 bp, Homo sapien
ttcagattgctccaaaaccaggtga

SEQ ID NO: 4244356 - DNA, 25 bp, Homo sapien
gagacggaaggtgcacaaatgatca

SEQ ID NO: 4244357 - DNA, 25 bp, Homo sapien
tgttgagcccagagcttgtagctat

SEQ ID NO: 4244358 - DNA, 25 bp, Homo sapien
tatgtttttattagcctccttgcaa

SEQ ID NO: 4244359 - DNA, 25 bp, Homo sapien
tattagcctccttgcaacacaaacc

SEQ ID NO: 4244360 - DNA, 25 bp, Homo sapien
ggtggggagacatgaagagtcccag

SEQ ID NO: 4244361 - DNA, 25 bp, Homo sapien
ccagagcattctgctggggaccaga

SEQ ID NO: 4244362 - DNA, 25 bp, Homo sapien
cgtgtggaagttacctggtgggcca

SEQ ID NO: 4244363 - DNA, 25 bp, Homo sapien
tgtggccgtgtggaagttacctggt

SEQ ID NO: 4244364 - DNA, 25 bp, Homo sapien
cagtaagtcccagttcccgtgggca

SEQ ID NO: 4244365 - DNA, 25 bp, Homo sapien
agagctttcccagtaagtcccagtt

SEQ ID NO: 4244366 - DNA, 25 bp, Homo sapien
gagctttcccagtaagtcccagttc

SEQ ID NO: 4244367 - DNA, 25 bp, Homo sapien
gtcataaccacgctccatggctttg

SEQ ID NO: 4244368 - DNA, 25 bp, Homo sapien
aaggcaggctcgtcataaccacgct

SEQ ID NO: 4244369 - DNA, 25 bp, Homo sapien
tcataaccacgctccatggctttgc

SEQ ID NO: 4244370 - DNA, 25 bp, Homo sapien
cctgaagcaaggcaggctcgtcata

SEQ ID NO: 4244371 - DNA, 25 bp, Homo sapien
gtgttctcttgctcttttgttgtgg

SEQ ID NO: 4244372 - DNA, 25 bp, Homo sapien
aaactgctggattccagtgcttcca

SEQ ID NO: 4244373 - DNA, 25 bp, Homo sapien
ttgtggttgaaggttggctgacagc

SEQ ID NO: 4244374 - DNA, 25 bp, Homo sapien
tgcttccagctgcagagttctgtga

SEQ ID NO: 4244375 - DNA, 25 bp, Homo sapien
ttggccgtcagacagcgcggtccgt

SEQ ID NO: 4244376 - DNA, 25 bp, Homo sapien
gacagccattgggtcacccgattgg

SEQ ID NO: 4244377 - DNA, 25 bp, Homo sapien
attgggtcacccgattggccgtcag

SEQ ID NO: 4244378 - DNA, 25 bp, Homo sapien
ctagcggttgacagccattgggtca

SEQ ID NO: 4244379 - DNA, 25 bp, Homo sapien
ccatgagaacacagctgggatagca

SEQ ID NO: 4244380 - DNA, 25 bp, Homo sapien
tttagcgggcagtcctctgtaagcc

SEQ ID NO: 4244381 - DNA, 25 bp, Homo sapien
agctgaagcgaatggccctgcacgg

SEQ ID NO: 4244382 - DNA, 25 bp, Homo sapien
gtttccttgaatgaccagattgtcc

SEQ ID NO: 4244383 - DNA, 25 bp, Homo sapien
cagacagtaaggaggtgaacggtca

SEQ ID NO: 4244384 - DNA, 25 bp, Homo sapien
ggcagctggaaaccactcaggcgag

SEQ ID NO: 4244385 - DNA, 25 bp, Homo sapien
ggaaaccactcaggcgaggcatctg

SEQ ID NO: 4244386 - DNA, 25 bp, Homo sapien
gagcttgcactctgcataaggcaga

SEQ ID NO: 4244387 - DNA, 25 bp, Homo sapien
tgacaaggctaagcataggggaggt

SEQ ID NO: 4244388 - DNA, 25 bp, Homo sapien
ctcaatgacatggaggatgacaagg

SEQ ID NO: 4244389 - DNA, 25 bp, Homo sapien
tgggagtcgtgaaggcctcaatgac

SEQ ID NO: 4244390 - DNA, 25 bp, Homo sapien
gacttgtgtcctggcatttggcagt

SEQ ID NO: 4244391 - DNA, 25 bp, Homo sapien
gaactcaacacctgatggaagctgg

SEQ ID NO: 4244392 - DNA, 25 bp, Homo sapien
cattgccatacaccaagtccatggg

SEQ ID NO: 4244393 - DNA, 25 bp, Homo sapien
tccgggcattcagcactcagatcaa

SEQ ID NO: 4244394 - DNA, 25 bp, Homo sapien
ttagaactcacctggagaacacctg

SEQ ID NO: 4244395 - DNA, 25 bp, Homo sapien
gagctaccatatatctatcagccag

SEQ ID NO: 4244396 - DNA, 25 bp, Homo sapien
taacactgccgttatagtgaggaga

SEQ ID NO: 4244397 - DNA, 25 bp, Homo sapien
caaatcctgtaatagcctgcccaaa

SEQ ID NO: 4244398 - DNA, 25 bp, Homo sapien
tactggtcacattgatgatactgag

SEQ ID NO: 4244399 - DNA, 25 bp, Homo sapien
tgttgagcatcactagttatcaggg

SEQ ID NO: 4244400 - DNA, 25 bp, Homo sapien
tgggaaggcagtgtgatacattcac

SEQ ID NO: 4244401 - DNA, 25 bp, Homo sapien
tgggcaaagcatttgatcagacact

SEQ ID NO: 4244402 - DNA, 25 bp, Homo sapien
gatggaactgtcatacacggctggt

SEQ ID NO: 4244403 - DNA, 25 bp, Homo sapien
caggatttcaaaatcccggtctctc

SEQ ID NO: 4244404 - DNA, 25 bp, Homo sapien
taattttattctttcgtgtgcctgg

SEQ ID NO: 4244405 - DNA, 25 bp, Homo sapien
tcaaaatcccggtctctcttttctc

SEQ ID NO: 4244406 - DNA, 25 bp, Homo sapien
tgttacttgccgtgttcacagagct

SEQ ID NO: 4244407 - DNA, 25 bp, Homo sapien
caggaacccctgtttgctgctagag

SEQ ID NO: 4244408 - DNA, 25 bp, Homo sapien
ggctccgcagaccaaagggtcgcaa

SEQ ID NO: 4244409 - DNA, 25 bp, Homo sapien
cacttggagaagtcgcaattgagac

SEQ ID NO: 4244410 - DNA, 25 bp, Homo sapien
gaggtctcacttgagctgtgcccca

SEQ ID NO: 4244411 - DNA, 25 bp, Homo sapien
tttgcaaatcccacctcctgcgggg

SEQ ID NO: 4244412 - DNA, 25 bp, Homo sapien
tccgtttcagcattacagggtttat

SEQ ID NO: 4244413 - DNA, 25 bp, Homo sapien
ccagctcccattatccgtgatatat

SEQ ID NO: 4244414 - DNA, 25 bp, Homo sapien
ctttaattccgtttcagcattacag

SEQ ID NO: 4244415 - DNA, 25 bp, Homo sapien
ccattatccgtgatatatttatttg

SEQ ID NO: 4244416 - DNA, 25 bp, Homo sapien
tttatactgacacagacctgtccac

SEQ ID NO: 4244417 - DNA, 25 bp, Homo sapien
cctactcgatcagcatttatactga

SEQ ID NO: 4244418 - DNA, 25 bp, Homo sapien
actggcaaattaaaccctactcgat

SEQ ID NO: 4244419 - DNA, 25 bp, Homo sapien
gcaaattaaaccctactcgatcagc

SEQ ID NO: 4244420 - DNA, 25 bp, Homo sapien
caatcgtggagacttaaaggcgtct

SEQ ID NO: 4244421 - DNA, 25 bp, Homo sapien
tcaatcgtggagacttaaaggcgtc

SEQ ID NO: 4244422 - DNA, 25 bp, Homo sapien
gtggagacttaaaggcgtcttgtga

SEQ ID NO: 4244423 - DNA, 25 bp, Homo sapien
tcgtggagacttaaaggcgtcttgt

SEQ ID NO: 4244424 - DNA, 25 bp, Homo sapien
tgttctgtgcgctaagtggtggctc

SEQ ID NO: 4244425 - DNA, 25 bp, Homo sapien
cgctgtctgctgttgtgtttaggct

SEQ ID NO: 4244426 - DNA, 25 bp, Homo sapien
gctcagagaagcgtcagatctaccg

SEQ ID NO: 4244427 - DNA, 25 bp, Homo sapien
gatctaccgctaaacggtggtgcct

SEQ ID NO: 4244428 - DNA, 25 bp, Homo sapien
tgctggaactgcctacagacaaggt

SEQ ID NO: 4244429 - DNA, 25 bp, Homo sapien
ccctgtagatagaaacagtgtgttt

SEQ ID NO: 4244430 - DNA, 25 bp, Homo sapien
tagaaacagtgtgtttcttgtcatc

SEQ ID NO: 4244431 - DNA, 25 bp, Homo sapien
cctacagacaaggtgacaggacctc

SEQ ID NO: 4244432 - DNA, 25 bp, Homo sapien
agcgccgctcattccccgagatgca

SEQ ID NO: 4244433 - DNA, 25 bp, Homo sapien
catattcactgacttgggccctgga

SEQ ID NO: 4244434 - DNA, 25 bp, Homo sapien
gagatgcaatctcatattcactgac

SEQ ID NO: 4244435 - DNA, 25 bp, Homo sapien
gctcattccccgagatgcaatctca

SEQ ID NO: 4244436 - DNA, 25 bp, Homo sapien
cagaggcaacgcaaggaaccaagtg

SEQ ID NO: 4244437 - DNA, 25 bp, Homo sapien
caagagagagcctgtgaaatctgca

SEQ ID NO: 4244438 - DNA, 25 bp, Homo sapien
gttggggacaacagcttccagccag

SEQ ID NO: 4244439 - DNA, 25 bp, Homo sapien
actttctgaagttggggacaacagc

SEQ ID NO: 4244440 - DNA, 25 bp, Homo sapien
gcagatcatgattagataagagtaa

SEQ ID NO: 4244441 - DNA, 25 bp, Homo sapien
atcatgattagataagagtaaggac

SEQ ID NO: 4244442 - DNA, 25 bp, Homo sapien
cagatcatgattagataagagtaag

SEQ ID NO: 4244443 - DNA, 25 bp, Homo sapien
ctgcagatcatgattagataagagt

SEQ ID NO: 4244444 - DNA, 25 bp, Homo sapien
gcagcagtgaccggagccacgaaat

SEQ ID NO: 4244445 - DNA, 25 bp, Homo sapien
gtggcagcagtgaccggagccacga

SEQ ID NO: 4244446 - DNA, 25 bp, Homo sapien
gcagtgaccggagccacgaaatgag

SEQ ID NO: 4244447 - DNA, 25 bp, Homo sapien
agcagtgaccggagccacgaaatga

SEQ ID NO: 4244448 - DNA, 25 bp, Homo sapien
gcttcgtgcagatgcacgatgatgg

SEQ ID NO: 4244449 - DNA, 25 bp, Homo sapien
accttctgcttcgtgcagatgcacg

SEQ ID NO: 4244450 - DNA, 25 bp, Homo sapien
taaagtgccgtggacaccttctgct

SEQ ID NO: 4244451 - DNA, 25 bp, Homo sapien
gctcctggctgttgataaagtgccg

SEQ ID NO: 4244452 - DNA, 25 bp, Homo sapien
aggaagggagtgcctaggtatgttc

SEQ ID NO: 4244453 - DNA, 25 bp, Homo sapien
tagaatattgatatttcaacattgg

SEQ ID NO: 4244454 - DNA, 25 bp, Homo sapien
aacattggtagtgctgagcagcagc

SEQ ID NO: 4244455 - DNA, 25 bp, Homo sapien
attgatatttcaacattggtagtgc

SEQ ID NO: 4244456 - DNA, 25 bp, Homo sapien
gaatattgatatttcaacattggta

SEQ ID NO: 4244457 - DNA, 25 bp, Homo sapien
ttaaccatgggtgaggatacagcct

SEQ ID NO: 4244458 - DNA, 25 bp, Homo sapien
cctgaagttagctggcaccacggca

SEQ ID NO: 4244459 - DNA, 25 bp, Homo sapien
gtgctgcctgccaaatacgattccc

SEQ ID NO: 4244460 - DNA, 25 bp, Homo sapien
agagtcaagaatatcggagcaggga

SEQ ID NO: 4244461 - DNA, 25 bp, Homo sapien
tgaccttcgtggagggtgtgccagg

SEQ ID NO: 4244462 - DNA, 25 bp, Homo sapien
atgatcctccctgaaggagcttgtg

SEQ ID NO: 4244463 - DNA, 25 bp, Homo sapien
gtgccaggtgccgtttgtaacaatg

SEQ ID NO: 4244464 - DNA, 25 bp, Homo sapien
agcagagccatgatcctccctgaag

SEQ ID NO: 4244465 - DNA, 25 bp, Homo sapien
ccagcaagtgtgcaccctgtgtacc

SEQ ID NO: 4244466 - DNA, 25 bp, Homo sapien
ccctgtgtaccatggtccctgtgca

SEQ ID NO: 4244467 - DNA, 25 bp, Homo sapien
tgcaccctgtgtaccatggtccctg

SEQ ID NO: 4244468 - DNA, 25 bp, Homo sapien
caagtgtgcaccctgtgtaccatgg

SEQ ID NO: 4244469 - DNA, 25 bp, Homo sapien
tacccccttctagtcgtttccatca

SEQ ID NO: 4244470 - DNA, 25 bp, Homo sapien
tgagcatccctaggcattctgagaa

SEQ ID NO: 4244471 - DNA, 25 bp, Homo sapien
cagtagacatgaagctgccatttga

SEQ ID NO: 4244472 - DNA, 25 bp, Homo sapien
gtcttcctgcctagtgagagcagta

SEQ ID NO: 4244473 - DNA, 25 bp, Homo sapien
ttgagttggaaagaccatcttcgcc

SEQ ID NO: 4244474 - DNA, 25 bp, Homo sapien
gaggtgattgattactcggtagtct

SEQ ID NO: 4244475 - DNA, 25 bp, Homo sapien
tctctgaggaggtgattgattactc

SEQ ID NO: 4244476 - DNA, 25 bp, Homo sapien
ctgagcagactttctctgaggaggt

SEQ ID NO: 4244477 - DNA, 25 bp, Homo sapien
tcggtagtctttcttagaacagcct

SEQ ID NO: 4244478 - DNA, 25 bp, Homo sapien
aagaactaaccagaaccttagcact

SEQ ID NO: 4244479 - DNA, 25 bp, Homo sapien
ctaaccagaaccttagcacttgtgg

SEQ ID NO: 4244480 - DNA, 25 bp, Homo sapien
gaaccttagcacttgtggtcagcct

SEQ ID NO: 4244481 - DNA, 25 bp, Homo sapien
accagaaccttagcacttgtggtca

SEQ ID NO: 4244482 - DNA, 25 bp, Homo sapien
taagtgagctacaggtgagttccga

SEQ ID NO: 4244483 - DNA, 25 bp, Homo sapien
taaactttcggctatgtgcagactc

SEQ ID NO: 4244484 - DNA, 25 bp, Homo sapien
tttctggagtctttcgaaggcctca

SEQ ID NO: 4244485 - DNA, 25 bp, Homo sapien
tgagttccgactgctagcagtgagg

SEQ ID NO: 4244486 - DNA, 25 bp, Homo sapien
cttcatctagatggaaaagggagcc

SEQ ID NO: 4244487 - DNA, 25 bp, Homo sapien
ggagtccaccatgaaacttgtcacg

SEQ ID NO: 4244488 - DNA, 25 bp, Homo sapien
tctggccagctgtcggaattaaagg

SEQ ID NO: 4244489 - DNA, 25 bp, Homo sapien
tgctactttcagtgctgctcaggac

SEQ ID NO: 4244490 - DNA, 25 bp, Homo sapien
tagctctcacatgccaatgcgagtg

SEQ ID NO: 4244491 - DNA, 25 bp, Homo sapien
aactgtgccctgagataccatttgg

SEQ ID NO: 4244492 - DNA, 25 bp, Homo sapien
gatgttctgcaggactcatgaggac

SEQ ID NO: 4244493 - DNA, 25 bp, Homo sapien
gaggatctttgtttcacacccgtgg

SEQ ID NO: 4244494 - DNA, 25 bp, Homo sapien
tttggaaggactaacagaaagcacc

SEQ ID NO: 4244495 - DNA, 25 bp, Homo sapien
tattaatagtgagtttcaggcccct

SEQ ID NO: 4244496 - DNA, 25 bp, Homo sapien
gagttctgattcacccacgaaggtt

SEQ ID NO: 4244497 - DNA, 25 bp, Homo sapien
ggagtaggaccttaacccacttgca

SEQ ID NO: 4244498 - DNA, 25 bp, Homo sapien
aagtacagtcggtttgattaccagg

SEQ ID NO: 4244499 - DNA, 25 bp, Homo sapien
gggagcgccctactaaatctcctgt

SEQ ID NO: 4244500 - DNA, 25 bp, Homo sapien
tctgaaccaacatgctacagtagct

SEQ ID NO: 4244501 - DNA, 25 bp, Homo sapien
gcctagttttgtacatggatctcat

SEQ ID NO: 4244502 - DNA, 25 bp, Homo sapien
tccatgcccctaaaattgtgtagtg

SEQ ID NO: 4244503 - DNA, 25 bp, Homo sapien
tgtgggatcttaccctttccatgcc

SEQ ID NO: 4244504 - DNA, 25 bp, Homo sapien
tctgtttgctgtcgtcctgaaggtc

SEQ ID NO: 4244505 - DNA, 25 bp, Homo sapien
tggtagtactcgctaacatgagaga

SEQ ID NO: 4244506 - DNA, 25 bp, Homo sapien
attcaaaagccagatcatctgacct

SEQ ID NO: 4244507 - DNA, 25 bp, Homo sapien
gaaagttgaagtgatttgaccaaac

SEQ ID NO: 4244508 - DNA, 25 bp, Homo sapien
gccagatcatctgacctcatgtata

SEQ ID NO: 4244509 - DNA, 25 bp, Homo sapien
ggattacaggattatgtgcctgtaa

SEQ ID NO: 4244510 - DNA, 25 bp, Homo sapien
cagtcctgtaggtatgctgcactag

SEQ ID NO: 4244511 - DNA, 25 bp, Homo sapien
ggtcaaaaacctgctcactagagag

SEQ ID NO: 4244512 - DNA, 25 bp, Homo sapien
taatgtttgggttgactcacggtac

SEQ ID NO: 4244513 - DNA, 25 bp, Homo sapien
tggtgcaaacatacaatggcgatgg

SEQ ID NO: 4244514 - DNA, 25 bp, Homo sapien
ttgtccacgttccttctgaaggcac

SEQ ID NO: 4244515 - DNA, 25 bp, Homo sapien
catcttcaaagagaggaatggccag

SEQ ID NO: 4244516 - DNA, 25 bp, Homo sapien
atcttcaaagagaggaatggccagt

SEQ ID NO: 4244517 - DNA, 25 bp, Homo sapien
gcttgtccacgttccttctgaaggc

SEQ ID NO: 4244518 - DNA, 25 bp, Homo sapien
tgtttaggacttctcagactatgat

SEQ ID NO: 4244519 - DNA, 25 bp, Homo sapien
aaaatggatgcatacctgtataagg

SEQ ID NO: 4244520 - DNA, 25 bp, Homo sapien
ttgcactttaaaagatccagtgagg

SEQ ID NO: 4244521 - DNA, 25 bp, Homo sapien
taagttactaacgtaatagagccaa

SEQ ID NO: 4244522 - DNA, 25 bp, Homo sapien
tgtgacgcaaggtattgcactgaac

SEQ ID NO: 4244523 - DNA, 25 bp, Homo sapien
catggtgtgacgcaaggtattgcac

SEQ ID NO: 4244524 - DNA, 25 bp, Homo sapien
ggtcccatggtgtgacgcaaggtat

SEQ ID NO: 4244525 - DNA, 25 bp, Homo sapien
gacgcaaggtattgcactgaacaca

SEQ ID NO: 4244526 - DNA, 25 bp, Homo sapien
gggcacgaacccaccgcagtgcttg

SEQ ID NO: 4244527 - DNA, 25 bp, Homo sapien
tctgtgccctgacgaggaaactggg

SEQ ID NO: 4244528 - DNA, 25 bp, Homo sapien
actggctccgagagcaaaggcatga

SEQ ID NO: 4244529 - DNA, 25 bp, Homo sapien
caagctcgcataggcagtgcggccg

SEQ ID NO: 4244530 - DNA, 25 bp, Homo sapien
gagccaagtcactttccaaaggtca

SEQ ID NO: 4244531 - DNA, 25 bp, Homo sapien
cgaccatctgtaataatgcccagag

SEQ ID NO: 4244532 - DNA, 25 bp, Homo sapien
aggcctggtgcttgcgaccctcaac

SEQ ID NO: 4244533 - DNA, 25 bp, Homo sapien
ggccgcaagtcctccagaaaacgga

SEQ ID NO: 4244534 - DNA, 25 bp, Homo sapien
ataatgtgccgatgtgggaacaagg

SEQ ID NO: 4244535 - DNA, 25 bp, Homo sapien
gataatgtgccgatgtgggaacaag

SEQ ID NO: 4244536 - DNA, 25 bp, Homo sapien
tttcagtatgtgttatggcaggata

SEQ ID NO: 4244537 - DNA, 25 bp, Homo sapien
tcataacccgtcaaacagtttttca

SEQ ID NO: 4244538 - DNA, 25 bp, Homo sapien
cagtatgtgttatggcaggatattc

SEQ ID NO: 4244539 - DNA, 25 bp, Homo sapien
agtttttcagtatgtgttatggcag

SEQ ID NO: 4244540 - DNA, 25 bp, Homo sapien
gaaaggccaaattactctctcccac

SEQ ID NO: 4244541 - DNA, 25 bp, Homo sapien
tctcccacccatgctgtgaagttca

SEQ ID NO: 4244542 - DNA, 25 bp, Homo sapien
ccggctgccagagaaaacgaaaggc

SEQ ID NO: 4244543 - DNA, 25 bp, Homo sapien
cccacccatgctgtgaagttcagag

SEQ ID NO: 4244544 - DNA, 25 bp, Homo sapien
cttattccaaacatatccgcagtgc

SEQ ID NO: 4244545 - DNA, 25 bp, Homo sapien
gcagtgccgtcagttgccagtgtca

SEQ ID NO: 4244546 - DNA, 25 bp, Homo sapien
agtgtcatactaaagaggtctcatc

SEQ ID NO: 4244547 - DNA, 25 bp, Homo sapien
ccagtgtcatactaaagaggtctca

SEQ ID NO: 4244548 - DNA, 25 bp, Homo sapien
tacactattggccagcttcggaatt

SEQ ID NO: 4244549 - DNA, 25 bp, Homo sapien
ttggagggcaggaccttcgttcacc

SEQ ID NO: 4244550 - DNA, 25 bp, Homo sapien
tcggaattttgtgaatgcagctgct

SEQ ID NO: 4244551 - DNA, 25 bp, Homo sapien
cactccaacccgtggagaaggttga

SEQ ID NO: 4244552 - DNA, 25 bp, Homo sapien
gtttcctgtgttagactgcaagctc

SEQ ID NO: 4244553 - DNA, 25 bp, Homo sapien
tttacagatgcaggtggctgtttcc

SEQ ID NO: 4244554 - DNA, 25 bp, Homo sapien
ctttacagatgcaggtggctgtttc

SEQ ID NO: 4244555 - DNA, 25 bp, Homo sapien
gctgtttcctgtgttagactgcaag

SEQ ID NO: 4244556 - DNA, 25 bp, Homo sapien
taagaatcacctgagtcacttgaca

SEQ ID NO: 4244557 - DNA, 25 bp, Homo sapien
gggtgtcccaagcaccagattataa

SEQ ID NO: 4244558 - DNA, 25 bp, Homo sapien
tcttaaagagacacacgggaaactg

SEQ ID NO: 4244559 - DNA, 25 bp, Homo sapien
gacaaactaacagcatcctgtctct

SEQ ID NO: 4244560 - DNA, 25 bp, Homo sapien
tccgtttcatctcccgtctggaaaa

SEQ ID NO: 4244561 - DNA, 25 bp, Homo sapien
ttccgtttcatctcccgtctggaaa

SEQ ID NO: 4244562 - DNA, 25 bp, Homo sapien
gtttcatctcccgtctggaaaaata

SEQ ID NO: 4244563 - DNA, 25 bp, Homo sapien
catctcccgtctggaaaaatattct

SEQ ID NO: 4244564 - DNA, 25 bp, Homo sapien
gcagaattgatacagtgaagctcca

SEQ ID NO: 4244565 - DNA, 25 bp, Homo sapien
gggacacacttcttactttgaggaa

SEQ ID NO: 4244566 - DNA, 25 bp, Homo sapien
tattatgaatagcaccggtgtgaac

SEQ ID NO: 4244567 - DNA, 25 bp, Homo sapien
taatcaagcagtcgacaaggattgc

SEQ ID NO: 4244568 - DNA, 25 bp, Homo sapien
gacagcatactgaactattttggcc

SEQ ID NO: 4244569 - DNA, 25 bp, Homo sapien
cactcatcagttgttatcaaaccgg

SEQ ID NO: 4244570 - DNA, 25 bp, Homo sapien
caagatgagtcaccagtagccacag

SEQ ID NO: 4244571 - DNA, 25 bp, Homo sapien
tcaaaccggtagagaagattcaatc

SEQ ID NO: 4244572 - DNA, 25 bp, Homo sapien
tacaaagatggctggctacaaggca

SEQ ID NO: 4244573 - DNA, 25 bp, Homo sapien
tttctcggccaccaacggccaatgg

SEQ ID NO: 4244574 - DNA, 25 bp, Homo sapien
caatggcagaggtcatacaaagatg

SEQ ID NO: 4244575 - DNA, 25 bp, Homo sapien
gagcagaacttgtcttctagcccaa

SEQ ID NO: 4244576 - DNA, 25 bp, Homo sapien
tgccttttgcttactaggctcttgc

SEQ ID NO: 4244577 - DNA, 25 bp, Homo sapien
tatctggcgccatcttattttgcct

SEQ ID NO: 4244578 - DNA, 25 bp, Homo sapien
tttgccttttgcttactaggctctt

SEQ ID NO: 4244579 - DNA, 25 bp, Homo sapien
ctttgaagcccttatctggcgccat

SEQ ID NO: 4244580 - DNA, 25 bp, Homo sapien
tgcaaaggatcggttaggaaatatt

SEQ ID NO: 4244581 - DNA, 25 bp, Homo sapien
ggcacactgactgcgcacagtaggg

SEQ ID NO: 4244582 - DNA, 25 bp, Homo sapien
ctttgctagtctgagatggcacact

SEQ ID NO: 4244583 - DNA, 25 bp, Homo sapien
ttaagctttgctggccacaaatgct

SEQ ID NO: 4244584 - DNA, 25 bp, Homo sapien
tgccgagtcaagctgcccgaccggt

SEQ ID NO: 4244585 - DNA, 25 bp, Homo sapien
tcaacaagggtagaagcggtttctg

SEQ ID NO: 4244586 - DNA, 25 bp, Homo sapien
tcatgtatgtcaagttcaccacccc

SEQ ID NO: 4244587 - DNA, 25 bp, Homo sapien
tgcccgaccggtcctgcccattctt

SEQ ID NO: 4244588 - DNA, 25 bp, Homo sapien
cccagaagttaagcagccactctcc

SEQ ID NO: 4244589 - DNA, 25 bp, Homo sapien
agaagttaagcagccactctcctga

SEQ ID NO: 4244590 - DNA, 25 bp, Homo sapien
agttaagcagccactctcctgacct

SEQ ID NO: 4244591 - DNA, 25 bp, Homo sapien
aagttaagcagccactctcctgacc

SEQ ID NO: 4244592 - DNA, 25 bp, Homo sapien
tcttcctctcaattctattcttgcc

SEQ ID NO: 4244593 - DNA, 25 bp, Homo sapien
cttcctctcaattctattcttgcca

SEQ ID NO: 4244594 - DNA, 25 bp, Homo sapien
ctcttcctctcaattctattcttgc

SEQ ID NO: 4244595 - DNA, 25 bp, Homo sapien
ttcctctcaattctattcttgccat

SEQ ID NO: 4244596 - DNA, 25 bp, Homo sapien
ggatctgaaattgtggcaataatca

SEQ ID NO: 4244597 - DNA, 25 bp, Homo sapien
gtggcaataatcaatagtttaccaa

SEQ ID NO: 4244598 - DNA, 25 bp, Homo sapien
gatctgaaattgtggcaataatcaa

SEQ ID NO: 4244599 - DNA, 25 bp, Homo sapien
aattgtggcaataatcaatagttta

SEQ ID NO: 4244600 - DNA, 25 bp, Homo sapien
ctaaagtcagacatatggcaaggat

SEQ ID NO: 4244601 - DNA, 25 bp, Homo sapien
taaacctaacaaatacagtgcatgc

SEQ ID NO: 4244602 - DNA, 25 bp, Homo sapien
ggtatcagccaatgcagttaggcag

SEQ ID NO: 4244603 - DNA, 25 bp, Homo sapien
taacacagtatagaaggtatcagcc

SEQ ID NO: 4244604 - DNA, 25 bp, Homo sapien
caatgaactgataaactggaatttg

SEQ ID NO: 4244605 - DNA, 25 bp, Homo sapien
gagtgtgaataaacattctaatcct

SEQ ID NO: 4244606 - DNA, 25 bp, Homo sapien
tgaactgataaactggaatttggag

SEQ ID NO: 4244607 - DNA, 25 bp, Homo sapien
tagtaagtgcttaatcaacgttgat

SEQ ID NO: 4244608 - DNA, 25 bp, Homo sapien
tactgaaccggtgcttgatgccctc

SEQ ID NO: 4244609 - DNA, 25 bp, Homo sapien
tgtgatgaatgcaggaccaatagct

SEQ ID NO: 4244610 - DNA, 25 bp, Homo sapien
tcagcagatgtgagacagcagagct

SEQ ID NO: 4244611 - DNA, 25 bp, Homo sapien
tctgaatggcaatgaatacccgttt

SEQ ID NO: 4244612 - DNA, 25 bp, Homo sapien
ccatgagccatggaagctgcaaggt

SEQ ID NO: 4244613 - DNA, 25 bp, Homo sapien
cacaatgaagcaggtcgcccaagat

SEQ ID NO: 4244614 - DNA, 25 bp, Homo sapien
ttgaaagcgcgtttccagggcggac

SEQ ID NO: 4244615 - DNA, 25 bp, Homo sapien
gaaccgtggttttgacgcagccgtg

SEQ ID NO: 4244616 - DNA, 25 bp, Homo sapien
tatctttctgcgcttgactggccgg

SEQ ID NO: 4244617 - DNA, 25 bp, Homo sapien
gccgaacttcccaacaggcagggag

SEQ ID NO: 4244618 - DNA, 25 bp, Homo sapien
tcaagaaatacgtgtcgaccgcatg

SEQ ID NO: 4244619 - DNA, 25 bp, Homo sapien
gattcatcaactagtgcagcgccta

SEQ ID NO: 4244620 - DNA, 25 bp, Homo sapien
ggagcgttgtccaacacgtgagact

SEQ ID NO: 4244621 - DNA, 25 bp, Homo sapien
tagcagccgccggagcgttgtccaa

SEQ ID NO: 4244622 - DNA, 25 bp, Homo sapien
cagggtagaacacgtagctccaacc

SEQ ID NO: 4244623 - DNA, 25 bp, Homo sapien
ccaacacgtgagactcatgtgatga

SEQ ID NO: 4244624 - DNA, 25 bp, Homo sapien
ttggcccttcaagcctcaactgcag

SEQ ID NO: 4244625 - DNA, 25 bp, Homo sapien
tgcagccgtgcgcaagcagtcacga

SEQ ID NO: 4244626 - DNA, 25 bp, Homo sapien
caccgggaggttcttgcccggcaga

SEQ ID NO: 4244627 - DNA, 25 bp, Homo sapien
gttatgcgccactctcaacttggag

SEQ ID NO: 4244628 - DNA, 25 bp, Homo sapien
tgcaggagacctacaaattgccgca

SEQ ID NO: 4244629 - DNA, 25 bp, Homo sapien
gacgatggttctgggtgctactctg

SEQ ID NO: 4244630 - DNA, 25 bp, Homo sapien
tcatcgagaaaaagagacgtgaccg

SEQ ID NO: 4244631 - DNA, 25 bp, Homo sapien
tgaccggattaacgagtgcatcgcc

SEQ ID NO: 4244632 - DNA, 25 bp, Homo sapien
tatctggccaagcacgagaacactc

SEQ ID NO: 4244633 - DNA, 25 bp, Homo sapien
tgtgcccgggaggtgcttcagtatc

SEQ ID NO: 4244634 - DNA, 25 bp, Homo sapien
tcaaaagtgaccacggacgcaggtt

SEQ ID NO: 4244635 - DNA, 25 bp, Homo sapien
tcagggagaaatgtcgaaacaggtc

SEQ ID NO: 4244636 - DNA, 25 bp, Homo sapien
gaagtgctggtatcccacctcagtg

SEQ ID NO: 4244637 - DNA, 25 bp, Homo sapien
tcagtgccagtgctatacccaggcc

SEQ ID NO: 4244638 - DNA, 25 bp, Homo sapien
tcatgaacccagacaagatctcggc

SEQ ID NO: 4244639 - DNA, 25 bp, Homo sapien
tccgtccgtcgactcttctgtcttg

SEQ ID NO: 4244640 - DNA, 25 bp, Homo sapien
gaggtttccgcaggtctgctcccca

SEQ ID NO: 4244641 - DNA, 25 bp, Homo sapien
tttggggaggtttccgcaggtctgc

SEQ ID NO: 4244642 - DNA, 25 bp, Homo sapien
gggaggtttccgcaggtctgctccc

SEQ ID NO: 4244643 - DNA, 25 bp, Homo sapien
gcactggcatagcacggtagtggtt

SEQ ID NO: 4244644 - DNA, 25 bp, Homo sapien
ggcctaaccattagtacttactgtg

SEQ ID NO: 4244645 - DNA, 25 bp, Homo sapien
ttgtacaagctgagctgccccggag

SEQ ID NO: 4244646 - DNA, 25 bp, Homo sapien
tggcacctgtttctaggcctaacca

SEQ ID NO: 4244647 - DNA, 25 bp, Homo sapien
ggtctgagaaatgcggacaccccga

SEQ ID NO: 4244648 - DNA, 25 bp, Homo sapien
aagccactgacatgctcgtctcgcg

SEQ ID NO: 4244649 - DNA, 25 bp, Homo sapien
gaaggtttcttccactatagatggg

SEQ ID NO: 4244650 - DNA, 25 bp, Homo sapien
ccaaaggaagtagggcaaccagcct

SEQ ID NO: 4244651 - DNA, 25 bp, Homo sapien
ccacagcagaacatgagccgggtga

SEQ ID NO: 4244652 - DNA, 25 bp, Homo sapien
tcattcatgaattcatcagtgaaca

SEQ ID NO: 4244653 - DNA, 25 bp, Homo sapien
ccttcattcatgaattcatcagtga

SEQ ID NO: 4244654 - DNA, 25 bp, Homo sapien
ttcatgaattcatcagtgaacattt

SEQ ID NO: 4244655 - DNA, 25 bp, Homo sapien
catccttcattcatgaattcatcag

SEQ ID NO: 4244656 - DNA, 25 bp, Homo sapien
cagagggaccaaaagtctgggatct

SEQ ID NO: 4244657 - DNA, 25 bp, Homo sapien
tctgagttggccaagatccaggctt

SEQ ID NO: 4244658 - DNA, 25 bp, Homo sapien
cctgcttttgctggagggctagatt

SEQ ID NO: 4244659 - DNA, 25 bp, Homo sapien
gacacgtgcttatggcatccacagg

SEQ ID NO: 4244660 - DNA, 25 bp, Homo sapien
cctgagcgatgacagatttcatcac

SEQ ID NO: 4244661 - DNA, 25 bp, Homo sapien
cagccctggcctgtttactggaaga

SEQ ID NO: 4244662 - DNA, 25 bp, Homo sapien
catcctgagcgatgacagatttcat

SEQ ID NO: 4244663 - DNA, 25 bp, Homo sapien
gaagacgcgaccctgttttctacat

SEQ ID NO: 4244664 - DNA, 25 bp, Homo sapien
cctgcctgtcctatgacacactgtg

SEQ ID NO: 4244665 - DNA, 25 bp, Homo sapien
gacgtaggggagtcacacctgctga

SEQ ID NO: 4244666 - DNA, 25 bp, Homo sapien
cctgtcctatgacacactgtgagtg

SEQ ID NO: 4244667 - DNA, 25 bp, Homo sapien
gagtggccctgcctgtcctatgaca

SEQ ID NO: 4244668 - DNA, 25 bp, Homo sapien
cggagggattttccagcttagggca

SEQ ID NO: 4244669 - DNA, 25 bp, Homo sapien
cctctatggtcacgggctgcttggg

SEQ ID NO: 4244670 - DNA, 25 bp, Homo sapien
tgggacccgaggcaatgtgacatag

SEQ ID NO: 4244671 - DNA, 25 bp, Homo sapien
cctctagtgtcatagtttcctgcct

SEQ ID NO: 4244672 - DNA, 25 bp, Homo sapien
agcaggccatctggcggctcgctgc

SEQ ID NO: 4244673 - DNA, 25 bp, Homo sapien
gaaggggaaccaagccttgcctctg

SEQ ID NO: 4244674 - DNA, 25 bp, Homo sapien
tcaggtgattccactcgtctgagga

SEQ ID NO: 4244675 - DNA, 25 bp, Homo sapien
tggcaaggtctccttgtttcagagg

SEQ ID NO: 4244676 - DNA, 25 bp, Homo sapien
ctgtacatggcaaggtctccttgtt

SEQ ID NO: 4244677 - DNA, 25 bp, Homo sapien
gattccactcgtctgaggacaggga

SEQ ID NO: 4244678 - DNA, 25 bp, Homo sapien
tttaaaacacaagcaatcctattca

SEQ ID NO: 4244679 - DNA, 25 bp, Homo sapien
tcctattcattatagggaaacaaat

SEQ ID NO: 4244680 - DNA, 25 bp, Homo sapien
caccccgtggaatagtttaaatcag

SEQ ID NO: 4244681 - DNA, 25 bp, Homo sapien
agattccaggcaacatataatgtta

SEQ ID NO: 4244682 - DNA, 25 bp, Homo sapien
aaatcagcccagttgctcaggaagg

SEQ ID NO: 4244683 - DNA, 25 bp, Homo sapien
tcagcccagttgctcaggaaggagg

SEQ ID NO: 4244684 - DNA, 25 bp, Homo sapien
acaaatcagcccagttgctcaggaa

SEQ ID NO: 4244685 - DNA, 25 bp, Homo sapien
tgtttcttccacaaatcagcccagt

SEQ ID NO: 4244686 - DNA, 25 bp, Homo sapien
aatcagggtgacttttgccttagaa

SEQ ID NO: 4244687 - DNA, 25 bp, Homo sapien
cagggtgacttttgccttagaattc

SEQ ID NO: 4244688 - DNA, 25 bp, Homo sapien
ctaatctacaccattcaatcagggt

SEQ ID NO: 4244689 - DNA, 25 bp, Homo sapien
tcagtgctgggttcttgactaatct

SEQ ID NO: 4244690 - DNA, 25 bp, Homo sapien
tggtgaaggcactaagatcccaggg

SEQ ID NO: 4244691 - DNA, 25 bp, Homo sapien
gctgctaatggcaaagacaggactg

SEQ ID NO: 4244692 - DNA, 25 bp, Homo sapien
aagatcccagggctgctaatggcaa

SEQ ID NO: 4244693 - DNA, 25 bp, Homo sapien
ggaggccagcgtccagcttcagttt

SEQ ID NO: 4244694 - DNA, 25 bp, Homo sapien
tgacaaaattcagggccacccgact

SEQ ID NO: 4244695 - DNA, 25 bp, Homo sapien
cctctgtcttgcactggtgggttca

SEQ ID NO: 4244696 - DNA, 25 bp, Homo sapien
ttcttaccttcgctggtgcctcttc

SEQ ID NO: 4244697 - DNA, 25 bp, Homo sapien
ccgactcttcttaccttcgctggtg

SEQ ID NO: 4244698 - DNA, 25 bp, Homo sapien
cacctcatgtttggcagctgtggtg

SEQ ID NO: 4244699 - DNA, 25 bp, Homo sapien
tgtcccatcacctcatgtttggcag

SEQ ID NO: 4244700 - DNA, 25 bp, Homo sapien
tcccatcacctcatgtttggcagct

SEQ ID NO: 4244701 - DNA, 25 bp, Homo sapien
catcacctcatgtttggcagctgtg

SEQ ID NO: 4244702 - DNA, 25 bp, Homo sapien
tccaactcattgtttccaacgaggg

SEQ ID NO: 4244703 - DNA, 25 bp, Homo sapien
tgtccacagaagttctcaccaaaag

SEQ ID NO: 4244704 - DNA, 25 bp, Homo sapien
aaccaccagattttgaatctcacag

SEQ ID NO: 4244705 - DNA, 25 bp, Homo sapien
gctgaaagtcatcaagacactttcc

SEQ ID NO: 4244706 - DNA, 25 bp, Homo sapien
cctttggagtgccagttcctcttga

SEQ ID NO: 4244707 - DNA, 25 bp, Homo sapien
tcctcacccagcaagactatgttgt

SEQ ID NO: 4244708 - DNA, 25 bp, Homo sapien
agtcctacccttgcgtctgccgagg

SEQ ID NO: 4244709 - DNA, 25 bp, Homo sapien
tgactctccctttggagtgccagtt

SEQ ID NO: 4244710 - DNA, 25 bp, Homo sapien
tgagctagaacatgatcttggtcaa

SEQ ID NO: 4244711 - DNA, 25 bp, Homo sapien
ccttcccagtgagctagaacatgat

SEQ ID NO: 4244712 - DNA, 25 bp, Homo sapien
tgatcttggtcaagccggagtgctg

SEQ ID NO: 4244713 - DNA, 25 bp, Homo sapien
ttggtcaagccggagtgctgatgta

SEQ ID NO: 4244714 - DNA, 25 bp, Homo sapien
cccaattctcccctctaccagccat

SEQ ID NO: 4244715 - DNA, 25 bp, Homo sapien
cagccatatcttgctcacttggaat

SEQ ID NO: 4244716 - DNA, 25 bp, Homo sapien
ctcccctctaccagccatatcttgc

SEQ ID NO: 4244717 - DNA, 25 bp, Homo sapien
agccatatcttgctcacttggaata

SEQ ID NO: 4244718 - DNA, 25 bp, Homo sapien
tcactacccattcctagagcttgtt

SEQ ID NO: 4244719 - DNA, 25 bp, Homo sapien
ggtgtgatcaccgttcatcgcagcc

SEQ ID NO: 4244720 - DNA, 25 bp, Homo sapien
gcctcaccctctagggctcaatcaa

SEQ ID NO: 4244721 - DNA, 25 bp, Homo sapien
cattcctagagcttgttcagcatcc

SEQ ID NO: 4244722 - DNA, 25 bp, Homo sapien
aaggcttaatacgtgctggctagcg

SEQ ID NO: 4244723 - DNA, 25 bp, Homo sapien
ctggctagcgctgttattatccgtc

SEQ ID NO: 4244724 - DNA, 25 bp, Homo sapien
ttcatgcccgtgcagctttgcaagg

SEQ ID NO: 4244725 - DNA, 25 bp, Homo sapien
tcaggaaatacttgccaaaagtaat

SEQ ID NO: 4244726 - DNA, 25 bp, Homo sapien
tgtgaccgaggagatgcagtaaacg

SEQ ID NO: 4244727 - DNA, 25 bp, Homo sapien
tcaggcgagtgtgctttgaaaacct

SEQ ID NO: 4244728 - DNA, 25 bp, Homo sapien
ttgtttctaacaccctcaggcgagt

SEQ ID NO: 4244729 - DNA, 25 bp, Homo sapien
tggtctcctagacaacagtgtgtga

SEQ ID NO: 4244730 - DNA, 25 bp, Homo sapien
ctgtgagaagtcaacggctcctggg

SEQ ID NO: 4244731 - DNA, 25 bp, Homo sapien
ccccggccgcaggaagtggaattct

SEQ ID NO: 4244732 - DNA, 25 bp, Homo sapien
tatatgaagggctctcggtgcctcc

SEQ ID NO: 4244733 - DNA, 25 bp, Homo sapien
ccacgtgtctgggtctatatgaagg

SEQ ID NO: 4244734 - DNA, 25 bp, Homo sapien
gctgccaaggaaaccgtctggacca

SEQ ID NO: 4244735 - DNA, 25 bp, Homo sapien
tgccagcgctgccaaggaaaccgtc

SEQ ID NO: 4244736 - DNA, 25 bp, Homo sapien
agcgctgccaaggaaaccgtctgga

SEQ ID NO: 4244737 - DNA, 25 bp, Homo sapien
caaggaaaccgtctggaccactagg

SEQ ID NO: 4244738 - DNA, 25 bp, Homo sapien
tgataacatcatgggctccaaggtg

SEQ ID NO: 4244739 - DNA, 25 bp, Homo sapien
cagtcgtggaacatggatgtgcccc

SEQ ID NO: 4244740 - DNA, 25 bp, Homo sapien
agttcccttctgataacatcatggg

SEQ ID NO: 4244741 - DNA, 25 bp, Homo sapien
gatgtgcccctgagtgtaggaggga

SEQ ID NO: 4244742 - DNA, 25 bp, Homo sapien
ggtggaaaaagagattagagagtct

SEQ ID NO: 4244743 - DNA, 25 bp, Homo sapien
gttgggtggaaaaagagattagaga

SEQ ID NO: 4244744 - DNA, 25 bp, Homo sapien
ctagggaacaatggcatccagaagt

SEQ ID NO: 4244745 - DNA, 25 bp, Homo sapien
agggaacaatggcatccagaagtgg

SEQ ID NO: 4244746 - DNA, 25 bp, Homo sapien
tctgggctaggtggtcagtagcaaa

SEQ ID NO: 4244747 - DNA, 25 bp, Homo sapien
tttatcatccttctgggctaggtgg

SEQ ID NO: 4244748 - DNA, 25 bp, Homo sapien
aggtgcccgccttgtgtcttgacca

SEQ ID NO: 4244749 - DNA, 25 bp, Homo sapien
aaattaactgcattgatcatatcct

SEQ ID NO: 4244750 - DNA, 25 bp, Homo sapien
tgttttcgttcatagtagtgagaac

SEQ ID NO: 4244751 - DNA, 25 bp, Homo sapien
cccctcttgttttcgttcatagtag

SEQ ID NO: 4244752 - DNA, 25 bp, Homo sapien
cgttcatagtagtgagaacggctac

SEQ ID NO: 4244753 - DNA, 25 bp, Homo sapien
tagtagtgagaacggctacttgcca

SEQ ID NO: 4244754 - DNA, 25 bp, Homo sapien
gttgcggtactcattggaagcccca

SEQ ID NO: 4244755 - DNA, 25 bp, Homo sapien
gcactcctgcatggactggatcaag

SEQ ID NO: 4244756 - DNA, 25 bp, Homo sapien
tctgcactgattgatgttagcctct

SEQ ID NO: 4244757 - DNA, 25 bp, Homo sapien
cctgtcccgccgtggagaatgggta

SEQ ID NO: 4244758 - DNA, 25 bp, Homo sapien
aggcagcccgggtcagctgtgccac

SEQ ID NO: 4244759 - DNA, 25 bp, Homo sapien
aaggcagcccgggtcagctgtgcca

SEQ ID NO: 4244760 - DNA, 25 bp, Homo sapien
gaaggcagcccgggtcagctgtgcc

SEQ ID NO: 4244761 - DNA, 25 bp, Homo sapien
agaaggcagcccgggtcagctgtgc

SEQ ID NO: 4244762 - DNA, 25 bp, Homo sapien
gcctgaggtgcggaacaggagctgc

SEQ ID NO: 4244763 - DNA, 25 bp, Homo sapien
tagctgctgggtctgcttcgtgatg

SEQ ID NO: 4244764 - DNA, 25 bp, Homo sapien
cagagaggcggtcggaagtagctgc

SEQ ID NO: 4244765 - DNA, 25 bp, Homo sapien
ggagctgctgtgtccgcatttttct

SEQ ID NO: 4244766 - DNA, 25 bp, Homo sapien
agcagttttgggccaaacgtctgtt

SEQ ID NO: 4244767 - DNA, 25 bp, Homo sapien
tcctgatgctaaatgaagcagtggg

SEQ ID NO: 4244768 - DNA, 25 bp, Homo sapien
ccacaagagcagcaggaattaggct

SEQ ID NO: 4244769 - DNA, 25 bp, Homo sapien
ctgagcaaaagaaggagagtcgtct

SEQ ID NO: 4244770 - DNA, 25 bp, Homo sapien
agggaggaagctgccgtagatcctg

SEQ ID NO: 4244771 - DNA, 25 bp, Homo sapien
gcaggtgtaggaacggcagggagga

SEQ ID NO: 4244772 - DNA, 25 bp, Homo sapien
gaagctgccgtagatcctgcaggcc

SEQ ID NO: 4244773 - DNA, 25 bp, Homo sapien
gaggaagctgccgtagatcctgcag

SEQ ID NO: 4244774 - DNA, 25 bp, Homo sapien
atgacctcgcccgtacatcctggaa

SEQ ID NO: 4244775 - DNA, 25 bp, Homo sapien
tacatcctggaaacaacagctccca

SEQ ID NO: 4244776 - DNA, 25 bp, Homo sapien
atcccacatgacctcgcccgtacat

SEQ ID NO: 4244777 - DNA, 25 bp, Homo sapien
tcgcccgtacatcctggaaacaaca

SEQ ID NO: 4244778 - DNA, 25 bp, Homo sapien
gtgttcctgccatcctcagaggaat

SEQ ID NO: 4244779 - DNA, 25 bp, Homo sapien
cttgattaagttggaatgatccttc

SEQ ID NO: 4244780 - DNA, 25 bp, Homo sapien
gtgggcttcttgggaatgtctgact

SEQ ID NO: 4244781 - DNA, 25 bp, Homo sapien
tcgttcttgaagcaggccaggtagt

SEQ ID NO: 4244782 - DNA, 25 bp, Homo sapien
gcttgctctcgggtcttgtacttgg

SEQ ID NO: 4244783 - DNA, 25 bp, Homo sapien
gtactctcttgatgacttgggcggc

SEQ ID NO: 4244784 - DNA, 25 bp, Homo sapien
caggtcacatccatggctttcgagg

SEQ ID NO: 4244785 - DNA, 25 bp, Homo sapien
agctcgatctccaagaacctaggct

SEQ ID NO: 4244786 - DNA, 25 bp, Homo sapien
aagtcactccaccttcgggccagcg

SEQ ID NO: 4244787 - DNA, 25 bp, Homo sapien
cgatctccaagaacctaggctgctc

SEQ ID NO: 4244788 - DNA, 25 bp, Homo sapien
caccttcgggccagcgtgcaggcca

SEQ ID NO: 4244789 - DNA, 25 bp, Homo sapien
gacagagatccttaacccaggggtc

SEQ ID NO: 4244790 - DNA, 25 bp, Homo sapien
ggtgcaccttatacgcttttgctgc

SEQ ID NO: 4244791 - DNA, 25 bp, Homo sapien
caccttatacgcttttgctgcccat

SEQ ID NO: 4244792 - DNA, 25 bp, Homo sapien
gtccaggtgcaccttatacgctttt

SEQ ID NO: 4244793 - DNA, 25 bp, Homo sapien
atccaccgagaagccgcgtgggctt

SEQ ID NO: 4244794 - DNA, 25 bp, Homo sapien
tccaggagatggctgccaatttcca

SEQ ID NO: 4244795 - DNA, 25 bp, Homo sapien
tgccaatttccatccaccgagaagc

SEQ ID NO: 4244796 - DNA, 25 bp, Homo sapien
gagatggctgccaatttccatccac

SEQ ID NO: 4244797 - DNA, 25 bp, Homo sapien
tggccacacggcatatcatgcgctc

SEQ ID NO: 4244798 - DNA, 25 bp, Homo sapien
gctccgcgctgggaacatccttctt

SEQ ID NO: 4244799 - DNA, 25 bp, Homo sapien
tttgtttcctggtcgcacataggcg

SEQ ID NO: 4244800 - DNA, 25 bp, Homo sapien
gggcagtctcctgagaaaaacgcag

SEQ ID NO: 4244801 - DNA, 25 bp, Homo sapien
atttgtccttgagctggtgttcagc

SEQ ID NO: 4244802 - DNA, 25 bp, Homo sapien
gggcgctcctggatataggtctgca

SEQ ID NO: 4244803 - DNA, 25 bp, Homo sapien
gttgggtcgcccatcatcaaatttg

SEQ ID NO: 4244804 - DNA, 25 bp, Homo sapien
atgttcggctcagggcgctcctgga

SEQ ID NO: 4244805 - DNA, 25 bp, Homo sapien
gtgggggagttgagcttcttgggga

SEQ ID NO: 4244806 - DNA, 25 bp, Homo sapien
tgagcttcttggggatgtctggctt

SEQ ID NO: 4244807 - DNA, 25 bp, Homo sapien
gggagttgagcttcttggggatgtc

SEQ ID NO: 4244808 - DNA, 25 bp, Homo sapien
agcttcttggggatgtctggcttct

SEQ ID NO: 4244809 - DNA, 25 bp, Homo sapien
ttgtaactgctgttggttggaaggt

SEQ ID NO: 4244810 - DNA, 25 bp, Homo sapien
cttgtaactgctgttggttggaagg

SEQ ID NO: 4244811 - DNA, 25 bp, Homo sapien
tgtaactgctgttggttggaaggtt

SEQ ID NO: 4244812 - DNA, 25 bp, Homo sapien
gtggttttgaacttgtaactgctgt

SEQ ID NO: 4244813 - DNA, 25 bp, Homo sapien
agtcaagcagagcaatgggaatgga

SEQ ID NO: 4244814 - DNA, 25 bp, Homo sapien
taaggctagtcaagcagagcaatgg

SEQ ID NO: 4244815 - DNA, 25 bp, Homo sapien
ggctagtcaagcagagcaatgggaa

SEQ ID NO: 4244816 - DNA, 25 bp, Homo sapien
tagtcaagcagagcaatgggaatgg

SEQ ID NO: 4244817 - DNA, 25 bp, Homo sapien
gaatgaatgtagagaaagcctcaag

SEQ ID NO: 4244818 - DNA, 25 bp, Homo sapien
ttattccacgccaactcttccagag

SEQ ID NO: 4244819 - DNA, 25 bp, Homo sapien
taagtggatgaatgacgaatgaacc

SEQ ID NO: 4244820 - DNA, 25 bp, Homo sapien
ttccagagtcttgaagtcttcctgc

SEQ ID NO: 4244821 - DNA, 25 bp, Homo sapien
catgaacttcgggttacatatttat

SEQ ID NO: 4244822 - DNA, 25 bp, Homo sapien
ggcatgtgctaccaccatggctcgc

SEQ ID NO: 4244823 - DNA, 25 bp, Homo sapien
taccaccatggctcgctatttattt

SEQ ID NO: 4244824 - DNA, 25 bp, Homo sapien
gaggaaacatgaacttcgggttaca

SEQ ID NO: 4244825 - DNA, 25 bp, Homo sapien
gagcaaatctttgagaaacttcttg

SEQ ID NO: 4244826 - DNA, 25 bp, Homo sapien
cagttgagttgttatgcttgggaac

SEQ ID NO: 4244827 - DNA, 25 bp, Homo sapien
tggataggtgtattaatacagccag

SEQ ID NO: 4244828 - DNA, 25 bp, Homo sapien
aaaacttgctctttgacaacatgga

SEQ ID NO: 4244829 - DNA, 25 bp, Homo sapien
taatttagctatttcgtttctagct

SEQ ID NO: 4244830 - DNA, 25 bp, Homo sapien
ctagcttttggcaatcttatttcaa

SEQ ID NO: 4244831 - DNA, 25 bp, Homo sapien
agttcttatcagaggaaaatctagg

SEQ ID NO: 4244832 - DNA, 25 bp, Homo sapien
aatagttcttatcagaggaaaatct

SEQ ID NO: 4244833 - DNA, 25 bp, Homo sapien
tgtagtaggtattgccctaagttag

SEQ ID NO: 4244834 - DNA, 25 bp, Homo sapien
ctaagttaggattgatcatattccc

SEQ ID NO: 4244835 - DNA, 25 bp, Homo sapien
tcagagttccggtaatttcagaaat

SEQ ID NO: 4244836 - DNA, 25 bp, Homo sapien
tgagcctgtactgtgcctaagtcct

SEQ ID NO: 4244837 - DNA, 25 bp, Homo sapien
cattttggaacatgcggacattacc

SEQ ID NO: 4244838 - DNA, 25 bp, Homo sapien
cctcatagcccagttaggttctttg

SEQ ID NO: 4244839 - DNA, 25 bp, Homo sapien
caagttaggaaatggctgttccacc

SEQ ID NO: 4244840 - DNA, 25 bp, Homo sapien
tggatttatagtgctcacagatagc

SEQ ID NO: 4244841 - DNA, 25 bp, Homo sapien
gaaacaatgtcgaaagcactgactg

SEQ ID NO: 4244842 - DNA, 25 bp, Homo sapien
tcttcagtaatacccagagagagct

SEQ ID NO: 4244843 - DNA, 25 bp, Homo sapien
ccagagtagaagactagcagagcat

SEQ ID NO: 4244844 - DNA, 25 bp, Homo sapien
cactgactggactaatggagtggct

SEQ ID NO: 4244845 - DNA, 25 bp, Homo sapien
ggttcacgcctgtgagaaacactca

SEQ ID NO: 4244846 - DNA, 25 bp, Homo sapien
tctggtattacgtctagtgcaagcc

SEQ ID NO: 4244847 - DNA, 25 bp, Homo sapien
tattatgcctcgaaaatggaccact

SEQ ID NO: 4244848 - DNA, 25 bp, Homo sapien
ttctggtgggatgttggttcacgcc

SEQ ID NO: 4244849 - DNA, 25 bp, Homo sapien
tcattgatgtgtttagaccattgcc

SEQ ID NO: 4244850 - DNA, 25 bp, Homo sapien
aatttctctattggggttttgactg

SEQ ID NO: 4244851 - DNA, 25 bp, Homo sapien
ctgatttcagcggagtgtttttata

SEQ ID NO: 4244852 - DNA, 25 bp, Homo sapien
cactgtgcctagacaaaatctgggt

SEQ ID NO: 4244853 - DNA, 25 bp, Homo sapien
tgaatgcaaccattactgctatcca

SEQ ID NO: 4244854 - DNA, 25 bp, Homo sapien
cactattctacattctgtctatgat

SEQ ID NO: 4244855 - DNA, 25 bp, Homo sapien
tgttaagtaccttcatattgaatgc

SEQ ID NO: 4244856 - DNA, 25 bp, Homo sapien
cattctgtctatgattagtcttgct

SEQ ID NO: 4244857 - DNA, 25 bp, Homo sapien
tgcccggcctcaaatgggatttcag

SEQ ID NO: 4244858 - DNA, 25 bp, Homo sapien
catgcccggcctcaaatgggatttc

SEQ ID NO: 4244859 - DNA, 25 bp, Homo sapien
cccggcctcaaatgggatttcaggc

SEQ ID NO: 4244860 - DNA, 25 bp, Homo sapien
caagtgatccctgtccctgcctccc

SEQ ID NO: 4244861 - DNA, 25 bp, Homo sapien
gagtactgcgacattctaggttttg

SEQ ID NO: 4244862 - DNA, 25 bp, Homo sapien
ttgttttggatacttcgagtactgc

SEQ ID NO: 4244863 - DNA, 25 bp, Homo sapien
ttttggatacttcgagtactgcgac

SEQ ID NO: 4244864 - DNA, 25 bp, Homo sapien
tacttcgagtactgcgacattctag

SEQ ID NO: 4244865 - DNA, 25 bp, Homo sapien
atttctagaaattgggctgcctttg

SEQ ID NO: 4244866 - DNA, 25 bp, Homo sapien
ctcctcttggagctttatctcttca

SEQ ID NO: 4244867 - DNA, 25 bp, Homo sapien
tcctcttggagctttatctcttcat

SEQ ID NO: 4244868 - DNA, 25 bp, Homo sapien
tatagttggctaaatagctcagtag

SEQ ID NO: 4244869 - DNA, 25 bp, Homo sapien
gaggacttctttcgctatttgaggc

SEQ ID NO: 4244870 - DNA, 25 bp, Homo sapien
tctgatccagtctaataagatccac

SEQ ID NO: 4244871 - DNA, 25 bp, Homo sapien
ctggctcacttaaaaggttgtcaag

SEQ ID NO: 4244872 - DNA, 25 bp, Homo sapien
ggcgcccgctgccgtgctcggctaa

SEQ ID NO: 4244873 - DNA, 25 bp, Homo sapien
tacaggcgcccgctgccgtgctcgg

SEQ ID NO: 4244874 - DNA, 25 bp, Homo sapien
cgcccgctgccgtgctcggctaatt

SEQ ID NO: 4244875 - DNA, 25 bp, Homo sapien
caggcgcccgctgccgtgctcggct

SEQ ID NO: 4244876 - DNA, 25 bp, Homo sapien
cataaaaggtggcaccagccgtcct

SEQ ID NO: 4244877 - DNA, 25 bp, Homo sapien
tagtgtgtgccttgaattagctgcc

SEQ ID NO: 4244878 - DNA, 25 bp, Homo sapien
cataaagaatcagctagagttgtca

SEQ ID NO: 4244879 - DNA, 25 bp, Homo sapien
tctttagatatcacacttcagtggc

SEQ ID NO: 4244880 - DNA, 25 bp, Homo sapien
tagaaaacctttaggcgtgaatgac

SEQ ID NO: 4244881 - DNA, 25 bp, Homo sapien
tccaaaatggtctgcagagagtgag

SEQ ID NO: 4244882 - DNA, 25 bp, Homo sapien
catgaagtttctagtgccacacaca

SEQ ID NO: 4244883 - DNA, 25 bp, Homo sapien
gagcggaggcaccagatcaatgttg

SEQ ID NO: 4244884 - DNA, 25 bp, Homo sapien
catgttgcatactaccctggtggga

SEQ ID NO: 4244885 - DNA, 25 bp, Homo sapien
gcatttcaagacatccagacgctat

SEQ ID NO: 4244886 - DNA, 25 bp, Homo sapien
tagcgacttccgtatacataaaggg

SEQ ID NO: 4244887 - DNA, 25 bp, Homo sapien
gataaaactctatggtacacctgct

SEQ ID NO: 4244888 - DNA, 25 bp, Homo sapien
aactactggctcaggggatcttcct

SEQ ID NO: 4244889 - DNA, 25 bp, Homo sapien
tatcttgctaacagagcatgttgac

SEQ ID NO: 4244890 - DNA, 25 bp, Homo sapien
aaacttggatttgtgcccatcaaat

SEQ ID NO: 4244891 - DNA, 25 bp, Homo sapien
agcctctcgagtatcctgtatcttg

SEQ ID NO: 4244892 - DNA, 25 bp, Homo sapien
gcactccattggtcggccattcagc

SEQ ID NO: 4244893 - DNA, 25 bp, Homo sapien
tcagatttgggggtctagtcaggtc

SEQ ID NO: 4244894 - DNA, 25 bp, Homo sapien
caatatcagatttgggggtctagtc

SEQ ID NO: 4244895 - DNA, 25 bp, Homo sapien
cttcttatgcactccattggtcggc

SEQ ID NO: 4244896 - DNA, 25 bp, Homo sapien
gataccgttttgtgcactccttgag

SEQ ID NO: 4244897 - DNA, 25 bp, Homo sapien
tagagtggctttttccggtcctagc

SEQ ID NO: 4244898 - DNA, 25 bp, Homo sapien
tctttggctacgacaactacatggc

SEQ ID NO: 4244899 - DNA, 25 bp, Homo sapien
gctttaaaataatgcccgcggcgcc

SEQ ID NO: 4244900 - DNA, 25 bp, Homo sapien
tagaaaatttcggtgctaaacactc

SEQ ID NO: 4244901 - DNA, 25 bp, Homo sapien
ggaggtatcaggtaaggagttaaca

SEQ ID NO: 4244902 - DNA, 25 bp, Homo sapien
cactctaaaaagagcagatctgtct

SEQ ID NO: 4244903 - DNA, 25 bp, Homo sapien
cactcttaccgtttctctgtagtca

SEQ ID NO: 4244904 - DNA, 25 bp, Homo sapien
gatagaatgacacatgccgcagatc

SEQ ID NO: 4244905 - DNA, 25 bp, Homo sapien
gcccactctgtttctaagcggcaga

SEQ ID NO: 4244906 - DNA, 25 bp, Homo sapien
cagaattgggcgtaaggatctccct

SEQ ID NO: 4244907 - DNA, 25 bp, Homo sapien
tggctgtcacttgcgcttgagaggc

SEQ ID NO: 4244908 - DNA, 25 bp, Homo sapien
tctttgctttagattagatggtgta

SEQ ID NO: 4244909 - DNA, 25 bp, Homo sapien
ttgctttagattagatggtgtaaca

SEQ ID NO: 4244910 - DNA, 25 bp, Homo sapien
tttgctttagattagatggtgtaac

SEQ ID NO: 4244911 - DNA, 25 bp, Homo sapien
ctttgctttagattagatggtgtaa

SEQ ID NO: 4244912 - DNA, 25 bp, Homo sapien
tgtctggtcccactattagagagcc

SEQ ID NO: 4244913 - DNA, 25 bp, Homo sapien
cctcacttgatttgagctcctgtca

SEQ ID NO: 4244914 - DNA, 25 bp, Homo sapien
ttcagaacatagtcactcaggattc

SEQ ID NO: 4244915 - DNA, 25 bp, Homo sapien
cacacttaatggtgtctggtgcaca

SEQ ID NO: 4244916 - DNA, 25 bp, Homo sapien
caaatgtatgtgaccagaagacccg

SEQ ID NO: 4244917 - DNA, 25 bp, Homo sapien
tgcaattctgcatcagtgtactgtg

SEQ ID NO: 4244918 - DNA, 25 bp, Homo sapien
gctgaatcatgtttttaccgtagga

SEQ ID NO: 4244919 - DNA, 25 bp, Homo sapien
cagtgtcattcgtaacttcacagga

SEQ ID NO: 4244920 - DNA, 25 bp, Homo sapien
tgctactcttacacagtgcagcagg

SEQ ID NO: 4244921 - DNA, 25 bp, Homo sapien
catgaagcgtcatgggtggaaacgc

SEQ ID NO: 4244922 - DNA, 25 bp, Homo sapien
cagggttgactcttagtctggcttc

SEQ ID NO: 4244923 - DNA, 25 bp, Homo sapien
tagcacggttctcacctgtcactgt

SEQ ID NO: 4244924 - DNA, 25 bp, Homo sapien
catggactgtgcacgtgacacttaa

SEQ ID NO: 4244925 - DNA, 25 bp, Homo sapien
ttagttgatgtgaccgaggaatccc

SEQ ID NO: 4244926 - DNA, 25 bp, Homo sapien
agtggacttcatcctttgcggcggc

SEQ ID NO: 4244927 - DNA, 25 bp, Homo sapien
gagtgattaccttagccacagggtg

SEQ ID NO: 4244928 - DNA, 25 bp, Homo sapien
tgactgaatcatggtagtacatcat

SEQ ID NO: 4244929 - DNA, 25 bp, Homo sapien
caggaaagataggaatgatcagcat

SEQ ID NO: 4244930 - DNA, 25 bp, Homo sapien
aatcatggtagtacatcataacagg

SEQ ID NO: 4244931 - DNA, 25 bp, Homo sapien
catcataacaggaaagataggaatg

SEQ ID NO: 4244932 - DNA, 25 bp, Homo sapien
acctggtaaggcaagatctgggtag

SEQ ID NO: 4244933 - DNA, 25 bp, Homo sapien
agtccttacagcaacttgggattga

SEQ ID NO: 4244934 - DNA, 25 bp, Homo sapien
gattgaaaatacctggtaaggcaag

SEQ ID NO: 4244935 - DNA, 25 bp, Homo sapien
aaaacaaagctagcccagtgtccaa

SEQ ID NO: 4244936 - DNA, 25 bp, Homo sapien
cctagtgtgtacacccaattggcac

SEQ ID NO: 4244937 - DNA, 25 bp, Homo sapien
tactcatcagcacgggaaatttgac

SEQ ID NO: 4244938 - DNA, 25 bp, Homo sapien
ggtcaccgggttgatgctgaaccta

SEQ ID NO: 4244939 - DNA, 25 bp, Homo sapien
ggcatgatttgattactcatcagca

SEQ ID NO: 4244940 - DNA, 25 bp, Homo sapien
tcatctcatgggtctacagcttaat

SEQ ID NO: 4244941 - DNA, 25 bp, Homo sapien
ggctattagcaatctgattcctggc

SEQ ID NO: 4244942 - DNA, 25 bp, Homo sapien
cgccaacgaaaggtgcccactgagt

SEQ ID NO: 4244943 - DNA, 25 bp, Homo sapien
tttgccaaggcaacagaatgctaag

SEQ ID NO: 4244944 - DNA, 25 bp, Homo sapien
ttagagagtaagagtttgagcacgt

SEQ ID NO: 4244945 - DNA, 25 bp, Homo sapien
ttggaaggcactgatagagtggcaa

SEQ ID NO: 4244946 - DNA, 25 bp, Homo sapien
gtgtggtggctttattggtccaagt

SEQ ID NO: 4244947 - DNA, 25 bp, Homo sapien
ttgagcacgtatgaggtctgagttg

SEQ ID NO: 4244948 - DNA, 25 bp, Homo sapien
gagaaccagttgagccatgcagtgt

SEQ ID NO: 4244949 - DNA, 25 bp, Homo sapien
gaagtgaatccatccctagggcctc

SEQ ID NO: 4244950 - DNA, 25 bp, Homo sapien
gaaggacttcacctgccattgctga

SEQ ID NO: 4244951 - DNA, 25 bp, Homo sapien
gacatgcccaggtaatgatggccct

SEQ ID NO: 4244952 - DNA, 25 bp, Homo sapien
tctatgaagggtggtctgcagtggt

SEQ ID NO: 4244953 - DNA, 25 bp, Homo sapien
gtgggaatagtgtttgcagacccct

SEQ ID NO: 4244954 - DNA, 25 bp, Homo sapien
tggcaactggatggctcttggcagc

SEQ ID NO: 4244955 - DNA, 25 bp, Homo sapien
cctggggtctgtgatattggcaact

SEQ ID NO: 4244956 - DNA, 25 bp, Homo sapien
ggggttggggttgactgtgtgcatg

SEQ ID NO: 4244957 - DNA, 25 bp, Homo sapien
gctgatggtaggggttggggttgac

SEQ ID NO: 4244958 - DNA, 25 bp, Homo sapien
gtaggggttggggttgactgtgtgc

SEQ ID NO: 4244959 - DNA, 25 bp, Homo sapien
tgatggtaggggttggggttgactg

SEQ ID NO: 4244960 - DNA, 25 bp, Homo sapien
ggtcagggctggcagtgtgcatgtg

SEQ ID NO: 4244961 - DNA, 25 bp, Homo sapien
gcttatgggtgtttagtggctccat

SEQ ID NO: 4244962 - DNA, 25 bp, Homo sapien
cagcttatgggtgtttagtggctcc

SEQ ID NO: 4244963 - DNA, 25 bp, Homo sapien
gccagcttatgggtgtttagtggct

SEQ ID NO: 4244964 - DNA, 25 bp, Homo sapien
tagatcactgaaacacgagctcgtt

SEQ ID NO: 4244965 - DNA, 25 bp, Homo sapien
gcgtaaacgcgatacagagggcaca

SEQ ID NO: 4244966 - DNA, 25 bp, Homo sapien
tatgaactgattaaggtcgagtgcg

SEQ ID NO: 4244967 - DNA, 25 bp, Homo sapien
gatacagagggcacaatagatcact

SEQ ID NO: 4244968 - DNA, 25 bp, Homo sapien
ttaggctttgatgagggacttcctg

SEQ ID NO: 4244969 - DNA, 25 bp, Homo sapien
ttgatgagggacttcctgtgagtgt

SEQ ID NO: 4244970 - DNA, 25 bp, Homo sapien
atgagggacttcctgtgagtgtgct

SEQ ID NO: 4244971 - DNA, 25 bp, Homo sapien
gctttgatgagggacttcctgtgag

SEQ ID NO: 4244972 - DNA, 25 bp, Homo sapien
tgtctaaattcctagcttcatcaag

SEQ ID NO: 4244973 - DNA, 25 bp, Homo sapien
ctaaattcctagcttcatcaagagc

SEQ ID NO: 4244974 - DNA, 25 bp, Homo sapien
tcccatgtctaaattcctagcttca

SEQ ID NO: 4244975 - DNA, 25 bp, Homo sapien
ttgctcccatgtctaaattcctagc

SEQ ID NO: 4244976 - DNA, 25 bp, Homo sapien
tgcgtttgcaatatagagacatcaa

SEQ ID NO: 4244977 - DNA, 25 bp, Homo sapien
tagagacatcaaaggcctgatgagt

SEQ ID NO: 4244978 - DNA, 25 bp, Homo sapien
tgctgatcagcggaaagatcaaagc

SEQ ID NO: 4244979 - DNA, 25 bp, Homo sapien
ccaagtctagtgaaatgcgtttgca

SEQ ID NO: 4244980 - DNA, 25 bp, Homo sapien
tcctccaggaagattgtctaccatg

SEQ ID NO: 4244981 - DNA, 25 bp, Homo sapien
ggaagattgtctaccatggaccaca

SEQ ID NO: 4244982 - DNA, 25 bp, Homo sapien
tgttcggtgtcactgattatcctcc

SEQ ID NO: 4244983 - DNA, 25 bp, Homo sapien
catgctgttctgttcggtgtcactg

SEQ ID NO: 4244984 - DNA, 25 bp, Homo sapien
tggggtgaggaccattgagttcccc

SEQ ID NO: 4244985 - DNA, 25 bp, Homo sapien
ccaacttcactggggtgaggaccat

SEQ ID NO: 4244986 - DNA, 25 bp, Homo sapien
cactggggtgaggaccattgagttc

SEQ ID NO: 4244987 - DNA, 25 bp, Homo sapien
ttcactggggtgaggaccattgagt

SEQ ID NO: 4244988 - DNA, 25 bp, Homo sapien
tcagtgacactcttgaaagtgctca

SEQ ID NO: 4244989 - DNA, 25 bp, Homo sapien
cgttagtgactggtggacgagttct

SEQ ID NO: 4244990 - DNA, 25 bp, Homo sapien
atagctttaaaaccaatcccaagtg

SEQ ID NO: 4244991 - DNA, 25 bp, Homo sapien
cagcaagattattgacctgaagcgt

SEQ ID NO: 4244992 - DNA, 25 bp, Homo sapien
cggacttcttttccaagcctgcagc

SEQ ID NO: 4244993 - DNA, 25 bp, Homo sapien
tcttttccaagcctgcagcaatgtc

SEQ ID NO: 4244994 - DNA, 25 bp, Homo sapien
ttagatgtattcggacttcttttcc

SEQ ID NO: 4244995 - DNA, 25 bp, Homo sapien
tgtattcggacttcttttccaagcc

SEQ ID NO: 4244996 - DNA, 25 bp, Homo sapien
aaatcacgatcaaagctggttggtg

SEQ ID NO: 4244997 - DNA, 25 bp, Homo sapien
gggacctgatgcacaaaatcacgat

SEQ ID NO: 4244998 - DNA, 25 bp, Homo sapien
tcatgaatgatcactcctgggcagg

SEQ ID NO: 4244999 - DNA, 25 bp, Homo sapien
tcagagccaagggtcacagagacat

SEQ ID NO: 4245000 - DNA, 25 bp, Homo sapien
cacctcgtacagaaggtcttgtgta

SEQ ID NO: 4245001 - DNA, 25 bp, Homo sapien
tgtaagagttagactgggctgctgc

SEQ ID NO: 4245002 - DNA, 25 bp, Homo sapien
tagatgctgtctgattggaagcacc

SEQ ID NO: 4245003 - DNA, 25 bp, Homo sapien
gaagtggctccttgtttcaaaaaca

SEQ ID NO: 4245004 - DNA, 25 bp, Homo sapien
cagagacacaaaagtaggcgtgttt

SEQ ID NO: 4245005 - DNA, 25 bp, Homo sapien
tctacagtagcaaagagatcccctg

SEQ ID NO: 4245006 - DNA, 25 bp, Homo sapien
agtctgaaatccacccgcaatgttg

SEQ ID NO: 4245007 - DNA, 25 bp, Homo sapien
tgttgcaggcgcagaacagagacac

SEQ ID NO: 4245008 - DNA, 25 bp, Homo sapien
tcctttgtcaaggtgagtgtgccct

SEQ ID NO: 4245009 - DNA, 25 bp, Homo sapien
atcctttgtcaaggtgagtgtgccc

SEQ ID NO: 4245010 - DNA, 25 bp, Homo sapien
gcaaatgggtcatcttactggacag

SEQ ID NO: 4245011 - DNA, 25 bp, Homo sapien
gaagccactgctaaggttctgacct

SEQ ID NO: 4245012 - DNA, 25 bp, Homo sapien
ttgcaaacagaagtgcaaatgggtc

SEQ ID NO: 4245013 - DNA, 25 bp, Homo sapien
ctgacctaagtggattttcaagaca

SEQ ID NO: 4245014 - DNA, 25 bp, Homo sapien
cccctccaagaagtgccgtgaaata

SEQ ID NO: 4245015 - DNA, 25 bp, Homo sapien
cgaatgagagtaatagctggtaacc

SEQ ID NO: 4245016 - DNA, 25 bp, Homo sapien
gatattgtttatactgccgcgtgaa

SEQ ID NO: 4245017 - DNA, 25 bp, Homo sapien
gccgcgtgaatgtggaacatgacga

SEQ ID NO: 4245018 - DNA, 25 bp, Homo sapien
cagagaagcttgctgccgtacgcag

SEQ ID NO: 4245019 - DNA, 25 bp, Homo sapien
gtctctgggagcttgccgtatgttt

SEQ ID NO: 4245020 - DNA, 25 bp, Homo sapien
tatgtttggtacttagctggctcag

SEQ ID NO: 4245021 - DNA, 25 bp, Homo sapien
gtaggacattgaggggcaaatgccc

SEQ ID NO: 4245022 - DNA, 25 bp, Homo sapien
gtcgtggtggttgacatgttttgca

SEQ ID NO: 4245023 - DNA, 25 bp, Homo sapien
tatgactggccggtggtactgtcag

SEQ ID NO: 4245024 - DNA, 25 bp, Homo sapien
gtactgtcagtcgtggtggttgaca

SEQ ID NO: 4245025 - DNA, 25 bp, Homo sapien
tctcagacacaacgccatttgtatg

SEQ ID NO: 4245026 - DNA, 25 bp, Homo sapien
ccacttgccggagtgattagctcta

SEQ ID NO: 4245027 - DNA, 25 bp, Homo sapien
cacttgccggagtgattagctctat

SEQ ID NO: 4245028 - DNA, 25 bp, Homo sapien
cttgccggagtgattagctctattg

SEQ ID NO: 4245029 - DNA, 25 bp, Homo sapien
tcccacttgccggagtgattagctc

SEQ ID NO: 4245030 - DNA, 25 bp, Homo sapien
ttccttgtagccacaaatcctccta

SEQ ID NO: 4245031 - DNA, 25 bp, Homo sapien
acacagctgggtttgtctgcgtgca

SEQ ID NO: 4245032 - DNA, 25 bp, Homo sapien
taattatctctggtacacagctggg

SEQ ID NO: 4245033 - DNA, 25 bp, Homo sapien
gctgggtttgtctgcgtgcaacttg

SEQ ID NO: 4245034 - DNA, 25 bp, Homo sapien
tgtctgcgtgcaacttgtgagtcat

SEQ ID NO: 4245035 - DNA, 25 bp, Homo sapien
cccctctacccgataattcctctgc

SEQ ID NO: 4245036 - DNA, 25 bp, Homo sapien
ccctctacccgataattcctctgca

SEQ ID NO: 4245037 - DNA, 25 bp, Homo sapien
tcccctctacccgataattcctctg

SEQ ID NO: 4245038 - DNA, 25 bp, Homo sapien
tgtcccctctacccgataattcctc

SEQ ID NO: 4245039 - DNA, 25 bp, Homo sapien
tcagaatctgtaggtccatggtggt

SEQ ID NO: 4245040 - DNA, 25 bp, Homo sapien
tgtataggaaagaatgccagtggat

SEQ ID NO: 4245041 - DNA, 25 bp, Homo sapien
ctctggttgccagcttcaaaatggc

SEQ ID NO: 4245042 - DNA, 25 bp, Homo sapien
tctgtaggtccatggtggtgcactc

SEQ ID NO: 4245043 - DNA, 25 bp, Homo sapien
acagtcatttgccccttctaggcag

SEQ ID NO: 4245044 - DNA, 25 bp, Homo sapien
cacagtcatttgccccttctaggca

SEQ ID NO: 4245045 - DNA, 25 bp, Homo sapien
cgatttgtcgttttttaaagcacag

SEQ ID NO: 4245046 - DNA, 25 bp, Homo sapien
ccccttctaggcagcgttcttccat

SEQ ID NO: 4245047 - DNA, 25 bp, Homo sapien
ggaacatgtgccatctttgcttctt

SEQ ID NO: 4245048 - DNA, 25 bp, Homo sapien
ttgcttcttgttgcaatggcatttc

SEQ ID NO: 4245049 - DNA, 25 bp, Homo sapien
tcttgttgcaatggcatttcagcat

SEQ ID NO: 4245050 - DNA, 25 bp, Homo sapien
gaacatgtgccatctttgcttcttg

SEQ ID NO: 4245051 - DNA, 25 bp, Homo sapien
caaagtggaggtcgcatctctccct

SEQ ID NO: 4245052 - DNA, 25 bp, Homo sapien
taatgatgtgatgtgcaaccacacc

SEQ ID NO: 4245053 - DNA, 25 bp, Homo sapien
gctagctttgtgtccgaatccaaca

SEQ ID NO: 4245054 - DNA, 25 bp, Homo sapien
tcagggtgtttaatgcaagggctaa

SEQ ID NO: 4245055 - DNA, 25 bp, Homo sapien
tgatggaaccaggacaattcgagct

SEQ ID NO: 4245056 - DNA, 25 bp, Homo sapien
gaattccattcactcctgttccagt

SEQ ID NO: 4245057 - DNA, 25 bp, Homo sapien
cacgcatttgtgtgaaaagagtcta

SEQ ID NO: 4245058 - DNA, 25 bp, Homo sapien
gctgttatggtagattcagggaaca

SEQ ID NO: 4245059 - DNA, 25 bp, Homo sapien
gatttagtttctcggagtgactgaa

SEQ ID NO: 4245060 - DNA, 25 bp, Homo sapien
gagtgactgaaccaatagaatgtac

SEQ ID NO: 4245061 - DNA, 25 bp, Homo sapien
ccttccctgataatgtggatttgaa

SEQ ID NO: 4245062 - DNA, 25 bp, Homo sapien
ccctgataatgtggatttgaaacaa

SEQ ID NO: 4245063 - DNA, 25 bp, Homo sapien
gcttcagtgcctcaaccgagtcttc

SEQ ID NO: 4245064 - DNA, 25 bp, Homo sapien
cttcagtgcctcaaccgagtcttca

SEQ ID NO: 4245065 - DNA, 25 bp, Homo sapien
agcttcagtgcctcaaccgagtctt

SEQ ID NO: 4245066 - DNA, 25 bp, Homo sapien
ttcagtgcctcaaccgagtcttcat

SEQ ID NO: 4245067 - DNA, 25 bp, Homo sapien
tgcttgggtcatgaagatcccatgt

SEQ ID NO: 4245068 - DNA, 25 bp, Homo sapien
ggtcacgtctatagaggtctcttcg

SEQ ID NO: 4245069 - DNA, 25 bp, Homo sapien
gcatcaaggtcacgtctatagaggt

SEQ ID NO: 4245070 - DNA, 25 bp, Homo sapien
tatagaggtctcttcgaagttgcca

SEQ ID NO: 4245071 - DNA, 25 bp, Homo sapien
ggtctcttcgaagttgccagccctg

SEQ ID NO: 4245072 - DNA, 25 bp, Homo sapien
ttgaggtggtaggtaggcagtttcc

SEQ ID NO: 4245073 - DNA, 25 bp, Homo sapien
cactcgtttgaacagtcatgcatga

SEQ ID NO: 4245074 - DNA, 25 bp, Homo sapien
cagtttccctggcaacattatccac

SEQ ID NO: 4245075 - DNA, 25 bp, Homo sapien
tatccacctgaaagtctagtcctcc

SEQ ID NO: 4245076 - DNA, 25 bp, Homo sapien
taggtgccgatggttctataatgac

SEQ ID NO: 4245077 - DNA, 25 bp, Homo sapien
aatacgtgtcataacccatcctaag

SEQ ID NO: 4245078 - DNA, 25 bp, Homo sapien
cagtcgccggttacataggtggtaa

SEQ ID NO: 4245079 - DNA, 25 bp, Homo sapien
tctataatgactgaaacattggtgc

SEQ ID NO: 4245080 - DNA, 25 bp, Homo sapien
ccctttctgcgtgggatggcagtga

SEQ ID NO: 4245081 - DNA, 25 bp, Homo sapien
atggcagtgagcaagttcgctggac

SEQ ID NO: 4245082 - DNA, 25 bp, Homo sapien
ctggaagccctttctgcgtgggatg

SEQ ID NO: 4245083 - DNA, 25 bp, Homo sapien
gagcaagttcgctggacagtaacca

SEQ ID NO: 4245084 - DNA, 25 bp, Homo sapien
gatgtggaatgagactgaattgtgc

SEQ ID NO: 4245085 - DNA, 25 bp, Homo sapien
gctcagggagcttgattttgggcat

SEQ ID NO: 4245086 - DNA, 25 bp, Homo sapien
atttcaggtttatggcagttatcag

SEQ ID NO: 4245087 - DNA, 25 bp, Homo sapien
tccgtctattttgctgttgctcagg

SEQ ID NO: 4245088 - DNA, 25 bp, Homo sapien
ctggggagagcatatgttgtcaatc

SEQ ID NO: 4245089 - DNA, 25 bp, Homo sapien
tgttctggggagagcatatgttgtc

SEQ ID NO: 4245090 - DNA, 25 bp, Homo sapien
agagcatatgttgtcaatcttctcc

SEQ ID NO: 4245091 - DNA, 25 bp, Homo sapien
gggagagcatatgttgtcaatcttc

SEQ ID NO: 4245092 - DNA, 25 bp, Homo sapien
cttttcaggacaagagattaatttc

SEQ ID NO: 4245093 - DNA, 25 bp, Homo sapien
ttatggagattaatttgtgaagctg

SEQ ID NO: 4245094 - DNA, 25 bp, Homo sapien
tctgaagtgttagtattatggagat

SEQ ID NO: 4245095 - DNA, 25 bp, Homo sapien
gatcttaaatctgaaggccccttta

SEQ ID NO: 4245096 - DNA, 25 bp, Homo sapien
ctctggggactttaagggaacatgg

SEQ ID NO: 4245097 - DNA, 25 bp, Homo sapien
tgggttaatgggagaatttcattat

SEQ ID NO: 4245098 - DNA, 25 bp, Homo sapien
tctctggggactttaagggaacatg

SEQ ID NO: 4245099 - DNA, 25 bp, Homo sapien
gaacatgggttaatgggagaatttc

SEQ ID NO: 4245100 - DNA, 25 bp, Homo sapien
tcctctgcagtctacctacggctga

SEQ ID NO: 4245101 - DNA, 25 bp, Homo sapien
gtatattcacgcaaaagcccagctt

SEQ ID NO: 4245102 - DNA, 25 bp, Homo sapien
tctacctacggctgaatggctttct

SEQ ID NO: 4245103 - DNA, 25 bp, Homo sapien
gagtcagggatgttttatcactggc

SEQ ID NO: 4245104 - DNA, 25 bp, Homo sapien
atggccattgttctgactactacat

SEQ ID NO: 4245105 - DNA, 25 bp, Homo sapien
ttgtttgcctctcagttctgtggct

SEQ ID NO: 4245106 - DNA, 25 bp, Homo sapien
gccattgttctgactactacatttg

SEQ ID NO: 4245107 - DNA, 25 bp, Homo sapien
atttgtttgcctctcagttctgtgg

SEQ ID NO: 4245108 - DNA, 25 bp, Homo sapien
tactctctgctttgattgttgtccc

SEQ ID NO: 4245109 - DNA, 25 bp, Homo sapien
cctgtgggtttgacatcaagctaga

SEQ ID NO: 4245110 - DNA, 25 bp, Homo sapien
ctatttctcataggttgggtcatgt

SEQ ID NO: 4245111 - DNA, 25 bp, Homo sapien
tcaagctagacgctgagaaaggatg

SEQ ID NO: 4245112 - DNA, 25 bp, Homo sapien
caacagcgtgaaggattgtgctaga

SEQ ID NO: 4245113 - DNA, 25 bp, Homo sapien
ttgctgtggcccatagcttcgtcat

SEQ ID NO: 4245114 - DNA, 25 bp, Homo sapien
tctctgtcagaaggaatgtctaggt

SEQ ID NO: 4245115 - DNA, 25 bp, Homo sapien
tcagaaggaatgtctaggtctgaag

SEQ ID NO: 4245116 - DNA, 25 bp, Homo sapien
tctgtcagaaggaatgtctaggtct

SEQ ID NO: 4245117 - DNA, 25 bp, Homo sapien
agaaggaatgtctaggtctgaagac

SEQ ID NO: 4245118 - DNA, 25 bp, Homo sapien
tgctcaacactgatgtcttcagctt

SEQ ID NO: 4245119 - DNA, 25 bp, Homo sapien
ttgcagattcattagttgccactcc

SEQ ID NO: 4245120 - DNA, 25 bp, Homo sapien
tttgatttcctacgggctctgcaag

SEQ ID NO: 4245121 - DNA, 25 bp, Homo sapien
aggtcttatttttcgatcatactcc

SEQ ID NO: 4245122 - DNA, 25 bp, Homo sapien
tgaagtatttgcgttcttagctgcc

SEQ ID NO: 4245123 - DNA, 25 bp, Homo sapien
tgtacattctgcacgatttggctcc

SEQ ID NO: 4245124 - DNA, 25 bp, Homo sapien
actattaagcagctgctgatgtaca

SEQ ID NO: 4245125 - DNA, 25 bp, Homo sapien
gaatgagaatgctgaactattaagc

SEQ ID NO: 4245126 - DNA, 25 bp, Homo sapien
caggaggatcagttgccctcaagtt

SEQ ID NO: 4245127 - DNA, 25 bp, Homo sapien
gttgccctcaagttgtaaatcactg

SEQ ID NO: 4245128 - DNA, 25 bp, Homo sapien
cctcaagttgtaaatcactgtgcaa

SEQ ID NO: 4245129 - DNA, 25 bp, Homo sapien
ggatcagttgccctcaagttgtaaa

SEQ ID NO: 4245130 - DNA, 25 bp, Homo sapien
ggctcctaaatccatggggtgttct

SEQ ID NO: 4245131 - DNA, 25 bp, Homo sapien
atccatggggtgttctagtgcaggt

SEQ ID NO: 4245132 - DNA, 25 bp, Homo sapien
tcctaaatccatggggtgttctagt

SEQ ID NO: 4245133 - DNA, 25 bp, Homo sapien
taaatccatggggtgttctagtgca

SEQ ID NO: 4245134 - DNA, 25 bp, Homo sapien
cagactccagcatatgtcctcctta

SEQ ID NO: 4245135 - DNA, 25 bp, Homo sapien
agactccagcatatgtcctccttac

SEQ ID NO: 4245136 - DNA, 25 bp, Homo sapien
aacacagactccagcatatgtcctc

SEQ ID NO: 4245137 - DNA, 25 bp, Homo sapien
cacagactccagcatatgtcctcct

SEQ ID NO: 4245138 - DNA, 25 bp, Homo sapien
tcagagctagtctaggtgcaccagt

SEQ ID NO: 4245139 - DNA, 25 bp, Homo sapien
taggtcagagctagtctaggtgcac

SEQ ID NO: 4245140 - DNA, 25 bp, Homo sapien
agtaggtcagagctagtctaggtgc

SEQ ID NO: 4245141 - DNA, 25 bp, Homo sapien
gctagtctaggtgcaccagtcacag

SEQ ID NO: 4245142 - DNA, 25 bp, Homo sapien
tcaggatgactaagaacagagtagg

SEQ ID NO: 4245143 - DNA, 25 bp, Homo sapien
gtatgacacaacacccaacgagaac

SEQ ID NO: 4245144 - DNA, 25 bp, Homo sapien
tgggaatgatggttacagaacaggt

SEQ ID NO: 4245145 - DNA, 25 bp, Homo sapien
acgaagggtgactaaggtcagagca

SEQ ID NO: 4245146 - DNA, 25 bp, Homo sapien
ccagttggactagagcatgagtgct

SEQ ID NO: 4245147 - DNA, 25 bp, Homo sapien
gtcaaaggacccacgtgaggcactt

SEQ ID NO: 4245148 - DNA, 25 bp, Homo sapien
gtcacacaagtgtaacaggcgcttt

SEQ ID NO: 4245149 - DNA, 25 bp, Homo sapien
gaagagagctaccacacagctcgtg

SEQ ID NO: 4245150 - DNA, 25 bp, Homo sapien
acttgtaagtgtcaatttttgttgc

SEQ ID NO: 4245151 - DNA, 25 bp, Homo sapien
catttaatgaagttaagggctcaca

SEQ ID NO: 4245152 - DNA, 25 bp, Homo sapien
tcatttaaattatccgtggcaatcc

SEQ ID NO: 4245153 - DNA, 25 bp, Homo sapien
tttactgaacactcttcctaactct

SEQ ID NO: 4245154 - DNA, 25 bp, Homo sapien
gagattgaatcgcagattttctgct

SEQ ID NO: 4245155 - DNA, 25 bp, Homo sapien
ccagagattgaatcgcagattttct

SEQ ID NO: 4245156 - DNA, 25 bp, Homo sapien
gattgaatcgcagattttctgctac

SEQ ID NO: 4245157 - DNA, 25 bp, Homo sapien
gaccagagattgaatcgcagatttt

SEQ ID NO: 4245158 - DNA, 25 bp, Homo sapien
actttgtccttcacactttgataaa

SEQ ID NO: 4245159 - DNA, 25 bp, Homo sapien
gtccttcacactttgataaagcttg

SEQ ID NO: 4245160 - DNA, 25 bp, Homo sapien
tttgataaagcttgttcgctgccat

SEQ ID NO: 4245161 - DNA, 25 bp, Homo sapien
tcacactttgataaagcttgttcgc

SEQ ID NO: 4245162 - DNA, 25 bp, Homo sapien
tcatgactcgggctgcttcaggtta

SEQ ID NO: 4245163 - DNA, 25 bp, Homo sapien
ttggatgcctatcacaacgtcctct

SEQ ID NO: 4245164 - DNA, 25 bp, Homo sapien
ggacagtagcaagccttcaggagca

SEQ ID NO: 4245165 - DNA, 25 bp, Homo sapien
ggagcatgcgccctccactggcttg

SEQ ID NO: 4245166 - DNA, 25 bp, Homo sapien
attctaagttatttgctgcaatgtc

SEQ ID NO: 4245167 - DNA, 25 bp, Homo sapien
tatttgctgcaatgtcaaccacttc

SEQ ID NO: 4245168 - DNA, 25 bp, Homo sapien
tcttctttagcttgatgctgtgaac

SEQ ID NO: 4245169 - DNA, 25 bp, Homo sapien
tgtctgctacacacatagccccgtg

SEQ ID NO: 4245170 - DNA, 25 bp, Homo sapien
gaaggactgagtgaacccagctgac

SEQ ID NO: 4245171 - DNA, 25 bp, Homo sapien
caattgggaaggactgagtgaaccc

SEQ ID NO: 4245172 - DNA, 25 bp, Homo sapien
attgggaaggactgagtgaacccag

SEQ ID NO: 4245173 - DNA, 25 bp, Homo sapien
tgggaaggactgagtgaacccagct

SEQ ID NO: 4245174 - DNA, 25 bp, Homo sapien
cattggcataacctgagaaaaaggg

SEQ ID NO: 4245175 - DNA, 25 bp, Homo sapien
tacattgaatggtctatagttagct

SEQ ID NO: 4245176 - DNA, 25 bp, Homo sapien
ttcattggcataacctgagaaaaag

SEQ ID NO: 4245177 - DNA, 25 bp, Homo sapien
ctctattacattgaatggtctatag

SEQ ID NO: 4245178 - DNA, 25 bp, Homo sapien
aatgagtaagtgtatgactcgagat

SEQ ID NO: 4245179 - DNA, 25 bp, Homo sapien
cctgtaaggttaagggttgagcaat

SEQ ID NO: 4245180 - DNA, 25 bp, Homo sapien
gtgtatgactcgagatgctgatcca

SEQ ID NO: 4245181 - DNA, 25 bp, Homo sapien
gactcgagatgctgatccatttgcc

SEQ ID NO: 4245182 - DNA, 25 bp, Homo sapien
ttacatcagcgtctgaattcctcat

SEQ ID NO: 4245183 - DNA, 25 bp, Homo sapien
gtttacatcagcgtctgaattcctc

SEQ ID NO: 4245184 - DNA, 25 bp, Homo sapien
tgtttacatcagcgtctgaattcct

SEQ ID NO: 4245185 - DNA, 25 bp, Homo sapien
tttacatcagcgtctgaattcctca

SEQ ID NO: 4245186 - DNA, 25 bp, Homo sapien
ctgacttgactaagctgacaatttg

SEQ ID NO: 4245187 - DNA, 25 bp, Homo sapien
gccacattgcccacaaccagaaagt

SEQ ID NO: 4245188 - DNA, 25 bp, Homo sapien
tgaggacagataccatgagttattc

SEQ ID NO: 4245189 - DNA, 25 bp, Homo sapien
cgatgaaagactggtgatctgtgct

SEQ ID NO: 4245190 - DNA, 25 bp, Homo sapien
cagtctgaatggctcaggcccgctt

SEQ ID NO: 4245191 - DNA, 25 bp, Homo sapien
gcccgctttaggtttcagctctttc

SEQ ID NO: 4245192 - DNA, 25 bp, Homo sapien
ggctcaggcccgctttaggtttcag

SEQ ID NO: 4245193 - DNA, 25 bp, Homo sapien
ctgaatggctcaggcccgctttagg

SEQ ID NO: 4245194 - DNA, 25 bp, Homo sapien
tatcgtgggaggtgcaaagtcttgc

SEQ ID NO: 4245195 - DNA, 25 bp, Homo sapien
aaaaccattgtctccgctgggacat

SEQ ID NO: 4245196 - DNA, 25 bp, Homo sapien
taaactctcgaaaggcaaagccagg

SEQ ID NO: 4245197 - DNA, 25 bp, Homo sapien
tttccctgcaggatctaaactctcg

SEQ ID NO: 4245198 - DNA, 25 bp, Homo sapien
tgtagcagtggagttctccaaacac

SEQ ID NO: 4245199 - DNA, 25 bp, Homo sapien
aaacctacgacatgatatagctgtg

SEQ ID NO: 4245200 - DNA, 25 bp, Homo sapien
taggagaataacaggggcaacatct

SEQ ID NO: 4245201 - DNA, 25 bp, Homo sapien
caacatctgtcctttgatagatgag

SEQ ID NO: 4245202 - DNA, 25 bp, Homo sapien
tgtctgatgttaggctagccccatg

SEQ ID NO: 4245203 - DNA, 25 bp, Homo sapien
gctgtctgatgttaggctagcccca

SEQ ID NO: 4245204 - DNA, 25 bp, Homo sapien
tctgatgttaggctagccccatgag

SEQ ID NO: 4245205 - DNA, 25 bp, Homo sapien
gatgttaggctagccccatgagctc

SEQ ID NO: 4245206 - DNA, 25 bp, Homo sapien
gtcccctaatggtcctgtcatccag

SEQ ID NO: 4245207 - DNA, 25 bp, Homo sapien
cagtcccgagggcaaggatacaagg

SEQ ID NO: 4245208 - DNA, 25 bp, Homo sapien
catgggtcttacctggaattctgac

SEQ ID NO: 4245209 - DNA, 25 bp, Homo sapien
gcttccaggttggtctacgagacat

SEQ ID NO: 4245210 - DNA, 25 bp, Homo sapien
gccttgcgtcagagcctttccaaag

SEQ ID NO: 4245211 - DNA, 25 bp, Homo sapien
ttcctgaactgccttgcgtcagagc

SEQ ID NO: 4245212 - DNA, 25 bp, Homo sapien
gcgtcagagcctttccaaagcttgg

SEQ ID NO: 4245213 - DNA, 25 bp, Homo sapien
gaactgccttgcgtcagagcctttc

SEQ ID NO: 4245214 - DNA, 25 bp, Homo sapien
gggctttgtgaatcaagttgctcac

SEQ ID NO: 4245215 - DNA, 25 bp, Homo sapien
tgggtctttgaagcctagaggtccc

SEQ ID NO: 4245216 - DNA, 25 bp, Homo sapien
cccttcaaggtcacaagtgggtctt

SEQ ID NO: 4245217 - DNA, 25 bp, Homo sapien
tcacaagtgggtctttgaagcctag

SEQ ID NO: 4245218 - DNA, 25 bp, Homo sapien
tgaaggtatcagtgacatggtcagg

SEQ ID NO: 4245219 - DNA, 25 bp, Homo sapien
gggactaactagctttaagcaggag

SEQ ID NO: 4245220 - DNA, 25 bp, Homo sapien
caggagtcatttatgaaggcaaaac

SEQ ID NO: 4245221 - DNA, 25 bp, Homo sapien
gagagccactcggagtcacaaggaa

SEQ ID NO: 4245222 - DNA, 25 bp, Homo sapien
aaaagtaaagcaccaaagctattgc

SEQ ID NO: 4245223 - DNA, 25 bp, Homo sapien
ttgctgaaggcgtcagcaagcttcc

SEQ ID NO: 4245224 - DNA, 25 bp, Homo sapien
aagtaaagcaccaaagctattgctg

SEQ ID NO: 4245225 - DNA, 25 bp, Homo sapien
caaagctattgctgaaggcgtcagc

SEQ ID NO: 4245226 - DNA, 25 bp, Homo sapien
ctgacaatttaaagtgcagtatgaa

SEQ ID NO: 4245227 - DNA, 25 bp, Homo sapien
aattgagtgcaaagtagaaaatact

SEQ ID NO: 4245228 - DNA, 25 bp, Homo sapien
gtagaaaatactcagaggtctgaca

SEQ ID NO: 4245229 - DNA, 25 bp, Homo sapien
tactcagaggtctgacaatttaaag

SEQ ID NO: 4245230 - DNA, 25 bp, Homo sapien
gtctgaaggtaggtatttgctggca

SEQ ID NO: 4245231 - DNA, 25 bp, Homo sapien
ttaacgatgctgaggacagcatctc

SEQ ID NO: 4245232 - DNA, 25 bp, Homo sapien
cagtctgaaggtaggtatttgctgg

SEQ ID NO: 4245233 - DNA, 25 bp, Homo sapien
ctttaacgatgctgaggacagcatc

SEQ ID NO: 4245234 - DNA, 25 bp, Homo sapien
ggagacaaacgttactaagtgattg

SEQ ID NO: 4245235 - DNA, 25 bp, Homo sapien
gccaagtaggagacaaacgttacta

SEQ ID NO: 4245236 - DNA, 25 bp, Homo sapien
tgtgagcatccaggacgatggtgct

SEQ ID NO: 4245237 - DNA, 25 bp, Homo sapien
caggaggccaagtaggagacaaacg

SEQ ID NO: 4245238 - DNA, 25 bp, Homo sapien
taattataaggccagattccgaaac

SEQ ID NO: 4245239 - DNA, 25 bp, Homo sapien
gaacaagtaggtatagtaaagtgat

SEQ ID NO: 4245240 - DNA, 25 bp, Homo sapien
tagagggcccatcaaggttcggtgt

SEQ ID NO: 4245241 - DNA, 25 bp, Homo sapien
gattccgaaacagtaagaacaagta

SEQ ID NO: 4245242 - DNA, 25 bp, Homo sapien
tgtactttcaggctccaataacagc

SEQ ID NO: 4245243 - DNA, 25 bp, Homo sapien
gcccgtgtaacaggaaactctagac

SEQ ID NO: 4245244 - DNA, 25 bp, Homo sapien
ttcttggaagtctgccggtggccga

SEQ ID NO: 4245245 - DNA, 25 bp, Homo sapien
tatcacataaggcaggaacaaagcc

SEQ ID NO: 4245246 - DNA, 25 bp, Homo sapien
tatatgtcccacaggtgatccctac

SEQ ID NO: 4245247 - DNA, 25 bp, Homo sapien
gccagtagccccagtttgaaatgaa

SEQ ID NO: 4245248 - DNA, 25 bp, Homo sapien
caaaacccggctaggatgtgtcatc

SEQ ID NO: 4245249 - DNA, 25 bp, Homo sapien
tgtcaaacatgtgggatatgcctcc

SEQ ID NO: 4245250 - DNA, 25 bp, Homo sapien
caaactcatctgaacagatgatggg

SEQ ID NO: 4245251 - DNA, 25 bp, Homo sapien
atgtgtccttattcttattgtggca

SEQ ID NO: 4245252 - DNA, 25 bp, Homo sapien
attacttagtacttggacaaactca

SEQ ID NO: 4245253 - DNA, 25 bp, Homo sapien
tattgtggcaattattacttagtac

SEQ ID NO: 4245254 - DNA, 25 bp, Homo sapien
gccactttggtgcccagcggtatgg

SEQ ID NO: 4245255 - DNA, 25 bp, Homo sapien
tgatagtctgggtgaaatctactgt

SEQ ID NO: 4245256 - DNA, 25 bp, Homo sapien
cccagtgcgagaggtgttgtagact

SEQ ID NO: 4245257 - DNA, 25 bp, Homo sapien
tagactccacagtgatagtctgggt

SEQ ID NO: 4245258 - DNA, 25 bp, Homo sapien
catcacttggcatagcagcatgcca

SEQ ID NO: 4245259 - DNA, 25 bp, Homo sapien
catccctttccagttgtaatttctc

SEQ ID NO: 4245260 - DNA, 25 bp, Homo sapien
actgacagagtggagcgtacatccc

SEQ ID NO: 4245261 - DNA, 25 bp, Homo sapien
gagtggagcgtacatccctttccag

SEQ ID NO: 4245262 - DNA, 25 bp, Homo sapien
acgtacttagctgcgaaaatgaaga

SEQ ID NO: 4245263 - DNA, 25 bp, Homo sapien
tattcttaatgacaacccggtgaac

SEQ ID NO: 4245264 - DNA, 25 bp, Homo sapien
gatatttgacccagtatctcattta

SEQ ID NO: 4245265 - DNA, 25 bp, Homo sapien
ctgtctgagcataaacgtacttagc

SEQ ID NO: 4245266 - DNA, 25 bp, Homo sapien
gaacttggagttgaaatcatgctaa

SEQ ID NO: 4245267 - DNA, 25 bp, Homo sapien
agttccagcgtccaaccacagttga

SEQ ID NO: 4245268 - DNA, 25 bp, Homo sapien
tgtttggcctacacagagaagaact

SEQ ID NO: 4245269 - DNA, 25 bp, Homo sapien
ccactccccgtgattctcttgatga

SEQ ID NO: 4245270 - DNA, 25 bp, Homo sapien
gattgaaacccgttggtctggtcta

SEQ ID NO: 4245271 - DNA, 25 bp, Homo sapien
tccctgcggctcacgcgtatcttat

SEQ ID NO: 4245272 - DNA, 25 bp, Homo sapien
aaacagattgaaacccgttggtctg

SEQ ID NO: 4245273 - DNA, 25 bp, Homo sapien
cgttggtctggtctatccctgcggc

SEQ ID NO: 4245274 - DNA, 25 bp, Homo sapien
tgtaacgaagtgctagccaatcatg

SEQ ID NO: 4245275 - DNA, 25 bp, Homo sapien
tcacttgaggataccaggagacatt

SEQ ID NO: 4245276 - DNA, 25 bp, Homo sapien
taaattgtgcgctgtgagatgcctt

SEQ ID NO: 4245277 - DNA, 25 bp, Homo sapien
caaagtgttgagtgtttctccagcc

SEQ ID NO: 4245278 - DNA, 25 bp, Homo sapien
ccaaatggattgagggaatctggtt

SEQ ID NO: 4245279 - DNA, 25 bp, Homo sapien
agcaatgtaagcactgcagactcca

SEQ ID NO: 4245280 - DNA, 25 bp, Homo sapien
tgaaagccaaatggattgagggaat

SEQ ID NO: 4245281 - DNA, 25 bp, Homo sapien
tgagcaatgtaagcactgcagactc

SEQ ID NO: 4245282 - DNA, 25 bp, Homo sapien
aaagcattgtcttccacgcagactt

SEQ ID NO: 4245283 - DNA, 25 bp, Homo sapien
tccacgcagacttccttggaaactg

SEQ ID NO: 4245284 - DNA, 25 bp, Homo sapien
tcttccagacttgaccgaaaagcat

SEQ ID NO: 4245285 - DNA, 25 bp, Homo sapien
gacttgaccgaaaagcattgtcttc

SEQ ID NO: 4245286 - DNA, 25 bp, Homo sapien
tttgtaatttcagcccacgatggtt

SEQ ID NO: 4245287 - DNA, 25 bp, Homo sapien
tccttagtgacaactcagcatggct

SEQ ID NO: 4245288 - DNA, 25 bp, Homo sapien
atttcagcccacgatggttccttag

SEQ ID NO: 4245289 - DNA, 25 bp, Homo sapien
cccacgatggttccttagtgacaac

SEQ ID NO: 4245290 - DNA, 25 bp, Homo sapien
tgcctgcaaatggttgcttgtgatt

SEQ ID NO: 4245291 - DNA, 25 bp, Homo sapien
ctattctttgtagtccagaagaatg

SEQ ID NO: 4245292 - DNA, 25 bp, Homo sapien
ttctttgtagtccagaagaatgaaa

SEQ ID NO: 4245293 - DNA, 25 bp, Homo sapien
tctgcctgcaaatggttgcttgtga

SEQ ID NO: 4245294 - DNA, 25 bp, Homo sapien
gcatcagtttatcactatccatagc

SEQ ID NO: 4245295 - DNA, 25 bp, Homo sapien
aaatgagaggaggaatcatggatgc

SEQ ID NO: 4245296 - DNA, 25 bp, Homo sapien
tggatgcttcccaagtgcaaggaat

SEQ ID NO: 4245297 - DNA, 25 bp, Homo sapien
cagtaatgatctcttctagctcaga

SEQ ID NO: 4245298 - DNA, 25 bp, Homo sapien
ctctccattctcattagcgatacgt

SEQ ID NO: 4245299 - DNA, 25 bp, Homo sapien
tttgaagctcatgtcttcactgcaa

SEQ ID NO: 4245300 - DNA, 25 bp, Homo sapien
tgaagctcatgtcttcactgcaact

SEQ ID NO: 4245301 - DNA, 25 bp, Homo sapien
gatacgtctcatgaatttcttgctg

SEQ ID NO: 4245302 - DNA, 25 bp, Homo sapien
gatccattgagatcaattgcatgag

SEQ ID NO: 4245303 - DNA, 25 bp, Homo sapien
aggttttctgagatattgtcagcat

SEQ ID NO: 4245304 - DNA, 25 bp, Homo sapien
gatcatggaactgccgtggtgagca

SEQ ID NO: 4245305 - DNA, 25 bp, Homo sapien
tgtcagcatcataaactgtgtcaaa

SEQ ID NO: 4245306 - DNA, 25 bp, Homo sapien
cagctcacccagatctaggtgattt

SEQ ID NO: 4245307 - DNA, 25 bp, Homo sapien
tcttccagctcacccagatctaggt

SEQ ID NO: 4245308 - DNA, 25 bp, Homo sapien
cacccagatctaggtgatttatctc

SEQ ID NO: 4245309 - DNA, 25 bp, Homo sapien
cccagatctaggtgatttatctccc

SEQ ID NO: 4245310 - DNA, 25 bp, Homo sapien
cagtttatcgttgtttctgttccac

SEQ ID NO: 4245311 - DNA, 25 bp, Homo sapien
cttttccgtgagcaagagtccctgg

SEQ ID NO: 4245312 - DNA, 25 bp, Homo sapien
gagcaagagtccctggatcctccca

SEQ ID NO: 4245313 - DNA, 25 bp, Homo sapien
cacaagagagcaactcagtttatcg

SEQ ID NO: 4245314 - DNA, 25 bp, Homo sapien
gaaaacattctcgttaatgcttgga

SEQ ID NO: 4245315 - DNA, 25 bp, Homo sapien
ctacaagtacagaggaagtttgaaa

SEQ ID NO: 4245316 - DNA, 25 bp, Homo sapien
gaaagagtccaccattgtccccttg

SEQ ID NO: 4245317 - DNA, 25 bp, Homo sapien
cccttgactggcagcctttatcaga

SEQ ID NO: 4245318 - DNA, 25 bp, Homo sapien
gcagctgcaggtatgatttgttgat

SEQ ID NO: 4245319 - DNA, 25 bp, Homo sapien
cactatcagatgaatacagacccat

SEQ ID NO: 4245320 - DNA, 25 bp, Homo sapien
tatgatttgttgatagagttgacac

SEQ ID NO: 4245321 - DNA, 25 bp, Homo sapien
gatagagttgacactatcagatgaa

SEQ ID NO: 4245322 - DNA, 25 bp, Homo sapien
gacattcgttgtctcagaatgaaag

SEQ ID NO: 4245323 - DNA, 25 bp, Homo sapien
caccatttccaactttaagccaaat

SEQ ID NO: 4245324 - DNA, 25 bp, Homo sapien
tcaaaggagcgaatctgcattcccc

SEQ ID NO: 4245325 - DNA, 25 bp, Homo sapien
gccaaataattcgtattgtagtccg

SEQ ID NO: 4245326 - DNA, 25 bp, Homo sapien
ttcttgctgtgcctcataagcattg

SEQ ID NO: 4245327 - DNA, 25 bp, Homo sapien
taagcattgattgaccatgggtgaa

SEQ ID NO: 4245328 - DNA, 25 bp, Homo sapien
tgaatatcccagacctctcaggggg

SEQ ID NO: 4245329 - DNA, 25 bp, Homo sapien
gattgaccatgggtgaatatcccag

SEQ ID NO: 4245330 - DNA, 25 bp, Homo sapien
aattcaactcttctatagactgagg

SEQ ID NO: 4245331 - DNA, 25 bp, Homo sapien
gagatgacatagctcctctagacac

SEQ ID NO: 4245332 - DNA, 25 bp, Homo sapien
tttggtatcaccacatcttggagag

SEQ ID NO: 4245333 - DNA, 25 bp, Homo sapien
gattagaaaatccaggccagtgtaa

SEQ ID NO: 4245334 - DNA, 25 bp, Homo sapien
ccatcccatgtttccactccttttt

SEQ ID NO: 4245335 - DNA, 25 bp, Homo sapien
tcccatcccatgtttccactccttt

SEQ ID NO: 4245336 - DNA, 25 bp, Homo sapien
cccatcccatgtttccactcctttt

SEQ ID NO: 4245337 - DNA, 25 bp, Homo sapien
aattttctctcaactggtattgcta

SEQ ID NO: 4245338 - DNA, 25 bp, Homo sapien
tgctacctttagtgtttctcctcct

SEQ ID NO: 4245339 - DNA, 25 bp, Homo sapien
tcccgtttgacaagtgtagactgtc

SEQ ID NO: 4245340 - DNA, 25 bp, Homo sapien
tacaaatggctcatctgaccactgc

SEQ ID NO: 4245341 - DNA, 25 bp, Homo sapien
gaaaattcatcaagagccttagctt

SEQ ID NO: 4245342 - DNA, 25 bp, Homo sapien
aaattcatcaagagccttagctttg

SEQ ID NO: 4245343 - DNA, 25 bp, Homo sapien
aaaattcatcaagagccttagcttt

SEQ ID NO: 4245344 - DNA, 25 bp, Homo sapien
gcttgctaccttaatgaggtatgcc

SEQ ID NO: 4245345 - DNA, 25 bp, Homo sapien
tgtccaagtcccaattctgaggtta

SEQ ID NO: 4245346 - DNA, 25 bp, Homo sapien
tactgtgaagttgaagctgagcttg

SEQ ID NO: 4245347 - DNA, 25 bp, Homo sapien
gactctaggctgctgtaattggctt

SEQ ID NO: 4245348 - DNA, 25 bp, Homo sapien
gaaatctgacatacgtacactaaag

SEQ ID NO: 4245349 - DNA, 25 bp, Homo sapien
gggtaatccgccacctcaatcattt

SEQ ID NO: 4245350 - DNA, 25 bp, Homo sapien
gaatcttttagatcccactgggagc

SEQ ID NO: 4245351 - DNA, 25 bp, Homo sapien
taccgtacgatggaacactagaact

SEQ ID NO: 4245352 - DNA, 25 bp, Homo sapien
tggaacaaatggtaacctccgagga

SEQ ID NO: 4245353 - DNA, 25 bp, Homo sapien
ggcgcactctcttatctggttgaaa

SEQ ID NO: 4245354 - DNA, 25 bp, Homo sapien
tctgcagaagacagccgtgtgctac

SEQ ID NO: 4245355 - DNA, 25 bp, Homo sapien
cacgaaagaggccagttcttaattt

SEQ ID NO: 4245356 - DNA, 25 bp, Homo sapien
tcgaatctcagctatagcatctggg

SEQ ID NO: 4245357 - DNA, 25 bp, Homo sapien
aggccccgttccagctatctcgaat

SEQ ID NO: 4245358 - DNA, 25 bp, Homo sapien
tgagtcctttatttgcgaggccccg

SEQ ID NO: 4245359 - DNA, 25 bp, Homo sapien
gatcagttaggactagggctcccat

SEQ ID NO: 4245360 - DNA, 25 bp, Homo sapien
cagtcagctggtgtgacacattaac

SEQ ID NO: 4245361 - DNA, 25 bp, Homo sapien
tcagctggtgtgacacattaacatt

SEQ ID NO: 4245362 - DNA, 25 bp, Homo sapien
tggtgtgacacattaacattgaatg

SEQ ID NO: 4245363 - DNA, 25 bp, Homo sapien
gctggtgtgacacattaacattgaa

SEQ ID NO: 4245364 - DNA, 25 bp, Homo sapien
tgcaccactctgctttaaagtccag

SEQ ID NO: 4245365 - DNA, 25 bp, Homo sapien
ttttaggagactgggcctgactgca

SEQ ID NO: 4245366 - DNA, 25 bp, Homo sapien
aatcttgttggaaggacgatctacc

SEQ ID NO: 4245367 - DNA, 25 bp, Homo sapien
tcataagaggcgataagaaagtggt

SEQ ID NO: 4245368 - DNA, 25 bp, Homo sapien
gacatctgtcctctgatgcaggctt

SEQ ID NO: 4245369 - DNA, 25 bp, Homo sapien
agtaagtcagcacaactggcagtgt

SEQ ID NO: 4245370 - DNA, 25 bp, Homo sapien
aagtaagtcagcacaactggcagtg

SEQ ID NO: 4245371 - DNA, 25 bp, Homo sapien
tgagtccaggtattcttgagtctta

SEQ ID NO: 4245372 - DNA, 25 bp, Homo sapien
ctatatccccactttctcgtcgacg

SEQ ID NO: 4245373 - DNA, 25 bp, Homo sapien
gggtcttgagtgaaggccttggaga

SEQ ID NO: 4245374 - DNA, 25 bp, Homo sapien
aatagttgatgaatcggtgggtctt

SEQ ID NO: 4245375 - DNA, 25 bp, Homo sapien
tcgacgctgagtgaagtaaaaatag

SEQ ID NO: 4245376 - DNA, 25 bp, Homo sapien
taagagtcactgaactcccctgtgc

SEQ ID NO: 4245377 - DNA, 25 bp, Homo sapien
ttgaactccaccagttgcgcccagg

SEQ ID NO: 4245378 - DNA, 25 bp, Homo sapien
taataaagggcgataacagctgctg

SEQ ID NO: 4245379 - DNA, 25 bp, Homo sapien
gctgataaagcttcccttgttgggc

SEQ ID NO: 4245380 - DNA, 25 bp, Homo sapien
gaggggcaatggcaacataaaccat

SEQ ID NO: 4245381 - DNA, 25 bp, Homo sapien
tgaggggcaatggcaacataaacca

SEQ ID NO: 4245382 - DNA, 25 bp, Homo sapien
aatctataggacagtcacagcttct

SEQ ID NO: 4245383 - DNA, 25 bp, Homo sapien
gtgtttacttaacctgtgcttggga

SEQ ID NO: 4245384 - DNA, 25 bp, Homo sapien
aatatttgggttcttggctgcaagg

SEQ ID NO: 4245385 - DNA, 25 bp, Homo sapien
gtgcttgggacttccatactcataa

SEQ ID NO: 4245386 - DNA, 25 bp, Homo sapien
gctgtgctttaaggatgcgaatgtg

SEQ ID NO: 4245387 - DNA, 25 bp, Homo sapien
ctttaaggatgcgaatgtgaattgg

SEQ ID NO: 4245388 - DNA, 25 bp, Homo sapien
tggaaggataaaatgacttgggatg

SEQ ID NO: 4245389 - DNA, 25 bp, Homo sapien
tgacttgggatgtaactccacgaac

SEQ ID NO: 4245390 - DNA, 25 bp, Homo sapien
gatagagcccatagatgacacagag

SEQ ID NO: 4245391 - DNA, 25 bp, Homo sapien
caaggattatctatgtgagtttcag

SEQ ID NO: 4245392 - DNA, 25 bp, Homo sapien
ctcagtagtgtaccctcctctttgg

SEQ ID NO: 4245393 - DNA, 25 bp, Homo sapien
aggtctctgaactgttatctcagta

SEQ ID NO: 4245394 - DNA, 25 bp, Homo sapien
aaaaattgatggttatgggtggaga

SEQ ID NO: 4245395 - DNA, 25 bp, Homo sapien
taatgaaaaattgatggttatgggt

SEQ ID NO: 4245396 - DNA, 25 bp, Homo sapien
aattgatggttatgggtggagaaca

SEQ ID NO: 4245397 - DNA, 25 bp, Homo sapien
taatttgccaatctgtttattaaga

SEQ ID NO: 4245398 - DNA, 25 bp, Homo sapien
tccctgatgctgtgtatggctctgg

SEQ ID NO: 4245399 - DNA, 25 bp, Homo sapien
aatagctatgaacctcttgcgtgta

SEQ ID NO: 4245400 - DNA, 25 bp, Homo sapien
caagatgacacccaagcagttgagg

SEQ ID NO: 4245401 - DNA, 25 bp, Homo sapien
ttgaggagattggatgcctcagaca

SEQ ID NO: 4245402 - DNA, 25 bp, Homo sapien
ctgctgaatgatggctcagtcacca

SEQ ID NO: 4245403 - DNA, 25 bp, Homo sapien
ccctttgagagcttagcatggtcac

SEQ ID NO: 4245404 - DNA, 25 bp, Homo sapien
agctctggccctttgagagcttagc

SEQ ID NO: 4245405 - DNA, 25 bp, Homo sapien
ggtcactgctgaatgatggctcagt

SEQ ID NO: 4245406 - DNA, 25 bp, Homo sapien
ctcctctggcagttgcacccattcc

SEQ ID NO: 4245407 - DNA, 25 bp, Homo sapien
tctttctccactgagctgatgtatt

SEQ ID NO: 4245408 - DNA, 25 bp, Homo sapien
ttgctcaaaactattctccccacct

SEQ ID NO: 4245409 - DNA, 25 bp, Homo sapien
ctcaaaactattctccccacctgga

SEQ ID NO: 4245410 - DNA, 25 bp, Homo sapien
cagctgcaaggctttcagagactag

SEQ ID NO: 4245411 - DNA, 25 bp, Homo sapien
gtggcaccagctgcaaggctttcag

SEQ ID NO: 4245412 - DNA, 25 bp, Homo sapien
gcaccagctgcaaggctttcagaga

SEQ ID NO: 4245413 - DNA, 25 bp, Homo sapien
taagtggcaccagctgcaaggcttt

SEQ ID NO: 4245414 - DNA, 25 bp, Homo sapien
tttcttctaggtccattataagtct

SEQ ID NO: 4245415 - DNA, 25 bp, Homo sapien
tgactctgttccctctagttatgta

SEQ ID NO: 4245416 - DNA, 25 bp, Homo sapien
tctgttccctctagttatgtagttc

SEQ ID NO: 4245417 - DNA, 25 bp, Homo sapien
tcttctaggtccattataagtcttc

SEQ ID NO: 4245418 - DNA, 25 bp, Homo sapien
cttccctttcattgaactcagacat

SEQ ID NO: 4245419 - DNA, 25 bp, Homo sapien
tgaactcagacataaagctgtagtc

SEQ ID NO: 4245420 - DNA, 25 bp, Homo sapien
ttcattgaactcagacataaagctg

SEQ ID NO: 4245421 - DNA, 25 bp, Homo sapien
tcagacataaagctgtagtcagaaa

SEQ ID NO: 4245422 - DNA, 25 bp, Homo sapien
tagagtttgtctggactcactttca

SEQ ID NO: 4245423 - DNA, 25 bp, Homo sapien
agccactgcaactctaagatggcaa

SEQ ID NO: 4245424 - DNA, 25 bp, Homo sapien
tctaagatggcaatataactctgaa

SEQ ID NO: 4245425 - DNA, 25 bp, Homo sapien
gccatgtttttcaagaataaagatt

SEQ ID NO: 4245426 - DNA, 25 bp, Homo sapien
gcccaggctaataacatgatctttg

SEQ ID NO: 4245427 - DNA, 25 bp, Homo sapien
ggcattgaaactgggtctgaagtac

SEQ ID NO: 4245428 - DNA, 25 bp, Homo sapien
aagcttggcattgaaactgggtctg

SEQ ID NO: 4245429 - DNA, 25 bp, Homo sapien
acagtaagcgtgtaggctggctgca

SEQ ID NO: 4245430 - DNA, 25 bp, Homo sapien
tccttcaagactcctggctctgcac

SEQ ID NO: 4245431 - DNA, 25 bp, Homo sapien
gcacagctggcttttgtctctttcc

SEQ ID NO: 4245432 - DNA, 25 bp, Homo sapien
ctttgcgttcagtttctccttcaag

SEQ ID NO: 4245433 - DNA, 25 bp, Homo sapien
ctgctttcctcatctttgcgttcag

SEQ ID NO: 4245434 - DNA, 25 bp, Homo sapien
gtgtatatgtatgtgaaccagtgtt

SEQ ID NO: 4245435 - DNA, 25 bp, Homo sapien
tgtatatgtatgtgaaccagtgttt

SEQ ID NO: 4245436 - DNA, 25 bp, Homo sapien
atatgtatgtgaaccagtgttttgc

SEQ ID NO: 4245437 - DNA, 25 bp, Homo sapien
gtatgtgaaccagtgttttgcaaat

SEQ ID NO: 4245438 - DNA, 25 bp, Homo sapien
gggctacaacatctgtcttccggtg

SEQ ID NO: 4245439 - DNA, 25 bp, Homo sapien
tcttccggtgttgcagcctgcaggt

SEQ ID NO: 4245440 - DNA, 25 bp, Homo sapien
tatctaccattggattggggctaca

SEQ ID NO: 4245441 - DNA, 25 bp, Homo sapien
cttgggagatttgttctcagccaca

SEQ ID NO: 4245442 - DNA, 25 bp, Homo sapien
ctttgttgtgacttcagaacctgag

SEQ ID NO: 4245443 - DNA, 25 bp, Homo sapien
gaacctgagttacgacatgagcgat

SEQ ID NO: 4245444 - DNA, 25 bp, Homo sapien
gaatgtgtagatctcctgaggtgtc

SEQ ID NO: 4245445 - DNA, 25 bp, Homo sapien
tgagcgatgatcttccactgggaat

SEQ ID NO: 4245446 - DNA, 25 bp, Homo sapien
tctggcttcgtaagttgcaaagcac

SEQ ID NO: 4245447 - DNA, 25 bp, Homo sapien
gcttcgtaagttgcaaagcacctga

SEQ ID NO: 4245448 - DNA, 25 bp, Homo sapien
cttctggcttcgtaagttgcaaagc

SEQ ID NO: 4245449 - DNA, 25 bp, Homo sapien
tggcttcgtaagttgcaaagcacct

SEQ ID NO: 4245450 - DNA, 25 bp, Homo sapien
taatgatgacatacatagcctttga

SEQ ID NO: 4245451 - DNA, 25 bp, Homo sapien
aatcttaatgatgacatacatagcc

SEQ ID NO: 4245452 - DNA, 25 bp, Homo sapien
tcttaatgatgacatacatagcctt

SEQ ID NO: 4245453 - DNA, 25 bp, Homo sapien
ttaatcttaatgatgacatacatag

SEQ ID NO: 4245454 - DNA, 25 bp, Homo sapien
caaaaccaaggcttagaacttcaga

SEQ ID NO: 4245455 - DNA, 25 bp, Homo sapien
ccaaaaccaaggcttagaacttcag

SEQ ID NO: 4245456 - DNA, 25 bp, Homo sapien
aaaccaaggcttagaacttcagaca

SEQ ID NO: 4245457 - DNA, 25 bp, Homo sapien
ccaaggcttagaacttcagacaatt

SEQ ID NO: 4245458 - DNA, 25 bp, Homo sapien
catcctcgtgtattgaaagaactga

SEQ ID NO: 4245459 - DNA, 25 bp, Homo sapien
aatgcaaatgggatagctggctaac

SEQ ID NO: 4245460 - DNA, 25 bp, Homo sapien
ggccatagtgcccaaagaaatctac

SEQ ID NO: 4245461 - DNA, 25 bp, Homo sapien
tatagccatctgatcttgggccagt

SEQ ID NO: 4245462 - DNA, 25 bp, Homo sapien
gacgtaactccataagccaccagga

SEQ ID NO: 4245463 - DNA, 25 bp, Homo sapien
ggaatttgtggcctataggctggca

SEQ ID NO: 4245464 - DNA, 25 bp, Homo sapien
tatatgacgtaactccataagccac

SEQ ID NO: 4245465 - DNA, 25 bp, Homo sapien
tcaccagctatatgacgtaactcca

SEQ ID NO: 4245466 - DNA, 25 bp, Homo sapien
ggataaatcagcttaaccatcacaa

SEQ ID NO: 4245467 - DNA, 25 bp, Homo sapien
tggataaatcagcttaaccatcaca

SEQ ID NO: 4245468 - DNA, 25 bp, Homo sapien
gataaatcagcttaaccatcacaat

SEQ ID NO: 4245469 - DNA, 25 bp, Homo sapien
tctcatcttctttctatttgccttc

SEQ ID NO: 4245470 - DNA, 25 bp, Homo sapien
atctcatcttctttctatttgcctt

SEQ ID NO: 4245471 - DNA, 25 bp, Homo sapien
tatctcatcttctttctatttgcct

SEQ ID NO: 4245472 - DNA, 25 bp, Homo sapien
ctatctcatcttctttctatttgcc

SEQ ID NO: 4245473 - DNA, 25 bp, Homo sapien
cacaagacgatcactattaatgaca

SEQ ID NO: 4245474 - DNA, 25 bp, Homo sapien
gggagtgagttctgcaatcagtatg

SEQ ID NO: 4245475 - DNA, 25 bp, Homo sapien
ggagtgagttctgcaatcagtatgt

SEQ ID NO: 4245476 - DNA, 25 bp, Homo sapien
agaggcacaagacgatcactattaa

SEQ ID NO: 4245477 - DNA, 25 bp, Homo sapien
tagcgtactaccgttcaccgaacag

SEQ ID NO: 4245478 - DNA, 25 bp, Homo sapien
gcagccagtagagcacagaatagag

SEQ ID NO: 4245479 - DNA, 25 bp, Homo sapien
tcaaagggttccacaaagaactaca

SEQ ID NO: 4245480 - DNA, 25 bp, Homo sapien
tggcagaagtcctctgagcacttta

SEQ ID NO: 4245481 - DNA, 25 bp, Homo sapien
gaaccagaaggtgtttgcacttttc

SEQ ID NO: 4245482 - DNA, 25 bp, Homo sapien
gctcgacgaagggatccattttggt

SEQ ID NO: 4245483 - DNA, 25 bp, Homo sapien
gtttgcacttttctgtgctcgacga

SEQ ID NO: 4245484 - DNA, 25 bp, Homo sapien
tttctgtgctcgacgaagggatcca

SEQ ID NO: 4245485 - DNA, 25 bp, Homo sapien
tttctgtagtcatctgattggtcca

SEQ ID NO: 4245486 - DNA, 25 bp, Homo sapien
ttctgtagtcatctgattggtccat

SEQ ID NO: 4245487 - DNA, 25 bp, Homo sapien
tctgtagtcatctgattggtccatt

SEQ ID NO: 4245488 - DNA, 25 bp, Homo sapien
tgaaggcaatgaggccgcttcgaaa

SEQ ID NO: 4245489 - DNA, 25 bp, Homo sapien
tatcaagcagcgattcatcacatcc

SEQ ID NO: 4245490 - DNA, 25 bp, Homo sapien
catcacatcccgcattgaaggcaat

SEQ ID NO: 4245491 - DNA, 25 bp, Homo sapien
cttcgaaaatcagcgcttgggctgc

SEQ ID NO: 4245492 - DNA, 25 bp, Homo sapien
gcccgacaagtaaatcctacaataa

SEQ ID NO: 4245493 - DNA, 25 bp, Homo sapien
ttcacagcccgacaagtaaatccta

SEQ ID NO: 4245494 - DNA, 25 bp, Homo sapien
cagcccgacaagtaaatcctacaat

SEQ ID NO: 4245495 - DNA, 25 bp, Homo sapien
cacagcccgacaagtaaatcctaca

SEQ ID NO: 4245496 - DNA, 25 bp, Homo sapien
aaccgaaacggtttgcattcaccat

SEQ ID NO: 4245497 - DNA, 25 bp, Homo sapien
gacatcaggcccattcttgcttctt

SEQ ID NO: 4245498 - DNA, 25 bp, Homo sapien
tatacaagggtctaactattttgga

SEQ ID NO: 4245499 - DNA, 25 bp, Homo sapien
ctgatgaaaccaaatccgattaaaa

SEQ ID NO: 4245500 - DNA, 25 bp, Homo sapien
cattgtcagctatgcttttaaagac

SEQ ID NO: 4245501 - DNA, 25 bp, Homo sapien
tcagttgggggcatcagggaattca

SEQ ID NO: 4245502 - DNA, 25 bp, Homo sapien
tgggggcatcagggaattcataaac

SEQ ID NO: 4245503 - DNA, 25 bp, Homo sapien
gttgggggcatcagggaattcataa

SEQ ID NO: 4245504 - DNA, 25 bp, Homo sapien
cagttgggggcatcagggaattcat

SEQ ID NO: 4245505 - DNA, 25 bp, Homo sapien
ctaatgtagccgctgggctgatggc

SEQ ID NO: 4245506 - DNA, 25 bp, Homo sapien
ctgatggccaacatcttggttgaag

SEQ ID NO: 4245507 - DNA, 25 bp, Homo sapien
taatgtagccgctgggctgatggcc

SEQ ID NO: 4245508 - DNA, 25 bp, Homo sapien
ggctgatggccaacatcttggttga

SEQ ID NO: 4245509 - DNA, 25 bp, Homo sapien
tatcttttgacctggaataatgtcc

SEQ ID NO: 4245510 - DNA, 25 bp, Homo sapien
cacagcagaatgttaaattggttgg

SEQ ID NO: 4245511 - DNA, 25 bp, Homo sapien
ggctataagaattccccacctgtag

SEQ ID NO: 4245512 - DNA, 25 bp, Homo sapien
tccacaaaagtgagagaagcatgct

SEQ ID NO: 4245513 - DNA, 25 bp, Homo sapien
ggccagcaaagccaaccagtggaat

SEQ ID NO: 4245514 - DNA, 25 bp, Homo sapien
gtccacaactctggaagaaaagctg

SEQ ID NO: 4245515 - DNA, 25 bp, Homo sapien
gtacaggtgcacacagtctaccgcc

SEQ ID NO: 4245516 - DNA, 25 bp, Homo sapien
gctgttgtacaatgtgcagtgggta

SEQ ID NO: 4245517 - DNA, 25 bp, Homo sapien
aaatataaaacagaatttattgtga

SEQ ID NO: 4245518 - DNA, 25 bp, Homo sapien
gagtataaatataaaacagaattta

SEQ ID NO: 4245519 - DNA, 25 bp, Homo sapien
taaaacagaatttattgtgaggaaa

SEQ ID NO: 4245520 - DNA, 25 bp, Homo sapien
tataaaacagaatttattgtgagga

SEQ ID NO: 4245521 - DNA, 25 bp, Homo sapien
tccacagcgttgatagagatgccct

SEQ ID NO: 4245522 - DNA, 25 bp, Homo sapien
gatacctttggacatacctttgctg

SEQ ID NO: 4245523 - DNA, 25 bp, Homo sapien
tgtaccagtctccatgatacctttg

SEQ ID NO: 4245524 - DNA, 25 bp, Homo sapien
tcagcccatccataagtcattggtc

SEQ ID NO: 4245525 - DNA, 25 bp, Homo sapien
ctaagcaggtaagtgcaaaaaggaa

SEQ ID NO: 4245526 - DNA, 25 bp, Homo sapien
cactaagcaggtaagtgcaaaaagg

SEQ ID NO: 4245527 - DNA, 25 bp, Homo sapien
gccactaagcaggtaagtgcaaaaa

SEQ ID NO: 4245528 - DNA, 25 bp, Homo sapien
ctgccagcgtggaagtttgtactgt

SEQ ID NO: 4245529 - DNA, 25 bp, Homo sapien
catgactgattgaattcctggccac

SEQ ID NO: 4245530 - DNA, 25 bp, Homo sapien
tatagtactagtactgtctgactga

SEQ ID NO: 4245531 - DNA, 25 bp, Homo sapien
tgagagttaagagattgaatagatc

SEQ ID NO: 4245532 - DNA, 25 bp, Homo sapien
taaaacccatgactgattgaattcc

SEQ ID NO: 4245533 - DNA, 25 bp, Homo sapien
gctttgaggaaataagacagcagta

SEQ ID NO: 4245534 - DNA, 25 bp, Homo sapien
gcagtaaccctgtcttctttagagg

SEQ ID NO: 4245535 - DNA, 25 bp, Homo sapien
taactttatatgttcctcagagtga

SEQ ID NO: 4245536 - DNA, 25 bp, Homo sapien
cagggaagcaaaagcgatgtctctt

SEQ ID NO: 4245537 - DNA, 25 bp, Homo sapien
tgcttttgtcaggaacgaagtgttc

SEQ ID NO: 4245538 - DNA, 25 bp, Homo sapien
ttgtcaggaacgaagtgttctgcat

SEQ ID NO: 4245539 - DNA, 25 bp, Homo sapien
ccatgcttttgtcaggaacgaagtg

SEQ ID NO: 4245540 - DNA, 25 bp, Homo sapien
cttttgtcaggaacgaagtgttctg

SEQ ID NO: 4245541 - DNA, 25 bp, Homo sapien
gacttgcagaggtctttctagccct

SEQ ID NO: 4245542 - DNA, 25 bp, Homo sapien
cctgttcttgactaccccagtattc

SEQ ID NO: 4245543 - DNA, 25 bp, Homo sapien
tcattattccctgtggacttgcaga

SEQ ID NO: 4245544 - DNA, 25 bp, Homo sapien
gaggtctttctagcccttctctgtt

SEQ ID NO: 4245545 - DNA, 25 bp, Homo sapien
ccactattgtgataggagcaattaa

SEQ ID NO: 4245546 - DNA, 25 bp, Homo sapien
tattcaatcgaagacacaattcatc

SEQ ID NO: 4245547 - DNA, 25 bp, Homo sapien
tttgaaaagaatgtgataaccttgg

SEQ ID NO: 4245548 - DNA, 25 bp, Homo sapien
aatggacaaatggatatccgctaac

SEQ ID NO: 4245549 - DNA, 25 bp, Homo sapien
aaacgaatgtcataaacgtgctgca

SEQ ID NO: 4245550 - DNA, 25 bp, Homo sapien
taaacgtgctgcagttattttccat

SEQ ID NO: 4245551 - DNA, 25 bp, Homo sapien
gagaaagaaacgaatgtcataaacg

SEQ ID NO: 4245552 - DNA, 25 bp, Homo sapien
cgaatgtcataaacgtgctgcagtt

SEQ ID NO: 4245553 - DNA, 25 bp, Homo sapien
gtaactaggttcagtattgttctga

SEQ ID NO: 4245554 - DNA, 25 bp, Homo sapien
ttgtcagcagtaacaagacatttca

SEQ ID NO: 4245555 - DNA, 25 bp, Homo sapien
ttcatctcttagggagcaaatggtc

SEQ ID NO: 4245556 - DNA, 25 bp, Homo sapien
ggagcaaatggtcagtcatgcaggt

SEQ ID NO: 4245557 - DNA, 25 bp, Homo sapien
catgcaggtcttgtcagcagtaaca

SEQ ID NO: 4245558 - DNA, 25 bp, Homo sapien
ttcccctgtccatagtttggtcatg

SEQ ID NO: 4245559 - DNA, 25 bp, Homo sapien
cttcccctgtccatagtttggtcat

SEQ ID NO: 4245560 - DNA, 25 bp, Homo sapien
cccctgtccatagtttggtcatgtg

SEQ ID NO: 4245561 - DNA, 25 bp, Homo sapien
tcccctgtccatagtttggtcatgt

SEQ ID NO: 4245562 - DNA, 25 bp, Homo sapien
gtcctgtcagctgtggtggcacttg

SEQ ID NO: 4245563 - DNA, 25 bp, Homo sapien
ccctctttatacactagttggacct

SEQ ID NO: 4245564 - DNA, 25 bp, Homo sapien
tcttatactcatgggagtctttgag

SEQ ID NO: 4245565 - DNA, 25 bp, Homo sapien
agaacttgagcatatattgtttccc

SEQ ID NO: 4245566 - DNA, 25 bp, Homo sapien
cagacactcaagctgctgccacctt

SEQ ID NO: 4245567 - DNA, 25 bp, Homo sapien
acacaagtaagcatctcaatgtctg

SEQ ID NO: 4245568 - DNA, 25 bp, Homo sapien
caatgtctgatcttcagtattttta

SEQ ID NO: 4245569 - DNA, 25 bp, Homo sapien
tcttgccgaaatcagcaatgtgtct

SEQ ID NO: 4245570 - DNA, 25 bp, Homo sapien
ctaggcagacgaagcatggacctga

SEQ ID NO: 4245571 - DNA, 25 bp, Homo sapien
caagagatatagagttctaacagcc

SEQ ID NO: 4245572 - DNA, 25 bp, Homo sapien
tatagagttctaacagcctgtgctg

SEQ ID NO: 4245573 - DNA, 25 bp, Homo sapien
tagagttctaacagcctgtgctgga

SEQ ID NO: 4245574 - DNA, 25 bp, Homo sapien
gagatatagagttctaacagcctgt

SEQ ID NO: 4245575 - DNA, 25 bp, Homo sapien
gggccggttctcctttgattggcac

SEQ ID NO: 4245576 - DNA, 25 bp, Homo sapien
ttgtttaagctgatgaggagaagca

SEQ ID NO: 4245577 - DNA, 25 bp, Homo sapien
ctttcgagaaatatgaggaaggttc

SEQ ID NO: 4245578 - DNA, 25 bp, Homo sapien
gaaggttctaaaggctccccgcaca

SEQ ID NO: 4245579 - DNA, 25 bp, Homo sapien
taaaggatgaacactgatgtatgaa

SEQ ID NO: 4245580 - DNA, 25 bp, Homo sapien
cagagagcctgcctaaaatgatcca

SEQ ID NO: 4245581 - DNA, 25 bp, Homo sapien
tacaggcacccaaagtaaaggtcag

SEQ ID NO: 4245582 - DNA, 25 bp, Homo sapien
aagataaaggatgaacactgatgta

SEQ ID NO: 4245583 - DNA, 25 bp, Homo sapien
tgatcaagtaatggagaacgggagc

SEQ ID NO: 4245584 - DNA, 25 bp, Homo sapien
tcaggtcaggtctcgcactgaggca

SEQ ID NO: 4245585 - DNA, 25 bp, Homo sapien
gaacgggagctcatgctcaaagcac

SEQ ID NO: 4245586 - DNA, 25 bp, Homo sapien
tggttcctggttattggcatctgac

SEQ ID NO: 4245587 - DNA, 25 bp, Homo sapien
tgattcttatttccaggtcactctg

SEQ ID NO: 4245588 - DNA, 25 bp, Homo sapien
ataggctagtttgattcttatttcc

SEQ ID NO: 4245589 - DNA, 25 bp, Homo sapien
taggctagtttgattcttatttcca

SEQ ID NO: 4245590 - DNA, 25 bp, Homo sapien
agtttgattcttatttccaggtcac

SEQ ID NO: 4245591 - DNA, 25 bp, Homo sapien
aacgcagtcttaggcacaatgagga

SEQ ID NO: 4245592 - DNA, 25 bp, Homo sapien
taatgtgtgtacagaaacgcagtct

SEQ ID NO: 4245593 - DNA, 25 bp, Homo sapien
gaaataaaggatttactccatgctc

SEQ ID NO: 4245594 - DNA, 25 bp, Homo sapien
gatcctgaagagttcacacatcacc

SEQ ID NO: 4245595 - DNA, 25 bp, Homo sapien
gctttaataaaacagctctgagtag

SEQ ID NO: 4245596 - DNA, 25 bp, Homo sapien
catggtgtagattactacttctgta

SEQ ID NO: 4245597 - DNA, 25 bp, Homo sapien
gctctgagtagtaacagtggatcaa

SEQ ID NO: 4245598 - DNA, 25 bp, Homo sapien
caggcatggtgtagattactacttc

SEQ ID NO: 4245599 - DNA, 25 bp, Homo sapien
tagctttgaataaactccagtcccc

SEQ ID NO: 4245600 - DNA, 25 bp, Homo sapien
tgagaatcaccggaatacgaaactt

SEQ ID NO: 4245601 - DNA, 25 bp, Homo sapien
ttgaatgcaccaagatagcctcttg

SEQ ID NO: 4245602 - DNA, 25 bp, Homo sapien
ggacttcccaacattcttgaatgca

SEQ ID NO: 4245603 - DNA, 25 bp, Homo sapien
aaatgaataaatgcctccatatttt

SEQ ID NO: 4245604 - DNA, 25 bp, Homo sapien
gaataaatgcctccatatttttcaa

SEQ ID NO: 4245605 - DNA, 25 bp, Homo sapien
atgaataaatgcctccatatttttc

SEQ ID NO: 4245606 - DNA, 25 bp, Homo sapien
taaatgaataaatgcctccatattt

SEQ ID NO: 4245607 - DNA, 25 bp, Homo sapien
ctcatcataaatagcttgccttatt

SEQ ID NO: 4245608 - DNA, 25 bp, Homo sapien
tatttaatatatactcggcattcta

SEQ ID NO: 4245609 - DNA, 25 bp, Homo sapien
tatttccattttgggatatgatatt

SEQ ID NO: 4245610 - DNA, 25 bp, Homo sapien
tatactcggcattctatctgtttta

SEQ ID NO: 4245611 - DNA, 25 bp, Homo sapien
tatttgttcaattcaatattttaaa

SEQ ID NO: 4245612 - DNA, 25 bp, Homo sapien
gatatttgttcaattcaatatttta

SEQ ID NO: 4245613 - DNA, 25 bp, Homo sapien
taaacaaatgaagatatatttggaa

SEQ ID NO: 4245614 - DNA, 25 bp, Homo sapien
ttttaaacaaatgaagatatatttg

SEQ ID NO: 4245615 - DNA, 25 bp, Homo sapien
ttctcttaggaaggctgcctcaact

SEQ ID NO: 4245616 - DNA, 25 bp, Homo sapien
aactgctggaatccctttaccacct

SEQ ID NO: 4245617 - DNA, 25 bp, Homo sapien
tgcagtggatcctgttgatactctg

SEQ ID NO: 4245618 - DNA, 25 bp, Homo sapien
ttttctgttgcacctgcatttctct

SEQ ID NO: 4245619 - DNA, 25 bp, Homo sapien
gagattaagttatgctcttgaggtc

SEQ ID NO: 4245620 - DNA, 25 bp, Homo sapien
tgagattaagttatgctcttgaggt

SEQ ID NO: 4245621 - DNA, 25 bp, Homo sapien
agattaagttatgctcttgaggtcc

SEQ ID NO: 4245622 - DNA, 25 bp, Homo sapien
ctgagattaagttatgctcttgagg

SEQ ID NO: 4245623 - DNA, 25 bp, Homo sapien
ctgcaggaatagacaagaaacctct

SEQ ID NO: 4245624 - DNA, 25 bp, Homo sapien
tctgcttccctgtgtcttactggtt

SEQ ID NO: 4245625 - DNA, 25 bp, Homo sapien
gaaacctctgggaagacatcacctg

SEQ ID NO: 4245626 - DNA, 25 bp, Homo sapien
ctagggaatcaacccaagacggaca

SEQ ID NO: 4245627 - DNA, 25 bp, Homo sapien
acttggttatcaatccagaactgcc

SEQ ID NO: 4245628 - DNA, 25 bp, Homo sapien
taaacttggttatcaatccagaact

SEQ ID NO: 4245629 - DNA, 25 bp, Homo sapien
agtatttgatacaaaatgagatatt

SEQ ID NO: 4245630 - DNA, 25 bp, Homo sapien
atataaacttggttatcaatccaga

SEQ ID NO: 4245631 - DNA, 25 bp, Homo sapien
acctccaatcaagactacatctttg

SEQ ID NO: 4245632 - DNA, 25 bp, Homo sapien
ggtaaattacattatctgtagtttc

SEQ ID NO: 4245633 - DNA, 25 bp, Homo sapien
gactacatctttgagtatatatgct

SEQ ID NO: 4245634 - DNA, 25 bp, Homo sapien
agccccacctccaatcaagactaca

SEQ ID NO: 4245635 - DNA, 25 bp, Homo sapien
aacttgtgcatactacatatgtatt

SEQ ID NO: 4245636 - DNA, 25 bp, Homo sapien
cttgtgcatactacatatgtatttc

SEQ ID NO: 4245637 - DNA, 25 bp, Homo sapien
atgaaacttgtgcatactacatatg

SEQ ID NO: 4245638 - DNA, 25 bp, Homo sapien
gaaacttgtgcatactacatatgta

SEQ ID NO: 4245639 - DNA, 25 bp, Homo sapien
tcttatgcgtttctgtatgcatggg

SEQ ID NO: 4245640 - DNA, 25 bp, Homo sapien
aattagctttcttcagtctaggaac

SEQ ID NO: 4245641 - DNA, 25 bp, Homo sapien
cttcctgttcttatgcgtttctgta

SEQ ID NO: 4245642 - DNA, 25 bp, Homo sapien
tgataaacaatacgtcacttcctgt

SEQ ID NO: 4245643 - DNA, 25 bp, Homo sapien
cctgctggcatttaggactgtggtc

SEQ ID NO: 4245644 - DNA, 25 bp, Homo sapien
gctggcatttaggactgtggtcagc

SEQ ID NO: 4245645 - DNA, 25 bp, Homo sapien
ggtggttagccctgctggcatttag

SEQ ID NO: 4245646 - DNA, 25 bp, Homo sapien
gttagccctgctggcatttaggact

SEQ ID NO: 4245647 - DNA, 25 bp, Homo sapien
taaactatcaaatgtgcttttccaa

SEQ ID NO: 4245648 - DNA, 25 bp, Homo sapien
ggcgaggcaagagtcactctcctct

SEQ ID NO: 4245649 - DNA, 25 bp, Homo sapien
gaataagtgggtggcgaggcaagag

SEQ ID NO: 4245650 - DNA, 25 bp, Homo sapien
gtgacttcataaactatcaaatgtg

SEQ ID NO: 4245651 - DNA, 25 bp, Homo sapien
gcagcactgaagcaatatcctgaag

SEQ ID NO: 4245652 - DNA, 25 bp, Homo sapien
gccacagcatgatatgggactcctg

SEQ ID NO: 4245653 - DNA, 25 bp, Homo sapien
gggactcctgaagtcattccccatg

SEQ ID NO: 4245654 - DNA, 25 bp, Homo sapien
cagccaggctcggaacatcagctag

SEQ ID NO: 4245655 - DNA, 25 bp, Homo sapien
catttacgctcattcccagtgcctg

SEQ ID NO: 4245656 - DNA, 25 bp, Homo sapien
aattaccagggccatttacgctcat

SEQ ID NO: 4245657 - DNA, 25 bp, Homo sapien
gagaaaggcaccaataggttattaa

SEQ ID NO: 4245658 - DNA, 25 bp, Homo sapien
attaaagttgaattaccagggccat

SEQ ID NO: 4245659 - DNA, 25 bp, Homo sapien
acttttgcaaaggtcagcttgacta

SEQ ID NO: 4245660 - DNA, 25 bp, Homo sapien
ttttgcaaaggtcagcttgactaca

SEQ ID NO: 4245661 - DNA, 25 bp, Homo sapien
aaacttttgcaaaggtcagcttgac

SEQ ID NO: 4245662 - DNA, 25 bp, Homo sapien
caaaacttttgcaaaggtcagcttg

SEQ ID NO: 4245663 - DNA, 25 bp, Homo sapien
tattggataacagatattgggatat

SEQ ID NO: 4245664 - DNA, 25 bp, Homo sapien
aacagatattgggatataaaaccaa

SEQ ID NO: 4245665 - DNA, 25 bp, Homo sapien
attgggatataaaaccaaatcagcc

SEQ ID NO: 4245666 - DNA, 25 bp, Homo sapien
atttattggataacagatattggga

SEQ ID NO: 4245667 - DNA, 25 bp, Homo sapien
tgatttactgtaagagcttcattat

SEQ ID NO: 4245668 - DNA, 25 bp, Homo sapien
catttggtgccagtatctctgctgc

SEQ ID NO: 4245669 - DNA, 25 bp, Homo sapien
cagttgctgaatctgcattgttgag

SEQ ID NO: 4245670 - DNA, 25 bp, Homo sapien
gatgaaatcatgagccttttgattt

SEQ ID NO: 4245671 - DNA, 25 bp, Homo sapien
ggcgtttaatgtatagtttctcatc

SEQ ID NO: 4245672 - DNA, 25 bp, Homo sapien
cctccacattggataaattcaattt

SEQ ID NO: 4245673 - DNA, 25 bp, Homo sapien
taatgtatagtttctcatctgccat

SEQ ID NO: 4245674 - DNA, 25 bp, Homo sapien
aaggcgtttaatgtatagtttctca

SEQ ID NO: 4245675 - DNA, 25 bp, Homo sapien
tctggtgatgtatcccttagaatgt

SEQ ID NO: 4245676 - DNA, 25 bp, Homo sapien
ggtgatgtatcccttagaatgttgt

SEQ ID NO: 4245677 - DNA, 25 bp, Homo sapien
atctggtgatgtatcccttagaatg

SEQ ID NO: 4245678 - DNA, 25 bp, Homo sapien
gatgtatcccttagaatgttgtgaa

SEQ ID NO: 4245679 - DNA, 25 bp, Homo sapien
ccttattaatggagtgtgtggtttg

SEQ ID NO: 4245680 - DNA, 25 bp, Homo sapien
cattgggtttaggattgtctcttct

SEQ ID NO: 4245681 - DNA, 25 bp, Homo sapien
aggattgtctcttctgtcaggaaac

SEQ ID NO: 4245682 - DNA, 25 bp, Homo sapien
agaagagtgagatggtagccctgct

SEQ ID NO: 4245683 - DNA, 25 bp, Homo sapien
gaacgaccctactggcagacgccat

SEQ ID NO: 4245684 - DNA, 25 bp, Homo sapien
ctgaacgaccctactggcagacgcc

SEQ ID NO: 4245685 - DNA, 25 bp, Homo sapien
tgaacgaccctactggcagacgcca

SEQ ID NO: 4245686 - DNA, 25 bp, Homo sapien
gattcatgagtatgtataacttctc

SEQ ID NO: 4245687 - DNA, 25 bp, Homo sapien
gaaagaggtggtgtacatatgaagt

SEQ ID NO: 4245688 - DNA, 25 bp, Homo sapien
ttgcaacaagtggtagtgggaaggc

SEQ ID NO: 4245689 - DNA, 25 bp, Homo sapien
catggtgtctttcaagggtcaagga

SEQ ID NO: 4245690 - DNA, 25 bp, Homo sapien
ggatcactatgttttctggcagata

SEQ ID NO: 4245691 - DNA, 25 bp, Homo sapien
cgcaaggtacttagcttatgtagct

SEQ ID NO: 4245692 - DNA, 25 bp, Homo sapien
tcaaacttaagtcaacgcaaggtac

SEQ ID NO: 4245693 - DNA, 25 bp, Homo sapien
gggacttgtctcagctatagaacta

SEQ ID NO: 4245694 - DNA, 25 bp, Homo sapien
cattcttcgtctagaataagatcag

SEQ ID NO: 4245695 - DNA, 25 bp, Homo sapien
ttcattcttcgtctagaataagatc

SEQ ID NO: 4245696 - DNA, 25 bp, Homo sapien
ttcttcgtctagaataagatcagaa

SEQ ID NO: 4245697 - DNA, 25 bp, Homo sapien
ggcttttcattcttcgtctagaata

SEQ ID NO: 4245698 - DNA, 25 bp, Homo sapien
tgacttatagacgtgccatgcatga

SEQ ID NO: 4245699 - DNA, 25 bp, Homo sapien
gacttatagacgtgccatgcatgag

SEQ ID NO: 4245700 - DNA, 25 bp, Homo sapien
cttgacttatagacgtgccatgcat

SEQ ID NO: 4245701 - DNA, 25 bp, Homo sapien
cttatagacgtgccatgcatgagtc

SEQ ID NO: 4245702 - DNA, 25 bp, Homo sapien
ttttccgagcttataataccttcca

SEQ ID NO: 4245703 - DNA, 25 bp, Homo sapien
atatataggtcagtgatttgtcccc

SEQ ID NO: 4245704 - DNA, 25 bp, Homo sapien
taatgctgcctaaatcaaaaaactg

SEQ ID NO: 4245705 - DNA, 25 bp, Homo sapien
gacatatagattagtgcaccataaa

SEQ ID NO: 4245706 - DNA, 25 bp, Homo sapien
ttcacatgatgagaacgacccagat

SEQ ID NO: 4245707 - DNA, 25 bp, Homo sapien
gttcacatgatgagaacgacccaga

SEQ ID NO: 4245708 - DNA, 25 bp, Homo sapien
cttgccttgtggttcacatgatgag

SEQ ID NO: 4245709 - DNA, 25 bp, Homo sapien
tcacatgatgagaacgacccagatg

SEQ ID NO: 4245710 - DNA, 25 bp, Homo sapien
tgccctaagagctggcaagtcctgt

SEQ ID NO: 4245711 - DNA, 25 bp, Homo sapien
atctgccctaagagctggcaagtcc

SEQ ID NO: 4245712 - DNA, 25 bp, Homo sapien
ctgccctaagagctggcaagtcctg

SEQ ID NO: 4245713 - DNA, 25 bp, Homo sapien
tctgccctaagagctggcaagtcct

SEQ ID NO: 4245714 - DNA, 25 bp, Homo sapien
tgtgataggcgggattttacgagtt

SEQ ID NO: 4245715 - DNA, 25 bp, Homo sapien
tggcttcaagtgagacatcaagtgg

SEQ ID NO: 4245716 - DNA, 25 bp, Homo sapien
tacagcgtgtacaatgggcatcttc

SEQ ID NO: 4245717 - DNA, 25 bp, Homo sapien
tacgagtttggaaggcaattatcat

SEQ ID NO: 4245718 - DNA, 25 bp, Homo sapien
ccattaggtcagggaataaaacaca

SEQ ID NO: 4245719 - DNA, 25 bp, Homo sapien
cattaggtcagggaataaaacacat

SEQ ID NO: 4245720 - DNA, 25 bp, Homo sapien
attaggtcagggaataaaacacatt

SEQ ID NO: 4245721 - DNA, 25 bp, Homo sapien
catccatgtctgattagcatgaagg

SEQ ID NO: 4245722 - DNA, 25 bp, Homo sapien
gactcagggttatgtatcttttagg

SEQ ID NO: 4245723 - DNA, 25 bp, Homo sapien
ttatgaggagaacgtgatcacagcc

SEQ ID NO: 4245724 - DNA, 25 bp, Homo sapien
gatcacagccaaggtagtcttctca

SEQ ID NO: 4245725 - DNA, 25 bp, Homo sapien
aagtttggccctcatgcctcagctc

SEQ ID NO: 4245726 - DNA, 25 bp, Homo sapien
cctccacaagtttggccctcatgcc

SEQ ID NO: 4245727 - DNA, 25 bp, Homo sapien
ctccacaagtttggccctcatgcct

SEQ ID NO: 4245728 - DNA, 25 bp, Homo sapien
cacaagtttggccctcatgcctcag

SEQ ID NO: 4245729 - DNA, 25 bp, Homo sapien
tgagctcgatgcaggtaggctttga

SEQ ID NO: 4245730 - DNA, 25 bp, Homo sapien
gaacttgagctcgatgcaggtaggc

SEQ ID NO: 4245731 - DNA, 25 bp, Homo sapien
ctcgatgcaggtaggctttgaactt

SEQ ID NO: 4245732 - DNA, 25 bp, Homo sapien
cttgagctcgatgcaggtaggcttt

SEQ ID NO: 4245733 - DNA, 25 bp, Homo sapien
gttgtggaaacaacacctgctagaa

SEQ ID NO: 4245734 - DNA, 25 bp, Homo sapien
gaaagagctcagttcagccaaccct

SEQ ID NO: 4245735 - DNA, 25 bp, Homo sapien
tatatttagctaggaggagtacatc

SEQ ID NO: 4245736 - DNA, 25 bp, Homo sapien
gccaaccctagatgtgtgcctgtat

SEQ ID NO: 4245737 - DNA, 25 bp, Homo sapien
ctgagtgccatcatggaaatcctgg

SEQ ID NO: 4245738 - DNA, 25 bp, Homo sapien
tcaggaaagaggagtgcccatccaa

SEQ ID NO: 4245739 - DNA, 25 bp, Homo sapien
ctgcagcttgcatggcccctctgat

SEQ ID NO: 4245740 - DNA, 25 bp, Homo sapien
tggcaggtctgcaaacccaaaagtg

SEQ ID NO: 4245741 - DNA, 25 bp, Homo sapien
cctgggcagtactgcggatcagcct

SEQ ID NO: 4245742 - DNA, 25 bp, Homo sapien
cagtactgcggatcagcctgtctct

SEQ ID NO: 4245743 - DNA, 25 bp, Homo sapien
ggcagtactgcggatcagcctgtct

SEQ ID NO: 4245744 - DNA, 25 bp, Homo sapien
gtactgcggatcagcctgtctctgt

SEQ ID NO: 4245745 - DNA, 25 bp, Homo sapien
tcatgtaattccagtccccaggttt

SEQ ID NO: 4245746 - DNA, 25 bp, Homo sapien
cgtgtgatcttagacgctcctgtca

SEQ ID NO: 4245747 - DNA, 25 bp, Homo sapien
tctgaggaatgcaccaacttgtagc

SEQ ID NO: 4245748 - DNA, 25 bp, Homo sapien
tatgtgtcctggttaatcactgccc

SEQ ID NO: 4245749 - DNA, 25 bp, Homo sapien
ccatgcaattaagatgtctttgggc

SEQ ID NO: 4245750 - DNA, 25 bp, Homo sapien
catgcaattaagatgtctttgggca

SEQ ID NO: 4245751 - DNA, 25 bp, Homo sapien
atgcaattaagatgtctttgggcat

SEQ ID NO: 4245752 - DNA, 25 bp, Homo sapien
catatccaggaaggtataatatatt

SEQ ID NO: 4245753 - DNA, 25 bp, Homo sapien
tacatatccaggaaggtataatata

SEQ ID NO: 4245754 - DNA, 25 bp, Homo sapien
tatccaggaaggtataatatattcc

SEQ ID NO: 4245755 - DNA, 25 bp, Homo sapien
ctacatatccaggaaggtataatat

SEQ ID NO: 4245756 - DNA, 25 bp, Homo sapien
catcccaggatgtgaaagacttccc

SEQ ID NO: 4245757 - DNA, 25 bp, Homo sapien
tgtgtgggacaaaacgatgcgaaac

SEQ ID NO: 4245758 - DNA, 25 bp, Homo sapien
gatgcgaaacccgaactcaaataga

SEQ ID NO: 4245759 - DNA, 25 bp, Homo sapien
aaaattagctacaggtgtgcatggc

SEQ ID NO: 4245760 - DNA, 25 bp, Homo sapien
gggcatatgaacagcttccattacg

SEQ ID NO: 4245761 - DNA, 25 bp, Homo sapien
catatgaacagcttccattacggta

SEQ ID NO: 4245762 - DNA, 25 bp, Homo sapien
ggcatatgaacagcttccattacgg

SEQ ID NO: 4245763 - DNA, 25 bp, Homo sapien
gggggcatatgaacagcttccatta

SEQ ID NO: 4245764 - DNA, 25 bp, Homo sapien
agtagtgctcctatgtagttcatca

SEQ ID NO: 4245765 - DNA, 25 bp, Homo sapien
gatgccatctagtagtgctcctatg

SEQ ID NO: 4245766 - DNA, 25 bp, Homo sapien
cagacgacattgagatgccatctag

SEQ ID NO: 4245767 - DNA, 25 bp, Homo sapien
ccaatatgacatgaggtgcagacga

SEQ ID NO: 4245768 - DNA, 25 bp, Homo sapien
ttattgcccctcaaggtctaaattc

SEQ ID NO: 4245769 - DNA, 25 bp, Homo sapien
ttgcccctcaaggtctaaattcacc

SEQ ID NO: 4245770 - DNA, 25 bp, Homo sapien
gtctatgtattaacatttacatcat

SEQ ID NO: 4245771 - DNA, 25 bp, Homo sapien
ccaccctaagagaaacattgatagt

SEQ ID NO: 4245772 - DNA, 25 bp, Homo sapien
tgcagtcacttcttcatagtgagca

SEQ ID NO: 4245773 - DNA, 25 bp, Homo sapien
gagcaaattatggtaaacccatggg

SEQ ID NO: 4245774 - DNA, 25 bp, Homo sapien
tgcagaaatcgatgtccacatgggt

SEQ ID NO: 4245775 - DNA, 25 bp, Homo sapien
ccacatgggttgaacgttgagcaaa

SEQ ID NO: 4245776 - DNA, 25 bp, Homo sapien
tattccagtgggatatgcgtgtgcc

SEQ ID NO: 4245777 - DNA, 25 bp, Homo sapien
gctttttcttcagcgtcagacagag

SEQ ID NO: 4245778 - DNA, 25 bp, Homo sapien
tataaacaaggctcacacctcctgg

SEQ ID NO: 4245779 - DNA, 25 bp, Homo sapien
tatcagtgcagctcggaaaagcagt

SEQ ID NO: 4245780 - DNA, 25 bp, Homo sapien
tgggaagagatgtgttatcacactg

SEQ ID NO: 4245781 - DNA, 25 bp, Homo sapien
tgcaggtgtctggtgtttggcccca

SEQ ID NO: 4245782 - DNA, 25 bp, Homo sapien
ccagagatttggaataaagagtaga

SEQ ID NO: 4245783 - DNA, 25 bp, Homo sapien
tggccccatggaactttctaagtgt

SEQ ID NO: 4245784 - DNA, 25 bp, Homo sapien
taaagcggtttctgagagccaagag

SEQ ID NO: 4245785 - DNA, 25 bp, Homo sapien
tgctgagtccagttgacagaatgta

SEQ ID NO: 4245786 - DNA, 25 bp, Homo sapien
gaagacatccctgactatgactgta

SEQ ID NO: 4245787 - DNA, 25 bp, Homo sapien
tctcttgtctaagaatgctgagtcc

SEQ ID NO: 4245788 - DNA, 25 bp, Homo sapien
tcttatggaagaggcgcaaaccagg

SEQ ID NO: 4245789 - DNA, 25 bp, Homo sapien
tatggaagaggcgcaaaccagggca

SEQ ID NO: 4245790 - DNA, 25 bp, Homo sapien
aatcttatggaagaggcgcaaacca

SEQ ID NO: 4245791 - DNA, 25 bp, Homo sapien
ttatggaagaggcgcaaaccagggc

SEQ ID NO: 4245792 - DNA, 25 bp, Homo sapien
ctcggttcaagtggctccggtaact

SEQ ID NO: 4245793 - DNA, 25 bp, Homo sapien
caagtggctccggtaacttctcttt

SEQ ID NO: 4245794 - DNA, 25 bp, Homo sapien
agtctcctcagttttggggaaatct

SEQ ID NO: 4245795 - DNA, 25 bp, Homo sapien
aggacaactcggttcaagtggctcc

SEQ ID NO: 4245796 - DNA, 25 bp, Homo sapien
atcttatttacaacagacctattta

SEQ ID NO: 4245797 - DNA, 25 bp, Homo sapien
tcttatttacaacagacctatttaa

SEQ ID NO: 4245798 - DNA, 25 bp, Homo sapien
tatttacaacagacctatttaactc

SEQ ID NO: 4245799 - DNA, 25 bp, Homo sapien
atttacaacagacctatttaactca

SEQ ID NO: 4245800 - DNA, 25 bp, Homo sapien
tcatggcaccaacgtaaaagaaaaa

SEQ ID NO: 4245801 - DNA, 25 bp, Homo sapien
tatcatggcaccaacgtaaaagaaa

SEQ ID NO: 4245802 - DNA, 25 bp, Homo sapien
atcatggcaccaacgtaaaagaaaa

SEQ ID NO: 4245803 - DNA, 25 bp, Homo sapien
tcttttactgattgcttttgcctct

SEQ ID NO: 4245804 - DNA, 25 bp, Homo sapien
tgtggggtgtggggatgtgcctcat

SEQ ID NO: 4245805 - DNA, 25 bp, Homo sapien
gctttgtggggtgtggggatgtgcc

SEQ ID NO: 4245806 - DNA, 25 bp, Homo sapien
tttgtggggtgtggggatgtgcctc

SEQ ID NO: 4245807 - DNA, 25 bp, Homo sapien
cttactggctttgtggggtgtgggg

SEQ ID NO: 4245808 - DNA, 25 bp, Homo sapien
tggaaaagaggacttagagttctca

SEQ ID NO: 4245809 - DNA, 25 bp, Homo sapien
ttctggaaaagaggacttagagttc

SEQ ID NO: 4245810 - DNA, 25 bp, Homo sapien
agagcttctacaggcatcgtggcca

SEQ ID NO: 4245811 - DNA, 25 bp, Homo sapien
tctcaatggcagagcttctacaggc

SEQ ID NO: 4245812 - DNA, 25 bp, Homo sapien
cagaacaactattcagaacaactgc

SEQ ID NO: 4245813 - DNA, 25 bp, Homo sapien
gaacaactattcagaacaactgcca

SEQ ID NO: 4245814 - DNA, 25 bp, Homo sapien
ccagccgaatattcagaacaactat

SEQ ID NO: 4245815 - DNA, 25 bp, Homo sapien
tgcatcccagccgaatattcagaac

SEQ ID NO: 4245816 - DNA, 25 bp, Homo sapien
agttacttggccttttagtatcctg

SEQ ID NO: 4245817 - DNA, 25 bp, Homo sapien
cctggtttaagaggtaggacattgc

SEQ ID NO: 4245818 - DNA, 25 bp, Homo sapien
tagtatcctggtttaagaggtagga

SEQ ID NO: 4245819 - DNA, 25 bp, Homo sapien
ttaagaggtaggacattgccaaaga

SEQ ID NO: 4245820 - DNA, 25 bp, Homo sapien
cagcttaattaggagattctctagc

SEQ ID NO: 4245821 - DNA, 25 bp, Homo sapien
tgggtaaatgatagcaccaaatggt

SEQ ID NO: 4245822 - DNA, 25 bp, Homo sapien
ccattgttccggtccagcatggaag

SEQ ID NO: 4245823 - DNA, 25 bp, Homo sapien
catttcgtccgctatagtgagttct

SEQ ID NO: 4245824 - DNA, 25 bp, Homo sapien
ggtgctctgagcgtgctaatttctt

SEQ ID NO: 4245825 - DNA, 25 bp, Homo sapien
cacctgaaaaaatcctaggtgctct

SEQ ID NO: 4245826 - DNA, 25 bp, Homo sapien
ctgagcgtgctaatttctttctcaa

SEQ ID NO: 4245827 - DNA, 25 bp, Homo sapien
tcaagcacctgaaaaaatcctaggt

SEQ ID NO: 4245828 - DNA, 25 bp, Homo sapien
ggtctaagctatcccctgactctgg

SEQ ID NO: 4245829 - DNA, 25 bp, Homo sapien
ttttccttgtagaacgtgctccagt

SEQ ID NO: 4245830 - DNA, 25 bp, Homo sapien
ctgtggatcacttaagcgatcatct

SEQ ID NO: 4245831 - DNA, 25 bp, Homo sapien
attcctgcatcaagtggtctaagct

SEQ ID NO: 4245832 - DNA, 25 bp, Homo sapien
tctccgctcctgagtttggggtctc

SEQ ID NO: 4245833 - DNA, 25 bp, Homo sapien
gcagatcaatttggtctgctgcttc

SEQ ID NO: 4245834 - DNA, 25 bp, Homo sapien
cttctccgctcctgagtttggggtc

SEQ ID NO: 4245835 - DNA, 25 bp, Homo sapien
ttctccgctcctgagtttggggtct

SEQ ID NO: 4245836 - DNA, 25 bp, Homo sapien
gtagaagcggcagaagacaggcctt

SEQ ID NO: 4245837 - DNA, 25 bp, Homo sapien
caaattcctccaagcaccctgtgga

SEQ ID NO: 4245838 - DNA, 25 bp, Homo sapien
agcaccctgtggatttttgataatg

SEQ ID NO: 4245839 - DNA, 25 bp, Homo sapien
tccttgaaatgtagaagcggcagaa

SEQ ID NO: 4245840 - DNA, 25 bp, Homo sapien
tttaataaggtggccgaacaatctg

SEQ ID NO: 4245841 - DNA, 25 bp, Homo sapien
ttaataaggtggccgaacaatctgt

SEQ ID NO: 4245842 - DNA, 25 bp, Homo sapien
gaaatcctttccctttgtggcatgg

SEQ ID NO: 4245843 - DNA, 25 bp, Homo sapien
catgggtcaaatcgctagtagttaa

SEQ ID NO: 4245844 - DNA, 25 bp, Homo sapien
ggcaccaccaagatagatccaggag

SEQ ID NO: 4245845 - DNA, 25 bp, Homo sapien
tccagtgtaggtgtccacggttccc

SEQ ID NO: 4245846 - DNA, 25 bp, Homo sapien
gaagatctggttaggtccaccagat

SEQ ID NO: 4245847 - DNA, 25 bp, Homo sapien
taatgatagactcaaaggcagagtc

SEQ ID NO: 4245848 - DNA, 25 bp, Homo sapien
cttcagttcttgtaatgatagactc

SEQ ID NO: 4245849 - DNA, 25 bp, Homo sapien
ggttaggtccaccagatcccttgcc

SEQ ID NO: 4245850 - DNA, 25 bp, Homo sapien
gcaactctgtttctggttaaccacc

SEQ ID NO: 4245851 - DNA, 25 bp, Homo sapien
catccgcaactctgtttctggttaa

SEQ ID NO: 4245852 - DNA, 25 bp, Homo sapien
tccgcaactctgtttctggttaacc

SEQ ID NO: 4245853 - DNA, 25 bp, Homo sapien
cgcaactctgtttctggttaaccac

SEQ ID NO: 4245854 - DNA, 25 bp, Homo sapien
ctcgtagcagtcctgttctgtgcaa

SEQ ID NO: 4245855 - DNA, 25 bp, Homo sapien
agctgctcgtagcagtcctgttctg

SEQ ID NO: 4245856 - DNA, 25 bp, Homo sapien
ttgaatggaaatgataactttccta

SEQ ID NO: 4245857 - DNA, 25 bp, Homo sapien
actttcctacattctgctagagaca

SEQ ID NO: 4245858 - DNA, 25 bp, Homo sapien
ggtttgtataggtttatacgctgaa

SEQ ID NO: 4245859 - DNA, 25 bp, Homo sapien
gatggctagattcaagagtcgaccc

SEQ ID NO: 4245860 - DNA, 25 bp, Homo sapien
ttatacgctgaatgtgatggctaga

SEQ ID NO: 4245861 - DNA, 25 bp, Homo sapien
tcttctaagctgtttggtttgtata

SEQ ID NO: 4245862 - DNA, 25 bp, Homo sapien
ggagtttggaagacctggttgtgtg

SEQ ID NO: 4245863 - DNA, 25 bp, Homo sapien
gacctcaacaccttcacagggagtt

SEQ ID NO: 4245864 - DNA, 25 bp, Homo sapien
tttggaagacctggttgtgtgctcc

SEQ ID NO: 4245865 - DNA, 25 bp, Homo sapien
acctcaacaccttcacagggagttt

SEQ ID NO: 4245866 - DNA, 25 bp, Homo sapien
ctgcattctccacgggtttatcttt

SEQ ID NO: 4245867 - DNA, 25 bp, Homo sapien
gcctgcattctccacgggtttatct

SEQ ID NO: 4245868 - DNA, 25 bp, Homo sapien
cattctccacgggtttatctttggc

SEQ ID NO: 4245869 - DNA, 25 bp, Homo sapien
gcattctccacgggtttatctttgg

SEQ ID NO: 4245870 - DNA, 25 bp, Homo sapien
ctaccgctatcttataaagccttag

SEQ ID NO: 4245871 - DNA, 25 bp, Homo sapien
ttataaagccttagtcttccattca

SEQ ID NO: 4245872 - DNA, 25 bp, Homo sapien
cctaagaagctttcctaccgctatc

SEQ ID NO: 4245873 - DNA, 25 bp, Homo sapien
gaagctttcctaccgctatcttata

SEQ ID NO: 4245874 - DNA, 25 bp, Homo sapien
cttcaactttattacctacaactga

SEQ ID NO: 4245875 - DNA, 25 bp, Homo sapien
cagagtctcactacggacttttaaa

SEQ ID NO: 4245876 - DNA, 25 bp, Homo sapien
tattacctacaactgattttccatt

SEQ ID NO: 4245877 - DNA, 25 bp, Homo sapien
aacagaaatggttatccaaacctga

SEQ ID NO: 4245878 - DNA, 25 bp, Homo sapien
catggcagcatctgctcacttctgg

SEQ ID NO: 4245879 - DNA, 25 bp, Homo sapien
gcagcatctgctcacttctggggaa

SEQ ID NO: 4245880 - DNA, 25 bp, Homo sapien
tggcagcatctgctcacttctgggg

SEQ ID NO: 4245881 - DNA, 25 bp, Homo sapien
agcatctgctcacttctggggaagc

SEQ ID NO: 4245882 - DNA, 25 bp, Homo sapien
caacacatattgattatctgacagt

SEQ ID NO: 4245883 - DNA, 25 bp, Homo sapien
aaactgcaagtttgctgtcatggtg

SEQ ID NO: 4245884 - DNA, 25 bp, Homo sapien
tctctgataggtgctgagtctcatc

SEQ ID NO: 4245885 - DNA, 25 bp, Homo sapien
ggctccttcaggttgctggcaaaat

SEQ ID NO: 4245886 - DNA, 25 bp, Homo sapien
tgtatgtcttatacccattgctgag

SEQ ID NO: 4245887 - DNA, 25 bp, Homo sapien
aaatctggtgagtgaagtttcctgc

SEQ ID NO: 4245888 - DNA, 25 bp, Homo sapien
taagatgtctgtgattagctctaat

SEQ ID NO: 4245889 - DNA, 25 bp, Homo sapien
cattgctgagtccataaatctggtg

SEQ ID NO: 4245890 - DNA, 25 bp, Homo sapien
gagaatctgttccagatcttgtatt

SEQ ID NO: 4245891 - DNA, 25 bp, Homo sapien
gtcctggcttaaggaacctttgaga

SEQ ID NO: 4245892 - DNA, 25 bp, Homo sapien
gaatctgttccagatcttgtattgt

SEQ ID NO: 4245893 - DNA, 25 bp, Homo sapien
ctggcttaaggaacctttgagaatc

SEQ ID NO: 4245894 - DNA, 25 bp, Homo sapien
tgtttagaaggctcaacaggagttt

SEQ ID NO: 4245895 - DNA, 25 bp, Homo sapien
tatgaagatactagtgatttttcca

SEQ ID NO: 4245896 - DNA, 25 bp, Homo sapien
tctgtatatgaagatactagtgatt

SEQ ID NO: 4245897 - DNA, 25 bp, Homo sapien
ttccattatttgtttagaaggctca

SEQ ID NO: 4245898 - DNA, 25 bp, Homo sapien
ctgcaagaataacggaagggtaaat

SEQ ID NO: 4245899 - DNA, 25 bp, Homo sapien
tgcaagaataacggaagggtaaatg

SEQ ID NO: 4245900 - DNA, 25 bp, Homo sapien
caactagacggtaaagtgcaggatc

SEQ ID NO: 4245901 - DNA, 25 bp, Homo sapien
tgagtgtttgtacagagcctttcat

SEQ ID NO: 4245902 - DNA, 25 bp, Homo sapien
agtgcaggatctgcgagtgccttcc

SEQ ID NO: 4245903 - DNA, 25 bp, Homo sapien
tagttactaccatcaactagacggt

SEQ ID NO: 4245904 - DNA, 25 bp, Homo sapien
cattgtgcctctgcaattttctgct

SEQ ID NO: 4245905 - DNA, 25 bp, Homo sapien
gcattgtgcctctgcaattttctgc

SEQ ID NO: 4245906 - DNA, 25 bp, Homo sapien
attgtgcctctgcaattttctgctc

SEQ ID NO: 4245907 - DNA, 25 bp, Homo sapien
ctcctgacgatttgatctaagccac

SEQ ID NO: 4245908 - DNA, 25 bp, Homo sapien
caccaaggaaattctttacggagag

SEQ ID NO: 4245909 - DNA, 25 bp, Homo sapien
ggaaattctttacggagagtggcag

SEQ ID NO: 4245910 - DNA, 25 bp, Homo sapien
caaggaaattctttacggagagtgg

SEQ ID NO: 4245911 - DNA, 25 bp, Homo sapien
gacggagctggccttatcagtcact

SEQ ID NO: 4245912 - DNA, 25 bp, Homo sapien
gtatgactggccattgtagtgccca

SEQ ID NO: 4245913 - DNA, 25 bp, Homo sapien
tgggctcagtaaagcagatggctct

SEQ ID NO: 4245914 - DNA, 25 bp, Homo sapien
tgatgtagtaaaagcaccgtgggct

SEQ ID NO: 4245915 - DNA, 25 bp, Homo sapien
tatatggactacaaacatctgcata

SEQ ID NO: 4245916 - DNA, 25 bp, Homo sapien
gaacataacttcctttgatcaaaag

SEQ ID NO: 4245917 - DNA, 25 bp, Homo sapien
tggaatgtggataagggtgtctata

SEQ ID NO: 4245918 - DNA, 25 bp, Homo sapien
gtagtggtcactgtctgcgttgtca

SEQ ID NO: 4245919 - DNA, 25 bp, Homo sapien
tcatagccctcaagtccttccagat

SEQ ID NO: 4245920 - DNA, 25 bp, Homo sapien
ccgctcatagccctcaagtccttcc

SEQ ID NO: 4245921 - DNA, 25 bp, Homo sapien
aagaccatccaaaatagagtggtct

SEQ ID NO: 4245922 - DNA, 25 bp, Homo sapien
ctgtctgcctgttccgctcatagcc

SEQ ID NO: 4245923 - DNA, 25 bp, Homo sapien
tctcccccttttctgatgctcacgg

SEQ ID NO: 4245924 - DNA, 25 bp, Homo sapien
ctgttgattctttaaagtggcagtt

SEQ ID NO: 4245925 - DNA, 25 bp, Homo sapien
gattctttaaagtggcagttctccc

SEQ ID NO: 4245926 - DNA, 25 bp, Homo sapien
ctggggatgttgatggcctgttgat

SEQ ID NO: 4245927 - DNA, 25 bp, Homo sapien
agatggcagtattcagagatggaag

SEQ ID NO: 4245928 - DNA, 25 bp, Homo sapien
tggcagtattcagagatggaagctg

SEQ ID NO: 4245929 - DNA, 25 bp, Homo sapien
gatggcagtattcagagatggaagc

SEQ ID NO: 4245930 - DNA, 25 bp, Homo sapien
cagatggcagtattcagagatggaa

SEQ ID NO: 4245931 - DNA, 25 bp, Homo sapien
ccacctgtagcatcttccagtttat

SEQ ID NO: 4245932 - DNA, 25 bp, Homo sapien
tggacagctgatccaagcattcatc

SEQ ID NO: 4245933 - DNA, 25 bp, Homo sapien
tcaaccatctagacggggtcctgtg

SEQ ID NO: 4245934 - DNA, 25 bp, Homo sapien
ggacagctgatccaagcattcatct

SEQ ID NO: 4245935 - DNA, 25 bp, Homo sapien
ccatctagacggggtcctgtggaca

SEQ ID NO: 4245936 - DNA, 25 bp, Homo sapien
cccaggtgcagctcttttactgaac

SEQ ID NO: 4245937 - DNA, 25 bp, Homo sapien
tatatctgcgttccctactagacca

SEQ ID NO: 4245938 - DNA, 25 bp, Homo sapien
tcccaaaccagagtgagtctccagc

SEQ ID NO: 4245939 - DNA, 25 bp, Homo sapien
tcttccttatatctgcgttccctac

SEQ ID NO: 4245940 - DNA, 25 bp, Homo sapien
tctttgacccaagagggcctttggc

SEQ ID NO: 4245941 - DNA, 25 bp, Homo sapien
aagaggcactaccaagtctgtgaca

SEQ ID NO: 4245942 - DNA, 25 bp, Homo sapien
tgaccaagggagcagactagaacac

SEQ ID NO: 4245943 - DNA, 25 bp, Homo sapien
gagcaatgacactcacagaccagtt

SEQ ID NO: 4245944 - DNA, 25 bp, Homo sapien
taaactctcagtatgcaccttgggc

SEQ ID NO: 4245945 - DNA, 25 bp, Homo sapien
gcaagtagagtgagcacaaagctgt

SEQ ID NO: 4245946 - DNA, 25 bp, Homo sapien
aatgtagcaagtaccctcccaggaa

SEQ ID NO: 4245947 - DNA, 25 bp, Homo sapien
gcaggctaccactcaggcaagtaga

SEQ ID NO: 4245948 - DNA, 25 bp, Homo sapien
gagatgtgcgtctttattcttttgt

SEQ ID NO: 4245949 - DNA, 25 bp, Homo sapien
tgaaggctccaccaagtaccagact

SEQ ID NO: 4245950 - DNA, 25 bp, Homo sapien
gtaccagactttggggctgcatctc

SEQ ID NO: 4245951 - DNA, 25 bp, Homo sapien
aagagtgaaggctccaccaagtacc

SEQ ID NO: 4245952 - DNA, 25 bp, Homo sapien
taagctgtagctttctttacttgga

SEQ ID NO: 4245953 - DNA, 25 bp, Homo sapien
ctaagctgtagctttctttacttgg

SEQ ID NO: 4245954 - DNA, 25 bp, Homo sapien
gcatcaagctatcagagcctgctgt

SEQ ID NO: 4245955 - DNA, 25 bp, Homo sapien
tcagcgaggactagaggtatgagct

SEQ ID NO: 4245956 - DNA, 25 bp, Homo sapien
cactggctagttctttgaaggttat

SEQ ID NO: 4245957 - DNA, 25 bp, Homo sapien
gaaggttattgccaccatttgcctc

SEQ ID NO: 4245958 - DNA, 25 bp, Homo sapien
tgcaacagctgaagtggatcaaaag

SEQ ID NO: 4245959 - DNA, 25 bp, Homo sapien
tgtcttagcgctacattgcaacagc

SEQ ID NO: 4245960 - DNA, 25 bp, Homo sapien
cactccatgtgagcctttgtatgcc

SEQ ID NO: 4245961 - DNA, 25 bp, Homo sapien
tatgccatctatcagtctaggctgg

SEQ ID NO: 4245962 - DNA, 25 bp, Homo sapien
gaagagcttggtaatctcattatcc

SEQ ID NO: 4245963 - DNA, 25 bp, Homo sapien
cattgttggaacacattgtcttccc

SEQ ID NO: 4245964 - DNA, 25 bp, Homo sapien
agaaagcatgtggaacgggccattg

SEQ ID NO: 4245965 - DNA, 25 bp, Homo sapien
gaggagtgtcactcatataaagaaa

SEQ ID NO: 4245966 - DNA, 25 bp, Homo sapien
ctggaaagtgactcatatagggttc

SEQ ID NO: 4245967 - DNA, 25 bp, Homo sapien
ttcaggtttgtgttagaccgtagcc

SEQ ID NO: 4245968 - DNA, 25 bp, Homo sapien
ttttggaggttcataggcctattca

SEQ ID NO: 4245969 - DNA, 25 bp, Homo sapien
cgtagcctctgaaatctttgtctaa

SEQ ID NO: 4245970 - DNA, 25 bp, Homo sapien
taacacagcgtcaaggctgctatgc

SEQ ID NO: 4245971 - DNA, 25 bp, Homo sapien
gaagcaggtaacacagcgtcaaggc

SEQ ID NO: 4245972 - DNA, 25 bp, Homo sapien
taacttgccgtaggagaagcaggta

SEQ ID NO: 4245973 - DNA, 25 bp, Homo sapien
gaaacaagataacttgccgtaggag

SEQ ID NO: 4245974 - DNA, 25 bp, Homo sapien
taacaaatatcgctacacgggcact

SEQ ID NO: 4245975 - DNA, 25 bp, Homo sapien
tgtaatcagtgctatggaggaaacc

SEQ ID NO: 4245976 - DNA, 25 bp, Homo sapien
tgcatgctcacgtggtagaaaggac

SEQ ID NO: 4245977 - DNA, 25 bp, Homo sapien
tcctgagactgtgcaaagcagcgag

SEQ ID NO: 4245978 - DNA, 25 bp, Homo sapien
ctttcttctgcttttctggaggatg

SEQ ID NO: 4245979 - DNA, 25 bp, Homo sapien
ttcttctgcttttctggaggatgct

SEQ ID NO: 4245980 - DNA, 25 bp, Homo sapien
cttctgcttttctggaggatgctcc

SEQ ID NO: 4245981 - DNA, 25 bp, Homo sapien
tctgcttttctggaggatgctccca

SEQ ID NO: 4245982 - DNA, 25 bp, Homo sapien
tccactctcacgcagagtgttttat

SEQ ID NO: 4245983 - DNA, 25 bp, Homo sapien
ctctcacgcagagtgttttatcttt

SEQ ID NO: 4245984 - DNA, 25 bp, Homo sapien
cacgcagagtgttttatctttacca

SEQ ID NO: 4245985 - DNA, 25 bp, Homo sapien
ctcacgcagagtgttttatctttac

SEQ ID NO: 4245986 - DNA, 25 bp, Homo sapien
gtaggtgtttgtctccggtcttata

SEQ ID NO: 4245987 - DNA, 25 bp, Homo sapien
tgtctccggtcttatatccagagct

SEQ ID NO: 4245988 - DNA, 25 bp, Homo sapien
tccagagcttgacatagggacatct

SEQ ID NO: 4245989 - DNA, 25 bp, Homo sapien
tcacattaacacctgggatgtgggt

SEQ ID NO: 4245990 - DNA, 25 bp, Homo sapien
ggacaaaactactcttggccttgga

SEQ ID NO: 4245991 - DNA, 25 bp, Homo sapien
tctgctctttcatatgtggaacaaa

SEQ ID NO: 4245992 - DNA, 25 bp, Homo sapien
gattttcggacaggtctcagggctg

SEQ ID NO: 4245993 - DNA, 25 bp, Homo sapien
tagtgcccctaagtctaggctcaac

SEQ ID NO: 4245994 - DNA, 25 bp, Homo sapien
gaatgattgaggacagcttgtcgtc

SEQ ID NO: 4245995 - DNA, 25 bp, Homo sapien
accaaagtaaatagccactgttgca

SEQ ID NO: 4245996 - DNA, 25 bp, Homo sapien
ttgaggacagcttgtcgtctaccat

SEQ ID NO: 4245997 - DNA, 25 bp, Homo sapien
ggcgaatgattgaggacagcttgtc

SEQ ID NO: 4245998 - DNA, 25 bp, Homo sapien
gactcacagagctcgtaagcacact

SEQ ID NO: 4245999 - DNA, 25 bp, Homo sapien
ttcagcagactcacagagctcgtaa

SEQ ID NO: 4246000 - DNA, 25 bp, Homo sapien
tcacagagctcgtaagcacactttc

SEQ ID NO: 4246001 - DNA, 25 bp, Homo sapien
agcagactcacagagctcgtaagca

SEQ ID NO: 4246002 - DNA, 25 bp, Homo sapien
cagtaaccaatagttacctttcctg

SEQ ID NO: 4246003 - DNA, 25 bp, Homo sapien
tgttacagggctttgctgtgtgtgt

SEQ ID NO: 4246004 - DNA, 25 bp, Homo sapien
gggtatatgtgaaacttttgtacat

SEQ ID NO: 4246005 - DNA, 25 bp, Homo sapien
catacataaacaagtgttacagggc

SEQ ID NO: 4246006 - DNA, 25 bp, Homo sapien
tagaggagctctagaccacaagtga

SEQ ID NO: 4246007 - DNA, 25 bp, Homo sapien
gacatccaacactacagagaagcag

SEQ ID NO: 4246008 - DNA, 25 bp, Homo sapien
tgaaacttgcagagctcgtggaaca

SEQ ID NO: 4246009 - DNA, 25 bp, Homo sapien
tacagggaccaaagatagagcctct

SEQ ID NO: 4246010 - DNA, 25 bp, Homo sapien
tcatccctccgttctccctgtctcc

SEQ ID NO: 4246011 - DNA, 25 bp, Homo sapien
tgtcatccctccgttctccctgtct

SEQ ID NO: 4246012 - DNA, 25 bp, Homo sapien
ctgtcatccctccgttctccctgtc

SEQ ID NO: 4246013 - DNA, 25 bp, Homo sapien
atccctccgttctccctgtctccac

SEQ ID NO: 4246014 - DNA, 25 bp, Homo sapien
ctgcggacacgctcatggcagacca

SEQ ID NO: 4246015 - DNA, 25 bp, Homo sapien
ggacacgctcatggcagaccactgg

SEQ ID NO: 4246016 - DNA, 25 bp, Homo sapien
tgcggacacgctcatggcagaccac

SEQ ID NO: 4246017 - DNA, 25 bp, Homo sapien
tggccgtagtgacaggttggtcaac

SEQ ID NO: 4246018 - DNA, 25 bp, Homo sapien
atcccagagttcagggacccaaagg

SEQ ID NO: 4246019 - DNA, 25 bp, Homo sapien
tcacgtcttctcctgataactgaca

SEQ ID NO: 4246020 - DNA, 25 bp, Homo sapien
tcttctcctgataactgacaggatc

SEQ ID NO: 4246021 - DNA, 25 bp, Homo sapien
tcatgtttagcatcagcatctcaaa

SEQ ID NO: 4246022 - DNA, 25 bp, Homo sapien
catttgtttgcagtaccagcctccc

SEQ ID NO: 4246023 - DNA, 25 bp, Homo sapien
atgcctgttttgctggaccgaagag

SEQ ID NO: 4246024 - DNA, 25 bp, Homo sapien
cctgctgttgcagagatgtgagaat

SEQ ID NO: 4246025 - DNA, 25 bp, Homo sapien
gaactcgggcaaactggcaaagctc

SEQ ID NO: 4246026 - DNA, 25 bp, Homo sapien
caagggttttgagtccacaagctaa

SEQ ID NO: 4246027 - DNA, 25 bp, Homo sapien
aacaggttaatgtgctcatattaca

SEQ ID NO: 4246028 - DNA, 25 bp, Homo sapien
agatgtaaacaggttaatgtgctca

SEQ ID NO: 4246029 - DNA, 25 bp, Homo sapien
gttttgagtccacaagctaaaattc

SEQ ID NO: 4246030 - DNA, 25 bp, Homo sapien
atgaggactctcttaacggtgtcct

SEQ ID NO: 4246031 - DNA, 25 bp, Homo sapien
tgtcctcaattgtccgtggttctag

SEQ ID NO: 4246032 - DNA, 25 bp, Homo sapien
taacggtgtcctcaattgtccgtgg

SEQ ID NO: 4246033 - DNA, 25 bp, Homo sapien
tgtccgtggttctagttctgtgaac

SEQ ID NO: 4246034 - DNA, 25 bp, Homo sapien
gagaagcagtctagtgcccaggtta

SEQ ID NO: 4246035 - DNA, 25 bp, Homo sapien
taaatcagccatgatcttgtggaga

SEQ ID NO: 4246036 - DNA, 25 bp, Homo sapien
gcgtttctgcccaatcaagtagtga

SEQ ID NO: 4246037 - DNA, 25 bp, Homo sapien
taagacttaagatgctggagcccat

SEQ ID NO: 4246038 - DNA, 25 bp, Homo sapien
aagcacttttcacttggattggcca

SEQ ID NO: 4246039 - DNA, 25 bp, Homo sapien
tctgtgcatggttagcccttggcaa

SEQ ID NO: 4246040 - DNA, 25 bp, Homo sapien
tggataatgactacagtaaggccct

SEQ ID NO: 4246041 - DNA, 25 bp, Homo sapien
tcggttgtcagctggaaaattctct

SEQ ID NO: 4246042 - DNA, 25 bp, Homo sapien
ggccgccacttgaataatgcttaag

SEQ ID NO: 4246043 - DNA, 25 bp, Homo sapien
caatcgggcagtttccatggaggcc

SEQ ID NO: 4246044 - DNA, 25 bp, Homo sapien
tgtttagcatgactgcccacgtgtg

SEQ ID NO: 4246045 - DNA, 25 bp, Homo sapien
ccactgagtcagttaatgggccaga

SEQ ID NO: 4246046 - DNA, 25 bp, Homo sapien
tcagtcccaacaccatctagctagg

SEQ ID NO: 4246047 - DNA, 25 bp, Homo sapien
taaaattgggaatatcatggaacac

SEQ ID NO: 4246048 - DNA, 25 bp, Homo sapien
gaacacgtgctttcatgtactttgt

SEQ ID NO: 4246049 - DNA, 25 bp, Homo sapien
catggaacactcatcttggttaatt

SEQ ID NO: 4246050 - DNA, 25 bp, Homo sapien
ccctcccagttgaaatagttataag

SEQ ID NO: 4246051 - DNA, 25 bp, Homo sapien
caaagttgtatcaggcaataatcca

SEQ ID NO: 4246052 - DNA, 25 bp, Homo sapien
cacagacagtgctttgaatggtttc

SEQ ID NO: 4246053 - DNA, 25 bp, Homo sapien
tgaaaacaagcagcctagagatgct

SEQ ID NO: 4246054 - DNA, 25 bp, Homo sapien
caacataatatctatgaggctctct

SEQ ID NO: 4246055 - DNA, 25 bp, Homo sapien
gaatctgggttacgcgtgttccata

SEQ ID NO: 4246056 - DNA, 25 bp, Homo sapien
agtgtttctcaacataatatctatg

SEQ ID NO: 4246057 - DNA, 25 bp, Homo sapien
ggttacgcgtgttccatagaatgca

SEQ ID NO: 4246058 - DNA, 25 bp, Homo sapien
tacctggtgcgtttattttgtttgc

SEQ ID NO: 4246059 - DNA, 25 bp, Homo sapien
ctatctggtaatgtgagtaatggcc

SEQ ID NO: 4246060 - DNA, 25 bp, Homo sapien
gtttgcatattgcttagctatctgg

SEQ ID NO: 4246061 - DNA, 25 bp, Homo sapien
tgcctgaaatcacaaattggttgct

SEQ ID NO: 4246062 - DNA, 25 bp, Homo sapien
accgagtgcatcttagtaatggcca

SEQ ID NO: 4246063 - DNA, 25 bp, Homo sapien
tctggctattgagctgaacaatgac

SEQ ID NO: 4246064 - DNA, 25 bp, Homo sapien
tgagctgaacaatgaccgagtgcat

SEQ ID NO: 4246065 - DNA, 25 bp, Homo sapien
aaatctgcatctggctattgagctg

SEQ ID NO: 4246066 - DNA, 25 bp, Homo sapien
gctttaatgggtctccctgctgcag

SEQ ID NO: 4246067 - DNA, 25 bp, Homo sapien
tgctgcagaatactttggcccaggt

SEQ ID NO: 4246068 - DNA, 25 bp, Homo sapien
tatgccacctaagctgaggctgctt

SEQ ID NO: 4246069 - DNA, 25 bp, Homo sapien
tagcgctgacttacacttatgccac

SEQ ID NO: 4246070 - DNA, 25 bp, Homo sapien
gaaaggaccaagtacctgaacagtg

SEQ ID NO: 4246071 - DNA, 25 bp, Homo sapien
gaccaatctgcaggaggaacatcca

SEQ ID NO: 4246072 - DNA, 25 bp, Homo sapien
tgttgctaagctgtccaataagacc

SEQ ID NO: 4246073 - DNA, 25 bp, Homo sapien
caattctgagcgacatgcacggatg

SEQ ID NO: 4246074 - DNA, 25 bp, Homo sapien
tctcgcattaggcttgatagaaata

SEQ ID NO: 4246075 - DNA, 25 bp, Homo sapien
ctgcctcgggaatggccactgttct

SEQ ID NO: 4246076 - DNA, 25 bp, Homo sapien
tgcctcgggaatggccactgttctt

SEQ ID NO: 4246077 - DNA, 25 bp, Homo sapien
ctatctcgcattaggcttgatagaa

SEQ ID NO: 4246078 - DNA, 25 bp, Homo sapien
ctgtgtcattcatgggagcataaag

SEQ ID NO: 4246079 - DNA, 25 bp, Homo sapien
tctgggttttcgtaaatctagaaca

SEQ ID NO: 4246080 - DNA, 25 bp, Homo sapien
tgtgtcattcatgggagcataaagc

SEQ ID NO: 4246081 - DNA, 25 bp, Homo sapien
tctgtgtcattcatgggagcataaa

SEQ ID NO: 4246082 - DNA, 25 bp, Homo sapien
gaacacatgaggctagagagactga

SEQ ID NO: 4246083 - DNA, 25 bp, Homo sapien
catcgaggtagcacaaacgttgccc

SEQ ID NO: 4246084 - DNA, 25 bp, Homo sapien
caatgtgtaaggatacggtgagccc

SEQ ID NO: 4246085 - DNA, 25 bp, Homo sapien
ggaagggcttcaaatctctctaact

SEQ ID NO: 4246086 - DNA, 25 bp, Homo sapien
ttgattcctcgaggttaactcctcc

SEQ ID NO: 4246087 - DNA, 25 bp, Homo sapien
tcttgattcctcgaggttaactcct

SEQ ID NO: 4246088 - DNA, 25 bp, Homo sapien
cacagcatcttgattcctcgaggtt

SEQ ID NO: 4246089 - DNA, 25 bp, Homo sapien
gcatcttgattcctcgaggttaact

SEQ ID NO: 4246090 - DNA, 25 bp, Homo sapien
gtcaatgctgcatctcaaggaacta

SEQ ID NO: 4246091 - DNA, 25 bp, Homo sapien
tttgagctcacactttcagcattgg

SEQ ID NO: 4246092 - DNA, 25 bp, Homo sapien
gccttaaactgcaccagagaacaga

SEQ ID NO: 4246093 - DNA, 25 bp, Homo sapien
catgctcctaagtgaccaatggttg

SEQ ID NO: 4246094 - DNA, 25 bp, Homo sapien
acaaagctgaaagggtagcttgaag

SEQ ID NO: 4246095 - DNA, 25 bp, Homo sapien
gcagtcagcggccacaaagctgaaa

SEQ ID NO: 4246096 - DNA, 25 bp, Homo sapien
gtagcttgaagggtcaggtccctta

SEQ ID NO: 4246097 - DNA, 25 bp, Homo sapien
gcttgaagggtcaggtcccttataa

SEQ ID NO: 4246098 - DNA, 25 bp, Homo sapien
gaagttcagtatgagccttacaggg

SEQ ID NO: 4246099 - DNA, 25 bp, Homo sapien
gagctttggccaagcatgatgagaa

SEQ ID NO: 4246100 - DNA, 25 bp, Homo sapien
ggcagttcaggaagaagtctcaaca

SEQ ID NO: 4246101 - DNA, 25 bp, Homo sapien
gagaaagatggagagctcttccagg

SEQ ID NO: 4246102 - DNA, 25 bp, Homo sapien
taccacatatggagtttggcaaata

SEQ ID NO: 4246103 - DNA, 25 bp, Homo sapien
ctctgtgaccctagcatgtatgtac

SEQ ID NO: 4246104 - DNA, 25 bp, Homo sapien
gagactgaggctcaatgcaccttaa

SEQ ID NO: 4246105 - DNA, 25 bp, Homo sapien
caagagcgttgtattgggttactaa

SEQ ID NO: 4246106 - DNA, 25 bp, Homo sapien
ttccacaacggaaataagtctgctt

SEQ ID NO: 4246107 - DNA, 25 bp, Homo sapien
catatttcatcagggcccctgagag

SEQ ID NO: 4246108 - DNA, 25 bp, Homo sapien
agctttccacaacggaaataagtct

SEQ ID NO: 4246109 - DNA, 25 bp, Homo sapien
cataaggatgggcgattcagggtca

SEQ ID NO: 4246110 - DNA, 25 bp, Homo sapien
aataaaaactctcatcaagagaaag

SEQ ID NO: 4246111 - DNA, 25 bp, Homo sapien
actctcatcaagagaaagtgaaccc

SEQ ID NO: 4246112 - DNA, 25 bp, Homo sapien
tcaagagaaagtgaaccctctggag

SEQ ID NO: 4246113 - DNA, 25 bp, Homo sapien
agagaaagtgaaccctctggagatt

SEQ ID NO: 4246114 - DNA, 25 bp, Homo sapien
ggctggactgttggtaccatttgaa

SEQ ID NO: 4246115 - DNA, 25 bp, Homo sapien
gctggactgttggtaccatttgaaa

SEQ ID NO: 4246116 - DNA, 25 bp, Homo sapien
taggctggactgttggtaccatttg

SEQ ID NO: 4246117 - DNA, 25 bp, Homo sapien
tggactgttggtaccatttgaaaag

SEQ ID NO: 4246118 - DNA, 25 bp, Homo sapien
taaacattgctaacggatcctcaca

SEQ ID NO: 4246119 - DNA, 25 bp, Homo sapien
ttctaatgcaaggagggtaacccca

SEQ ID NO: 4246120 - DNA, 25 bp, Homo sapien
ggaatagtgcctgcccatatggagg

SEQ ID NO: 4246121 - DNA, 25 bp, Homo sapien
tggacaatccggaaagcctgtagcg

SEQ ID NO: 4246122 - DNA, 25 bp, Homo sapien
tgtaaacagtcccaattactggtaa

SEQ ID NO: 4246123 - DNA, 25 bp, Homo sapien
catcatgtattaatcattcctctgc

SEQ ID NO: 4246124 - DNA, 25 bp, Homo sapien
tgctgcagtgcaatctttaatcccc

SEQ ID NO: 4246125 - DNA, 25 bp, Homo sapien
tctgcaatataataaagctgcttct

SEQ ID NO: 4246126 - DNA, 25 bp, Homo sapien
agatcagggccaattggatgaaaat

SEQ ID NO: 4246127 - DNA, 25 bp, Homo sapien
tgggaagtcacttcacgaaccagac

SEQ ID NO: 4246128 - DNA, 25 bp, Homo sapien
cttgggatgtgagatcagggccaat

SEQ ID NO: 4246129 - DNA, 25 bp, Homo sapien
atgggaagtcacttcacgaaccaga

SEQ ID NO: 4246130 - DNA, 25 bp, Homo sapien
gcgggcaatcttggcatgctgtact

SEQ ID NO: 4246131 - DNA, 25 bp, Homo sapien
ggcaatcttggcatgctgtactctc

SEQ ID NO: 4246132 - DNA, 25 bp, Homo sapien
caatcttggcatgctgtactctcca

SEQ ID NO: 4246133 - DNA, 25 bp, Homo sapien
tcttggcatgctgtactctccacag

SEQ ID NO: 4246134 - DNA, 25 bp, Homo sapien
gaaacggtatggctgcctgacaaac

SEQ ID NO: 4246135 - DNA, 25 bp, Homo sapien
ggaatgaaacggtatggctgcctga

SEQ ID NO: 4246136 - DNA, 25 bp, Homo sapien
ggtatggctgcctgacaaactttgc

SEQ ID NO: 4246137 - DNA, 25 bp, Homo sapien
tatggctgcctgacaaactttgctt

SEQ ID NO: 4246138 - DNA, 25 bp, Homo sapien
tggataaagatgacctggcagtgcc

SEQ ID NO: 4246139 - DNA, 25 bp, Homo sapien
agagggaggccaaaaatccgactgg

SEQ ID NO: 4246140 - DNA, 25 bp, Homo sapien
cctacagggatacccagagaacttc

SEQ ID NO: 4246141 - DNA, 25 bp, Homo sapien
tcttctagcctgatgacctacaggg

SEQ ID NO: 4246142 - DNA, 25 bp, Homo sapien
cacagtgccttctagagttggacca

SEQ ID NO: 4246143 - DNA, 25 bp, Homo sapien
gagaacttcttgagccattgaggta

SEQ ID NO: 4246144 - DNA, 25 bp, Homo sapien
agcccagcgcaagctgtcctttgtg

SEQ ID NO: 4246145 - DNA, 25 bp, Homo sapien
ccattataagcccagcgcaagctgt

SEQ ID NO: 4246146 - DNA, 25 bp, Homo sapien
taagcccagcgcaagctgtcctttg

SEQ ID NO: 4246147 - DNA, 25 bp, Homo sapien
aggatgccattataagcccagcgca

SEQ ID NO: 4246148 - DNA, 25 bp, Homo sapien
tgggtgctgccgaaatttactaatg

SEQ ID NO: 4246149 - DNA, 25 bp, Homo sapien
ggtgctgccgaaatttactaatgta

SEQ ID NO: 4246150 - DNA, 25 bp, Homo sapien
ccatgggtgctgccgaaatttacta

SEQ ID NO: 4246151 - DNA, 25 bp, Homo sapien
tgctgccgaaatttactaatgtata

SEQ ID NO: 4246152 - DNA, 25 bp, Homo sapien
gcttgagtccaagccagcagttcca

SEQ ID NO: 4246153 - DNA, 25 bp, Homo sapien
gggcttggcagttctaattagtgca

SEQ ID NO: 4246154 - DNA, 25 bp, Homo sapien
ttagtgcagaccacatgatgtcttt

SEQ ID NO: 4246155 - DNA, 25 bp, Homo sapien
gagcttgagtccaagccagcagttc

SEQ ID NO: 4246156 - DNA, 25 bp, Homo sapien
tgaaggtaaccacaggaggctttcc

SEQ ID NO: 4246157 - DNA, 25 bp, Homo sapien
agtaacctggctgaaggtaaccaca

SEQ ID NO: 4246158 - DNA, 25 bp, Homo sapien
tcttattgtcaaagtaacctggctg

SEQ ID NO: 4246159 - DNA, 25 bp, Homo sapien
ttgatttcttattgtcaaagtaacc

SEQ ID NO: 4246160 - DNA, 25 bp, Homo sapien
agctttgtgaagatgtgacctgatg

SEQ ID NO: 4246161 - DNA, 25 bp, Homo sapien
caccacggccagttctgggctgatg

SEQ ID NO: 4246162 - DNA, 25 bp, Homo sapien
ccaccacggccagttctgggctgat

SEQ ID NO: 4246163 - DNA, 25 bp, Homo sapien
acactgatgctactaaggccaccac

SEQ ID NO: 4246164 - DNA, 25 bp, Homo sapien
tgatgctactaaggccaccacggcc

SEQ ID NO: 4246165 - DNA, 25 bp, Homo sapien
aagttcttggctctgtcgagcaaca

SEQ ID NO: 4246166 - DNA, 25 bp, Homo sapien
catctgcaaggctatgaattaggaa

SEQ ID NO: 4246167 - DNA, 25 bp, Homo sapien
taggaagattgctctggtgccaaca

SEQ ID NO: 4246168 - DNA, 25 bp, Homo sapien
gaagattgctctggtgccaacaggt

SEQ ID NO: 4246169 - DNA, 25 bp, Homo sapien
tggggaaatgtgatgcaaatgaaaa

SEQ ID NO: 4246170 - DNA, 25 bp, Homo sapien
ctggggaaatgtgatgcaaatgaaa

SEQ ID NO: 4246171 - DNA, 25 bp, Homo sapien
ggggaaatgtgatgcaaatgaaaaa

SEQ ID NO: 4246172 - DNA, 25 bp, Homo sapien
atgttccattggcttcattaagctc

SEQ ID NO: 4246173 - DNA, 25 bp, Homo sapien
tgttccattggcttcattaagctca

SEQ ID NO: 4246174 - DNA, 25 bp, Homo sapien
gttccattggcttcattaagctcat

SEQ ID NO: 4246175 - DNA, 25 bp, Homo sapien
catacttggagaatgtctgtcctaa

SEQ ID NO: 4246176 - DNA, 25 bp, Homo sapien
gtgaccttggcactctggaccttag

SEQ ID NO: 4246177 - DNA, 25 bp, Homo sapien
tagtgggccaggtaacatacttgga

SEQ ID NO: 4246178 - DNA, 25 bp, Homo sapien
gagcatcgactctgggttgaaatcc

SEQ ID NO: 4246179 - DNA, 25 bp, Homo sapien
ttcaggccctggattgccgagtggt

SEQ ID NO: 4246180 - DNA, 25 bp, Homo sapien
tcaggccctggattgccgagtggtg

SEQ ID NO: 4246181 - DNA, 25 bp, Homo sapien
agcaacggacgaagccactggagaa

SEQ ID NO: 4246182 - DNA, 25 bp, Homo sapien
gctgccaaagttgctgagcaacgga

SEQ ID NO: 4246183 - DNA, 25 bp, Homo sapien
agcctctccttggactttttgcctg

SEQ ID NO: 4246184 - DNA, 25 bp, Homo sapien
gagaactcagtcctatcctcacagc

SEQ ID NO: 4246185 - DNA, 25 bp, Homo sapien
aagactagacctagcatccctggcc

SEQ ID NO: 4246186 - DNA, 25 bp, Homo sapien
gatccagggaactttgccttccata

SEQ ID NO: 4246187 - DNA, 25 bp, Homo sapien
ttacataggacaatagtgaacagtc

SEQ ID NO: 4246188 - DNA, 25 bp, Homo sapien
tatatcaggttgatgacgaagacca

SEQ ID NO: 4246189 - DNA, 25 bp, Homo sapien
tcagatctctgaggaaatgcttctg

SEQ ID NO: 4246190 - DNA, 25 bp, Homo sapien
gggctagaagctcaagtgcttttct

SEQ ID NO: 4246191 - DNA, 25 bp, Homo sapien
aagtcatgataaacaacgagcttcc

SEQ ID NO: 4246192 - DNA, 25 bp, Homo sapien
aggagccacgctgtcaattctgttt

SEQ ID NO: 4246193 - DNA, 25 bp, Homo sapien
aataatcctgccacaactagtgaca

SEQ ID NO: 4246194 - DNA, 25 bp, Homo sapien
taatcctgccacaactagtgacacg

SEQ ID NO: 4246195 - DNA, 25 bp, Homo sapien
ctcataaataatcctgccacaacta

SEQ ID NO: 4246196 - DNA, 25 bp, Homo sapien
ataaataatcctgccacaactagtg

SEQ ID NO: 4246197 - DNA, 25 bp, Homo sapien
tactcctgttactacacttggacca

SEQ ID NO: 4246198 - DNA, 25 bp, Homo sapien
aatttactcctgttactacacttgg

SEQ ID NO: 4246199 - DNA, 25 bp, Homo sapien
ctcctgttactacacttggaccaac

SEQ ID NO: 4246200 - DNA, 25 bp, Homo sapien
tttactcctgttactacacttggac

SEQ ID NO: 4246201 - DNA, 25 bp, Homo sapien
atcctgggtcccaagattaatcctg

SEQ ID NO: 4246202 - DNA, 25 bp, Homo sapien
tcctgggtcccaagattaatcctga

SEQ ID NO: 4246203 - DNA, 25 bp, Homo sapien
cctgggtcccaagattaatcctgac

SEQ ID NO: 4246204 - DNA, 25 bp, Homo sapien
ttctcttggagaaaatggtatggac

SEQ ID NO: 4246205 - DNA, 25 bp, Homo sapien
ctccgaaaggtagcattttcctcca

SEQ ID NO: 4246206 - DNA, 25 bp, Homo sapien
ctccattatctttttctcttggaga

SEQ ID NO: 4246207 - DNA, 25 bp, Homo sapien
ttttctcttggagaaaatggtatgg

SEQ ID NO: 4246208 - DNA, 25 bp, Homo sapien
gggtcaaaagatggatagaccctgg

SEQ ID NO: 4246209 - DNA, 25 bp, Homo sapien
gatagggtcaaaagatggatagacc

SEQ ID NO: 4246210 - DNA, 25 bp, Homo sapien
tgatagggtcaaaagatggatagac

SEQ ID NO: 4246211 - DNA, 25 bp, Homo sapien
caaaagatggatagaccctggaccc

SEQ ID NO: 4246212 - DNA, 25 bp, Homo sapien
agaatcctcctcaattattagtctt

SEQ ID NO: 4246213 - DNA, 25 bp, Homo sapien
catagcccaatgaaacgttggccat

SEQ ID NO: 4246214 - DNA, 25 bp, Homo sapien
tctccatagcccaatgaaacgttgg

SEQ ID NO: 4246215 - DNA, 25 bp, Homo sapien
tcctcctcaattattagtcttcctt

SEQ ID NO: 4246216 - DNA, 25 bp, Homo sapien
gccagtcttaattgatgaagccatt

SEQ ID NO: 4246217 - DNA, 25 bp, Homo sapien
tctgtgatagcgtcagtaagaaatg

SEQ ID NO: 4246218 - DNA, 25 bp, Homo sapien
ccagctgtggcccggcaagtctgct

SEQ ID NO: 4246219 - DNA, 25 bp, Homo sapien
ccactctgtgatagcgtcagtaaga

SEQ ID NO: 4246220 - DNA, 25 bp, Homo sapien
aaatgacagtagacattgctggcat

SEQ ID NO: 4246221 - DNA, 25 bp, Homo sapien
tcccatcgaacatgacaacactgag

SEQ ID NO: 4246222 - DNA, 25 bp, Homo sapien
agggcttcccatcgaacatgacaac

SEQ ID NO: 4246223 - DNA, 25 bp, Homo sapien
cagtagacattgctggcatatgcat

SEQ ID NO: 4246224 - DNA, 25 bp, Homo sapien
tgctgggcatgcatcagctgggtct

SEQ ID NO: 4246225 - DNA, 25 bp, Homo sapien
tctgcactgccaaaatgatggatgg

SEQ ID NO: 4246226 - DNA, 25 bp, Homo sapien
gctctggaatagaaaggagatgcat

SEQ ID NO: 4246227 - DNA, 25 bp, Homo sapien
gagatcccgagacacaacaaaatgc

SEQ ID NO: 4246228 - DNA, 25 bp, Homo sapien
cataatgtcctactttcaggcattt

SEQ ID NO: 4246229 - DNA, 25 bp, Homo sapien
caaggctgccacttttacataatgt

SEQ ID NO: 4246230 - DNA, 25 bp, Homo sapien
tcatcctgttacacacatctcccca

SEQ ID NO: 4246231 - DNA, 25 bp, Homo sapien
tgtcctactttcaggcatttctgca

SEQ ID NO: 4246232 - DNA, 25 bp, Homo sapien
tccaaattgacccttgggctctcac

SEQ ID NO: 4246233 - DNA, 25 bp, Homo sapien
ggcagattctactactgtgcctcct

SEQ ID NO: 4246234 - DNA, 25 bp, Homo sapien
ttcctccaaattgacccttgggctc

SEQ ID NO: 4246235 - DNA, 25 bp, Homo sapien
caattttatagtataggcagattct

SEQ ID NO: 4246236 - DNA, 25 bp, Homo sapien
tctgacacaagtatagatactcctg

SEQ ID NO: 4246237 - DNA, 25 bp, Homo sapien
tgacacaagtatagatactcctgct

SEQ ID NO: 4246238 - DNA, 25 bp, Homo sapien
cacaagtatagatactcctgcttct

SEQ ID NO: 4246239 - DNA, 25 bp, Homo sapien
aatctatatgtgtttttataggtga

SEQ ID NO: 4246240 - DNA, 25 bp, Homo sapien
tctgaatgaacttcctacccctatc

SEQ ID NO: 4246241 - DNA, 25 bp, Homo sapien
gatgacttgagatagtagtcttatt

SEQ ID NO: 4246242 - DNA, 25 bp, Homo sapien
tgacttgagatagtagtcttatttg

SEQ ID NO: 4246243 - DNA, 25 bp, Homo sapien
tgacttttgggagtcttcttaatag

SEQ ID NO: 4246244 - DNA, 25 bp, Homo sapien
gcattcgaaggccaaacctggagcc

SEQ ID NO: 4246245 - DNA, 25 bp, Homo sapien
taagcttggagtcagatacttgcaa

SEQ ID NO: 4246246 - DNA, 25 bp, Homo sapien
tacttccgcctgtgaaaaaattaga

SEQ ID NO: 4246247 - DNA, 25 bp, Homo sapien
gaagagcttatttcctagtggtaca

SEQ ID NO: 4246248 - DNA, 25 bp, Homo sapien
ctgttttatgtttccacgaccccat

SEQ ID NO: 4246249 - DNA, 25 bp, Homo sapien
cacgaccccatgttgaggacagatt

SEQ ID NO: 4246250 - DNA, 25 bp, Homo sapien
tccctctgctgtggaacgagaacca

SEQ ID NO: 4246251 - DNA, 25 bp, Homo sapien
tctgctgtggaacgagaaccatcca

SEQ ID NO: 4246252 - DNA, 25 bp, Homo sapien
taacgtattgctcctaggcccagtc

SEQ ID NO: 4246253 - DNA, 25 bp, Homo sapien
tgaaaacagccgcaccagtgaggtg

SEQ ID NO: 4246254 - DNA, 25 bp, Homo sapien
ttggaagtgaatcgtcagccccgtc

SEQ ID NO: 4246255 - DNA, 25 bp, Homo sapien
tataagctttctatggagaggccca

SEQ ID NO: 4246256 - DNA, 25 bp, Homo sapien
acataaaaagaatccctccacctgc

SEQ ID NO: 4246257 - DNA, 25 bp, Homo sapien
ccacaatgtcaaggtaattatctac

SEQ ID NO: 4246258 - DNA, 25 bp, Homo sapien
tgcctatataatgcccactagtgtc

SEQ ID NO: 4246259 - DNA, 25 bp, Homo sapien
ttctcctgtccgagcttggagccct

SEQ ID NO: 4246260 - DNA, 25 bp, Homo sapien
tcagattgagtggatctgtgctcaa

SEQ ID NO: 4246261 - DNA, 25 bp, Homo sapien
cactctactgcttagcccattcaga

SEQ ID NO: 4246262 - DNA, 25 bp, Homo sapien
tatgtgtttccatgtaggttatgca

SEQ ID NO: 4246263 - DNA, 25 bp, Homo sapien
ctttcaaacgtgtaattaagctgta

SEQ ID NO: 4246264 - DNA, 25 bp, Homo sapien
gaattttaatgcttggctgatgcca

SEQ ID NO: 4246265 - DNA, 25 bp, Homo sapien
tgcagcattagatttgtggccacag

SEQ ID NO: 4246266 - DNA, 25 bp, Homo sapien
tcgatcagaatggagctgagttgca

SEQ ID NO: 4246267 - DNA, 25 bp, Homo sapien
aatgtgtacattcatgcctgcatgc

SEQ ID NO: 4246268 - DNA, 25 bp, Homo sapien
ttacgttattttcagctatgtatac

SEQ ID NO: 4246269 - DNA, 25 bp, Homo sapien
cagttacgttattttcagctatgta

SEQ ID NO: 4246270 - DNA, 25 bp, Homo sapien
gttacgttattttcagctatgtata

SEQ ID NO: 4246271 - DNA, 25 bp, Homo sapien
tacgttattttcagctatgtataca

SEQ ID NO: 4246272 - DNA, 25 bp, Homo sapien
tgttgtaaatacctgattccctgaa

SEQ ID NO: 4246273 - DNA, 25 bp, Homo sapien
tgtttataatagcagagtggccctg

SEQ ID NO: 4246274 - DNA, 25 bp, Homo sapien
aaggcactgccttgagtctaaccca

SEQ ID NO: 4246275 - DNA, 25 bp, Homo sapien
cagcccctcaagttcactgtgtgtt

SEQ ID NO: 4246276 - DNA, 25 bp, Homo sapien
tgggatatggaacctctaaatgcta

SEQ ID NO: 4246277 - DNA, 25 bp, Homo sapien
tcagttcgctgcaccagcacagttt

SEQ ID NO: 4246278 - DNA, 25 bp, Homo sapien
gcagttgacaacaggtctcttttcc

SEQ ID NO: 4246279 - DNA, 25 bp, Homo sapien
ttggcacgcagttgacaacaggtct

SEQ ID NO: 4246280 - DNA, 25 bp, Homo sapien
tgggcctgcatatggcctgtcagca

SEQ ID NO: 4246281 - DNA, 25 bp, Homo sapien
gcatatggcctgtcagcatgattca

SEQ ID NO: 4246282 - DNA, 25 bp, Homo sapien
acccctgggcctgcatatggcctgt

SEQ ID NO: 4246283 - DNA, 25 bp, Homo sapien
aatgccatcttgttgagccacccct

SEQ ID NO: 4246284 - DNA, 25 bp, Homo sapien
gcatgctgtgtcctctactgtggcc

SEQ ID NO: 4246285 - DNA, 25 bp, Homo sapien
caggaatagtggaaaccatcgcaca

SEQ ID NO: 4246286 - DNA, 25 bp, Homo sapien
tccataatggatgacaacaggtgta

SEQ ID NO: 4246287 - DNA, 25 bp, Homo sapien
tcagagcatagaagagcacaaggac

SEQ ID NO: 4246288 - DNA, 25 bp, Homo sapien
tgcacctcatgcatgaatgctctga

SEQ ID NO: 4246289 - DNA, 25 bp, Homo sapien
tagctcttcctaaatgctggccctt

SEQ ID NO: 4246290 - DNA, 25 bp, Homo sapien
caagccagagctttatagctgcccc

SEQ ID NO: 4246291 - DNA, 25 bp, Homo sapien
gaacctgtgccttaggattgcacct

SEQ ID NO: 4246292 - DNA, 25 bp, Homo sapien
tctgttaccgcaacaacaataacag

SEQ ID NO: 4246293 - DNA, 25 bp, Homo sapien
cactgtcattattgctatcattgct

SEQ ID NO: 4246294 - DNA, 25 bp, Homo sapien
gctattaatcatgagacatatctgc

SEQ ID NO: 4246295 - DNA, 25 bp, Homo sapien
acatatctgcacatgacattgtcca

SEQ ID NO: 4246296 - DNA, 25 bp, Homo sapien
tagttccaatctctgcactgagtcc

SEQ ID NO: 4246297 - DNA, 25 bp, Homo sapien
gcaatagtcttccaacagtctcttt

SEQ ID NO: 4246298 - DNA, 25 bp, Homo sapien
ggcaacctgccaccatatcttatag

SEQ ID NO: 4246299 - DNA, 25 bp, Homo sapien
tctttcttgccccaagtctctcttg

SEQ ID NO: 4246300 - DNA, 25 bp, Homo sapien
gaacagggcacatgatattaaggcc

SEQ ID NO: 4246301 - DNA, 25 bp, Homo sapien
gcagggaccagtactttagcttcac

SEQ ID NO: 4246302 - DNA, 25 bp, Homo sapien
tattaaggccacatgtacttgactc

SEQ ID NO: 4246303 - DNA, 25 bp, Homo sapien
acagttgacctgcagggaccagtac

SEQ ID NO: 4246304 - DNA, 25 bp, Homo sapien
ttcttgggtacttggtgtgttcatc

SEQ ID NO: 4246305 - DNA, 25 bp, Homo sapien
ccttcttgggtacttggtgtgttca

SEQ ID NO: 4246306 - DNA, 25 bp, Homo sapien
tggtgtgttcatcaggagcagggac

SEQ ID NO: 4246307 - DNA, 25 bp, Homo sapien
ttggtgtgttcatcaggagcaggga

SEQ ID NO: 4246308 - DNA, 25 bp, Homo sapien
ttcgatggcatgttttccatagcag

SEQ ID NO: 4246309 - DNA, 25 bp, Homo sapien
gtataaccccactcacttgggcttg

SEQ ID NO: 4246310 - DNA, 25 bp, Homo sapien
tacccaaggtttcctgtaagcagaa

SEQ ID NO: 4246311 - DNA, 25 bp, Homo sapien
tcatgctgacctcgtttcgatggca

SEQ ID NO: 4246312 - DNA, 25 bp, Homo sapien
acaaagggagctttcataatgggag

SEQ ID NO: 4246313 - DNA, 25 bp, Homo sapien
cacaaagggagctttcataatggga

SEQ ID NO: 4246314 - DNA, 25 bp, Homo sapien
cccacaaagggagctttcataatgg

SEQ ID NO: 4246315 - DNA, 25 bp, Homo sapien
ccacaaagggagctttcataatggg

SEQ ID NO: 4246316 - DNA, 25 bp, Homo sapien
ctccaagtgccctgggttctcccat

SEQ ID NO: 4246317 - DNA, 25 bp, Homo sapien
ctccagatgacgtgcagcccctggg

SEQ ID NO: 4246318 - DNA, 25 bp, Homo sapien
gctccagatgacgtgcagcccctgg

SEQ ID NO: 4246319 - DNA, 25 bp, Homo sapien
gacagaggctagaccatgcaggcat

SEQ ID NO: 4246320 - DNA, 25 bp, Homo sapien
gctcaaagtgtagtactcagaccag

SEQ ID NO: 4246321 - DNA, 25 bp, Homo sapien
aatacatgctatctgttgtggcagc

SEQ ID NO: 4246322 - DNA, 25 bp, Homo sapien
ctaaaatgtggtcggcagtgctgct

SEQ ID NO: 4246323 - DNA, 25 bp, Homo sapien
tgggccaattctggagggacacata

SEQ ID NO: 4246324 - DNA, 25 bp, Homo sapien
cagaagataattgggccaattctgg

SEQ ID NO: 4246325 - DNA, 25 bp, Homo sapien
gataattgggccaattctggaggga

SEQ ID NO: 4246326 - DNA, 25 bp, Homo sapien
aattgggccaattctggagggacac

SEQ ID NO: 4246327 - DNA, 25 bp, Homo sapien
caaggaataaaaacgttcatctggg

SEQ ID NO: 4246328 - DNA, 25 bp, Homo sapien
gaacagtttagctagactgggggat

SEQ ID NO: 4246329 - DNA, 25 bp, Homo sapien
caggctccttcatgattattgctgg

SEQ ID NO: 4246330 - DNA, 25 bp, Homo sapien
tctggggggaacagtttagctagac

SEQ ID NO: 4246331 - DNA, 25 bp, Homo sapien
tcacggttattgaagaaaggtgcac

SEQ ID NO: 4246332 - DNA, 25 bp, Homo sapien
ttcatctgcactggcaccttcacgg

SEQ ID NO: 4246333 - DNA, 25 bp, Homo sapien
ttgaagaaaggtgcacactctccag

SEQ ID NO: 4246334 - DNA, 25 bp, Homo sapien
cgtcacaggcttgccaacctcatcc

SEQ ID NO: 4246335 - DNA, 25 bp, Homo sapien
tgccttgaattactatgcttgaact

SEQ ID NO: 4246336 - DNA, 25 bp, Homo sapien
ctttgccttgaattactatgcttga

SEQ ID NO: 4246337 - DNA, 25 bp, Homo sapien
tttgccttgaattactatgcttgaa

SEQ ID NO: 4246338 - DNA, 25 bp, Homo sapien
ttgccttgaattactatgcttgaac

SEQ ID NO: 4246339 - DNA, 25 bp, Homo sapien
tctgcagttaaacttgaaccaagaa

SEQ ID NO: 4246340 - DNA, 25 bp, Homo sapien
gtgtagccagtacagaaaatgtgga

SEQ ID NO: 4246341 - DNA, 25 bp, Homo sapien
gaacaatttatgctggagatgctgc

SEQ ID NO: 4246342 - DNA, 25 bp, Homo sapien
gagagactgtctgagagtgtagcca

SEQ ID NO: 4246343 - DNA, 25 bp, Homo sapien
gaggtgacttggaagatagatcatt

SEQ ID NO: 4246344 - DNA, 25 bp, Homo sapien
atttttacaagccactagcataaat

SEQ ID NO: 4246345 - DNA, 25 bp, Homo sapien
ttacaagccactagcataaatatta

SEQ ID NO: 4246346 - DNA, 25 bp, Homo sapien
ggtgacttggaagatagatcatttt

SEQ ID NO: 4246347 - DNA, 25 bp, Homo sapien
tgcctgcattacatgctcactggac

SEQ ID NO: 4246348 - DNA, 25 bp, Homo sapien
tgcattacatgctcactggacacca

SEQ ID NO: 4246349 - DNA, 25 bp, Homo sapien
tacatgctcactggacaccagtgca

SEQ ID NO: 4246350 - DNA, 25 bp, Homo sapien
agtactgcctgcattacatgctcac

SEQ ID NO: 4246351 - DNA, 25 bp, Homo sapien
gttgaagacccagtagcagctagtt

SEQ ID NO: 4246352 - DNA, 25 bp, Homo sapien
tcttagctgccaaacagactgataa

SEQ ID NO: 4246353 - DNA, 25 bp, Homo sapien
taataagcaactacccatctcaaag

SEQ ID NO: 4246354 - DNA, 25 bp, Homo sapien
ctgggaacggagaagaagtgatcca

SEQ ID NO: 4246355 - DNA, 25 bp, Homo sapien
gggcctgcaatcaaaatgtcatcgg

SEQ ID NO: 4246356 - DNA, 25 bp, Homo sapien
cacaatgcctctccgagtggggcct

SEQ ID NO: 4246357 - DNA, 25 bp, Homo sapien
atcaaaatgtcatcggcttgcctcc

SEQ ID NO: 4246358 - DNA, 25 bp, Homo sapien
cgagtggggcctgcaatcaaaatgt

SEQ ID NO: 4246359 - DNA, 25 bp, Homo sapien
cctggagacgcagagctggaaattc

SEQ ID NO: 4246360 - DNA, 25 bp, Homo sapien
tctggagaccatgcatgggattgct

SEQ ID NO: 4246361 - DNA, 25 bp, Homo sapien
gcactgagttactgttgaagcagcc

SEQ ID NO: 4246362 - DNA, 25 bp, Homo sapien
tctctttgctagagtggcaggctcc

SEQ ID NO: 4246363 - DNA, 25 bp, Homo sapien
ggcccttaggaattgccctcttgcc

SEQ ID NO: 4246364 - DNA, 25 bp, Homo sapien
tagacaggcccttaggaattgccct

SEQ ID NO: 4246365 - DNA, 25 bp, Homo sapien
gacaggcccttaggaattgccctct

SEQ ID NO: 4246366 - DNA, 25 bp, Homo sapien
caggcccttaggaattgccctcttg

SEQ ID NO: 4246367 - DNA, 25 bp, Homo sapien
ctcccaagacatagagctttaaagc

SEQ ID NO: 4246368 - DNA, 25 bp, Homo sapien
taggggaggaatactgaactgccat

SEQ ID NO: 4246369 - DNA, 25 bp, Homo sapien
catctgctcccaagacatagagctt

SEQ ID NO: 4246370 - DNA, 25 bp, Homo sapien
cagtaggggaggaatactgaactgc

SEQ ID NO: 4246371 - DNA, 25 bp, Homo sapien
taaactgagacaacgtagaagcacc

SEQ ID NO: 4246372 - DNA, 25 bp, Homo sapien
tggctgccccggtgagaactgatca

SEQ ID NO: 4246373 - DNA, 25 bp, Homo sapien
gccatcctgtagtcctagagcctta

SEQ ID NO: 4246374 - DNA, 25 bp, Homo sapien
tagaagcacctacagaaccaggaga

SEQ ID NO: 4246375 - DNA, 25 bp, Homo sapien
aactccagaatgccacttggaatca

SEQ ID NO: 4246376 - DNA, 25 bp, Homo sapien
actccagaatgccacttggaatcat

SEQ ID NO: 4246377 - DNA, 25 bp, Homo sapien
ttgtgtgcaatttcctaaggccctt

SEQ ID NO: 4246378 - DNA, 25 bp, Homo sapien
taaggcccttaagtcatatcagaga

SEQ ID NO: 4246379 - DNA, 25 bp, Homo sapien
tatactgcgaaacccaatgccaaca

SEQ ID NO: 4246380 - DNA, 25 bp, Homo sapien
tcagagaacccctaacagagaaggg

SEQ ID NO: 4246381 - DNA, 25 bp, Homo sapien
cttgagtcctttaacctggtcaggg

SEQ ID NO: 4246382 - DNA, 25 bp, Homo sapien
ttgagtcctttaacctggtcagggc

SEQ ID NO: 4246383 - DNA, 25 bp, Homo sapien
agggctgtctctgttacatcttgct

SEQ ID NO: 4246384 - DNA, 25 bp, Homo sapien
tccttgagtcctttaacctggtcag

SEQ ID NO: 4246385 - DNA, 25 bp, Homo sapien
gcacgccgtcggtttgtatctgagt

SEQ ID NO: 4246386 - DNA, 25 bp, Homo sapien
tatctaagtattaagaacacccatg

SEQ ID NO: 4246387 - DNA, 25 bp, Homo sapien
tcttatggccatttcaccaggcatt

SEQ ID NO: 4246388 - DNA, 25 bp, Homo sapien
tctagaaagttcagccaatgggtag

SEQ ID NO: 4246389 - DNA, 25 bp, Homo sapien
tagtgtgatgatgtgacggtcagaa

SEQ ID NO: 4246390 - DNA, 25 bp, Homo sapien
ggcaaatgcctgcaattgaagagct

SEQ ID NO: 4246391 - DNA, 25 bp, Homo sapien
caattgtatccattgaaattcgttg

SEQ ID NO: 4246392 - DNA, 25 bp, Homo sapien
ggctgaactttcaagagtgtctcct

SEQ ID NO: 4246393 - DNA, 25 bp, Homo sapien
actccattgggccttgctttcaaaa

SEQ ID NO: 4246394 - DNA, 25 bp, Homo sapien
ccattgggccttgctttcaaaatcc

SEQ ID NO: 4246395 - DNA, 25 bp, Homo sapien
caaatatatgcaggactggcagctt

SEQ ID NO: 4246396 - DNA, 25 bp, Homo sapien
tatatgcaggactggcagcttgcca

SEQ ID NO: 4246397 - DNA, 25 bp, Homo sapien
tcgcaaaagcatggctgacacccag

SEQ ID NO: 4246398 - DNA, 25 bp, Homo sapien
gcagctttctccacacttcgcaaaa

SEQ ID NO: 4246399 - DNA, 25 bp, Homo sapien
tagatttcgtgtttgtgcagctttc

SEQ ID NO: 4246400 - DNA, 25 bp, Homo sapien
gccaagttcagtgtaaaaagatatc

SEQ ID NO: 4246401 - DNA, 25 bp, Homo sapien
gatatagaacaaattctgggccagc

SEQ ID NO: 4246402 - DNA, 25 bp, Homo sapien
tggactatttctagctcaaacaccc

SEQ ID NO: 4246403 - DNA, 25 bp, Homo sapien
gggactccaactccaattggttcag

SEQ ID NO: 4246404 - DNA, 25 bp, Homo sapien
tatcctagcactactctgtatgaga

SEQ ID NO: 4246405 - DNA, 25 bp, Homo sapien
aagcaacttgccagcctgcagcagt

SEQ ID NO: 4246406 - DNA, 25 bp, Homo sapien
agaagcaacttgccagcctgcagca

SEQ ID NO: 4246407 - DNA, 25 bp, Homo sapien
gaagcaacttgccagcctgcagcag

SEQ ID NO: 4246408 - DNA, 25 bp, Homo sapien
ggaattacatggctatttgcaaggg

SEQ ID NO: 4246409 - DNA, 25 bp, Homo sapien
tgcagatgaagcaaacgaagcacag

SEQ ID NO: 4246410 - DNA, 25 bp, Homo sapien
taacataaggcatcaatgtctctgg

SEQ ID NO: 4246411 - DNA, 25 bp, Homo sapien
tctaagagacaagtatcagccacat

SEQ ID NO: 4246412 - DNA, 25 bp, Homo sapien
caaattcaactacagcaggtgtgga

SEQ ID NO: 4246413 - DNA, 25 bp, Homo sapien
tctgccctgctagcttggatatcca

SEQ ID NO: 4246414 - DNA, 25 bp, Homo sapien
ggtttggaattccatcctcgcccca

SEQ ID NO: 4246415 - DNA, 25 bp, Homo sapien
tcatttcaagggagcattgggactc

SEQ ID NO: 4246416 - DNA, 25 bp, Homo sapien
tcatctggtagcaacagggagtcac

SEQ ID NO: 4246417 - DNA, 25 bp, Homo sapien
gagaacatcggattccatcataggg

SEQ ID NO: 4246418 - DNA, 25 bp, Homo sapien
accagaaattccagagcaaaggagc

SEQ ID NO: 4246419 - DNA, 25 bp, Homo sapien
cagtccgctgaaggtttaggaacac

SEQ ID NO: 4246420 - DNA, 25 bp, Homo sapien
agacgcaaagcaaacagtatgtcat

SEQ ID NO: 4246421 - DNA, 25 bp, Homo sapien
gagacgcaaagcaaacagtatgtca

SEQ ID NO: 4246422 - DNA, 25 bp, Homo sapien
agagacgcaaagcaaacagtatgtc

SEQ ID NO: 4246423 - DNA, 25 bp, Homo sapien
cagagacgcaaagcaaacagtatgt

SEQ ID NO: 4246424 - DNA, 25 bp, Homo sapien
tgtgtcccagtagaccaagaactct

SEQ ID NO: 4246425 - DNA, 25 bp, Homo sapien
aaaattcaaaatgcgtgtgtcccag

SEQ ID NO: 4246426 - DNA, 25 bp, Homo sapien
tctgtatcagtgtggtcaacgggag

SEQ ID NO: 4246427 - DNA, 25 bp, Homo sapien
gaaagctctaacaggcagtaccagt

SEQ ID NO: 4246428 - DNA, 25 bp, Homo sapien
gaaggtctctaatcatgttccacac

SEQ ID NO: 4246429 - DNA, 25 bp, Homo sapien
gggctggaagaaattgctccagtag

SEQ ID NO: 4246430 - DNA, 25 bp, Homo sapien
tggaagaaggtctctaatcatgttc

SEQ ID NO: 4246431 - DNA, 25 bp, Homo sapien
tcatgttccacactctcagggctgg

SEQ ID NO: 4246432 - DNA, 25 bp, Homo sapien
gattaaggaggcctatcttgggcta

SEQ ID NO: 4246433 - DNA, 25 bp, Homo sapien
gaaaagaatagtagccaagcccata

SEQ ID NO: 4246434 - DNA, 25 bp, Homo sapien
caagttgccagccttaaaaacatgt

SEQ ID NO: 4246435 - DNA, 25 bp, Homo sapien
agtatctttatagagcgaccaggag

SEQ ID NO: 4246436 - DNA, 25 bp, Homo sapien
tggtagtcatcactcgctagaggcc

SEQ ID NO: 4246437 - DNA, 25 bp, Homo sapien
cctagaaggagtgggtagcctagat

SEQ ID NO: 4246438 - DNA, 25 bp, Homo sapien
gccccttgtaattggaaaccatgaa

SEQ ID NO: 4246439 - DNA, 25 bp, Homo sapien
caccaggtccttctaggcagaggtt

SEQ ID NO: 4246440 - DNA, 25 bp, Homo sapien
tccaggatctgtttgacagcttctg

SEQ ID NO: 4246441 - DNA, 25 bp, Homo sapien
tcataatccaggatctgtttgacag

SEQ ID NO: 4246442 - DNA, 25 bp, Homo sapien
agtgtgactatccatgtcagatgac

SEQ ID NO: 4246443 - DNA, 25 bp, Homo sapien
gacttcagtgtgactatccatgtca

SEQ ID NO: 4246444 - DNA, 25 bp, Homo sapien
gaaagactgatcagcagcaaggcat

SEQ ID NO: 4246445 - DNA, 25 bp, Homo sapien
agaaagactgatcagcagcaaggca

SEQ ID NO: 4246446 - DNA, 25 bp, Homo sapien
gttcatcagccacgaacacactcat

SEQ ID NO: 4246447 - DNA, 25 bp, Homo sapien
tttggtgtcttcataccttgttcat

SEQ ID NO: 4246448 - DNA, 25 bp, Homo sapien
gtggctgtctggacattctgctgca

SEQ ID NO: 4246449 - DNA, 25 bp, Homo sapien
agctttggaattctgcccgtggctg

SEQ ID NO: 4246450 - DNA, 25 bp, Homo sapien
cccgtggctgtctggacattctgct

SEQ ID NO: 4246451 - DNA, 25 bp, Homo sapien
tcagaagctttggaattctgcccgt

SEQ ID NO: 4246452 - DNA, 25 bp, Homo sapien
aatgggaagacagcaaactcgttca

SEQ ID NO: 4246453 - DNA, 25 bp, Homo sapien
ggaccgcggactggctgaatccaat

SEQ ID NO: 4246454 - DNA, 25 bp, Homo sapien
caaactcgttcatgcgtgcagtcca

SEQ ID NO: 4246455 - DNA, 25 bp, Homo sapien
ccaaggatgaacttcctgggcacag

SEQ ID NO: 4246456 - DNA, 25 bp, Homo sapien
ggcctgcattgtgttccagtgggaa

SEQ ID NO: 4246457 - DNA, 25 bp, Homo sapien
gaaagcactgatgtctaacctcctg

SEQ ID NO: 4246458 - DNA, 25 bp, Homo sapien
ccctaatctaaaatgactgtgtcca

SEQ ID NO: 4246459 - DNA, 25 bp, Homo sapien
gggcttagttcacacaccacctgct

SEQ ID NO: 4246460 - DNA, 25 bp, Homo sapien
tctccaaggagaagaactcttttat

SEQ ID NO: 4246461 - DNA, 25 bp, Homo sapien
tagaccaatatgttctccaaggaga

SEQ ID NO: 4246462 - DNA, 25 bp, Homo sapien
tattagaccaatatgttctccaagg

SEQ ID NO: 4246463 - DNA, 25 bp, Homo sapien
ctccaaggagaagaactcttttatt

SEQ ID NO: 4246464 - DNA, 25 bp, Homo sapien
tgaggctcaggtgcaataactacat

SEQ ID NO: 4246465 - DNA, 25 bp, Homo sapien
gaatgcttctaataatcccgtgtca

SEQ ID NO: 4246466 - DNA, 25 bp, Homo sapien
tccaaagagaagtgaagaggacctc

SEQ ID NO: 4246467 - DNA, 25 bp, Homo sapien
tcccgtgtcaaaaagcgatgatcct

SEQ ID NO: 4246468 - DNA, 25 bp, Homo sapien
ccaggtgtccggttaagtctctgaa

SEQ ID NO: 4246469 - DNA, 25 bp, Homo sapien
tgtaatggtctgtccaggtgtccgg

SEQ ID NO: 4246470 - DNA, 25 bp, Homo sapien
agtcccaagttgtaatggtctgtcc

SEQ ID NO: 4246471 - DNA, 25 bp, Homo sapien
ggttaagtctctgaatataggtccc

SEQ ID NO: 4246472 - DNA, 25 bp, Homo sapien
ttgacctgaatggatcgcgggagcc

SEQ ID NO: 4246473 - DNA, 25 bp, Homo sapien
cttttgacctgaatggatcgcggga

SEQ ID NO: 4246474 - DNA, 25 bp, Homo sapien
tcggctctcctgtttgatcactctc

SEQ ID NO: 4246475 - DNA, 25 bp, Homo sapien
cccttttgacctgaatggatcgcgg

SEQ ID NO: 4246476 - DNA, 25 bp, Homo sapien
gggacggattcctgccgctcgaggg

SEQ ID NO: 4246477 - DNA, 25 bp, Homo sapien
ttcctgccgctcgagggatagaagg

SEQ ID NO: 4246478 - DNA, 25 bp, Homo sapien
cgctcagctccgctcgctgccacag

SEQ ID NO: 4246479 - DNA, 25 bp, Homo sapien
ccgcggccatgctgacgtcagggca

SEQ ID NO: 4246480 - DNA, 25 bp, Homo sapien
gctggcgaggttttagagggagtcc

SEQ ID NO: 4246481 - DNA, 25 bp, Homo sapien
gggagtcccgctctccaattaaagc

SEQ ID NO: 4246482 - DNA, 25 bp, Homo sapien
ccggcgcggagtggctggcgaggtt

SEQ ID NO: 4246483 - DNA, 25 bp, Homo sapien
ctgggattggctggcctcgcgcgag

SEQ ID NO: 4246484 - DNA, 25 bp, Homo sapien
tacgtgatatcagcaacacgctgaa

SEQ ID NO: 4246485 - DNA, 25 bp, Homo sapien
gggaggtttataacatttggcttca

SEQ ID NO: 4246486 - DNA, 25 bp, Homo sapien
gaaacaatttcatagactcttagag

SEQ ID NO: 4246487 - DNA, 25 bp, Homo sapien
tggcttcaggatgcataatcgcact

SEQ ID NO: 4246488 - DNA, 25 bp, Homo sapien
catttcttggtaacaaagggccttg

SEQ ID NO: 4246489 - DNA, 25 bp, Homo sapien
aaagagaaggtttcctagcacagac

SEQ ID NO: 4246490 - DNA, 25 bp, Homo sapien
catcgtggcagagcttacaagttcc

SEQ ID NO: 4246491 - DNA, 25 bp, Homo sapien
ccctgagaatggtgaaatcgccaac

SEQ ID NO: 4246492 - DNA, 25 bp, Homo sapien
cacatcttccactacaacattctgc

SEQ ID NO: 4246493 - DNA, 25 bp, Homo sapien
tgccattgaatttagcctggcatcc

SEQ ID NO: 4246494 - DNA, 25 bp, Homo sapien
tttcttccttgtgggcgtgctgaga

SEQ ID NO: 4246495 - DNA, 25 bp, Homo sapien
tagcctggcatccaggtttctttgt

SEQ ID NO: 4246496 - DNA, 25 bp, Homo sapien
cagattttgtcaggagggtccctgt

SEQ ID NO: 4246497 - DNA, 25 bp, Homo sapien
gaggtcaagcatctccggtccaaga

SEQ ID NO: 4246498 - DNA, 25 bp, Homo sapien
gacgtgttcgggcttcgagccacat

SEQ ID NO: 4246499 - DNA, 25 bp, Homo sapien
gccagcacgccaagtcttttagagg

SEQ ID NO: 4246500 - DNA, 25 bp, Homo sapien
tcctgcttggtccaattcagaaacg

SEQ ID NO: 4246501 - DNA, 25 bp, Homo sapien
agggaaggcactcctgcttggtcca

SEQ ID NO: 4246502 - DNA, 25 bp, Homo sapien
ggcactcctgcttggtccaattcag

SEQ ID NO: 4246503 - DNA, 25 bp, Homo sapien
gaaggcactcctgcttggtccaatt

SEQ ID NO: 4246504 - DNA, 25 bp, Homo sapien
gaaagagaggtcattctgtccacag

SEQ ID NO: 4246505 - DNA, 25 bp, Homo sapien
gcaccaacttcgctgtggatgggtt

SEQ ID NO: 4246506 - DNA, 25 bp, Homo sapien
ttctgtccacagtacttaaaaacca

SEQ ID NO: 4246507 - DNA, 25 bp, Homo sapien
caacttcgctgtggatgggttttgg

SEQ ID NO: 4246508 - DNA, 25 bp, Homo sapien
tgtcgttactgtcagcaagtccgtg

SEQ ID NO: 4246509 - DNA, 25 bp, Homo sapien
actgtcagcaagtccgtgggcattg

SEQ ID NO: 4246510 - DNA, 25 bp, Homo sapien
ttaatcgtgttcgttgtgtttgtcg

SEQ ID NO: 4246511 - DNA, 25 bp, Homo sapien
tcgttgtgtttgtcgttactgtcag

SEQ ID NO: 4246512 - DNA, 25 bp, Homo sapien
ccttcctctgagtccttgggaggtg

SEQ ID NO: 4246513 - DNA, 25 bp, Homo sapien
cttgtccacctgctgggggacgtcc

SEQ ID NO: 4246514 - DNA, 25 bp, Homo sapien
tgtccacctgctgggggacgtcctt

SEQ ID NO: 4246515 - DNA, 25 bp, Homo sapien
tgctgggggacgtccttcctctgag

SEQ ID NO: 4246516 - DNA, 25 bp, Homo sapien
gatggaactgatgggcccctgagct

SEQ ID NO: 4246517 - DNA, 25 bp, Homo sapien
agtatcagagatctccgtggccagg

SEQ ID NO: 4246518 - DNA, 25 bp, Homo sapien
gagctgggtgggcaatgatcttcat

SEQ ID NO: 4246519 - DNA, 25 bp, Homo sapien
tgggagcctcttatctgcgtactga

SEQ ID NO: 4246520 - DNA, 25 bp, Homo sapien
tgctgagggtaaaagcccagaggcc

SEQ ID NO: 4246521 - DNA, 25 bp, Homo sapien
tgtggttacctaactccggagcctc

SEQ ID NO: 4246522 - DNA, 25 bp, Homo sapien
aaaatagggatgagaccagcgccca

SEQ ID NO: 4246523 - DNA, 25 bp, Homo sapien
gaggcattgcccacgttcaaacctg

SEQ ID NO: 4246524 - DNA, 25 bp, Homo sapien
agcaagtccaaacgctcctgaaggg

SEQ ID NO: 4246525 - DNA, 25 bp, Homo sapien
gggcgtacatcgtcaccaagggtca

SEQ ID NO: 4246526 - DNA, 25 bp, Homo sapien
ggtgtgccgagaccatcctaagggt

SEQ ID NO: 4246527 - DNA, 25 bp, Homo sapien
tggcctggcaccgaaagcactttgt

SEQ ID NO: 4246528 - DNA, 25 bp, Homo sapien
ccaaatgggcagtttacagtcacag

SEQ ID NO: 4246529 - DNA, 25 bp, Homo sapien
acagtcacagtgtgtgcccctgctt

SEQ ID NO: 4246530 - DNA, 25 bp, Homo sapien
caatagctgagtgggattctgtacc

SEQ ID NO: 4246531 - DNA, 25 bp, Homo sapien
gagtgggattctgtaccagaattgg

SEQ ID NO: 4246532 - DNA, 25 bp, Homo sapien
ttttgcctgcaattccccacactgt

SEQ ID NO: 4246533 - DNA, 25 bp, Homo sapien
ggctgcaatagctgagtgggattct

SEQ ID NO: 4246534 - DNA, 25 bp, Homo sapien
aatggcacaaagttgggattcagga

SEQ ID NO: 4246535 - DNA, 25 bp, Homo sapien
gggagtaaaggagaccaatccagga

SEQ ID NO: 4246536 - DNA, 25 bp, Homo sapien
gagtaaaggagaccaatccaggaga

SEQ ID NO: 4246537 - DNA, 25 bp, Homo sapien
atggcacaaagttgggattcaggag

SEQ ID NO: 4246538 - DNA, 25 bp, Homo sapien
ggttgacctgtggtgagctggcatc

SEQ ID NO: 4246539 - DNA, 25 bp, Homo sapien
gctggcatctaaggctggcctgagt

SEQ ID NO: 4246540 - DNA, 25 bp, Homo sapien
agctggcatctaaggctggcctgag

SEQ ID NO: 4246541 - DNA, 25 bp, Homo sapien
aggatcaggttgacctgtggtgagc

SEQ ID NO: 4246542 - DNA, 25 bp, Homo sapien
ctgtgtccacctgttgatgtccatt

SEQ ID NO: 4246543 - DNA, 25 bp, Homo sapien
gtccacctgttgatgtccatttcca

SEQ ID NO: 4246544 - DNA, 25 bp, Homo sapien
ccacctgttgatgtccatttccaca

SEQ ID NO: 4246545 - DNA, 25 bp, Homo sapien
gtgtccacctgttgatgtccatttc

SEQ ID NO: 4246546 - DNA, 25 bp, Homo sapien
aggccagtgtctccaggtctccaca

SEQ ID NO: 4246547 - DNA, 25 bp, Homo sapien
tactaatggtctccacaggccagtg

SEQ ID NO: 4246548 - DNA, 25 bp, Homo sapien
cagtgtctccaggtctccacatcta

SEQ ID NO: 4246549 - DNA, 25 bp, Homo sapien
actaatggtctccacaggccagtgt

SEQ ID NO: 4246550 - DNA, 25 bp, Homo sapien
aatcacaccctgctcacttctcctc

SEQ ID NO: 4246551 - DNA, 25 bp, Homo sapien
actttctaaatcacaccctgctcac

SEQ ID NO: 4246552 - DNA, 25 bp, Homo sapien
catcaacatcccatacataaatact

SEQ ID NO: 4246553 - DNA, 25 bp, Homo sapien
tttctaaatcacaccctgctcactt

SEQ ID NO: 4246554 - DNA, 25 bp, Homo sapien
gctgatatgttcatccacgtgaact

SEQ ID NO: 4246555 - DNA, 25 bp, Homo sapien
ggcagatgctgatatgttcatccac

SEQ ID NO: 4246556 - DNA, 25 bp, Homo sapien
gatgctgatatgttcatccacgtga

SEQ ID NO: 4246557 - DNA, 25 bp, Homo sapien
gatatgttcatccacgtgaactcaa

SEQ ID NO: 4246558 - DNA, 25 bp, Homo sapien
aacacaccatcgacctgccaaaact

SEQ ID NO: 4246559 - DNA, 25 bp, Homo sapien
aagcccagggtcatcacatcacttt

SEQ ID NO: 4246560 - DNA, 25 bp, Homo sapien
gggtcatcacatcactttccaggga

SEQ ID NO: 4246561 - DNA, 25 bp, Homo sapien
cgctctaagtgggttggcaccaaca

SEQ ID NO: 4246562 - DNA, 25 bp, Homo sapien
ccccaagtgatggagagtagagagc

SEQ ID NO: 4246563 - DNA, 25 bp, Homo sapien
gatcaaacccttgcatctcttctta

SEQ ID NO: 4246564 - DNA, 25 bp, Homo sapien
tgctcatgacctgattactccccaa

SEQ ID NO: 4246565 - DNA, 25 bp, Homo sapien
tgacctgattactccccaaagtaaa

SEQ ID NO: 4246566 - DNA, 25 bp, Homo sapien
gggtattgtgctccccattggccaa

SEQ ID NO: 4246567 - DNA, 25 bp, Homo sapien
cagggtattgtgctccccattggcc

SEQ ID NO: 4246568 - DNA, 25 bp, Homo sapien
agggtattgtgctccccattggcca

SEQ ID NO: 4246569 - DNA, 25 bp, Homo sapien
tgcagctatctgcttcagggcaaaa

SEQ ID NO: 4246570 - DNA, 25 bp, Homo sapien
agccgctgagtggatccttctttga

SEQ ID NO: 4246571 - DNA, 25 bp, Homo sapien
gggcagccgctgagtggatccttct

SEQ ID NO: 4246572 - DNA, 25 bp, Homo sapien
tctttgagaaaactttctctgagcc

SEQ ID NO: 4246573 - DNA, 25 bp, Homo sapien
tgaccacagagccaacgccacctgc

SEQ ID NO: 4246574 - DNA, 25 bp, Homo sapien
ttgctgcccaatgggcagaccacac

SEQ ID NO: 4246575 - DNA, 25 bp, Homo sapien
agagccaacgccacctgcccattgc

SEQ ID NO: 4246576 - DNA, 25 bp, Homo sapien
tgcccattgctgcccaatgggcaga

SEQ ID NO: 4246577 - DNA, 25 bp, Homo sapien
cacccggtgtccagtgtgtgcataa

SEQ ID NO: 4246578 - DNA, 25 bp, Homo sapien
gttttgctgccaggattcccctccg

SEQ ID NO: 4246579 - DNA, 25 bp, Homo sapien
ccagtgtgtgcataaacactgccct

SEQ ID NO: 4246580 - DNA, 25 bp, Homo sapien
tggttttgctgccaggattcccctc

SEQ ID NO: 4246581 - DNA, 25 bp, Homo sapien
tttgccctctcctcaaccaggatgg

SEQ ID NO: 4246582 - DNA, 25 bp, Homo sapien
gcggggtttgccctctcctcaacca

SEQ ID NO: 4246583 - DNA, 25 bp, Homo sapien
gaagcggggtttgccctctcctcaa

SEQ ID NO: 4246584 - DNA, 25 bp, Homo sapien
gggtttgccctctcctcaaccagga

SEQ ID NO: 4246585 - DNA, 25 bp, Homo sapien
tgtgattgtccaatgcagccaacag

SEQ ID NO: 4246586 - DNA, 25 bp, Homo sapien
catggattccaccagaggagctgta

SEQ ID NO: 4246587 - DNA, 25 bp, Homo sapien
aaatcaaatcacacgcatcatcggg

SEQ ID NO: 4246588 - DNA, 25 bp, Homo sapien
tactcagatcgtcaagaggctccca

SEQ ID NO: 4246589 - DNA, 25 bp, Homo sapien
tggcaaacgtgaatggcaggctctg

SEQ ID NO: 4246590 - DNA, 25 bp, Homo sapien
gagtgtcggccatcttccttggcaa

SEQ ID NO: 4246591 - DNA, 25 bp, Homo sapien
tccttggcaaacgtgaatggcaggc

SEQ ID NO: 4246592 - DNA, 25 bp, Homo sapien
tcttccttggcaaacgtgaatggca

SEQ ID NO: 4246593 - DNA, 25 bp, Homo sapien
ccaccgcatacacctggtggtcagt

SEQ ID NO: 4246594 - DNA, 25 bp, Homo sapien
agatgtagtagacataagtctttcc

SEQ ID NO: 4246595 - DNA, 25 bp, Homo sapien
aataccgctcaggatagtccaccgc

SEQ ID NO: 4246596 - DNA, 25 bp, Homo sapien
ggtggtcagtgccatagatgtagta

SEQ ID NO: 4246597 - DNA, 25 bp, Homo sapien
tgtgagggggatcagctcaatggtc

SEQ ID NO: 4246598 - DNA, 25 bp, Homo sapien
gggggatcagctcaatggtctggcg

SEQ ID NO: 4246599 - DNA, 25 bp, Homo sapien
tgagggggatcagctcaatggtctg

SEQ ID NO: 4246600 - DNA, 25 bp, Homo sapien
gagggggatcagctcaatggtctgg

SEQ ID NO: 4246601 - DNA, 25 bp, Homo sapien
agtcctcttgctgtagttgatagct

SEQ ID NO: 4246602 - DNA, 25 bp, Homo sapien
tcttgctgtagttgatagcttgaag

SEQ ID NO: 4246603 - DNA, 25 bp, Homo sapien
ccgctccgacgttctcaggaaagag

SEQ ID NO: 4246604 - DNA, 25 bp, Homo sapien
tccttccgctccgacgttctcagga

SEQ ID NO: 4246605 - DNA, 25 bp, Homo sapien
tcatccttccgctccgacgttctca

SEQ ID NO: 4246606 - DNA, 25 bp, Homo sapien
cttccgctccgacgttctcaggaaa

SEQ ID NO: 4246607 - DNA, 25 bp, Homo sapien
gctgtgctctgcaatgcccctctgg

SEQ ID NO: 4246608 - DNA, 25 bp, Homo sapien
gagatgtctcgcagagggaagtcca

SEQ ID NO: 4246609 - DNA, 25 bp, Homo sapien
gggaggcaagagagatgtctcgcag

SEQ ID NO: 4246610 - DNA, 25 bp, Homo sapien
aggacgcgggcacgggaggccaagg

SEQ ID NO: 4246611 - DNA, 25 bp, Homo sapien
gacacaaactcaaacaagctgttct

SEQ ID NO: 4246612 - DNA, 25 bp, Homo sapien
ctttggctttagcaaggagctccct

SEQ ID NO: 4246613 - DNA, 25 bp, Homo sapien
gcagttgagccggtgctcagacaca

SEQ ID NO: 4246614 - DNA, 25 bp, Homo sapien
tcctttggctttagcaaggagctcc

SEQ ID NO: 4246615 - DNA, 25 bp, Homo sapien
ccccgcatgccacagcattgagaca

SEQ ID NO: 4246616 - DNA, 25 bp, Homo sapien
aagccagtccagggctaagtccctc

SEQ ID NO: 4246617 - DNA, 25 bp, Homo sapien
agtccagggctaagtccctcagcca

SEQ ID NO: 4246618 - DNA, 25 bp, Homo sapien
acccccgcatgccacagcattgaga

SEQ ID NO: 4246619 - DNA, 25 bp, Homo sapien
gtggcgcaggtcttgttccctctcc

SEQ ID NO: 4246620 - DNA, 25 bp, Homo sapien
agctggatgaagtgcaacagcttct

SEQ ID NO: 4246621 - DNA, 25 bp, Homo sapien
catgatgacaagctggatgaagtgc

SEQ ID NO: 4246622 - DNA, 25 bp, Homo sapien
caggtggcgcaggtcttgttccctc

SEQ ID NO: 4246623 - DNA, 25 bp, Homo sapien
ccagatcagttgcaggtcctggtgg

SEQ ID NO: 4246624 - DNA, 25 bp, Homo sapien
tgagaaaggcacagagtccgtaccc

SEQ ID NO: 4246625 - DNA, 25 bp, Homo sapien
acagagtccgtacccccagatcagt

SEQ ID NO: 4246626 - DNA, 25 bp, Homo sapien
gatcagttgcaggtcctggtggctt

SEQ ID NO: 4246627 - DNA, 25 bp, Homo sapien
caactggcttgtcagaaggatggcc

SEQ ID NO: 4246628 - DNA, 25 bp, Homo sapien
agaaagcaagagcacttcaccgcgg

SEQ ID NO: 4246629 - DNA, 25 bp, Homo sapien
gactgtctctaccaaccacgatgga

SEQ ID NO: 4246630 - DNA, 25 bp, Homo sapien
tattgcatgacgagttccagccttg

SEQ ID NO: 4246631 - DNA, 25 bp, Homo sapien
gccggaccccgcgcacagctgacat

SEQ ID NO: 4246632 - DNA, 25 bp, Homo sapien
cagctgacatctccgggactgcttg

SEQ ID NO: 4246633 - DNA, 25 bp, Homo sapien
gctgacatctccgggactgcttggc

SEQ ID NO: 4246634 - DNA, 25 bp, Homo sapien
tggctttgcgcttggctccgcagca

SEQ ID NO: 4246635 - DNA, 25 bp, Homo sapien
gctgcacttgtaccgcccacgccca

SEQ ID NO: 4246636 - DNA, 25 bp, Homo sapien
cgtgcccgccccgtggcagccgctg

SEQ ID NO: 4246637 - DNA, 25 bp, Homo sapien
gccgctgcacttgtaccgcccacgc

SEQ ID NO: 4246638 - DNA, 25 bp, Homo sapien
cagccgctgcacttgtaccgcccac

SEQ ID NO: 4246639 - DNA, 25 bp, Homo sapien
tgggatctagtttcccaagggccac

SEQ ID NO: 4246640 - DNA, 25 bp, Homo sapien
tcttgggatctagtttcccaagggc

SEQ ID NO: 4246641 - DNA, 25 bp, Homo sapien
ctgaaagtgcaacgctttcttggga

SEQ ID NO: 4246642 - DNA, 25 bp, Homo sapien
aaagtgcaacgctttcttgggatct

SEQ ID NO: 4246643 - DNA, 25 bp, Homo sapien
atcaggaccaggataggaagatggc

SEQ ID NO: 4246644 - DNA, 25 bp, Homo sapien
ctctttgcggcccatccacagagtg

SEQ ID NO: 4246645 - DNA, 25 bp, Homo sapien
cttgaccagtgacgagtgagggacc

SEQ ID NO: 4246646 - DNA, 25 bp, Homo sapien
catcggaggaccttgaaccttgatg

SEQ ID NO: 4246647 - DNA, 25 bp, Homo sapien
cctggtgtcttcctgaaacatcgga

SEQ ID NO: 4246648 - DNA, 25 bp, Homo sapien
ggtcattgtaagaatgacgaagggc

SEQ ID NO: 4246649 - DNA, 25 bp, Homo sapien
cagaaaggggtcattgtaagaatga

SEQ ID NO: 4246650 - DNA, 25 bp, Homo sapien
cattgtaagaatgacgaagggcagc

SEQ ID NO: 4246651 - DNA, 25 bp, Homo sapien
ttgtaagaatgacgaagggcagcag

SEQ ID NO: 4246652 - DNA, 25 bp, Homo sapien
ttgaaatgtccactcgcttatcctg

SEQ ID NO: 4246653 - DNA, 25 bp, Homo sapien
gcttatcctggattcactaaaggtc

SEQ ID NO: 4246654 - DNA, 25 bp, Homo sapien
cactcgcttatcctggattcactaa

SEQ ID NO: 4246655 - DNA, 25 bp, Homo sapien
cctggattcactaaaggtctccaga

SEQ ID NO: 4246656 - DNA, 25 bp, Homo sapien
tgctgtagcagcacttagagtccac

SEQ ID NO: 4246657 - DNA, 25 bp, Homo sapien
cctggatgacgaggtctccagccac

SEQ ID NO: 4246658 - DNA, 25 bp, Homo sapien
ctgtagcagcacttagagtccacaa

SEQ ID NO: 4246659 - DNA, 25 bp, Homo sapien
cttcagctcctggatgacgaggtct

SEQ ID NO: 4246660 - DNA, 25 bp, Homo sapien
ctgcaggggaccgaacagagaggcg

SEQ ID NO: 4246661 - DNA, 25 bp, Homo sapien
gcaggggaccgaacagagaggcggg

SEQ ID NO: 4246662 - DNA, 25 bp, Homo sapien
tgcaggggaccgaacagagaggcgg

SEQ ID NO: 4246663 - DNA, 25 bp, Homo sapien
caggggaccgaacagagaggcgggg

SEQ ID NO: 4246664 - DNA, 25 bp, Homo sapien
taaagccctcagcagtccaactggg

SEQ ID NO: 4246665 - DNA, 25 bp, Homo sapien
cagcctcctcaacgtgcaggcgaga

SEQ ID NO: 4246666 - DNA, 25 bp, Homo sapien
actgaggccacggtagtggtaaagc

SEQ ID NO: 4246667 - DNA, 25 bp, Homo sapien
aacgtgcaggcgagaaactgaggcc

SEQ ID NO: 4246668 - DNA, 25 bp, Homo sapien
ctgcaaaggggaccatgtgaacggg

SEQ ID NO: 4246669 - DNA, 25 bp, Homo sapien
gggaccatgtgaacgggtgcccagc

SEQ ID NO: 4246670 - DNA, 25 bp, Homo sapien
ccatgtgaacgggtgcccagcgtga

SEQ ID NO: 4246671 - DNA, 25 bp, Homo sapien
caaaggggaccatgtgaacgggtgc

SEQ ID NO: 4246672 - DNA, 25 bp, Homo sapien
taaataaggctcctgccctcgggta

SEQ ID NO: 4246673 - DNA, 25 bp, Homo sapien
gatgtcgcacagttaaaaggaggca

SEQ ID NO: 4246674 - DNA, 25 bp, Homo sapien
tcgggtaccttgaccttagccagag

SEQ ID NO: 4246675 - DNA, 25 bp, Homo sapien
gagctgctagcaacatgatgggaag

SEQ ID NO: 4246676 - DNA, 25 bp, Homo sapien
tgagagccattaatccacaattctg

SEQ ID NO: 4246677 - DNA, 25 bp, Homo sapien
agagatgactccccggaggaagcag

SEQ ID NO: 4246678 - DNA, 25 bp, Homo sapien
gatggcagcacaagagacactgtgg

SEQ ID NO: 4246679 - DNA, 25 bp, Homo sapien
gcagccctgagagccattaatccac

SEQ ID NO: 4246680 - DNA, 25 bp, Homo sapien
ctaagcatggaaagtgggtgtccat

SEQ ID NO: 4246681 - DNA, 25 bp, Homo sapien
gcctccaaaggtgggaagaatatct

SEQ ID NO: 4246682 - DNA, 25 bp, Homo sapien
tgtgttccaggaacgagggccagga

SEQ ID NO: 4246683 - DNA, 25 bp, Homo sapien
aacgagggccaggacctttgctcct

SEQ ID NO: 4246684 - DNA, 25 bp, Homo sapien
aaaggtgggaagaatatctgtcctc

SEQ ID NO: 4246685 - DNA, 25 bp, Homo sapien
gaagaagccagtcatagctgggcag

SEQ ID NO: 4246686 - DNA, 25 bp, Homo sapien
ccccttgaagaagccagtcatagct

SEQ ID NO: 4246687 - DNA, 25 bp, Homo sapien
ttgaagaagccagtcatagctgggc

SEQ ID NO: 4246688 - DNA, 25 bp, Homo sapien
tgcccccttgaagaagccagtcata

SEQ ID NO: 4246689 - DNA, 25 bp, Homo sapien
tgtattgtcgatatgcacaaatgcc

SEQ ID NO: 4246690 - DNA, 25 bp, Homo sapien
gccaaaaagattcaggtggtcaaac

SEQ ID NO: 4246691 - DNA, 25 bp, Homo sapien
aatgcctcgtgatttgaattatact

SEQ ID NO: 4246692 - DNA, 25 bp, Homo sapien
caaagtagagtgatggttgacaggg

SEQ ID NO: 4246693 - DNA, 25 bp, Homo sapien
cttggaccgatgtgctctgatggac

SEQ ID NO: 4246694 - DNA, 25 bp, Homo sapien
tgtgctctgatggaccaccctcagg

SEQ ID NO: 4246695 - DNA, 25 bp, Homo sapien
gagatgtctgcccttcgagtgtgct

SEQ ID NO: 4246696 - DNA, 25 bp, Homo sapien
tgttccagacgtcctgccaaagaga

SEQ ID NO: 4246697 - DNA, 25 bp, Homo sapien
gaaggagcgtggcatggttttcact

SEQ ID NO: 4246698 - DNA, 25 bp, Homo sapien
ctgacctggctacttagtggcttgg

SEQ ID NO: 4246699 - DNA, 25 bp, Homo sapien
tacttagtggcttggcccgtgtaag

SEQ ID NO: 4246700 - DNA, 25 bp, Homo sapien
ccgtgtaagtctggctacccaatca

SEQ ID NO: 4246701 - DNA, 25 bp, Homo sapien
caaagccacactttagctggtgccc

SEQ ID NO: 4246702 - DNA, 25 bp, Homo sapien
gaaagctgagaaactacgatgcccg

SEQ ID NO: 4246703 - DNA, 25 bp, Homo sapien
tgtctcctcagcgacagcaaagcca

SEQ ID NO: 4246704 - DNA, 25 bp, Homo sapien
cagaggccttcaggaaggtcacctt

SEQ ID NO: 4246705 - DNA, 25 bp, Homo sapien
ctcctgctccatccgtggccttgac

SEQ ID NO: 4246706 - DNA, 25 bp, Homo sapien
ggagctcttttgtgggtcagtgcag

SEQ ID NO: 4246707 - DNA, 25 bp, Homo sapien
gctcttttgtgggtcagtgcagatg

SEQ ID NO: 4246708 - DNA, 25 bp, Homo sapien
tccgtggccttgactctggaagaca

SEQ ID NO: 4246709 - DNA, 25 bp, Homo sapien
tggaagaggttttaaatcgtggctc

SEQ ID NO: 4246710 - DNA, 25 bp, Homo sapien
atggaagaggttttaaatcgtggct

SEQ ID NO: 4246711 - DNA, 25 bp, Homo sapien
catctccgtggcgactgcctcaggc

SEQ ID NO: 4246712 - DNA, 25 bp, Homo sapien
tctccgtggcgactgcctcaggcag

SEQ ID NO: 4246713 - DNA, 25 bp, Homo sapien
atctccgtggcgactgcctcaggca

SEQ ID NO: 4246714 - DNA, 25 bp, Homo sapien
tccatctccgtggcgactgcctcag

SEQ ID NO: 4246715 - DNA, 25 bp, Homo sapien
ccctccatccgggggtctctgactc

SEQ ID NO: 4246716 - DNA, 25 bp, Homo sapien
ctccatccgggggtctctgactccc

SEQ ID NO: 4246717 - DNA, 25 bp, Homo sapien
tccatccgggggtctctgactcccc

SEQ ID NO: 4246718 - DNA, 25 bp, Homo sapien
ccatccgggggtctctgactcccct

SEQ ID NO: 4246719 - DNA, 25 bp, Homo sapien
gcagtgccagccagtgtgagctgtt

SEQ ID NO: 4246720 - DNA, 25 bp, Homo sapien
ttagcagtgccagccagtgtgagct

SEQ ID NO: 4246721 - DNA, 25 bp, Homo sapien
ctgcttagcagtgccagccagtgtg

SEQ ID NO: 4246722 - DNA, 25 bp, Homo sapien
gcttagcagtgccagccagtgtgag

SEQ ID NO: 4246723 - DNA, 25 bp, Homo sapien
gcgtgtcccgcatgcacagtgatga

SEQ ID NO: 4246724 - DNA, 25 bp, Homo sapien
cagcgtgtcccgcatgcacagtgat

SEQ ID NO: 4246725 - DNA, 25 bp, Homo sapien
ctacagcgtgtcccgcatgcacagt

SEQ ID NO: 4246726 - DNA, 25 bp, Homo sapien
gtgtcccgcatgcacagtgatgacc

SEQ ID NO: 4246727 - DNA, 25 bp, Homo sapien
gagtagccttatagaccagtaacag

SEQ ID NO: 4246728 - DNA, 25 bp, Homo sapien
tttgtgtcactaatagcagctgcct

SEQ ID NO: 4246729 - DNA, 25 bp, Homo sapien
caagtcaagcaaacctttgtgtcac

SEQ ID NO: 4246730 - DNA, 25 bp, Homo sapien
cagatttttcccaatcagacatcca

SEQ ID NO: 4246731 - DNA, 25 bp, Homo sapien
ttccatgttatccttccttcacagc

SEQ ID NO: 4246732 - DNA, 25 bp, Homo sapien
catacacaaagcactatgataggca

SEQ ID NO: 4246733 - DNA, 25 bp, Homo sapien
gataggcatgttgcttccatgttat

SEQ ID NO: 4246734 - DNA, 25 bp, Homo sapien
gccctaagaggtactattacaaggc

SEQ ID NO: 4246735 - DNA, 25 bp, Homo sapien
tgtctgtgaacatgggacacctcag

SEQ ID NO: 4246736 - DNA, 25 bp, Homo sapien
ggcctttcagagttagagaattccc

SEQ ID NO: 4246737 - DNA, 25 bp, Homo sapien
gagaattcccaagtccatatcatgt

SEQ ID NO: 4246738 - DNA, 25 bp, Homo sapien
gtgtctgctcacatcagtcccctga

SEQ ID NO: 4246739 - DNA, 25 bp, Homo sapien
tttccataggtaccacaggggacac

SEQ ID NO: 4246740 - DNA, 25 bp, Homo sapien
tccataggtaccacaggggacacac

SEQ ID NO: 4246741 - DNA, 25 bp, Homo sapien
ttccataggtaccacaggggacaca

SEQ ID NO: 4246742 - DNA, 25 bp, Homo sapien
ttcttagtaatgatgcgtgtcccaa

SEQ ID NO: 4246743 - DNA, 25 bp, Homo sapien
ggcacacagataaatttacggaaaa

SEQ ID NO: 4246744 - DNA, 25 bp, Homo sapien
gcgtgtcccaagacaatgttgtttt

SEQ ID NO: 4246745 - DNA, 25 bp, Homo sapien
tagtaatgatgcgtgtcccaagaca

SEQ ID NO: 4246746 - DNA, 25 bp, Homo sapien
tattacgaatttgatggcagggtct

SEQ ID NO: 4246747 - DNA, 25 bp, Homo sapien
tgaagtcccgctaggatattacgaa

SEQ ID NO: 4246748 - DNA, 25 bp, Homo sapien
gggtgcacacgcattgtgaaatgac

SEQ ID NO: 4246749 - DNA, 25 bp, Homo sapien
gatggcagggtctacacgtcctgtg

SEQ ID NO: 4246750 - DNA, 25 bp, Homo sapien
tattatagacgggtgtacatcctct

SEQ ID NO: 4246751 - DNA, 25 bp, Homo sapien
ggatattacaatccacggtggtcac

SEQ ID NO: 4246752 - DNA, 25 bp, Homo sapien
gattgtcagtaatatcttctcagcc

SEQ ID NO: 4246753 - DNA, 25 bp, Homo sapien
cacacagcatgttgacgggattgtc

SEQ ID NO: 4246754 - DNA, 25 bp, Homo sapien
atccaacaggggtccgaactcagca

SEQ ID NO: 4246755 - DNA, 25 bp, Homo sapien
aatctcagagctgccgaaggcaggt

SEQ ID NO: 4246756 - DNA, 25 bp, Homo sapien
aagaaatctcagagctgccgaaggc

SEQ ID NO: 4246757 - DNA, 25 bp, Homo sapien
tccgaactcagcagcccgggatcag

SEQ ID NO: 4246758 - DNA, 25 bp, Homo sapien
agaaggcaggtgagagaattcttag

SEQ ID NO: 4246759 - DNA, 25 bp, Homo sapien
ctaagggcagaaggcaggtgagaga

SEQ ID NO: 4246760 - DNA, 25 bp, Homo sapien
gggcagaaggcaggtgagagaattc

SEQ ID NO: 4246761 - DNA, 25 bp, Homo sapien
gcagaaggcaggtgagagaattctt

SEQ ID NO: 4246762 - DNA, 25 bp, Homo sapien
aaagctcagatctgcggaaggcaag

SEQ ID NO: 4246763 - DNA, 25 bp, Homo sapien
ctcagatctgcggaaggcaagtacc

SEQ ID NO: 4246764 - DNA, 25 bp, Homo sapien
aagctcagatctgcggaaggcaagt

SEQ ID NO: 4246765 - DNA, 25 bp, Homo sapien
agatctgcggaaggcaagtacctta

SEQ ID NO: 4246766 - DNA, 25 bp, Homo sapien
cagagctgccgaaagcaggtacctt

SEQ ID NO: 4246767 - DNA, 25 bp, Homo sapien
gaaagctcagagctgccgaaagcag

SEQ ID NO: 4246768 - DNA, 25 bp, Homo sapien
gggaacgcagcccaggatcagaaag

SEQ ID NO: 4246769 - DNA, 25 bp, Homo sapien
gatttactatctgacaggggtggga

SEQ ID NO: 4246770 - DNA, 25 bp, Homo sapien
agcccggattttgcctgtatactcc

SEQ ID NO: 4246771 - DNA, 25 bp, Homo sapien
ccggattttgcctgtatactccaac

SEQ ID NO: 4246772 - DNA, 25 bp, Homo sapien
gcagtgagcccggattttgcctgta

SEQ ID NO: 4246773 - DNA, 25 bp, Homo sapien
tgagcccggattttgcctgtatact

SEQ ID NO: 4246774 - DNA, 25 bp, Homo sapien
tactgtcgatttgaaagccatctca

SEQ ID NO: 4246775 - DNA, 25 bp, Homo sapien
aatatgtgctggattctactgtcga

SEQ ID NO: 4246776 - DNA, 25 bp, Homo sapien
aaaggctgatgccacacgcataacg

SEQ ID NO: 4246777 - DNA, 25 bp, Homo sapien
tgttctgaggatacacctggagcaa

SEQ ID NO: 4246778 - DNA, 25 bp, Homo sapien
taaaaatgcaaatagtggagcctcc

SEQ ID NO: 4246779 - DNA, 25 bp, Homo sapien
tgcaaatagtggagcctcccacagt

SEQ ID NO: 4246780 - DNA, 25 bp, Homo sapien
gccactttaactccagattcataaa

SEQ ID NO: 4246781 - DNA, 25 bp, Homo sapien
gttgtcctggttgatcttcacagcc

SEQ ID NO: 4246782 - DNA, 25 bp, Homo sapien
cagcggatacgatgtgtttagcaca

SEQ ID NO: 4246783 - DNA, 25 bp, Homo sapien
cttctgagagtcatggtggcgatcc

SEQ ID NO: 4246784 - DNA, 25 bp, Homo sapien
caatgcctggtgtctaatcctcaga

SEQ ID NO: 4246785 - DNA, 25 bp, Homo sapien
taagaacaatggtagctgggatcgg

SEQ ID NO: 4246786 - DNA, 25 bp, Homo sapien
gccatatacatcgtgggtgttacca

SEQ ID NO: 4246787 - DNA, 25 bp, Homo sapien
ggttatcccagattgtacacagttg

SEQ ID NO: 4246788 - DNA, 25 bp, Homo sapien
tgtaagatacatggccccaaactga

SEQ ID NO: 4246789 - DNA, 25 bp, Homo sapien
ctgccagtcccttacgtgccatgtg

SEQ ID NO: 4246790 - DNA, 25 bp, Homo sapien
gacacacgcagactcatttataact

SEQ ID NO: 4246791 - DNA, 25 bp, Homo sapien
tcagatgtattttcgaggaatcttc

SEQ ID NO: 4246792 - DNA, 25 bp, Homo sapien
gactccatccgtcttatcagcacag

SEQ ID NO: 4246793 - DNA, 25 bp, Homo sapien
taagtaggctggagaataatccggg

SEQ ID NO: 4246794 - DNA, 25 bp, Homo sapien
aaatacagagccttaggccccactc

SEQ ID NO: 4246795 - DNA, 25 bp, Homo sapien
gcagcttgggctcaacagggagctt

SEQ ID NO: 4246796 - DNA, 25 bp, Homo sapien
ttgaacgagcgtgttgtgttggtca

SEQ ID NO: 4246797 - DNA, 25 bp, Homo sapien
tccagacttggggagtcggaatccc

SEQ ID NO: 4246798 - DNA, 25 bp, Homo sapien
gaagtggcaacacatagactcaagc

SEQ ID NO: 4246799 - DNA, 25 bp, Homo sapien
gactcaagccaaaagaagaccaaag

SEQ ID NO: 4246800 - DNA, 25 bp, Homo sapien
tgaacccaaggtagcgttctgaacc

SEQ ID NO: 4246801 - DNA, 25 bp, Homo sapien
ggcaaccccggccatgcatatggtt

SEQ ID NO: 4246802 - DNA, 25 bp, Homo sapien
tgtgcctggaaacttaaaaggtgcc

SEQ ID NO: 4246803 - DNA, 25 bp, Homo sapien
taacaacctgcagctacaaggcatc

SEQ ID NO: 4246804 - DNA, 25 bp, Homo sapien
gacgtggtcatgtcctaacctcaag

SEQ ID NO: 4246805 - DNA, 25 bp, Homo sapien
gatgagatccctctcaagcagtgag

SEQ ID NO: 4246806 - DNA, 25 bp, Homo sapien
caatatgtgggcttttgcacctggc

SEQ ID NO: 4246807 - DNA, 25 bp, Homo sapien
tagccatcctagtgattgtaaactg

SEQ ID NO: 4246808 - DNA, 25 bp, Homo sapien
caaacccttagtagtcatgcctcat

SEQ ID NO: 4246809 - DNA, 25 bp, Homo sapien
taatgttccattgcgtggacagacc

SEQ ID NO: 4246810 - DNA, 25 bp, Homo sapien
tagatcttggatgcgttttgagttg

SEQ ID NO: 4246811 - DNA, 25 bp, Homo sapien
cttgcatatcattgtctcggtgcca

SEQ ID NO: 4246812 - DNA, 25 bp, Homo sapien
tagtgtgagtaaaggtccaacctca

SEQ ID NO: 4246813 - DNA, 25 bp, Homo sapien
aaccactgcctaattcaaggttaca

SEQ ID NO: 4246814 - DNA, 25 bp, Homo sapien
tcttgaaaccttgcggaacttgctt

SEQ ID NO: 4246815 - DNA, 25 bp, Homo sapien
cacactgagctgattacctttatcg

SEQ ID NO: 4246816 - DNA, 25 bp, Homo sapien
tccgtatgtctatccttaaaccagt

SEQ ID NO: 4246817 - DNA, 25 bp, Homo sapien
catgtcagttaggatagtattgcca

SEQ ID NO: 4246818 - DNA, 25 bp, Homo sapien
aacatacgccatcacctaggagcag

SEQ ID NO: 4246819 - DNA, 25 bp, Homo sapien
tgcgccagatggtcttacaaggtaa

SEQ ID NO: 4246820 - DNA, 25 bp, Homo sapien
agttctaataggtccactgcgccag

SEQ ID NO: 4246821 - DNA, 25 bp, Homo sapien
ggagcagagcacttatgccagcaca

SEQ ID NO: 4246822 - DNA, 25 bp, Homo sapien
tggagctgcgatggctcaggacaaa

SEQ ID NO: 4246823 - DNA, 25 bp, Homo sapien
ccttcaggtagctggcggagcagca

SEQ ID NO: 4246824 - DNA, 25 bp, Homo sapien
gacgagttgctctttttgctggcac

SEQ ID NO: 4246825 - DNA, 25 bp, Homo sapien
aagcgctgcacgagttcgtggaaga

SEQ ID NO: 4246826 - DNA, 25 bp, Homo sapien
caagatgaggtactaaagaggcaaa

SEQ ID NO: 4246827 - DNA, 25 bp, Homo sapien
taaacatcatttcctgagcgacagc

SEQ ID NO: 4246828 - DNA, 25 bp, Homo sapien
tgagcgacagccttgtccaagtact

SEQ ID NO: 4246829 - DNA, 25 bp, Homo sapien
tggagccacttccagacctatctga

SEQ ID NO: 4246830 - DNA, 25 bp, Homo sapien
gctgaatccatcacagccacctttt

SEQ ID NO: 4246831 - DNA, 25 bp, Homo sapien
tccctcagcagaagctgaatccatc

SEQ ID NO: 4246832 - DNA, 25 bp, Homo sapien
tcagcagaagctgaatccatcacag

SEQ ID NO: 4246833 - DNA, 25 bp, Homo sapien
gcagaagctgaatccatcacagcca

SEQ ID NO: 4246834 - DNA, 25 bp, Homo sapien
caggagatccccaagtcgaaggtgt

SEQ ID NO: 4246835 - DNA, 25 bp, Homo sapien
tccccaagtcgaaggtgtagatcat

SEQ ID NO: 4246836 - DNA, 25 bp, Homo sapien
gagatccccaagtcgaaggtgtaga

SEQ ID NO: 4246837 - DNA, 25 bp, Homo sapien
taacaagcgcccaggagatccccaa

SEQ ID NO: 4246838 - DNA, 25 bp, Homo sapien
tcaccacagggcagaaaccctaagg

SEQ ID NO: 4246839 - DNA, 25 bp, Homo sapien
cattaacattagctaagaacataaa

SEQ ID NO: 4246840 - DNA, 25 bp, Homo sapien
ccatctaattgtgatttgtacccag

SEQ ID NO: 4246841 - DNA, 25 bp, Homo sapien
tataagtgtctgaagttaactgtcc

SEQ ID NO: 4246842 - DNA, 25 bp, Homo sapien
ggcaagcactggttgagctatcaat

SEQ ID NO: 4246843 - DNA, 25 bp, Homo sapien
ttccacgtatttggcaagcactggt

SEQ ID NO: 4246844 - DNA, 25 bp, Homo sapien
gctcccattttccacgtatttggca

SEQ ID NO: 4246845 - DNA, 25 bp, Homo sapien
aagcactggttgagctatcaatgac

SEQ ID NO: 4246846 - DNA, 25 bp, Homo sapien
agtccacagacccctggacattctg

SEQ ID NO: 4246847 - DNA, 25 bp, Homo sapien
aagtccacagacccctggacattct

SEQ ID NO: 4246848 - DNA, 25 bp, Homo sapien
gtccacagacccctggacattctga

SEQ ID NO: 4246849 - DNA, 25 bp, Homo sapien
cttgggcgcgttggcatcccagacg

SEQ ID NO: 4246850 - DNA, 25 bp, Homo sapien
tccttgggcgcgttggcatcccaga

SEQ ID NO: 4246851 - DNA, 25 bp, Homo sapien
gggcgcgttggcatcccagacgctc

SEQ ID NO: 4246852 - DNA, 25 bp, Homo sapien
cttccttgggcgcgttggcatccca

SEQ ID NO: 4246853 - DNA, 25 bp, Homo sapien
tcttgaagctgataaggccgtagca

SEQ ID NO: 4246854 - DNA, 25 bp, Homo sapien
tgcaagtacttgaccaggcggcaca

SEQ ID NO: 4246855 - DNA, 25 bp, Homo sapien
gatgaccggcacgatgtagacagct

SEQ ID NO: 4246856 - DNA, 25 bp, Homo sapien
cgtagaagcggaaggtgatgtccca

SEQ ID NO: 4246857 - DNA, 25 bp, Homo sapien
ggcgctggcgttggctgcctcggcg

SEQ ID NO: 4246858 - DNA, 25 bp, Homo sapien
gctgcctcggcgctccagttggctg

SEQ ID NO: 4246859 - DNA, 25 bp, Homo sapien
cgttggctgcctcggcgctccagtt

SEQ ID NO: 4246860 - DNA, 25 bp, Homo sapien
agttggctgcgagcgcgccctccat

SEQ ID NO: 4246861 - DNA, 25 bp, Homo sapien
gccttcgagccctttacggcttggc

SEQ ID NO: 4246862 - DNA, 25 bp, Homo sapien
ccggatccggcgtgtcggagggtgt

SEQ ID NO: 4246863 - DNA, 25 bp, Homo sapien
agccctttacggcttggcgcggctg

SEQ ID NO: 4246864 - DNA, 25 bp, Homo sapien
ctggagactccacggacggatctgc

SEQ ID NO: 4246865 - DNA, 25 bp, Homo sapien
gccgtgaggagaccgccgcgtttct

SEQ ID NO: 4246866 - DNA, 25 bp, Homo sapien
agggccgtgaggagaccgccgcgtt

SEQ ID NO: 4246867 - DNA, 25 bp, Homo sapien
ggagaccgccgcgtttctcttccga

SEQ ID NO: 4246868 - DNA, 25 bp, Homo sapien
cgggagggccgtgaggagaccgccg

SEQ ID NO: 4246869 - DNA, 25 bp, Homo sapien
gaaacaacagggcacaaccgccggc

SEQ ID NO: 4246870 - DNA, 25 bp, Homo sapien
cagccgccaccccagaaatccccgt

SEQ ID NO: 4246871 - DNA, 25 bp, Homo sapien
atctgaaacaacagggcacaaccgc

SEQ ID NO: 4246872 - DNA, 25 bp, Homo sapien
caaccgccggcctcgggttgctcag

SEQ ID NO: 4246873 - DNA, 25 bp, Homo sapien
aatgagcgggaatcctctaccggcc

SEQ ID NO: 4246874 - DNA, 25 bp, Homo sapien
ccagcgtgccagttcctcgggatgt

SEQ ID NO: 4246875 - DNA, 25 bp, Homo sapien
tcctcgggatgttcagcggcttcca

SEQ ID NO: 4246876 - DNA, 25 bp, Homo sapien
gagccactgcaaatgagcgggaatc

SEQ ID NO: 4246877 - DNA, 25 bp, Homo sapien
caggaacaaggagtgcgaggcaccc

SEQ ID NO: 4246878 - DNA, 25 bp, Homo sapien
actcgggtcccgatggctccaccgg

SEQ ID NO: 4246879 - DNA, 25 bp, Homo sapien
tcaatcccgagaagtcactttacaa

SEQ ID NO: 4246880 - DNA, 25 bp, Homo sapien
gagaagtcactttacaatctctcgg

SEQ ID NO: 4246881 - DNA, 25 bp, Homo sapien
tgccggctgcacctaatgtgatgct

SEQ ID NO: 4246882 - DNA, 25 bp, Homo sapien
tcactggagcctcggttggaatccc

SEQ ID NO: 4246883 - DNA, 25 bp, Homo sapien
gatgctaagctgaggtctctcactg

SEQ ID NO: 4246884 - DNA, 25 bp, Homo sapien
tccgcaggcgaacctaaagttgact

SEQ ID NO: 4246885 - DNA, 25 bp, Homo sapien
tgttgagacgcaggatccttggaat

SEQ ID NO: 4246886 - DNA, 25 bp, Homo sapien
tgttggcccaggttaaggcataaca

SEQ ID NO: 4246887 - DNA, 25 bp, Homo sapien
tccgtgtgtaggcactgttggccca

SEQ ID NO: 4246888 - DNA, 25 bp, Homo sapien
taacaacggatgtggctaaacaatc

SEQ ID NO: 4246889 - DNA, 25 bp, Homo sapien
cccatatgcacagagctgccacaga

SEQ ID NO: 4246890 - DNA, 25 bp, Homo sapien
gcacagagctgccacagacattgcc

SEQ ID NO: 4246891 - DNA, 25 bp, Homo sapien
acagagctgccacagacattgccct

SEQ ID NO: 4246892 - DNA, 25 bp, Homo sapien
gagctgccacagacattgcccttgc

SEQ ID NO: 4246893 - DNA, 25 bp, Homo sapien
atctatttgtgttagccaggagcag

SEQ ID NO: 4246894 - DNA, 25 bp, Homo sapien
tcctgatgaatttacgctttcatca

SEQ ID NO: 4246895 - DNA, 25 bp, Homo sapien
tataaatgtctctcactatctctaa

SEQ ID NO: 4246896 - DNA, 25 bp, Homo sapien
caggcatggtgtcaaatacctatag

SEQ ID NO: 4246897 - DNA, 25 bp, Homo sapien
gacagccttctcagcgtctctatga

SEQ ID NO: 4246898 - DNA, 25 bp, Homo sapien
tagaacatgcccctagcaaagacag

SEQ ID NO: 4246899 - DNA, 25 bp, Homo sapien
tgaacgctaaggctagaggcagaga

SEQ ID NO: 4246900 - DNA, 25 bp, Homo sapien
cccctccagttctagtgagcatgca

SEQ ID NO: 4246901 - DNA, 25 bp, Homo sapien
tgtgtcacggcaagctccaggccac

SEQ ID NO: 4246902 - DNA, 25 bp, Homo sapien
ttccctgtgtcacggcaagctccag

SEQ ID NO: 4246903 - DNA, 25 bp, Homo sapien
ctgtgtcacggcaagctccaggcca

SEQ ID NO: 4246904 - DNA, 25 bp, Homo sapien
cccttccctgtgtcacggcaagctc

SEQ ID NO: 4246905 - DNA, 25 bp, Homo sapien
ggaactggcaccaggtctgtcctcc

SEQ ID NO: 4246906 - DNA, 25 bp, Homo sapien
tggaactggcaccaggtctgtcctc

SEQ ID NO: 4246907 - DNA, 25 bp, Homo sapien
ctggaactggcaccaggtctgtcct

SEQ ID NO: 4246908 - DNA, 25 bp, Homo sapien
cctggaactggcaccaggtctgtcc

SEQ ID NO: 4246909 - DNA, 25 bp, Homo sapien
ttacaaggacagtgatgtagcccag

SEQ ID NO: 4246910 - DNA, 25 bp, Homo sapien
cagacaaggtcgcaaggagaataaa

SEQ ID NO: 4246911 - DNA, 25 bp, Homo sapien
gacaaggtcgcaaggagaataaaaa

SEQ ID NO: 4246912 - DNA, 25 bp, Homo sapien
tgactcacagacaaggtcgcaagga

SEQ ID NO: 4246913 - DNA, 25 bp, Homo sapien
tcacagacaaggtcgcaaggagaat

SEQ ID NO: 4246914 - DNA, 25 bp, Homo sapien
gtcacccaggccttcgtgggcttta

SEQ ID NO: 4246915 - DNA, 25 bp, Homo sapien
ccaggccttcgtgggctttagctgc

SEQ ID NO: 4246916 - DNA, 25 bp, Homo sapien
cacccaggccttcgtgggctttagc

SEQ ID NO: 4246917 - DNA, 25 bp, Homo sapien
gacatgtcacccaggccttcgtggg

SEQ ID NO: 4246918 - DNA, 25 bp, Homo sapien
tactgaacgcaaaacaactctctcc

SEQ ID NO: 4246919 - DNA, 25 bp, Homo sapien
aacgcaaaacaactctctccttctg

SEQ ID NO: 4246920 - DNA, 25 bp, Homo sapien
tttactgaacgcaaaacaactctct

SEQ ID NO: 4246921 - DNA, 25 bp, Homo sapien
ctgaatttactgaacgcaaaacaac

SEQ ID NO: 4246922 - DNA, 25 bp, Homo sapien
tttagcaatctgaaactctgaattc

SEQ ID NO: 4246923 - DNA, 25 bp, Homo sapien
tagcaatctgaaactctgaattcct

SEQ ID NO: 4246924 - DNA, 25 bp, Homo sapien
ctgctttagcaatctgaaactctga

SEQ ID NO: 4246925 - DNA, 25 bp, Homo sapien
gctttagcaatctgaaactctgaat

SEQ ID NO: 4246926 - DNA, 25 bp, Homo sapien
cacaggtccaatagccacaagacat

SEQ ID NO: 4246927 - DNA, 25 bp, Homo sapien
ggaagaggcttacttcacaggtcca

SEQ ID NO: 4246928 - DNA, 25 bp, Homo sapien
aagcatagatggctctctctttgcc

SEQ ID NO: 4246929 - DNA, 25 bp, Homo sapien
aagacatttgagaagcatagatggc

SEQ ID NO: 4246930 - DNA, 25 bp, Homo sapien
gccttcctgctgttcttccatgcag

SEQ ID NO: 4246931 - DNA, 25 bp, Homo sapien
tggccttcctgctgttcttccatgc

SEQ ID NO: 4246932 - DNA, 25 bp, Homo sapien
ggccttcctgctgttcttccatgca

SEQ ID NO: 4246933 - DNA, 25 bp, Homo sapien
ctggccttcctgctgttcttccatg

SEQ ID NO: 4246934 - DNA, 25 bp, Homo sapien
tatcatcagtcatacagggttcccc

SEQ ID NO: 4246935 - DNA, 25 bp, Homo sapien
cacttacatggaggtgatagaccct

SEQ ID NO: 4246936 - DNA, 25 bp, Homo sapien
taacgtaaattgcaagacggaagcc

SEQ ID NO: 4246937 - DNA, 25 bp, Homo sapien
tggccatgcatgatagaccctctgt

SEQ ID NO: 4246938 - DNA, 25 bp, Homo sapien
ggttttgatgatggagtttaccaag

SEQ ID NO: 4246939 - DNA, 25 bp, Homo sapien
gaacaaggttctgaatcagtccctg

SEQ ID NO: 4246940 - DNA, 25 bp, Homo sapien
atcatctattggtgaacaaggttct

SEQ ID NO: 4246941 - DNA, 25 bp, Homo sapien
gatggagtttaccaaggaaagcaag

SEQ ID NO: 4246942 - DNA, 25 bp, Homo sapien
gtctctccagctgaaagtgtctggt

SEQ ID NO: 4246943 - DNA, 25 bp, Homo sapien
ctctgtgtaatagatcagcaaaact

SEQ ID NO: 4246944 - DNA, 25 bp, Homo sapien
tctgtgtaatagatcagcaaaactc

SEQ ID NO: 4246945 - DNA, 25 bp, Homo sapien
tactctgtgtaatagatcagcaaaa

SEQ ID NO: 4246946 - DNA, 25 bp, Homo sapien
actatagtcactactctgtgtaata

SEQ ID NO: 4246947 - DNA, 25 bp, Homo sapien
cttgggatcttgatcccaaaactgc

SEQ ID NO: 4246948 - DNA, 25 bp, Homo sapien
gtttctgtggaaggccttttgtgga

SEQ ID NO: 4246949 - DNA, 25 bp, Homo sapien
gacgttgtgccccttgggatcttga

SEQ ID NO: 4246950 - DNA, 25 bp, Homo sapien
gtggaggatttacaaagacgttgtg

SEQ ID NO: 4246951 - DNA, 25 bp, Homo sapien
caagagataccaggatgtgctcaca

SEQ ID NO: 4246952 - DNA, 25 bp, Homo sapien
tagtgttagaaaagggcacagcctg

SEQ ID NO: 4246953 - DNA, 25 bp, Homo sapien
cgtagtgtgtccatcagtgtcctca

SEQ ID NO: 4246954 - DNA, 25 bp, Homo sapien
tattctactgtcagttccctggctg

SEQ ID NO: 4246955 - DNA, 25 bp, Homo sapien
caataaggtgtgaagtgacagtgcc

SEQ ID NO: 4246956 - DNA, 25 bp, Homo sapien
aggaagggcccctgtaactgccaga

SEQ ID NO: 4246957 - DNA, 25 bp, Homo sapien
ggcaatttgcacctaggaaaggaag

SEQ ID NO: 4246958 - DNA, 25 bp, Homo sapien
taaagctgctggacaggcaatttgc

SEQ ID NO: 4246959 - DNA, 25 bp, Homo sapien
ggcccacaaccaagcagcaattagg

SEQ ID NO: 4246960 - DNA, 25 bp, Homo sapien
cacagagtggatggcacatacacgg

SEQ ID NO: 4246961 - DNA, 25 bp, Homo sapien
tacacggaggcaattccacgccatg

SEQ ID NO: 4246962 - DNA, 25 bp, Homo sapien
aagtgctagctggtaattagttccc

SEQ ID NO: 4246963 - DNA, 25 bp, Homo sapien
tgaagatttaaagatgttgtgcatc

SEQ ID NO: 4246964 - DNA, 25 bp, Homo sapien
catctgacacagaggttcaaagcaa

SEQ ID NO: 4246965 - DNA, 25 bp, Homo sapien
tcaaagcaaaggtccaaagcaaaat

SEQ ID NO: 4246966 - DNA, 25 bp, Homo sapien
gttgtgcatctgacacagaggttca

SEQ ID NO: 4246967 - DNA, 25 bp, Homo sapien
ctgccagaagaaaataccacagtct

SEQ ID NO: 4246968 - DNA, 25 bp, Homo sapien
ttggaatcaaaggagtcagaagatg

SEQ ID NO: 4246969 - DNA, 25 bp, Homo sapien
caaaggagtcagaagatgcatgcat

SEQ ID NO: 4246970 - DNA, 25 bp, Homo sapien
ttgtgctgccagaagaaaataccac

SEQ ID NO: 4246971 - DNA, 25 bp, Homo sapien
caaggtaggactttccagcagggcc

SEQ ID NO: 4246972 - DNA, 25 bp, Homo sapien
tagaccagtaatcctcaacatgagg

SEQ ID NO: 4246973 - DNA, 25 bp, Homo sapien
ggaacacagcaaggccaagagactg

SEQ ID NO: 4246974 - DNA, 25 bp, Homo sapien
tataagagctgtgccctcacgactt

SEQ ID NO: 4246975 - DNA, 25 bp, Homo sapien
gcatcactgccattctgagctgatg

SEQ ID NO: 4246976 - DNA, 25 bp, Homo sapien
cactgccattctgagctgatgttga

SEQ ID NO: 4246977 - DNA, 25 bp, Homo sapien
catcactgccattctgagctgatgt

SEQ ID NO: 4246978 - DNA, 25 bp, Homo sapien
tcactgccattctgagctgatgttg

SEQ ID NO: 4246979 - DNA, 25 bp, Homo sapien
gaggccgaagaagaaaccctactga

SEQ ID NO: 4246980 - DNA, 25 bp, Homo sapien
tgttgtagtctaaagcgtgcccctt

SEQ ID NO: 4246981 - DNA, 25 bp, Homo sapien
tgcagtatcttgtgacggcagccct

SEQ ID NO: 4246982 - DNA, 25 bp, Homo sapien
ggaagtcttaactgccggtatctca

SEQ ID NO: 4246983 - DNA, 25 bp, Homo sapien
taatgcacccctcaggatttcatgc

SEQ ID NO: 4246984 - DNA, 25 bp, Homo sapien
caaggtcaacggagacagtctttgg

SEQ ID NO: 4246985 - DNA, 25 bp, Homo sapien
cccaaggcataccaaaaagacaagg

SEQ ID NO: 4246986 - DNA, 25 bp, Homo sapien
ggaagcatctggctactggtagaca

SEQ ID NO: 4246987 - DNA, 25 bp, Homo sapien
ggtggcgtgcatcggtacttacaca

SEQ ID NO: 4246988 - DNA, 25 bp, Homo sapien
ttaacctcgggcaacaaccatcatg

SEQ ID NO: 4246989 - DNA, 25 bp, Homo sapien
tctgcaaagctggtacctgtgtgaa

SEQ ID NO: 4246990 - DNA, 25 bp, Homo sapien
aaatccctgtgccaaagtgccaaag

SEQ ID NO: 4246991 - DNA, 25 bp, Homo sapien
taattcctattacgcttgtttcttg

SEQ ID NO: 4246992 - DNA, 25 bp, Homo sapien
attcctattacgcttgtttcttggt

SEQ ID NO: 4246993 - DNA, 25 bp, Homo sapien
cctattacgcttgtttcttggttca

SEQ ID NO: 4246994 - DNA, 25 bp, Homo sapien
tattacgcttgtttcttggttcaat

SEQ ID NO: 4246995 - DNA, 25 bp, Homo sapien
cttgtgcggcgattctgtcttggac

SEQ ID NO: 4246996 - DNA, 25 bp, Homo sapien
tctgtcttggacttatttctgtgtc

SEQ ID NO: 4246997 - DNA, 25 bp, Homo sapien
tgtgcggcgattctgtcttggactt

SEQ ID NO: 4246998 - DNA, 25 bp, Homo sapien
ggcgattctgtcttggacttatttc

SEQ ID NO: 4246999 - DNA, 25 bp, Homo sapien
gaaaggtgaccactctgacaaggct

SEQ ID NO: 4247000 - DNA, 25 bp, Homo sapien
tgattacagccagaaaggtgaccac

SEQ ID NO: 4247001 - DNA, 25 bp, Homo sapien
caaggctgagaagtgttaactctgg

SEQ ID NO: 4247002 - DNA, 25 bp, Homo sapien
gagaagtgttaactctggcagagcc

SEQ ID NO: 4247003 - DNA, 25 bp, Homo sapien
gctgcaaagctagtcaaatgcctct

SEQ ID NO: 4247004 - DNA, 25 bp, Homo sapien
gcaagctccaagtcaagtaaagtaa

SEQ ID NO: 4247005 - DNA, 25 bp, Homo sapien
tggcgtatcatttgccccaactgtt

SEQ ID NO: 4247006 - DNA, 25 bp, Homo sapien
caaaatgtgaagtaacaccaggacc

SEQ ID NO: 4247007 - DNA, 25 bp, Homo sapien
aactacagttattacataggattcc

SEQ ID NO: 4247008 - DNA, 25 bp, Homo sapien
tatatagaaacaagtagtaaactga

SEQ ID NO: 4247009 - DNA, 25 bp, Homo sapien
tataatttctcaggtcaaagtgcat

SEQ ID NO: 4247010 - DNA, 25 bp, Homo sapien
gaaataacatctgatacataactac

SEQ ID NO: 4247011 - DNA, 25 bp, Homo sapien
aaaagatctcttatgatgtctgaac

SEQ ID NO: 4247012 - DNA, 25 bp, Homo sapien
tctaaaagatctcttatgatgtctg

SEQ ID NO: 4247013 - DNA, 25 bp, Homo sapien
cttctaaaagatctcttatgatgtc

SEQ ID NO: 4247014 - DNA, 25 bp, Homo sapien
tcttcttctaaaagatctcttatga

SEQ ID NO: 4247015 - DNA, 25 bp, Homo sapien
tttgatttccactgtttctatgaca

SEQ ID NO: 4247016 - DNA, 25 bp, Homo sapien
ttctatgacaccagggtgtaaattc

SEQ ID NO: 4247017 - DNA, 25 bp, Homo sapien
ctttgatttccactgtttctatgac

SEQ ID NO: 4247018 - DNA, 25 bp, Homo sapien
ctatgacaccagggtgtaaattcat

SEQ ID NO: 4247019 - DNA, 25 bp, Homo sapien
gaaaaaacgcaaacatctgctataa

SEQ ID NO: 4247020 - DNA, 25 bp, Homo sapien
aaaaacgcaaacatctgctataaaa

SEQ ID NO: 4247021 - DNA, 25 bp, Homo sapien
aaaaaacgcaaacatctgctataaa

SEQ ID NO: 4247022 - DNA, 25 bp, Homo sapien
ctcctgagtagttataggtgcatac

SEQ ID NO: 4247023 - DNA, 25 bp, Homo sapien
tcctgagtagttataggtgcatacc

SEQ ID NO: 4247024 - DNA, 25 bp, Homo sapien
catctcctgagtagttataggtgca

SEQ ID NO: 4247025 - DNA, 25 bp, Homo sapien
tgtttttatctcctttactcatcgt

SEQ ID NO: 4247026 - DNA, 25 bp, Homo sapien
tccaacggtaggaaaagtatctaca

SEQ ID NO: 4247027 - DNA, 25 bp, Homo sapien
cctttactcatcgtcttgacaaaaa

SEQ ID NO: 4247028 - DNA, 25 bp, Homo sapien
caacggtaggaaaagtatctacata

SEQ ID NO: 4247029 - DNA, 25 bp, Homo sapien
gtgatccctgcactaccttcccaaa

SEQ ID NO: 4247030 - DNA, 25 bp, Homo sapien
tgtgatccctgcactaccttcccaa

SEQ ID NO: 4247031 - DNA, 25 bp, Homo sapien
atccctgcactaccttcccaaatcc

SEQ ID NO: 4247032 - DNA, 25 bp, Homo sapien
tgatccctgcactaccttcccaaat

SEQ ID NO: 4247033 - DNA, 25 bp, Homo sapien
tatcaatacagctagaagaatcctc

SEQ ID NO: 4247034 - DNA, 25 bp, Homo sapien
gagtccagctttgattgagaaaagt

SEQ ID NO: 4247035 - DNA, 25 bp, Homo sapien
gaaagaacttcttgaatatcaatac

SEQ ID NO: 4247036 - DNA, 25 bp, Homo sapien
gggagtccagctttgattgagaaaa

SEQ ID NO: 4247037 - DNA, 25 bp, Homo sapien
tagcctgatccaccagaagctgaaa

SEQ ID NO: 4247038 - DNA, 25 bp, Homo sapien
gcatacagaagatagcttttctgta

SEQ ID NO: 4247039 - DNA, 25 bp, Homo sapien
gaagctgaaattcactcttatgttt

SEQ ID NO: 4247040 - DNA, 25 bp, Homo sapien
tccttttctagcctgatccaccaga

SEQ ID NO: 4247041 - DNA, 25 bp, Homo sapien
gaaaacagcggaagaatacctttga

SEQ ID NO: 4247042 - DNA, 25 bp, Homo sapien
aaacagccaaattatcaatcaataa

SEQ ID NO: 4247043 - DNA, 25 bp, Homo sapien
taacctaaagttctacaaacagcca

SEQ ID NO: 4247044 - DNA, 25 bp, Homo sapien
acgggttatttcctgttatgtatgg

SEQ ID NO: 4247045 - DNA, 25 bp, Homo sapien
gatttcatctatttccttttctgtt

SEQ ID NO: 4247046 - DNA, 25 bp, Homo sapien
tcatctatttccttttctgtttggt

SEQ ID NO: 4247047 - DNA, 25 bp, Homo sapien
catctatttccttttctgtttggtc

SEQ ID NO: 4247048 - DNA, 25 bp, Homo sapien
tttcatctatttccttttctgtttg

SEQ ID NO: 4247049 - DNA, 25 bp, Homo sapien
agtttactagcttcaagacgcatcc

SEQ ID NO: 4247050 - DNA, 25 bp, Homo sapien
gcttcaagacgcatcctagtcttct

SEQ ID NO: 4247051 - DNA, 25 bp, Homo sapien
cttctctatattttcgatttctcga

SEQ ID NO: 4247052 - DNA, 25 bp, Homo sapien
tattttcgatttctcgaactatttc

SEQ ID NO: 4247053 - DNA, 25 bp, Homo sapien
ggtgcaccgggagtgagctgaagca

SEQ ID NO: 4247054 - DNA, 25 bp, Homo sapien
aggacagtgggagcggtgcaccggg

SEQ ID NO: 4247055 - DNA, 25 bp, Homo sapien
gcggtgcaccgggagtgagctgaag

SEQ ID NO: 4247056 - DNA, 25 bp, Homo sapien
tgggagcggtgcaccgggagtgagc

SEQ ID NO: 4247057 - DNA, 25 bp, Homo sapien
tatatacagttttgggcagcggctt

SEQ ID NO: 4247058 - DNA, 25 bp, Homo sapien
tacatgtgtacaaattcttggtgcc

SEQ ID NO: 4247059 - DNA, 25 bp, Homo sapien
caaagcatcgcattgggcattgtac

SEQ ID NO: 4247060 - DNA, 25 bp, Homo sapien
tttctttaaatcacgatcagagagc

SEQ ID NO: 4247061 - DNA, 25 bp, Homo sapien
ctttggccaagaggctttttggtag

SEQ ID NO: 4247062 - DNA, 25 bp, Homo sapien
ctttctttggccaagaggctttttg

SEQ ID NO: 4247063 - DNA, 25 bp, Homo sapien
tctttggccaagaggctttttggta

SEQ ID NO: 4247064 - DNA, 25 bp, Homo sapien
cttgctttctttggccaagaggctt

SEQ ID NO: 4247065 - DNA, 25 bp, Homo sapien
tctggaatgttaaccccgcaaacag

SEQ ID NO: 4247066 - DNA, 25 bp, Homo sapien
ttaaccccgcaaacaggacaatcca

SEQ ID NO: 4247067 - DNA, 25 bp, Homo sapien
gctgtctaaatgcttattaatgtga

SEQ ID NO: 4247068 - DNA, 25 bp, Homo sapien
tctcttcgcgtgataaacagctgtc

SEQ ID NO: 4247069 - DNA, 25 bp, Homo sapien
agtttctgcctaaaaggtgctctaa

SEQ ID NO: 4247070 - DNA, 25 bp, Homo sapien
tgggtataccaaagatgtctaagag

SEQ ID NO: 4247071 - DNA, 25 bp, Homo sapien
tgtctaagagtttctgcctaaaagg

SEQ ID NO: 4247072 - DNA, 25 bp, Homo sapien
gcactacgtgtggtatgggtatacc

SEQ ID NO: 4247073 - DNA, 25 bp, Homo sapien
ggaggcattcaagtggtggtaaaat

SEQ ID NO: 4247074 - DNA, 25 bp, Homo sapien
aatgggaactgatatgttgaatgag

SEQ ID NO: 4247075 - DNA, 25 bp, Homo sapien
gaacagtgaggaggcattcaagtgg

SEQ ID NO: 4247076 - DNA, 25 bp, Homo sapien
aagagcttttcaagattaaatggga

SEQ ID NO: 4247077 - DNA, 25 bp, Homo sapien
gtttcctttttgtagcagtcagcct

SEQ ID NO: 4247078 - DNA, 25 bp, Homo sapien
tttcctttttgtagcagtcagcctg

SEQ ID NO: 4247079 - DNA, 25 bp, Homo sapien
tcctttttgtagcagtcagcctgaa

SEQ ID NO: 4247080 - DNA, 25 bp, Homo sapien
ttcctttttgtagcagtcagcctga

SEQ ID NO: 4247081 - DNA, 25 bp, Homo sapien
tatctacaacaatgtctgaggtttg

SEQ ID NO: 4247082 - DNA, 25 bp, Homo sapien
aacatatctacaacaatgtctgagg

SEQ ID NO: 4247083 - DNA, 25 bp, Homo sapien
gatatggtaaaatctggtttgtcct

SEQ ID NO: 4247084 - DNA, 25 bp, Homo sapien
gtctgaggtttgtgatatggtaaaa

SEQ ID NO: 4247085 - DNA, 25 bp, Homo sapien
gagcgatctcttctacagaacgtgt

SEQ ID NO: 4247086 - DNA, 25 bp, Homo sapien
gcagggctcgcctctttttgagggc

SEQ ID NO: 4247087 - DNA, 25 bp, Homo sapien
aacgtgtctctttggtctttgcagc

SEQ ID NO: 4247088 - DNA, 25 bp, Homo sapien
tcaggacgcttagcctctgagggat

SEQ ID NO: 4247089 - DNA, 25 bp, Homo sapien
aaagactgtctggaggctacaggag

SEQ ID NO: 4247090 - DNA, 25 bp, Homo sapien
tgtctggaggctacaggagtatata

SEQ ID NO: 4247091 - DNA, 25 bp, Homo sapien
tctggaggctacaggagtatatact

SEQ ID NO: 4247092 - DNA, 25 bp, Homo sapien
atttggctggtgactctaaagcaaa

SEQ ID NO: 4247093 - DNA, 25 bp, Homo sapien
gctttttaccagttcatctaatatg

SEQ ID NO: 4247094 - DNA, 25 bp, Homo sapien
taatatgcggttatttttcagatcc

SEQ ID NO: 4247095 - DNA, 25 bp, Homo sapien
ttttaccagttcatctaatatgcgg

SEQ ID NO: 4247096 - DNA, 25 bp, Homo sapien
tatttttcagatccggctctgtgac

SEQ ID NO: 4247097 - DNA, 25 bp, Homo sapien
acacagcaagttggacactgagttt

SEQ ID NO: 4247098 - DNA, 25 bp, Homo sapien
cagcaagttggacactgagttttat

SEQ ID NO: 4247099 - DNA, 25 bp, Homo sapien
cacagcaagttggacactgagtttt

SEQ ID NO: 4247100 - DNA, 25 bp, Homo sapien
cacacagcaagttggacactgagtt

SEQ ID NO: 4247101 - DNA, 25 bp, Homo sapien
aactggtttctgagctgcctgaatc

SEQ ID NO: 4247102 - DNA, 25 bp, Homo sapien
attgcgggggctacttgagaaactg

SEQ ID NO: 4247103 - DNA, 25 bp, Homo sapien
gaaactggtttctgagctgcctgaa

SEQ ID NO: 4247104 - DNA, 25 bp, Homo sapien
tttctgagctgcctgaatctataca

SEQ ID NO: 4247105 - DNA, 25 bp, Homo sapien
gcaaattccacaccgcagcaaatca

SEQ ID NO: 4247106 - DNA, 25 bp, Homo sapien
tactcgaagcaaattccacaccgca

SEQ ID NO: 4247107 - DNA, 25 bp, Homo sapien
ttgcaatgttgaaatactcgaagca

SEQ ID NO: 4247108 - DNA, 25 bp, Homo sapien
cacaccgcagcaaatcatctattgt

SEQ ID NO: 4247109 - DNA, 25 bp, Homo sapien
gccaccgagactcggccagggagtc

SEQ ID NO: 4247110 - DNA, 25 bp, Homo sapien
ccaccgagactcggccagggagtcc

SEQ ID NO: 4247111 - DNA, 25 bp, Homo sapien
ggccaccgagactcggccagggagt

SEQ ID NO: 4247112 - DNA, 25 bp, Homo sapien
aggccaccgagactcggccagggag

SEQ ID NO: 4247113 - DNA, 25 bp, Homo sapien
tagcctccggcgctccaacaccact

SEQ ID NO: 4247114 - DNA, 25 bp, Homo sapien
cacccactagcctccggcgctccaa

SEQ ID NO: 4247115 - DNA, 25 bp, Homo sapien
ggcgctccaacaccactcgaaattc

SEQ ID NO: 4247116 - DNA, 25 bp, Homo sapien
aacaccactcgaaattccccgcgct

SEQ ID NO: 4247117 - DNA, 25 bp, Homo sapien
ggttccagccgatagccaaaatatg

SEQ ID NO: 4247118 - DNA, 25 bp, Homo sapien
taaccccatggttgtgagccagcca

SEQ ID NO: 4247119 - DNA, 25 bp, Homo sapien
tcagacactctataggacgggcgtt

SEQ ID NO: 4247120 - DNA, 25 bp, Homo sapien
gaaaatcagctaggcaacacctcgg

SEQ ID NO: 4247121 - DNA, 25 bp, Homo sapien
tgatgaacaagtaggtaaacaccac

SEQ ID NO: 4247122 - DNA, 25 bp, Homo sapien
gactgaacgtcggttacacataaag

SEQ ID NO: 4247123 - DNA, 25 bp, Homo sapien
ccaaaaagctctttagtggcagctg

SEQ ID NO: 4247124 - DNA, 25 bp, Homo sapien
aggcccaggaaactagaccaggaat

SEQ ID NO: 4247125 - DNA, 25 bp, Homo sapien
gagagggcaccacttcatccaatgg

SEQ ID NO: 4247126 - DNA, 25 bp, Homo sapien
catgactttaagagcctgacgcagc

SEQ ID NO: 4247127 - DNA, 25 bp, Homo sapien
tgcgtttcatgcaagacggcaccag

SEQ ID NO: 4247128 - DNA, 25 bp, Homo sapien
aatggaatcgaaggagagcgacccg

SEQ ID NO: 4247129 - DNA, 25 bp, Homo sapien
tcgtctgttgacacgcgagaggtcc

SEQ ID NO: 4247130 - DNA, 25 bp, Homo sapien
gaagccatgtggtattttgcctcca

SEQ ID NO: 4247131 - DNA, 25 bp, Homo sapien
ccagtgacgatatgcgggagaagcc

SEQ ID NO: 4247132 - DNA, 25 bp, Homo sapien
tggaaggccacgacttctggagaca

SEQ ID NO: 4247133 - DNA, 25 bp, Homo sapien
catctggcgcctgcttgaccgtgtt

SEQ ID NO: 4247134 - DNA, 25 bp, Homo sapien
atggtgcccgacttgtccgctgagc

SEQ ID NO: 4247135 - DNA, 25 bp, Homo sapien
gagttcccgcaactcgtgcagagcc

SEQ ID NO: 4247136 - DNA, 25 bp, Homo sapien
gtcatcatctcggtggaggagctgc

SEQ ID NO: 4247137 - DNA, 25 bp, Homo sapien
tcaaccactccgcttgaaggaagcc

SEQ ID NO: 4247138 - DNA, 25 bp, Homo sapien
ccttatccaaaaggaggcgctgtgg

SEQ ID NO: 4247139 - DNA, 25 bp, Homo sapien
ttgcattagtccgagaggtggcgct

SEQ ID NO: 4247140 - DNA, 25 bp, Homo sapien
catggcaggcttcaatctggctggg

SEQ ID NO: 4247141 - DNA, 25 bp, Homo sapien
ccatgagcctggcataaaggccaag

SEQ ID NO: 4247142 - DNA, 25 bp, Homo sapien
aaggtggctccccgctccacggatt

SEQ ID NO: 4247143 - DNA, 25 bp, Homo sapien
ttctctggcttagccatgagcctgg

SEQ ID NO: 4247144 - DNA, 25 bp, Homo sapien
ggcataaaggccaaggtggctcccc

SEQ ID NO: 4247145 - DNA, 25 bp, Homo sapien
cctctggggcttttggctgcccagc

SEQ ID NO: 4247146 - DNA, 25 bp, Homo sapien
gcccagcctgccttcccgctggccc

SEQ ID NO: 4247147 - DNA, 25 bp, Homo sapien
agcctgccttcccgctggcccttac

SEQ ID NO: 4247148 - DNA, 25 bp, Homo sapien
ctgccctctggggcttttggctgcc

SEQ ID NO: 4247149 - DNA, 25 bp, Homo sapien
tcatcgagtgcccttcggagagcgc

SEQ ID NO: 4247150 - DNA, 25 bp, Homo sapien
ggtagttgatgctgccagcgctccc

SEQ ID NO: 4247151 - DNA, 25 bp, Homo sapien
tggctgctccatcagatcgtaaccg

SEQ ID NO: 4247152 - DNA, 25 bp, Homo sapien
gaaccgcaggtcgacctcatcgagt

SEQ ID NO: 4247153 - DNA, 25 bp, Homo sapien
gaaattggtaatactgctccctcca

SEQ ID NO: 4247154 - DNA, 25 bp, Homo sapien
cacacatagggagcgaagaaattgg

SEQ ID NO: 4247155 - DNA, 25 bp, Homo sapien
gacacaggtaggaaaaatacttgcc

SEQ ID NO: 4247156 - DNA, 25 bp, Homo sapien
tgaacaggattgacaccagcaggga

SEQ ID NO: 4247157 - DNA, 25 bp, Homo sapien
tcaggctgtcggagaaggcatcatc

SEQ ID NO: 4247158 - DNA, 25 bp, Homo sapien
ttgtcatccagcaatggcccactgc

SEQ ID NO: 4247159 - DNA, 25 bp, Homo sapien
ccccaaagccgtaatccgagatgtg

SEQ ID NO: 4247160 - DNA, 25 bp, Homo sapien
cgtaatccgagatgtgctccgtggg

SEQ ID NO: 4247161 - DNA, 25 bp, Homo sapien
tcctgtacaactatgtactgatggg

SEQ ID NO: 4247162 - DNA, 25 bp, Homo sapien
aacttggcaatagcctcgatctgct

SEQ ID NO: 4247163 - DNA, 25 bp, Homo sapien
ttgaaggatagctcacgcggggacc

SEQ ID NO: 4247164 - DNA, 25 bp, Homo sapien
gatgagtccatccacgccgttgtgc

SEQ ID NO: 4247165 - DNA, 25 bp, Homo sapien
acttctaagggccacggatggcatg

SEQ ID NO: 4247166 - DNA, 25 bp, Homo sapien
cacggatggcatggaaaaatcaaag

SEQ ID NO: 4247167 - DNA, 25 bp, Homo sapien
gtgcacttctaagggccacggatgg

SEQ ID NO: 4247168 - DNA, 25 bp, Homo sapien
tggtgcacttctaagggccacggat

SEQ ID NO: 4247169 - DNA, 25 bp, Homo sapien
catcaccagagcctccagcagtcac

SEQ ID NO: 4247170 - DNA, 25 bp, Homo sapien
caccagagcctccagcagtcactgg

SEQ ID NO: 4247171 - DNA, 25 bp, Homo sapien
cagagcctccagcagtcactggaca

SEQ ID NO: 4247172 - DNA, 25 bp, Homo sapien
gagcctccagcagtcactggacagc

SEQ ID NO: 4247173 - DNA, 25 bp, Homo sapien
ccacgcccagttggtacagaatctt

SEQ ID NO: 4247174 - DNA, 25 bp, Homo sapien
cattggctgattcatgcatggcaaa

SEQ ID NO: 4247175 - DNA, 25 bp, Homo sapien
acagaatctttgagacaagaaaggc

SEQ ID NO: 4247176 - DNA, 25 bp, Homo sapien
gatacacaaacaactaaattgttcc

SEQ ID NO: 4247177 - DNA, 25 bp, Homo sapien
cataccgggtgctgtcaagagcaaa

SEQ ID NO: 4247178 - DNA, 25 bp, Homo sapien
gacagatattgatgatcccctaaat

SEQ ID NO: 4247179 - DNA, 25 bp, Homo sapien
gagcaaagaagacagatattgatga

SEQ ID NO: 4247180 - DNA, 25 bp, Homo sapien
cattcataccgggtgctgtcaagag

SEQ ID NO: 4247181 - DNA, 25 bp, Homo sapien
aaagctctgactcatgcattctggg

SEQ ID NO: 4247182 - DNA, 25 bp, Homo sapien
tgagagccttcagggaacatgaaac

SEQ ID NO: 4247183 - DNA, 25 bp, Homo sapien
gccactgtgaacctttaccctgaga

SEQ ID NO: 4247184 - DNA, 25 bp, Homo sapien
tgtggcttgcctcagattacatgac

SEQ ID NO: 4247185 - DNA, 25 bp, Homo sapien
agaagccttctgcccatcagcccga

SEQ ID NO: 4247186 - DNA, 25 bp, Homo sapien
agagaagccttctgcccatcagccc

SEQ ID NO: 4247187 - DNA, 25 bp, Homo sapien
agccttctgcccatcagcccgagga

SEQ ID NO: 4247188 - DNA, 25 bp, Homo sapien
aagccttctgcccatcagcccgagg

SEQ ID NO: 4247189 - DNA, 25 bp, Homo sapien
tgaagaggtctatgtgggccagccc

SEQ ID NO: 4247190 - DNA, 25 bp, Homo sapien
ttaggatttgtacctgggccaggca

SEQ ID NO: 4247191 - DNA, 25 bp, Homo sapien
tactctgcctgacggataagttggc

SEQ ID NO: 4247192 - DNA, 25 bp, Homo sapien
gatcctacacgagaatgaaaccagc

SEQ ID NO: 4247193 - DNA, 25 bp, Homo sapien
agtgccattgtcatggtcaacttca

SEQ ID NO: 4247194 - DNA, 25 bp, Homo sapien
tcatcgctggtatgaggctcagtgc

SEQ ID NO: 4247195 - DNA, 25 bp, Homo sapien
tcgatggcccctggctcgctgtgtg

SEQ ID NO: 4247196 - DNA, 25 bp, Homo sapien
ggctcagtgccattgtcatggtcaa

SEQ ID NO: 4247197 - DNA, 25 bp, Homo sapien
ggcactgagagtagactggcaacca

SEQ ID NO: 4247198 - DNA, 25 bp, Homo sapien
tagataaggcggacaaggttcctgg

SEQ ID NO: 4247199 - DNA, 25 bp, Homo sapien
gatgaagctaacaagggctgccctg

SEQ ID NO: 4247200 - DNA, 25 bp, Homo sapien
ggaaacacgggaatgggactcactg

SEQ ID NO: 4247201 - DNA, 25 bp, Homo sapien
gggatccatcatgttctcgtcgcta

SEQ ID NO: 4247202 - DNA, 25 bp, Homo sapien
aggtccctctagctcccgggggctg

SEQ ID NO: 4247203 - DNA, 25 bp, Homo sapien
gttctcgtcgctatactgggagagg

SEQ ID NO: 4247204 - DNA, 25 bp, Homo sapien
tcagggatgtgcatgagggtaggcc

SEQ ID NO: 4247205 - DNA, 25 bp, Homo sapien
accctctcggctgggttctccagtt

SEQ ID NO: 4247206 - DNA, 25 bp, Homo sapien
gaccacaatgaccacgcggggaagg

SEQ ID NO: 4247207 - DNA, 25 bp, Homo sapien
cgaggatttgttggatctggtgcac

SEQ ID NO: 4247208 - DNA, 25 bp, Homo sapien
tgttggatctggtgcaccctctcgg

SEQ ID NO: 4247209 - DNA, 25 bp, Homo sapien
cagagtactgtgagaaacaccccaa

SEQ ID NO: 4247210 - DNA, 25 bp, Homo sapien
ggctgcaaatatctctcagagtact

SEQ ID NO: 4247211 - DNA, 25 bp, Homo sapien
tctctcagagtactgtgagaaacac

SEQ ID NO: 4247212 - DNA, 25 bp, Homo sapien
caaatatctctcagagtactgtgag

SEQ ID NO: 4247213 - DNA, 25 bp, Homo sapien
tatcaaatcttgaaacctttcctta

SEQ ID NO: 4247214 - DNA, 25 bp, Homo sapien
tccagtcctcggaaatacagtttta

SEQ ID NO: 4247215 - DNA, 25 bp, Homo sapien
caccagcgactgaattgatatctcg

SEQ ID NO: 4247216 - DNA, 25 bp, Homo sapien
cgttcattttgatcgtccacaaggg

SEQ ID NO: 4247217 - DNA, 25 bp, Homo sapien
tcctcctgaacagcgaagagcacct

SEQ ID NO: 4247218 - DNA, 25 bp, Homo sapien
cagcgagccttctgctgttttgatg

SEQ ID NO: 4247219 - DNA, 25 bp, Homo sapien
cactgtgaatttccatgggggaggt

SEQ ID NO: 4247220 - DNA, 25 bp, Homo sapien
gttttgatgttcagagacatccaca

SEQ ID NO: 4247221 - DNA, 25 bp, Homo sapien
gagatcctggcactctgaagatccc

SEQ ID NO: 4247222 - DNA, 25 bp, Homo sapien
agatcctggcactctgaagatcccc

SEQ ID NO: 4247223 - DNA, 25 bp, Homo sapien
ctgagatcctggcactctgaagatc

SEQ ID NO: 4247224 - DNA, 25 bp, Homo sapien
tgagatcctggcactctgaagatcc

SEQ ID NO: 4247225 - DNA, 25 bp, Homo sapien
tataaattgatgtaacggatgcagc

SEQ ID NO: 4247226 - DNA, 25 bp, Homo sapien
tacaagcggtatagcttgtcctgaa

SEQ ID NO: 4247227 - DNA, 25 bp, Homo sapien
taacggatgcagctctcgactacaa

SEQ ID NO: 4247228 - DNA, 25 bp, Homo sapien
gcagctctcgactacaagcggtata

SEQ ID NO: 4247229 - DNA, 25 bp, Homo sapien
gttcctggttcgagcatttcttctt

SEQ ID NO: 4247230 - DNA, 25 bp, Homo sapien
ctggttcctggttcgagcatttctt

SEQ ID NO: 4247231 - DNA, 25 bp, Homo sapien
tggttcctggttcgagcatttcttc

SEQ ID NO: 4247232 - DNA, 25 bp, Homo sapien
tcctggttcgagcatttcttcttcc

SEQ ID NO: 4247233 - DNA, 25 bp, Homo sapien
gccgttaaagagtttatggctatac

SEQ ID NO: 4247234 - DNA, 25 bp, Homo sapien
tgagagaggcctaggtctcctcatt

SEQ ID NO: 4247235 - DNA, 25 bp, Homo sapien
taatgaatgcttccatactgccgtt

SEQ ID NO: 4247236 - DNA, 25 bp, Homo sapien
gaatgcttccatactgccgttaaag

SEQ ID NO: 4247237 - DNA, 25 bp, Homo sapien
cagtcgggcccttggaggctattca

SEQ ID NO: 4247238 - DNA, 25 bp, Homo sapien
gaaatcttccagactatgcagccaa

SEQ ID NO: 4247239 - DNA, 25 bp, Homo sapien
tctaatccagaccacgagggcatgt

SEQ ID NO: 4247240 - DNA, 25 bp, Homo sapien
tctgtgagcgggcaagaaatcttcc

SEQ ID NO: 4247241 - DNA, 25 bp, Homo sapien
acagcagccccaaaagcgccccttc

SEQ ID NO: 4247242 - DNA, 25 bp, Homo sapien
gcagccccaaaagcgccccttccat

SEQ ID NO: 4247243 - DNA, 25 bp, Homo sapien
acacagcagccccaaaagcgcccct

SEQ ID NO: 4247244 - DNA, 25 bp, Homo sapien
ggccagcgcaaagggagggtgcccc

SEQ ID NO: 4247245 - DNA, 25 bp, Homo sapien
gctttgtcagtctaatgctagaaca

SEQ ID NO: 4247246 - DNA, 25 bp, Homo sapien
tcagtctaatgctagaacaagcaaa

SEQ ID NO: 4247247 - DNA, 25 bp, Homo sapien
gggcgtggctttgtcagtctaatgc

SEQ ID NO: 4247248 - DNA, 25 bp, Homo sapien
gtggctttgtcagtctaatgctaga

SEQ ID NO: 4247249 - DNA, 25 bp, Homo sapien
cagatggcctggtcctggtggccat

SEQ ID NO: 4247250 - DNA, 25 bp, Homo sapien
gcctggtcctggtggccattttgct

SEQ ID NO: 4247251 - DNA, 25 bp, Homo sapien
tcagatggcctggtcctggtggcca

SEQ ID NO: 4247252 - DNA, 25 bp, Homo sapien
atggcctggtcctggtggccatttt

SEQ ID NO: 4247253 - DNA, 25 bp, Homo sapien
gaatcaccagttgacactaagaagg

SEQ ID NO: 4247254 - DNA, 25 bp, Homo sapien
gaatagaagaaccaaaacgctcagg

SEQ ID NO: 4247255 - DNA, 25 bp, Homo sapien
taacgctaccctactcttagaagag

SEQ ID NO: 4247256 - DNA, 25 bp, Homo sapien
aaaggccactgacgcagctgtaacg

SEQ ID NO: 4247257 - DNA, 25 bp, Homo sapien
cagaagagagactggtagagcaatc

SEQ ID NO: 4247258 - DNA, 25 bp, Homo sapien
tcagaagagagactggtagagcaat

SEQ ID NO: 4247259 - DNA, 25 bp, Homo sapien
caaggcgtagttgaaggctaaataa

SEQ ID NO: 4247260 - DNA, 25 bp, Homo sapien
ttagagcaaggcgtagttgaaggct

SEQ ID NO: 4247261 - DNA, 25 bp, Homo sapien
gagcaaggcgtagttgaaggctaaa

SEQ ID NO: 4247262 - DNA, 25 bp, Homo sapien
tagagcaaggcgtagttgaaggcta

SEQ ID NO: 4247263 - DNA, 25 bp, Homo sapien
tggaccaggagttatgccaaaacta

SEQ ID NO: 4247264 - DNA, 25 bp, Homo sapien
aaaactaagtatggtgataatgatg

SEQ ID NO: 4247265 - DNA, 25 bp, Homo sapien
ggaggaccaaatggaccaggagtta

SEQ ID NO: 4247266 - DNA, 25 bp, Homo sapien
ggagttatgccaaaactaagtatgg

SEQ ID NO: 4247267 - DNA, 25 bp, Homo sapien
catgtatggattttccttctctgga

SEQ ID NO: 4247268 - DNA, 25 bp, Homo sapien
acatgtatggattttccttctctgg

SEQ ID NO: 4247269 - DNA, 25 bp, Homo sapien
atgtatggattttccttctctggac

SEQ ID NO: 4247270 - DNA, 25 bp, Homo sapien
ttacatgtatggattttccttctct

SEQ ID NO: 4247271 - DNA, 25 bp, Homo sapien
tggattcccactccctacctgatgg

SEQ ID NO: 4247272 - DNA, 25 bp, Homo sapien
tattccttgcaaatagtgtctgctg

SEQ ID NO: 4247273 - DNA, 25 bp, Homo sapien
tagccagacactccagtagtattcc

SEQ ID NO: 4247274 - DNA, 25 bp, Homo sapien
gatggatgcccctctatcactttgc

SEQ ID NO: 4247275 - DNA, 25 bp, Homo sapien
tcaagcctgaacagctcaacacgtc

SEQ ID NO: 4247276 - DNA, 25 bp, Homo sapien
ctattttctatagccagattggacc

SEQ ID NO: 4247277 - DNA, 25 bp, Homo sapien
cacaaggcatctgtaccaaggtgat

SEQ ID NO: 4247278 - DNA, 25 bp, Homo sapien
tgcccagtcctggtaagtccaggtt

SEQ ID NO: 4247279 - DNA, 25 bp, Homo sapien
gcttggtgatgaggttactgccatt

SEQ ID NO: 4247280 - DNA, 25 bp, Homo sapien
ccagggtctgcttgagtaaatcgtg

SEQ ID NO: 4247281 - DNA, 25 bp, Homo sapien
gcttgagtaaatcgtgcttggcctg

SEQ ID NO: 4247282 - DNA, 25 bp, Homo sapien
tggtgatgaggttactgccattcac

SEQ ID NO: 4247283 - DNA, 25 bp, Homo sapien
gccccactgggcatgcctctgctgc

SEQ ID NO: 4247284 - DNA, 25 bp, Homo sapien
gagccccactgggcatgcctctgct

SEQ ID NO: 4247285 - DNA, 25 bp, Homo sapien
ctgcactgtcacagagccccactgg

SEQ ID NO: 4247286 - DNA, 25 bp, Homo sapien
cagagccccactgggcatgcctctg

SEQ ID NO: 4247287 - DNA, 25 bp, Homo sapien
tattggccattaagagtcactcgac

SEQ ID NO: 4247288 - DNA, 25 bp, Homo sapien
cttgatgggtttctggaacgactgg

SEQ ID NO: 4247289 - DNA, 25 bp, Homo sapien
gtatccacagagcacttgacagttt

SEQ ID NO: 4247290 - DNA, 25 bp, Homo sapien
tttccatggtcctaggctcccagga

SEQ ID NO: 4247291 - DNA, 25 bp, Homo sapien
agagtcttggatggcaaatggggaa

SEQ ID NO: 4247292 - DNA, 25 bp, Homo sapien
cagagtcttggatggcaaatgggga

SEQ ID NO: 4247293 - DNA, 25 bp, Homo sapien
tcagagtcttggatggcaaatgggg

SEQ ID NO: 4247294 - DNA, 25 bp, Homo sapien
ggagtgcagtagtacgatgttggct

SEQ ID NO: 4247295 - DNA, 25 bp, Homo sapien
tcccaggctcaagccatgctcccaa

SEQ ID NO: 4247296 - DNA, 25 bp, Homo sapien
gcagtagtacgatgttggctcactg

SEQ ID NO: 4247297 - DNA, 25 bp, Homo sapien
tagtacgatgttggctcactgcaat

SEQ ID NO: 4247298 - DNA, 25 bp, Homo sapien
taactcatgccttggcaggtcatcc

SEQ ID NO: 4247299 - DNA, 25 bp, Homo sapien
gatgtaatcccaaatgcctaactca

SEQ ID NO: 4247300 - DNA, 25 bp, Homo sapien
tggttagcgcaaattacagcctggg

SEQ ID NO: 4247301 - DNA, 25 bp, Homo sapien
gatgcttccagcaataatgtcctct

SEQ ID NO: 4247302 - DNA, 25 bp, Homo sapien
tctctggttctcagtagcttgggtt

SEQ ID NO: 4247303 - DNA, 25 bp, Homo sapien
tcttagatccaattgacccatgtgg

SEQ ID NO: 4247304 - DNA, 25 bp, Homo sapien
tgccagtggcttggccgacagtgtg

SEQ ID NO: 4247305 - DNA, 25 bp, Homo sapien
agcatggtgatggagtcttagatcc

SEQ ID NO: 4247306 - DNA, 25 bp, Homo sapien
gaaggcatcggagacatcaaagtcc

SEQ ID NO: 4247307 - DNA, 25 bp, Homo sapien
catgtaggtctcagaggcagccgac

SEQ ID NO: 4247308 - DNA, 25 bp, Homo sapien
tcgatcgactgtgttggaaggcatc

SEQ ID NO: 4247309 - DNA, 25 bp, Homo sapien
gacttgacggactctgtcgatcgac

SEQ ID NO: 4247310 - DNA, 25 bp, Homo sapien
tcctgtattctcatactgccgttga

SEQ ID NO: 4247311 - DNA, 25 bp, Homo sapien
catactgccgttgacacctaaagtc

SEQ ID NO: 4247312 - DNA, 25 bp, Homo sapien
gctgtcactttacttcttccatatg

SEQ ID NO: 4247313 - DNA, 25 bp, Homo sapien
gggaaacacagcagattgacaaaaa

SEQ ID NO: 4247314 - DNA, 25 bp, Homo sapien
gaacaaaaataatccttctcactgt

SEQ ID NO: 4247315 - DNA, 25 bp, Homo sapien
aaaataatccttctcactgtattaa

SEQ ID NO: 4247316 - DNA, 25 bp, Homo sapien
ctaggatataggcagaacaaaaata

SEQ ID NO: 4247317 - DNA, 25 bp, Homo sapien
taggatataggcagaacaaaaataa

SEQ ID NO: 4247318 - DNA, 25 bp, Homo sapien
tctctatcttgagggtggccagtct

SEQ ID NO: 4247319 - DNA, 25 bp, Homo sapien
agcagttctgtctggacgggctgct

SEQ ID NO: 4247320 - DNA, 25 bp, Homo sapien
acgggctgctgagcgctgacctggc

SEQ ID NO: 4247321 - DNA, 25 bp, Homo sapien
cagctggtgataacgcatgagcagt

SEQ ID NO: 4247322 - DNA, 25 bp, Homo sapien
tagaaactttctgtacgtgcaacca

SEQ ID NO: 4247323 - DNA, 25 bp, Homo sapien
caggcgtcggatagaaactttctgt

SEQ ID NO: 4247324 - DNA, 25 bp, Homo sapien
ttgaccccaggcgtcggatagaaac

SEQ ID NO: 4247325 - DNA, 25 bp, Homo sapien
tgtacgtgcaaccagggatgatgta

SEQ ID NO: 4247326 - DNA, 25 bp, Homo sapien
acatccagcccttcgtggcgagagg

SEQ ID NO: 4247327 - DNA, 25 bp, Homo sapien
aactcgaacttgagtggagggcaga

SEQ ID NO: 4247328 - DNA, 25 bp, Homo sapien
acttgattgcacatgtccatgactg

SEQ ID NO: 4247329 - DNA, 25 bp, Homo sapien
gagataggtccggaaggtgcgggcc

SEQ ID NO: 4247330 - DNA, 25 bp, Homo sapien
gacttcccgacaggatacaccagga

SEQ ID NO: 4247331 - DNA, 25 bp, Homo sapien
agaggcccatgtcccactcgtgaaa

SEQ ID NO: 4247332 - DNA, 25 bp, Homo sapien
tgtacacgtgtctggctgagtggcc

SEQ ID NO: 4247333 - DNA, 25 bp, Homo sapien
caaaagagctgtggctacccgagaa

SEQ ID NO: 4247334 - DNA, 25 bp, Homo sapien
tatagctgcgttggtggctgccaga

SEQ ID NO: 4247335 - DNA, 25 bp, Homo sapien
ttgagcaagtagtcattccgggcct

SEQ ID NO: 4247336 - DNA, 25 bp, Homo sapien
tagtatttgcttatagctgcgttgg

SEQ ID NO: 4247337 - DNA, 25 bp, Homo sapien
tgttctcagagtacttggcctgcct

SEQ ID NO: 4247338 - DNA, 25 bp, Homo sapien
cctgcacagccgatgaggacactag

SEQ ID NO: 4247339 - DNA, 25 bp, Homo sapien
gatgaggacactagatgagcagcag

SEQ ID NO: 4247340 - DNA, 25 bp, Homo sapien
cctctgacggtccttgctagggtgg

SEQ ID NO: 4247341 - DNA, 25 bp, Homo sapien
ctgctagatgagtaagggctggacc

SEQ ID NO: 4247342 - DNA, 25 bp, Homo sapien
cattgctaggtctggagcgcccaga

SEQ ID NO: 4247343 - DNA, 25 bp, Homo sapien
tgctgtgtaaaaagtcaggtctctg

SEQ ID NO: 4247344 - DNA, 25 bp, Homo sapien
gattgtcagtgatctcccattagaa

SEQ ID NO: 4247345 - DNA, 25 bp, Homo sapien
ggcagttacatcctacgccagccat

SEQ ID NO: 4247346 - DNA, 25 bp, Homo sapien
gtctcctgacttattgaactgcttc

SEQ ID NO: 4247347 - DNA, 25 bp, Homo sapien
tcctcgtgccggagcaggttcatgc

SEQ ID NO: 4247348 - DNA, 25 bp, Homo sapien
gcatggtacatgtggtaggttttca

SEQ ID NO: 4247349 - DNA, 25 bp, Homo sapien
gagcaggttcatgctgaggtctcct

SEQ ID NO: 4247350 - DNA, 25 bp, Homo sapien
ttctgagtctgcttgcctcgccacg

SEQ ID NO: 4247351 - DNA, 25 bp, Homo sapien
gcctcgccacgaatctgtcatctgt

SEQ ID NO: 4247352 - DNA, 25 bp, Homo sapien
ccatccccgtctgcgttcaatgatt

SEQ ID NO: 4247353 - DNA, 25 bp, Homo sapien
caatgattcctgctacatctccttt

SEQ ID NO: 4247354 - DNA, 25 bp, Homo sapien
gctagatcttcctgtccaatcacca

SEQ ID NO: 4247355 - DNA, 25 bp, Homo sapien
agctagatcttcctgtccaatcacc

SEQ ID NO: 4247356 - DNA, 25 bp, Homo sapien
gaactgtccactgtcgatcagatac

SEQ ID NO: 4247357 - DNA, 25 bp, Homo sapien
gatactcagtagatttcatcacccc

SEQ ID NO: 4247358 - DNA, 25 bp, Homo sapien
cacatctcgtggtctggatatgctg

SEQ ID NO: 4247359 - DNA, 25 bp, Homo sapien
cacctgtcatagtgtgcagccacat

SEQ ID NO: 4247360 - DNA, 25 bp, Homo sapien
tgccacttgtgttagcaaggtgact

SEQ ID NO: 4247361 - DNA, 25 bp, Homo sapien
caaggtgactttcggtgtcatggga

SEQ ID NO: 4247362 - DNA, 25 bp, Homo sapien
actagtaacacagcaaccgaggtga

SEQ ID NO: 4247363 - DNA, 25 bp, Homo sapien
aaaccgagtgtcagagccccactat

SEQ ID NO: 4247364 - DNA, 25 bp, Homo sapien
aggacccttcttcctccactagctt

SEQ ID NO: 4247365 - DNA, 25 bp, Homo sapien
cttcttcctccactagcttctggtg

SEQ ID NO: 4247366 - DNA, 25 bp, Homo sapien
tcttcctccactagcttctggtgac

SEQ ID NO: 4247367 - DNA, 25 bp, Homo sapien
ctccactagcttctggtgaccctca

SEQ ID NO: 4247368 - DNA, 25 bp, Homo sapien
ttcaggagctcctcgtgcatctgca

SEQ ID NO: 4247369 - DNA, 25 bp, Homo sapien
gaggtgagaagcctctgaatccagt

SEQ ID NO: 4247370 - DNA, 25 bp, Homo sapien
aggtgagaagcctctgaatccagtg

SEQ ID NO: 4247371 - DNA, 25 bp, Homo sapien
agaggtgagaagcctctgaatccag

SEQ ID NO: 4247372 - DNA, 25 bp, Homo sapien
tggcttccaagtcgaggtagctggg

SEQ ID NO: 4247373 - DNA, 25 bp, Homo sapien
ttccaagtcgaggtagctggggatg

SEQ ID NO: 4247374 - DNA, 25 bp, Homo sapien
ctggcttccaagtcgaggtagctgg

SEQ ID NO: 4247375 - DNA, 25 bp, Homo sapien
gcttccaagtcgaggtagctgggga

SEQ ID NO: 4247376 - DNA, 25 bp, Homo sapien
agagtctgatgacatcctcactgat

SEQ ID NO: 4247377 - DNA, 25 bp, Homo sapien
ctgatgacatcctcactgatctggg

SEQ ID NO: 4247378 - DNA, 25 bp, Homo sapien
ctgatctgggagaggcggacgatga

SEQ ID NO: 4247379 - DNA, 25 bp, Homo sapien
gagaggcggacgatgacattgttca

SEQ ID NO: 4247380 - DNA, 25 bp, Homo sapien
atgtcattgagggtggcatggtctc

SEQ ID NO: 4247381 - DNA, 25 bp, Homo sapien
gttcacaggcgagaggaggtactgg

SEQ ID NO: 4247382 - DNA, 25 bp, Homo sapien
tgcagaaccagataccaacagttca

SEQ ID NO: 4247383 - DNA, 25 bp, Homo sapien
tcccgccgggtctgatgcagaacca

SEQ ID NO: 4247384 - DNA, 25 bp, Homo sapien
gccagagagcgcagttcagggccta

SEQ ID NO: 4247385 - DNA, 25 bp, Homo sapien
ggagtcccccgaggagtgtgaggct

SEQ ID NO: 4247386 - DNA, 25 bp, Homo sapien
gagcgcagttcagggcctagctctg

SEQ ID NO: 4247387 - DNA, 25 bp, Homo sapien
agagagcgcagttcagggcctagct

SEQ ID NO: 4247388 - DNA, 25 bp, Homo sapien
ttgctgattagagtctctgaggatt

SEQ ID NO: 4247389 - DNA, 25 bp, Homo sapien
ctagttaatgctttggtagttgctg

SEQ ID NO: 4247390 - DNA, 25 bp, Homo sapien
gctgattagagtctctgaggattcc

SEQ ID NO: 4247391 - DNA, 25 bp, Homo sapien
aatgctttggtagttgctgattaga

SEQ ID NO: 4247392 - DNA, 25 bp, Homo sapien
ggcaagccctaagctggcctctgtg

SEQ ID NO: 4247393 - DNA, 25 bp, Homo sapien
gacttgggatcaaccaacagcaggg

SEQ ID NO: 4247394 - DNA, 25 bp, Homo sapien
gaggataatagcaaacccctgatgc

SEQ ID NO: 4247395 - DNA, 25 bp, Homo sapien
catccaaggaggatatggtcgacat

SEQ ID NO: 4247396 - DNA, 25 bp, Homo sapien
gataaagcaagtcgctgatctcctg

SEQ ID NO: 4247397 - DNA, 25 bp, Homo sapien
caggtgagataaagcaagtcgctga

SEQ ID NO: 4247398 - DNA, 25 bp, Homo sapien
agcaagtcgctgatctcctggtgtt

SEQ ID NO: 4247399 - DNA, 25 bp, Homo sapien
aagtcgctgatctcctggtgttgag

SEQ ID NO: 4247400 - DNA, 25 bp, Homo sapien
ttgaactggtgctcccgggagctgc

SEQ ID NO: 4247401 - DNA, 25 bp, Homo sapien
tgctccaccagctgcgtgcggatct

SEQ ID NO: 4247402 - DNA, 25 bp, Homo sapien
gaagcagctgcagtcgcgactctga

SEQ ID NO: 4247403 - DNA, 25 bp, Homo sapien
ctcaatctcagctttccggcggaaa

SEQ ID NO: 4247404 - DNA, 25 bp, Homo sapien
gggcacacaagggtaggagcatgag

SEQ ID NO: 4247405 - DNA, 25 bp, Homo sapien
ctgcgggcacacaagggtaggagca

SEQ ID NO: 4247406 - DNA, 25 bp, Homo sapien
gcgggcacacaagggtaggagcatg

SEQ ID NO: 4247407 - DNA, 25 bp, Homo sapien
ggcacacaagggtaggagcatgaga

SEQ ID NO: 4247408 - DNA, 25 bp, Homo sapien
tcctagcctcctgtacaccgagagg

SEQ ID NO: 4247409 - DNA, 25 bp, Homo sapien
ctgtacaccgagaggcggcttccgg

SEQ ID NO: 4247410 - DNA, 25 bp, Homo sapien
ccctgcacaaaagactcgtgcgctg

SEQ ID NO: 4247411 - DNA, 25 bp, Homo sapien
agactcgtgcgctgcccggacacgg

SEQ ID NO: 4247412 - DNA, 25 bp, Homo sapien
gacattaatagggtgcaggatgaat

SEQ ID NO: 4247413 - DNA, 25 bp, Homo sapien
taatagggtgcaggatgaattccct

SEQ ID NO: 4247414 - DNA, 25 bp, Homo sapien
cattaatagggtgcaggatgaattc

SEQ ID NO: 4247415 - DNA, 25 bp, Homo sapien
agggtgcaggatgaattcccttgac

SEQ ID NO: 4247416 - DNA, 25 bp, Homo sapien
tgagaatgccacatggaagaatatc

SEQ ID NO: 4247417 - DNA, 25 bp, Homo sapien
tgatgagaatgccacatggaagaat

SEQ ID NO: 4247418 - DNA, 25 bp, Homo sapien
catggaagaatatctaaggccacca

SEQ ID NO: 4247419 - DNA, 25 bp, Homo sapien
ttctgatgagaatgccacatggaag

SEQ ID NO: 4247420 - DNA, 25 bp, Homo sapien
tcaatccattccacaacagggactg

SEQ ID NO: 4247421 - DNA, 25 bp, Homo sapien
tatggtgcacatcaagcaacccctt

SEQ ID NO: 4247422 - DNA, 25 bp, Homo sapien
tgttgtcagctggtcaagtttccaa

SEQ ID NO: 4247423 - DNA, 25 bp, Homo sapien
gagattagattttccaggaggtcag

SEQ ID NO: 4247424 - DNA, 25 bp, Homo sapien
tggctgagcacatcaggcaaggctt

SEQ ID NO: 4247425 - DNA, 25 bp, Homo sapien
catgcagtacagtcagctagtggtg

SEQ ID NO: 4247426 - DNA, 25 bp, Homo sapien
tatctggctgagcacatcaggcaag

SEQ ID NO: 4247427 - DNA, 25 bp, Homo sapien
aggtgagggtacagaatgccatgca

SEQ ID NO: 4247428 - DNA, 25 bp, Homo sapien
gaccaagaaggtcccgagatgccca

SEQ ID NO: 4247429 - DNA, 25 bp, Homo sapien
gggatgtttggcatgcagccatcaa

SEQ ID NO: 4247430 - DNA, 25 bp, Homo sapien
tggaggctcgttcgggatgtttggc

SEQ ID NO: 4247431 - DNA, 25 bp, Homo sapien
agccagaccaagaaggtcccgagat

SEQ ID NO: 4247432 - DNA, 25 bp, Homo sapien
caggacagggtcagagataagcaga

SEQ ID NO: 4247433 - DNA, 25 bp, Homo sapien
agcagaagcaggcaacgggaatcca

SEQ ID NO: 4247434 - DNA, 25 bp, Homo sapien
gctgtcagacatggtagggttgaat

SEQ ID NO: 4247435 - DNA, 25 bp, Homo sapien
taaggaaaggtattgctgcctttga

SEQ ID NO: 4247436 - DNA, 25 bp, Homo sapien
tgggggataccaggaattaaagaga

SEQ ID NO: 4247437 - DNA, 25 bp, Homo sapien
gggataccaggaattaaagagaatc

SEQ ID NO: 4247438 - DNA, 25 bp, Homo sapien
tctctaaattatgctgggggatacc

SEQ ID NO: 4247439 - DNA, 25 bp, Homo sapien
ttatgctgggggataccaggaatta

SEQ ID NO: 4247440 - DNA, 25 bp, Homo sapien
actgaggtaggaccatgtgaccaaa

SEQ ID NO: 4247441 - DNA, 25 bp, Homo sapien
tgctcgggcctgtaacaaattgtaa

SEQ ID NO: 4247442 - DNA, 25 bp, Homo sapien
tctcctgtccgctcaaacctgggag

SEQ ID NO: 4247443 - DNA, 25 bp, Homo sapien
tattatcaagaagtactgcccctgg

SEQ ID NO: 4247444 - DNA, 25 bp, Homo sapien
ggagctcctctgataccagttctgg

SEQ ID NO: 4247445 - DNA, 25 bp, Homo sapien
tgcgctgctcacatgcctgagatgg

SEQ ID NO: 4247446 - DNA, 25 bp, Homo sapien
gttccaactcgtgttctgtactggg

SEQ ID NO: 4247447 - DNA, 25 bp, Homo sapien
ggtcctcgggccatcactctctttg

SEQ ID NO: 4247448 - DNA, 25 bp, Homo sapien
accatcattggatctatttgtcttt

SEQ ID NO: 4247449 - DNA, 25 bp, Homo sapien
caaataatcagcaagcgtgacaggg

SEQ ID NO: 4247450 - DNA, 25 bp, Homo sapien
taatcagcaagcgtgacagggcccc

SEQ ID NO: 4247451 - DNA, 25 bp, Homo sapien
catcattggatctatttgtctttca

SEQ ID NO: 4247452 - DNA, 25 bp, Homo sapien
cttagctagggtcgaaggtcaggcc

SEQ ID NO: 4247453 - DNA, 25 bp, Homo sapien
aacaggtaaagtcatgcttggtaaa

SEQ ID NO: 4247454 - DNA, 25 bp, Homo sapien
aggtgagtggagtcccatgatccca

SEQ ID NO: 4247455 - DNA, 25 bp, Homo sapien
catcttctcctaccaggaagggagg

SEQ ID NO: 4247456 - DNA, 25 bp, Homo sapien
aaagagccatgctggagcgagatgc

SEQ ID NO: 4247457 - DNA, 25 bp, Homo sapien
tgggaaagagccatgctggagcgag

SEQ ID NO: 4247458 - DNA, 25 bp, Homo sapien
agccatgctggagcgagatgcccac

SEQ ID NO: 4247459 - DNA, 25 bp, Homo sapien
catgctggagcgagatgcccaccat

SEQ ID NO: 4247460 - DNA, 25 bp, Homo sapien
gaaacctgaagtgcatgagtccctt

SEQ ID NO: 4247461 - DNA, 25 bp, Homo sapien
gttggccagcaagtcaggcagccat

SEQ ID NO: 4247462 - DNA, 25 bp, Homo sapien
aagtgcatgagtcccttccctgtcc

SEQ ID NO: 4247463 - DNA, 25 bp, Homo sapien
ggagagaaacctgaagtgcatgagt

SEQ ID NO: 4247464 - DNA, 25 bp, Homo sapien
atcctccagggctgagggtggtcct

SEQ ID NO: 4247465 - DNA, 25 bp, Homo sapien
agaaagggggaggattgatcctcca

SEQ ID NO: 4247466 - DNA, 25 bp, Homo sapien
gggtggtcctgcagtggctttttca

SEQ ID NO: 4247467 - DNA, 25 bp, Homo sapien
tgtgacagcaattctcctgggcagg

SEQ ID NO: 4247468 - DNA, 25 bp, Homo sapien
tgccctcactatagccttgccttga

SEQ ID NO: 4247469 - DNA, 25 bp, Homo sapien
gccctcactatagccttgccttgac

SEQ ID NO: 4247470 - DNA, 25 bp, Homo sapien
ctgccctcactatagccttgccttg

SEQ ID NO: 4247471 - DNA, 25 bp, Homo sapien
ttacagcccaaagttctaatgccgg

SEQ ID NO: 4247472 - DNA, 25 bp, Homo sapien
caagcgcagactagaagggtgagac

SEQ ID NO: 4247473 - DNA, 25 bp, Homo sapien
gaaagcactaccctccttcaggaga

SEQ ID NO: 4247474 - DNA, 25 bp, Homo sapien
gatgggtcaaccagatgcggtctag

SEQ ID NO: 4247475 - DNA, 25 bp, Homo sapien
gactccagcccttcccggttctcag

SEQ ID NO: 4247476 - DNA, 25 bp, Homo sapien
tcctctgcggcttgcctcttttgtg

SEQ ID NO: 4247477 - DNA, 25 bp, Homo sapien
cttgcctcttttgtggagccagttg

SEQ ID NO: 4247478 - DNA, 25 bp, Homo sapien
tcagcttgcaagctcctcgcctcct

SEQ ID NO: 4247479 - DNA, 25 bp, Homo sapien
tggcaagattatagcacatggcagc

SEQ ID NO: 4247480 - DNA, 25 bp, Homo sapien
gccaagattgattgttccccaaatg

SEQ ID NO: 4247481 - DNA, 25 bp, Homo sapien
ccaggaggattcagttgagcggcca

SEQ ID NO: 4247482 - DNA, 25 bp, Homo sapien
taggcgtgtgtcactcaagtagcac

SEQ ID NO: 4247483 - DNA, 25 bp, Homo sapien
caagggctccgttatcagagttact

SEQ ID NO: 4247484 - DNA, 25 bp, Homo sapien
tgcatttgcaatgggcttaatcatc

SEQ ID NO: 4247485 - DNA, 25 bp, Homo sapien
ccaagaaggatgctcaagggctccg

SEQ ID NO: 4247486 - DNA, 25 bp, Homo sapien
agagttacttaattctgcatttgca

SEQ ID NO: 4247487 - DNA, 25 bp, Homo sapien
ttcctctcacatcagcatcctgagt

SEQ ID NO: 4247488 - DNA, 25 bp, Homo sapien
gccttcctctcacatcagcatcctg

SEQ ID NO: 4247489 - DNA, 25 bp, Homo sapien
ttaagccttcctctcacatcagcat

SEQ ID NO: 4247490 - DNA, 25 bp, Homo sapien
tgggcttaagccttcctctcacatc

SEQ ID NO: 4247491 - DNA, 25 bp, Homo sapien
acctgcagtccaaaacctgcatcat

SEQ ID NO: 4247492 - DNA, 25 bp, Homo sapien
taggcacctgcagtccaaaacctgc

SEQ ID NO: 4247493 - DNA, 25 bp, Homo sapien
tcataggcacctgcagtccaaaacc

SEQ ID NO: 4247494 - DNA, 25 bp, Homo sapien
tcatcataggcacctgcagtccaaa

SEQ ID NO: 4247495 - DNA, 25 bp, Homo sapien
caggctccgatgtaatggatgagga

SEQ ID NO: 4247496 - DNA, 25 bp, Homo sapien
ttcagtcccacgtagaggacaggct

SEQ ID NO: 4247497 - DNA, 25 bp, Homo sapien
tggctaaaaactgacaagaccgcag

SEQ ID NO: 4247498 - DNA, 25 bp, Homo sapien
agtcactttcccgagccatggctaa

SEQ ID NO: 4247499 - DNA, 25 bp, Homo sapien
ggtacagagttgcatttcacaagat

SEQ ID NO: 4247500 - DNA, 25 bp, Homo sapien
gcccggccaaggagctattgtttaa

SEQ ID NO: 4247501 - DNA, 25 bp, Homo sapien
aagacttacaggatctgatgatcag

SEQ ID NO: 4247502 - DNA, 25 bp, Homo sapien
gcatttaataccactaagctgcaca

SEQ ID NO: 4247503 - DNA, 25 bp, Homo sapien
tcccagcaagaggtaatggcaggct

SEQ ID NO: 4247504 - DNA, 25 bp, Homo sapien
tggtgtgtgagcagcagaatcgcct

SEQ ID NO: 4247505 - DNA, 25 bp, Homo sapien
tggatcttggagcacaaccctggag

SEQ ID NO: 4247506 - DNA, 25 bp, Homo sapien
ggtggcatgcaacctcaaagcagaa

SEQ ID NO: 4247507 - DNA, 25 bp, Homo sapien
tcagaggcatgcaacaaaggcaacg

SEQ ID NO: 4247508 - DNA, 25 bp, Homo sapien
gagaaaggtaattggcctcgggcac

SEQ ID NO: 4247509 - DNA, 25 bp, Homo sapien
ggactttttgcatcccactggccag

SEQ ID NO: 4247510 - DNA, 25 bp, Homo sapien
tggccagatgattcccagggagaaa

SEQ ID NO: 4247511 - DNA, 25 bp, Homo sapien
ttctaaattttcagcaaggctgaga

SEQ ID NO: 4247512 - DNA, 25 bp, Homo sapien
caataaagcgcttatttctaaattt

SEQ ID NO: 4247513 - DNA, 25 bp, Homo sapien
aattttcagcaaggctgagacatcg

SEQ ID NO: 4247514 - DNA, 25 bp, Homo sapien
ttcagcaaggctgagacatcgtaag

SEQ ID NO: 4247515 - DNA, 25 bp, Homo sapien
ccctaggatatgcccagaggtgatg

SEQ ID NO: 4247516 - DNA, 25 bp, Homo sapien
gagcacgctgggcttttgaccagga

SEQ ID NO: 4247517 - DNA, 25 bp, Homo sapien
tgccctaggatatgcccagaggtga

SEQ ID NO: 4247518 - DNA, 25 bp, Homo sapien
cttgccctaggatatgcccagaggt

SEQ ID NO: 4247519 - DNA, 25 bp, Homo sapien
gaccagaaagaaagcggacgccaag

SEQ ID NO: 4247520 - DNA, 25 bp, Homo sapien
cctgctggatggagcttttagattt

SEQ ID NO: 4247521 - DNA, 25 bp, Homo sapien
aaagaaagcggacgccaagaggcac

SEQ ID NO: 4247522 - DNA, 25 bp, Homo sapien
cctgtgtcgcagcaaggagaaccat

SEQ ID NO: 4247523 - DNA, 25 bp, Homo sapien
atattcagcaatgatctctttgtct

SEQ ID NO: 4247524 - DNA, 25 bp, Homo sapien
tcttgaacttagtttgagatgacat

SEQ ID NO: 4247525 - DNA, 25 bp, Homo sapien
ttcttgaacttagtttgagatgaca

SEQ ID NO: 4247526 - DNA, 25 bp, Homo sapien
caaaggaactgacaggctgtttgat

SEQ ID NO: 4247527 - DNA, 25 bp, Homo sapien
ctctcaagccctggtaatcacacag

SEQ ID NO: 4247528 - DNA, 25 bp, Homo sapien
ctcaagccctggtaatcacacagct

SEQ ID NO: 4247529 - DNA, 25 bp, Homo sapien
actgacaggctgtttgatttatttc

SEQ ID NO: 4247530 - DNA, 25 bp, Homo sapien
taatagtaataaccaagcgcactca

SEQ ID NO: 4247531 - DNA, 25 bp, Homo sapien
gaagaatcaccctaggagcacagta

SEQ ID NO: 4247532 - DNA, 25 bp, Homo sapien
gctctagtagcttgccctggtcagc

SEQ ID NO: 4247533 - DNA, 25 bp, Homo sapien
tctttcacttggctgcagagcaggg

SEQ ID NO: 4247534 - DNA, 25 bp, Homo sapien
tcaggttgccaaagggccggtcatc

SEQ ID NO: 4247535 - DNA, 25 bp, Homo sapien
cgcggcgcctctttggtcgtgcagc

SEQ ID NO: 4247536 - DNA, 25 bp, Homo sapien
tctttggtcgtgcagccagcccctg

SEQ ID NO: 4247537 - DNA, 25 bp, Homo sapien
ttttgaaggctctgctaagtcgatg

SEQ ID NO: 4247538 - DNA, 25 bp, Homo sapien
tgaacacaaggctggactgctcgcc

SEQ ID NO: 4247539 - DNA, 25 bp, Homo sapien
gagagcgagatggaagttttcctgc

SEQ ID NO: 4247540 - DNA, 25 bp, Homo sapien
ctgctgcaacgcttaagctccggtg

SEQ ID NO: 4247541 - DNA, 25 bp, Homo sapien
ccaggagagcgagatggaagttttc

SEQ ID NO: 4247542 - DNA, 25 bp, Homo sapien
tcatttgtcgtatgtggtcctcaca

SEQ ID NO: 4247543 - DNA, 25 bp, Homo sapien
gtcgtatgtggtcctcacaataacc

SEQ ID NO: 4247544 - DNA, 25 bp, Homo sapien
catttgtcgtatgtggtcctcacaa

SEQ ID NO: 4247545 - DNA, 25 bp, Homo sapien
tttgtcgtatgtggtcctcacaata

SEQ ID NO: 4247546 - DNA, 25 bp, Homo sapien
gcactccatttggaggcaatacccc

SEQ ID NO: 4247547 - DNA, 25 bp, Homo sapien
agagtcaattactccctccactgca

SEQ ID NO: 4247548 - DNA, 25 bp, Homo sapien
gggcagcagagtcaattactccctc

SEQ ID NO: 4247549 - DNA, 25 bp, Homo sapien
ctgcactccatttggaggcaatacc

SEQ ID NO: 4247550 - DNA, 25 bp, Homo sapien
tggatgttgtgggtgcagttgaggc

SEQ ID NO: 4247551 - DNA, 25 bp, Homo sapien
tcccaaggatgtgaagaacactctg

SEQ ID NO: 4247552 - DNA, 25 bp, Homo sapien
gcggttgcagttgggtttgttccca

SEQ ID NO: 4247553 - DNA, 25 bp, Homo sapien
gccacatgcagtggtttcagttggg

SEQ ID NO: 4247554 - DNA, 25 bp, Homo sapien
ctctggtaccaataaccgctgaaga

SEQ ID NO: 4247555 - DNA, 25 bp, Homo sapien
tctggtaccaataaccgctgaagac

SEQ ID NO: 4247556 - DNA, 25 bp, Homo sapien
tggtaccaataaccgctgaagacaa

SEQ ID NO: 4247557 - DNA, 25 bp, Homo sapien
accaataaccgctgaagacaaaagc

SEQ ID NO: 4247558 - DNA, 25 bp, Homo sapien
gtatgtgtatgctgtgctgcccaga

SEQ ID NO: 4247559 - DNA, 25 bp, Homo sapien
gtgtatgctgtgctgcccagatccc

SEQ ID NO: 4247560 - DNA, 25 bp, Homo sapien
tatgtgtatgctgtgctgcccagat

SEQ ID NO: 4247561 - DNA, 25 bp, Homo sapien
cccagatccccctgcagaggatttt

SEQ ID NO: 4247562 - DNA, 25 bp, Homo sapien
cactaacaatacacaagagtttcaa

SEQ ID NO: 4247563 - DNA, 25 bp, Homo sapien
tccaaggacgaggttgcaaggagat

SEQ ID NO: 4247564 - DNA, 25 bp, Homo sapien
taaggttgtatcttattgcagtggt

SEQ ID NO: 4247565 - DNA, 25 bp, Homo sapien
gttttggatagtacccatcctaatg

SEQ ID NO: 4247566 - DNA, 25 bp, Homo sapien
cagctgaacttttctccaaagctac

SEQ ID NO: 4247567 - DNA, 25 bp, Homo sapien
caaagctacatcatcaagctgtccc

SEQ ID NO: 4247568 - DNA, 25 bp, Homo sapien
tgatgaaagtggctttcaatgggaa

SEQ ID NO: 4247569 - DNA, 25 bp, Homo sapien
ttcccctgaaatctggccattccca

SEQ ID NO: 4247570 - DNA, 25 bp, Homo sapien
agctgcctcgcccaatttctttagc

SEQ ID NO: 4247571 - DNA, 25 bp, Homo sapien
gctgcctcgcccaatttctttagct

SEQ ID NO: 4247572 - DNA, 25 bp, Homo sapien
gctccgtcataaataaccagctgcc

SEQ ID NO: 4247573 - DNA, 25 bp, Homo sapien
ctctgtgttgctccgtcataaataa

SEQ ID NO: 4247574 - DNA, 25 bp, Homo sapien
tactgctctctaagacccttgggag

SEQ ID NO: 4247575 - DNA, 25 bp, Homo sapien
taactggtgtttctagccccgagca

SEQ ID NO: 4247576 - DNA, 25 bp, Homo sapien
aatcagatcttccagtcagcatggg

SEQ ID NO: 4247577 - DNA, 25 bp, Homo sapien
taatcaaagacaacggtaactgcca

SEQ ID NO: 4247578 - DNA, 25 bp, Homo sapien
atatgtttgactatatcacaattgc

SEQ ID NO: 4247579 - DNA, 25 bp, Homo sapien
acaattgcatccaggggagagcaac

SEQ ID NO: 4247580 - DNA, 25 bp, Homo sapien
atatcacaattgcatccaggggaga

SEQ ID NO: 4247581 - DNA, 25 bp, Homo sapien
tatgtttgactatatcacaattgca

SEQ ID NO: 4247582 - DNA, 25 bp, Homo sapien
ttgctctgactggtgcctcctggaa

SEQ ID NO: 4247583 - DNA, 25 bp, Homo sapien
attccatttgattgctctgactggt

SEQ ID NO: 4247584 - DNA, 25 bp, Homo sapien
gctctgactggtgcctcctggaagg

SEQ ID NO: 4247585 - DNA, 25 bp, Homo sapien
tgattccatttgattgctctgactg

SEQ ID NO: 4247586 - DNA, 25 bp, Homo sapien
gaagagcgccacctggcgaaccgct

SEQ ID NO: 4247587 - DNA, 25 bp, Homo sapien
gatcctatcccgggggaagagcgcc

SEQ ID NO: 4247588 - DNA, 25 bp, Homo sapien
ctgctggctgtagaacgccaggttc

SEQ ID NO: 4247589 - DNA, 25 bp, Homo sapien
tgaggaagggctagcgtctgccgcg

SEQ ID NO: 4247590 - DNA, 25 bp, Homo sapien
gggttgcccataaacacttgcctaa

SEQ ID NO: 4247591 - DNA, 25 bp, Homo sapien
tacgggaccccatgtacgacttaca

SEQ ID NO: 4247592 - DNA, 25 bp, Homo sapien
caattctgtccagggtcgcactgct

SEQ ID NO: 4247593 - DNA, 25 bp, Homo sapien
tccccatgcccttgagtgagacttg

SEQ ID NO: 4247594 - DNA, 25 bp, Homo sapien
gtgtaatcattatacacggctcttt

SEQ ID NO: 4247595 - DNA, 25 bp, Homo sapien
caaaaatgacaacctattatacatg

SEQ ID NO: 4247596 - DNA, 25 bp, Homo sapien
tgtttttcaaatacgttcataagcg

SEQ ID NO: 4247597 - DNA, 25 bp, Homo sapien
cgttcataagcgagatgtttgtttt

SEQ ID NO: 4247598 - DNA, 25 bp, Homo sapien
gcttgggaacttatgctgaagccat

SEQ ID NO: 4247599 - DNA, 25 bp, Homo sapien
gctgaagccatgtttgcacagcacc

SEQ ID NO: 4247600 - DNA, 25 bp, Homo sapien
taaataagactgcaatgacaccaag

SEQ ID NO: 4247601 - DNA, 25 bp, Homo sapien
ctagttggatattcagcttgggaac

SEQ ID NO: 4247602 - DNA, 25 bp, Homo sapien
gcccgggttctgataaccagacttc

SEQ ID NO: 4247603 - DNA, 25 bp, Homo sapien
cccgggttctgataaccagacttca

SEQ ID NO: 4247604 - DNA, 25 bp, Homo sapien
tggagcccgggttctgataaccaga

SEQ ID NO: 4247605 - DNA, 25 bp, Homo sapien
gagcccgggttctgataaccagact

SEQ ID NO: 4247606 - DNA, 25 bp, Homo sapien
ttgtctggcccataggcaccagtcc

SEQ ID NO: 4247607 - DNA, 25 bp, Homo sapien
cttgtctggcccataggcaccagtc

SEQ ID NO: 4247608 - DNA, 25 bp, Homo sapien
ccataggcaccagtcctcactcatc

SEQ ID NO: 4247609 - DNA, 25 bp, Homo sapien
ggcccataggcaccagtcctcactc

SEQ ID NO: 4247610 - DNA, 25 bp, Homo sapien
agtgtctgcggttgagcaggaacat

SEQ ID NO: 4247611 - DNA, 25 bp, Homo sapien
agagactcagagtgtctgcggttga

SEQ ID NO: 4247612 - DNA, 25 bp, Homo sapien
tgtctgcggttgagcaggaacatga

SEQ ID NO: 4247613 - DNA, 25 bp, Homo sapien
actcagagtgtctgcggttgagcag

SEQ ID NO: 4247614 - DNA, 25 bp, Homo sapien
ctgaaacagtgaggttggttacagc

SEQ ID NO: 4247615 - DNA, 25 bp, Homo sapien
aaggtaaagtgacgtacaggaatca

SEQ ID NO: 4247616 - DNA, 25 bp, Homo sapien
agtgaggtactgaaacagtgaggtt

SEQ ID NO: 4247617 - DNA, 25 bp, Homo sapien
aagtgacgtacaggaatcagaagtg

SEQ ID NO: 4247618 - DNA, 25 bp, Homo sapien
gttcacaacaaggatgccatctcct

SEQ ID NO: 4247619 - DNA, 25 bp, Homo sapien
cattcttgtggggaaaagctgttca

SEQ ID NO: 4247620 - DNA, 25 bp, Homo sapien
ctgttcacaacaaggatgccatctc

SEQ ID NO: 4247621 - DNA, 25 bp, Homo sapien
ccattcttgtggggaaaagctgttc

SEQ ID NO: 4247622 - DNA, 25 bp, Homo sapien
ggagtgtggagggacctttctcagc

SEQ ID NO: 4247623 - DNA, 25 bp, Homo sapien
gattatgaacccaatgttcaaggct

SEQ ID NO: 4247624 - DNA, 25 bp, Homo sapien
tgaacccaatgttcaaggctccaaa

SEQ ID NO: 4247625 - DNA, 25 bp, Homo sapien
tggtgtggatggtaaggacagtctt

SEQ ID NO: 4247626 - DNA, 25 bp, Homo sapien
cttgcgtgttcactcagcactcctg

SEQ ID NO: 4247627 - DNA, 25 bp, Homo sapien
tcagcactcctgggcgtcaccagaa

SEQ ID NO: 4247628 - DNA, 25 bp, Homo sapien
gcactcctgggcgtcaccagaagct

SEQ ID NO: 4247629 - DNA, 25 bp, Homo sapien
ctgggcgtcaccagaagctccactt

SEQ ID NO: 4247630 - DNA, 25 bp, Homo sapien
gcaaaattgttcctcacataacagt

SEQ ID NO: 4247631 - DNA, 25 bp, Homo sapien
aattgttcctcacataacagtcctg

SEQ ID NO: 4247632 - DNA, 25 bp, Homo sapien
aaagcaaaattgttcctcacataac

SEQ ID NO: 4247633 - DNA, 25 bp, Homo sapien
tgttcctcacataacagtcctgcat

SEQ ID NO: 4247634 - DNA, 25 bp, Homo sapien
tcataccaacatggaataagctcct

SEQ ID NO: 4247635 - DNA, 25 bp, Homo sapien
ttcgtgacaatgaaatgcctcttgg

SEQ ID NO: 4247636 - DNA, 25 bp, Homo sapien
ccttctgggatttctcgtggcagtt

SEQ ID NO: 4247637 - DNA, 25 bp, Homo sapien
gacctctgagggttagaagtacttc

SEQ ID NO: 4247638 - DNA, 25 bp, Homo sapien
tataaagtaaagacatttatttctc

SEQ ID NO: 4247639 - DNA, 25 bp, Homo sapien
taaagtaaagacatttatttctcac

SEQ ID NO: 4247640 - DNA, 25 bp, Homo sapien
ataaagtaaagacatttatttctca

SEQ ID NO: 4247641 - DNA, 25 bp, Homo sapien
ctggaaagtccaatgtcaaggtgct

SEQ ID NO: 4247642 - DNA, 25 bp, Homo sapien
gtccaatgtcaaggtgctggcatct

SEQ ID NO: 4247643 - DNA, 25 bp, Homo sapien
aggctggaaagtccaatgtcaaggt

SEQ ID NO: 4247644 - DNA, 25 bp, Homo sapien
agtccaatgtcaaggtgctggcatc

SEQ ID NO: 4247645 - DNA, 25 bp, Homo sapien
taagggttcagtctccaagactatc

SEQ ID NO: 4247646 - DNA, 25 bp, Homo sapien
tagacataatgtcagatcctacagg

SEQ ID NO: 4247647 - DNA, 25 bp, Homo sapien
tgtgtctggcatctcagcatagtgt

SEQ ID NO: 4247648 - DNA, 25 bp, Homo sapien
gcctgtataacacatggtcttttgt

SEQ ID NO: 4247649 - DNA, 25 bp, Homo sapien
gactctccgctttcagcttactgaa

SEQ ID NO: 4247650 - DNA, 25 bp, Homo sapien
catggtaggacacaaggcccctgac

SEQ ID NO: 4247651 - DNA, 25 bp, Homo sapien
agcgcggagccaccgtgactcgtag

SEQ ID NO: 4247652 - DNA, 25 bp, Homo sapien
gggaagcactctctaaacgttagca

SEQ ID NO: 4247653 - DNA, 25 bp, Homo sapien
tttttgctttgggtacagggtctca

SEQ ID NO: 4247654 - DNA, 25 bp, Homo sapien
gaaactccaggacaatgctgatgct

SEQ ID NO: 4247655 - DNA, 25 bp, Homo sapien
aatactgcagtttatatagcctcgc

SEQ ID NO: 4247656 - DNA, 25 bp, Homo sapien
gaatcacctaggagtactgttaaca

SEQ ID NO: 4247657 - DNA, 25 bp, Homo sapien
ccggcctcaacctgtacatttctat

SEQ ID NO: 4247658 - DNA, 25 bp, Homo sapien
atcatgcccagcttatttttgtatt

SEQ ID NO: 4247659 - DNA, 25 bp, Homo sapien
agctcggatttcaggcacatgccat

SEQ ID NO: 4247660 - DNA, 25 bp, Homo sapien
gctcggatttcaggcacatgccatc

SEQ ID NO: 4247661 - DNA, 25 bp, Homo sapien
catgcctcaggatgcatgaaactgt

SEQ ID NO: 4247662 - DNA, 25 bp, Homo sapien
tcatagacatgtaatggcaaaggtc

SEQ ID NO: 4247663 - DNA, 25 bp, Homo sapien
caagtgtttgactcatgagaccttc

SEQ ID NO: 4247664 - DNA, 25 bp, Homo sapien
gagatgagccgtgtctgcacaccta

SEQ ID NO: 4247665 - DNA, 25 bp, Homo sapien
tctggaatgcgacacgtatggcgaa

SEQ ID NO: 4247666 - DNA, 25 bp, Homo sapien
cccaccactggaaatgttagcataa

SEQ ID NO: 4247667 - DNA, 25 bp, Homo sapien
tatggcgaaaggtggatacagtctg

SEQ ID NO: 4247668 - DNA, 25 bp, Homo sapien
gaacgttggtggtcttcgtgctgca

SEQ ID NO: 4247669 - DNA, 25 bp, Homo sapien
caagttctttacctcaacctgaagg

SEQ ID NO: 4247670 - DNA, 25 bp, Homo sapien
gcagctttgctaatccagttgctca

SEQ ID NO: 4247671 - DNA, 25 bp, Homo sapien
tgtgtcaagtgcaaaactaccctgg

SEQ ID NO: 4247672 - DNA, 25 bp, Homo sapien
ggtgttcagcctataagacgaagtc

SEQ ID NO: 4247673 - DNA, 25 bp, Homo sapien
ggatcacgattcacatttaattgct

SEQ ID NO: 4247674 - DNA, 25 bp, Homo sapien
gcttttccagttgcaacaagtcctt

SEQ ID NO: 4247675 - DNA, 25 bp, Homo sapien
tgagttgttactttctcctggatca

SEQ ID NO: 4247676 - DNA, 25 bp, Homo sapien
atttgggagttatgtgagttgttac

SEQ ID NO: 4247677 - DNA, 25 bp, Homo sapien
gaaggttttatatcctagactggcc

SEQ ID NO: 4247678 - DNA, 25 bp, Homo sapien
gcctctggctgcaatcagtatagat

SEQ ID NO: 4247679 - DNA, 25 bp, Homo sapien
agaagagttcacattagcagcacag

SEQ ID NO: 4247680 - DNA, 25 bp, Homo sapien
taccactatcagaattcacagctgc

SEQ ID NO: 4247681 - DNA, 25 bp, Homo sapien
gcattcacattgtatgaagtataag

SEQ ID NO: 4247682 - DNA, 25 bp, Homo sapien
gaaaccaatcccaaagcaagggaca

SEQ ID NO: 4247683 - DNA, 25 bp, Homo sapien
ggtgtccttggcaaatggccagcaa

SEQ ID NO: 4247684 - DNA, 25 bp, Homo sapien
acaaatataagtacacaatgtaaca

SEQ ID NO: 4247685 - DNA, 25 bp, Homo sapien
taggtggcaccaacactattcaaga

SEQ ID NO: 4247686 - DNA, 25 bp, Homo sapien
tttatcactcaacagcggcactact

SEQ ID NO: 4247687 - DNA, 25 bp, Homo sapien
tcaaaatgatgccacaacataggtg

SEQ ID NO: 4247688 - DNA, 25 bp, Homo sapien
ttgagaggcccaaagcaagatcact

SEQ ID NO: 4247689 - DNA, 25 bp, Homo sapien
cgttagtttgagtcagtccttccaa

SEQ ID NO: 4247690 - DNA, 25 bp, Homo sapien
gattaggtaaatatctccaaagcag

SEQ ID NO: 4247691 - DNA, 25 bp, Homo sapien
tctactgcagaacatgattaggtaa

SEQ ID NO: 4247692 - DNA, 25 bp, Homo sapien
agcagtctttttaagccgatccatt

SEQ ID NO: 4247693 - DNA, 25 bp, Homo sapien
tgaggttgcaaagattactgaaggc

SEQ ID NO: 4247694 - DNA, 25 bp, Homo sapien
tgtacttatgtttatacttaggcac

SEQ ID NO: 4247695 - DNA, 25 bp, Homo sapien
ccattacacaatattgaggttgcaa

SEQ ID NO: 4247696 - DNA, 25 bp, Homo sapien
ggcataacctaaaaaatgagttgat

SEQ ID NO: 4247697 - DNA, 25 bp, Homo sapien
tagcctctgcacaccgtgagaataa

SEQ ID NO: 4247698 - DNA, 25 bp, Homo sapien
tctgtgcttacgcaacggataaagc

SEQ ID NO: 4247699 - DNA, 25 bp, Homo sapien
taaagccataagaactgtcctgccc

SEQ ID NO: 4247700 - DNA, 25 bp, Homo sapien
tagttttgacctcgcagacctctct

SEQ ID NO: 4247701 - DNA, 25 bp, Homo sapien
ggttgaagattacgatagctgtggc

SEQ ID NO: 4247702 - DNA, 25 bp, Homo sapien
taagggtgagggtatcaaggcttcc

SEQ ID NO: 4247703 - DNA, 25 bp, Homo sapien
caacgttaacgatggctactgactc

SEQ ID NO: 4247704 - DNA, 25 bp, Homo sapien
ggtatacctcagaaacacggcaggc

SEQ ID NO: 4247705 - DNA, 25 bp, Homo sapien
gcactgctttatcaaccaggtttct

SEQ ID NO: 4247706 - DNA, 25 bp, Homo sapien
gtaattcctaaatcctttattggca

SEQ ID NO: 4247707 - DNA, 25 bp, Homo sapien
tcctaaatcctttattggcatttta

SEQ ID NO: 4247708 - DNA, 25 bp, Homo sapien
attggcattttaacaatgttcacag

SEQ ID NO: 4247709 - DNA, 25 bp, Homo sapien
attcctaaatcctttattggcattt

SEQ ID NO: 4247710 - DNA, 25 bp, Homo sapien
tcagtcacatcttcaatgctttact

SEQ ID NO: 4247711 - DNA, 25 bp, Homo sapien
aatgctttacttccagttctagttc

SEQ ID NO: 4247712 - DNA, 25 bp, Homo sapien
cacatcttcaatgctttacttccag

SEQ ID NO: 4247713 - DNA, 25 bp, Homo sapien
ccagttctagttctcttcctgtttc

SEQ ID NO: 4247714 - DNA, 25 bp, Homo sapien
gcaacctgcaaagtccagtaccaga

SEQ ID NO: 4247715 - DNA, 25 bp, Homo sapien
actgatctctaggaaaagctggaaa

SEQ ID NO: 4247716 - DNA, 25 bp, Homo sapien
taccagaatccatacactagaggtg

SEQ ID NO: 4247717 - DNA, 25 bp, Homo sapien
ttactgttgtcagcaggaaaagcca

SEQ ID NO: 4247718 - DNA, 25 bp, Homo sapien
gcaatgattagtacaggaaacccaa

SEQ ID NO: 4247719 - DNA, 25 bp, Homo sapien
tggtgggatagatgtactcagagac

SEQ ID NO: 4247720 - DNA, 25 bp, Homo sapien
taaatgggaccctgaagtctctccc

SEQ ID NO: 4247721 - DNA, 25 bp, Homo sapien
cagagaccatgaggcatcagtttcc

SEQ ID NO: 4247722 - DNA, 25 bp, Homo sapien
attataattcctcaggataaaactt

SEQ ID NO: 4247723 - DNA, 25 bp, Homo sapien
tataattcctcaggataaaacttac

SEQ ID NO: 4247724 - DNA, 25 bp, Homo sapien
ttataattcctcaggataaaactta

SEQ ID NO: 4247725 - DNA, 25 bp, Homo sapien
tattataattcctcaggataaaact

SEQ ID NO: 4247726 - DNA, 25 bp, Homo sapien
tgggttcatttgtatcacacagacc

SEQ ID NO: 4247727 - DNA, 25 bp, Homo sapien
ccaatcaagtgtttccaggaagtga

SEQ ID NO: 4247728 - DNA, 25 bp, Homo sapien
caagatatgatgcttagagctcctc

SEQ ID NO: 4247729 - DNA, 25 bp, Homo sapien
aagtgaaaacttgtaggacagaaat

SEQ ID NO: 4247730 - DNA, 25 bp, Homo sapien
ctgtaatccacagaacaagtccggg

SEQ ID NO: 4247731 - DNA, 25 bp, Homo sapien
gcagcaagggtagcattccaaaaag

SEQ ID NO: 4247732 - DNA, 25 bp, Homo sapien
ttggaagctatcacacaggcatctg

SEQ ID NO: 4247733 - DNA, 25 bp, Homo sapien
cggcccgcgggttagacaacttgct

SEQ ID NO: 4247734 - DNA, 25 bp, Homo sapien
ctgtaaagcagtagtcaagatcacc

SEQ ID NO: 4247735 - DNA, 25 bp, Homo sapien
caattctctgtaaagcagtagtcaa

SEQ ID NO: 4247736 - DNA, 25 bp, Homo sapien
cagtagtcaagatcacctggactgt

SEQ ID NO: 4247737 - DNA, 25 bp, Homo sapien
tcacctggactgtgaagacggtcag

SEQ ID NO: 4247738 - DNA, 25 bp, Homo sapien
gaactcccataaaggtattgcggca

SEQ ID NO: 4247739 - DNA, 25 bp, Homo sapien
ccaggctacccaagatcaagagagg

SEQ ID NO: 4247740 - DNA, 25 bp, Homo sapien
gaagataaactaatcggagtcgccc

SEQ ID NO: 4247741 - DNA, 25 bp, Homo sapien
ttaagcctaggcaaaagaatcccgc

SEQ ID NO: 4247742 - DNA, 25 bp, Homo sapien
ccgcgcagtggtttcgctcatgtga

SEQ ID NO: 4247743 - DNA, 25 bp, Homo sapien
ttgtctcgcccttcaggcggtggga

SEQ ID NO: 4247744 - DNA, 25 bp, Homo sapien
cagccaatcaggtgtcgaagacaag

SEQ ID NO: 4247745 - DNA, 25 bp, Homo sapien
catgtgagactcgagccagtagcaa

SEQ ID NO: 4247746 - DNA, 25 bp, Homo sapien
tcgctaagcggctgcgtactcccga

SEQ ID NO: 4247747 - DNA, 25 bp, Homo sapien
ccacccagggggcaacgcgagagtc

SEQ ID NO: 4247748 - DNA, 25 bp, Homo sapien
gagagtcgctaagcggctgcgtact

SEQ ID NO: 4247749 - DNA, 25 bp, Homo sapien
gcaacgcgagagtcgctaagcggct

SEQ ID NO: 4247750 - DNA, 25 bp, Homo sapien
cagacggcccccctagccacccatc

SEQ ID NO: 4247751 - DNA, 25 bp, Homo sapien
ctcccctcccaccagagttccgctc

SEQ ID NO: 4247752 - DNA, 25 bp, Homo sapien
catccccccagtgtaccgcacctcc

SEQ ID NO: 4247753 - DNA, 25 bp, Homo sapien
aggcaacccccgcaagccaccagac

SEQ ID NO: 4247754 - DNA, 25 bp, Homo sapien
cggcgagtgggccaatgggtgcggg

SEQ ID NO: 4247755 - DNA, 25 bp, Homo sapien
cgctgggaatccccgtgcggtcagt

SEQ ID NO: 4247756 - DNA, 25 bp, Homo sapien
cggcggcttccgctgattggcggcg

SEQ ID NO: 4247757 - DNA, 25 bp, Homo sapien
tcagtggcgtttccgctcgggcagc

SEQ ID NO: 4247758 - DNA, 25 bp, Homo sapien
agtccgccaacacagtagtgccggc

SEQ ID NO: 4247759 - DNA, 25 bp, Homo sapien
ccctccccgcctttggctcgctccg

SEQ ID NO: 4247760 - DNA, 25 bp, Homo sapien
ccgcctttggctcgctccgcctttc

SEQ ID NO: 4247761 - DNA, 25 bp, Homo sapien
gccagtccgccaacacagtagtgcc

SEQ ID NO: 4247762 - DNA, 25 bp, Homo sapien
gttgggcctaactcgagtcctgccg

SEQ ID NO: 4247763 - DNA, 25 bp, Homo sapien
tggcgccgcgttgggcctaactcga

SEQ ID NO: 4247764 - DNA, 25 bp, Homo sapien
cattcccggccaggaaacgccgtgg

SEQ ID NO: 4247765 - DNA, 25 bp, Homo sapien
cctcccgggagtgccgtgcgccgca

SEQ ID NO: 4247766 - DNA, 25 bp, Homo sapien
tcttgctgccctccgctcgaaatac

SEQ ID NO: 4247767 - DNA, 25 bp, Homo sapien
tcccttgaggagaggcctcttgctg

SEQ ID NO: 4247768 - DNA, 25 bp, Homo sapien
cctcttgctgccctccgctcgaaat

SEQ ID NO: 4247769 - DNA, 25 bp, Homo sapien
ctttcccttgaggagaggcctcttg

SEQ ID NO: 4247770 - DNA, 25 bp, Homo sapien
caccacacgttctctggctccccgt

SEQ ID NO: 4247771 - DNA, 25 bp, Homo sapien
accacacgttctctggctccccgtg

SEQ ID NO: 4247772 - DNA, 25 bp, Homo sapien
tggagaacgatcttgtgagaatatc

SEQ ID NO: 4247773 - DNA, 25 bp, Homo sapien
tgagaatatcttcaaaggcagaaaa

SEQ ID NO: 4247774 - DNA, 25 bp, Homo sapien
cgatcttgtgagaatatcttcaaag

SEQ ID NO: 4247775 - DNA, 25 bp, Homo sapien
cttgggcgtggagaacgatcttgtg

SEQ ID NO: 4247776 - DNA, 25 bp, Homo sapien
agaagcttgagtagtgctggctgct

SEQ ID NO: 4247777 - DNA, 25 bp, Homo sapien
gtctccagggaaggacagcagtgca

SEQ ID NO: 4247778 - DNA, 25 bp, Homo sapien
tgagaagcttgagtagtgctggctg

SEQ ID NO: 4247779 - DNA, 25 bp, Homo sapien
ggaaggacagcagtgcagcgtccat

SEQ ID NO: 4247780 - DNA, 25 bp, Homo sapien
tattatgcctccagtaggcctgtca

SEQ ID NO: 4247781 - DNA, 25 bp, Homo sapien
ggccaaacagctagataagtgcggg

SEQ ID NO: 4247782 - DNA, 25 bp, Homo sapien
ccagtaggcctgtcaatatggccaa

SEQ ID NO: 4247783 - DNA, 25 bp, Homo sapien
cagactgactcccttattatgcctc

SEQ ID NO: 4247784 - DNA, 25 bp, Homo sapien
gctcgaacccaggtggcagaaattg

SEQ ID NO: 4247785 - DNA, 25 bp, Homo sapien
gaatcgctcgaacccaggtggcaga

SEQ ID NO: 4247786 - DNA, 25 bp, Homo sapien
atcgctcgaacccaggtggcagaaa

SEQ ID NO: 4247787 - DNA, 25 bp, Homo sapien
cgctcgaacccaggtggcagaaatt

SEQ ID NO: 4247788 - DNA, 25 bp, Homo sapien
gactcaacagagtcatcatgaattt

SEQ ID NO: 4247789 - DNA, 25 bp, Homo sapien
tccctgtatgttagactcaacagag

SEQ ID NO: 4247790 - DNA, 25 bp, Homo sapien
aaattgagcttctatcctagtgtct

SEQ ID NO: 4247791 - DNA, 25 bp, Homo sapien
gagtgatgttttgtcgatacttccc

SEQ ID NO: 4247792 - DNA, 25 bp, Homo sapien
ggtcctttacaaacactggatcctg

SEQ ID NO: 4247793 - DNA, 25 bp, Homo sapien
gacttcacaagtataccagtgctta

SEQ ID NO: 4247794 - DNA, 25 bp, Homo sapien
cagtggctggtgcaacataagcatc

SEQ ID NO: 4247795 - DNA, 25 bp, Homo sapien
gctttagggtattgtgtatgctgac

SEQ ID NO: 4247796 - DNA, 25 bp, Homo sapien
tagatgaaacaatcaacttattagt

SEQ ID NO: 4247797 - DNA, 25 bp, Homo sapien
caacttattagttggtcattgtcga

SEQ ID NO: 4247798 - DNA, 25 bp, Homo sapien
tggtcattgtcgatactagataatg

SEQ ID NO: 4247799 - DNA, 25 bp, Homo sapien
tttgctttagatagagaggagataa

SEQ ID NO: 4247800 - DNA, 25 bp, Homo sapien
tgctgtctgcataggctgttaacaa

SEQ ID NO: 4247801 - DNA, 25 bp, Homo sapien
tcacaggattactgaagcagacttg

SEQ ID NO: 4247802 - DNA, 25 bp, Homo sapien
aagactgtctgaagcatatgaggcc

SEQ ID NO: 4247803 - DNA, 25 bp, Homo sapien
tctctttctgaagcggcactcctct

SEQ ID NO: 4247804 - DNA, 25 bp, Homo sapien
tgtctgatgcaatttcttcttctga

SEQ ID NO: 4247805 - DNA, 25 bp, Homo sapien
ctgatgcaatttcttcttctgaaat

SEQ ID NO: 4247806 - DNA, 25 bp, Homo sapien
gtctgatgcaatttcttcttctgaa

SEQ ID NO: 4247807 - DNA, 25 bp, Homo sapien
ctgtctgatgcaatttcttcttctg

SEQ ID NO: 4247808 - DNA, 25 bp, Homo sapien
ctgttggaattgttcataaaacact

SEQ ID NO: 4247809 - DNA, 25 bp, Homo sapien
gtcttctctgtgagtgaccagggag

SEQ ID NO: 4247810 - DNA, 25 bp, Homo sapien
ctctgtgagtgaccagggagatcat

SEQ ID NO: 4247811 - DNA, 25 bp, Homo sapien
ttctctgtgagtgaccagggagatc

SEQ ID NO: 4247812 - DNA, 25 bp, Homo sapien
tgggtgtaggaacaggcgtattgtc

SEQ ID NO: 4247813 - DNA, 25 bp, Homo sapien
gggtgtaggaacaggcgtattgtca

SEQ ID NO: 4247814 - DNA, 25 bp, Homo sapien
tccccaaagtatagacatgactgcc

SEQ ID NO: 4247815 - DNA, 25 bp, Homo sapien
tataaagtcagctactaacctggta

SEQ ID NO: 4247816 - DNA, 25 bp, Homo sapien
tctccctgcattagtaggtagccag

SEQ ID NO: 4247817 - DNA, 25 bp, Homo sapien
catgactgcccgtaaatactgctgg

SEQ ID NO: 4247818 - DNA, 25 bp, Homo sapien
catgtgtatagttaaggttgggaac

SEQ ID NO: 4247819 - DNA, 25 bp, Homo sapien
gttaccacctatatacctcaggata

SEQ ID NO: 4247820 - DNA, 25 bp, Homo sapien
tataacttagctgaaatagactatc

SEQ ID NO: 4247821 - DNA, 25 bp, Homo sapien
tctagtattcaccaaaaattaggga

SEQ ID NO: 4247822 - DNA, 25 bp, Homo sapien
gcagcagtcaaatgcgcaagttata

SEQ ID NO: 4247823 - DNA, 25 bp, Homo sapien
tcaagaataccaaagagacattaag

SEQ ID NO: 4247824 - DNA, 25 bp, Homo sapien
tgatgttactagaagtctctgaggc

SEQ ID NO: 4247825 - DNA, 25 bp, Homo sapien
ctgggcctggtcacgtacctgtaat

SEQ ID NO: 4247826 - DNA, 25 bp, Homo sapien
aaatcactgtaactagactcagaca

SEQ ID NO: 4247827 - DNA, 25 bp, Homo sapien
gggaaaggatttgcagtaaaactgc

SEQ ID NO: 4247828 - DNA, 25 bp, Homo sapien
tcataatccttaacctagtagtcgt

SEQ ID NO: 4247829 - DNA, 25 bp, Homo sapien
ggagtaatatccctgctagcaatct

SEQ ID NO: 4247830 - DNA, 25 bp, Homo sapien
acattcagaagataagcccagtata

SEQ ID NO: 4247831 - DNA, 25 bp, Homo sapien
tggagaactagaacagaataactgg

SEQ ID NO: 4247832 - DNA, 25 bp, Homo sapien
gcccagtatatgtaagaatctaata

SEQ ID NO: 4247833 - DNA, 25 bp, Homo sapien
gggaaaggatggattaattgctacc

SEQ ID NO: 4247834 - DNA, 25 bp, Homo sapien
cgggtgtggtagcgagcacctgtag

SEQ ID NO: 4247835 - DNA, 25 bp, Homo sapien
atatagatagatggagccaggcgcg

SEQ ID NO: 4247836 - DNA, 25 bp, Homo sapien
tagccgggtgtggtagcgagcacct

SEQ ID NO: 4247837 - DNA, 25 bp, Homo sapien
gtggctcacgcctgtaatcccagca

SEQ ID NO: 4247838 - DNA, 25 bp, Homo sapien
tagaacagatttcaccaccctgacc

SEQ ID NO: 4247839 - DNA, 25 bp, Homo sapien
taaaaggtccaaggcatggtttcac

SEQ ID NO: 4247840 - DNA, 25 bp, Homo sapien
cagtgtgttccttatcccttgtagc

SEQ ID NO: 4247841 - DNA, 25 bp, Homo sapien
taagtcactttgcaaaacaagcggg

SEQ ID NO: 4247842 - DNA, 25 bp, Homo sapien
tgtgcactggttagggcttcatttg

SEQ ID NO: 4247843 - DNA, 25 bp, Homo sapien
cctgacatagttggaggcagaggaa

SEQ ID NO: 4247844 - DNA, 25 bp, Homo sapien
tcagtagaacgactccgagaaggag

SEQ ID NO: 4247845 - DNA, 25 bp, Homo sapien
gaacttgcaccctgttgcctttaca

SEQ ID NO: 4247846 - DNA, 25 bp, Homo sapien
tatgttaccttccagaccctgcaga

SEQ ID NO: 4247847 - DNA, 25 bp, Homo sapien
cagtttctgatgcagttgggctcca

SEQ ID NO: 4247848 - DNA, 25 bp, Homo sapien
cataggagtgtgttctgggtcccaa

SEQ ID NO: 4247849 - DNA, 25 bp, Homo sapien
tgtcacaaagagagcagtacgggtt

SEQ ID NO: 4247850 - DNA, 25 bp, Homo sapien
tgtggtcacaattggcctctggcct

SEQ ID NO: 4247851 - DNA, 25 bp, Homo sapien
gaacctaggccgagcatattgctga

SEQ ID NO: 4247852 - DNA, 25 bp, Homo sapien
tcagacgggactttcctagggcttc

SEQ ID NO: 4247853 - DNA, 25 bp, Homo sapien
tgcctgtagcccgtagtcacttgtg

SEQ ID NO: 4247854 - DNA, 25 bp, Homo sapien
tgtgcctgttgtacacccctggagg

SEQ ID NO: 4247855 - DNA, 25 bp, Homo sapien
ataggtttgtggagtggcaccgaca

SEQ ID NO: 4247856 - DNA, 25 bp, Homo sapien
cacccctaacactgttctggatgag

SEQ ID NO: 4247857 - DNA, 25 bp, Homo sapien
gagagatgagagcagaccggcttct

SEQ ID NO: 4247858 - DNA, 25 bp, Homo sapien
cattgggagtggaaatcatgttgcc

SEQ ID NO: 4247859 - DNA, 25 bp, Homo sapien
ggcagggtgctgtcaagaccagacc

SEQ ID NO: 4247860 - DNA, 25 bp, Homo sapien
ggtttgcattctccccttggctatt

SEQ ID NO: 4247861 - DNA, 25 bp, Homo sapien
caaacccatcagtctgggagagcat

SEQ ID NO: 4247862 - DNA, 25 bp, Homo sapien
tctcttgggacctgaagccggaagg

SEQ ID NO: 4247863 - DNA, 25 bp, Homo sapien
tggagaaaggttattccccgtgtgc

SEQ ID NO: 4247864 - DNA, 25 bp, Homo sapien
caacatctgattccggctagggtcc

SEQ ID NO: 4247865 - DNA, 25 bp, Homo sapien
tagacaatgaacagcgaggacacac

SEQ ID NO: 4247866 - DNA, 25 bp, Homo sapien
ggccagggtcaagggtccagtcatt

SEQ ID NO: 4247867 - DNA, 25 bp, Homo sapien
taccctgttcagagatgacctgcaa

SEQ ID NO: 4247868 - DNA, 25 bp, Homo sapien
caaggttggcaaacacatggcgctc

SEQ ID NO: 4247869 - DNA, 25 bp, Homo sapien
agaccctgggcatatcgcaaggcga

SEQ ID NO: 4247870 - DNA, 25 bp, Homo sapien
gaggccaggccagcccgggctgagc

SEQ ID NO: 4247871 - DNA, 25 bp, Homo sapien
caggccagcccgggctgagcagctt

SEQ ID NO: 4247872 - DNA, 25 bp, Homo sapien
ggccaggccagcccgggctgagcag

SEQ ID NO: 4247873 - DNA, 25 bp, Homo sapien
aggaggccaggccagcccgggctga

SEQ ID NO: 4247874 - DNA, 25 bp, Homo sapien
ttttctgactctgggctgatcaggg

SEQ ID NO: 4247875 - DNA, 25 bp, Homo sapien
gtcttttctgactctgggctgatca

SEQ ID NO: 4247876 - DNA, 25 bp, Homo sapien
ccctgtgcatccctcggtgcagctc

SEQ ID NO: 4247877 - DNA, 25 bp, Homo sapien
ctgtgcatccctcggtgcagctctc

SEQ ID NO: 4247878 - DNA, 25 bp, Homo sapien
gagcaagaattagaccctcccaagg

SEQ ID NO: 4247879 - DNA, 25 bp, Homo sapien
accagaagaggtgcggatacagcca

SEQ ID NO: 4247880 - DNA, 25 bp, Homo sapien
tgaggtcaggccaattactgggctg

SEQ ID NO: 4247881 - DNA, 25 bp, Homo sapien
ccctggagcagtatctagaataaat

SEQ ID NO: 4247882 - DNA, 25 bp, Homo sapien
cagggaaggactccccatccagaga

SEQ ID NO: 4247883 - DNA, 25 bp, Homo sapien
cacggggcagggaaggactccccat

SEQ ID NO: 4247884 - DNA, 25 bp, Homo sapien
tcagggtccctgtgagtgagccacg

SEQ ID NO: 4247885 - DNA, 25 bp, Homo sapien
agagacatcacccccgggccgcaac

SEQ ID NO: 4247886 - DNA, 25 bp, Homo sapien
tatttgaaattatcctgcctcccag

SEQ ID NO: 4247887 - DNA, 25 bp, Homo sapien
ttgaaattatcctgcctcccaggac

SEQ ID NO: 4247888 - DNA, 25 bp, Homo sapien
ttatttgaaattatcctgcctccca

SEQ ID NO: 4247889 - DNA, 25 bp, Homo sapien
atttgaaattatcctgcctcccagg

SEQ ID NO: 4247890 - DNA, 25 bp, Homo sapien
gccgctgccccccagcccacagcac

SEQ ID NO: 4247891 - DNA, 25 bp, Homo sapien
ccgccgctgccccccagcccacagc

SEQ ID NO: 4247892 - DNA, 25 bp, Homo sapien
caggcctggctcccgccgctgcccc

SEQ ID NO: 4247893 - DNA, 25 bp, Homo sapien
tcccgccgctgccccccagcccaca

SEQ ID NO: 4247894 - DNA, 25 bp, Homo sapien
gatgtatgcccagcgcactgaacag

SEQ ID NO: 4247895 - DNA, 25 bp, Homo sapien
gtcccggatggtctcggcatcccag

SEQ ID NO: 4247896 - DNA, 25 bp, Homo sapien
atcaggaaagatcatgcagcccagg

SEQ ID NO: 4247897 - DNA, 25 bp, Homo sapien
gtctgtttgccggttgcccagcacg

SEQ ID NO: 4247898 - DNA, 25 bp, Homo sapien
tccccaacacgtgctcctcttccag

SEQ ID NO: 4247899 - DNA, 25 bp, Homo sapien
cggagtgggccctccttctcatcgt

SEQ ID NO: 4247900 - DNA, 25 bp, Homo sapien
atggagggaatgctcccaggcccca

SEQ ID NO: 4247901 - DNA, 25 bp, Homo sapien
cctcttccggcttccaacggagtgg

SEQ ID NO: 4247902 - DNA, 25 bp, Homo sapien
aaggcttaggactgagccctggtgc

SEQ ID NO: 4247903 - DNA, 25 bp, Homo sapien
cacatagcgctgcactttgccagac

SEQ ID NO: 4247904 - DNA, 25 bp, Homo sapien
ctggtgctccagcattaacagggca

SEQ ID NO: 4247905 - DNA, 25 bp, Homo sapien
tccaggaccctatctgaaaggaaag

SEQ ID NO: 4247906 - DNA, 25 bp, Homo sapien
tgcagtagtcggtggctcccgccag

SEQ ID NO: 4247907 - DNA, 25 bp, Homo sapien
tggtgccagaggcgcgggtcctgca

SEQ ID NO: 4247908 - DNA, 25 bp, Homo sapien
ccgtggtgccagaggcgcgggtcct

SEQ ID NO: 4247909 - DNA, 25 bp, Homo sapien
ctctctggtcgtccattcccgtggt

SEQ ID NO: 4247910 - DNA, 25 bp, Homo sapien
ccctccttaggtgggacagcatggc

SEQ ID NO: 4247911 - DNA, 25 bp, Homo sapien
cataaaggtttctgctcatgggttc

SEQ ID NO: 4247912 - DNA, 25 bp, Homo sapien
tattcaccgtaagaacttggtagag

SEQ ID NO: 4247913 - DNA, 25 bp, Homo sapien
aagaggtctccgtcttttagtgagc

SEQ ID NO: 4247914 - DNA, 25 bp, Homo sapien
gagcaggtagaaagaccatacgtag

SEQ ID NO: 4247915 - DNA, 25 bp, Homo sapien
gaaagaccatacgtaggcatgatcc

SEQ ID NO: 4247916 - DNA, 25 bp, Homo sapien
caggtagaaagaccatacgtaggca

SEQ ID NO: 4247917 - DNA, 25 bp, Homo sapien
ggtagaaagaccatacgtaggcatg

SEQ ID NO: 4247918 - DNA, 25 bp, Homo sapien
ggcagaagattctgctgctgcaggg

SEQ ID NO: 4247919 - DNA, 25 bp, Homo sapien
gaagaaacaggcctcagtgggggca

SEQ ID NO: 4247920 - DNA, 25 bp, Homo sapien
ctatagggaagaaacaggcctcagt

SEQ ID NO: 4247921 - DNA, 25 bp, Homo sapien
gggggcagaagattctgctgctgca

SEQ ID NO: 4247922 - DNA, 25 bp, Homo sapien
ctctacaactctatggaatagatac

SEQ ID NO: 4247923 - DNA, 25 bp, Homo sapien
gcaaatagttatatagaatttacca

SEQ ID NO: 4247924 - DNA, 25 bp, Homo sapien
aagtactttacacatgctagttcat

SEQ ID NO: 4247925 - DNA, 25 bp, Homo sapien
gcaagacgtttgaggttatccaagt

SEQ ID NO: 4247926 - DNA, 25 bp, Homo sapien
tacaggactaagcatagggatggtt

SEQ ID NO: 4247927 - DNA, 25 bp, Homo sapien
actagacagtatgctccctgagagc

SEQ ID NO: 4247928 - DNA, 25 bp, Homo sapien
tagacctaagatccttggagacagg

SEQ ID NO: 4247929 - DNA, 25 bp, Homo sapien
ataaaagttaacaggaacaggccag

SEQ ID NO: 4247930 - DNA, 25 bp, Homo sapien
tgggtaccacagagaagtatggagc

SEQ ID NO: 4247931 - DNA, 25 bp, Homo sapien
ggagctgatctctaaggtgcctgaa

SEQ ID NO: 4247932 - DNA, 25 bp, Homo sapien
gggcaattcttccaatgaggcagta

SEQ ID NO: 4247933 - DNA, 25 bp, Homo sapien
tcctcttgtggaaacagaccagcct

SEQ ID NO: 4247934 - DNA, 25 bp, Homo sapien
ggtctcagggactcactcccattgg

SEQ ID NO: 4247935 - DNA, 25 bp, Homo sapien
taagatgactgtcttggtcaaacat

SEQ ID NO: 4247936 - DNA, 25 bp, Homo sapien
tcccattgggcatggcaccagaact

SEQ ID NO: 4247937 - DNA, 25 bp, Homo sapien
caaacatttcggagggtctcaggga

SEQ ID NO: 4247938 - DNA, 25 bp, Homo sapien
ccaccacgttgatgatggcgaagca

SEQ ID NO: 4247939 - DNA, 25 bp, Homo sapien
aaagcaggtgatgcagccgaggatc

SEQ ID NO: 4247940 - DNA, 25 bp, Homo sapien
tcttgtagaccgtagccgtgttgca

SEQ ID NO: 4247941 - DNA, 25 bp, Homo sapien
gcatccaggcgcagatcttgtagac

SEQ ID NO: 4247942 - DNA, 25 bp, Homo sapien
cctgagtcaaggaacccgcgagggc

SEQ ID NO: 4247943 - DNA, 25 bp, Homo sapien
ggacgcacgcgagaagcggccctga

SEQ ID NO: 4247944 - DNA, 25 bp, Homo sapien
gggacgcacgcgagaagcggccctg

SEQ ID NO: 4247945 - DNA, 25 bp, Homo sapien
ggccctgagtcaaggaacccgcgag

SEQ ID NO: 4247946 - DNA, 25 bp, Homo sapien
gcggcctccatcttgctcgggttct

SEQ ID NO: 4247947 - DNA, 25 bp, Homo sapien
ggatccgggactggcacggcctagg

SEQ ID NO: 4247948 - DNA, 25 bp, Homo sapien
cacggccggaggcagcggatccggg

SEQ ID NO: 4247949 - DNA, 25 bp, Homo sapien
cgcggcctccatcttgctcgggttc

SEQ ID NO: 4247950 - DNA, 25 bp, Homo sapien
tgcctcccagagaatgcggaggcta

SEQ ID NO: 4247951 - DNA, 25 bp, Homo sapien
ggttatcaaaactgtctctgtgcct

SEQ ID NO: 4247952 - DNA, 25 bp, Homo sapien
ggggtcacaagtctgggtggcatca

SEQ ID NO: 4247953 - DNA, 25 bp, Homo sapien
cagccaagcgagaagatgagacaat

SEQ ID NO: 4247954 - DNA, 25 bp, Homo sapien
ttggcatccacccaagaatgtacaa

SEQ ID NO: 4247955 - DNA, 25 bp, Homo sapien
ggaggaggggcacgagatcagatga

SEQ ID NO: 4247956 - DNA, 25 bp, Homo sapien
ggggaggaggggcacgagatcagat

SEQ ID NO: 4247957 - DNA, 25 bp, Homo sapien
gcagtcagttactgggttggggagg

SEQ ID NO: 4247958 - DNA, 25 bp, Homo sapien
gggaggaggggcacgagatcagatg

SEQ ID NO: 4247959 - DNA, 25 bp, Homo sapien
tcttatcgccagacctggagggctt

SEQ ID NO: 4247960 - DNA, 25 bp, Homo sapien
ccctgcttcaggtgccgtaggatga

SEQ ID NO: 4247961 - DNA, 25 bp, Homo sapien
ggatttccacccagtcgtcttatcg

SEQ ID NO: 4247962 - DNA, 25 bp, Homo sapien
agaaaaatagggagacgattcctcg

SEQ ID NO: 4247963 - DNA, 25 bp, Homo sapien
cccggactaagtcaaatcctcagga

SEQ ID NO: 4247964 - DNA, 25 bp, Homo sapien
gacgaagtagagcagaatcaacgga

SEQ ID NO: 4247965 - DNA, 25 bp, Homo sapien
tatacataccctatgtcagccactg

SEQ ID NO: 4247966 - DNA, 25 bp, Homo sapien
gggattagcttgcaatggtgaacaa

SEQ ID NO: 4247967 - DNA, 25 bp, Homo sapien
gggccaaagttaggacactgcgtaa

SEQ ID NO: 4247968 - DNA, 25 bp, Homo sapien
caatggcagttcagcgcaaggagag

SEQ ID NO: 4247969 - DNA, 25 bp, Homo sapien
gccctaagtgcagctggactgtaca

SEQ ID NO: 4247970 - DNA, 25 bp, Homo sapien
tgtacagaacactccaagggccaat

SEQ ID NO: 4247971 - DNA, 25 bp, Homo sapien
ggaaaatgcagtgaggagtggtagg

SEQ ID NO: 4247972 - DNA, 25 bp, Homo sapien
ggcagagaaactcccggttcaggga

SEQ ID NO: 4247973 - DNA, 25 bp, Homo sapien
cagtgaggagtggtagggaagcagg

SEQ ID NO: 4247974 - DNA, 25 bp, Homo sapien
gagtggtagggaagcaggtgaggag

SEQ ID NO: 4247975 - DNA, 25 bp, Homo sapien
cacgcagcagtctcgacagcaacag

SEQ ID NO: 4247976 - DNA, 25 bp, Homo sapien
cggctccacgcagcagtctcgacag

SEQ ID NO: 4247977 - DNA, 25 bp, Homo sapien
agcagtctcgacagcaacagccagc

SEQ ID NO: 4247978 - DNA, 25 bp, Homo sapien
ctccacgcagcagtctcgacagcaa

SEQ ID NO: 4247979 - DNA, 25 bp, Homo sapien
agcccgggtgcacctttgtggacca

SEQ ID NO: 4247980 - DNA, 25 bp, Homo sapien
gcccgggtgcacctttgtggaccac

SEQ ID NO: 4247981 - DNA, 25 bp, Homo sapien
agtttcctcatgtgccgcaccacag

SEQ ID NO: 4247982 - DNA, 25 bp, Homo sapien
cgcaccacagccgtggcattgaagg

SEQ ID NO: 4247983 - DNA, 25 bp, Homo sapien
tggctcgccgtctgcccctgcccct

SEQ ID NO: 4247984 - DNA, 25 bp, Homo sapien
agctccccatggctcgccgtctgcc

SEQ ID NO: 4247985 - DNA, 25 bp, Homo sapien
caggtgtgtctctattcaatatctc

SEQ ID NO: 4247986 - DNA, 25 bp, Homo sapien
cacacgcacatatgttagatgtatg

SEQ ID NO: 4247987 - DNA, 25 bp, Homo sapien
aacactatagcactgtatgtcaggc

SEQ ID NO: 4247988 - DNA, 25 bp, Homo sapien
ggcgcagtgggattcttgcaattgt

SEQ ID NO: 4247989 - DNA, 25 bp, Homo sapien
ctcctaatgcgtcacccagtcttta

SEQ ID NO: 4247990 - DNA, 25 bp, Homo sapien
taatgcgtcacccagtctttactcc

SEQ ID NO: 4247991 - DNA, 25 bp, Homo sapien
acagcctcctaatgcgtcacccagt

SEQ ID NO: 4247992 - DNA, 25 bp, Homo sapien
tgcgtcacccagtctttactccatg

SEQ ID NO: 4247993 - DNA, 25 bp, Homo sapien
gatctgctcactcaccgactggtgg

SEQ ID NO: 4247994 - DNA, 25 bp, Homo sapien
tattcttatctagagctgtatctcc

SEQ ID NO: 4247995 - DNA, 25 bp, Homo sapien
ttcttgatctgctcactcaccgact

SEQ ID NO: 4247996 - DNA, 25 bp, Homo sapien
caccgactggtggatattcttatct

SEQ ID NO: 4247997 - DNA, 25 bp, Homo sapien
ctccatcaagtgccggatgaaatct

SEQ ID NO: 4247998 - DNA, 25 bp, Homo sapien
ccttctccatcaagtgccggatgaa

SEQ ID NO: 4247999 - DNA, 25 bp, Homo sapien
catcaagtgccggatgaaatctttg

SEQ ID NO: 4248000 - DNA, 25 bp, Homo sapien
atcaagtgccggatgaaatctttgg

SEQ ID NO: 4248001 - DNA, 25 bp, Homo sapien
ggagagtcaaactcgtactcggcct

SEQ ID NO: 4248002 - DNA, 25 bp, Homo sapien
ctcgtactcggccttcaaaatctgt

SEQ ID NO: 4248003 - DNA, 25 bp, Homo sapien
cagagatgtcgtcccagtaaggaga

SEQ ID NO: 4248004 - DNA, 25 bp, Homo sapien
cgtcatagaagggagggtaaccgca

SEQ ID NO: 4248005 - DNA, 25 bp, Homo sapien
ctcatttccactttcgggtgccgtt

SEQ ID NO: 4248006 - DNA, 25 bp, Homo sapien
ccactttcgggtgccgttggctccg

SEQ ID NO: 4248007 - DNA, 25 bp, Homo sapien
catttccactttcgggtgccgttgg

SEQ ID NO: 4248008 - DNA, 25 bp, Homo sapien
ttccactttcgggtgccgttggctc

SEQ ID NO: 4248009 - DNA, 25 bp, Homo sapien
cgatgacacctatggaccagcaatc

SEQ ID NO: 4248010 - DNA, 25 bp, Homo sapien
gttccacaggcggtggagagcacac

SEQ ID NO: 4248011 - DNA, 25 bp, Homo sapien
ggctgtagtacagcagattctctgg

SEQ ID NO: 4248012 - DNA, 25 bp, Homo sapien
ggagatcatgattttggagtcttca

SEQ ID NO: 4248013 - DNA, 25 bp, Homo sapien
gtggagagcacactgcccgggtcct

SEQ ID NO: 4248014 - DNA, 25 bp, Homo sapien
agaggctggtagaaccttctgccgc

SEQ ID NO: 4248015 - DNA, 25 bp, Homo sapien
gatggttagaggctggtagaacctt

SEQ ID NO: 4248016 - DNA, 25 bp, Homo sapien
gttagaggctggtagaaccttctgc

SEQ ID NO: 4248017 - DNA, 25 bp, Homo sapien
tggttagaggctggtagaaccttct

SEQ ID NO: 4248018 - DNA, 25 bp, Homo sapien
ttgagatcccggtgtacaatgccca

SEQ ID NO: 4248019 - DNA, 25 bp, Homo sapien
ttccacaatacggtcaaagagctcc

SEQ ID NO: 4248020 - DNA, 25 bp, Homo sapien
gcgtcccgctccgtgtagaagcctt

SEQ ID NO: 4248021 - DNA, 25 bp, Homo sapien
caggtcatgcaggtatttcacagca

SEQ ID NO: 4248022 - DNA, 25 bp, Homo sapien
gatgaggtagaggtggcccccactc

SEQ ID NO: 4248023 - DNA, 25 bp, Homo sapien
agaggtggcccccactctcatagat

SEQ ID NO: 4248024 - DNA, 25 bp, Homo sapien
gtggcccccactctcatagatgtca

SEQ ID NO: 4248025 - DNA, 25 bp, Homo sapien
ggctacaatgttggggtgcttgatc

SEQ ID NO: 4248026 - DNA, 25 bp, Homo sapien
accagcttctgcgtcctcttatctt

SEQ ID NO: 4248027 - DNA, 25 bp, Homo sapien
ggcctccttggcaatgcatttgatg

SEQ ID NO: 4248028 - DNA, 25 bp, Homo sapien
tgccaggatcacctccgagaaggcc

SEQ ID NO: 4248029 - DNA, 25 bp, Homo sapien
tggcaatgcatttgatggccaccag

SEQ ID NO: 4248030 - DNA, 25 bp, Homo sapien
cctggagctaatggcgatcatcttt

SEQ ID NO: 4248031 - DNA, 25 bp, Homo sapien
taatggcgatcatctttgccaccac

SEQ ID NO: 4248032 - DNA, 25 bp, Homo sapien
tagcactttgagaatgagtctcctg

SEQ ID NO: 4248033 - DNA, 25 bp, Homo sapien
ctggtaggatgtaagcctggagcta

SEQ ID NO: 4248034 - DNA, 25 bp, Homo sapien
gaagtcgtagatgtctctaatgtcc

SEQ ID NO: 4248035 - DNA, 25 bp, Homo sapien
tgtctctaatgtcctccgcctgctt

SEQ ID NO: 4248036 - DNA, 25 bp, Homo sapien
tctcggaagtcgtagatgtctctaa

SEQ ID NO: 4248037 - DNA, 25 bp, Homo sapien
gtgcccagaacatctcggaagtcgt

SEQ ID NO: 4248038 - DNA, 25 bp, Homo sapien
ggcccactgccccccgaccacagcc

SEQ ID NO: 4248039 - DNA, 25 bp, Homo sapien
cccactgccccccgaccacagccag

SEQ ID NO: 4248040 - DNA, 25 bp, Homo sapien
cactgccccccgaccacagccaggg

SEQ ID NO: 4248041 - DNA, 25 bp, Homo sapien
actgccccccgaccacagccagggc

SEQ ID NO: 4248042 - DNA, 25 bp, Homo sapien
tacatgtactcccagacatcagcac

SEQ ID NO: 4248043 - DNA, 25 bp, Homo sapien
gccttgtatccacatcccgtgacac

SEQ ID NO: 4248044 - DNA, 25 bp, Homo sapien
acatgtactcccagacatcagcaca

SEQ ID NO: 4248045 - DNA, 25 bp, Homo sapien
cccgtgacacctgatcatacatgta

SEQ ID NO: 4248046 - DNA, 25 bp, Homo sapien
tggttggcgccgagctgtggccgcg

SEQ ID NO: 4248047 - DNA, 25 bp, Homo sapien
gaggcccgcggtggttggcgccgag

SEQ ID NO: 4248048 - DNA, 25 bp, Homo sapien
ctggctgggaggcccgcggtggttg

SEQ ID NO: 4248049 - DNA, 25 bp, Homo sapien
ttggcgccgagctgtggccgcggtc

SEQ ID NO: 4248050 - DNA, 25 bp, Homo sapien
ctcggcggctctctccgcccgcctg

SEQ ID NO: 4248051 - DNA, 25 bp, Homo sapien
gctcggcggctctctccgcccgcct

SEQ ID NO: 4248052 - DNA, 25 bp, Homo sapien
tgcggctctgatgtcagtggaggtg

SEQ ID NO: 4248053 - DNA, 25 bp, Homo sapien
ggtgttgctgaaagtcagctgtaag

SEQ ID NO: 4248054 - DNA, 25 bp, Homo sapien
agagactgccgccatttgagggaca

SEQ ID NO: 4248055 - DNA, 25 bp, Homo sapien
ggaccaagcagagactaggcctcag

SEQ ID NO: 4248056 - DNA, 25 bp, Homo sapien
tttcctgtgcccaaagaaggaagtg

SEQ ID NO: 4248057 - DNA, 25 bp, Homo sapien
ctggttgtacagagctaggccaaaa

SEQ ID NO: 4248058 - DNA, 25 bp, Homo sapien
ttcttggtgggagtccgcttcttct

SEQ ID NO: 4248059 - DNA, 25 bp, Homo sapien
tgacctcgttgtcagccatgcgcac

SEQ ID NO: 4248060 - DNA, 25 bp, Homo sapien
tgcgaaaggcgtccatgacctcgtt

SEQ ID NO: 4248061 - DNA, 25 bp, Homo sapien
ttctgccgggcagccatgatcttgc

SEQ ID NO: 4248062 - DNA, 25 bp, Homo sapien
gttactgacctacacttacatggca

SEQ ID NO: 4248063 - DNA, 25 bp, Homo sapien
tacatggcactatcttaagctcctg

SEQ ID NO: 4248064 - DNA, 25 bp, Homo sapien
gcatgcctgtggattgtgtcataca

SEQ ID NO: 4248065 - DNA, 25 bp, Homo sapien
tacagtcgtgaccaaaaagcagtta

SEQ ID NO: 4248066 - DNA, 25 bp, Homo sapien
ttagtagagaagggggtctgactac

SEQ ID NO: 4248067 - DNA, 25 bp, Homo sapien
tagagaagggggtctgactacattg

SEQ ID NO: 4248068 - DNA, 25 bp, Homo sapien
gagaagggggtctgactacattgcc

SEQ ID NO: 4248069 - DNA, 25 bp, Homo sapien
agtagagaagggggtctgactacat

SEQ ID NO: 4248070 - DNA, 25 bp, Homo sapien
ggtggagaatatactgatgtttatt

SEQ ID NO: 4248071 - DNA, 25 bp, Homo sapien
tgaatatgggtaacactactaaact

SEQ ID NO: 4248072 - DNA, 25 bp, Homo sapien
tactgatgtttattgtatgattctt

SEQ ID NO: 4248073 - DNA, 25 bp, Homo sapien
atgtgaatatgggtaacactactaa

SEQ ID NO: 4248074 - DNA, 25 bp, Homo sapien
cagcctcccatggagatacatttta

SEQ ID NO: 4248075 - DNA, 25 bp, Homo sapien
gctctccaggtgatttagaggccag

SEQ ID NO: 4248076 - DNA, 25 bp, Homo sapien
cctgaaaggtgactagccgtggcca

SEQ ID NO: 4248077 - DNA, 25 bp, Homo sapien
tcaatcggtcagtcacagatgcctg

SEQ ID NO: 4248078 - DNA, 25 bp, Homo sapien
cccgggactgtgcatcctgctaacg

SEQ ID NO: 4248079 - DNA, 25 bp, Homo sapien
ctccagggacttagtatgcggcaca

SEQ ID NO: 4248080 - DNA, 25 bp, Homo sapien
ggcactaagtgccttcagctcagcc

SEQ ID NO: 4248081 - DNA, 25 bp, Homo sapien
aaaggccctgggcaattagctcctc

SEQ ID NO: 4248082 - DNA, 25 bp, Homo sapien
gctcagcaaggacctcatcctcgga

SEQ ID NO: 4248083 - DNA, 25 bp, Homo sapien
gtgcttgccccgtcagcccctgatt

SEQ ID NO: 4248084 - DNA, 25 bp, Homo sapien
ctgaagggcttgttctgattgcgag

SEQ ID NO: 4248085 - DNA, 25 bp, Homo sapien
tgattgcgaggggaggtgcttgccc

SEQ ID NO: 4248086 - DNA, 25 bp, Homo sapien
gtcaggaataggagaatcctccata

SEQ ID NO: 4248087 - DNA, 25 bp, Homo sapien
tgcaggaggcgctgcgtcagggcac

SEQ ID NO: 4248088 - DNA, 25 bp, Homo sapien
accaaaggggcatccatcttccggc

SEQ ID NO: 4248089 - DNA, 25 bp, Homo sapien
gaggcgctgcgtcagggcaccaaag

SEQ ID NO: 4248090 - DNA, 25 bp, Homo sapien
caggaggcgctgcgtcagggcacca

SEQ ID NO: 4248091 - DNA, 25 bp, Homo sapien
agttcggtcagtggccccatgaggc

SEQ ID NO: 4248092 - DNA, 25 bp, Homo sapien
tagtgtccagttcggtcagtggccc

SEQ ID NO: 4248093 - DNA, 25 bp, Homo sapien
cagcgctgggagtagtgcttcccca

SEQ ID NO: 4248094 - DNA, 25 bp, Homo sapien
ctttagtgtccagttcggtcagtgg

SEQ ID NO: 4248095 - DNA, 25 bp, Homo sapien
aaccctgagtgggtaagcactggcc

SEQ ID NO: 4248096 - DNA, 25 bp, Homo sapien
tcaacacggcaatgaagagggatat

SEQ ID NO: 4248097 - DNA, 25 bp, Homo sapien
tacttggtgggactggtcaacacgg

SEQ ID NO: 4248098 - DNA, 25 bp, Homo sapien
gaatacgtacacagattgtctcagg

SEQ ID NO: 4248099 - DNA, 25 bp, Homo sapien
tgcaaccgatgcctccccagttcag

SEQ ID NO: 4248100 - DNA, 25 bp, Homo sapien
atggatggaatctccttctgtcacc

SEQ ID NO: 4248101 - DNA, 25 bp, Homo sapien
ttaatggatggaatctccttctgtc

SEQ ID NO: 4248102 - DNA, 25 bp, Homo sapien
ttttttaatggatggaatctccttc

SEQ ID NO: 4248103 - DNA, 25 bp, Homo sapien
tcttgttccgcatcatgtctatcaa

SEQ ID NO: 4248104 - DNA, 25 bp, Homo sapien
atcatgtctatcaaggcccagagtt

SEQ ID NO: 4248105 - DNA, 25 bp, Homo sapien
catgtctatcaaggcccagagtttc

SEQ ID NO: 4248106 - DNA, 25 bp, Homo sapien
gaactctcttgttccgcatcatgtc

SEQ ID NO: 4248107 - DNA, 25 bp, Homo sapien
ggagaagcagatcctgagtgggcgc

SEQ ID NO: 4248108 - DNA, 25 bp, Homo sapien
gagaagcagatcctgagtgggcgcc

SEQ ID NO: 4248109 - DNA, 25 bp, Homo sapien
agggagaagcagatcctgagtgggc

SEQ ID NO: 4248110 - DNA, 25 bp, Homo sapien
gcagggagaagcagatcctgagtgg

SEQ ID NO: 4248111 - DNA, 25 bp, Homo sapien
cttgaggcccccttctatgttctct

SEQ ID NO: 4248112 - DNA, 25 bp, Homo sapien
tgaggcccccttctatgttctctag

SEQ ID NO: 4248113 - DNA, 25 bp, Homo sapien
gaggcccccttctatgttctctagc

SEQ ID NO: 4248114 - DNA, 25 bp, Homo sapien
accttgaggcccccttctatgttct

SEQ ID NO: 4248115 - DNA, 25 bp, Homo sapien
ccaagttcatggtctcgacccagct

SEQ ID NO: 4248116 - DNA, 25 bp, Homo sapien
gatccgtggcacgtcgatagggtca

SEQ ID NO: 4248117 - DNA, 25 bp, Homo sapien
cagcttcaggaatcgtctgtcacct

SEQ ID NO: 4248118 - DNA, 25 bp, Homo sapien
ttcttatcctgccagtcggtgagga

SEQ ID NO: 4248119 - DNA, 25 bp, Homo sapien
gtttcggcctcaagcacacgcaggc

SEQ ID NO: 4248120 - DNA, 25 bp, Homo sapien
tgccatcatcctcagagcgtgccag

SEQ ID NO: 4248121 - DNA, 25 bp, Homo sapien
tagcggggacagaccttcaggtgat

SEQ ID NO: 4248122 - DNA, 25 bp, Homo sapien
cagacttgaagtcgtggaactgcaa

SEQ ID NO: 4248123 - DNA, 25 bp, Homo sapien
caagatgcaatttgaaccccgctag

SEQ ID NO: 4248124 - DNA, 25 bp, Homo sapien
tccaagatgcaatttgaaccccgct

SEQ ID NO: 4248125 - DNA, 25 bp, Homo sapien
gatgcaatttgaaccccgctagtct

SEQ ID NO: 4248126 - DNA, 25 bp, Homo sapien
tgcttccaagatgcaatttgaaccc

SEQ ID NO: 4248127 - DNA, 25 bp, Homo sapien
cgtcaagagcccagttcagtgtctg

SEQ ID NO: 4248128 - DNA, 25 bp, Homo sapien
ggactgtttaatggctggccccgcc

SEQ ID NO: 4248129 - DNA, 25 bp, Homo sapien
ggagttccggtcgatgtgagcaacc

SEQ ID NO: 4248130 - DNA, 25 bp, Homo sapien
gaggattaagagatgatgcccgtca

SEQ ID NO: 4248131 - DNA, 25 bp, Homo sapien
gagatctccgcgctgcagttagccc

SEQ ID NO: 4248132 - DNA, 25 bp, Homo sapien
agcttggcggccgagatctccgcgc

SEQ ID NO: 4248133 - DNA, 25 bp, Homo sapien
gcctcgagcaaagccgctagaggtg

SEQ ID NO: 4248134 - DNA, 25 bp, Homo sapien
aaggtgggcctcgagcaaagccgct

SEQ ID NO: 4248135 - DNA, 25 bp, Homo sapien
ctgcgggtaggaggggcgagagaaa

SEQ ID NO: 4248136 - DNA, 25 bp, Homo sapien
ggtaggaggggcgagagaaaggatg

SEQ ID NO: 4248137 - DNA, 25 bp, Homo sapien
taggaggggcgagagaaaggatggg

SEQ ID NO: 4248138 - DNA, 25 bp, Homo sapien
tgcgggtaggaggggcgagagaaag

SEQ ID NO: 4248139 - DNA, 25 bp, Homo sapien
gctgtggcaaaggtgacaagaaggc

SEQ ID NO: 4248140 - DNA, 25 bp, Homo sapien
tggcaaaggtgacaagaaggccgaa

SEQ ID NO: 4248141 - DNA, 25 bp, Homo sapien
tgtggcaaaggtgacaagaaggccg

SEQ ID NO: 4248142 - DNA, 25 bp, Homo sapien
gaggctgtggcaaaggtgacaagaa

SEQ ID NO: 4248143 - DNA, 25 bp, Homo sapien
ggcggagaccgtagctgcgcttctc

SEQ ID NO: 4248144 - DNA, 25 bp, Homo sapien
cccgctcggagcatagatggtaccg

SEQ ID NO: 4248145 - DNA, 25 bp, Homo sapien
atagatggtaccgtccggaagtccg

SEQ ID NO: 4248146 - DNA, 25 bp, Homo sapien
tgcgcttctcgcgaaagggcaggca

SEQ ID NO: 4248147 - DNA, 25 bp, Homo sapien
gaccccctaatccaaatacttcata

SEQ ID NO: 4248148 - DNA, 25 bp, Homo sapien
ttacctaccagcctagacactctga

SEQ ID NO: 4248149 - DNA, 25 bp, Homo sapien
tgattttctcttatctagtttccat

SEQ ID NO: 4248150 - DNA, 25 bp, Homo sapien
taatgtaatgatcagggattttttt

SEQ ID NO: 4248151 - DNA, 25 bp, Homo sapien
cctgagttctgcctaaagatggccc

SEQ ID NO: 4248152 - DNA, 25 bp, Homo sapien
cctggagccagaaggcgacttattt

SEQ ID NO: 4248153 - DNA, 25 bp, Homo sapien
cattgggtgccctcccagttgagag

SEQ ID NO: 4248154 - DNA, 25 bp, Homo sapien
tccttggccccagtataagtgttgg

SEQ ID NO: 4248155 - DNA, 25 bp, Homo sapien
gcaacttaacagctaccagtgactg

SEQ ID NO: 4248156 - DNA, 25 bp, Homo sapien
tataaacaatctgatacggtcgctg

SEQ ID NO: 4248157 - DNA, 25 bp, Homo sapien
gacaaaagacccttgtgtttgagtc

SEQ ID NO: 4248158 - DNA, 25 bp, Homo sapien
tccattggatagtactagaccttag

SEQ ID NO: 4248159 - DNA, 25 bp, Homo sapien
aatccaaggctgctacccggtgatc

SEQ ID NO: 4248160 - DNA, 25 bp, Homo sapien
tgaggacgaggagttccagccatca

SEQ ID NO: 4248161 - DNA, 25 bp, Homo sapien
tgatgacctagatggaacacatgct

SEQ ID NO: 4248162 - DNA, 25 bp, Homo sapien
tctggatagctcagcgatgggtgac

SEQ ID NO: 4248163 - DNA, 25 bp, Homo sapien
tttgaccgagtgtgtaccttgtgcc

SEQ ID NO: 4248164 - DNA, 25 bp, Homo sapien
cacaagtgaaattatctaacaggtt

SEQ ID NO: 4248165 - DNA, 25 bp, Homo sapien
aacaggcaagcaagaacacaagtga

SEQ ID NO: 4248166 - DNA, 25 bp, Homo sapien
ttctgggcacttggggtatagcagt

SEQ ID NO: 4248167 - DNA, 25 bp, Homo sapien
gagcacacaggttagatgacttccc

SEQ ID NO: 4248168 - DNA, 25 bp, Homo sapien
gcgcttgaacacgtcctggcgatga

SEQ ID NO: 4248169 - DNA, 25 bp, Homo sapien
ggttaactgagactatgcacaaagc

SEQ ID NO: 4248170 - DNA, 25 bp, Homo sapien
cacaactagtgtggagatggcgctt

SEQ ID NO: 4248171 - DNA, 25 bp, Homo sapien
cagtagggccccatctcaagttgaa

SEQ ID NO: 4248172 - DNA, 25 bp, Homo sapien
tgcttccgccagacaacatgtggtc

SEQ ID NO: 4248173 - DNA, 25 bp, Homo sapien
gaagcacctggagaactcatgccat

SEQ ID NO: 4248174 - DNA, 25 bp, Homo sapien
tgtggtctagccagaggttccaggc

SEQ ID NO: 4248175 - DNA, 25 bp, Homo sapien
gcgcccggcaatagctgcatttttt

SEQ ID NO: 4248176 - DNA, 25 bp, Homo sapien
ccgcgcccggcaatagctgcatttt

SEQ ID NO: 4248177 - DNA, 25 bp, Homo sapien
cgcgcccggcaatagctgcattttt

SEQ ID NO: 4248178 - DNA, 25 bp, Homo sapien
gtgagggggtcaggaacagagggag

SEQ ID NO: 4248179 - DNA, 25 bp, Homo sapien
cttttattatcacaagtccagagag

SEQ ID NO: 4248180 - DNA, 25 bp, Homo sapien
tttattatcacaagtccagagaggt

SEQ ID NO: 4248181 - DNA, 25 bp, Homo sapien
gaggtaaagttacttgcccaatgcc

SEQ ID NO: 4248182 - DNA, 25 bp, Homo sapien
ctgtagggtcctggagaaataaggg

SEQ ID NO: 4248183 - DNA, 25 bp, Homo sapien
gtctgaggagggcttcatccaggac

SEQ ID NO: 4248184 - DNA, 25 bp, Homo sapien
ccgatgtaggtggaggtgcaagggc

SEQ ID NO: 4248185 - DNA, 25 bp, Homo sapien
tcaggtggaggcgtctgaggagggc

SEQ ID NO: 4248186 - DNA, 25 bp, Homo sapien
ggagaggtacgttgtgttcagcccc

SEQ ID NO: 4248187 - DNA, 25 bp, Homo sapien
acattttccaagcagctgagtaccc

SEQ ID NO: 4248188 - DNA, 25 bp, Homo sapien
tacgttgtgttcagccccacatttt

SEQ ID NO: 4248189 - DNA, 25 bp, Homo sapien
ctggagcgggagaggtacgttgtgt

SEQ ID NO: 4248190 - DNA, 25 bp, Homo sapien
ctcccttattgaacacatggacaga

SEQ ID NO: 4248191 - DNA, 25 bp, Homo sapien
cacatcaactcccttattgaacaca

SEQ ID NO: 4248192 - DNA, 25 bp, Homo sapien
tcaactcccttattgaacacatgga

SEQ ID NO: 4248193 - DNA, 25 bp, Homo sapien
aactcccttattgaacacatggaca

SEQ ID NO: 4248194 - DNA, 25 bp, Homo sapien
cacaccaagatgtgggtacggatac

SEQ ID NO: 4248195 - DNA, 25 bp, Homo sapien
cccagtagtcccaagctgcacagat

SEQ ID NO: 4248196 - DNA, 25 bp, Homo sapien
tacggatacagccttgggagccaaa

SEQ ID NO: 4248197 - DNA, 25 bp, Homo sapien
gcacagataaggtctggagatgctg

SEQ ID NO: 4248198 - DNA, 25 bp, Homo sapien
ctctccctccacccctcagaaagca

SEQ ID NO: 4248199 - DNA, 25 bp, Homo sapien
cctccacccctcagaaagcagcagg

SEQ ID NO: 4248200 - DNA, 25 bp, Homo sapien
gcagcaggcaggtgggctggagtac

SEQ ID NO: 4248201 - DNA, 25 bp, Homo sapien
tccacccctcagaaagcagcaggca

SEQ ID NO: 4248202 - DNA, 25 bp, Homo sapien
gagctgtagtaccatgtgcacctgt

SEQ ID NO: 4248203 - DNA, 25 bp, Homo sapien
cagcagaaatcgctggcccaggaca

SEQ ID NO: 4248204 - DNA, 25 bp, Homo sapien
ggacagtgcccacacgggcagagta

SEQ ID NO: 4248205 - DNA, 25 bp, Homo sapien
agtacatgtggtccccaagcacagg

SEQ ID NO: 4248206 - DNA, 25 bp, Homo sapien
gagagggacacataacacgtcagga

SEQ ID NO: 4248207 - DNA, 25 bp, Homo sapien
tgggcctggtcacatacacctctgg

SEQ ID NO: 4248208 - DNA, 25 bp, Homo sapien
tcagtgaggtcagtactatggcccc

SEQ ID NO: 4248209 - DNA, 25 bp, Homo sapien
tttaattgctgaagccaccgggcct

SEQ ID NO: 4248210 - DNA, 25 bp, Homo sapien
aagtgcagttttaaaggctggctag

SEQ ID NO: 4248211 - DNA, 25 bp, Homo sapien
aggctggctagggtgccagacctac

SEQ ID NO: 4248212 - DNA, 25 bp, Homo sapien
agcctcccaaatcaagtgcagtttt

SEQ ID NO: 4248213 - DNA, 25 bp, Homo sapien
agtctcctctatcacctagactgga

SEQ ID NO: 4248214 - DNA, 25 bp, Homo sapien
tgactgagagtcttcttgacacctt

SEQ ID NO: 4248215 - DNA, 25 bp, Homo sapien
tcgggatggggccttcactggaact

SEQ ID NO: 4248216 - DNA, 25 bp, Homo sapien
tgtggctaccacacgaaagtgactg

SEQ ID NO: 4248217 - DNA, 25 bp, Homo sapien
ccttccaggatgtcctttcgggatg

SEQ ID NO: 4248218 - DNA, 25 bp, Homo sapien
tggtgccagccaagagtgaacaagc

SEQ ID NO: 4248219 - DNA, 25 bp, Homo sapien
ctgtggtgccagccaagagtgaaca

SEQ ID NO: 4248220 - DNA, 25 bp, Homo sapien
tgtggtgccagccaagagtgaacaa

SEQ ID NO: 4248221 - DNA, 25 bp, Homo sapien
gtggtgccagccaagagtgaacaag

SEQ ID NO: 4248222 - DNA, 25 bp, Homo sapien
ggcagggccacagtataggcagtgg

SEQ ID NO: 4248223 - DNA, 25 bp, Homo sapien
acaggtctgggagctatacccagac

SEQ ID NO: 4248224 - DNA, 25 bp, Homo sapien
tgctcccaatagactccgggcaggg

SEQ ID NO: 4248225 - DNA, 25 bp, Homo sapien
ctccctgctcccaatagactccggg

SEQ ID NO: 4248226 - DNA, 25 bp, Homo sapien
aaatccatacccctgactcctctct

SEQ ID NO: 4248227 - DNA, 25 bp, Homo sapien
gagagccagccatcccaaatccata

SEQ ID NO: 4248228 - DNA, 25 bp, Homo sapien
ctctctgtaggggtactatatctag

SEQ ID NO: 4248229 - DNA, 25 bp, Homo sapien
tactatatctagaagcacccctcct

SEQ ID NO: 4248230 - DNA, 25 bp, Homo sapien
gtgttccagtttcagggcagcctgg

SEQ ID NO: 4248231 - DNA, 25 bp, Homo sapien
ttgaccccatcaatgtgttccagtt

SEQ ID NO: 4248232 - DNA, 25 bp, Homo sapien
aagcagctgggatcccatcagtgac

SEQ ID NO: 4248233 - DNA, 25 bp, Homo sapien
cagctgggatcccatcagtgacagc

SEQ ID NO: 4248234 - DNA, 25 bp, Homo sapien
aggtcacagggtggcttgctgggac

SEQ ID NO: 4248235 - DNA, 25 bp, Homo sapien
cctttgggctctccgtgcatgggtg

SEQ ID NO: 4248236 - DNA, 25 bp, Homo sapien
ccgtgcatgggtgaagtacttctgg

SEQ ID NO: 4248237 - DNA, 25 bp, Homo sapien
gcctttgggctctccgtgcatgggt

SEQ ID NO: 4248238 - DNA, 25 bp, Homo sapien
gtgaagtacttctggaggcgactag

SEQ ID NO: 4248239 - DNA, 25 bp, Homo sapien
ctggagaggagtacaagcccagagc

SEQ ID NO: 4248240 - DNA, 25 bp, Homo sapien
gagaggagtacaagcccagagcttt

SEQ ID NO: 4248241 - DNA, 25 bp, Homo sapien
tggagaggagtacaagcccagagct

SEQ ID NO: 4248242 - DNA, 25 bp, Homo sapien
gaggagtacaagcccagagctttct

SEQ ID NO: 4248243 - DNA, 25 bp, Homo sapien
cattcaggttgtttaggcttgcgta

SEQ ID NO: 4248244 - DNA, 25 bp, Homo sapien
catggatcgactagcaatgcctgcc

SEQ ID NO: 4248245 - DNA, 25 bp, Homo sapien
tcgtaacgattgtctaccatgtgcc

SEQ ID NO: 4248246 - DNA, 25 bp, Homo sapien
aatgcctgccacgagtaccgtcatg

SEQ ID NO: 4248247 - DNA, 25 bp, Homo sapien
ttcccatggaaaatgtctcagctta

SEQ ID NO: 4248248 - DNA, 25 bp, Homo sapien
ctggtatcacaccatttgtacttga

SEQ ID NO: 4248249 - DNA, 25 bp, Homo sapien
acagtacttgtatccacctctatga

SEQ ID NO: 4248250 - DNA, 25 bp, Homo sapien
tgtactcctagcttcctgtcacccc

SEQ ID NO: 4248251 - DNA, 25 bp, Homo sapien
tgagaacaacgtcagctctcctggt

SEQ ID NO: 4248252 - DNA, 25 bp, Homo sapien
gctccctgagccctagggactggct

SEQ ID NO: 4248253 - DNA, 25 bp, Homo sapien
ttcccagatgctcggacaacctgaa

SEQ ID NO: 4248254 - DNA, 25 bp, Homo sapien
tgctcggacaacctgaagctcctgc

SEQ ID NO: 4248255 - DNA, 25 bp, Homo sapien
aaaattacaagaggccaaagcttca

SEQ ID NO: 4248256 - DNA, 25 bp, Homo sapien
acaagaggccaaagcttcatgcctt

SEQ ID NO: 4248257 - DNA, 25 bp, Homo sapien
tcacgaaacccccttccgctgcatt

SEQ ID NO: 4248258 - DNA, 25 bp, Homo sapien
tcagtcacgaaacccccttccgctg

SEQ ID NO: 4248259 - DNA, 25 bp, Homo sapien
tagaccctgtggcttgttcaacgtc

SEQ ID NO: 4248260 - DNA, 25 bp, Homo sapien
agaccctgtggcttgttcaacgtca

SEQ ID NO: 4248261 - DNA, 25 bp, Homo sapien
catcatggcagtagggttaaaagcg

SEQ ID NO: 4248262 - DNA, 25 bp, Homo sapien
tgatcccgtggcttcaatggagagc

SEQ ID NO: 4248263 - DNA, 25 bp, Homo sapien
aagcctgtgttttgtccgtcgataa

SEQ ID NO: 4248264 - DNA, 25 bp, Homo sapien
tgcaaattaggtggcttgtcccagc

SEQ ID NO: 4248265 - DNA, 25 bp, Homo sapien
agctcctcccgactgaggttttttg

SEQ ID NO: 4248266 - DNA, 25 bp, Homo sapien
ggagccgcggggttgcctctgatgc

SEQ ID NO: 4248267 - DNA, 25 bp, Homo sapien
gcccgcagcgcatcaaccagctcct

SEQ ID NO: 4248268 - DNA, 25 bp, Homo sapien
aggagccgcggggttgcctctgatg

SEQ ID NO: 4248269 - DNA, 25 bp, Homo sapien
aaatgcctcacaatgtctgggctga

SEQ ID NO: 4248270 - DNA, 25 bp, Homo sapien
ggagtcattccatcccgaggtgcca

SEQ ID NO: 4248271 - DNA, 25 bp, Homo sapien
atcctgcggcctctgacaaatgcct

SEQ ID NO: 4248272 - DNA, 25 bp, Homo sapien
ccattcctatctccggacgcctctt

SEQ ID NO: 4248273 - DNA, 25 bp, Homo sapien
tagcctccgtcccgcatgagagagg

SEQ ID NO: 4248274 - DNA, 25 bp, Homo sapien
attcaggtacgaccggtcccattct

SEQ ID NO: 4248275 - DNA, 25 bp, Homo sapien
gggtaacatctacctgatccagatc

SEQ ID NO: 4248276 - DNA, 25 bp, Homo sapien
ttctacagcggagggcaccgaggct

SEQ ID NO: 4248277 - DNA, 25 bp, Homo sapien
gcactgggcggacacccaggccccg

SEQ ID NO: 4248278 - DNA, 25 bp, Homo sapien
cgggcttcggtgccaaagcctgcgt

SEQ ID NO: 4248279 - DNA, 25 bp, Homo sapien
cagccactccagaaccggcccaaaa

SEQ ID NO: 4248280 - DNA, 25 bp, Homo sapien
ggcttcggtgccaaagcctgcgtcc

SEQ ID NO: 4248281 - DNA, 25 bp, Homo sapien
aggacagcgcgcatgtgcgtccaga

SEQ ID NO: 4248282 - DNA, 25 bp, Homo sapien
ctcccgagccaggacagcgcgcatg

SEQ ID NO: 4248283 - DNA, 25 bp, Homo sapien
caggacagcgcgcatgtgcgtccag

SEQ ID NO: 4248284 - DNA, 25 bp, Homo sapien
ccgagccaggacagcgcgcatgtgc

SEQ ID NO: 4248285 - DNA, 25 bp, Homo sapien
cacgattgtccaacctgagattggc

SEQ ID NO: 4248286 - DNA, 25 bp, Homo sapien
gcggttattccggaggtcacagtgt

SEQ ID NO: 4248287 - DNA, 25 bp, Homo sapien
cctgtggcccctcgaagtcaggaga

SEQ ID NO: 4248288 - DNA, 25 bp, Homo sapien
tttgcatttctgacggccggatcac

SEQ ID NO: 4248289 - DNA, 25 bp, Homo sapien
acaggcatgcaccatcatacctgcc

SEQ ID NO: 4248290 - DNA, 25 bp, Homo sapien
tacaggcatgcaccatcatacctgc

SEQ ID NO: 4248291 - DNA, 25 bp, Homo sapien
aggcatgcaccatcatacctgccta

SEQ ID NO: 4248292 - DNA, 25 bp, Homo sapien
gcatgcaccatcatacctgcctaat

SEQ ID NO: 4248293 - DNA, 25 bp, Homo sapien
tccatgtccgtggaggcgcttttct

SEQ ID NO: 4248294 - DNA, 25 bp, Homo sapien
gtgtttccatgtccgtggaggcgct

SEQ ID NO: 4248295 - DNA, 25 bp, Homo sapien
ttccatgtccgtggaggcgcttttc

SEQ ID NO: 4248296 - DNA, 25 bp, Homo sapien
gtttccatgtccgtggaggcgcttt

SEQ ID NO: 4248297 - DNA, 25 bp, Homo sapien
tcagtagatggaatcgggttttaca

SEQ ID NO: 4248298 - DNA, 25 bp, Homo sapien
cagtagatggaatcgggttttacac

SEQ ID NO: 4248299 - DNA, 25 bp, Homo sapien
ctcagtagatggaatcgggttttac

SEQ ID NO: 4248300 - DNA, 25 bp, Homo sapien
aaaccaacacctagcctagagcctg

SEQ ID NO: 4248301 - DNA, 25 bp, Homo sapien
ccttgttttgtgcaacacagaatga

SEQ ID NO: 4248302 - DNA, 25 bp, Homo sapien
tgctaatatctgtctccttacccac

SEQ ID NO: 4248303 - DNA, 25 bp, Homo sapien
cttggccctagccaggactcaggtt

SEQ ID NO: 4248304 - DNA, 25 bp, Homo sapien
atccatgggaagatcgggtggctca

SEQ ID NO: 4248305 - DNA, 25 bp, Homo sapien
gtgcccttgatggtggcccgcaggg

SEQ ID NO: 4248306 - DNA, 25 bp, Homo sapien
tccccggcttggtcggcgctttgag

SEQ ID NO: 4248307 - DNA, 25 bp, Homo sapien
caggcggcacttaggaaggacaaac

SEQ ID NO: 4248308 - DNA, 25 bp, Homo sapien
ggcagcccgcaggggtcaggctctg

SEQ ID NO: 4248309 - DNA, 25 bp, Homo sapien
gcgtccctgtctccgcttcccagcg

SEQ ID NO: 4248310 - DNA, 25 bp, Homo sapien
cggcagcccgcaggggtcaggctct

SEQ ID NO: 4248311 - DNA, 25 bp, Homo sapien
cagcccgcaggggtcaggctctgct

SEQ ID NO: 4248312 - DNA, 25 bp, Homo sapien
tgctgtccaggctgaccccgactct

SEQ ID NO: 4248313 - DNA, 25 bp, Homo sapien
tgacccccagaggccgtgctgtcca

SEQ ID NO: 4248314 - DNA, 25 bp, Homo sapien
gtgctgtccaggctgaccccgactc

SEQ ID NO: 4248315 - DNA, 25 bp, Homo sapien
tgtccaggctgaccccgactctgag

SEQ ID NO: 4248316 - DNA, 25 bp, Homo sapien
gtggactgggatagcttctgtgcta

SEQ ID NO: 4248317 - DNA, 25 bp, Homo sapien
caactctgttactgagcactttacg

SEQ ID NO: 4248318 - DNA, 25 bp, Homo sapien
tctgttactgagcactttacggaag

SEQ ID NO: 4248319 - DNA, 25 bp, Homo sapien
gctaatacaaacatcaggcctccct

SEQ ID NO: 4248320 - DNA, 25 bp, Homo sapien
ccagcctggcaccgggccagcctcc

SEQ ID NO: 4248321 - DNA, 25 bp, Homo sapien
agcctgcgaggccagattgctaagg

SEQ ID NO: 4248322 - DNA, 25 bp, Homo sapien
caccatgaaagtacagcctgcgagg

SEQ ID NO: 4248323 - DNA, 25 bp, Homo sapien
tagtgcgcttgcgaattcactcagg

SEQ ID NO: 4248324 - DNA, 25 bp, Homo sapien
tgtgggcactaccagttaagcgtga

SEQ ID NO: 4248325 - DNA, 25 bp, Homo sapien
ccaagcagtacgtggcctgtggcct

SEQ ID NO: 4248326 - DNA, 25 bp, Homo sapien
cttcctccgtagcatcgaggagctg

SEQ ID NO: 4248327 - DNA, 25 bp, Homo sapien
catgctgaagagggcccagcggaaa

SEQ ID NO: 4248328 - DNA, 25 bp, Homo sapien
acaggaggtgccaagcagtacgtgg

SEQ ID NO: 4248329 - DNA, 25 bp, Homo sapien
gctggagtacacagtagtatggtca

SEQ ID NO: 4248330 - DNA, 25 bp, Homo sapien
gattataggtacatactaccactgc

SEQ ID NO: 4248331 - DNA, 25 bp, Homo sapien
ctggagtacacagtagtatggtcat

SEQ ID NO: 4248332 - DNA, 25 bp, Homo sapien
gagtacacagtagtatggtcatatc

SEQ ID NO: 4248333 - DNA, 25 bp, Homo sapien
gttacacgggccacatcaatcttct

SEQ ID NO: 4248334 - DNA, 25 bp, Homo sapien
acacgggccacatcaatcttcttgg

SEQ ID NO: 4248335 - DNA, 25 bp, Homo sapien
ggccccacagcagtgcagatcatag

SEQ ID NO: 4248336 - DNA, 25 bp, Homo sapien
ccccacagcagtgcagatcatagga

SEQ ID NO: 4248337 - DNA, 25 bp, Homo sapien
gggagagggacagtgggtgccttgt

SEQ ID NO: 4248338 - DNA, 25 bp, Homo sapien
tatgggagagggacagtgggtgcct

SEQ ID NO: 4248339 - DNA, 25 bp, Homo sapien
cttatgggagagggacagtgggtgc

SEQ ID NO: 4248340 - DNA, 25 bp, Homo sapien
gagagggacagtgggtgccttgtcc

SEQ ID NO: 4248341 - DNA, 25 bp, Homo sapien
tgaacactgtatcccctgccagggc

SEQ ID NO: 4248342 - DNA, 25 bp, Homo sapien
atgaacactgtatcccctgccaggg

SEQ ID NO: 4248343 - DNA, 25 bp, Homo sapien
agggcttggaagtactcttctgtct

SEQ ID NO: 4248344 - DNA, 25 bp, Homo sapien
gccagggcttggaagtactcttctg

SEQ ID NO: 4248345 - DNA, 25 bp, Homo sapien
cttggctcctggcttcagggttcct

SEQ ID NO: 4248346 - DNA, 25 bp, Homo sapien
ctcttggctcctggcttcagggttc

SEQ ID NO: 4248347 - DNA, 25 bp, Homo sapien
ggctcctggcttcagggttcctagt

SEQ ID NO: 4248348 - DNA, 25 bp, Homo sapien
tggctcctggcttcagggttcctag

SEQ ID NO: 4248349 - DNA, 25 bp, Homo sapien
atgcccttcctcacgcttcgatccg

SEQ ID NO: 4248350 - DNA, 25 bp, Homo sapien
gaggaggtcctcaagactgtaagcc

SEQ ID NO: 4248351 - DNA, 25 bp, Homo sapien
ttcgatccgccgtgcttacgcggca

SEQ ID NO: 4248352 - DNA, 25 bp, Homo sapien
tgggtcaccacagaggtacgcactg

SEQ ID NO: 4248353 - DNA, 25 bp, Homo sapien
gattttacagtcaggcagtcccaat

SEQ ID NO: 4248354 - DNA, 25 bp, Homo sapien
tctggcttacagctcataggtggct

SEQ ID NO: 4248355 - DNA, 25 bp, Homo sapien
gaatctgcacttgaacaaggtcccc

SEQ ID NO: 4248356 - DNA, 25 bp, Homo sapien
tcttggcagtgcaaaatctcgggtc

SEQ ID NO: 4248357 - DNA, 25 bp, Homo sapien
ggctaagggacttcatggcgtattc

SEQ ID NO: 4248358 - DNA, 25 bp, Homo sapien
gctaagggacttcatggcgtattcc

SEQ ID NO: 4248359 - DNA, 25 bp, Homo sapien
aaggctaagggacttcatggcgtat

SEQ ID NO: 4248360 - DNA, 25 bp, Homo sapien
taagggacttcatggcgtattccat

SEQ ID NO: 4248361 - DNA, 25 bp, Homo sapien
ccttgtcagctggactgcgttggac

SEQ ID NO: 4248362 - DNA, 25 bp, Homo sapien
ccttctcctgtccggccccatgcat

SEQ ID NO: 4248363 - DNA, 25 bp, Homo sapien
gcccttctcctgtccggccccatgc

SEQ ID NO: 4248364 - DNA, 25 bp, Homo sapien
cccttctcctgtccggccccatgca

SEQ ID NO: 4248365 - DNA, 25 bp, Homo sapien
ggtccttgagcaatccgagcccctt

SEQ ID NO: 4248366 - DNA, 25 bp, Homo sapien
ccatgggtccttgagcaatccgagc

SEQ ID NO: 4248367 - DNA, 25 bp, Homo sapien
ttgagcaatccgagccccttcctga

SEQ ID NO: 4248368 - DNA, 25 bp, Homo sapien
tgagcaatccgagccccttcctgag

SEQ ID NO: 4248369 - DNA, 25 bp, Homo sapien
catgatcagcatgggactcttttcc

SEQ ID NO: 4248370 - DNA, 25 bp, Homo sapien
gctaagatgagcgtgggacacctga

SEQ ID NO: 4248371 - DNA, 25 bp, Homo sapien
tgccctatcagtgggaatacccgta

SEQ ID NO: 4248372 - DNA, 25 bp, Homo sapien
gaagctgatctacgtacatctggtc

SEQ ID NO: 4248373 - DNA, 25 bp, Homo sapien
cagtgtcctcttgcaggtaggatgc

SEQ ID NO: 4248374 - DNA, 25 bp, Homo sapien
gaagggacattttttgcccctcaca

SEQ ID NO: 4248375 - DNA, 25 bp, Homo sapien
gggacattttttgcccctcacagtg

SEQ ID NO: 4248376 - DNA, 25 bp, Homo sapien
tgccagctctggaagggacattttt

SEQ ID NO: 4248377 - DNA, 25 bp, Homo sapien
gagaggactctggacctaggaaaag

SEQ ID NO: 4248378 - DNA, 25 bp, Homo sapien
attccctgcctcacaggccggaagt

SEQ ID NO: 4248379 - DNA, 25 bp, Homo sapien
gaatgagccttcgaccctgaaatcc

SEQ ID NO: 4248380 - DNA, 25 bp, Homo sapien
gtgcctcgaggacgactggccgaaa

SEQ ID NO: 4248381 - DNA, 25 bp, Homo sapien
catgtcatcctcaggcacgggcctt

SEQ ID NO: 4248382 - DNA, 25 bp, Homo sapien
tcatcctcaggcacgggccttgcta

SEQ ID NO: 4248383 - DNA, 25 bp, Homo sapien
tatatgggaccctccatgaatttgc

SEQ ID NO: 4248384 - DNA, 25 bp, Homo sapien
taaatatatgggaccctccatgaat

SEQ ID NO: 4248385 - DNA, 25 bp, Homo sapien
tgctaagacacaatggtaggcactc

SEQ ID NO: 4248386 - DNA, 25 bp, Homo sapien
aaaagtctgttgaatgggccaggcg

SEQ ID NO: 4248387 - DNA, 25 bp, Homo sapien
tttaattatccaaggtctcttgtgc

SEQ ID NO: 4248388 - DNA, 25 bp, Homo sapien
tgcttgccatactgctaagacacaa

SEQ ID NO: 4248389 - DNA, 25 bp, Homo sapien
tgcctactctttgccgctgcgcttt

SEQ ID NO: 4248390 - DNA, 25 bp, Homo sapien
tctcaaaaaggatcacgcgaaaggt

SEQ ID NO: 4248391 - DNA, 25 bp, Homo sapien
atccacaagcgctgggccctcgtgt

SEQ ID NO: 4248392 - DNA, 25 bp, Homo sapien
tctctgtggagggtaagtttctaac

SEQ ID NO: 4248393 - DNA, 25 bp, Homo sapien
tactcagccgatgactcgggtttcg

SEQ ID NO: 4248394 - DNA, 25 bp, Homo sapien
ttctctcccggtgcggtggcgctgt

SEQ ID NO: 4248395 - DNA, 25 bp, Homo sapien
cctgtggagccgtcgtgaactgagc

SEQ ID NO: 4248396 - DNA, 25 bp, Homo sapien
ggcagacgctgtttttctacccatg

SEQ ID NO: 4248397 - DNA, 25 bp, Homo sapien
gcctggcagagaggctcctcatatc

SEQ ID NO: 4248398 - DNA, 25 bp, Homo sapien
ctggcagagaggctcctcatatccc

SEQ ID NO: 4248399 - DNA, 25 bp, Homo sapien
cagcctggcagagaggctcctcata

SEQ ID NO: 4248400 - DNA, 25 bp, Homo sapien
gcagcctggcagagaggctcctcat

SEQ ID NO: 4248401 - DNA, 25 bp, Homo sapien
cactgagggctcctatgagtgccga

SEQ ID NO: 4248402 - DNA, 25 bp, Homo sapien
tttaagaccaagctaacggtggagc

SEQ ID NO: 4248403 - DNA, 25 bp, Homo sapien
gggacacacttagcttcaagacagg

SEQ ID NO: 4248404 - DNA, 25 bp, Homo sapien
tggagctgaccaattctgcgtgaac

SEQ ID NO: 4248405 - DNA, 25 bp, Homo sapien
tagccctgaaggtggataccatgag

SEQ ID NO: 4248406 - DNA, 25 bp, Homo sapien
ttcatcaagggcagataatcgcggc

SEQ ID NO: 4248407 - DNA, 25 bp, Homo sapien
ccaggaacagggatacgagtgccag

SEQ ID NO: 4248408 - DNA, 25 bp, Homo sapien
taccatgagctcttcacctggcggg

SEQ ID NO: 4248409 - DNA, 25 bp, Homo sapien
tctagacaagcgaggctcatcactc

SEQ ID NO: 4248410 - DNA, 25 bp, Homo sapien
cacaaagaggacaatctagacaagc

SEQ ID NO: 4248411 - DNA, 25 bp, Homo sapien
ttcttcatgcccgaatccatgcaca

SEQ ID NO: 4248412 - DNA, 25 bp, Homo sapien
ctgtattccgcataagacacggcct

SEQ ID NO: 4248413 - DNA, 25 bp, Homo sapien
ggttgccgtcaggtagagaggcctg

SEQ ID NO: 4248414 - DNA, 25 bp, Homo sapien
ggtttcgctatgttcgagaccagga

SEQ ID NO: 4248415 - DNA, 25 bp, Homo sapien
gtttcgctatgttcgagaccaggag

SEQ ID NO: 4248416 - DNA, 25 bp, Homo sapien
ccgggggttgccgtcaggtagagag

SEQ ID NO: 4248417 - DNA, 25 bp, Homo sapien
taaaggctcaactgtcccagtaggc

SEQ ID NO: 4248418 - DNA, 25 bp, Homo sapien
agtaggccatgccatgtgggcatcg

SEQ ID NO: 4248419 - DNA, 25 bp, Homo sapien
aactgtcccagtaggccatgccatg

SEQ ID NO: 4248420 - DNA, 25 bp, Homo sapien
ccatgtgggcatcgggcagggtcct

SEQ ID NO: 4248421 - DNA, 25 bp, Homo sapien
gatcttgagtgaacccctggagaag

SEQ ID NO: 4248422 - DNA, 25 bp, Homo sapien
taccgtgctgggcaactcatctagg

SEQ ID NO: 4248423 - DNA, 25 bp, Homo sapien
tcgatggtatcactggaggcgctgc

SEQ ID NO: 4248424 - DNA, 25 bp, Homo sapien
ggaacacactgtctcgcactaggtg

SEQ ID NO: 4248425 - DNA, 25 bp, Homo sapien
cactctccgccgggttgcggatgag

SEQ ID NO: 4248426 - DNA, 25 bp, Homo sapien
accaacgttgctgggccctgcatag

SEQ ID NO: 4248427 - DNA, 25 bp, Homo sapien
agcagttattgggtcgctccggcac

SEQ ID NO: 4248428 - DNA, 25 bp, Homo sapien
cacaccgttgcgggacagtcccggg

SEQ ID NO: 4248429 - DNA, 25 bp, Homo sapien
tgcgtggtgactcgaatgaggcccc

SEQ ID NO: 4248430 - DNA, 25 bp, Homo sapien
tgagcacagaccatgtggacagcag

SEQ ID NO: 4248431 - DNA, 25 bp, Homo sapien
tcggtaagcatgtaggcggatcgca

SEQ ID NO: 4248432 - DNA, 25 bp, Homo sapien
cacgacaagccctgcgtcaggaggt

SEQ ID NO: 4248433 - DNA, 25 bp, Homo sapien
cgccccggccactcctcggcttcat

SEQ ID NO: 4248434 - DNA, 25 bp, Homo sapien
gcgccccggccactcctcggcttca

SEQ ID NO: 4248435 - DNA, 25 bp, Homo sapien
ggcgccccggccactcctcggcttc

SEQ ID NO: 4248436 - DNA, 25 bp, Homo sapien
gaatttattatcctaggttgtttga

SEQ ID NO: 4248437 - DNA, 25 bp, Homo sapien
tgaatttattatcctaggttgtttg

SEQ ID NO: 4248438 - DNA, 25 bp, Homo sapien
ttattatcctaggttgtttgaagga

SEQ ID NO: 4248439 - DNA, 25 bp, Homo sapien
ttatcctaggttgtttgaaggaggc

SEQ ID NO: 4248440 - DNA, 25 bp, Homo sapien
gttactagacagagcactccctctc

SEQ ID NO: 4248441 - DNA, 25 bp, Homo sapien
tctcagttactagacagagcactcc

SEQ ID NO: 4248442 - DNA, 25 bp, Homo sapien
tccccaacagaggttctcagttact

SEQ ID NO: 4248443 - DNA, 25 bp, Homo sapien
catccccaacagaggttctcagtta

SEQ ID NO: 4248444 - DNA, 25 bp, Homo sapien
ctgttcggtttacagctgggccagg

SEQ ID NO: 4248445 - DNA, 25 bp, Homo sapien
gatgagagacttgggggtgcctggg

SEQ ID NO: 4248446 - DNA, 25 bp, Homo sapien
ctggggggagatggggtctgctcca

SEQ ID NO: 4248447 - DNA, 25 bp, Homo sapien
ctcctctcacccgctggggggagat

SEQ ID NO: 4248448 - DNA, 25 bp, Homo sapien
gaggaaggcttctggccaatgccaa

SEQ ID NO: 4248449 - DNA, 25 bp, Homo sapien
ttagacggccgatcaggagcctctg

SEQ ID NO: 4248450 - DNA, 25 bp, Homo sapien
tggctcctgagagtacaccacctca

SEQ ID NO: 4248451 - DNA, 25 bp, Homo sapien
aatccttagcgtcaggaaggtcagc

SEQ ID NO: 4248452 - DNA, 25 bp, Homo sapien
gtgggaccctgctcttagttttggc

SEQ ID NO: 4248453 - DNA, 25 bp, Homo sapien
cttgacagtacctgagtgggaaaca

SEQ ID NO: 4248454 - DNA, 25 bp, Homo sapien
tagttttggccttcagaccctcatc

SEQ ID NO: 4248455 - DNA, 25 bp, Homo sapien
gtggctaccctgagttgacgtctgg

SEQ ID NO: 4248456 - DNA, 25 bp, Homo sapien
tcatcagttactgggagtcgttctc

SEQ ID NO: 4248457 - DNA, 25 bp, Homo sapien
ccagccgtgggagcttggtccttga

SEQ ID NO: 4248458 - DNA, 25 bp, Homo sapien
tcggagttttcaagtggcctgggaa

SEQ ID NO: 4248459 - DNA, 25 bp, Homo sapien
gcgtggcggacatcagagttcctgt

SEQ ID NO: 4248460 - DNA, 25 bp, Homo sapien
gtctactccgatgcctgggcctaaa

SEQ ID NO: 4248461 - DNA, 25 bp, Homo sapien
ggtctactccgatgcctgggcctaa

SEQ ID NO: 4248462 - DNA, 25 bp, Homo sapien
tctactccgatgcctgggcctaaag

SEQ ID NO: 4248463 - DNA, 25 bp, Homo sapien
ctgcgcccgcgacgggggcagcagg

SEQ ID NO: 4248464 - DNA, 25 bp, Homo sapien
tcgcctgcgcccgcgacgggggcag

SEQ ID NO: 4248465 - DNA, 25 bp, Homo sapien
gtcgcctgcgcccgcgacgggggca

SEQ ID NO: 4248466 - DNA, 25 bp, Homo sapien
gcctgcgcccgcgacgggggcagca

SEQ ID NO: 4248467 - DNA, 25 bp, Homo sapien
ctgcgcgccgcagcccccgtgttca

SEQ ID NO: 4248468 - DNA, 25 bp, Homo sapien
tgcgcgccgcagcccccgtgttcac

SEQ ID NO: 4248469 - DNA, 25 bp, Homo sapien
cttgcgcgcgtccctgcagccgatc

SEQ ID NO: 4248470 - DNA, 25 bp, Homo sapien
gtccctgcagccgatcgccgcgccg

SEQ ID NO: 4248471 - DNA, 25 bp, Homo sapien
tgcgcgcgtccctgcagccgatcgc

SEQ ID NO: 4248472 - DNA, 25 bp, Homo sapien
gcgcgtccctgcagccgatcgccgc

SEQ ID NO: 4248473 - DNA, 25 bp, Homo sapien
atatatctatttaggagtggaactg

SEQ ID NO: 4248474 - DNA, 25 bp, Homo sapien
ttacagtggcgcgccatcacgccca

SEQ ID NO: 4248475 - DNA, 25 bp, Homo sapien
tttccaaagtagccttgtgactggt

SEQ ID NO: 4248476 - DNA, 25 bp, Homo sapien
ttttccaaagtagccttgtgactgg

SEQ ID NO: 4248477 - DNA, 25 bp, Homo sapien
tagtgagctataattcgcaccccac

SEQ ID NO: 4248478 - DNA, 25 bp, Homo sapien
caggatgaagttccgcctctgaggg

SEQ ID NO: 4248479 - DNA, 25 bp, Homo sapien
agggatgacttataagctcctctgc

SEQ ID NO: 4248480 - DNA, 25 bp, Homo sapien
tttcatactctacactgcagggtca

SEQ ID NO: 4248481 - DNA, 25 bp, Homo sapien
gttggtctagcagtctgagttttta

SEQ ID NO: 4248482 - DNA, 25 bp, Homo sapien
cactcaattcactattggttgaatg

SEQ ID NO: 4248483 - DNA, 25 bp, Homo sapien
tagcagtctgagtttttaaggtctg

SEQ ID NO: 4248484 - DNA, 25 bp, Homo sapien
gcctggcaacactcaattcactatt

SEQ ID NO: 4248485 - DNA, 25 bp, Homo sapien
tgaccctgggtattcactctgaaga

SEQ ID NO: 4248486 - DNA, 25 bp, Homo sapien
tgtgtgtctaccaacaactgccgtc

SEQ ID NO: 4248487 - DNA, 25 bp, Homo sapien
aacacagggtgtttggatcccaaga

SEQ ID NO: 4248488 - DNA, 25 bp, Homo sapien
tactgtggctagatgtcaggctgac

SEQ ID NO: 4248489 - DNA, 25 bp, Homo sapien
tatatattatcagtagcctgaggtt

SEQ ID NO: 4248490 - DNA, 25 bp, Homo sapien
tcaccagaaggaacatttacaacat

SEQ ID NO: 4248491 - DNA, 25 bp, Homo sapien
cctttctctgactttcattactaga

SEQ ID NO: 4248492 - DNA, 25 bp, Homo sapien
ccagcatactcctatttcctctagt

SEQ ID NO: 4248493 - DNA, 25 bp, Homo sapien
ggtgccagctccaaacaaagttaca

SEQ ID NO: 4248494 - DNA, 25 bp, Homo sapien
gttcctgacacagctaatccctgct

SEQ ID NO: 4248495 - DNA, 25 bp, Homo sapien
tttatttcaagaggtgccagctcca

SEQ ID NO: 4248496 - DNA, 25 bp, Homo sapien
caaggttaagtgcaactccaagttc

SEQ ID NO: 4248497 - DNA, 25 bp, Homo sapien
tcctttttgaacatgccttcgaagt

SEQ ID NO: 4248498 - DNA, 25 bp, Homo sapien
ttttgaacatgccttcgaagtggag

SEQ ID NO: 4248499 - DNA, 25 bp, Homo sapien
acatgccttcgaagtggaggtcttt

SEQ ID NO: 4248500 - DNA, 25 bp, Homo sapien
tcaaaaaatagaggtctgtaattcc

SEQ ID NO: 4248501 - DNA, 25 bp, Homo sapien
catctagtgcccactggtgatccgt

SEQ ID NO: 4248502 - DNA, 25 bp, Homo sapien
tcttcttcgacatcatctagtgccc

SEQ ID NO: 4248503 - DNA, 25 bp, Homo sapien
ctggtgatccgtcagctccaaagct

SEQ ID NO: 4248504 - DNA, 25 bp, Homo sapien
ccatgagctcttcttcgacatcatc

SEQ ID NO: 4248505 - DNA, 25 bp, Homo sapien
gaaaccacataccaaacagtagaca

SEQ ID NO: 4248506 - DNA, 25 bp, Homo sapien
cagtagacagctcccattattcacc

SEQ ID NO: 4248507 - DNA, 25 bp, Homo sapien
tggcaactactacgttatcttccgt

SEQ ID NO: 4248508 - DNA, 25 bp, Homo sapien
ttcacttattctgggcatatgtggc

SEQ ID NO: 4248509 - DNA, 25 bp, Homo sapien
catggtgtgaaataggtgcccagcc

SEQ ID NO: 4248510 - DNA, 25 bp, Homo sapien
aaccacggcgtgtaagttattcaat

SEQ ID NO: 4248511 - DNA, 25 bp, Homo sapien
tgacctatatctctccttatgccag

SEQ ID NO: 4248512 - DNA, 25 bp, Homo sapien
gtcttggtaccctctttgaaaatca

SEQ ID NO: 4248513 - DNA, 25 bp, Homo sapien
taaattaaaacgatggaaccacaca

SEQ ID NO: 4248514 - DNA, 25 bp, Homo sapien
gaaagagagacgtgtaaactatgtt

SEQ ID NO: 4248515 - DNA, 25 bp, Homo sapien
aaacgatggaaccacacaacactcc

SEQ ID NO: 4248516 - DNA, 25 bp, Homo sapien
tcaggaaagagagacgtgtaaacta

SEQ ID NO: 4248517 - DNA, 25 bp, Homo sapien
ctttgtttgtgtctgcgggcatggc

SEQ ID NO: 4248518 - DNA, 25 bp, Homo sapien
agctttgtttgtgtctgcgggcatg

SEQ ID NO: 4248519 - DNA, 25 bp, Homo sapien
tgcatcattcgtgattggtcagcgg

SEQ ID NO: 4248520 - DNA, 25 bp, Homo sapien
tgctcccgtcatctgctcctgcatc

SEQ ID NO: 4248521 - DNA, 25 bp, Homo sapien
taaatgctccgaagcccaaatacat

SEQ ID NO: 4248522 - DNA, 25 bp, Homo sapien
agaatcagagagtaaatgctccgaa

SEQ ID NO: 4248523 - DNA, 25 bp, Homo sapien
tccgaagcccaaatacattgaggaa

SEQ ID NO: 4248524 - DNA, 25 bp, Homo sapien
gagagtaaatgctccgaagcccaaa

SEQ ID NO: 4248525 - DNA, 25 bp, Homo sapien
tggcttcccaaagtgtggtttgtgt

SEQ ID NO: 4248526 - DNA, 25 bp, Homo sapien
caggatgcatctaatgtgagtagct

SEQ ID NO: 4248527 - DNA, 25 bp, Homo sapien
cataggcttaaaacggagggtcagt

SEQ ID NO: 4248528 - DNA, 25 bp, Homo sapien
tcgattccttgctgtaacataggct

SEQ ID NO: 4248529 - DNA, 25 bp, Homo sapien
taatgtgagtagctcgattccttgc

SEQ ID NO: 4248530 - DNA, 25 bp, Homo sapien
tagggaggacatttgttacattccc

SEQ ID NO: 4248531 - DNA, 25 bp, Homo sapien
agcctgagaatgtcatgttgatcca

SEQ ID NO: 4248532 - DNA, 25 bp, Homo sapien
tccaccaataagaatcatagggagg

SEQ ID NO: 4248533 - DNA, 25 bp, Homo sapien
gaatgtcatgttgatccatccacca

SEQ ID NO: 4248534 - DNA, 25 bp, Homo sapien
aggagaaggtggcactaccttccgt

SEQ ID NO: 4248535 - DNA, 25 bp, Homo sapien
aataatattttcgtgtcaagaaaga

SEQ ID NO: 4248536 - DNA, 25 bp, Homo sapien
aaataatattttcgtgtcaagaaag

SEQ ID NO: 4248537 - DNA, 25 bp, Homo sapien
taggagaaggtggcactaccttccg

SEQ ID NO: 4248538 - DNA, 25 bp, Homo sapien
tctaagaactatgacacagcaaact

SEQ ID NO: 4248539 - DNA, 25 bp, Homo sapien
gttttaagtctaagaactatgacac

SEQ ID NO: 4248540 - DNA, 25 bp, Homo sapien
taagtctaagaactatgacacagca

SEQ ID NO: 4248541 - DNA, 25 bp, Homo sapien
aagtgttttaagtctaagaactatg

SEQ ID NO: 4248542 - DNA, 25 bp, Homo sapien
gactctgcttcgaattaggacttga

SEQ ID NO: 4248543 - DNA, 25 bp, Homo sapien
ggactctgcttcgaattaggacttg

SEQ ID NO: 4248544 - DNA, 25 bp, Homo sapien
tgaggactctgcttcgaattaggac

SEQ ID NO: 4248545 - DNA, 25 bp, Homo sapien
gaggactctgcttcgaattaggact

SEQ ID NO: 4248546 - DNA, 25 bp, Homo sapien
aggaggctgcagtagaaggatcacc

SEQ ID NO: 4248547 - DNA, 25 bp, Homo sapien
tcaggaggctgcagtagaaggatca

SEQ ID NO: 4248548 - DNA, 25 bp, Homo sapien
aggctgcagtagaaggatcacctga

SEQ ID NO: 4248549 - DNA, 25 bp, Homo sapien
gatcacctgagcccaagaggcagag

SEQ ID NO: 4248550 - DNA, 25 bp, Homo sapien
gattataggtgtgagccattgcacc

SEQ ID NO: 4248551 - DNA, 25 bp, Homo sapien
ccatctcagccccccaaagtgctgg

SEQ ID NO: 4248552 - DNA, 25 bp, Homo sapien
aaattcctgggctcaagggatcctc

SEQ ID NO: 4248553 - DNA, 25 bp, Homo sapien
catgctgccaaggttggtctcaaat

SEQ ID NO: 4248554 - DNA, 25 bp, Homo sapien
ctcaacgaacgggtgggatggaact

SEQ ID NO: 4248555 - DNA, 25 bp, Homo sapien
tcttctcaacgaacgggtgggatgg

SEQ ID NO: 4248556 - DNA, 25 bp, Homo sapien
ctggcactcttctcaacgaacgggt

SEQ ID NO: 4248557 - DNA, 25 bp, Homo sapien
cactcttctcaacgaacgggtggga

SEQ ID NO: 4248558 - DNA, 25 bp, Homo sapien
agcgctttggtacttggcatctcag

SEQ ID NO: 4248559 - DNA, 25 bp, Homo sapien
tacagactgcaaagcgctttggtac

SEQ ID NO: 4248560 - DNA, 25 bp, Homo sapien
tacttggcatctcagctgacagtcc

SEQ ID NO: 4248561 - DNA, 25 bp, Homo sapien
acagactgcaaagcgctttggtact

SEQ ID NO: 4248562 - DNA, 25 bp, Homo sapien
gggtgagcttcttgtcgctctgcag

SEQ ID NO: 4248563 - DNA, 25 bp, Homo sapien
tacgaagaaagtgatgataacgatg

SEQ ID NO: 4248564 - DNA, 25 bp, Homo sapien
tgagcttcttgtcgctctgcagcag

SEQ ID NO: 4248565 - DNA, 25 bp, Homo sapien
tggacacgtagtggcggatcatgcc

SEQ ID NO: 4248566 - DNA, 25 bp, Homo sapien
tcccagtctggaatgggcgagcttc

SEQ ID NO: 4248567 - DNA, 25 bp, Homo sapien
acagttgcttctcttcggcttcgcc

SEQ ID NO: 4248568 - DNA, 25 bp, Homo sapien
gactgtgagccgagcttactgcctt

SEQ ID NO: 4248569 - DNA, 25 bp, Homo sapien
cccagaactctcctgcgactgtgag

SEQ ID NO: 4248570 - DNA, 25 bp, Homo sapien
gtgagccgagattgcgccactgcac

SEQ ID NO: 4248571 - DNA, 25 bp, Homo sapien
gagagtggtatgaacccgggaggca

SEQ ID NO: 4248572 - DNA, 25 bp, Homo sapien
gaggcagagcttgcagtgagccgag

SEQ ID NO: 4248573 - DNA, 25 bp, Homo sapien
gggtaaacagtgataccatgttctg

SEQ ID NO: 4248574 - DNA, 25 bp, Homo sapien
agtgataccatgttctgaattggaa

SEQ ID NO: 4248575 - DNA, 25 bp, Homo sapien
taaacagtgataccatgttctgaat

SEQ ID NO: 4248576 - DNA, 25 bp, Homo sapien
tgcgcccggcctctattaagtttta

SEQ ID NO: 4248577 - DNA, 25 bp, Homo sapien
catttttcttccatacccttgggat

SEQ ID NO: 4248578 - DNA, 25 bp, Homo sapien
ttcttccatacccttgggattctcc

SEQ ID NO: 4248579 - DNA, 25 bp, Homo sapien
catacccttgggattctccaaatac

SEQ ID NO: 4248580 - DNA, 25 bp, Homo sapien
tcatttttcttccatacccttggga

SEQ ID NO: 4248581 - DNA, 25 bp, Homo sapien
gtcttccgcccgaagagaccttgga

SEQ ID NO: 4248582 - DNA, 25 bp, Homo sapien
accttggagattaggcctagtcttg

SEQ ID NO: 4248583 - DNA, 25 bp, Homo sapien
cgcccgaagagaccttggagattag

SEQ ID NO: 4248584 - DNA, 25 bp, Homo sapien
ttccgcccgaagagaccttggagat

SEQ ID NO: 4248585 - DNA, 25 bp, Homo sapien
ctcaacatcacttgtatttaattct

SEQ ID NO: 4248586 - DNA, 25 bp, Homo sapien
ctgaacaaaaatcttgcttttctca

SEQ ID NO: 4248587 - DNA, 25 bp, Homo sapien
cttgcttttctcaacatcacttgta

SEQ ID NO: 4248588 - DNA, 25 bp, Homo sapien
aaatcttgcttttctcaacatcact

SEQ ID NO: 4248589 - DNA, 25 bp, Homo sapien
caaggattcctgtcagttactcaga

SEQ ID NO: 4248590 - DNA, 25 bp, Homo sapien
tactgataagtgaccggttcttgca

SEQ ID NO: 4248591 - DNA, 25 bp, Homo sapien
taggcggcatgcagtcaaggattcc

SEQ ID NO: 4248592 - DNA, 25 bp, Homo sapien
ccaattccacgtgaggtcccagaag

SEQ ID NO: 4248593 - DNA, 25 bp, Homo sapien
catgaagcgctccccctcagaggcc

SEQ ID NO: 4248594 - DNA, 25 bp, Homo sapien
ggcatgaagcgctccccctcagagg

SEQ ID NO: 4248595 - DNA, 25 bp, Homo sapien
gcctttctgcttcgatggtttcttc

SEQ ID NO: 4248596 - DNA, 25 bp, Homo sapien
ttcttttgataacagtggcatgaag

SEQ ID NO: 4248597 - DNA, 25 bp, Homo sapien
agggttgatggcaagacacagcagc

SEQ ID NO: 4248598 - DNA, 25 bp, Homo sapien
gggttgatggcaagacacagcagca

SEQ ID NO: 4248599 - DNA, 25 bp, Homo sapien
catggccggcatctgagtgtggcaa

SEQ ID NO: 4248600 - DNA, 25 bp, Homo sapien
tcagcacccatcaaggagcttcctt

SEQ ID NO: 4248601 - DNA, 25 bp, Homo sapien
cttgtgggttcctaatgagcttgag

SEQ ID NO: 4248602 - DNA, 25 bp, Homo sapien
gaacccggtttgtccgtgtctggca

SEQ ID NO: 4248603 - DNA, 25 bp, Homo sapien
atgcaggccgggcaaccttggcttg

SEQ ID NO: 4248604 - DNA, 25 bp, Homo sapien
ctccatatggcagacattcttctcc

SEQ ID NO: 4248605 - DNA, 25 bp, Homo sapien
catgcaggccgggcaaccttggctt

SEQ ID NO: 4248606 - DNA, 25 bp, Homo sapien
cctccatatggcagacattcttctc

SEQ ID NO: 4248607 - DNA, 25 bp, Homo sapien
gaagagagatcaagtagcatcccca

SEQ ID NO: 4248608 - DNA, 25 bp, Homo sapien
tcagcagggcgggttcccaaaagac

SEQ ID NO: 4248609 - DNA, 25 bp, Homo sapien
gctgaagagagatcaagtagcatcc

SEQ ID NO: 4248610 - DNA, 25 bp, Homo sapien
gcagggcgggttcccaaaagacagc

SEQ ID NO: 4248611 - DNA, 25 bp, Homo sapien
tgagctccctactgggcaagctcat

SEQ ID NO: 4248612 - DNA, 25 bp, Homo sapien
aagctcataggggttcggctccgct

SEQ ID NO: 4248613 - DNA, 25 bp, Homo sapien
tcactaagcttatttgcctgtccaa

SEQ ID NO: 4248614 - DNA, 25 bp, Homo sapien
gaagactggtgggactatcactaag

SEQ ID NO: 4248615 - DNA, 25 bp, Homo sapien
ctgcactccatcctgggcaacagag

SEQ ID NO: 4248616 - DNA, 25 bp, Homo sapien
cttgcagcgagccgagatcgcgcca

SEQ ID NO: 4248617 - DNA, 25 bp, Homo sapien
tcctgggcaacagagcgagactcgt

SEQ ID NO: 4248618 - DNA, 25 bp, Homo sapien
tccggaggctgaggcggagcttgca

SEQ ID NO: 4248619 - DNA, 25 bp, Homo sapien
gggtgaccctcacctgaggcctctg

SEQ ID NO: 4248620 - DNA, 25 bp, Homo sapien
tctggaggcgctgagtgggccggaa

SEQ ID NO: 4248621 - DNA, 25 bp, Homo sapien
gcgggcggcacttaacgaaggacaa

SEQ ID NO: 4248622 - DNA, 25 bp, Homo sapien
aggcctccaaaggacccatgggaag

SEQ ID NO: 4248623 - DNA, 25 bp, Homo sapien
tacacaaatatggacagcactggca

SEQ ID NO: 4248624 - DNA, 25 bp, Homo sapien
tagaattacgtgcacaagagccggg

SEQ ID NO: 4248625 - DNA, 25 bp, Homo sapien
gttattgaaatgatgtgcacaggcc

SEQ ID NO: 4248626 - DNA, 25 bp, Homo sapien
gggaatccaaggcactttgagaagc

SEQ ID NO: 4248627 - DNA, 25 bp, Homo sapien
gctttgactccattagcctcgagct

SEQ ID NO: 4248628 - DNA, 25 bp, Homo sapien
tgctttgactccattagcctcgagc

SEQ ID NO: 4248629 - DNA, 25 bp, Homo sapien
ctttgactccattagcctcgagctc

SEQ ID NO: 4248630 - DNA, 25 bp, Homo sapien
agagcaccatgaaagtacagcctgt

SEQ ID NO: 4248631 - DNA, 25 bp, Homo sapien
gtatgcttgcgaattcactcacgaa

SEQ ID NO: 4248632 - DNA, 25 bp, Homo sapien
accagtctggatgggctaagctacc

SEQ ID NO: 4248633 - DNA, 25 bp, Homo sapien
tgtggccactaccagttgagcgtgg

SEQ ID NO: 4248634 - DNA, 25 bp, Homo sapien
gggatgcccgtcctctgtggcatcg

SEQ ID NO: 4248635 - DNA, 25 bp, Homo sapien
tgcccgtcctctgtggcatcgagga

SEQ ID NO: 4248636 - DNA, 25 bp, Homo sapien
tatcttcagacaggtcgggatgagg

SEQ ID NO: 4248637 - DNA, 25 bp, Homo sapien
cgtcctctgtggcatcgaggagctg

SEQ ID NO: 4248638 - DNA, 25 bp, Homo sapien
tgaagcagcacgtggcccgtggctt

SEQ ID NO: 4248639 - DNA, 25 bp, Homo sapien
caggtaacaggaggtgaagcagcac

SEQ ID NO: 4248640 - DNA, 25 bp, Homo sapien
gaaaagggcccagtggagagcttcc

SEQ ID NO: 4248641 - DNA, 25 bp, Homo sapien
tggcccgtggcttgcatgctgaaaa

SEQ ID NO: 4248642 - DNA, 25 bp, Homo sapien
gcatgtactgagaactgaacctgaa

SEQ ID NO: 4248643 - DNA, 25 bp, Homo sapien
tgagacactctgttctagactctga

SEQ ID NO: 4248644 - DNA, 25 bp, Homo sapien
tcatgggtaaaatgggattgcacct

SEQ ID NO: 4248645 - DNA, 25 bp, Homo sapien
caactttggctaggtgcactggctc

SEQ ID NO: 4248646 - DNA, 25 bp, Homo sapien
ttcaaggttataacttagaagtata

SEQ ID NO: 4248647 - DNA, 25 bp, Homo sapien
tcaaggttataacttagaagtatac

SEQ ID NO: 4248648 - DNA, 25 bp, Homo sapien
acctagctgaccagccttaaaaagg

SEQ ID NO: 4248649 - DNA, 25 bp, Homo sapien
attcacatctacacaagagaatact

SEQ ID NO: 4248650 - DNA, 25 bp, Homo sapien
tatcggaaagatggactagcagcca

SEQ ID NO: 4248651 - DNA, 25 bp, Homo sapien
tgtagttacagcatagggccaggca

SEQ ID NO: 4248652 - DNA, 25 bp, Homo sapien
ccccatgtgaatagagatcgcctgt

SEQ ID NO: 4248653 - DNA, 25 bp, Homo sapien
catgcttcctgagacacttggttag

SEQ ID NO: 4248654 - DNA, 25 bp, Homo sapien
tacaggctatgctttgtcagcacca

SEQ ID NO: 4248655 - DNA, 25 bp, Homo sapien
tagttgctagagtggaaagtagtca

SEQ ID NO: 4248656 - DNA, 25 bp, Homo sapien
caggctccgtgttgtctgatacagg

SEQ ID NO: 4248657 - DNA, 25 bp, Homo sapien
tgttgtccacagcacttcgagagcc

SEQ ID NO: 4248658 - DNA, 25 bp, Homo sapien
cagatcataggaaagggagtacgta

SEQ ID NO: 4248659 - DNA, 25 bp, Homo sapien
gcagatcataggaaagggagtacgt

SEQ ID NO: 4248660 - DNA, 25 bp, Homo sapien
gatcataggaaagggagtacgtatc

SEQ ID NO: 4248661 - DNA, 25 bp, Homo sapien
tcataggaaagggagtacgtatcat

SEQ ID NO: 4248662 - DNA, 25 bp, Homo sapien
tacacgggccacatcaatcttcttg

SEQ ID NO: 4248663 - DNA, 25 bp, Homo sapien
gttacacgggccacatcaatcttct

SEQ ID NO: 4248664 - DNA, 25 bp, Homo sapien
cacgggccacatcaatcttcttggc

SEQ ID NO: 4248665 - DNA, 25 bp, Homo sapien
acacgggccacatcaatcttcttgg

SEQ ID NO: 4248666 - DNA, 25 bp, Homo sapien
tatgggagagggactgtgggtgcct

SEQ ID NO: 4248667 - DNA, 25 bp, Homo sapien
cttatgggagagggactgtgggtgc

SEQ ID NO: 4248668 - DNA, 25 bp, Homo sapien
gggagagggactgtgggtgcctcgt

SEQ ID NO: 4248669 - DNA, 25 bp, Homo sapien
gagagggactgtgggtgcctcgtcc

SEQ ID NO: 4248670 - DNA, 25 bp, Homo sapien
ggacaatatttttctagactatgaa

SEQ ID NO: 4248671 - DNA, 25 bp, Homo sapien
acaatatttttctagactatgaacc

SEQ ID NO: 4248672 - DNA, 25 bp, Homo sapien
tttattggacaatatttttctagac

SEQ ID NO: 4248673 - DNA, 25 bp, Homo sapien
ttggacaatatttttctagactatg

SEQ ID NO: 4248674 - DNA, 25 bp, Homo sapien
cagttccacctcatagagtccagcc

SEQ ID NO: 4248675 - DNA, 25 bp, Homo sapien
gaggtaccctgataaagtctctggg

SEQ ID NO: 4248676 - DNA, 25 bp, Homo sapien
aggagccaagaggtaccctgataaa

SEQ ID NO: 4248677 - DNA, 25 bp, Homo sapien
gggtagtgattccacaacagagggc

SEQ ID NO: 4248678 - DNA, 25 bp, Homo sapien
gcaggatggacacgtagtggcggat

SEQ ID NO: 4248679 - DNA, 25 bp, Homo sapien
cagcaggatggacacgtagtggcgg

SEQ ID NO: 4248680 - DNA, 25 bp, Homo sapien
ggatggacacgtagtggcggatcat

SEQ ID NO: 4248681 - DNA, 25 bp, Homo sapien
caggatggacacgtagtggcggatc

SEQ ID NO: 4248682 - DNA, 25 bp, Homo sapien
agcaacagttctggccctgccatct

SEQ ID NO: 4248683 - DNA, 25 bp, Homo sapien
gatgttggagtcaagcaacagttct

SEQ ID NO: 4248684 - DNA, 25 bp, Homo sapien
taggaccacccagaggcagatgttg

SEQ ID NO: 4248685 - DNA, 25 bp, Homo sapien
tgggtaggaccacccagaggcagat

SEQ ID NO: 4248686 - DNA, 25 bp, Homo sapien
aactctgctgcagcggtgagcccag

SEQ ID NO: 4248687 - DNA, 25 bp, Homo sapien
ggtgagcccagcttattgccttcag

SEQ ID NO: 4248688 - DNA, 25 bp, Homo sapien
tgatgggcgagcttctcttcaccgg

SEQ ID NO: 4248689 - DNA, 25 bp, Homo sapien
ctatgcccggctagcacagaactct

SEQ ID NO: 4248690 - DNA, 25 bp, Homo sapien
tatcgcacgtgttaaaggcgggtgc

SEQ ID NO: 4248691 - DNA, 25 bp, Homo sapien
gccggacgtgctgacaagacttagt

SEQ ID NO: 4248692 - DNA, 25 bp, Homo sapien
gatgaactaatccaggcagtcggcc

SEQ ID NO: 4248693 - DNA, 25 bp, Homo sapien
ttatccgtattaaccgaagcggcga

SEQ ID NO: 4248694 - DNA, 25 bp, Homo sapien
aatgaatggagtgcacagaattaag

SEQ ID NO: 4248695 - DNA, 25 bp, Homo sapien
tttgggactgagtttttgcctcgaa

SEQ ID NO: 4248696 - DNA, 25 bp, Homo sapien
atccataagaggaattagtgttaca

SEQ ID NO: 4248697 - DNA, 25 bp, Homo sapien
cgaattctgcgtataactttgagta

SEQ ID NO: 4248698 - DNA, 25 bp, Homo sapien
taatagaagaatttgttagtggcct

SEQ ID NO: 4248699 - DNA, 25 bp, Homo sapien
tttgttagtggcctggagtcttaca

SEQ ID NO: 4248700 - DNA, 25 bp, Homo sapien
tggcctggagtcttacattgaggat

SEQ ID NO: 4248701 - DNA, 25 bp, Homo sapien
aagaatttgttagtggcctggagtc

SEQ ID NO: 4248702 - DNA, 25 bp, Homo sapien
ctgccttcttaattccggcaaagat

SEQ ID NO: 4248703 - DNA, 25 bp, Homo sapien
cctttctgccttcttaattccggca

SEQ ID NO: 4248704 - DNA, 25 bp, Homo sapien
tttgccctttctgccttcttaattc

SEQ ID NO: 4248705 - DNA, 25 bp, Homo sapien
ttaagctatcaagtttgccctttct

SEQ ID NO: 4248706 - DNA, 25 bp, Homo sapien
ctgtcttccgcacgaagagaccgtg

SEQ ID NO: 4248707 - DNA, 25 bp, Homo sapien
cgcacgaagagaccgtggagattag

SEQ ID NO: 4248708 - DNA, 25 bp, Homo sapien
tgtcttccgcacgaagagaccgtgg

SEQ ID NO: 4248709 - DNA, 25 bp, Homo sapien
ttccgcacgaagagaccgtggagat

SEQ ID NO: 4248710 - DNA, 25 bp, Homo sapien
gaaagttcaggagtaccacataatg

SEQ ID NO: 4248711 - DNA, 25 bp, Homo sapien
gctgctgcagatttttcatgggctt

SEQ ID NO: 4248712 - DNA, 25 bp, Homo sapien
tcacggtgtagttgatggaccagga

SEQ ID NO: 4248713 - DNA, 25 bp, Homo sapien
tcatgggctttttgcttggtaagta

SEQ ID NO: 4248714 - DNA, 25 bp, Homo sapien
tacgtccaccgaccaggcgcagtgg

SEQ ID NO: 4248715 - DNA, 25 bp, Homo sapien
aatcaagggaaatgaaagcatacgt

SEQ ID NO: 4248716 - DNA, 25 bp, Homo sapien
agccattccatccttaggtatttaa

SEQ ID NO: 4248717 - DNA, 25 bp, Homo sapien
catccttaggtatttaatcaaggga

SEQ ID NO: 4248718 - DNA, 25 bp, Homo sapien
gccagagcgtccattacttgcagaa

SEQ ID NO: 4248719 - DNA, 25 bp, Homo sapien
cagacttttgatggttattttggag

SEQ ID NO: 4248720 - DNA, 25 bp, Homo sapien
catcaaagcattcccagtttccagt

SEQ ID NO: 4248721 - DNA, 25 bp, Homo sapien
tccagtgtgctctttatctcatcag

SEQ ID NO: 4248722 - DNA, 25 bp, Homo sapien
catatttggttggtccctcacagcc

SEQ ID NO: 4248723 - DNA, 25 bp, Homo sapien
aaggggagcaggttctatcagcagc

SEQ ID NO: 4248724 - DNA, 25 bp, Homo sapien
tgtgggcattccaaggtaagaaggg

SEQ ID NO: 4248725 - DNA, 25 bp, Homo sapien
gggagcaggttctatcagcagcctg

SEQ ID NO: 4248726 - DNA, 25 bp, Homo sapien
gttctatcagcagcctgcctgttgg

SEQ ID NO: 4248727 - DNA, 25 bp, Homo sapien
ggtaaattcattgaagatcggccag

SEQ ID NO: 4248728 - DNA, 25 bp, Homo sapien
gtttgatggaacataccgttggccc

SEQ ID NO: 4248729 - DNA, 25 bp, Homo sapien
gatcggccagtaagaggttatgaag

SEQ ID NO: 4248730 - DNA, 25 bp, Homo sapien
gcctcccggctggacagtgaatgtt

SEQ ID NO: 4248731 - DNA, 25 bp, Homo sapien
cactcctgagtatctcgagttgtgg

SEQ ID NO: 4248732 - DNA, 25 bp, Homo sapien
gacacaatcttagaatcactcctga

SEQ ID NO: 4248733 - DNA, 25 bp, Homo sapien
tttagaagggagaagtcatcgaagt

SEQ ID NO: 4248734 - DNA, 25 bp, Homo sapien
gcttatataatttttgggacccaga

SEQ ID NO: 4248735 - DNA, 25 bp, Homo sapien
ggctcaggattctaatgtagcatta

SEQ ID NO: 4248736 - DNA, 25 bp, Homo sapien
ttattggtttggataaacccagctg

SEQ ID NO: 4248737 - DNA, 25 bp, Homo sapien
taaacccagctgtgctacactgcag

SEQ ID NO: 4248738 - DNA, 25 bp, Homo sapien
gctgtgctacactgcagagtaaaat

SEQ ID NO: 4248739 - DNA, 25 bp, Homo sapien
aaggccagatattgtgggtcaccgc

SEQ ID NO: 4248740 - DNA, 25 bp, Homo sapien
tacaagaacgctacaaaggccagat

SEQ ID NO: 4248741 - DNA, 25 bp, Homo sapien
taacctagttacaagaacgctacaa

SEQ ID NO: 4248742 - DNA, 25 bp, Homo sapien
ctgagttatacctaacctagttaca

SEQ ID NO: 4248743 - DNA, 25 bp, Homo sapien
tgtgagttcacactaggctcattgg

SEQ ID NO: 4248744 - DNA, 25 bp, Homo sapien
gtttaacggttatcacatggacatg

SEQ ID NO: 4248745 - DNA, 25 bp, Homo sapien
gcctagcttcagtgctgctaccaag

SEQ ID NO: 4248746 - DNA, 25 bp, Homo sapien
tagatttttgacatcccctggtaca

SEQ ID NO: 4248747 - DNA, 25 bp, Homo sapien
catggtgtgagtaaatggggatcaa

SEQ ID NO: 4248748 - DNA, 25 bp, Homo sapien
tgagtaaatggggatcaaatgagga

SEQ ID NO: 4248749 - DNA, 25 bp, Homo sapien
aaagggcatggtgtgagtaaatggg

SEQ ID NO: 4248750 - DNA, 25 bp, Homo sapien
caaagggcatggtgtgagtaaatgg

SEQ ID NO: 4248751 - DNA, 25 bp, Homo sapien
catacagcaagaggatagagcgcag

SEQ ID NO: 4248752 - DNA, 25 bp, Homo sapien
tgaaactctgaaagtcccggtccac

SEQ ID NO: 4248753 - DNA, 25 bp, Homo sapien
gaggctccttcagtccaatgggcca

SEQ ID NO: 4248754 - DNA, 25 bp, Homo sapien
tagagcgcagcatctgtttgcacat

SEQ ID NO: 4248755 - DNA, 25 bp, Homo sapien
tgcacttcaaggtcggacggtgtgt

SEQ ID NO: 4248756 - DNA, 25 bp, Homo sapien
tgtaggtgtcgtgtgccgcagccat

SEQ ID NO: 4248757 - DNA, 25 bp, Homo sapien
ctctcatccagtggggtccatggtg

SEQ ID NO: 4248758 - DNA, 25 bp, Homo sapien
ccgcagccattggaaactctcatcc

SEQ ID NO: 4248759 - DNA, 25 bp, Homo sapien
attcctttcaaacaactctagcttt

SEQ ID NO: 4248760 - DNA, 25 bp, Homo sapien
tcctttcaaacaactctagctttca

SEQ ID NO: 4248761 - DNA, 25 bp, Homo sapien
ttcaaacaactctagctttcactat

SEQ ID NO: 4248762 - DNA, 25 bp, Homo sapien
gctattcctttcaaacaactctagc

SEQ ID NO: 4248763 - DNA, 25 bp, Homo sapien
tgccgagagtgcgagaggctcccac

SEQ ID NO: 4248764 - DNA, 25 bp, Homo sapien
tgtaaacggagatcccgagggtctg

SEQ ID NO: 4248765 - DNA, 25 bp, Homo sapien
cagctgaggtcctgaactgtaaacg

SEQ ID NO: 4248766 - DNA, 25 bp, Homo sapien
ggcgttagcgccaaagtgcagctga

SEQ ID NO: 4248767 - DNA, 25 bp, Homo sapien
gcggacgatgcggtgggaacctggg

SEQ ID NO: 4248768 - DNA, 25 bp, Homo sapien
ctgaggcggacgatgcggtgggaac

SEQ ID NO: 4248769 - DNA, 25 bp, Homo sapien
acgatgcggtgggaacctgggccca

SEQ ID NO: 4248770 - DNA, 25 bp, Homo sapien
gaggcggacgatgcggtgggaacct

SEQ ID NO: 4248771 - DNA, 25 bp, Homo sapien
aagtggcggccgctgttcgtggcgc

SEQ ID NO: 4248772 - DNA, 25 bp, Homo sapien
tgagggtctcacgctccaaagtggc

SEQ ID NO: 4248773 - DNA, 25 bp, Homo sapien
gccgctgttcgtggcgcctggcaac

SEQ ID NO: 4248774 - DNA, 25 bp, Homo sapien
gggtctcacgctccaaagtggcggc

SEQ ID NO: 4248775 - DNA, 25 bp, Homo sapien
aggcgacccctacttcaatggccat

SEQ ID NO: 4248776 - DNA, 25 bp, Homo sapien
gaggacaggcgacccctacttcaat

SEQ ID NO: 4248777 - DNA, 25 bp, Homo sapien
ccacagaggacaggcgacccctact

SEQ ID NO: 4248778 - DNA, 25 bp, Homo sapien
gacaggcgacccctacttcaatggc

SEQ ID NO: 4248779 - DNA, 25 bp, Homo sapien
tgtgagggtccagtaaggtaatagc

SEQ ID NO: 4248780 - DNA, 25 bp, Homo sapien
gagagctcagacagactttaacctg

SEQ ID NO: 4248781 - DNA, 25 bp, Homo sapien
tcggctttgttaccttgaacatcag

SEQ ID NO: 4248782 - DNA, 25 bp, Homo sapien
ctggaatcagctggttagggtctac

SEQ ID NO: 4248783 - DNA, 25 bp, Homo sapien
gattcaccaggactgggctaaccgg

SEQ ID NO: 4248784 - DNA, 25 bp, Homo sapien
taaccgggagtacattgagataatc

SEQ ID NO: 4248785 - DNA, 25 bp, Homo sapien
cagcagcatcaagaaaatcgcagac

SEQ ID NO: 4248786 - DNA, 25 bp, Homo sapien
gaaaatcgcagactttctcaactcg

SEQ ID NO: 4248787 - DNA, 25 bp, Homo sapien
gagaatagagtacattgaagctcgg

SEQ ID NO: 4248788 - DNA, 25 bp, Homo sapien
aaattgacagcccttgaacggagaa

SEQ ID NO: 4248789 - DNA, 25 bp, Homo sapien
ttgcaacactaaacgagaaattgac

SEQ ID NO: 4248790 - DNA, 25 bp, Homo sapien
tatgtcttgtcgttcaagacttgca

SEQ ID NO: 4248791 - DNA, 25 bp, Homo sapien
tgagacattcacagccaaaagcctg

SEQ ID NO: 4248792 - DNA, 25 bp, Homo sapien
gtgacaaaaggtgagacactcacct

SEQ ID NO: 4248793 - DNA, 25 bp, Homo sapien
catctacttgtcaatgtatttgaga

SEQ ID NO: 4248794 - DNA, 25 bp, Homo sapien
caaaagcctgggactctttgtgaag

SEQ ID NO: 4248795 - DNA, 25 bp, Homo sapien
agtcctggtcaagacactcatgccc

SEQ ID NO: 4248796 - DNA, 25 bp, Homo sapien
cagagaatgttgttgctaacccacc

SEQ ID NO: 4248797 - DNA, 25 bp, Homo sapien
ttctgtcacttggagtgtctatgcc

SEQ ID NO: 4248798 - DNA, 25 bp, Homo sapien
tcacttggagtgtctatgcctctca

SEQ ID NO: 4248799 - DNA, 25 bp, Homo sapien
tgtttgattcaaagcctaggtggct

SEQ ID NO: 4248800 - DNA, 25 bp, Homo sapien
gagatgggttcacttattgcacaga

SEQ ID NO: 4248801 - DNA, 25 bp, Homo sapien
gctgactagctcatcttgggaatca

SEQ ID NO: 4248802 - DNA, 25 bp, Homo sapien
taggtggcttaccagcccaagtccc

SEQ ID NO: 4248803 - DNA, 25 bp, Homo sapien
aaaattcagttagtccaccaggcac

SEQ ID NO: 4248804 - DNA, 25 bp, Homo sapien
taagcgtgatgattgggtgttcccg

SEQ ID NO: 4248805 - DNA, 25 bp, Homo sapien
ttgttacgacgtcggcacattgcgc

SEQ ID NO: 4248806 - DNA, 25 bp, Homo sapien
ggtgttcccgtgtgagatgcgccac

SEQ ID NO: 4248807 - DNA, 25 bp, Homo sapien
gcatccacagctaccgaggtacggg

SEQ ID NO: 4248808 - DNA, 25 bp, Homo sapien
acatccagggtgacgctgctcgtaa

SEQ ID NO: 4248809 - DNA, 25 bp, Homo sapien
cagggacgatagcacggtctgaagc

SEQ ID NO: 4248810 - DNA, 25 bp, Homo sapien
cgtatggctcaacttcgacggcgag

SEQ ID NO: 4248811 - DNA, 25 bp, Homo sapien
ggctcattgcacccttaacctgggc

SEQ ID NO: 4248812 - DNA, 25 bp, Homo sapien
cggctcattgcacccttaacctggg

SEQ ID NO: 4248813 - DNA, 25 bp, Homo sapien
acggctcattgcacccttaacctgg

SEQ ID NO: 4248814 - DNA, 25 bp, Homo sapien
acagatcttagggtttgatgagttt

SEQ ID NO: 4248815 - DNA, 25 bp, Homo sapien
cagatcttagggtttgatgagtttt

SEQ ID NO: 4248816 - DNA, 25 bp, Homo sapien
ggttatgtgttttgtgactaccacc

SEQ ID NO: 4248817 - DNA, 25 bp, Homo sapien
tttggttatgtgttttgtgactacc

SEQ ID NO: 4248818 - DNA, 25 bp, Homo sapien
ccggcctagattttctaagtacaca

SEQ ID NO: 4248819 - DNA, 25 bp, Homo sapien
tgtgttttgtgactaccaccccaaa

SEQ ID NO: 4248820 - DNA, 25 bp, Homo sapien
caggtcgctctacgaagatctggaa

SEQ ID NO: 4248821 - DNA, 25 bp, Homo sapien
ttacaggagactggacatcgtcagg

SEQ ID NO: 4248822 - DNA, 25 bp, Homo sapien
gagcgcattgcacatcaacggatgg

SEQ ID NO: 4248823 - DNA, 25 bp, Homo sapien
aatgtgcagaaagacctggagcggc

SEQ ID NO: 4248824 - DNA, 25 bp, Homo sapien
caatggattcatggagtagcctgga

SEQ ID NO: 4248825 - DNA, 25 bp, Homo sapien
tgtgggtatttcttggcatgcatct

SEQ ID NO: 4248826 - DNA, 25 bp, Homo sapien
tatcctagcctttgggcacaattcc

SEQ ID NO: 4248827 - DNA, 25 bp, Homo sapien
tcaaaaatgagagtgacggctggca

SEQ ID NO: 4248828 - DNA, 25 bp, Homo sapien
taagctgtctttgtgtcaaaatgat

SEQ ID NO: 4248829 - DNA, 25 bp, Homo sapien
aagctgtctttgtgtcaaaatgata

SEQ ID NO: 4248830 - DNA, 25 bp, Homo sapien
tttaagctgtctttgtgtcaaaatg

SEQ ID NO: 4248831 - DNA, 25 bp, Homo sapien
ttaagctgtctttgtgtcaaaatga

SEQ ID NO: 4248832 - DNA, 25 bp, Homo sapien
attaggcgggcgtggtggtgagcgc

SEQ ID NO: 4248833 - DNA, 25 bp, Homo sapien
aattaggcgggcgtggtggtgagcg

SEQ ID NO: 4248834 - DNA, 25 bp, Homo sapien
attatccaggtgtggcggtgggcgc

SEQ ID NO: 4248835 - DNA, 25 bp, Homo sapien
aaaaacatgccgtttgagtactgtg

SEQ ID NO: 4248836 - DNA, 25 bp, Homo sapien
tttcatttcgaatcttgtgaatgta

SEQ ID NO: 4248837 - DNA, 25 bp, Homo sapien
taaatatatcgctcttaagagacgg

SEQ ID NO: 4248838 - DNA, 25 bp, Homo sapien
aacctgtagcatgaataatgtttgt

SEQ ID NO: 4248839 - DNA, 25 bp, Homo sapien
tgtttgtccctgatagagccagctg

SEQ ID NO: 4248840 - DNA, 25 bp, Homo sapien
gcagcaggtggagtacaagttcagt

SEQ ID NO: 4248841 - DNA, 25 bp, Homo sapien
gatcgcacaattaggaaggcaggct

SEQ ID NO: 4248842 - DNA, 25 bp, Homo sapien
gcacgagggtgctttagttatagct

SEQ ID NO: 4248843 - DNA, 25 bp, Homo sapien
ccatcaagtgggaaggatgcgtttg

SEQ ID NO: 4248844 - DNA, 25 bp, Homo sapien
cctcatctctgaacagggatgagaa

SEQ ID NO: 4248845 - DNA, 25 bp, Homo sapien
tctccactgcgtgaaagggaggttg

SEQ ID NO: 4248846 - DNA, 25 bp, Homo sapien
gggcctggtacagcccgtcctcagt

SEQ ID NO: 4248847 - DNA, 25 bp, Homo sapien
ccaccatgccgtgctgaatttgttt

SEQ ID NO: 4248848 - DNA, 25 bp, Homo sapien
accaccatgccgtgctgaatttgtt

SEQ ID NO: 4248849 - DNA, 25 bp, Homo sapien
caccatgccgtgctgaatttgtttg

SEQ ID NO: 4248850 - DNA, 25 bp, Homo sapien
gactttcaacttgtgtctcagtgca

SEQ ID NO: 4248851 - DNA, 25 bp, Homo sapien
tgccagacacctagcgaagagctct

SEQ ID NO: 4248852 - DNA, 25 bp, Homo sapien
gggcctcaggttctacaaatgccag

SEQ ID NO: 4248853 - DNA, 25 bp, Homo sapien
cactgcctgtattggaaatcttgca

SEQ ID NO: 4248854 - DNA, 25 bp, Homo sapien
cctgatctcagaagcacgttgtggg

SEQ ID NO: 4248855 - DNA, 25 bp, Homo sapien
cagtacacggtttgctttggctcga

SEQ ID NO: 4248856 - DNA, 25 bp, Homo sapien
tgaaagcttcaggtacagcggccgg

SEQ ID NO: 4248857 - DNA, 25 bp, Homo sapien
gaagcgcttaggcatctccgaagta

SEQ ID NO: 4248858 - DNA, 25 bp, Homo sapien
cagctcagaggtctgcgtcgcgttc

SEQ ID NO: 4248859 - DNA, 25 bp, Homo sapien
atgtggcttgctcgcggaggttatc

SEQ ID NO: 4248860 - DNA, 25 bp, Homo sapien
agcagcacgtcggaagggtgtcccc

SEQ ID NO: 4248861 - DNA, 25 bp, Homo sapien
caaggtcaagcacaactggagcagc

SEQ ID NO: 4248862 - DNA, 25 bp, Homo sapien
ctttggcagggtaagagttgtagta

SEQ ID NO: 4248863 - DNA, 25 bp, Homo sapien
cagggtaagagttgtagtattttag

SEQ ID NO: 4248864 - DNA, 25 bp, Homo sapien
tttgagcatagtgctttggcagggt

SEQ ID NO: 4248865 - DNA, 25 bp, Homo sapien
ttttttgagcatagtgctttggcag

SEQ ID NO: 4248866 - DNA, 25 bp, Homo sapien
aggtctgcacttaaaggtccatggg

SEQ ID NO: 4248867 - DNA, 25 bp, Homo sapien
gggcgacctgcacaacaaactgaac

SEQ ID NO: 4248868 - DNA, 25 bp, Homo sapien
caaactgaactagaagcgataggca

SEQ ID NO: 4248869 - DNA, 25 bp, Homo sapien
gacccatgattatgctccagcctgg

SEQ ID NO: 4248870 - DNA, 25 bp, Homo sapien
tgcagaggagcactcattgtccatg

SEQ ID NO: 4248871 - DNA, 25 bp, Homo sapien
tcttgcaaccagtgaagtcgtcctc

SEQ ID NO: 4248872 - DNA, 25 bp, Homo sapien
aattaactggacacctatctcggag

SEQ ID NO: 4248873 - DNA, 25 bp, Homo sapien
ccatgatggagatccaggacagact

SEQ ID NO: 4248874 - DNA, 25 bp, Homo sapien
ccgtcttcacggattagctgtgctg

SEQ ID NO: 4248875 - DNA, 25 bp, Homo sapien
gggactgccgagcatatcaaagtgt

SEQ ID NO: 4248876 - DNA, 25 bp, Homo sapien
tccagcaagccctgaagtcagtagt

SEQ ID NO: 4248877 - DNA, 25 bp, Homo sapien
tatagtcaccaagtgaactgcagca

SEQ ID NO: 4248878 - DNA, 25 bp, Homo sapien
aaaagcacaaggtgctatctacttt

SEQ ID NO: 4248879 - DNA, 25 bp, Homo sapien
aaagcacaaggtgctatctactttt

SEQ ID NO: 4248880 - DNA, 25 bp, Homo sapien
gcctgtttggccttatactcctcat

SEQ ID NO: 4248881 - DNA, 25 bp, Homo sapien
tgtttggccttatactcctcatctc

SEQ ID NO: 4248882 - DNA, 25 bp, Homo sapien
tttggccttatactcctcatctcag

SEQ ID NO: 4248883 - DNA, 25 bp, Homo sapien
ggcctgtttggccttatactcctca

SEQ ID NO: 4248884 - DNA, 25 bp, Homo sapien
caaggctcgtgtctgctgtgaactg

SEQ ID NO: 4248885 - DNA, 25 bp, Homo sapien
taaggtgggcatgaccgagtggcct

SEQ ID NO: 4248886 - DNA, 25 bp, Homo sapien
ctggaattaagttgtggaacataag

SEQ ID NO: 4248887 - DNA, 25 bp, Homo sapien
cccgggaagaccagtgtcgtaactg

SEQ ID NO: 4248888 - DNA, 25 bp, Homo sapien
tgtcttcctctccaatcttgaatgg

SEQ ID NO: 4248889 - DNA, 25 bp, Homo sapien
caatcttgaatggatgttggcttcg

SEQ ID NO: 4248890 - DNA, 25 bp, Homo sapien
catcctgaagtttctttgtccacac

SEQ ID NO: 4248891 - DNA, 25 bp, Homo sapien
tgttggcttcgataatgtcatcctg

SEQ ID NO: 4248892 - DNA, 25 bp, Homo sapien
aataaattcccatttggaacatcag

SEQ ID NO: 4248893 - DNA, 25 bp, Homo sapien
gaaataaattcccatttggaacatc

SEQ ID NO: 4248894 - DNA, 25 bp, Homo sapien
tgaaataaattcccatttggaacat

SEQ ID NO: 4248895 - DNA, 25 bp, Homo sapien
taaattcccatttggaacatcagca

SEQ ID NO: 4248896 - DNA, 25 bp, Homo sapien
gctgcagaagcaagcgaaaagccag

SEQ ID NO: 4248897 - DNA, 25 bp, Homo sapien
aaaagccagatgagcgcttctaaac

SEQ ID NO: 4248898 - DNA, 25 bp, Homo sapien
caacagtcgtgggagttgctgcaga

SEQ ID NO: 4248899 - DNA, 25 bp, Homo sapien
ttgaacatttattcgcctcctgagc

SEQ ID NO: 4248900 - DNA, 25 bp, Homo sapien
gagaggtgagtaaggcttgtgggcg

SEQ ID NO: 4248901 - DNA, 25 bp, Homo sapien
agagaggtgagtaaggcttgtgggc

SEQ ID NO: 4248902 - DNA, 25 bp, Homo sapien
agaggtgagtaaggcttgtgggcga

SEQ ID NO: 4248903 - DNA, 25 bp, Homo sapien
aagctgaggttcaactgaggcccca

SEQ ID NO: 4248904 - DNA, 25 bp, Homo sapien
gggaaaactcatcacccacagagtg

SEQ ID NO: 4248905 - DNA, 25 bp, Homo sapien
tacgcagtgaagacggtgtaacacc

SEQ ID NO: 4248906 - DNA, 25 bp, Homo sapien
gaaggaactgcttaacaggctgcag

SEQ ID NO: 4248907 - DNA, 25 bp, Homo sapien
tgacagcttgattccaacatcaaag

SEQ ID NO: 4248908 - DNA, 25 bp, Homo sapien
cttcccagaggatgtcctgaagaaa

SEQ ID NO: 4248909 - DNA, 25 bp, Homo sapien
ttcccagaggatgtcctgaagaaac

SEQ ID NO: 4248910 - DNA, 25 bp, Homo sapien
gattccaacatcaaagggggcgttg

SEQ ID NO: 4248911 - DNA, 25 bp, Homo sapien
tttcttcccctctacagggagagcg

SEQ ID NO: 4248912 - DNA, 25 bp, Homo sapien
ctgagtcagggaaggatcttagtgc

SEQ ID NO: 4248913 - DNA, 25 bp, Homo sapien
tttcctagaaagaggctctgagcca

SEQ ID NO: 4248914 - DNA, 25 bp, Homo sapien
catggcagactttccttgagagcag

SEQ ID NO: 4248915 - DNA, 25 bp, Homo sapien
tgtgggtcacatgctccaaggctag

SEQ ID NO: 4248916 - DNA, 25 bp, Homo sapien
catctgttcaatgggagtgggactt

SEQ ID NO: 4248917 - DNA, 25 bp, Homo sapien
tgtttttcttccaccgctgaggcaa

SEQ ID NO: 4248918 - DNA, 25 bp, Homo sapien
caggcgtttgacttctggttccagc

SEQ ID NO: 4248919 - DNA, 25 bp, Homo sapien
ggaaaggtctgaacaccgccaggtg

SEQ ID NO: 4248920 - DNA, 25 bp, Homo sapien
aagcataaaactgcagaggtaccga

SEQ ID NO: 4248921 - DNA, 25 bp, Homo sapien
agcataaaactgcagaggtaccgac

SEQ ID NO: 4248922 - DNA, 25 bp, Homo sapien
gaagcataaaactgcagaggtaccg

SEQ ID NO: 4248923 - DNA, 25 bp, Homo sapien
agaagcataaaactgcagaggtacc

SEQ ID NO: 4248924 - DNA, 25 bp, Homo sapien
ctggtggcttcttcgactcctttct

SEQ ID NO: 4248925 - DNA, 25 bp, Homo sapien
tgcttgacctccatcttccgggcgg

SEQ ID NO: 4248926 - DNA, 25 bp, Homo sapien
cttggctggtggcttcttcgactcc

SEQ ID NO: 4248927 - DNA, 25 bp, Homo sapien
cttccgggcggagccagcctgctag

SEQ ID NO: 4248928 - DNA, 25 bp, Homo sapien
gtccagccagagcatgccgaggagc

SEQ ID NO: 4248929 - DNA, 25 bp, Homo sapien
agtccagccagagcatgccgaggag

SEQ ID NO: 4248930 - DNA, 25 bp, Homo sapien
aagtccagccagagcatgccgagga

SEQ ID NO: 4248931 - DNA, 25 bp, Homo sapien
cctcagctgggttgcagacaggtgg

SEQ ID NO: 4248932 - DNA, 25 bp, Homo sapien
tcagctgggttgcagacaggtgggc

SEQ ID NO: 4248933 - DNA, 25 bp, Homo sapien
ggcctcagctgggttgcagacaggt

SEQ ID NO: 4248934 - DNA, 25 bp, Homo sapien
gcctcagctgggttgcagacaggtg

SEQ ID NO: 4248935 - DNA, 25 bp, Homo sapien
cctctgagcttgctcaggtaggagc

SEQ ID NO: 4248936 - DNA, 25 bp, Homo sapien
tgcctctgagcttgctcaggtagga

SEQ ID NO: 4248937 - DNA, 25 bp, Homo sapien
gcctctgagcttgctcaggtaggag

SEQ ID NO: 4248938 - DNA, 25 bp, Homo sapien
tcctgactgctgtgtagagaggacc

SEQ ID NO: 4248939 - DNA, 25 bp, Homo sapien
cctgactgctgtgtagagaggaccc

SEQ ID NO: 4248940 - DNA, 25 bp, Homo sapien
actgctgtgtagagaggacccccgc

SEQ ID NO: 4248941 - DNA, 25 bp, Homo sapien
caaggccgttcagggcagaacacct

SEQ ID NO: 4248942 - DNA, 25 bp, Homo sapien
gggctgatgtacattccttgggaac

SEQ ID NO: 4248943 - DNA, 25 bp, Homo sapien
cccagaggtggcctagcttccgtgg

SEQ ID NO: 4248944 - DNA, 25 bp, Homo sapien
gatgactggcgtttgttctaaacca

SEQ ID NO: 4248945 - DNA, 25 bp, Homo sapien
ggctgtcaggtccttatataggatg

SEQ ID NO: 4248946 - DNA, 25 bp, Homo sapien
ctgggtagaagtcaacagtggaggt

SEQ ID NO: 4248947 - DNA, 25 bp, Homo sapien
tgggtagaagtcaacagtggaggtc

SEQ ID NO: 4248948 - DNA, 25 bp, Homo sapien
agaggcctgtggtgaactcggggca

SEQ ID NO: 4248949 - DNA, 25 bp, Homo sapien
gcagggatgttagcaaaggctccag

SEQ ID NO: 4248950 - DNA, 25 bp, Homo sapien
cagggatgttagcaaaggctccagg

SEQ ID NO: 4248951 - DNA, 25 bp, Homo sapien
gaaagaggcctgtggtgaactcggg

SEQ ID NO: 4248952 - DNA, 25 bp, Homo sapien
gaatgaccacctaccctgacttaaa

SEQ ID NO: 4248953 - DNA, 25 bp, Homo sapien
ggaaaatcagtctgcgctgaacagg

SEQ ID NO: 4248954 - DNA, 25 bp, Homo sapien
cttaaaagatcaacctcagggagga

SEQ ID NO: 4248955 - DNA, 25 bp, Homo sapien
gagcagttgattgccgaatgaccac

SEQ ID NO: 4248956 - DNA, 25 bp, Homo sapien
tttagtcccagcaacatatgagcat

SEQ ID NO: 4248957 - DNA, 25 bp, Homo sapien
cagcaacatatgagcatgtcaccag

SEQ ID NO: 4248958 - DNA, 25 bp, Homo sapien
gcctgtctgccacctgagtgtagac

SEQ ID NO: 4248959 - DNA, 25 bp, Homo sapien
gtcccagcaacatatgagcatgtca

SEQ ID NO: 4248960 - DNA, 25 bp, Homo sapien
tctccgggcacagctgccaatgttg

SEQ ID NO: 4248961 - DNA, 25 bp, Homo sapien
accctggaggcctctccgggcacag

SEQ ID NO: 4248962 - DNA, 25 bp, Homo sapien
gatcttagataagaccaccagcaag

SEQ ID NO: 4248963 - DNA, 25 bp, Homo sapien
gctgccaatgttgatcttagataag

SEQ ID NO: 4248964 - DNA, 25 bp, Homo sapien
actgaaatgtcccctgggagttgga

SEQ ID NO: 4248965 - DNA, 25 bp, Homo sapien
tgaaatgtcccctgggagttggaaa

SEQ ID NO: 4248966 - DNA, 25 bp, Homo sapien
tggggaactgaaatgtcccctggga

SEQ ID NO: 4248967 - DNA, 25 bp, Homo sapien
gaactgaaatgtcccctgggagttg

SEQ ID NO: 4248968 - DNA, 25 bp, Homo sapien
aaccatggcgggaggagtcatccgg

SEQ ID NO: 4248969 - DNA, 25 bp, Homo sapien
agctgatggacggaagaaccatggc

SEQ ID NO: 4248970 - DNA, 25 bp, Homo sapien
agtcatccggaagctacctcgctgc

SEQ ID NO: 4248971 - DNA, 25 bp, Homo sapien
gaagagctgatggacggaagaacca

SEQ ID NO: 4248972 - DNA, 25 bp, Homo sapien
ttgagggtgaggacgaagccccatt

SEQ ID NO: 4248973 - DNA, 25 bp, Homo sapien
ggttctctccagtcggtggctttcc

SEQ ID NO: 4248974 - DNA, 25 bp, Homo sapien
caagtgtgaataataaccaagccca

SEQ ID NO: 4248975 - DNA, 25 bp, Homo sapien
ttctgttgcgggtctcttgagggcc

SEQ ID NO: 4248976 - DNA, 25 bp, Homo sapien
tcatgaaggcacatgagtgactcat

SEQ ID NO: 4248977 - DNA, 25 bp, Homo sapien
cttcatgaaggcacatgagtgactc

SEQ ID NO: 4248978 - DNA, 25 bp, Homo sapien
ttcatgaaggcacatgagtgactca

SEQ ID NO: 4248979 - DNA, 25 bp, Homo sapien
ttagctatactgtactgttctattc

SEQ ID NO: 4248980 - DNA, 25 bp, Homo sapien
attttgtcttcaccgtcggcttatt

SEQ ID NO: 4248981 - DNA, 25 bp, Homo sapien
ctgttctattctttgagtggttgct

SEQ ID NO: 4248982 - DNA, 25 bp, Homo sapien
cttcaccgtcggcttattagctata

SEQ ID NO: 4248983 - DNA, 25 bp, Homo sapien
ctgaagtcgtatttgtaaatcctaa

SEQ ID NO: 4248984 - DNA, 25 bp, Homo sapien
gagttttgcactcagaatggatgag

SEQ ID NO: 4248985 - DNA, 25 bp, Homo sapien
ggctcaaacattccgcccgtcttgg

SEQ ID NO: 4248986 - DNA, 25 bp, Homo sapien
cccttagtgtttctgggctcacttg

SEQ ID NO: 4248987 - DNA, 25 bp, Homo sapien
tggcttatagcaccataaaaactcc

SEQ ID NO: 4248988 - DNA, 25 bp, Homo sapien
catcagtgaactgggtacacccaca

SEQ ID NO: 4248989 - DNA, 25 bp, Homo sapien
agtaactgttgagatgggccaggcc

SEQ ID NO: 4248990 - DNA, 25 bp, Homo sapien
gctttacgtttgcacagtcctgggc

SEQ ID NO: 4248991 - DNA, 25 bp, Homo sapien
caggccctgacgctggctttacgtt

SEQ ID NO: 4248992 - DNA, 25 bp, Homo sapien
aataatgcctgaacccaaaggtaca

SEQ ID NO: 4248993 - DNA, 25 bp, Homo sapien
gtagattacaaagcatctccgatca

SEQ ID NO: 4248994 - DNA, 25 bp, Homo sapien
cagctggacagtagattacaaagca

SEQ ID NO: 4248995 - DNA, 25 bp, Homo sapien
aatgcctgaacccaaaggtacataa

SEQ ID NO: 4248996 - DNA, 25 bp, Homo sapien
ataatcctgttggagttgggggctc

SEQ ID NO: 4248997 - DNA, 25 bp, Homo sapien
aataatcctgttggagttgggggct

SEQ ID NO: 4248998 - DNA, 25 bp, Homo sapien
ggggagccaggccccacctgtcttg

SEQ ID NO: 4248999 - DNA, 25 bp, Homo sapien
gttggcccaggaaggggcagtcctg

SEQ ID NO: 4249000 - DNA, 25 bp, Homo sapien
cccaggaaggggcagtcctggagct

SEQ ID NO: 4249001 - DNA, 25 bp, Homo sapien
cctggagctggcgggtggggagcca

SEQ ID NO: 4249002 - DNA, 25 bp, Homo sapien
atgctgatacggagccctggccctt

SEQ ID NO: 4249003 - DNA, 25 bp, Homo sapien
tgtcactgatgctgatacggagccc

SEQ ID NO: 4249004 - DNA, 25 bp, Homo sapien
tcactgatgctgatacggagccctg

SEQ ID NO: 4249005 - DNA, 25 bp, Homo sapien
ctgatgctgatacggagccctggcc

SEQ ID NO: 4249006 - DNA, 25 bp, Homo sapien
tgcacaagcagattatcacgggtct

SEQ ID NO: 4249007 - DNA, 25 bp, Homo sapien
tggaacaactgattaggaagctctg

SEQ ID NO: 4249008 - DNA, 25 bp, Homo sapien
taagagctgaaaaggtttgcccctg

SEQ ID NO: 4249009 - DNA, 25 bp, Homo sapien
aaaaatcagtctaggtcgggcatgg

SEQ ID NO: 4249010 - DNA, 25 bp, Homo sapien
ttgtctccaccagagacagccagga

SEQ ID NO: 4249011 - DNA, 25 bp, Homo sapien
tgtctccaccagagacagccaggat

SEQ ID NO: 4249012 - DNA, 25 bp, Homo sapien
tattgtctccaccagagacagccag

SEQ ID NO: 4249013 - DNA, 25 bp, Homo sapien
cttattgtctccaccagagacagcc

SEQ ID NO: 4249014 - DNA, 25 bp, Homo sapien
ttgcttgaggcatcatcacaggtcc

SEQ ID NO: 4249015 - DNA, 25 bp, Homo sapien
tcacatgccacaccacatcgttgaa

SEQ ID NO: 4249016 - DNA, 25 bp, Homo sapien
gttgaacttgtgcaacaatttaggg

SEQ ID NO: 4249017 - DNA, 25 bp, Homo sapien
tcacaggtccaaatgaacacacgac

SEQ ID NO: 4249018 - DNA, 25 bp, Homo sapien
ccacatctcgaacccagtcactgtg

SEQ ID NO: 4249019 - DNA, 25 bp, Homo sapien
gggcaggccgatggagggggcccag

SEQ ID NO: 4249020 - DNA, 25 bp, Homo sapien
cagtcactgtgcgcttctagcttct

SEQ ID NO: 4249021 - DNA, 25 bp, Homo sapien
acatctcgaacccagtcactgtgcg

SEQ ID NO: 4249022 - DNA, 25 bp, Homo sapien
gagaaggccacacatccctacttac

SEQ ID NO: 4249023 - DNA, 25 bp, Homo sapien
agggtagaagtgtcccctcaaagag

SEQ ID NO: 4249024 - DNA, 25 bp, Homo sapien
tgtcctccaacagattgaaaacagt

SEQ ID NO: 4249025 - DNA, 25 bp, Homo sapien
taggtgaacaggtgttgtgttgttt

SEQ ID NO: 4249026 - DNA, 25 bp, Homo sapien
gccacctgatgcaaacctcttgatg

SEQ ID NO: 4249027 - DNA, 25 bp, Homo sapien
cccagctgacggcattgcagccaat

SEQ ID NO: 4249028 - DNA, 25 bp, Homo sapien
gttgtcacagccacctgatgcaaac

SEQ ID NO: 4249029 - DNA, 25 bp, Homo sapien
ccgatgggtggtctatgaggcttcc

SEQ ID NO: 4249030 - DNA, 25 bp, Homo sapien
ctgcagacccaagcctgctgtccct

SEQ ID NO: 4249031 - DNA, 25 bp, Homo sapien
tctgcagtgtgcgctaaaagtagaa

SEQ ID NO: 4249032 - DNA, 25 bp, Homo sapien
ctcaaggatcccaacagtgtgtgca

SEQ ID NO: 4249033 - DNA, 25 bp, Homo sapien
catttttctgcagtgtgcgctaaaa

SEQ ID NO: 4249034 - DNA, 25 bp, Homo sapien
gagctggtgcgttctctcatcagga

SEQ ID NO: 4249035 - DNA, 25 bp, Homo sapien
tcatcaggaggcacgttagattgtc

SEQ ID NO: 4249036 - DNA, 25 bp, Homo sapien
ggtgtgatccctttggcaagactag

SEQ ID NO: 4249037 - DNA, 25 bp, Homo sapien
tgaaaactgtcagctggagccaaga

SEQ ID NO: 4249038 - DNA, 25 bp, Homo sapien
tgaagagtctgacaataatctaatt

SEQ ID NO: 4249039 - DNA, 25 bp, Homo sapien
ttttttcttctgcaccaatccttac

SEQ ID NO: 4249040 - DNA, 25 bp, Homo sapien
gtctttgtgtgaacttcaaagtcaa

SEQ ID NO: 4249041 - DNA, 25 bp, Homo sapien
ttcaaagtcaattttcctggttata

SEQ ID NO: 4249042 - DNA, 25 bp, Homo sapien
caaacaggagttcacctcgatctcc

SEQ ID NO: 4249043 - DNA, 25 bp, Homo sapien
ctcaaacaggagttcacctcgatct

SEQ ID NO: 4249044 - DNA, 25 bp, Homo sapien
tcaaacaggagttcacctcgatctc

SEQ ID NO: 4249045 - DNA, 25 bp, Homo sapien
aaacaggagttcacctcgatctccc

SEQ ID NO: 4249046 - DNA, 25 bp, Homo sapien
tagcaggttacagcttggctcggtt

SEQ ID NO: 4249047 - DNA, 25 bp, Homo sapien
caggatctgctgtgttcatcgacac

SEQ ID NO: 4249048 - DNA, 25 bp, Homo sapien
gaaagtctaagctcagaactctccc

SEQ ID NO: 4249049 - DNA, 25 bp, Homo sapien
tgtgctctcattgtccgcagggagg

SEQ ID NO: 4249050 - DNA, 25 bp, Homo sapien
tagagcaatcatgtctggtcagctg

SEQ ID NO: 4249051 - DNA, 25 bp, Homo sapien
caatgactactgcagggcatgtcac

SEQ ID NO: 4249052 - DNA, 25 bp, Homo sapien
cacacaacaaggaagcagtgccaag

SEQ ID NO: 4249053 - DNA, 25 bp, Homo sapien
caaccatagctaaggtggcagtgag

SEQ ID NO: 4249054 - DNA, 25 bp, Homo sapien
gccttccccggtgtaagtcagcagg

SEQ ID NO: 4249055 - DNA, 25 bp, Homo sapien
atggggggcccagcacaccgagttc

SEQ ID NO: 4249056 - DNA, 25 bp, Homo sapien
caggccaggatcaggccgtagtcat

SEQ ID NO: 4249057 - DNA, 25 bp, Homo sapien
ggtgtgagcgttgttgatcttcttt

SEQ ID NO: 4249058 - DNA, 25 bp, Homo sapien
gatgccaggatgttgccgtacatgg

SEQ ID NO: 4249059 - DNA, 25 bp, Homo sapien
tgtcccgcatgctcgtggctcttct

SEQ ID NO: 4249060 - DNA, 25 bp, Homo sapien
ctgaggagtcgtgtcccgcatgctc

SEQ ID NO: 4249061 - DNA, 25 bp, Homo sapien
actttccggtcataggagcacgatg

SEQ ID NO: 4249062 - DNA, 25 bp, Homo sapien
aattgctattcatccttcccgacgg

SEQ ID NO: 4249063 - DNA, 25 bp, Homo sapien
gaactaaatggctccctgagacgat

SEQ ID NO: 4249064 - DNA, 25 bp, Homo sapien
ggtgaccatttctctggcccaggga

SEQ ID NO: 4249065 - DNA, 25 bp, Homo sapien
tgccaggctttgtacggtgaccatt

SEQ ID NO: 4249066 - DNA, 25 bp, Homo sapien
agggccttgcatacactagctggat

SEQ ID NO: 4249067 - DNA, 25 bp, Homo sapien
aataatcactgaacacgtgccacgg

SEQ ID NO: 4249068 - DNA, 25 bp, Homo sapien
tgaactctattcacagaacccttgg

SEQ ID NO: 4249069 - DNA, 25 bp, Homo sapien
gcaacaaaccctagcggcaggtcta

SEQ ID NO: 4249070 - DNA, 25 bp, Homo sapien
gctttgctcccacgcttgaagcagg

SEQ ID NO: 4249071 - DNA, 25 bp, Homo sapien
gattcacacctgtatccacctgtgc

SEQ ID NO: 4249072 - DNA, 25 bp, Homo sapien
tctggtgggtacacataaagtggca

SEQ ID NO: 4249073 - DNA, 25 bp, Homo sapien
tcctctccgctaaatgtgctttggg

SEQ ID NO: 4249074 - DNA, 25 bp, Homo sapien
ccctccattgcgcacatcaaagatt

SEQ ID NO: 4249075 - DNA, 25 bp, Homo sapien
cctgaggtcggcgataaggatctgc

SEQ ID NO: 4249076 - DNA, 25 bp, Homo sapien
tgacggacctgtctgatgagcaggt

SEQ ID NO: 4249077 - DNA, 25 bp, Homo sapien
caaagattttgacggacctgtctga

SEQ ID NO: 4249078 - DNA, 25 bp, Homo sapien
tgcaaagggaggacagctcgggaag

SEQ ID NO: 4249079 - DNA, 25 bp, Homo sapien
gcaaagggaggacagctcgggaagc

SEQ ID NO: 4249080 - DNA, 25 bp, Homo sapien
aatcatgtcctcatgggaggtatcc

SEQ ID NO: 4249081 - DNA, 25 bp, Homo sapien
cctcatgggaggtatccacagtgtt

SEQ ID NO: 4249082 - DNA, 25 bp, Homo sapien
tcctcatgggaggtatccacagtgt

SEQ ID NO: 4249083 - DNA, 25 bp, Homo sapien
catgggaggtatccacagtgttaat

SEQ ID NO: 4249084 - DNA, 25 bp, Homo sapien
agaggacttaaaagaagtttcagtg

SEQ ID NO: 4249085 - DNA, 25 bp, Homo sapien
gacttaaaagaagtttcagtgtgga

SEQ ID NO: 4249086 - DNA, 25 bp, Homo sapien
tttcagtgtggaacagacatttctt

SEQ ID NO: 4249087 - DNA, 25 bp, Homo sapien
tcttctcttaaattcttgggataga

SEQ ID NO: 4249088 - DNA, 25 bp, Homo sapien
aggatggctgcaaagcagttcaaga

SEQ ID NO: 4249089 - DNA, 25 bp, Homo sapien
tctcatcagattctagactctctaa

SEQ ID NO: 4249090 - DNA, 25 bp, Homo sapien
ttctctcatcagattctagactctc

SEQ ID NO: 4249091 - DNA, 25 bp, Homo sapien
tctctcatcagattctagactctct

SEQ ID NO: 4249092 - DNA, 25 bp, Homo sapien
tcatcagattctagactctctaaaa

SEQ ID NO: 4249093 - DNA, 25 bp, Homo sapien
cctccatgtgccgagctgtataggt

SEQ ID NO: 4249094 - DNA, 25 bp, Homo sapien
ccatgtgccgagctgtataggttac

SEQ ID NO: 4249095 - DNA, 25 bp, Homo sapien
aaggacaataaggagtttcctccat

SEQ ID NO: 4249096 - DNA, 25 bp, Homo sapien
tttcctccatgtgccgagctgtata

SEQ ID NO: 4249097 - DNA, 25 bp, Homo sapien
cccgagcaacagttcaatcatctct

SEQ ID NO: 4249098 - DNA, 25 bp, Homo sapien
gggccctaccccgagcaacagttca

SEQ ID NO: 4249099 - DNA, 25 bp, Homo sapien
ctaccccgagcaacagttcaatcat

SEQ ID NO: 4249100 - DNA, 25 bp, Homo sapien
gccctaccccgagcaacagttcaat

SEQ ID NO: 4249101 - DNA, 25 bp, Homo sapien
tggttaggagggttcaaatctcggc

SEQ ID NO: 4249102 - DNA, 25 bp, Homo sapien
ggagggttcaaatctcggctctact

SEQ ID NO: 4249103 - DNA, 25 bp, Homo sapien
gaatggttaggagggttcaaatctc

SEQ ID NO: 4249104 - DNA, 25 bp, Homo sapien
cagtaggcggcagaaaggaatggtt

SEQ ID NO: 4249105 - DNA, 25 bp, Homo sapien
agcagctgtgcaagaggctccacgt

SEQ ID NO: 4249106 - DNA, 25 bp, Homo sapien
gtctccgaacctcaagtgtcctcat

SEQ ID NO: 4249107 - DNA, 25 bp, Homo sapien
tctgtaaagtgttgagaagaatagc

SEQ ID NO: 4249108 - DNA, 25 bp, Homo sapien
tccacgtctccgaacctcaagtgtc

SEQ ID NO: 4249109 - DNA, 25 bp, Homo sapien
tgagggctcggtatacagtagctcc

SEQ ID NO: 4249110 - DNA, 25 bp, Homo sapien
gattacgaacaatgctgagggctcg

SEQ ID NO: 4249111 - DNA, 25 bp, Homo sapien
caattgttgaccgaaaagaaggaag

SEQ ID NO: 4249112 - DNA, 25 bp, Homo sapien
cttcacaaggctgttagcaggcgga

SEQ ID NO: 4249113 - DNA, 25 bp, Homo sapien
gccgaggaacccgtgaaggccgcga

SEQ ID NO: 4249114 - DNA, 25 bp, Homo sapien
ccctcggaatggtccgcaaggacgg

SEQ ID NO: 4249115 - DNA, 25 bp, Homo sapien
taggcctcctcagtaccaacactca

SEQ ID NO: 4249116 - DNA, 25 bp, Homo sapien
ccaaatctctaagcggtggagggga

SEQ ID NO: 4249117 - DNA, 25 bp, Homo sapien
gcgcctcggaacagctcacttccgg

SEQ ID NO: 4249118 - DNA, 25 bp, Homo sapien
ctccaggtctcggacgtggcagctc

SEQ ID NO: 4249119 - DNA, 25 bp, Homo sapien
tggcgtaggagcctccgggcagcaa

SEQ ID NO: 4249120 - DNA, 25 bp, Homo sapien
ccgacgggccgtggcgtaggagcct

SEQ ID NO: 4249121 - DNA, 25 bp, Homo sapien
tacaataagagcacagtcacttccc

SEQ ID NO: 4249122 - DNA, 25 bp, Homo sapien
gagcacaagccaaagatacagagaa

SEQ ID NO: 4249123 - DNA, 25 bp, Homo sapien
ccacctgggttggtatgatctctac

SEQ ID NO: 4249124 - DNA, 25 bp, Homo sapien
ttacggaagctggaggcggcaccat

SEQ ID NO: 4249125 - DNA, 25 bp, Homo sapien
cagagtcctttgagccagtgcagtc

SEQ ID NO: 4249126 - DNA, 25 bp, Homo sapien
gaagctatgtggatgatgcagtccc

SEQ ID NO: 4249127 - DNA, 25 bp, Homo sapien
gatgagacacccaagtaagcgaaga

SEQ ID NO: 4249128 - DNA, 25 bp, Homo sapien
tcctggagcccttgtctagaggaca

SEQ ID NO: 4249129 - DNA, 25 bp, Homo sapien
tgtaggccctcccagttgactatgg

SEQ ID NO: 4249130 - DNA, 25 bp, Homo sapien
cattggtgcaaatctactaggcgag

SEQ ID NO: 4249131 - DNA, 25 bp, Homo sapien
gccgttagtgttgcaaacccaggaa

SEQ ID NO: 4249132 - DNA, 25 bp, Homo sapien
gagttcaaacagcatcgcagccaga

SEQ ID NO: 4249133 - DNA, 25 bp, Homo sapien
tccggaattcaggatgagccatgaa

SEQ ID NO: 4249134 - DNA, 25 bp, Homo sapien
ggttgatcccactgtcgatggcgct

SEQ ID NO: 4249135 - DNA, 25 bp, Homo sapien
gcttgagcgcggcatcttcttccag

SEQ ID NO: 4249136 - DNA, 25 bp, Homo sapien
tccaggtcggtgtcatcaatgaggg

SEQ ID NO: 4249137 - DNA, 25 bp, Homo sapien
gagcagtggctgccctgcaccacag

SEQ ID NO: 4249138 - DNA, 25 bp, Homo sapien
gcagagcagtggctgccctgcacca

SEQ ID NO: 4249139 - DNA, 25 bp, Homo sapien
gcagtggctgccctgcaccacaggc

SEQ ID NO: 4249140 - DNA, 25 bp, Homo sapien
ctgcagagcagtggctgccctgcac

SEQ ID NO: 4249141 - DNA, 25 bp, Homo sapien
tgctgaactctgtgtccagggttct

SEQ ID NO: 4249142 - DNA, 25 bp, Homo sapien
actctgtgtccagggttctctagcc

SEQ ID NO: 4249143 - DNA, 25 bp, Homo sapien
cttttaatttcactctctcttgctg

SEQ ID NO: 4249144 - DNA, 25 bp, Homo sapien
tcttgctgaactctgtgtccagggt

SEQ ID NO: 4249145 - DNA, 25 bp, Homo sapien
gagtcgtcagaaccaggaatctgca

SEQ ID NO: 4249146 - DNA, 25 bp, Homo sapien
tgcaaactccttgccctaggagtcg

SEQ ID NO: 4249147 - DNA, 25 bp, Homo sapien
tgccttatctgtctagcaaggtacg

SEQ ID NO: 4249148 - DNA, 25 bp, Homo sapien
tctgtctagcaaggtacggcgtcca

SEQ ID NO: 4249149 - DNA, 25 bp, Homo sapien
aaagagcattggacaacgacacgcg

SEQ ID NO: 4249150 - DNA, 25 bp, Homo sapien
gacacgcgactagggctagagagat

SEQ ID NO: 4249151 - DNA, 25 bp, Homo sapien
gaggccccgctcttgaaagtattga

SEQ ID NO: 4249152 - DNA, 25 bp, Homo sapien
tggtgaccgaggactgtctccgcag

SEQ ID NO: 4249153 - DNA, 25 bp, Homo sapien
cttgagtctgctggtcgggatggtg

SEQ ID NO: 4249154 - DNA, 25 bp, Homo sapien
tgctggtcgggatggtggcgatgac

SEQ ID NO: 4249155 - DNA, 25 bp, Homo sapien
cccgctccgcgtggtcgatctcctc

SEQ ID NO: 4249156 - DNA, 25 bp, Homo sapien
ctcctccacgtcctcgttgagctcc

SEQ ID NO: 4249157 - DNA, 25 bp, Homo sapien
caaacgagctctcctaacccaatga

SEQ ID NO: 4249158 - DNA, 25 bp, Homo sapien
gagctctcctaacccaatgaatatg

SEQ ID NO: 4249159 - DNA, 25 bp, Homo sapien
tctcctaacccaatgaatatgcacc

SEQ ID NO: 4249160 - DNA, 25 bp, Homo sapien
ctggccccaaacgagctctcctaac

SEQ ID NO: 4249161 - DNA, 25 bp, Homo sapien
ctcccgctgtcgatctggaacatct

SEQ ID NO: 4249162 - DNA, 25 bp, Homo sapien
gggttccggaagatgccgtcaaaga

SEQ ID NO: 4249163 - DNA, 25 bp, Homo sapien
aagacattgcgctcgccgtggatct

SEQ ID NO: 4249164 - DNA, 25 bp, Homo sapien
taatgttctgagggtggcgaatgca

SEQ ID NO: 4249165 - DNA, 25 bp, Homo sapien
gcaagctggtagacagcatggccca

SEQ ID NO: 4249166 - DNA, 25 bp, Homo sapien
tcagtggccagtgccagcgaggcaa

SEQ ID NO: 4249167 - DNA, 25 bp, Homo sapien
gcgaggcaaacgtgtccatgatgag

SEQ ID NO: 4249168 - DNA, 25 bp, Homo sapien
tcctggagatgagcggcttgttgcg

SEQ ID NO: 4249169 - DNA, 25 bp, Homo sapien
gtctgtcaggatgatgtctgaggcc

SEQ ID NO: 4249170 - DNA, 25 bp, Homo sapien
aattgtcgtctgtcaggatgatgtc

SEQ ID NO: 4249171 - DNA, 25 bp, Homo sapien
gaaattgtcgtctgtcaggatgatg

SEQ ID NO: 4249172 - DNA, 25 bp, Homo sapien
gtcgtctgtcaggatgatgtctgag

SEQ ID NO: 4249173 - DNA, 25 bp, Homo sapien
tcagtgtgtgtgctgtcgatgatgc

SEQ ID NO: 4249174 - DNA, 25 bp, Homo sapien
gcccacgtcggccttcttgagtgca

SEQ ID NO: 4249175 - DNA, 25 bp, Homo sapien
tgccgctgctcagtgtgtgtgctgt

SEQ ID NO: 4249176 - DNA, 25 bp, Homo sapien
agtgcaggcccgtcgttggtcccgt

SEQ ID NO: 4249177 - DNA, 25 bp, Homo sapien
ggcagctccacttgaggtgtcacca

SEQ ID NO: 4249178 - DNA, 25 bp, Homo sapien
ctggcagctccacttgaggtgtcac

SEQ ID NO: 4249179 - DNA, 25 bp, Homo sapien
tggcagctccacttgaggtgtcacc

SEQ ID NO: 4249180 - DNA, 25 bp, Homo sapien
gatcttgtcaattcgctcctgctca

SEQ ID NO: 4249181 - DNA, 25 bp, Homo sapien
cgcagctttggccagatcttgtcaa

SEQ ID NO: 4249182 - DNA, 25 bp, Homo sapien
taaccagggtatgcttgtccgttgg

SEQ ID NO: 4249183 - DNA, 25 bp, Homo sapien
ctttaaccagggtatgcttgtccgt

SEQ ID NO: 4249184 - DNA, 25 bp, Homo sapien
ttgccctcgaggcacagaaagtcct

SEQ ID NO: 4249185 - DNA, 25 bp, Homo sapien
ggcccgagccgtgttgatattgtcg

SEQ ID NO: 4249186 - DNA, 25 bp, Homo sapien
tctcgttgcggatcctcctgttgaa

SEQ ID NO: 4249187 - DNA, 25 bp, Homo sapien
gatattgtcgccagtgaccatgcgg

SEQ ID NO: 4249188 - DNA, 25 bp, Homo sapien
gagttcgttgaggatgtcattctca

SEQ ID NO: 4249189 - DNA, 25 bp, Homo sapien
caagccatgggctcaatcaccttct

SEQ ID NO: 4249190 - DNA, 25 bp, Homo sapien
cgccccattgaggattttgcagcac

SEQ ID NO: 4249191 - DNA, 25 bp, Homo sapien
taggccacgcagatagtgcggagcc

SEQ ID NO: 4249192 - DNA, 25 bp, Homo sapien
gctctcgtcgggcagcttgatgaca

SEQ ID NO: 4249193 - DNA, 25 bp, Homo sapien
atctggctgcgcacgggctcgtagt

SEQ ID NO: 4249194 - DNA, 25 bp, Homo sapien
ttcttgagcacgatctcagaagccc

SEQ ID NO: 4249195 - DNA, 25 bp, Homo sapien
cttgctgtacatgcggaagctctcg

SEQ ID NO: 4249196 - DNA, 25 bp, Homo sapien
agagagaggaaggagcggctggcac

SEQ ID NO: 4249197 - DNA, 25 bp, Homo sapien
ctgcagagagaggaaggagcggctg

SEQ ID NO: 4249198 - DNA, 25 bp, Homo sapien
tgcagagagaggaaggagcggctgg

SEQ ID NO: 4249199 - DNA, 25 bp, Homo sapien
cagagagaggaaggagcggctggca

SEQ ID NO: 4249200 - DNA, 25 bp, Homo sapien
tgagaggacaattcgtgctcttgtt

SEQ ID NO: 4249201 - DNA, 25 bp, Homo sapien
gaggacaattcgtgctcttgttttg

SEQ ID NO: 4249202 - DNA, 25 bp, Homo sapien
ctttgagaggacaattcgtgctctt

SEQ ID NO: 4249203 - DNA, 25 bp, Homo sapien
aggacaattcgtgctcttgttttgg

SEQ ID NO: 4249204 - DNA, 25 bp, Homo sapien
atggatgttgctccaggtggtggat

SEQ ID NO: 4249205 - DNA, 25 bp, Homo sapien
cagcagctccatggtcttggtgttg

SEQ ID NO: 4249206 - DNA, 25 bp, Homo sapien
taggcctgtaccactgtcatgcgat

SEQ ID NO: 4249207 - DNA, 25 bp, Homo sapien
tcatgcgattggtggtcagcgtgcc

SEQ ID NO: 4249208 - DNA, 25 bp, Homo sapien
gatctctttatagtggacgtcgccg

SEQ ID NO: 4249209 - DNA, 25 bp, Homo sapien
ggggcaggtgagagggcaacagtga

SEQ ID NO: 4249210 - DNA, 25 bp, Homo sapien
caggtgagagggcaacagtgaggag

SEQ ID NO: 4249211 - DNA, 25 bp, Homo sapien
gtgagagggcaacagtgaggagagg

SEQ ID NO: 4249212 - DNA, 25 bp, Homo sapien
gggcaggtgagagggcaacagtgag

SEQ ID NO: 4249213 - DNA, 25 bp, Homo sapien
gggcttcttttgtctgcgcgtggcc

SEQ ID NO: 4249214 - DNA, 25 bp, Homo sapien
gcttcttttgtctgcgcgtggccct

SEQ ID NO: 4249215 - DNA, 25 bp, Homo sapien
ggcttcttttgtctgcgcgtggccc

SEQ ID NO: 4249216 - DNA, 25 bp, Homo sapien
ctggcttctcttggaaaaaggtgac

SEQ ID NO: 4249217 - DNA, 25 bp, Homo sapien
aggcccctggactctatgaaagcgt

SEQ ID NO: 4249218 - DNA, 25 bp, Homo sapien
aatgtggcaatgctgggcctgcacc

SEQ ID NO: 4249219 - DNA, 25 bp, Homo sapien
tctctggtttgctacaggcccctgg

SEQ ID NO: 4249220 - DNA, 25 bp, Homo sapien
agctgcatcagccggctggtcctgc

SEQ ID NO: 4249221 - DNA, 25 bp, Homo sapien
ctgcagctgcatcagccggctggtc

SEQ ID NO: 4249222 - DNA, 25 bp, Homo sapien
gcagctgcatcagccggctggtcct

SEQ ID NO: 4249223 - DNA, 25 bp, Homo sapien
gctgcatcagccggctggtcctgct

SEQ ID NO: 4249224 - DNA, 25 bp, Homo sapien
tccacagtgaagtagagcaccagga

SEQ ID NO: 4249225 - DNA, 25 bp, Homo sapien
gcaccgtcacgccaatgatgaagaa

SEQ ID NO: 4249226 - DNA, 25 bp, Homo sapien
gccacggcttcttgttgaccacgaa

SEQ ID NO: 4249227 - DNA, 25 bp, Homo sapien
aataggccaacgagatggtgacggc

SEQ ID NO: 4249228 - DNA, 25 bp, Homo sapien
gccctcggcactcttgaggggctgc

SEQ ID NO: 4249229 - DNA, 25 bp, Homo sapien
agcgtcgccgccctcggcactcttg

SEQ ID NO: 4249230 - DNA, 25 bp, Homo sapien
tcttcctgtcgtcagcgtcgccgcc

SEQ ID NO: 4249231 - DNA, 25 bp, Homo sapien
ctccttcttgtgcatgctggccttc

SEQ ID NO: 4249232 - DNA, 25 bp, Homo sapien
tggctggcgtccacattgccatcct

SEQ ID NO: 4249233 - DNA, 25 bp, Homo sapien
ctttgctctggctggcgtccacatt

SEQ ID NO: 4249234 - DNA, 25 bp, Homo sapien
gctctggctggcgtccacattgcca

SEQ ID NO: 4249235 - DNA, 25 bp, Homo sapien
tttgctctggctggcgtccacattg

SEQ ID NO: 4249236 - DNA, 25 bp, Homo sapien
gaacagacaacacatggtcggtcat

SEQ ID NO: 4249237 - DNA, 25 bp, Homo sapien
gaagacgcaacaggccacagacatt

SEQ ID NO: 4249238 - DNA, 25 bp, Homo sapien
ttttaacagacaacagagaacagac

SEQ ID NO: 4249239 - DNA, 25 bp, Homo sapien
taatgtcacagatgaagggcgggcc

SEQ ID NO: 4249240 - DNA, 25 bp, Homo sapien
tcattgtgatctggctcagaggaag

SEQ ID NO: 4249241 - DNA, 25 bp, Homo sapien
tctctcaatcggcaaggttccacct

SEQ ID NO: 4249242 - DNA, 25 bp, Homo sapien
acctgtaatgtgctctcacctggag

SEQ ID NO: 4249243 - DNA, 25 bp, Homo sapien
gcttccaagatgaatggaccacacc

SEQ ID NO: 4249244 - DNA, 25 bp, Homo sapien
cattgactaggctggcattcgcact

SEQ ID NO: 4249245 - DNA, 25 bp, Homo sapien
cagcatttgaagctgccgcaccgtc

SEQ ID NO: 4249246 - DNA, 25 bp, Homo sapien
gactaggctggcattcgcactatct

SEQ ID NO: 4249247 - DNA, 25 bp, Homo sapien
ctaggctggcattcgcactatctgc

SEQ ID NO: 4249248 - DNA, 25 bp, Homo sapien
cctatgatggtgagcaagctttgca

SEQ ID NO: 4249249 - DNA, 25 bp, Homo sapien
cactgggtgaagcacactgttgcgt

SEQ ID NO: 4249250 - DNA, 25 bp, Homo sapien
taaaagcccatctaccctgagggtg

SEQ ID NO: 4249251 - DNA, 25 bp, Homo sapien
ctttgcatgctggtacgcagggcta

SEQ ID NO: 4249252 - DNA, 25 bp, Homo sapien
tggtagctgaaggccatcccccttc

SEQ ID NO: 4249253 - DNA, 25 bp, Homo sapien
ctggtagctgaaggccatccccctt

SEQ ID NO: 4249254 - DNA, 25 bp, Homo sapien
gtagctgaaggccatcccccttctt

SEQ ID NO: 4249255 - DNA, 25 bp, Homo sapien
agctgaaggccatcccccttcttca

SEQ ID NO: 4249256 - DNA, 25 bp, Homo sapien
gatttttgagacatgttaatgaagg

SEQ ID NO: 4249257 - DNA, 25 bp, Homo sapien
taagcaatgttcctagtggaggtga

SEQ ID NO: 4249258 - DNA, 25 bp, Homo sapien
acatgtggcgggctctaagcaatgt

SEQ ID NO: 4249259 - DNA, 25 bp, Homo sapien
tacacctagggtcatcctgaaatgg

SEQ ID NO: 4249260 - DNA, 25 bp, Homo sapien
aaggaccctgaactgtgcttctggg

SEQ ID NO: 4249261 - DNA, 25 bp, Homo sapien
catgctcagcgaaggaccctgaact

SEQ ID NO: 4249262 - DNA, 25 bp, Homo sapien
tctacatgaggctatttttctgaca

SEQ ID NO: 4249263 - DNA, 25 bp, Homo sapien
ttgacacttgtcttcctactggcat

SEQ ID NO: 4249264 - DNA, 25 bp, Homo sapien
gacagttttagcctgggtggtcagc

SEQ ID NO: 4249265 - DNA, 25 bp, Homo sapien
gtctcgacctaagctctgtgcctga

SEQ ID NO: 4249266 - DNA, 25 bp, Homo sapien
tatcattgtggaatagggctcagcc

SEQ ID NO: 4249267 - DNA, 25 bp, Homo sapien
aagacaatgagtacaggctgctgca

SEQ ID NO: 4249268 - DNA, 25 bp, Homo sapien
gatgatgggaccaattgatgctggc

SEQ ID NO: 4249269 - DNA, 25 bp, Homo sapien
ggtgcggacgtagaaggcactcaat

SEQ ID NO: 4249270 - DNA, 25 bp, Homo sapien
cttggatgaatctatgctgggtgga

SEQ ID NO: 4249271 - DNA, 25 bp, Homo sapien
caagacagagactgggacaagacct

SEQ ID NO: 4249272 - DNA, 25 bp, Homo sapien
cctgagccctccatcacgtgggttc

SEQ ID NO: 4249273 - DNA, 25 bp, Homo sapien
tgagagttcacacccacagcagtca

SEQ ID NO: 4249274 - DNA, 25 bp, Homo sapien
aaagatgatgccagtctgagagttc

SEQ ID NO: 4249275 - DNA, 25 bp, Homo sapien
gcagtcaccaacatccgtcctgagc

SEQ ID NO: 4249276 - DNA, 25 bp, Homo sapien
gatgaagaggccgtcggcagggagg

SEQ ID NO: 4249277 - DNA, 25 bp, Homo sapien
ggacttgcgcacctggtcagactct

SEQ ID NO: 4249278 - DNA, 25 bp, Homo sapien
cagactctccagttagggagctttc

SEQ ID NO: 4249279 - DNA, 25 bp, Homo sapien
tttcatcaatcttgaggtcattgcc

SEQ ID NO: 4249280 - DNA, 25 bp, Homo sapien
caggccccggaactgtttctctttg

SEQ ID NO: 4249281 - DNA, 25 bp, Homo sapien
tgttcctgctcgatgcggctctgca

SEQ ID NO: 4249282 - DNA, 25 bp, Homo sapien
cagcccggaccacggtaaatttctg

SEQ ID NO: 4249283 - DNA, 25 bp, Homo sapien
cgtgaccaggaccacacagataact

SEQ ID NO: 4249284 - DNA, 25 bp, Homo sapien
catcggatcatccttcctgcaaaac

SEQ ID NO: 4249285 - DNA, 25 bp, Homo sapien
tgcaaaactcagagcagttcccctc

SEQ ID NO: 4249286 - DNA, 25 bp, Homo sapien
catggaaaggaatctccagcagcat

SEQ ID NO: 4249287 - DNA, 25 bp, Homo sapien
tggggcactggataccctgcaaggc

SEQ ID NO: 4249288 - DNA, 25 bp, Homo sapien
gcatccactttaaccctcaagctgg

SEQ ID NO: 4249289 - DNA, 25 bp, Homo sapien
tgctgtgcacccagcatccacttta

SEQ ID NO: 4249290 - DNA, 25 bp, Homo sapien
tgcacccagcatccactttaaccct

SEQ ID NO: 4249291 - DNA, 25 bp, Homo sapien
cacccagcatccactttaaccctca

SEQ ID NO: 4249292 - DNA, 25 bp, Homo sapien
ggcgggtggtagaaggacagcccca

SEQ ID NO: 4249293 - DNA, 25 bp, Homo sapien
cgggtggtagaaggacagccccagg

SEQ ID NO: 4249294 - DNA, 25 bp, Homo sapien
aggtctggagcggtgcccggcaaac

SEQ ID NO: 4249295 - DNA, 25 bp, Homo sapien
tcgccgggcgggtggtagaaggaca

SEQ ID NO: 4249296 - DNA, 25 bp, Homo sapien
tcaccagacagaagagtgcccactt

SEQ ID NO: 4249297 - DNA, 25 bp, Homo sapien
cctggcactgttgcagacactggaa

SEQ ID NO: 4249298 - DNA, 25 bp, Homo sapien
gtgattgtacttaacccatgggtgg

SEQ ID NO: 4249299 - DNA, 25 bp, Homo sapien
ccgcgcagtggttagagaagaatca

SEQ ID NO: 4249300 - DNA, 25 bp, Homo sapien
tgccttgcaacgtgctcggagcgtg

SEQ ID NO: 4249301 - DNA, 25 bp, Homo sapien
ttgcaacgtgctcggagcgtgcctg

SEQ ID NO: 4249302 - DNA, 25 bp, Homo sapien
tggatgccttgcaacgtgctcggag

SEQ ID NO: 4249303 - DNA, 25 bp, Homo sapien
tgctcggagcgtgcctggtggacat

SEQ ID NO: 4249304 - DNA, 25 bp, Homo sapien
cagctgacactggtactttctcctc

SEQ ID NO: 4249305 - DNA, 25 bp, Homo sapien
agctgacactggtactttctcctct

SEQ ID NO: 4249306 - DNA, 25 bp, Homo sapien
gcagctgacactggtactttctcct

SEQ ID NO: 4249307 - DNA, 25 bp, Homo sapien
gctgacactggtactttctcctctt

SEQ ID NO: 4249308 - DNA, 25 bp, Homo sapien
tcttctgacccgcaacctgtgtctg

SEQ ID NO: 4249309 - DNA, 25 bp, Homo sapien
taaagcccgtgtttcccagcctggc

SEQ ID NO: 4249310 - DNA, 25 bp, Homo sapien
tggaataaagcccgtgtttcccagc

SEQ ID NO: 4249311 - DNA, 25 bp, Homo sapien
tcttccagacttgcaagtccactct

SEQ ID NO: 4249312 - DNA, 25 bp, Homo sapien
atggggcctctgagaaggtggaggt

SEQ ID NO: 4249313 - DNA, 25 bp, Homo sapien
gcctctgagaaggtggaggtggtca

SEQ ID NO: 4249314 - DNA, 25 bp, Homo sapien
gggcctctgagaaggtggaggtggt

SEQ ID NO: 4249315 - DNA, 25 bp, Homo sapien
tggggcctctgagaaggtggaggtg

SEQ ID NO: 4249316 - DNA, 25 bp, Homo sapien
tggtcttctgctggccaccaggtgg

SEQ ID NO: 4249317 - DNA, 25 bp, Homo sapien
tggccacctgagctcctacatcttc

SEQ ID NO: 4249318 - DNA, 25 bp, Homo sapien
ggtatggttcttcaccctggccacc

SEQ ID NO: 4249319 - DNA, 25 bp, Homo sapien
caggtggtcccaaataaggaggaag

SEQ ID NO: 4249320 - DNA, 25 bp, Homo sapien
tagaaaaggactgctgggccaaggc

SEQ ID NO: 4249321 - DNA, 25 bp, Homo sapien
ctgggcactgatgggccaaggtttt

SEQ ID NO: 4249322 - DNA, 25 bp, Homo sapien
ggtagaaaaggactgctgggccaag

SEQ ID NO: 4249323 - DNA, 25 bp, Homo sapien
agaactgttgccagggatgcccaaa

SEQ ID NO: 4249324 - DNA, 25 bp, Homo sapien
gcacagtcacatgcatccccttggg

SEQ ID NO: 4249325 - DNA, 25 bp, Homo sapien
agtttagcatttttctccagtatca

SEQ ID NO: 4249326 - DNA, 25 bp, Homo sapien
ggcttttggatactctagtttagca

SEQ ID NO: 4249327 - DNA, 25 bp, Homo sapien
taagaacttatgtgatctgtgcccc

SEQ ID NO: 4249328 - DNA, 25 bp, Homo sapien
tgtggttggctgattttctgagaga

SEQ ID NO: 4249329 - DNA, 25 bp, Homo sapien
tgcgtgtggttggctgattttctga

SEQ ID NO: 4249330 - DNA, 25 bp, Homo sapien
cgtgtggttggctgattttctgaga

SEQ ID NO: 4249331 - DNA, 25 bp, Homo sapien
ttgcgtgtggttggctgattttctg

SEQ ID NO: 4249332 - DNA, 25 bp, Homo sapien
cagctgtttttaagcctcgtgccag

SEQ ID NO: 4249333 - DNA, 25 bp, Homo sapien
ccagaagtctccaagcaaagccgat

SEQ ID NO: 4249334 - DNA, 25 bp, Homo sapien
gagcacggaccattctgccagggat

SEQ ID NO: 4249335 - DNA, 25 bp, Homo sapien
tcatgtgccaacctgatggtggagg

SEQ ID NO: 4249336 - DNA, 25 bp, Homo sapien
ttgatcttgaccacagcctcagtgc

SEQ ID NO: 4249337 - DNA, 25 bp, Homo sapien
tcggtgtccccataagtctccttga

SEQ ID NO: 4249338 - DNA, 25 bp, Homo sapien
gctccatgagggagcggagctcctc

SEQ ID NO: 4249339 - DNA, 25 bp, Homo sapien
aagtcgctgttggtcatgtcaccca

SEQ ID NO: 4249340 - DNA, 25 bp, Homo sapien
gcacaccctcactggtcagctgtgg

SEQ ID NO: 4249341 - DNA, 25 bp, Homo sapien
ggaactggcatctacatggtcaggg

SEQ ID NO: 4249342 - DNA, 25 bp, Homo sapien
tagacccaggagtctccattcagtg

SEQ ID NO: 4249343 - DNA, 25 bp, Homo sapien
gcccaagggtcagcgctggacaaga

SEQ ID NO: 4249344 - DNA, 25 bp, Homo sapien
gacattctgagaagtttctcctggt

SEQ ID NO: 4249345 - DNA, 25 bp, Homo sapien
ttctgagaagtttctcctggtggcc

SEQ ID NO: 4249346 - DNA, 25 bp, Homo sapien
gactttgaccagagtgacaggcctg

SEQ ID NO: 4249347 - DNA, 25 bp, Homo sapien
ttggcaacggggagcactgaagact

SEQ ID NO: 4249348 - DNA, 25 bp, Homo sapien
tagtgaagcccactgtagacgttcc

SEQ ID NO: 4249349 - DNA, 25 bp, Homo sapien
actgtagacgttcccagggccaggg

SEQ ID NO: 4249350 - DNA, 25 bp, Homo sapien
tgtagtgaagcccactgtagacgtt

SEQ ID NO: 4249351 - DNA, 25 bp, Homo sapien
tgaagcccactgtagacgttcccag

SEQ ID NO: 4249352 - DNA, 25 bp, Homo sapien
tgatcctgatgccaatcacaccttc

SEQ ID NO: 4249353 - DNA, 25 bp, Homo sapien
tcctgatgccaatcacaccttcgtg

SEQ ID NO: 4249354 - DNA, 25 bp, Homo sapien
caccttcgtgcacagccctctacag

SEQ ID NO: 4249355 - DNA, 25 bp, Homo sapien
gatgccaatcacaccttcgtgcaca

SEQ ID NO: 4249356 - DNA, 25 bp, Homo sapien
ggacagcacaggagggtgccagcat

SEQ ID NO: 4249357 - DNA, 25 bp, Homo sapien
cagaggagggcagcgggacagcaca

SEQ ID NO: 4249358 - DNA, 25 bp, Homo sapien
tgagctgggggaacgcagaggaggg

SEQ ID NO: 4249359 - DNA, 25 bp, Homo sapien
tgcgcctgagctgggggaacgcaga

SEQ ID NO: 4249360 - DNA, 25 bp, Homo sapien
gctatgaaaatcaccaccaatcctg

SEQ ID NO: 4249361 - DNA, 25 bp, Homo sapien
caatcctgcacggtttcccggcggg

SEQ ID NO: 4249362 - DNA, 25 bp, Homo sapien
gcgggcagccccgtaatcgcggtgc

SEQ ID NO: 4249363 - DNA, 25 bp, Homo sapien
gcagccccgtaatcgcggtgcggca

SEQ ID NO: 4249364 - DNA, 25 bp, Homo sapien
gccgaggcgggagtgaataatgaag

SEQ ID NO: 4249365 - DNA, 25 bp, Homo sapien
cgtctgcaataaagtggccgaggcg

SEQ ID NO: 4249366 - DNA, 25 bp, Homo sapien
aataatgaaggtgcaatgtgcaatg

SEQ ID NO: 4249367 - DNA, 25 bp, Homo sapien
cctttcaaggggctattgaggactt

SEQ ID NO: 4249368 - DNA, 25 bp, Homo sapien
catttggctgcagcccagtttttca

SEQ ID NO: 4249369 - DNA, 25 bp, Homo sapien
ttggctgcagcccagtttttcaggt

SEQ ID NO: 4249370 - DNA, 25 bp, Homo sapien
cagtttttcaggtccccaccctgat

SEQ ID NO: 4249371 - DNA, 25 bp, Homo sapien
tgcagcccagtttttcaggtcccca

SEQ ID NO: 4249372 - DNA, 25 bp, Homo sapien
tcattccactggaagtaactttctg

SEQ ID NO: 4249373 - DNA, 25 bp, Homo sapien
attccactggaagtaactttctgtg

SEQ ID NO: 4249374 - DNA, 25 bp, Homo sapien
ggtcattccactggaagtaactttc

SEQ ID NO: 4249375 - DNA, 25 bp, Homo sapien
ctggtcattccactggaagtaactt

SEQ ID NO: 4249376 - DNA, 25 bp, Homo sapien
cgtatggccacaccctgcaaggtgg

SEQ ID NO: 4249377 - DNA, 25 bp, Homo sapien
tcaggccacggacacaagtaccctc

SEQ ID NO: 4249378 - DNA, 25 bp, Homo sapien
agtcactgcagaagtctgcagcgta

SEQ ID NO: 4249379 - DNA, 25 bp, Homo sapien
tcggctccagcacctacagtcactg

SEQ ID NO: 4249380 - DNA, 25 bp, Homo sapien
aaagggtggctacgacgcgtgcatc

SEQ ID NO: 4249381 - DNA, 25 bp, Homo sapien
tctctgtacaactggctggcatgga

SEQ ID NO: 4249382 - DNA, 25 bp, Homo sapien
gctacgacgcgtgcatctggcccaa

SEQ ID NO: 4249383 - DNA, 25 bp, Homo sapien
ttttgttctgaggactctctgtaca

SEQ ID NO: 4249384 - DNA, 25 bp, Homo sapien
ggccccatgacactccttgcttgtg

SEQ ID NO: 4249385 - DNA, 25 bp, Homo sapien
cactttctcttcatagagaaacagg

SEQ ID NO: 4249386 - DNA, 25 bp, Homo sapien
gtttcctgctgagcaacttgtcctt

SEQ ID NO: 4249387 - DNA, 25 bp, Homo sapien
ctataatgtgcctgatcactttctc

SEQ ID NO: 4249388 - DNA, 25 bp, Homo sapien
gtcaagtgactgatgagagggagta

SEQ ID NO: 4249389 - DNA, 25 bp, Homo sapien
caagtgactgatgagagggagtagg

SEQ ID NO: 4249390 - DNA, 25 bp, Homo sapien
gggaagactcaagagcaggtgttat

SEQ ID NO: 4249391 - DNA, 25 bp, Homo sapien
aagactcaagagcaggtgttatctc

SEQ ID NO: 4249392 - DNA, 25 bp, Homo sapien
cttctgaggctacaagttcatcact

SEQ ID NO: 4249393 - DNA, 25 bp, Homo sapien
cctactggccatcaggtcaggtcct

SEQ ID NO: 4249394 - DNA, 25 bp, Homo sapien
gttcatcacttagggtctgggtggc

SEQ ID NO: 4249395 - DNA, 25 bp, Homo sapien
tgcccttggagaaacttagaatcac

SEQ ID NO: 4249396 - DNA, 25 bp, Homo sapien
tcttctggttaaatgagaggtgtca

SEQ ID NO: 4249397 - DNA, 25 bp, Homo sapien
tagggactgggtgacgaagttcagc

SEQ ID NO: 4249398 - DNA, 25 bp, Homo sapien
cacgtcttctggttaaatgagaggt

SEQ ID NO: 4249399 - DNA, 25 bp, Homo sapien
ctccacgtcttctggttaaatgaga

SEQ ID NO: 4249400 - DNA, 25 bp, Homo sapien
tgttgaaaaggggactctagcttct

SEQ ID NO: 4249401 - DNA, 25 bp, Homo sapien
tctgggaatgtcctggccatgtgac

SEQ ID NO: 4249402 - DNA, 25 bp, Homo sapien
tctgccagtaaaggggagtcacatc

SEQ ID NO: 4249403 - DNA, 25 bp, Homo sapien
caattccaaaagctaccttggtctg

SEQ ID NO: 4249404 - DNA, 25 bp, Homo sapien
gctttctagagctcgcctgtggcag

SEQ ID NO: 4249405 - DNA, 25 bp, Homo sapien
cgtgggcgggaaaccacataggcat

SEQ ID NO: 4249406 - DNA, 25 bp, Homo sapien
catctgacagatttgcccctgtgga

SEQ ID NO: 4249407 - DNA, 25 bp, Homo sapien
taggcatcaccatggcatctgacag

SEQ ID NO: 4249408 - DNA, 25 bp, Homo sapien
aggagagccttctggtaggaaagcc

SEQ ID NO: 4249409 - DNA, 25 bp, Homo sapien
tctggtaggaaagccgatgcaggaa

SEQ ID NO: 4249410 - DNA, 25 bp, Homo sapien
tgggctgcctggacgaagctagatt

SEQ ID NO: 4249411 - DNA, 25 bp, Homo sapien
ctgcctggacgaagctagattccca

SEQ ID NO: 4249412 - DNA, 25 bp, Homo sapien
atgagctgcaccttcaggtgcttac

SEQ ID NO: 4249413 - DNA, 25 bp, Homo sapien
gatgagctgcaccttcaggtgctta

SEQ ID NO: 4249414 - DNA, 25 bp, Homo sapien
cagatgagctgcaccttcaggtgct

SEQ ID NO: 4249415 - DNA, 25 bp, Homo sapien
tcagatgagctgcaccttcaggtgc

SEQ ID NO: 4249416 - DNA, 25 bp, Homo sapien
aggacatcaagaggagtcccatggc

SEQ ID NO: 4249417 - DNA, 25 bp, Homo sapien
caagaggagtcccatggcagtctga

SEQ ID NO: 4249418 - DNA, 25 bp, Homo sapien
gctcctcaggctggcaggacatcaa

SEQ ID NO: 4249419 - DNA, 25 bp, Homo sapien
catcaagaggagtcccatggcagtc

SEQ ID NO: 4249420 - DNA, 25 bp, Homo sapien
ctcattggatgggtaaacaggatgt

SEQ ID NO: 4249421 - DNA, 25 bp, Homo sapien
gatggtcaggcattgttggtttggg

SEQ ID NO: 4249422 - DNA, 25 bp, Homo sapien
tgggtaaacaggatgttatgtggct

SEQ ID NO: 4249423 - DNA, 25 bp, Homo sapien
aacaggatgttatgtggctttcccc

SEQ ID NO: 4249424 - DNA, 25 bp, Homo sapien
cctttgtttctatccactgtgctgg

SEQ ID NO: 4249425 - DNA, 25 bp, Homo sapien
ggtcccattggatccaacatcattt

SEQ ID NO: 4249426 - DNA, 25 bp, Homo sapien
cagggcaggattcagtacagggcct

SEQ ID NO: 4249427 - DNA, 25 bp, Homo sapien
gcaaggtcctagctaattaggaggc

SEQ ID NO: 4249428 - DNA, 25 bp, Homo sapien
agcttgctcatccagtgccatattc

SEQ ID NO: 4249429 - DNA, 25 bp, Homo sapien
tgctttcctggaccccggtactgtg

SEQ ID NO: 4249430 - DNA, 25 bp, Homo sapien
ggtactgtgaaccaagccagcttgc

SEQ ID NO: 4249431 - DNA, 25 bp, Homo sapien
caaagccatgagtgtccaggaggtt

SEQ ID NO: 4249432 - DNA, 25 bp, Homo sapien
agggcccgttcaggtatcttccaag

SEQ ID NO: 4249433 - DNA, 25 bp, Homo sapien
cattgtggaattgcaggcggcagca

SEQ ID NO: 4249434 - DNA, 25 bp, Homo sapien
gatgcctctagcgtccttcactgtg

SEQ ID NO: 4249435 - DNA, 25 bp, Homo sapien
tgtgcagggtcagactcgagttcca

SEQ ID NO: 4249436 - DNA, 25 bp, Homo sapien
catgggaccatcagtctggcaagag

SEQ ID NO: 4249437 - DNA, 25 bp, Homo sapien
gcatgctgcctggagtccctagagg

SEQ ID NO: 4249438 - DNA, 25 bp, Homo sapien
tccataagaaagagtccacgtgagc

SEQ ID NO: 4249439 - DNA, 25 bp, Homo sapien
tccacgtgagcaaggcatggacatg

SEQ ID NO: 4249440 - DNA, 25 bp, Homo sapien
tgttggccagaattgctgcaggggc

SEQ ID NO: 4249441 - DNA, 25 bp, Homo sapien
ccctgttccaaagcagcattgtgtg

SEQ ID NO: 4249442 - DNA, 25 bp, Homo sapien
gcagcattgtgtggcagccaggtcc

SEQ ID NO: 4249443 - DNA, 25 bp, Homo sapien
ggggatctgggcgtgttggccagaa

SEQ ID NO: 4249444 - DNA, 25 bp, Homo sapien
tgattcaacccccaagttgacggcc

SEQ ID NO: 4249445 - DNA, 25 bp, Homo sapien
caagttgttgattcaacccccaagt

SEQ ID NO: 4249446 - DNA, 25 bp, Homo sapien
gattcaacccccaagttgacggcca

SEQ ID NO: 4249447 - DNA, 25 bp, Homo sapien
cttgcaagttgttgattcaaccccc

SEQ ID NO: 4249448 - DNA, 25 bp, Homo sapien
tcctcaaggagacattctacatctt

SEQ ID NO: 4249449 - DNA, 25 bp, Homo sapien
gtcctcaaggagacattctacatct

SEQ ID NO: 4249450 - DNA, 25 bp, Homo sapien
cctcaaggagacattctacatcttt

SEQ ID NO: 4249451 - DNA, 25 bp, Homo sapien
ggtcctcaaggagacattctacatc

SEQ ID NO: 4249452 - DNA, 25 bp, Homo sapien
catgggcgcttctgtacctggtggt

SEQ ID NO: 4249453 - DNA, 25 bp, Homo sapien
tgtaggtgcatcctcacacccatgg

SEQ ID NO: 4249454 - DNA, 25 bp, Homo sapien
acaagtgtccccacacaaccatgga

SEQ ID NO: 4249455 - DNA, 25 bp, Homo sapien
ggtgccaccctggatctctgtaggt

SEQ ID NO: 4249456 - DNA, 25 bp, Homo sapien
gggtctgtgagcctactgtgcacca

SEQ ID NO: 4249457 - DNA, 25 bp, Homo sapien
tctcggagcctacaaaaccaggaag

SEQ ID NO: 4249458 - DNA, 25 bp, Homo sapien
ggcttgccctgctgagatctctcaa

SEQ ID NO: 4249459 - DNA, 25 bp, Homo sapien
gcttccaatacctggacattctcgg

SEQ ID NO: 4249460 - DNA, 25 bp, Homo sapien
tcgcgtgggttgtttacagataaaa

SEQ ID NO: 4249461 - DNA, 25 bp, Homo sapien
tagctcctgttgatgacaagcgata

SEQ ID NO: 4249462 - DNA, 25 bp, Homo sapien
aagactaaatgggtaatcgcgtggg

SEQ ID NO: 4249463 - DNA, 25 bp, Homo sapien
gactgaagttggagggaaactgaca

SEQ ID NO: 4249464 - DNA, 25 bp, Homo sapien
caaggtaaagtggcaatgcgtaggc

SEQ ID NO: 4249465 - DNA, 25 bp, Homo sapien
aaggtaaagtggcaatgcgtaggct

SEQ ID NO: 4249466 - DNA, 25 bp, Homo sapien
accaaggtaaagtggcaatgcgtag

SEQ ID NO: 4249467 - DNA, 25 bp, Homo sapien
ccaaggtaaagtggcaatgcgtagg

SEQ ID NO: 4249468 - DNA, 25 bp, Homo sapien
cacagtccacgctctaagtacaggg

SEQ ID NO: 4249469 - DNA, 25 bp, Homo sapien
gttcacagtccacgctctaagtaca

SEQ ID NO: 4249470 - DNA, 25 bp, Homo sapien
gggttcacagtccacgctctaagta

SEQ ID NO: 4249471 - DNA, 25 bp, Homo sapien
gtccacgctctaagtacagggaaac

SEQ ID NO: 4249472 - DNA, 25 bp, Homo sapien
tattctggctacacaaggtctctgg

SEQ ID NO: 4249473 - DNA, 25 bp, Homo sapien
tgaggacgtggtattctggctacac

SEQ ID NO: 4249474 - DNA, 25 bp, Homo sapien
aaggtctctggctgcacgaggccac

SEQ ID NO: 4249475 - DNA, 25 bp, Homo sapien
actcagaggtgaggacgtggtattc

SEQ ID NO: 4249476 - DNA, 25 bp, Homo sapien
cttgggaccctatgctgtcatgggc

SEQ ID NO: 4249477 - DNA, 25 bp, Homo sapien
ggagccagggggaggagtcttgcag

SEQ ID NO: 4249478 - DNA, 25 bp, Homo sapien
tgggaccctatgctgtcatgggctt

SEQ ID NO: 4249479 - DNA, 25 bp, Homo sapien
accctatgctgtcatgggcttcggg

SEQ ID NO: 4249480 - DNA, 25 bp, Homo sapien
tgtgaggccaggatgtgaatgtctc

SEQ ID NO: 4249481 - DNA, 25 bp, Homo sapien
cagagatgggtacactgagtcccag

SEQ ID NO: 4249482 - DNA, 25 bp, Homo sapien
aagactgagacagggtaaagggctc

SEQ ID NO: 4249483 - DNA, 25 bp, Homo sapien
tgggaaactctcatctagtccaacc

SEQ ID NO: 4249484 - DNA, 25 bp, Homo sapien
tccagtcggtgaaccgcaagggaag

SEQ ID NO: 4249485 - DNA, 25 bp, Homo sapien
ttccagtcggtgaaccgcaagggaa

SEQ ID NO: 4249486 - DNA, 25 bp, Homo sapien
gggttgccatccactgatgcaataa

SEQ ID NO: 4249487 - DNA, 25 bp, Homo sapien
ttgccatccactgatgcaataacag

SEQ ID NO: 4249488 - DNA, 25 bp, Homo sapien
cagggttgccatccactgatgcaat

SEQ ID NO: 4249489 - DNA, 25 bp, Homo sapien
catccactgatgcaataacagcaga

SEQ ID NO: 4249490 - DNA, 25 bp, Homo sapien
ccaaagccttatagctagaaatata

SEQ ID NO: 4249491 - DNA, 25 bp, Homo sapien
tttacccaaagccttatagctagaa

SEQ ID NO: 4249492 - DNA, 25 bp, Homo sapien
cccaaagccttatagctagaaatat

SEQ ID NO: 4249493 - DNA, 25 bp, Homo sapien
tacccaaagccttatagctagaaat

SEQ ID NO: 4249494 - DNA, 25 bp, Homo sapien
acttccgagctcttgtgtcaccagg

SEQ ID NO: 4249495 - DNA, 25 bp, Homo sapien
tggatctgaggacccactgaatgtg

SEQ ID NO: 4249496 - DNA, 25 bp, Homo sapien
gggctgaaaaatcacgctgtggatc

SEQ ID NO: 4249497 - DNA, 25 bp, Homo sapien
cactgaatgtgggacttccgagctc

SEQ ID NO: 4249498 - DNA, 25 bp, Homo sapien
ctccgagagcgagatgctgccgccg

SEQ ID NO: 4249499 - DNA, 25 bp, Homo sapien
gccggctccgagagcgagatgctgc

SEQ ID NO: 4249500 - DNA, 25 bp, Homo sapien
ccggctccgagagcgagatgctgcc

SEQ ID NO: 4249501 - DNA, 25 bp, Homo sapien
ggctccgagagcgagatgctgccgc

SEQ ID NO: 4249502 - DNA, 25 bp, Homo sapien
gtgtctccaggtacctccatcagca

SEQ ID NO: 4249503 - DNA, 25 bp, Homo sapien
gtatccagtcttgccccggggcgtg

SEQ ID NO: 4249504 - DNA, 25 bp, Homo sapien
gcgtgtctccaggtacctccatcag

SEQ ID NO: 4249505 - DNA, 25 bp, Homo sapien
ctgcggggaagggtatccagtcttg

SEQ ID NO: 4249506 - DNA, 25 bp, Homo sapien
tgaccctcaaacaatgctgacaagc

SEQ ID NO: 4249507 - DNA, 25 bp, Homo sapien
agtcagtacccttcatgccttgccc

SEQ ID NO: 4249508 - DNA, 25 bp, Homo sapien
tgtgcaggcacatctcttacttcag

SEQ ID NO: 4249509 - DNA, 25 bp, Homo sapien
gacaagctgatatcagacaccctga

SEQ ID NO: 4249510 - DNA, 25 bp, Homo sapien
taaacatagttctgccactcgctgg

SEQ ID NO: 4249511 - DNA, 25 bp, Homo sapien
caaaggtaacgctttctgggacaga

SEQ ID NO: 4249512 - DNA, 25 bp, Homo sapien
cacatttgtggcagcagcgttcatc

SEQ ID NO: 4249513 - DNA, 25 bp, Homo sapien
aaaagacagccatcggtgcctggaa

SEQ ID NO: 4249514 - DNA, 25 bp, Homo sapien
ctcatatcctcggatgacatcaggg

SEQ ID NO: 4249515 - DNA, 25 bp, Homo sapien
gggatggccagatttagcgatgcct

SEQ ID NO: 4249516 - DNA, 25 bp, Homo sapien
aggggactcactccctgaccaaagc

SEQ ID NO: 4249517 - DNA, 25 bp, Homo sapien
atttagcgatgcctcatatcctcgg

SEQ ID NO: 4249518 - DNA, 25 bp, Homo sapien
catgggacaaagatgatcatgatca

SEQ ID NO: 4249519 - DNA, 25 bp, Homo sapien
gatgtccagtccctctagaagcagc

SEQ ID NO: 4249520 - DNA, 25 bp, Homo sapien
gcagttctagaacttgcaagcatgg

SEQ ID NO: 4249521 - DNA, 25 bp, Homo sapien
ctttgtagcagttctagaacttgca

SEQ ID NO: 4249522 - DNA, 25 bp, Homo sapien
cccttcccggagagtgctgtcaggc

SEQ ID NO: 4249523 - DNA, 25 bp, Homo sapien
ggccctgcattccagtcccgacggg

SEQ ID NO: 4249524 - DNA, 25 bp, Homo sapien
cattccagtcccgacgggccacttc

SEQ ID NO: 4249525 - DNA, 25 bp, Homo sapien
tcccggagagtgctgtcaggctcag

SEQ ID NO: 4249526 - DNA, 25 bp, Homo sapien
aagccctctattctgtttggctcag

SEQ ID NO: 4249527 - DNA, 25 bp, Homo sapien
tgtttggctcagatggccccacgct

SEQ ID NO: 4249528 - DNA, 25 bp, Homo sapien
cagagccgtcccgaggcagcctctg

SEQ ID NO: 4249529 - DNA, 25 bp, Homo sapien
gagctcaactcacatccggggctgt

SEQ ID NO: 4249530 - DNA, 25 bp, Homo sapien
ccaggaatgttagctgaggttgcag

SEQ ID NO: 4249531 - DNA, 25 bp, Homo sapien
tgaaacccttttcaacgcctctggc

SEQ ID NO: 4249532 - DNA, 25 bp, Homo sapien
ggaattgtgcagatcacatgctgag

SEQ ID NO: 4249533 - DNA, 25 bp, Homo sapien
catgtgcatggatcttaggaaagga

SEQ ID NO: 4249534 - DNA, 25 bp, Homo sapien
ctgaatacccagactcaggcaggaa

SEQ ID NO: 4249535 - DNA, 25 bp, Homo sapien
tttggcgatatctccaatttgagac

SEQ ID NO: 4249536 - DNA, 25 bp, Homo sapien
tcacagctgaatacccagactcagg

SEQ ID NO: 4249537 - DNA, 25 bp, Homo sapien
tgacttggatttggcgatatctcca

SEQ ID NO: 4249538 - DNA, 25 bp, Homo sapien
agctcctaaatctgggtatgtaaag

SEQ ID NO: 4249539 - DNA, 25 bp, Homo sapien
gtagctcctaaatctgggtatgtaa

SEQ ID NO: 4249540 - DNA, 25 bp, Homo sapien
tagctcctaaatctgggtatgtaaa

SEQ ID NO: 4249541 - DNA, 25 bp, Homo sapien
ggtagctcctaaatctgggtatgta

SEQ ID NO: 4249542 - DNA, 25 bp, Homo sapien
tgggcattactgtcatcaaggagcc

SEQ ID NO: 4249543 - DNA, 25 bp, Homo sapien
cttgggcattactgtcatcaaggag

SEQ ID NO: 4249544 - DNA, 25 bp, Homo sapien
ttgggcattactgtcatcaaggagc

SEQ ID NO: 4249545 - DNA, 25 bp, Homo sapien
tcatttctgtgatggcttggttaac

SEQ ID NO: 4249546 - DNA, 25 bp, Homo sapien
gatggcttggttaacttctacctct

SEQ ID NO: 4249547 - DNA, 25 bp, Homo sapien
tctgtgatggcttggttaacttcta

SEQ ID NO: 4249548 - DNA, 25 bp, Homo sapien
ggttaacttctacctctgccgccat

SEQ ID NO: 4249549 - DNA, 25 bp, Homo sapien
actccactctgtgcaccatactgag

SEQ ID NO: 4249550 - DNA, 25 bp, Homo sapien
tgtgcaccatactgaggaggcctgc

SEQ ID NO: 4249551 - DNA, 25 bp, Homo sapien
accatactgaggaggcctgcaagcg

SEQ ID NO: 4249552 - DNA, 25 bp, Homo sapien
tggggatgtggctccgacattccat

SEQ ID NO: 4249553 - DNA, 25 bp, Homo sapien
ttccaacttcgctagctgctccatt

SEQ ID NO: 4249554 - DNA, 25 bp, Homo sapien
ctccctcagttccaacttcgctagc

SEQ ID NO: 4249555 - DNA, 25 bp, Homo sapien
agttccaacttcgctagctgctcca

SEQ ID NO: 4249556 - DNA, 25 bp, Homo sapien
ctcagttccaacttcgctagctgct

SEQ ID NO: 4249557 - DNA, 25 bp, Homo sapien
gaatctctcaggcaggtcactttgg

SEQ ID NO: 4249558 - DNA, 25 bp, Homo sapien
tccttgctcagatgagcgtgctgga

SEQ ID NO: 4249559 - DNA, 25 bp, Homo sapien
gaaaacacgggctcataatagctcc

SEQ ID NO: 4249560 - DNA, 25 bp, Homo sapien
cactttggccgcgactgagggtgtc

SEQ ID NO: 4249561 - DNA, 25 bp, Homo sapien
gggactgacgatcccagtacaggtt

SEQ ID NO: 4249562 - DNA, 25 bp, Homo sapien
gacgatcccagtacaggttctcacc

SEQ ID NO: 4249563 - DNA, 25 bp, Homo sapien
caacaaggggactgacgatcccagt

SEQ ID NO: 4249564 - DNA, 25 bp, Homo sapien
gactgacgatcccagtacaggttct

SEQ ID NO: 4249565 - DNA, 25 bp, Homo sapien
tctggacatatataaaggttttgcc

SEQ ID NO: 4249566 - DNA, 25 bp, Homo sapien
caggactcctacactaagttcaaac

SEQ ID NO: 4249567 - DNA, 25 bp, Homo sapien
taagactcagatccaatcacatcct

SEQ ID NO: 4249568 - DNA, 25 bp, Homo sapien
tgacctagttacaaccctcaattgg

SEQ ID NO: 4249569 - DNA, 25 bp, Homo sapien
taggtggggtagaggacctgaggtc

SEQ ID NO: 4249570 - DNA, 25 bp, Homo sapien
ggtggggtagaggacctgaggtcca

SEQ ID NO: 4249571 - DNA, 25 bp, Homo sapien
tccctgagccacatgaaggagcaga

SEQ ID NO: 4249572 - DNA, 25 bp, Homo sapien
ctgagccacatgaaggagcagaggc

SEQ ID NO: 4249573 - DNA, 25 bp, Homo sapien
agaggcgccgctcggaccccgacgt

SEQ ID NO: 4249574 - DNA, 25 bp, Homo sapien
ctcggaccccgacgtgcgcccaggc

SEQ ID NO: 4249575 - DNA, 25 bp, Homo sapien
aaacccagttagagccacttcatcc

SEQ ID NO: 4249576 - DNA, 25 bp, Homo sapien
cagccccaatgccaaacccagttag

SEQ ID NO: 4249577 - DNA, 25 bp, Homo sapien
ccaaacccagttagagccacttcat

SEQ ID NO: 4249578 - DNA, 25 bp, Homo sapien
acagccccaatgccaaacccagtta

SEQ ID NO: 4249579 - DNA, 25 bp, Homo sapien
cagctgcctggtgtctgcaagttct

SEQ ID NO: 4249580 - DNA, 25 bp, Homo sapien
tgcctggtgtctgcaagttctgtgt

SEQ ID NO: 4249581 - DNA, 25 bp, Homo sapien
gctgcctggtgtctgcaagttctgt

SEQ ID NO: 4249582 - DNA, 25 bp, Homo sapien
ctgtcagctgcctggtgtctgcaag

SEQ ID NO: 4249583 - DNA, 25 bp, Homo sapien
ggctgtgtagtttgataaggagatt

SEQ ID NO: 4249584 - DNA, 25 bp, Homo sapien
ggacattcaaggtcaaagatgccct

SEQ ID NO: 4249585 - DNA, 25 bp, Homo sapien
catcgacagcaggttgctttcatgg

SEQ ID NO: 4249586 - DNA, 25 bp, Homo sapien
gatgccctgaaacatcgacagcagg

SEQ ID NO: 4249587 - DNA, 25 bp, Homo sapien
tagccccttgagaaggagcccagat

SEQ ID NO: 4249588 - DNA, 25 bp, Homo sapien
gtagccccttgagaaggagcccaga

SEQ ID NO: 4249589 - DNA, 25 bp, Homo sapien
ggtagccccttgagaaggagcccag

SEQ ID NO: 4249590 - DNA, 25 bp, Homo sapien
agccccttgagaaggagcccagatg

SEQ ID NO: 4249591 - DNA, 25 bp, Homo sapien
gagattaacatctccttggttatgc

SEQ ID NO: 4249592 - DNA, 25 bp, Homo sapien
tctccttggttatgcgcagagtttg

SEQ ID NO: 4249593 - DNA, 25 bp, Homo sapien
ttaacatctccttggttatgcgcag

SEQ ID NO: 4249594 - DNA, 25 bp, Homo sapien
aacatctccttggttatgcgcagag

SEQ ID NO: 4249595 - DNA, 25 bp, Homo sapien
tatcatgagttctaggagcttccct

SEQ ID NO: 4249596 - DNA, 25 bp, Homo sapien
ctgcctttggactgttgccatgctg

SEQ ID NO: 4249597 - DNA, 25 bp, Homo sapien
ctggagattgtgaaatatcatgagt

SEQ ID NO: 4249598 - DNA, 25 bp, Homo sapien
tgcctttggactgttgccatgctgg

SEQ ID NO: 4249599 - DNA, 25 bp, Homo sapien
cgatgcggatcagattgaaaattgc

SEQ ID NO: 4249600 - DNA, 25 bp, Homo sapien
tccccggaggtgcacagtcgatgcg

SEQ ID NO: 4249601 - DNA, 25 bp, Homo sapien
gctccccggaggtgcacagtcgatg

SEQ ID NO: 4249602 - DNA, 25 bp, Homo sapien
cagctgtcccgagagctcagtggca

SEQ ID NO: 4249603 - DNA, 25 bp, Homo sapien
ctgtaggctttgtccagcgcaaccg

SEQ ID NO: 4249604 - DNA, 25 bp, Homo sapien
ctttgtccagcgcaaccgtagaagc

SEQ ID NO: 4249605 - DNA, 25 bp, Homo sapien
ttgtccagcgcaaccgtagaagcca

SEQ ID NO: 4249606 - DNA, 25 bp, Homo sapien
taggctttgtccagcgcaaccgtag

SEQ ID NO: 4249607 - DNA, 25 bp, Homo sapien
ttggagccagaactcagaggctctc

SEQ ID NO: 4249608 - DNA, 25 bp, Homo sapien
ggagccagaactcagaggctctcat

SEQ ID NO: 4249609 - DNA, 25 bp, Homo sapien
tttggagccagaactcagaggctct

SEQ ID NO: 4249610 - DNA, 25 bp, Homo sapien
tggagccagaactcagaggctctca

SEQ ID NO: 4249611 - DNA, 25 bp, Homo sapien
gaacagcaggccttgtccttgtgga

SEQ ID NO: 4249612 - DNA, 25 bp, Homo sapien
catacttgtacaccccaaatggagg

SEQ ID NO: 4249613 - DNA, 25 bp, Homo sapien
aacagcaggccttgtccttgtggag

SEQ ID NO: 4249614 - DNA, 25 bp, Homo sapien
ctggggacgggccatacttgtacac

SEQ ID NO: 4249615 - DNA, 25 bp, Homo sapien
ttagtccggtgtccaagacccttca

SEQ ID NO: 4249616 - DNA, 25 bp, Homo sapien
tctgatgtagagcttccaaactgta

SEQ ID NO: 4249617 - DNA, 25 bp, Homo sapien
ttggtcatagagcatccactgagga

SEQ ID NO: 4249618 - DNA, 25 bp, Homo sapien
gagcgagtcatcttctggtttacga

SEQ ID NO: 4249619 - DNA, 25 bp, Homo sapien
tgtcctccaacatgatccaagagag

SEQ ID NO: 4249620 - DNA, 25 bp, Homo sapien
cacctgaaggaatgtggagccgcat

SEQ ID NO: 4249621 - DNA, 25 bp, Homo sapien
gacagccaagttaccctgccgtgaa

SEQ ID NO: 4249622 - DNA, 25 bp, Homo sapien
aactggaagacgctggaagaaggct

SEQ ID NO: 4249623 - DNA, 25 bp, Homo sapien
cccacagctgtcccgagggcagcgg

SEQ ID NO: 4249624 - DNA, 25 bp, Homo sapien
gccccactcctgcatgttcccagca

SEQ ID NO: 4249625 - DNA, 25 bp, Homo sapien
aattatggaatgtcttctccacgct

SEQ ID NO: 4249626 - DNA, 25 bp, Homo sapien
tgataaaattatggaatgtcttctc

SEQ ID NO: 4249627 - DNA, 25 bp, Homo sapien
caaggatacccggtggcttctggca

SEQ ID NO: 4249628 - DNA, 25 bp, Homo sapien
tcttactgccgaaacccttgactgt

SEQ ID NO: 4249629 - DNA, 25 bp, Homo sapien
tgatgcaggaagaccacatgcgctc

SEQ ID NO: 4249630 - DNA, 25 bp, Homo sapien
agcatcccacgatcggccttggtaa

SEQ ID NO: 4249631 - DNA, 25 bp, Homo sapien
gacggatccacagtaatctttcggt

SEQ ID NO: 4249632 - DNA, 25 bp, Homo sapien
tgaaatttctcagcgggagtctcct

SEQ ID NO: 4249633 - DNA, 25 bp, Homo sapien
gaaacttcctataccggagctccag

SEQ ID NO: 4249634 - DNA, 25 bp, Homo sapien
gaaatcaaggtgaaggatctgtccg

SEQ ID NO: 4249635 - DNA, 25 bp, Homo sapien
ggcggcacttcaagcaaagacagtt

SEQ ID NO: 4249636 - DNA, 25 bp, Homo sapien
tgtacacatatgaacgcacaacatg

SEQ ID NO: 4249637 - DNA, 25 bp, Homo sapien
gatgggttcccacgtagcaaatcgt

SEQ ID NO: 4249638 - DNA, 25 bp, Homo sapien
tagctccgcgtgtctcatttgccag

SEQ ID NO: 4249639 - DNA, 25 bp, Homo sapien
aggccgtgtgaccaccaaggcccag

SEQ ID NO: 4249640 - DNA, 25 bp, Homo sapien
gggctccactccaaggccgtgtgac

SEQ ID NO: 4249641 - DNA, 25 bp, Homo sapien
ttgttcttgtcgctcagccttccgc

SEQ ID NO: 4249642 - DNA, 25 bp, Homo sapien
ttcttgtcgctcagccttccgcagg

SEQ ID NO: 4249643 - DNA, 25 bp, Homo sapien
ctgtttctgagataggagcccaggg

SEQ ID NO: 4249644 - DNA, 25 bp, Homo sapien
cctctgtttctgagataggagccca

SEQ ID NO: 4249645 - DNA, 25 bp, Homo sapien
tgtttctgagataggagcccaggga

SEQ ID NO: 4249646 - DNA, 25 bp, Homo sapien
tctgtttctgagataggagcccagg

SEQ ID NO: 4249647 - DNA, 25 bp, Homo sapien
ctatgcagacagacaaggccagatg

SEQ ID NO: 4249648 - DNA, 25 bp, Homo sapien
acagacaaggccagatgccagagac

SEQ ID NO: 4249649 - DNA, 25 bp, Homo sapien
gcagacagacaaggccagatgccag

SEQ ID NO: 4249650 - DNA, 25 bp, Homo sapien
gacagacaaggccagatgccagaga

SEQ ID NO: 4249651 - DNA, 25 bp, Homo sapien
tccatctccttcttcacccagccag

SEQ ID NO: 4249652 - DNA, 25 bp, Homo sapien
tctccttcttcacccagccagtcat

SEQ ID NO: 4249653 - DNA, 25 bp, Homo sapien
atctccttcttcacccagccagtca

SEQ ID NO: 4249654 - DNA, 25 bp, Homo sapien
tttgttcagtttccatctccttctt

SEQ ID NO: 4249655 - DNA, 25 bp, Homo sapien
gggcattcagccacgtactggactg

SEQ ID NO: 4249656 - DNA, 25 bp, Homo sapien
gtggttaaaacaacacaggcttgct

SEQ ID NO: 4249657 - DNA, 25 bp, Homo sapien
cacaatgggtcaaatctctctcagg

SEQ ID NO: 4249658 - DNA, 25 bp, Homo sapien
tgggaccagtctttgattccatggc

SEQ ID NO: 4249659 - DNA, 25 bp, Homo sapien
ccaagagagcatgaggcctgaaatc

SEQ ID NO: 4249660 - DNA, 25 bp, Homo sapien
gatggagaactgagcctcgggtcat

SEQ ID NO: 4249661 - DNA, 25 bp, Homo sapien
gagaaaagacagacggtgagaccag

SEQ ID NO: 4249662 - DNA, 25 bp, Homo sapien
caatgagactgggtgaaattaccaa

SEQ ID NO: 4249663 - DNA, 25 bp, Homo sapien
ttcaaaagagcctctccacagagct

SEQ ID NO: 4249664 - DNA, 25 bp, Homo sapien
gaggcattggttctccttcaaaaga

SEQ ID NO: 4249665 - DNA, 25 bp, Homo sapien
ggttcactcacatgtcccaagttga

SEQ ID NO: 4249666 - DNA, 25 bp, Homo sapien
ccccagtaggtgatataagagacca

SEQ ID NO: 4249667 - DNA, 25 bp, Homo sapien
ctcaggggcaacaagaaaaggatct

SEQ ID NO: 4249668 - DNA, 25 bp, Homo sapien
ctagcatctcaggggcaacaagaaa

SEQ ID NO: 4249669 - DNA, 25 bp, Homo sapien
atctcaggggcaacaagaaaaggat

SEQ ID NO: 4249670 - DNA, 25 bp, Homo sapien
caggggcaacaagaaaaggatcttg

SEQ ID NO: 4249671 - DNA, 25 bp, Homo sapien
tgcagactgaaatttgaccacagtc

SEQ ID NO: 4249672 - DNA, 25 bp, Homo sapien
gggataaggtctgattcttcctgga

SEQ ID NO: 4249673 - DNA, 25 bp, Homo sapien
tcttcctggaatcggcaacctcctg

SEQ ID NO: 4249674 - DNA, 25 bp, Homo sapien
ttttcacactgtactatgcttattt

SEQ ID NO: 4249675 - DNA, 25 bp, Homo sapien
tcaatcttctccataaacaattaga

SEQ ID NO: 4249676 - DNA, 25 bp, Homo sapien
aactagcttgtgaagatcaatcttc

SEQ ID NO: 4249677 - DNA, 25 bp, Homo sapien
tgcttttgcctatgaaaaaactagc

SEQ ID NO: 4249678 - DNA, 25 bp, Homo sapien
taataacacaggaagagacttttgc

SEQ ID NO: 4249679 - DNA, 25 bp, Homo sapien
gcggctgcatgagaaagagccattt

SEQ ID NO: 4249680 - DNA, 25 bp, Homo sapien
ttgatcactctaaataacatgctgg

SEQ ID NO: 4249681 - DNA, 25 bp, Homo sapien
ccactttggtcctgaaggatgcact

SEQ ID NO: 4249682 - DNA, 25 bp, Homo sapien
tgggagcccaacgtagtgacactca

SEQ ID NO: 4249683 - DNA, 25 bp, Homo sapien
ttcaagaacactttatagccaaagc

SEQ ID NO: 4249684 - DNA, 25 bp, Homo sapien
cattcaagaacactttatagccaaa

SEQ ID NO: 4249685 - DNA, 25 bp, Homo sapien
cactttatagccaaagccatttata

SEQ ID NO: 4249686 - DNA, 25 bp, Homo sapien
caagaacactttatagccaaagcca

SEQ ID NO: 4249687 - DNA, 25 bp, Homo sapien
ccaggctgagtagggtggatgctca

SEQ ID NO: 4249688 - DNA, 25 bp, Homo sapien
ggatgctcagttctcctacatgtga

SEQ ID NO: 4249689 - DNA, 25 bp, Homo sapien
atgctcagttctcctacatgtgacc

SEQ ID NO: 4249690 - DNA, 25 bp, Homo sapien
ggccaggctgagtagggtggatgct

SEQ ID NO: 4249691 - DNA, 25 bp, Homo sapien
ctgactttgcctttttcgattttgg

SEQ ID NO: 4249692 - DNA, 25 bp, Homo sapien
tctgactttgcctttttcgattttg

SEQ ID NO: 4249693 - DNA, 25 bp, Homo sapien
tgtctgactttgcctttttcgattt

SEQ ID NO: 4249694 - DNA, 25 bp, Homo sapien
tctgtctgactttgcctttttcgat

SEQ ID NO: 4249695 - DNA, 25 bp, Homo sapien
ctggggcgcgagctgggagagggtg

SEQ ID NO: 4249696 - DNA, 25 bp, Homo sapien
ggcgcgagctgggagagggtgtccg

SEQ ID NO: 4249697 - DNA, 25 bp, Homo sapien
gggcgcgagctgggagagggtgtcc

SEQ ID NO: 4249698 - DNA, 25 bp, Homo sapien
ggggcgcgagctgggagagggtgtc

SEQ ID NO: 4249699 - DNA, 25 bp, Homo sapien
tgggggtgtggagcaagaggcggat

SEQ ID NO: 4249700 - DNA, 25 bp, Homo sapien
ctcctcgttgtaccgagagaggagg

SEQ ID NO: 4249701 - DNA, 25 bp, Homo sapien
tgtggagcaagaggcggatcacctc

SEQ ID NO: 4249702 - DNA, 25 bp, Homo sapien
gagcaagaggcggatcacctcctcc

SEQ ID NO: 4249703 - DNA, 25 bp, Homo sapien
gctctcaatttgtgcaacagcttgg

SEQ ID NO: 4249704 - DNA, 25 bp, Homo sapien
tgggccaggatcgaagctgacagct

SEQ ID NO: 4249705 - DNA, 25 bp, Homo sapien
ccattgaaacttgttgttgccagca

SEQ ID NO: 4249706 - DNA, 25 bp, Homo sapien
tcttcgggagcaatgctgctgatgc

SEQ ID NO: 4249707 - DNA, 25 bp, Homo sapien
catggtgatcatgtgcctgctgtac

SEQ ID NO: 4249708 - DNA, 25 bp, Homo sapien
tggaacccattctgtcaaccctgct

SEQ ID NO: 4249709 - DNA, 25 bp, Homo sapien
gcttgccacacccaacagggaagag

SEQ ID NO: 4249710 - DNA, 25 bp, Homo sapien
cagttcactcctcggtcagatgcag

SEQ ID NO: 4249711 - DNA, 25 bp, Homo sapien
ctccccaatacccagagatttaggg

SEQ ID NO: 4249712 - DNA, 25 bp, Homo sapien
gatattaagtgctccccaataccca

SEQ ID NO: 4249713 - DNA, 25 bp, Homo sapien
ttctgatattaagtgctccccaata

SEQ ID NO: 4249714 - DNA, 25 bp, Homo sapien
taagtgctccccaatacccagagat

SEQ ID NO: 4249715 - DNA, 25 bp, Homo sapien
tgcattctccaggcccgtgacatct

SEQ ID NO: 4249716 - DNA, 25 bp, Homo sapien
ggcttctccaggcccgtgacatctg

SEQ ID NO: 4249717 - DNA, 25 bp, Homo sapien
gcattctccaggcccgtgacatctg

SEQ ID NO: 4249718 - DNA, 25 bp, Homo sapien
attctccaggcccgtgacatctgct

SEQ ID NO: 4249719 - DNA, 25 bp, Homo sapien
gatgcctgtaaccacatctagaatc

SEQ ID NO: 4249720 - DNA, 25 bp, Homo sapien
gatacacacatatgtcgaattgaca

SEQ ID NO: 4249721 - DNA, 25 bp, Homo sapien
tgacaattcaaacaccaacaaggga

SEQ ID NO: 4249722 - DNA, 25 bp, Homo sapien
tcaagttacatgatcagagcaatct

SEQ ID NO: 4249723 - DNA, 25 bp, Homo sapien
tgtcaggcctctcgtgtaagagcac

SEQ ID NO: 4249724 - DNA, 25 bp, Homo sapien
caagctcaaggcgacagcagattga

SEQ ID NO: 4249725 - DNA, 25 bp, Homo sapien
aatatcccatatgcaggctgatgcc

SEQ ID NO: 4249726 - DNA, 25 bp, Homo sapien
ccctgagggcaagctaatcatagca

SEQ ID NO: 4249727 - DNA, 25 bp, Homo sapien
tagattccccagagacatcctggaa

SEQ ID NO: 4249728 - DNA, 25 bp, Homo sapien
cagccgaaacctttgagagtgcagt

SEQ ID NO: 4249729 - DNA, 25 bp, Homo sapien
tcttagagacactgaaatgggtttc

SEQ ID NO: 4249730 - DNA, 25 bp, Homo sapien
agtgcagtttggcatccctccagga

SEQ ID NO: 4249731 - DNA, 25 bp, Homo sapien
ctcaccggggcaggcaccaggactg

SEQ ID NO: 4249732 - DNA, 25 bp, Homo sapien
tacggttgagttttgcggtagataa

SEQ ID NO: 4249733 - DNA, 25 bp, Homo sapien
atacatacggttgagttttgcggta

SEQ ID NO: 4249734 - DNA, 25 bp, Homo sapien
tgagttttgcggtagataaaattat

SEQ ID NO: 4249735 - DNA, 25 bp, Homo sapien
tatggctcccacttgacattcgctg

SEQ ID NO: 4249736 - DNA, 25 bp, Homo sapien
gaggctcagtgggatgttcatatcc

SEQ ID NO: 4249737 - DNA, 25 bp, Homo sapien
tactatgtgataagccctgaaccag

SEQ ID NO: 4249738 - DNA, 25 bp, Homo sapien
ttaaacagacatgaatgggacctac

SEQ ID NO: 4249739 - DNA, 25 bp, Homo sapien
gatcagctctgcacaaccttgtagg

SEQ ID NO: 4249740 - DNA, 25 bp, Homo sapien
aagcaatttcgccagtgacacagga

SEQ ID NO: 4249741 - DNA, 25 bp, Homo sapien
taagctgacgctcactgaatcaccg

SEQ ID NO: 4249742 - DNA, 25 bp, Homo sapien
ctcagaagtgtgtatggccagagca

SEQ ID NO: 4249743 - DNA, 25 bp, Homo sapien
cttttgctgctatcagatggctgcc

SEQ ID NO: 4249744 - DNA, 25 bp, Homo sapien
tcttgcatggattgccacctggtgg

SEQ ID NO: 4249745 - DNA, 25 bp, Homo sapien
cccggcagctgggctcttgcatgga

SEQ ID NO: 4249746 - DNA, 25 bp, Homo sapien
cacctggtggttggctgttttcaca

SEQ ID NO: 4249747 - DNA, 25 bp, Homo sapien
tctgcaccctcgaagggcacaagga

SEQ ID NO: 4249748 - DNA, 25 bp, Homo sapien
tttatagatgcagggaccaaggcgc

SEQ ID NO: 4249749 - DNA, 25 bp, Homo sapien
gagtgacttgccagggtcatacagc

SEQ ID NO: 4249750 - DNA, 25 bp, Homo sapien
aaggagatgcagagaccaccgtctg

SEQ ID NO: 4249751 - DNA, 25 bp, Homo sapien
ccttctaccaagataaagccactgt

SEQ ID NO: 4249752 - DNA, 25 bp, Homo sapien
aagccactgtgaacaatccagggaa

SEQ ID NO: 4249753 - DNA, 25 bp, Homo sapien
aatatcacttgaaatccttctacca

SEQ ID NO: 4249754 - DNA, 25 bp, Homo sapien
tactatctgttaaatcaaaagtttg

SEQ ID NO: 4249755 - DNA, 25 bp, Homo sapien
attgaacgtgccagtgtatccagcc

SEQ ID NO: 4249756 - DNA, 25 bp, Homo sapien
ggctgccgtgaactattgaacgtgc

SEQ ID NO: 4249757 - DNA, 25 bp, Homo sapien
tcgaggctgccgtgaactattgaac

SEQ ID NO: 4249758 - DNA, 25 bp, Homo sapien
cgtgaactattgaacgtgccagtgt

SEQ ID NO: 4249759 - DNA, 25 bp, Homo sapien
ttagttgtttatgattctggtattg

SEQ ID NO: 4249760 - DNA, 25 bp, Homo sapien
atccaaaagaaaccagtcggtaatg

SEQ ID NO: 4249761 - DNA, 25 bp, Homo sapien
ctgaatgggatatcacatccaaaag

SEQ ID NO: 4249762 - DNA, 25 bp, Homo sapien
ctgcaaataactctgaatgggatat

SEQ ID NO: 4249763 - DNA, 25 bp, Homo sapien
agaaaccagtcggtaatggtgggat

SEQ ID NO: 4249764 - DNA, 25 bp, Homo sapien
ccctcctttatcgggctgcgctgaa

SEQ ID NO: 4249765 - DNA, 25 bp, Homo sapien
tgccctcctttatcgggctgcgctg

SEQ ID NO: 4249766 - DNA, 25 bp, Homo sapien
ttcttgttgggctgcctcttgtaaa

SEQ ID NO: 4249767 - DNA, 25 bp, Homo sapien
tttgccctcctttatcgggctgcgc

SEQ ID NO: 4249768 - DNA, 25 bp, Homo sapien
caagttcacagcactatgtaaaatg

SEQ ID NO: 4249769 - DNA, 25 bp, Homo sapien
ccagcaagttcacagcactatgtaa

SEQ ID NO: 4249770 - DNA, 25 bp, Homo sapien
tagaaccagtggaggtttttgtgag

SEQ ID NO: 4249771 - DNA, 25 bp, Homo sapien
aatgcttagaaccagtggaggtttt

SEQ ID NO: 4249772 - DNA, 25 bp, Homo sapien
cccagctttataagggttgtaattg

SEQ ID NO: 4249773 - DNA, 25 bp, Homo sapien
ccacaacccagctttataagggttg

SEQ ID NO: 4249774 - DNA, 25 bp, Homo sapien
ccgggttcaggcgactcacatgcct

SEQ ID NO: 4249775 - DNA, 25 bp, Homo sapien
gcacccgaccacaacccagctttat

SEQ ID NO: 4249776 - DNA, 25 bp, Homo sapien
cacccagaaggaggcctgtctgagc

SEQ ID NO: 4249777 - DNA, 25 bp, Homo sapien
cacaggactctggtctgcacctgag

SEQ ID NO: 4249778 - DNA, 25 bp, Homo sapien
tgagctgcacaggactctggtctgc

SEQ ID NO: 4249779 - DNA, 25 bp, Homo sapien
ttcattatgtaaatacacacccaga

SEQ ID NO: 4249780 - DNA, 25 bp, Homo sapien
cccagaagaagaaatgcttagatat

SEQ ID NO: 4249781 - DNA, 25 bp, Homo sapien
tggaaacaatactgtgggaacccag

SEQ ID NO: 4249782 - DNA, 25 bp, Homo sapien
atatagtggtaaatgccttaataga

SEQ ID NO: 4249783 - DNA, 25 bp, Homo sapien
gccttaatagagatatggaaacaat

SEQ ID NO: 4249784 - DNA, 25 bp, Homo sapien
tgggctctgaaataggcccataagg

SEQ ID NO: 4249785 - DNA, 25 bp, Homo sapien
aaataggcccataaggagacaatag

SEQ ID NO: 4249786 - DNA, 25 bp, Homo sapien
cattcttctcacctactttgtttca

SEQ ID NO: 4249787 - DNA, 25 bp, Homo sapien
gcccataaggagacaatagtaaaca

SEQ ID NO: 4249788 - DNA, 25 bp, Homo sapien
atctcctccgtgctatagtggaagc

SEQ ID NO: 4249789 - DNA, 25 bp, Homo sapien
ttgatctcctccgtgctatagtgga

SEQ ID NO: 4249790 - DNA, 25 bp, Homo sapien
gatctcctccgtgctatagtggaag

SEQ ID NO: 4249791 - DNA, 25 bp, Homo sapien
cccttgatctcctccgtgctatagt

SEQ ID NO: 4249792 - DNA, 25 bp, Homo sapien
cttcattggtagtatcaatccatgc

SEQ ID NO: 4249793 - DNA, 25 bp, Homo sapien
ggcatggacggttccagttaatgtc

SEQ ID NO: 4249794 - DNA, 25 bp, Homo sapien
ccataataataagtctgggagaaga

SEQ ID NO: 4249795 - DNA, 25 bp, Homo sapien
tcccgatggtcccaagatgactctc

SEQ ID NO: 4249796 - DNA, 25 bp, Homo sapien
tttcttggccttcccgatggtccca

SEQ ID NO: 4249797 - DNA, 25 bp, Homo sapien
gctcagcagcttagtgacagcaagg

SEQ ID NO: 4249798 - DNA, 25 bp, Homo sapien
tctgcatattcgctcctaagggagg

SEQ ID NO: 4249799 - DNA, 25 bp, Homo sapien
tccactggagaattgaaaaggactc

SEQ ID NO: 4249800 - DNA, 25 bp, Homo sapien
gacaactgaagagacacgtggctag

SEQ ID NO: 4249801 - DNA, 25 bp, Homo sapien
aaaaggactcttgagccctcctgga

SEQ ID NO: 4249802 - DNA, 25 bp, Homo sapien
ggaatggctcatgttgctaaactgc

SEQ ID NO: 4249803 - DNA, 25 bp, Homo sapien
aaaagaaccctgtttcatggcacct

SEQ ID NO: 4249804 - DNA, 25 bp, Homo sapien
tatccccagcatatagagcaatgcc

SEQ ID NO: 4249805 - DNA, 25 bp, Homo sapien
gattctgaaacgtacagggtcatgg

SEQ ID NO: 4249806 - DNA, 25 bp, Homo sapien
taaggagcatcaagtcagaggtgag

SEQ ID NO: 4249807 - DNA, 25 bp, Homo sapien
tgctaaggagcatcaagtcagaggt

SEQ ID NO: 4249808 - DNA, 25 bp, Homo sapien
cctgagagcggctgctaaggagcat

SEQ ID NO: 4249809 - DNA, 25 bp, Homo sapien
gcggctgctaaggagcatcaagtca

SEQ ID NO: 4249810 - DNA, 25 bp, Homo sapien
ccatggtcttgaggaactctgtatt

SEQ ID NO: 4249811 - DNA, 25 bp, Homo sapien
aggagcccatggtcttgaggaactc

SEQ ID NO: 4249812 - DNA, 25 bp, Homo sapien
tcttgaggaactctgtatttatcag

SEQ ID NO: 4249813 - DNA, 25 bp, Homo sapien
gagcccatggtcttgaggaactctg

SEQ ID NO: 4249814 - DNA, 25 bp, Homo sapien
tggctgaagcttggaaacccagtgc

SEQ ID NO: 4249815 - DNA, 25 bp, Homo sapien
taaagtcttagctcaacagtggtac

SEQ ID NO: 4249816 - DNA, 25 bp, Homo sapien
taatccagtctaggctgcgcacagt

SEQ ID NO: 4249817 - DNA, 25 bp, Homo sapien
taccaaagcgagtcacaggaccaag

SEQ ID NO: 4249818 - DNA, 25 bp, Homo sapien
gattagattctgcaagcaggcagca

SEQ ID NO: 4249819 - DNA, 25 bp, Homo sapien
tgaatgatcacaaaacgaacagtct

SEQ ID NO: 4249820 - DNA, 25 bp, Homo sapien
ggtaagcacctcttgattatcagca

SEQ ID NO: 4249821 - DNA, 25 bp, Homo sapien
tctggcccaatgtacgtggattaga

SEQ ID NO: 4249822 - DNA, 25 bp, Homo sapien
tttctggttctttggtaggaggcac

SEQ ID NO: 4249823 - DNA, 25 bp, Homo sapien
ataaaatgtacaggccactcttgat

SEQ ID NO: 4249824 - DNA, 25 bp, Homo sapien
tttccctcccggctggtggctgagc

SEQ ID NO: 4249825 - DNA, 25 bp, Homo sapien
gaggcacagttcaggatttataaaa

SEQ ID NO: 4249826 - DNA, 25 bp, Homo sapien
agttctcagttgtactttgcatttt

SEQ ID NO: 4249827 - DNA, 25 bp, Homo sapien
ttctcagttgtactttgcattttcc

SEQ ID NO: 4249828 - DNA, 25 bp, Homo sapien
gttctcagttgtactttgcattttc

SEQ ID NO: 4249829 - DNA, 25 bp, Homo sapien
cgttgatcttttgtctgaacagaga

SEQ ID NO: 4249830 - DNA, 25 bp, Homo sapien
ggtgtcatgtagttggcactgtcag

SEQ ID NO: 4249831 - DNA, 25 bp, Homo sapien
aacagagatcaggtgccgttcccat

SEQ ID NO: 4249832 - DNA, 25 bp, Homo sapien
taagagctcgtgtgatgggtgtcat

SEQ ID NO: 4249833 - DNA, 25 bp, Homo sapien
gtgtctgtggccaatgttaagccta

SEQ ID NO: 4249834 - DNA, 25 bp, Homo sapien
tgtggccaatgttaagcctacgact

SEQ ID NO: 4249835 - DNA, 25 bp, Homo sapien
tacgactttagatgagctggcataa

SEQ ID NO: 4249836 - DNA, 25 bp, Homo sapien
gttaagcctacgactttagatgagc

SEQ ID NO: 4249837 - DNA, 25 bp, Homo sapien
acattggtactcaaactggaagata

SEQ ID NO: 4249838 - DNA, 25 bp, Homo sapien
gaaaacattggtactcaaactggaa

SEQ ID NO: 4249839 - DNA, 25 bp, Homo sapien
gagaaaacattggtactcaaactgg

SEQ ID NO: 4249840 - DNA, 25 bp, Homo sapien
aaactggaagataatgttattgtta

SEQ ID NO: 4249841 - DNA, 25 bp, Homo sapien
tgtaggttgctgtccagtaggtgcc

SEQ ID NO: 4249842 - DNA, 25 bp, Homo sapien
gaacgaataaccctcagcaagtgct

SEQ ID NO: 4249843 - DNA, 25 bp, Homo sapien
agaaataaattatcggccgggcgag

SEQ ID NO: 4249844 - DNA, 25 bp, Homo sapien
tataggttgtagatttccaggcacc

SEQ ID NO: 4249845 - DNA, 25 bp, Homo sapien
aacaccttagccatgttccacaaaa

SEQ ID NO: 4249846 - DNA, 25 bp, Homo sapien
tgcgtttgttgaagaaatgctcagt

SEQ ID NO: 4249847 - DNA, 25 bp, Homo sapien
acatatgaacaccttagccatgttc

SEQ ID NO: 4249848 - DNA, 25 bp, Homo sapien
aaagctgcgtttgttgaagaaatgc

SEQ ID NO: 4249849 - DNA, 25 bp, Homo sapien
tagaataagtatcagttcacatgta

SEQ ID NO: 4249850 - DNA, 25 bp, Homo sapien
ctatgagtagaataagtatcagttc

SEQ ID NO: 4249851 - DNA, 25 bp, Homo sapien
ccaactgtgggttcaacatcatact

SEQ ID NO: 4249852 - DNA, 25 bp, Homo sapien
actgtgggttcaacatcatactatg

SEQ ID NO: 4249853 - DNA, 25 bp, Homo sapien
ttagtcttgatccatcttgcttctc

SEQ ID NO: 4249854 - DNA, 25 bp, Homo sapien
caggatttatctacatcttgaggtt

SEQ ID NO: 4249855 - DNA, 25 bp, Homo sapien
tcaggatttatctacatcttgaggt

SEQ ID NO: 4249856 - DNA, 25 bp, Homo sapien
gatttatctacatcttgaggtttac

SEQ ID NO: 4249857 - DNA, 25 bp, Homo sapien
ggatttatctacatcttgaggttta

SEQ ID NO: 4249858 - DNA, 25 bp, Homo sapien
cctaccttaatcctctttgaaagag

SEQ ID NO: 4249859 - DNA, 25 bp, Homo sapien
gtcaccgcaaccagcctgcattatg

SEQ ID NO: 4249860 - DNA, 25 bp, Homo sapien
gcaggacaaagttgttgagtttcta

SEQ ID NO: 4249861 - DNA, 25 bp, Homo sapien
aatttgctgctagctttcaagcatc

SEQ ID NO: 4249862 - DNA, 25 bp, Homo sapien
ttcagtgaaaaaccttttgtagcca

SEQ ID NO: 4249863 - DNA, 25 bp, Homo sapien
gtgaaaaaccttttgtagccatcca

SEQ ID NO: 4249864 - DNA, 25 bp, Homo sapien
ttgatcatcatagcagtcattttca

SEQ ID NO: 4249865 - DNA, 25 bp, Homo sapien
atcatagcagtcattttcagtgaaa

SEQ ID NO: 4249866 - DNA, 25 bp, Homo sapien
ctgaaacttgttgataaaaccaaat

SEQ ID NO: 4249867 - DNA, 25 bp, Homo sapien
gccgtgctgaaacttgttgataaaa

SEQ ID NO: 4249868 - DNA, 25 bp, Homo sapien
gctgaaacttgttgataaaaccaaa

SEQ ID NO: 4249869 - DNA, 25 bp, Homo sapien
ttgccgtgctgaaacttgttgataa

SEQ ID NO: 4249870 - DNA, 25 bp, Homo sapien
ttcccaaactcttgcggcgggaaga

SEQ ID NO: 4249871 - DNA, 25 bp, Homo sapien
cttgcggcgggaagatctgtactag

SEQ ID NO: 4249872 - DNA, 25 bp, Homo sapien
atctgtactaggtgggactgccggt

SEQ ID NO: 4249873 - DNA, 25 bp, Homo sapien
actaggtgggactgccggtaaatca

SEQ ID NO: 4249874 - DNA, 25 bp, Homo sapien
actttctgacacaggagcaataatc

SEQ ID NO: 4249875 - DNA, 25 bp, Homo sapien
tcactttctgacacaggagcaataa

SEQ ID NO: 4249876 - DNA, 25 bp, Homo sapien
tcatttcagcttcactttctgacac

SEQ ID NO: 4249877 - DNA, 25 bp, Homo sapien
gcttcactttctgacacaggagcaa

SEQ ID NO: 4249878 - DNA, 25 bp, Homo sapien
gaggcctcccttcaaaatgtatgga

SEQ ID NO: 4249879 - DNA, 25 bp, Homo sapien
gactcaggttgctgaccaaaagcag

SEQ ID NO: 4249880 - DNA, 25 bp, Homo sapien
tcagcctttgtaagcttgagaggac

SEQ ID NO: 4249881 - DNA, 25 bp, Homo sapien
gaatggtctgctaaaccttcagtct

SEQ ID NO: 4249882 - DNA, 25 bp, Homo sapien
ccgaataggttctggagtctgaccc

SEQ ID NO: 4249883 - DNA, 25 bp, Homo sapien
tcattgcgagtagctagaagcagtg

SEQ ID NO: 4249884 - DNA, 25 bp, Homo sapien
caaacctgggaatgccagatggact

SEQ ID NO: 4249885 - DNA, 25 bp, Homo sapien
tgaacattcttagctggcagcctgg

SEQ ID NO: 4249886 - DNA, 25 bp, Homo sapien
taatgtatttgaagcactttgcaca

SEQ ID NO: 4249887 - DNA, 25 bp, Homo sapien
cctccagagagttctagagctgagt

SEQ ID NO: 4249888 - DNA, 25 bp, Homo sapien
agagctgagtgaaaacctggtttat

SEQ ID NO: 4249889 - DNA, 25 bp, Homo sapien
tgtgtgtgtaaggacacctccagag

SEQ ID NO: 4249890 - DNA, 25 bp, Homo sapien
actttcatccctgctcgccctttga

SEQ ID NO: 4249891 - DNA, 25 bp, Homo sapien
tcagctatagaagagcgtgactttc

SEQ ID NO: 4249892 - DNA, 25 bp, Homo sapien
tggtaccaatcacccgaggaatctg

SEQ ID NO: 4249893 - DNA, 25 bp, Homo sapien
caatttgtctaggaaggtatttagc

SEQ ID NO: 4249894 - DNA, 25 bp, Homo sapien
caagctgacaggtcagtgtttgggc

SEQ ID NO: 4249895 - DNA, 25 bp, Homo sapien
tcataagattctgaagttttccaca

SEQ ID NO: 4249896 - DNA, 25 bp, Homo sapien
tgggccactgaggacaagctgacag

SEQ ID NO: 4249897 - DNA, 25 bp, Homo sapien
cttggaagtcataagattctgaagt

SEQ ID NO: 4249898 - DNA, 25 bp, Homo sapien
gacaaaatgttcatctccatactct

SEQ ID NO: 4249899 - DNA, 25 bp, Homo sapien
catctccatactcttaaaggagtga

SEQ ID NO: 4249900 - DNA, 25 bp, Homo sapien
tactcttaaaggagtgatgatacac

SEQ ID NO: 4249901 - DNA, 25 bp, Homo sapien
tctttcctctgtgacaaaatgttca

SEQ ID NO: 4249902 - DNA, 25 bp, Homo sapien
gacttcactaccacctgctaataca

SEQ ID NO: 4249903 - DNA, 25 bp, Homo sapien
ttagacttcactaccacctgctaat

SEQ ID NO: 4249904 - DNA, 25 bp, Homo sapien
tagacttcactaccacctgctaata

SEQ ID NO: 4249905 - DNA, 25 bp, Homo sapien
acttcactaccacctgctaatacat

SEQ ID NO: 4249906 - DNA, 25 bp, Homo sapien
ccaaataggaaatcggaggactcac

SEQ ID NO: 4249907 - DNA, 25 bp, Homo sapien
ccttgtatatagaagtggagcttaa

SEQ ID NO: 4249908 - DNA, 25 bp, Homo sapien
tctacaagacactattattatattg

SEQ ID NO: 4249909 - DNA, 25 bp, Homo sapien
ggagcttaatctgtttatcctagag

SEQ ID NO: 4249910 - DNA, 25 bp, Homo sapien
aaagaacatcttattggcacaatgt

SEQ ID NO: 4249911 - DNA, 25 bp, Homo sapien
tattccttgggcttcgtaggctaca

SEQ ID NO: 4249912 - DNA, 25 bp, Homo sapien
gatgttatctgctttaatgcagtgg

SEQ ID NO: 4249913 - DNA, 25 bp, Homo sapien
tgggttttgtacacaatgaccctgc

SEQ ID NO: 4249914 - DNA, 25 bp, Homo sapien
gcgccaaccaccacccgcggccacc

SEQ ID NO: 4249915 - DNA, 25 bp, Homo sapien
gaattctcttgctgggctaaagaca

SEQ ID NO: 4249916 - DNA, 25 bp, Homo sapien
cattaagcctcatagaactgttctc

SEQ ID NO: 4249917 - DNA, 25 bp, Homo sapien
gacagtctaaaccacaagagaagtt

SEQ ID NO: 4249918 - DNA, 25 bp, Homo sapien
ggctgcacggccacatgtatacatt

SEQ ID NO: 4249919 - DNA, 25 bp, Homo sapien
tattatggctactgatggtggctgc

SEQ ID NO: 4249920 - DNA, 25 bp, Homo sapien
tatggctactgatggtggctgccgt

SEQ ID NO: 4249921 - DNA, 25 bp, Homo sapien
tagctattatggctactgatggtgg

SEQ ID NO: 4249922 - DNA, 25 bp, Homo sapien
cagtagctattatggctactgatgg

SEQ ID NO: 4249923 - DNA, 25 bp, Homo sapien
ggatgaggaagatgccgtgctggcc

SEQ ID NO: 4249924 - DNA, 25 bp, Homo sapien
ctggggacatggggatgaggaagat

SEQ ID NO: 4249925 - DNA, 25 bp, Homo sapien
ggctggggacatggggatgaggaag

SEQ ID NO: 4249926 - DNA, 25 bp, Homo sapien
catggggatgaggaagatgccgtgc

SEQ ID NO: 4249927 - DNA, 25 bp, Homo sapien
gcacagttggttgtgagtcttctcc

SEQ ID NO: 4249928 - DNA, 25 bp, Homo sapien
ggcacagttggttgtgagtcttctc

SEQ ID NO: 4249929 - DNA, 25 bp, Homo sapien
gtgagcatttccttgcacttaaggc

SEQ ID NO: 4249930 - DNA, 25 bp, Homo sapien
ttaaggctgcctattagcatcaggg

SEQ ID NO: 4249931 - DNA, 25 bp, Homo sapien
ggagtagtagttgctccaggcccca

SEQ ID NO: 4249932 - DNA, 25 bp, Homo sapien
ggccaacattctgcaaacaagtgag

SEQ ID NO: 4249933 - DNA, 25 bp, Homo sapien
aataactgcaacacttcatggtccc

SEQ ID NO: 4249934 - DNA, 25 bp, Homo sapien
ttccacttgtctggtaataactgca

SEQ ID NO: 4249935 - DNA, 25 bp, Homo sapien
gaatcttctgtttccacttgtctgg

SEQ ID NO: 4249936 - DNA, 25 bp, Homo sapien
gcgcccaccccttgtctagagccat

SEQ ID NO: 4249937 - DNA, 25 bp, Homo sapien
catgttgttcacaacatgaactttg

SEQ ID NO: 4249938 - DNA, 25 bp, Homo sapien
ttcacaacatgaactttgatttgtc

SEQ ID NO: 4249939 - DNA, 25 bp, Homo sapien
ttctgttcatgttgttcacaacatg

SEQ ID NO: 4249940 - DNA, 25 bp, Homo sapien
gttagcttgcttgctgttattcttc

SEQ ID NO: 4249941 - DNA, 25 bp, Homo sapien
gcataggtcccagtgtgggattcca

SEQ ID NO: 4249942 - DNA, 25 bp, Homo sapien
tgggattccagatgacccctgttgt

SEQ ID NO: 4249943 - DNA, 25 bp, Homo sapien
ctgttgtccagctggctaggagata

SEQ ID NO: 4249944 - DNA, 25 bp, Homo sapien
tggctaggagatatgtggaccccag

SEQ ID NO: 4249945 - DNA, 25 bp, Homo sapien
ggagacaccagtatccccactgcta

SEQ ID NO: 4249946 - DNA, 25 bp, Homo sapien
ggtccctggagacaccagtatcccc

SEQ ID NO: 4249947 - DNA, 25 bp, Homo sapien
ctgtggcccgtgtacctctcacctg

SEQ ID NO: 4249948 - DNA, 25 bp, Homo sapien
ttcctgtggcccgtgtacctctcac

SEQ ID NO: 4249949 - DNA, 25 bp, Homo sapien
tggagagagttaaacctcaaggccc

SEQ ID NO: 4249950 - DNA, 25 bp, Homo sapien
ttgtgatgggcccaattgaaaggtc

SEQ ID NO: 4249951 - DNA, 25 bp, Homo sapien
tgagggctcctttcaaactcgtctg

SEQ ID NO: 4249952 - DNA, 25 bp, Homo sapien
tgccattcccaaggtaattacagtg

SEQ ID NO: 4249953 - DNA, 25 bp, Homo sapien
gtgtaagtggcatggtcatggctca

SEQ ID NO: 4249954 - DNA, 25 bp, Homo sapien
gacaggatttccctgtgttttccag

SEQ ID NO: 4249955 - DNA, 25 bp, Homo sapien
agagacaggatttccctgtgttttc

SEQ ID NO: 4249956 - DNA, 25 bp, Homo sapien
caggatttccctgtgttttccaggc

SEQ ID NO: 4249957 - DNA, 25 bp, Homo sapien
taccatgggtaactcaggcaagagc

SEQ ID NO: 4249958 - DNA, 25 bp, Homo sapien
tgaggcttcgcttctcccaaagtag

SEQ ID NO: 4249959 - DNA, 25 bp, Homo sapien
gaggccatggcctaggtacctgtga

SEQ ID NO: 4249960 - DNA, 25 bp, Homo sapien
tgagtcgagctgacccttacaacag

SEQ ID NO: 4249961 - DNA, 25 bp, Homo sapien
cactttattattgttcttaaggcta

SEQ ID NO: 4249962 - DNA, 25 bp, Homo sapien
ctttattattgttcttaaggctact

SEQ ID NO: 4249963 - DNA, 25 bp, Homo sapien
gaggaatgtatactgccttggcccc

SEQ ID NO: 4249964 - DNA, 25 bp, Homo sapien
tgtgactacaagagccagtcctccg

SEQ ID NO: 4249965 - DNA, 25 bp, Homo sapien
tatcccagataggtcagtgcaccag

SEQ ID NO: 4249966 - DNA, 25 bp, Homo sapien
gaacttcacggagccccttcttaga

SEQ ID NO: 4249967 - DNA, 25 bp, Homo sapien
ttggcaaagtggtcgtccacggagc

SEQ ID NO: 4249968 - DNA, 25 bp, Homo sapien
ggctcgggctccttgtaattcttgc

SEQ ID NO: 4249969 - DNA, 25 bp, Homo sapien
cgctttgatctggagccacgtgtca

SEQ ID NO: 4249970 - DNA, 25 bp, Homo sapien
ccacgtgtcacccagagctttggca

SEQ ID NO: 4249971 - DNA, 25 bp, Homo sapien
gaaggcaggcagtcagacacaggtg

SEQ ID NO: 4249972 - DNA, 25 bp, Homo sapien
aaggcaggcagtcagacacaggtgg

SEQ ID NO: 4249973 - DNA, 25 bp, Homo sapien
aatttaaataacagtagccgctgcc

SEQ ID NO: 4249974 - DNA, 25 bp, Homo sapien
gccagagtccgagttcagaaagaga

SEQ ID NO: 4249975 - DNA, 25 bp, Homo sapien
gatgtaccaactgcactgggccaga

SEQ ID NO: 4249976 - DNA, 25 bp, Homo sapien
caacctcagcaatagatgggctcag

SEQ ID NO: 4249977 - DNA, 25 bp, Homo sapien
gctcggtggcctccggtagctggca

SEQ ID NO: 4249978 - DNA, 25 bp, Homo sapien
cagccgaggcacaggtgatcacgga

SEQ ID NO: 4249979 - DNA, 25 bp, Homo sapien
agaggttgcagttgcgggcgccagc

SEQ ID NO: 4249980 - DNA, 25 bp, Homo sapien
gggcgcggcacagccgctgtgcgcg

SEQ ID NO: 4249981 - DNA, 25 bp, Homo sapien
aaacaccgggcatcctgtggaggac

SEQ ID NO: 4249982 - DNA, 25 bp, Homo sapien
caatacacggcaattaactggaagc

SEQ ID NO: 4249983 - DNA, 25 bp, Homo sapien
gccaatccacagagtgagcgcagct

SEQ ID NO: 4249984 - DNA, 25 bp, Homo sapien
caactgttgagttggtctgtcccca

SEQ ID NO: 4249985 - DNA, 25 bp, Homo sapien
caagaagcgacacatgccagggtag

SEQ ID NO: 4249986 - DNA, 25 bp, Homo sapien
gcaagagagcagaataccgagacct

SEQ ID NO: 4249987 - DNA, 25 bp, Homo sapien
caaggagctggttgaaatcacccca

SEQ ID NO: 4249988 - DNA, 25 bp, Homo sapien
ttagtggcccgacacttagcagcgg

SEQ ID NO: 4249989 - DNA, 25 bp, Homo sapien
ggatgacacccaacagacttccagg

SEQ ID NO: 4249990 - DNA, 25 bp, Homo sapien
gacctattaggtcgcagtccctgga

SEQ ID NO: 4249991 - DNA, 25 bp, Homo sapien
gaaggagccccacgaatggttacga

SEQ ID NO: 4249992 - DNA, 25 bp, Homo sapien
tgtgaccgaaaaccaactgcaagat

SEQ ID NO: 4249993 - DNA, 25 bp, Homo sapien
tcatccgcgtgaccgtctaaaggag

SEQ ID NO: 4249994 - DNA, 25 bp, Homo sapien
ttgcccaaggccgtgagtgctaaga

SEQ ID NO: 4249995 - DNA, 25 bp, Homo sapien
taggcttctgaccagcatgggctca

SEQ ID NO: 4249996 - DNA, 25 bp, Homo sapien
ttgtcccaagtgcacaacagaggcg

SEQ ID NO: 4249997 - DNA, 25 bp, Homo sapien
gtgggggccacagcgcgctcgatgg

SEQ ID NO: 4249998 - DNA, 25 bp, Homo sapien
ccaggctgttcttggtcagtgcgag

SEQ ID NO: 4249999 - DNA, 25 bp, Homo sapien
gtctctgcggcagtctccattggca

SEQ ID NO: 4250000 - DNA, 25 bp, Homo sapien
agggaggtgtacaggtggctgccgt

SEQ ID NO: 4250001 - DNA, 25 bp, Homo sapien
tatgggtgaccgtgtaagaaaggca

SEQ ID NO: 4250002 - DNA, 25 bp, Homo sapien
agggcgtcgagtccctcctgtctca

SEQ ID NO: 4250003 - DNA, 25 bp, Homo sapien
tgtctcattacgcttgctaccaggg

SEQ ID NO: 4250004 - DNA, 25 bp, Homo sapien
tgaagagaagcagcatatgggtgac

SEQ ID NO: 4250005 - DNA, 25 bp, Homo sapien
acttcatgaagtgcatagacctggg

SEQ ID NO: 4250006 - DNA, 25 bp, Homo sapien
gttaacaacatgagtgaatggcttc

SEQ ID NO: 4250007 - DNA, 25 bp, Homo sapien
taacaacatgagtgaatggcttctc

SEQ ID NO: 4250008 - DNA, 25 bp, Homo sapien
aggtgatgcttccacgggccacttc

SEQ ID NO: 4250009 - DNA, 25 bp, Homo sapien
gatccgggcaaggataaagacaccc

SEQ ID NO: 4250010 - DNA, 25 bp, Homo sapien
gactaaaggtcaggcgtctgcccat

SEQ ID NO: 4250011 - DNA, 25 bp, Homo sapien
aggagcagactaaaggtcaggcgtc

SEQ ID NO: 4250012 - DNA, 25 bp, Homo sapien
cagctctggatccgggcaaggataa

SEQ ID NO: 4250013 - DNA, 25 bp, Homo sapien
tggaaagacagtccgtggaacacag

SEQ ID NO: 4250014 - DNA, 25 bp, Homo sapien
gggcactatgggtcagacaaagaca

SEQ ID NO: 4250015 - DNA, 25 bp, Homo sapien
cagcacagtgggcactatgggtcag

SEQ ID NO: 4250016 - DNA, 25 bp, Homo sapien
gacttccaggcccactaactggaaa

SEQ ID NO: 4250017 - DNA, 25 bp, Homo sapien
gggacggcagaaaaccgcacgcatc

SEQ ID NO: 4250018 - DNA, 25 bp, Homo sapien
acgcatcctgcccgggagatggaag

SEQ ID NO: 4250019 - DNA, 25 bp, Homo sapien
ggttcccggagcttcaagacagaca

SEQ ID NO: 4250020 - DNA, 25 bp, Homo sapien
ttcccaggcgtcatgtgctcccggg

SEQ ID NO: 4250021 - DNA, 25 bp, Homo sapien
aggcctttccgacccaccagcacca

SEQ ID NO: 4250022 - DNA, 25 bp, Homo sapien
gaggcctttccgacccaccagcacc

SEQ ID NO: 4250023 - DNA, 25 bp, Homo sapien
ggcctttccgacccaccagcaccat

SEQ ID NO: 4250024 - DNA, 25 bp, Homo sapien
tgtctctctaactgcgccaagggtt

SEQ ID NO: 4250025 - DNA, 25 bp, Homo sapien
cggaagacacttgggaaacctggcg

SEQ ID NO: 4250026 - DNA, 25 bp, Homo sapien
cctcagatctgtgcaagggacggaa

SEQ ID NO: 4250027 - DNA, 25 bp, Homo sapien
cagctcagctggaatgtgcatcgtg

SEQ ID NO: 4250028 - DNA, 25 bp, Homo sapien
ccccacgttagcaactgttgccagg

SEQ ID NO: 4250029 - DNA, 25 bp, Homo sapien
ttagcaactgttgccagggaagtag

SEQ ID NO: 4250030 - DNA, 25 bp, Homo sapien
agcagtggatgcccacctgcggcca

SEQ ID NO: 4250031 - DNA, 25 bp, Homo sapien
gaagtagttgtgagagcacagccag

SEQ ID NO: 4250032 - DNA, 25 bp, Homo sapien
taacaggagagagatgtggaatccc

SEQ ID NO: 4250033 - DNA, 25 bp, Homo sapien
tgcttaaacactatccagacagctg

SEQ ID NO: 4250034 - DNA, 25 bp, Homo sapien
ggatgctttgtccaactcaggagaa

SEQ ID NO: 4250035 - DNA, 25 bp, Homo sapien
aggagaacacttcacactaaaatgg

SEQ ID NO: 4250036 - DNA, 25 bp, Homo sapien
ctggtatgttgtgccgccaaccgca

SEQ ID NO: 4250037 - DNA, 25 bp, Homo sapien
cttgcagccgctggaactaccattc

SEQ ID NO: 4250038 - DNA, 25 bp, Homo sapien
taccattctaccttctaggactttc

SEQ ID NO: 4250039 - DNA, 25 bp, Homo sapien
cagtgacaataagtacactggtatg

SEQ ID NO: 4250040 - DNA, 25 bp, Homo sapien
ccccgcttaggagaaactgtgcatg

SEQ ID NO: 4250041 - DNA, 25 bp, Homo sapien
tctagaggcggtcacatgacagcca

SEQ ID NO: 4250042 - DNA, 25 bp, Homo sapien
aactatgcaccattgtctagaggcg

SEQ ID NO: 4250043 - DNA, 25 bp, Homo sapien
tgaaggaaacaatcactagtgtgcc

SEQ ID NO: 4250044 - DNA, 25 bp, Homo sapien
actttaatcattgccaaagagcatg

SEQ ID NO: 4250045 - DNA, 25 bp, Homo sapien
tgccaaagagcatgaagacagccca

SEQ ID NO: 4250046 - DNA, 25 bp, Homo sapien
cgtcctcccacaagaaagccttggg

SEQ ID NO: 4250047 - DNA, 25 bp, Homo sapien
ttttccacaagatgaatcccactcc

SEQ ID NO: 4250048 - DNA, 25 bp, Homo sapien
tttccacaagatgaatcccactcca

SEQ ID NO: 4250049 - DNA, 25 bp, Homo sapien
ttcttaagtccttacaataatccta

SEQ ID NO: 4250050 - DNA, 25 bp, Homo sapien
cattcttaagtccttacaataatcc

SEQ ID NO: 4250051 - DNA, 25 bp, Homo sapien
ccaggcaccattcttaagtccttac

SEQ ID NO: 4250052 - DNA, 25 bp, Homo sapien
ggcaccattcttaagtccttacaat

SEQ ID NO: 4250053 - DNA, 25 bp, Homo sapien
cgagcggaatgcgaggacgctggag

SEQ ID NO: 4250054 - DNA, 25 bp, Homo sapien
tatgactgaacacaacagtccaagc

SEQ ID NO: 4250055 - DNA, 25 bp, Homo sapien
aagctgactggaacgagcggaatgc

SEQ ID NO: 4250056 - DNA, 25 bp, Homo sapien
acacaacagtccaagctgactggaa

SEQ ID NO: 4250057 - DNA, 25 bp, Homo sapien
ggttgaagatgcgactcattttgga

SEQ ID NO: 4250058 - DNA, 25 bp, Homo sapien
tggagacgtggtcgttgtcacagtc

SEQ ID NO: 4250059 - DNA, 25 bp, Homo sapien
tgtcacagtctaggtcctcgtcacc

SEQ ID NO: 4250060 - DNA, 25 bp, Homo sapien
tggctccatgctgaacttcctcttg

SEQ ID NO: 4250061 - DNA, 25 bp, Homo sapien
tgggttctcccctgagagcagcttc

SEQ ID NO: 4250062 - DNA, 25 bp, Homo sapien
gggttctcccctgagagcagcttcg

SEQ ID NO: 4250063 - DNA, 25 bp, Homo sapien
tctgggttctcccctgagagcagct

SEQ ID NO: 4250064 - DNA, 25 bp, Homo sapien
ggttctcccctgagagcagcttcgc

SEQ ID NO: 4250065 - DNA, 25 bp, Homo sapien
gatgatgtagtcactaagcaggaga

SEQ ID NO: 4250066 - DNA, 25 bp, Homo sapien
gagatgatgtagtcactaagcagga

SEQ ID NO: 4250067 - DNA, 25 bp, Homo sapien
agatgatgtagtcactaagcaggag

SEQ ID NO: 4250068 - DNA, 25 bp, Homo sapien
ctcgggcttggacccccgaactgtg

SEQ ID NO: 4250069 - DNA, 25 bp, Homo sapien
ccgaactgtggtcatcatttcatca

SEQ ID NO: 4250070 - DNA, 25 bp, Homo sapien
tgggaagccctgatgatacccccag

SEQ ID NO: 4250071 - DNA, 25 bp, Homo sapien
ggaacgcagcaactgcaaatcaaac

SEQ ID NO: 4250072 - DNA, 25 bp, Homo sapien
gcctctgcaatcagacaacgcctca

SEQ ID NO: 4250073 - DNA, 25 bp, Homo sapien
taacaggttagctggaggcaagaac

SEQ ID NO: 4250074 - DNA, 25 bp, Homo sapien
tggaggcaagaacccatggcctctg

SEQ ID NO: 4250075 - DNA, 25 bp, Homo sapien
ccaagatcctccagttaacaggtta

SEQ ID NO: 4250076 - DNA, 25 bp, Homo sapien
acttctttgtctcacggtcgagcag

SEQ ID NO: 4250077 - DNA, 25 bp, Homo sapien
aataatacttctttgtctcacggtc

SEQ ID NO: 4250078 - DNA, 25 bp, Homo sapien
ctttcaaataatacttctttgtctc

SEQ ID NO: 4250079 - DNA, 25 bp, Homo sapien
aatacttctttgtctcacggtcgag

SEQ ID NO: 4250080 - DNA, 25 bp, Homo sapien
gaagacaccgtgaagtcaatctcct

SEQ ID NO: 4250081 - DNA, 25 bp, Homo sapien
ttgttcaacttgtggctagccccat

SEQ ID NO: 4250082 - DNA, 25 bp, Homo sapien
tggggagaagacaccgtgaagtcaa

SEQ ID NO: 4250083 - DNA, 25 bp, Homo sapien
aacttgtggctagccccattctggc

SEQ ID NO: 4250084 - DNA, 25 bp, Homo sapien
ttctattcttggtcctccattccct

SEQ ID NO: 4250085 - DNA, 25 bp, Homo sapien
tccctagactctggctctcaggtag

SEQ ID NO: 4250086 - DNA, 25 bp, Homo sapien
cattccctagactctggctctcagg

SEQ ID NO: 4250087 - DNA, 25 bp, Homo sapien
ctagactctggctctcaggtagcct

SEQ ID NO: 4250088 - DNA, 25 bp, Homo sapien
catgtgacaggttaagcaccgaagg

SEQ ID NO: 4250089 - DNA, 25 bp, Homo sapien
gttccagagggtacgactgccacag

SEQ ID NO: 4250090 - DNA, 25 bp, Homo sapien
cgaaggtcatatgctaccatctgca

SEQ ID NO: 4250091 - DNA, 25 bp, Homo sapien
gccctgagatggttgagtcctggaa

SEQ ID NO: 4250092 - DNA, 25 bp, Homo sapien
cattagggacttgggcacgcacacc

SEQ ID NO: 4250093 - DNA, 25 bp, Homo sapien
ttgggcacgcacaccattcgagagc

SEQ ID NO: 4250094 - DNA, 25 bp, Homo sapien
cagtggaagcagcattagggacttg

SEQ ID NO: 4250095 - DNA, 25 bp, Homo sapien
gcacaccattcgagagcctgacaac

SEQ ID NO: 4250096 - DNA, 25 bp, Homo sapien
cttcctcagcaagtaagtgttcctt

SEQ ID NO: 4250097 - DNA, 25 bp, Homo sapien
ttcaagctcttcctcagcaagtaag

SEQ ID NO: 4250098 - DNA, 25 bp, Homo sapien
agctcttcctcagcaagtaagtgtt

SEQ ID NO: 4250099 - DNA, 25 bp, Homo sapien
tcttcctcagcaagtaagtgttcct

SEQ ID NO: 4250100 - DNA, 25 bp, Homo sapien
gggtgagggcaagggtgaagagcag

SEQ ID NO: 4250101 - DNA, 25 bp, Homo sapien
ggtgagggcaagggtgaagagcagc

SEQ ID NO: 4250102 - DNA, 25 bp, Homo sapien
caacaataaattcacaactcccctt

SEQ ID NO: 4250103 - DNA, 25 bp, Homo sapien
tggacaacaataaattcacaactcc

SEQ ID NO: 4250104 - DNA, 25 bp, Homo sapien
ctgggcccttgctgaccggctccac

SEQ ID NO: 4250105 - DNA, 25 bp, Homo sapien
aatgacaacattcaggctggacaac

SEQ ID NO: 4250106 - DNA, 25 bp, Homo sapien
ccaccttttagttatggattccaat

SEQ ID NO: 4250107 - DNA, 25 bp, Homo sapien
caccttttagttatggattccaatg

SEQ ID NO: 4250108 - DNA, 25 bp, Homo sapien
tccaccttttagttatggattccaa

SEQ ID NO: 4250109 - DNA, 25 bp, Homo sapien
catccaccttttagttatggattcc

SEQ ID NO: 4250110 - DNA, 25 bp, Homo sapien
gtcatccactgggatcacatcaagg

SEQ ID NO: 4250111 - DNA, 25 bp, Homo sapien
tgggatcacatcaaggctctgtcga

SEQ ID NO: 4250112 - DNA, 25 bp, Homo sapien
caggtcatccactgggatcacatca

SEQ ID NO: 4250113 - DNA, 25 bp, Homo sapien
tccactgggatcacatcaaggctct

SEQ ID NO: 4250114 - DNA, 25 bp, Homo sapien
gccgccgcaggtaaacagagggata

SEQ ID NO: 4250115 - DNA, 25 bp, Homo sapien
tcaacttgatccgaaggaacactgc

SEQ ID NO: 4250116 - DNA, 25 bp, Homo sapien
gaaagcaagatttaggccgtcctgg

SEQ ID NO: 4250117 - DNA, 25 bp, Homo sapien
caagtgctacctcatgacagaatgg

SEQ ID NO: 4250118 - DNA, 25 bp, Homo sapien
gatgggcaggaactaagttgttttg

SEQ ID NO: 4250119 - DNA, 25 bp, Homo sapien
tgacacaaaagatctggcagagctg

SEQ ID NO: 4250120 - DNA, 25 bp, Homo sapien
ttcattctcctcttattacttcaaa

SEQ ID NO: 4250121 - DNA, 25 bp, Homo sapien
tcattctcctcttattacttcaaag

SEQ ID NO: 4250122 - DNA, 25 bp, Homo sapien
ccgaggcagttggatcatctaaggt

SEQ ID NO: 4250123 - DNA, 25 bp, Homo sapien
ggccgaggcagttggatcatctaag

SEQ ID NO: 4250124 - DNA, 25 bp, Homo sapien
taaggtcaggagttcgagaccagcc

SEQ ID NO: 4250125 - DNA, 25 bp, Homo sapien
tctaaggtcaggagttcgagaccag

SEQ ID NO: 4250126 - DNA, 25 bp, Homo sapien
gactggctctggagctggcatccac

SEQ ID NO: 4250127 - DNA, 25 bp, Homo sapien
ggagctggcatccacgcaggcctcc

SEQ ID NO: 4250128 - DNA, 25 bp, Homo sapien
tctggagctggcatccacgcaggcc

SEQ ID NO: 4250129 - DNA, 25 bp, Homo sapien
ggctctggagctggcatccacgcag

SEQ ID NO: 4250130 - DNA, 25 bp, Homo sapien
tcaaatcgcacgtagaggatgtccg

SEQ ID NO: 4250131 - DNA, 25 bp, Homo sapien
taataaataacagttcggcgcggct

SEQ ID NO: 4250132 - DNA, 25 bp, Homo sapien
ttaaaaatgtgaggcgcgagtacgt

SEQ ID NO: 4250133 - DNA, 25 bp, Homo sapien
cagggtacagtagacggtgcaatcc

SEQ ID NO: 4250134 - DNA, 25 bp, Homo sapien
tgttcatcttgtccaagtactgata

SEQ ID NO: 4250135 - DNA, 25 bp, Homo sapien
caagtactgatagttcaacaggtcc

SEQ ID NO: 4250136 - DNA, 25 bp, Homo sapien
cagaatgccgatattgttgttcatc

SEQ ID NO: 4250137 - DNA, 25 bp, Homo sapien
cttcgtagcacagaatgccgatatt

SEQ ID NO: 4250138 - DNA, 25 bp, Homo sapien
ggcccagcctcagactatcaaaaca

SEQ ID NO: 4250139 - DNA, 25 bp, Homo sapien
gaaaaccagctctttgcttttgccc

SEQ ID NO: 4250140 - DNA, 25 bp, Homo sapien
aatcaggcacaaaaaaatcgagctc

SEQ ID NO: 4250141 - DNA, 25 bp, Homo sapien
tcaattgttgctgagtagctcctgg

SEQ ID NO: 4250142 - DNA, 25 bp, Homo sapien
cccgatcgagtatgaaaacagcgtt

SEQ ID NO: 4250143 - DNA, 25 bp, Homo sapien
caagggcttactggtagacggtgta

SEQ ID NO: 4250144 - DNA, 25 bp, Homo sapien
aaacagcgtttcagaagtccttaca

SEQ ID NO: 4250145 - DNA, 25 bp, Homo sapien
tgtatgtactgtatccccgatcgag

SEQ ID NO: 4250146 - DNA, 25 bp, Homo sapien
gcgcagcccgtttcctaggacaaag

SEQ ID NO: 4250147 - DNA, 25 bp, Homo sapien
ttcctaggacaaagcggcgccggcc

SEQ ID NO: 4250148 - DNA, 25 bp, Homo sapien
tctcacagcccgctgcaagccggca

SEQ ID NO: 4250149 - DNA, 25 bp, Homo sapien
ctgcaagccggcagcgctgacatga

SEQ ID NO: 4250150 - DNA, 25 bp, Homo sapien
cagcctctcaatgtagcaagtgttg

SEQ ID NO: 4250151 - DNA, 25 bp, Homo sapien
gaggccgagcatgctcactgcgccg

SEQ ID NO: 4250152 - DNA, 25 bp, Homo sapien
cacaggatcagcctctcaatgtagc

SEQ ID NO: 4250153 - DNA, 25 bp, Homo sapien
ctctcaatgtagcaagtgttggaaa

SEQ ID NO: 4250154 - DNA, 25 bp, Homo sapien
tagatcaccaaaactgcgagctgtg

SEQ ID NO: 4250155 - DNA, 25 bp, Homo sapien
tatgacgatagaagaaagcccaggc

SEQ ID NO: 4250156 - DNA, 25 bp, Homo sapien
gagtaaccctactgcgctatctgtt

SEQ ID NO: 4250157 - DNA, 25 bp, Homo sapien
gcccaggctaattactaggctgatc

SEQ ID NO: 4250158 - DNA, 25 bp, Homo sapien
tgcagactgggaatggtgttttttg

SEQ ID NO: 4250159 - DNA, 25 bp, Homo sapien
tgcagaattcgtgctattcttgcct

SEQ ID NO: 4250160 - DNA, 25 bp, Homo sapien
gccaagtgattaaataggaaatgtg

SEQ ID NO: 4250161 - DNA, 25 bp, Homo sapien
cttgcctgatgtgcattatatttca

SEQ ID NO: 4250162 - DNA, 25 bp, Homo sapien
atccactctaaaaagtcccccatat

SEQ ID NO: 4250163 - DNA, 25 bp, Homo sapien
agtcccccatattgaaatcccaaca

SEQ ID NO: 4250164 - DNA, 25 bp, Homo sapien
ccatattgaaatcccaacatgcctt

SEQ ID NO: 4250165 - DNA, 25 bp, Homo sapien
cactctaaaaagtcccccatattga

SEQ ID NO: 4250166 - DNA, 25 bp, Homo sapien
ctgagtgactccggagtggcagaaa

SEQ ID NO: 4250167 - DNA, 25 bp, Homo sapien
gagtgactccggagtggcagaaaga

SEQ ID NO: 4250168 - DNA, 25 bp, Homo sapien
aggctgagtgactccggagtggcag

SEQ ID NO: 4250169 - DNA, 25 bp, Homo sapien
ggctgagtgactccggagtggcaga

SEQ ID NO: 4250170 - DNA, 25 bp, Homo sapien
tcagtcatcagttccgcagcgagga

SEQ ID NO: 4250171 - DNA, 25 bp, Homo sapien
attttgtcaaaatgcgtattctcag

SEQ ID NO: 4250172 - DNA, 25 bp, Homo sapien
tgcagacctggatgtctccaacttt

SEQ ID NO: 4250173 - DNA, 25 bp, Homo sapien
caacttttgagtgcacaggactcag

SEQ ID NO: 4250174 - DNA, 25 bp, Homo sapien
gcagagcccacctgtatgaaaagtc

SEQ ID NO: 4250175 - DNA, 25 bp, Homo sapien
gaaaagtcaagggttccacatccca

SEQ ID NO: 4250176 - DNA, 25 bp, Homo sapien
ccccaggtgtacaaaaatccatgca

SEQ ID NO: 4250177 - DNA, 25 bp, Homo sapien
caagtttcgcagtctgccctgcaga

SEQ ID NO: 4250178 - DNA, 25 bp, Homo sapien
cctcacgcttactaggatagctact

SEQ ID NO: 4250179 - DNA, 25 bp, Homo sapien
caaatagccaaccggcacatgcaaa

SEQ ID NO: 4250180 - DNA, 25 bp, Homo sapien
taccacctcacgcttactaggatag

SEQ ID NO: 4250181 - DNA, 25 bp, Homo sapien
gaacccttgtgtatgggaatgtaaa

SEQ ID NO: 4250182 - DNA, 25 bp, Homo sapien
cacttgagccccagggggcggagct

SEQ ID NO: 4250183 - DNA, 25 bp, Homo sapien
tgcagtgagccaagattgtgccact

SEQ ID NO: 4250184 - DNA, 25 bp, Homo sapien
atactccagtctgggcaacagagca

SEQ ID NO: 4250185 - DNA, 25 bp, Homo sapien
gatcacttgagccccagggggcgga

SEQ ID NO: 4250186 - DNA, 25 bp, Homo sapien
taagaggttcacttggctgatgcag

SEQ ID NO: 4250187 - DNA, 25 bp, Homo sapien
tattccatacaagagggccatgtgt

SEQ ID NO: 4250188 - DNA, 25 bp, Homo sapien
gaagtcaccatgatcttgaggaaag

SEQ ID NO: 4250189 - DNA, 25 bp, Homo sapien
gagtgggcccagctgaactagtcac

SEQ ID NO: 4250190 - DNA, 25 bp, Homo sapien
aggtactgttcccttcaaaatgctg

SEQ ID NO: 4250191 - DNA, 25 bp, Homo sapien
tacatcaatgtctcatgagcagtgg

SEQ ID NO: 4250192 - DNA, 25 bp, Homo sapien
tccactagtagacatactgaagcct

SEQ ID NO: 4250193 - DNA, 25 bp, Homo sapien
taacctcccctaaagtctgagagca

SEQ ID NO: 4250194 - DNA, 25 bp, Homo sapien
ccaaggcggatggactgctggaggc

SEQ ID NO: 4250195 - DNA, 25 bp, Homo sapien
caaggcggatggactgctggaggcc

SEQ ID NO: 4250196 - DNA, 25 bp, Homo sapien
gtttttcgtcatcagcatgcaccag

SEQ ID NO: 4250197 - DNA, 25 bp, Homo sapien
gacaaaacatccaatggcgtctcca

SEQ ID NO: 4250198 - DNA, 25 bp, Homo sapien
ctggacaaaacatccaatggcgtct

SEQ ID NO: 4250199 - DNA, 25 bp, Homo sapien
ttcgtcatcagcatgcaccagagat

SEQ ID NO: 4250200 - DNA, 25 bp, Homo sapien
ttctgtatacttcctaggtgcaagg

SEQ ID NO: 4250201 - DNA, 25 bp, Homo sapien
tatacttcctaggtgcaaggaccct

SEQ ID NO: 4250202 - DNA, 25 bp, Homo sapien
accctgtcttatccccagtgcagtc

SEQ ID NO: 4250203 - DNA, 25 bp, Homo sapien
gcactgtgtttctgtatacttccta

SEQ ID NO: 4250204 - DNA, 25 bp, Homo sapien
catcggaggaatcacattcaaactg

SEQ ID NO: 4250205 - DNA, 25 bp, Homo sapien
gggtgagcatcggaggaatcacatt

SEQ ID NO: 4250206 - DNA, 25 bp, Homo sapien
ggaatcacattcaaactgccaggtg

SEQ ID NO: 4250207 - DNA, 25 bp, Homo sapien
tgagcatcggaggaatcacattcaa

SEQ ID NO: 4250208 - DNA, 25 bp, Homo sapien
gcttctgcttgcgtcaaattcctta

SEQ ID NO: 4250209 - DNA, 25 bp, Homo sapien
ctgcttgcgtcaaattccttacttc

SEQ ID NO: 4250210 - DNA, 25 bp, Homo sapien
tggctgcttctgcttgcgtcaaatt

SEQ ID NO: 4250211 - DNA, 25 bp, Homo sapien
gctgcttctgcttgcgtcaaattcc

SEQ ID NO: 4250212 - DNA, 25 bp, Homo sapien
cctatgcaatgctgcctgatgctgg

SEQ ID NO: 4250213 - DNA, 25 bp, Homo sapien
atttcacggccctatgcaatgctgc

SEQ ID NO: 4250214 - DNA, 25 bp, Homo sapien
tgcctgatgctggtgcaaaattctt

SEQ ID NO: 4250215 - DNA, 25 bp, Homo sapien
ttacaacacatttcacggccctatg

SEQ ID NO: 4250216 - DNA, 25 bp, Homo sapien
gtagcactgtagttattaccatcag

SEQ ID NO: 4250217 - DNA, 25 bp, Homo sapien
tgacacagtgcaacattaggtagca

SEQ ID NO: 4250218 - DNA, 25 bp, Homo sapien
caggtctaactctccatggttccaa

SEQ ID NO: 4250219 - DNA, 25 bp, Homo sapien
gcccaagttagcaagcttcccagaa

SEQ ID NO: 4250220 - DNA, 25 bp, Homo sapien
tccttcctgagcttacaacttttag

SEQ ID NO: 4250221 - DNA, 25 bp, Homo sapien
cttttattgttaacctactcattat

SEQ ID NO: 4250222 - DNA, 25 bp, Homo sapien
cagcaaaactctccaagacagatac

SEQ ID NO: 4250223 - DNA, 25 bp, Homo sapien
ttgttaggtcatgttcaaagttaca

SEQ ID NO: 4250224 - DNA, 25 bp, Homo sapien
tgggcacgcggggcgcaccccgagg

SEQ ID NO: 4250225 - DNA, 25 bp, Homo sapien
ggcccccgccaaacacgcacacgca

SEQ ID NO: 4250226 - DNA, 25 bp, Homo sapien
gcgcgcagacgcacaggcgggctcg

SEQ ID NO: 4250227 - DNA, 25 bp, Homo sapien
ccgagggcgcgcagacgcacaggcg

SEQ ID NO: 4250228 - DNA, 25 bp, Homo sapien
acgcacgcgcggaccgggccggcgg

SEQ ID NO: 4250229 - DNA, 25 bp, Homo sapien
cgcacgcgcggaccgggccggcgga

SEQ ID NO: 4250230 - DNA, 25 bp, Homo sapien
gggagcgcgggagcgcgaggaatcc

SEQ ID NO: 4250231 - DNA, 25 bp, Homo sapien
ggccggcggacgggagcgcgggagc

SEQ ID NO: 4250232 - DNA, 25 bp, Homo sapien
ctcccgggccgatgccggcgcgctg

SEQ ID NO: 4250233 - DNA, 25 bp, Homo sapien
ggcgggcgctcccgagaggcgccag

SEQ ID NO: 4250234 - DNA, 25 bp, Homo sapien
ggcagtgaggtttgtcggggcgggc

SEQ ID NO: 4250235 - DNA, 25 bp, Homo sapien
gccgatgccggcgcgctggggcagt

SEQ ID NO: 4250236 - DNA, 25 bp, Homo sapien
gcgctccccgacggccgacggccac

SEQ ID NO: 4250237 - DNA, 25 bp, Homo sapien
gtcgccccctctcggcacccgcatg

SEQ ID NO: 4250238 - DNA, 25 bp, Homo sapien
tccccgacggccgacggccacgcac

SEQ ID NO: 4250239 - DNA, 25 bp, Homo sapien
acccgcatgcccgagccgcgctccc

SEQ ID NO: 4250240 - DNA, 25 bp, Homo sapien
ttcctcccattacagcatgttgcac

SEQ ID NO: 4250241 - DNA, 25 bp, Homo sapien
gcatgttgcactccagcgctgcact

SEQ ID NO: 4250242 - DNA, 25 bp, Homo sapien
aagggacaggtcacaccggctgcgg

SEQ ID NO: 4250243 - DNA, 25 bp, Homo sapien
cgggcgctccgacgccgctgggttt

SEQ ID NO: 4250244 - DNA, 25 bp, Homo sapien
agggagggagatcggagtggaaaga

SEQ ID NO: 4250245 - DNA, 25 bp, Homo sapien
gatcggagtggaaagagtccccttc

SEQ ID NO: 4250246 - DNA, 25 bp, Homo sapien
gagggagatcggagtggaaagagtc

SEQ ID NO: 4250247 - DNA, 25 bp, Homo sapien
ggagatcggagtggaaagagtcccc

SEQ ID NO: 4250248 - DNA, 25 bp, Homo sapien
tcctggcgtccacaacccggactgc

SEQ ID NO: 4250249 - DNA, 25 bp, Homo sapien
actcctggcgtccacaacccggact

SEQ ID NO: 4250250 - DNA, 25 bp, Homo sapien
cctggcgtccacaacccggactgct

SEQ ID NO: 4250251 - DNA, 25 bp, Homo sapien
ctcctggcgtccacaacccggactg

SEQ ID NO: 4250252 - DNA, 25 bp, Homo sapien
tgacttaaatccagtccaggtgggc

SEQ ID NO: 4250253 - DNA, 25 bp, Homo sapien
acagagataatgcttcttcgaagag

SEQ ID NO: 4250254 - DNA, 25 bp, Homo sapien
taatgcttcttcgaagagccggtgt

SEQ ID NO: 4250255 - DNA, 25 bp, Homo sapien
ggcttcgcagagacgtttaatgaat

SEQ ID NO: 4250256 - DNA, 25 bp, Homo sapien
tgtttctttgtgcgtcctccccaat

SEQ ID NO: 4250257 - DNA, 25 bp, Homo sapien
tctgccaaggactttcctcacagct

SEQ ID NO: 4250258 - DNA, 25 bp, Homo sapien
ttggctcccttattgctatctctat

SEQ ID NO: 4250259 - DNA, 25 bp, Homo sapien
agctttggctcccttattgctatct

SEQ ID NO: 4250260 - DNA, 25 bp, Homo sapien
aggagactttattgatgcatggaac

SEQ ID NO: 4250261 - DNA, 25 bp, Homo sapien
gtatccacaagctaaagtccagtct

SEQ ID NO: 4250262 - DNA, 25 bp, Homo sapien
cagttttattggtcaggactctttt

SEQ ID NO: 4250263 - DNA, 25 bp, Homo sapien
acaacagttttattggtcaggactc

SEQ ID NO: 4250264 - DNA, 25 bp, Homo sapien
cattctgtgtattgtcgggcgggga

SEQ ID NO: 4250265 - DNA, 25 bp, Homo sapien
gctgccgagcactctgaacattctg

SEQ ID NO: 4250266 - DNA, 25 bp, Homo sapien
tcacacgaggagaactgctgccgag

SEQ ID NO: 4250267 - DNA, 25 bp, Homo sapien
tcgggcggggatgtccagcttgaac

SEQ ID NO: 4250268 - DNA, 25 bp, Homo sapien
tgagcctccaatgaaaccaagcctt

SEQ ID NO: 4250269 - DNA, 25 bp, Homo sapien
aaagtgtgactacacgcctcacggc

SEQ ID NO: 4250270 - DNA, 25 bp, Homo sapien
ggcagagggtatctttcagcctcaa

SEQ ID NO: 4250271 - DNA, 25 bp, Homo sapien
tcatttaagaaagaacccggctgtg

SEQ ID NO: 4250272 - DNA, 25 bp, Homo sapien
cctctacctcggctgtgctggaaag

SEQ ID NO: 4250273 - DNA, 25 bp, Homo sapien
caccctgcgttccctcttcttggct

SEQ ID NO: 4250274 - DNA, 25 bp, Homo sapien
ctggtgagtcaccctgcgttccctc

SEQ ID NO: 4250275 - DNA, 25 bp, Homo sapien
ccctgcgttccctcttcttggctgg

SEQ ID NO: 4250276 - DNA, 25 bp, Homo sapien
ggtgagtcaccctgcgttccctctt

SEQ ID NO: 4250277 - DNA, 25 bp, Homo sapien
gcatcatgttttcgaggctcatccg

SEQ ID NO: 4250278 - DNA, 25 bp, Homo sapien
tacatcgtgtctcggtacatctggc

SEQ ID NO: 4250279 - DNA, 25 bp, Homo sapien
tcagcagccacaaatctacatcgtg

SEQ ID NO: 4250280 - DNA, 25 bp, Homo sapien
catccgtgtcacagtctgcatcagt

SEQ ID NO: 4250281 - DNA, 25 bp, Homo sapien
cttgcattatgagagtggattttat

SEQ ID NO: 4250282 - DNA, 25 bp, Homo sapien
cattatgagagtggattttatcttc

SEQ ID NO: 4250283 - DNA, 25 bp, Homo sapien
attatgagagtggattttatcttct

SEQ ID NO: 4250284 - DNA, 25 bp, Homo sapien
tgcattatgagagtggattttatct

SEQ ID NO: 4250285 - DNA, 25 bp, Homo sapien
tgaggcagcaccacagcaccgtcat

SEQ ID NO: 4250286 - DNA, 25 bp, Homo sapien
cagaggcagctcatcagtgctgggc

SEQ ID NO: 4250287 - DNA, 25 bp, Homo sapien
gactcggagcttgaagactcactgc

SEQ ID NO: 4250288 - DNA, 25 bp, Homo sapien
tcactgcaatggagagcctcaaagg

SEQ ID NO: 4250289 - DNA, 25 bp, Homo sapien
tattattgcacttgtgggcagaggc

SEQ ID NO: 4250290 - DNA, 25 bp, Homo sapien
gatcaaacactttattcatctacac

SEQ ID NO: 4250291 - DNA, 25 bp, Homo sapien
cagttttagtgaactataaatcact

SEQ ID NO: 4250292 - DNA, 25 bp, Homo sapien
agttttagtgaactataaatcactg

SEQ ID NO: 4250293 - DNA, 25 bp, Homo sapien
gcagacttgtctttggaggagggca

SEQ ID NO: 4250294 - DNA, 25 bp, Homo sapien
tgacattctgagcagacttgtcttt

SEQ ID NO: 4250295 - DNA, 25 bp, Homo sapien
gcttgttgagtggatgctcagagtt

SEQ ID NO: 4250296 - DNA, 25 bp, Homo sapien
ttgagtggatgctcagagtttcagt

SEQ ID NO: 4250297 - DNA, 25 bp, Homo sapien
taacaggtttcgctctggacatgcc

SEQ ID NO: 4250298 - DNA, 25 bp, Homo sapien
ggataagactctgtatgccactggg

SEQ ID NO: 4250299 - DNA, 25 bp, Homo sapien
tgcactttggtgagcatgccgacaa

SEQ ID NO: 4250300 - DNA, 25 bp, Homo sapien
tatgtcactgtgaaaggcacctgtc

SEQ ID NO: 4250301 - DNA, 25 bp, Homo sapien
tgtgaactccctaacactgcaggaa

SEQ ID NO: 4250302 - DNA, 25 bp, Homo sapien
cagggatcctggacttgcaaaaggc

SEQ ID NO: 4250303 - DNA, 25 bp, Homo sapien
cagggcgtccagagttctagtcaga

SEQ ID NO: 4250304 - DNA, 25 bp, Homo sapien
gactctagttccaggtgggccacaa

SEQ ID NO: 4250305 - DNA, 25 bp, Homo sapien
gctatgtcactatatggctccttag

SEQ ID NO: 4250306 - DNA, 25 bp, Homo sapien
tctgtgcccagattacattaagctt

SEQ ID NO: 4250307 - DNA, 25 bp, Homo sapien
gtaagactatgaactccccgtgtga

SEQ ID NO: 4250308 - DNA, 25 bp, Homo sapien
gatgcattccctgtagagagatcct

SEQ ID NO: 4250309 - DNA, 25 bp, Homo sapien
cattctactgtgttcccggaaaagg

SEQ ID NO: 4250310 - DNA, 25 bp, Homo sapien
cagtcgttcccttctaaacacggca

SEQ ID NO: 4250311 - DNA, 25 bp, Homo sapien
gaaaaggctggtaaggatcaactga

SEQ ID NO: 4250312 - DNA, 25 bp, Homo sapien
gaatgaatggctctactgcttccca

SEQ ID NO: 4250313 - DNA, 25 bp, Homo sapien
tccagtgattcaggagggcaacacg

SEQ ID NO: 4250314 - DNA, 25 bp, Homo sapien
tactctgcttgtgggacgatgaact

SEQ ID NO: 4250315 - DNA, 25 bp, Homo sapien
tcacttttgtatcccgagcagctgg

SEQ ID NO: 4250316 - DNA, 25 bp, Homo sapien
tcagaggagtatccaagcagctggg

SEQ ID NO: 4250317 - DNA, 25 bp, Homo sapien
gacattgttcgaccaccaggttctg

SEQ ID NO: 4250318 - DNA, 25 bp, Homo sapien
gaaaattcagaagggcagtaaagct

SEQ ID NO: 4250319 - DNA, 25 bp, Homo sapien
cagatggaagcagttgtctcagaga

SEQ ID NO: 4250320 - DNA, 25 bp, Homo sapien
tatgagggaaaaaccctgcacacag

SEQ ID NO: 4250321 - DNA, 25 bp, Homo sapien
atcccagtttatggccatcaaagct

SEQ ID NO: 4250322 - DNA, 25 bp, Homo sapien
atatcccagtttatggccatcaaag

SEQ ID NO: 4250323 - DNA, 25 bp, Homo sapien
ccagtttatggccatcaaagctcag

SEQ ID NO: 4250324 - DNA, 25 bp, Homo sapien
cccagtttatggccatcaaagctca

SEQ ID NO: 4250325 - DNA, 25 bp, Homo sapien
gatacaaagctttacactgtaacca

SEQ ID NO: 4250326 - DNA, 25 bp, Homo sapien
acacacggatttccaaagctcttac

SEQ ID NO: 4250327 - DNA, 25 bp, Homo sapien
cactgtaaccaagagtgtggaagcc

SEQ ID NO: 4250328 - DNA, 25 bp, Homo sapien
caagagtgtggaagccactcagtca

SEQ ID NO: 4250329 - DNA, 25 bp, Homo sapien
agtaaaaatgcctttcgtgctctgt

SEQ ID NO: 4250330 - DNA, 25 bp, Homo sapien
gtaaaaatgcctttcgtgctctgtc

SEQ ID NO: 4250331 - DNA, 25 bp, Homo sapien
taaaaatgcctttcgtgctctgtct

SEQ ID NO: 4250332 - DNA, 25 bp, Homo sapien
tagacggtctcacgattgctgaaag

SEQ ID NO: 4250333 - DNA, 25 bp, Homo sapien
ctagacggtctcacgattgctgaaa

SEQ ID NO: 4250334 - DNA, 25 bp, Homo sapien
agacggtctcacgattgctgaaagc

SEQ ID NO: 4250335 - DNA, 25 bp, Homo sapien
gacggtctcacgattgctgaaagcc

SEQ ID NO: 4250336 - DNA, 25 bp, Homo sapien
gaaaacacacatacggattccacag

SEQ ID NO: 4250337 - DNA, 25 bp, Homo sapien
tgtgtgagtccaagccgatgaccga

SEQ ID NO: 4250338 - DNA, 25 bp, Homo sapien
gatgaccgaacagctctgtgcctct

SEQ ID NO: 4250339 - DNA, 25 bp, Homo sapien
tgggttagctgaccctcaaagggca

SEQ ID NO: 4250340 - DNA, 25 bp, Homo sapien
cactgttgccaggatcatgttcaaa

SEQ ID NO: 4250341 - DNA, 25 bp, Homo sapien
gagacggcccagatcacactgttgc

SEQ ID NO: 4250342 - DNA, 25 bp, Homo sapien
tgcctcgtacagagctatcttcagg

SEQ ID NO: 4250343 - DNA, 25 bp, Homo sapien
tcaaacaaacaacagtgtgcctcgt

SEQ ID NO: 4250344 - DNA, 25 bp, Homo sapien
gcagtgcgatggtctttgcaaagca

SEQ ID NO: 4250345 - DNA, 25 bp, Homo sapien
ctggcacgcggaggagctcagtaaa

SEQ ID NO: 4250346 - DNA, 25 bp, Homo sapien
tactggaaattctatctggcacgcg

SEQ ID NO: 4250347 - DNA, 25 bp, Homo sapien
gcagctcatccactgcagtgcgatg

SEQ ID NO: 4250348 - DNA, 25 bp, Homo sapien
ggagaatgcactcaattgacagagg

SEQ ID NO: 4250349 - DNA, 25 bp, Homo sapien
gagggactcattctcaatttcataa

SEQ ID NO: 4250350 - DNA, 25 bp, Homo sapien
ttgattgactgatctcataaattac

SEQ ID NO: 4250351 - DNA, 25 bp, Homo sapien
tttcttgattgactgatctcataaa

SEQ ID NO: 4250352 - DNA, 25 bp, Homo sapien
gagatacgggctgctctatcaccaa

SEQ ID NO: 4250353 - DNA, 25 bp, Homo sapien
gaagttgtgctctaggaaccaaaag

SEQ ID NO: 4250354 - DNA, 25 bp, Homo sapien
caccttaaagggaagttagtctctg

SEQ ID NO: 4250355 - DNA, 25 bp, Homo sapien
ccatgtctgagggaatgtactcaac

SEQ ID NO: 4250356 - DNA, 25 bp, Homo sapien
tttgggcaatgtcatcagctgagtg

SEQ ID NO: 4250357 - DNA, 25 bp, Homo sapien
tgctgtaaggttttgggcaatgtca

SEQ ID NO: 4250358 - DNA, 25 bp, Homo sapien
cacagtcgggatcatgagccacttg

SEQ ID NO: 4250359 - DNA, 25 bp, Homo sapien
tccaggagggtccataatatgattt

SEQ ID NO: 4250360 - DNA, 25 bp, Homo sapien
tgcagttgacactcgtggaggccgc

SEQ ID NO: 4250361 - DNA, 25 bp, Homo sapien
gacgacgtctatggaagtgctttaa

SEQ ID NO: 4250362 - DNA, 25 bp, Homo sapien
ggcagcaagctaaggaaactctctt

SEQ ID NO: 4250363 - DNA, 25 bp, Homo sapien
taaatccagcagtcaaaggaagtgg

SEQ ID NO: 4250364 - DNA, 25 bp, Homo sapien
tgaatcaaaagttagccacagagct

SEQ ID NO: 4250365 - DNA, 25 bp, Homo sapien
ccagcggcttcggttcccaaagtat

SEQ ID NO: 4250366 - DNA, 25 bp, Homo sapien
tgtcctaaagctactatgccagcgg

SEQ ID NO: 4250367 - DNA, 25 bp, Homo sapien
catacactgtgcctcgtggaatgaa

SEQ ID NO: 4250368 - DNA, 25 bp, Homo sapien
catcagccctagcaaaagagtgaga

SEQ ID NO: 4250369 - DNA, 25 bp, Homo sapien
cagccctagcaaaagagtgagatat

SEQ ID NO: 4250370 - DNA, 25 bp, Homo sapien
ctagcaaaagagtgagatatccggc

SEQ ID NO: 4250371 - DNA, 25 bp, Homo sapien
tcaacatcagccctagcaaaagagt

SEQ ID NO: 4250372 - DNA, 25 bp, Homo sapien
ggtggtgcaagcctacagttctgtc

SEQ ID NO: 4250373 - DNA, 25 bp, Homo sapien
ttaatggctccataaagctagaggg

SEQ ID NO: 4250374 - DNA, 25 bp, Homo sapien
ggatggttctaaattcacaggcccc

SEQ ID NO: 4250375 - DNA, 25 bp, Homo sapien
tccaacggcttgagtgacatataaa

SEQ ID NO: 4250376 - DNA, 25 bp, Homo sapien
gaaacaatacaagctattttccaca

SEQ ID NO: 4250377 - DNA, 25 bp, Homo sapien
gttctcacaccagtcatgctgttct

SEQ ID NO: 4250378 - DNA, 25 bp, Homo sapien
agaaacaatacaagctattttccac

SEQ ID NO: 4250379 - DNA, 25 bp, Homo sapien
agtcatgctgttctacccctgactt

SEQ ID NO: 4250380 - DNA, 25 bp, Homo sapien
tatgctgccatagagctctcgaaag

SEQ ID NO: 4250381 - DNA, 25 bp, Homo sapien
ggcttttatacaccacttgaggatt

SEQ ID NO: 4250382 - DNA, 25 bp, Homo sapien
aggattttcctgtagtatgctgcca

SEQ ID NO: 4250383 - DNA, 25 bp, Homo sapien
gctctcgaaagtgggctatattggg

SEQ ID NO: 4250384 - DNA, 25 bp, Homo sapien
tgtgtaccaccatgcccggcttttt

SEQ ID NO: 4250385 - DNA, 25 bp, Homo sapien
ctgggactacaggtcaggtgtgtac

SEQ ID NO: 4250386 - DNA, 25 bp, Homo sapien
tgagacagagtcttactcggtcgcc

SEQ ID NO: 4250387 - DNA, 25 bp, Homo sapien
gacagagtcttactcggtcgccagg

SEQ ID NO: 4250388 - DNA, 25 bp, Homo sapien
agtaggaagtaatagggaggactca

SEQ ID NO: 4250389 - DNA, 25 bp, Homo sapien
ggaggactcaggttcactatattgg

SEQ ID NO: 4250390 - DNA, 25 bp, Homo sapien
tacatgtcacatactattggaagca

SEQ ID NO: 4250391 - DNA, 25 bp, Homo sapien
caggaaggaagcagtataatccact

SEQ ID NO: 4250392 - DNA, 25 bp, Homo sapien
gctgacaacataattccactttgga

SEQ ID NO: 4250393 - DNA, 25 bp, Homo sapien
cacatccaaggaagtcagtgcctcc

SEQ ID NO: 4250394 - DNA, 25 bp, Homo sapien
taataaaacagtgagaaatggagct

SEQ ID NO: 4250395 - DNA, 25 bp, Homo sapien
caaagtgattcacagcagtgttgct

SEQ ID NO: 4250396 - DNA, 25 bp, Homo sapien
tagtccaccatgtaccagatgagtg

SEQ ID NO: 4250397 - DNA, 25 bp, Homo sapien
taccagatgagtgaccttagacagg

SEQ ID NO: 4250398 - DNA, 25 bp, Homo sapien
tattcaaactagtccaccatgtacc

SEQ ID NO: 4250399 - DNA, 25 bp, Homo sapien
gtgaccttagacagggaaccattct

SEQ ID NO: 4250400 - DNA, 25 bp, Homo sapien
agggctgatctaagagtgacatcct

SEQ ID NO: 4250401 - DNA, 25 bp, Homo sapien
tcctcgttcactgagataattttca

SEQ ID NO: 4250402 - DNA, 25 bp, Homo sapien
ctcttcagatttctatcgagggctg

SEQ ID NO: 4250403 - DNA, 25 bp, Homo sapien
ctgaataggagagaccggcaatctc

SEQ ID NO: 4250404 - DNA, 25 bp, Homo sapien
tgaaagaagcagaacattgggaaga

SEQ ID NO: 4250405 - DNA, 25 bp, Homo sapien
ctgaaagaagcagaacattgggaag

SEQ ID NO: 4250406 - DNA, 25 bp, Homo sapien
actccagcctgaaagacacagttga

SEQ ID NO: 4250407 - DNA, 25 bp, Homo sapien
tccagcctgaaagacacagttgaga

SEQ ID NO: 4250408 - DNA, 25 bp, Homo sapien
cagcctgaaagacacagttgagacc

SEQ ID NO: 4250409 - DNA, 25 bp, Homo sapien
ccagcctgaaagacacagttgagac

SEQ ID NO: 4250410 - DNA, 25 bp, Homo sapien
tgggccagcggttctcatctttagc

SEQ ID NO: 4250411 - DNA, 25 bp, Homo sapien
cctcggtgagggctgaaaaatgtac

SEQ ID NO: 4250412 - DNA, 25 bp, Homo sapien
gtattatcggatgcaactcccagag

SEQ ID NO: 4250413 - DNA, 25 bp, Homo sapien
tgcttctcagtgcacaaggcaagag

SEQ ID NO: 4250414 - DNA, 25 bp, Homo sapien
aaagccagtgaactcttgggacact

SEQ ID NO: 4250415 - DNA, 25 bp, Homo sapien
gctactgtgctgatctggttcttca

SEQ ID NO: 4250416 - DNA, 25 bp, Homo sapien
aactaggaacttgtctcagcagcac

SEQ ID NO: 4250417 - DNA, 25 bp, Homo sapien
ggaaaaatgtcagttcggaagattc

SEQ ID NO: 4250418 - DNA, 25 bp, Homo sapien
tgatgtgcttaccaacccagaagtt

SEQ ID NO: 4250419 - DNA, 25 bp, Homo sapien
tatggaggttccactgcctatgcac

SEQ ID NO: 4250420 - DNA, 25 bp, Homo sapien
aatcattggccgttggtgattggcc

SEQ ID NO: 4250421 - DNA, 25 bp, Homo sapien
tatgaaggacacaactgaggaaccg

SEQ ID NO: 4250422 - DNA, 25 bp, Homo sapien
gatcttcaatcagaacgttagtgct

SEQ ID NO: 4250423 - DNA, 25 bp, Homo sapien
cagcaatgtataagttattccagtt

SEQ ID NO: 4250424 - DNA, 25 bp, Homo sapien
tataagttattccagttgaggagat

SEQ ID NO: 4250425 - DNA, 25 bp, Homo sapien
gaacgttagtgctaataactccata

SEQ ID NO: 4250426 - DNA, 25 bp, Homo sapien
taaactctttacagcaataccacag

SEQ ID NO: 4250427 - DNA, 25 bp, Homo sapien
taaaggtggaatggctcttagatgc

SEQ ID NO: 4250428 - DNA, 25 bp, Homo sapien
ccgattttgtccatgcgacaggcag

SEQ ID NO: 4250429 - DNA, 25 bp, Homo sapien
gaacccaccaggcaattacaaggtg

SEQ ID NO: 4250430 - DNA, 25 bp, Homo sapien
tgcaggcaagtaaccactgggaggt

SEQ ID NO: 4250431 - DNA, 25 bp, Homo sapien
gaacaaagctaagtgtcctgcatga

SEQ ID NO: 4250432 - DNA, 25 bp, Homo sapien
gggacctgttgcaaactagctgcac

SEQ ID NO: 4250433 - DNA, 25 bp, Homo sapien
gtaacagaaacaccacgggcctgga

SEQ ID NO: 4250434 - DNA, 25 bp, Homo sapien
caagttcaagacgtctggcaggagt

SEQ ID NO: 4250435 - DNA, 25 bp, Homo sapien
ttaatgggacatgaggaaggactcc

SEQ ID NO: 4250436 - DNA, 25 bp, Homo sapien
tataacaacgtccagcaggagtgtg

SEQ ID NO: 4250437 - DNA, 25 bp, Homo sapien
gtgaatgtttcctgaccacaagaac

SEQ ID NO: 4250438 - DNA, 25 bp, Homo sapien
tgtgaacacaaagtccagcatagca

SEQ ID NO: 4250439 - DNA, 25 bp, Homo sapien
ggttctttgaatgccatgcgacagg

SEQ ID NO: 4250440 - DNA, 25 bp, Homo sapien
ctggatggacgtgataatcttgggc

SEQ ID NO: 4250441 - DNA, 25 bp, Homo sapien
tgaattgtagtaaactccagcgcca

SEQ ID NO: 4250442 - DNA, 25 bp, Homo sapien
tgaaggacacgtgagttaaacagac

SEQ ID NO: 4250443 - DNA, 25 bp, Homo sapien
ttaaacagacttgctggaagcactg

SEQ ID NO: 4250444 - DNA, 25 bp, Homo sapien
gcactcagcatagggatcagatcag

SEQ ID NO: 4250445 - DNA, 25 bp, Homo sapien
catgttctggaagctgccgtcagat

SEQ ID NO: 4250446 - DNA, 25 bp, Homo sapien
ggtgactctcaacaaacttggctgc

SEQ ID NO: 4250447 - DNA, 25 bp, Homo sapien
gagggtaaatacactggtcacgcac

SEQ ID NO: 4250448 - DNA, 25 bp, Homo sapien
tccaagcaacagcatagatggcctc

SEQ ID NO: 4250449 - DNA, 25 bp, Homo sapien
tgtgctgagccaactctgaaaagta

SEQ ID NO: 4250450 - DNA, 25 bp, Homo sapien
tggtctgaactcggccctgcctggc

SEQ ID NO: 4250451 - DNA, 25 bp, Homo sapien
tggcggtacaccccggagccgtaga

SEQ ID NO: 4250452 - DNA, 25 bp, Homo sapien
atcttgcggaaggtcacccacgagc

SEQ ID NO: 4250453 - DNA, 25 bp, Homo sapien
tagacgaaagccagactcagctcct

SEQ ID NO: 4250454 - DNA, 25 bp, Homo sapien
actggatcgagggacacaaggctga

SEQ ID NO: 4250455 - DNA, 25 bp, Homo sapien
ggcggcggtcgcacaggcagagctt

SEQ ID NO: 4250456 - DNA, 25 bp, Homo sapien
ggtcgaggctaacaggggacactca

SEQ ID NO: 4250457 - DNA, 25 bp, Homo sapien
cccagataggctcgggtgggcggcg

SEQ ID NO: 4250458 - DNA, 25 bp, Homo sapien
aatcctccatcagtgagtgtatcct

SEQ ID NO: 4250459 - DNA, 25 bp, Homo sapien
aaatcctccatcagtgagtgtatcc

SEQ ID NO: 4250460 - DNA, 25 bp, Homo sapien
atcctccatcagtgagtgtatcctc

SEQ ID NO: 4250461 - DNA, 25 bp, Homo sapien
ggctattcacaaggcgatgccacta

SEQ ID NO: 4250462 - DNA, 25 bp, Homo sapien
caaggcgatgccactacagatcagc

SEQ ID NO: 4250463 - DNA, 25 bp, Homo sapien
tgccatagcgccctacagcctagaa

SEQ ID NO: 4250464 - DNA, 25 bp, Homo sapien
aattgccatagcgccctacagccta

SEQ ID NO: 4250465 - DNA, 25 bp, Homo sapien
taaagttgctccatgtcaaatctgg

SEQ ID NO: 4250466 - DNA, 25 bp, Homo sapien
tcaaatctggtacactgaagggcaa

SEQ ID NO: 4250467 - DNA, 25 bp, Homo sapien
aatttctcatggacccctacgatgg

SEQ ID NO: 4250468 - DNA, 25 bp, Homo sapien
caaaatagccattgattgggcaagg

SEQ ID NO: 4250469 - DNA, 25 bp, Homo sapien
ttaagacaatacagccagcctgctc

SEQ ID NO: 4250470 - DNA, 25 bp, Homo sapien
tacagccagcctgctcaggtttttc

SEQ ID NO: 4250471 - DNA, 25 bp, Homo sapien
agacaatacagccagcctgctcagg

SEQ ID NO: 4250472 - DNA, 25 bp, Homo sapien
acagccagcctgctcaggtttttca

SEQ ID NO: 4250473 - DNA, 25 bp, Homo sapien
tctgctccatcaggcggtctgtggc

SEQ ID NO: 4250474 - DNA, 25 bp, Homo sapien
ccaatttcccctcaattaccctctg

SEQ ID NO: 4250475 - DNA, 25 bp, Homo sapien
ctcctttgtccaatttcccctcaat

SEQ ID NO: 4250476 - DNA, 25 bp, Homo sapien
ccctcaattaccctctgctccatca

SEQ ID NO: 4250477 - DNA, 25 bp, Homo sapien
tatgagaggcccaagtcaggcagac

SEQ ID NO: 4250478 - DNA, 25 bp, Homo sapien
tgcaagaaggtcaaactcacgcctg

SEQ ID NO: 4250479 - DNA, 25 bp, Homo sapien
tccatttgcatatgaggcccagaga

SEQ ID NO: 4250480 - DNA, 25 bp, Homo sapien
tctacagcaggcgagtctaaatggg

SEQ ID NO: 4250481 - DNA, 25 bp, Homo sapien
tttcagctgggacacggctcttttt

SEQ ID NO: 4250482 - DNA, 25 bp, Homo sapien
gctgggacacggctctttttctctc

SEQ ID NO: 4250483 - DNA, 25 bp, Homo sapien
ctccgcatagggaggctgacacctc

SEQ ID NO: 4250484 - DNA, 25 bp, Homo sapien
ggtttccttcgcctccatttcagct

SEQ ID NO: 4250485 - DNA, 25 bp, Homo sapien
gcagcttattcagctcgctgtccca

SEQ ID NO: 4250486 - DNA, 25 bp, Homo sapien
ccaggtcgccgaggaaacgtttcag

SEQ ID NO: 4250487 - DNA, 25 bp, Homo sapien
agccgcacgccgactggtaggtgcc

SEQ ID NO: 4250488 - DNA, 25 bp, Homo sapien
tgtcccaagcggtaaagcagacggc

SEQ ID NO: 4250489 - DNA, 25 bp, Homo sapien
agcaggaagacgtagtttttagtag

SEQ ID NO: 4250490 - DNA, 25 bp, Homo sapien
tacagcaggaagacgtagtttttag

SEQ ID NO: 4250491 - DNA, 25 bp, Homo sapien
cagcaggaagacgtagtttttagta

SEQ ID NO: 4250492 - DNA, 25 bp, Homo sapien
atacagcaggaagacgtagttttta

SEQ ID NO: 4250493 - DNA, 25 bp, Homo sapien
atttcattctccgaggataaaggca

SEQ ID NO: 4250494 - DNA, 25 bp, Homo sapien
tttcattctccgaggataaaggcat

SEQ ID NO: 4250495 - DNA, 25 bp, Homo sapien
ctttatttcattctccgaggataaa

SEQ ID NO: 4250496 - DNA, 25 bp, Homo sapien
ttatttcattctccgaggataaagg

SEQ ID NO: 4250497 - DNA, 25 bp, Homo sapien
tcctttgggctattgctttgtctat

SEQ ID NO: 4250498 - DNA, 25 bp, Homo sapien
ggctctcaaggaaccatttttctga

SEQ ID NO: 4250499 - DNA, 25 bp, Homo sapien
tctatacctttatgagttttgtgtg

SEQ ID NO: 4250500 - DNA, 25 bp, Homo sapien
cacttggctctcaaggaaccatttt

SEQ ID NO: 4250501 - DNA, 25 bp, Homo sapien
aactcagttgttgcatcgtctagca

SEQ ID NO: 4250502 - DNA, 25 bp, Homo sapien
tcaagactcaactcagttgttgcat

SEQ ID NO: 4250503 - DNA, 25 bp, Homo sapien
ctggataatcttcaagactcaactc

SEQ ID NO: 4250504 - DNA, 25 bp, Homo sapien
aagactcaactcagttgttgcatcg

SEQ ID NO: 4250505 - DNA, 25 bp, Homo sapien
ccctttgcccctacaatctccacct

SEQ ID NO: 4250506 - DNA, 25 bp, Homo sapien
cctgcattgtactgaatccctttgc

SEQ ID NO: 4250507 - DNA, 25 bp, Homo sapien
tgtactgaatccctttgcccctaca

SEQ ID NO: 4250508 - DNA, 25 bp, Homo sapien
tactgaatccctttgcccctacaat

SEQ ID NO: 4250509 - DNA, 25 bp, Homo sapien
aatccaaagtattgttgccttgagg

SEQ ID NO: 4250510 - DNA, 25 bp, Homo sapien
ggaaatccaaagtattgttgccttg

SEQ ID NO: 4250511 - DNA, 25 bp, Homo sapien
gaaatccaaagtattgttgccttga

SEQ ID NO: 4250512 - DNA, 25 bp, Homo sapien
tttggaaatccaaagtattgttgcc

SEQ ID NO: 4250513 - DNA, 25 bp, Homo sapien
cgctctgagtggaaatcgggtcctc

SEQ ID NO: 4250514 - DNA, 25 bp, Homo sapien
ctacatcctgttatatcacttaggg

SEQ ID NO: 4250515 - DNA, 25 bp, Homo sapien
gagttacctttcttgctctaaggag

SEQ ID NO: 4250516 - DNA, 25 bp, Homo sapien
gatcttgaacttgtcaaatttccct

SEQ ID NO: 4250517 - DNA, 25 bp, Homo sapien
ttaaatgatgtccatcctcagtggg

SEQ ID NO: 4250518 - DNA, 25 bp, Homo sapien
gagccaatggtataagtttcaatct

SEQ ID NO: 4250519 - DNA, 25 bp, Homo sapien
cacctgtggcctaatcaagttaaca

SEQ ID NO: 4250520 - DNA, 25 bp, Homo sapien
tgttctaatcagaccttcagtgggt

SEQ ID NO: 4250521 - DNA, 25 bp, Homo sapien
cctgggcagagaaccaagtaggtca

SEQ ID NO: 4250522 - DNA, 25 bp, Homo sapien
tatgactctgctgaggcttagtgcc

SEQ ID NO: 4250523 - DNA, 25 bp, Homo sapien
taaaagcttaagtcctcgagtggcc

SEQ ID NO: 4250524 - DNA, 25 bp, Homo sapien
cagaactgattctctgggaaggtgg

SEQ ID NO: 4250525 - DNA, 25 bp, Homo sapien
gagggctggccatcagaatagcaca

SEQ ID NO: 4250526 - DNA, 25 bp, Homo sapien
tagtgacagagtcctaccaagtggt

SEQ ID NO: 4250527 - DNA, 25 bp, Homo sapien
tttgctgcggagtggacctttggcc

SEQ ID NO: 4250528 - DNA, 25 bp, Homo sapien
ccttataggtctgtaggctctgccc

SEQ ID NO: 4250529 - DNA, 25 bp, Homo sapien
cattattgtgttggctgtcccaggg

SEQ ID NO: 4250530 - DNA, 25 bp, Homo sapien
acatgctggaaaggtagggccccac

SEQ ID NO: 4250531 - DNA, 25 bp, Homo sapien
tcactaccttgagcagacagggact

SEQ ID NO: 4250532 - DNA, 25 bp, Homo sapien
gagctggcattaactccctagggat

SEQ ID NO: 4250533 - DNA, 25 bp, Homo sapien
gataccagtggcttcgagtgtgaac

SEQ ID NO: 4250534 - DNA, 25 bp, Homo sapien
gagacctgagtgctcttgcagtgca

SEQ ID NO: 4250535 - DNA, 25 bp, Homo sapien
caatttgtcaaatcagagggctggc

SEQ ID NO: 4250536 - DNA, 25 bp, Homo sapien
tatgtgccagtatcgcttgtagaga

SEQ ID NO: 4250537 - DNA, 25 bp, Homo sapien
tcgctatctataagacactgggagg

SEQ ID NO: 4250538 - DNA, 25 bp, Homo sapien
gaactatagagcttatgcggctgga

SEQ ID NO: 4250539 - DNA, 25 bp, Homo sapien
tgcagtttgcccagctggtcgctat

SEQ ID NO: 4250540 - DNA, 25 bp, Homo sapien
taactagattttagctgacagcctc

SEQ ID NO: 4250541 - DNA, 25 bp, Homo sapien
tttgccagagcttccccagggagaa

SEQ ID NO: 4250542 - DNA, 25 bp, Homo sapien
cagagattatgtttgtgcccgcctc

SEQ ID NO: 4250543 - DNA, 25 bp, Homo sapien
tgtgtgcagtttccaataagacggt

SEQ ID NO: 4250544 - DNA, 25 bp, Homo sapien
caattggtgatcgtgcttaacccac

SEQ ID NO: 4250545 - DNA, 25 bp, Homo sapien
ggagaactggcttgatcttcaggac

SEQ ID NO: 4250546 - DNA, 25 bp, Homo sapien
tctgatactgtacatcgcaaggata

SEQ ID NO: 4250547 - DNA, 25 bp, Homo sapien
tcaggtggtaatggccaaagctctg

SEQ ID NO: 4250548 - DNA, 25 bp, Homo sapien
tatgatgctgtcaaaccaccttctg

SEQ ID NO: 4250549 - DNA, 25 bp, Homo sapien
cagacataatgctgagcctggtaac

SEQ ID NO: 4250550 - DNA, 25 bp, Homo sapien
gcctggtaaccatagagctttcgtt

SEQ ID NO: 4250551 - DNA, 25 bp, Homo sapien
ctagggctgaacgatgtcaacaaac

SEQ ID NO: 4250552 - DNA, 25 bp, Homo sapien
gcaggtgccgtcaacatgcttcata

SEQ ID NO: 4250553 - DNA, 25 bp, Homo sapien
gattcagactttccctctgcaccaa

SEQ ID NO: 4250554 - DNA, 25 bp, Homo sapien
cagccacagttcagatggtagtgat

SEQ ID NO: 4250555 - DNA, 25 bp, Homo sapien
tggtagtgatgattcagactttccc

SEQ ID NO: 4250556 - DNA, 25 bp, Homo sapien
tagtgatgattcagactttccctct

SEQ ID NO: 4250557 - DNA, 25 bp, Homo sapien
tcacaccacagagggaagagtcaaa

SEQ ID NO: 4250558 - DNA, 25 bp, Homo sapien
ggaagagtcaaaaggcgtatagata

SEQ ID NO: 4250559 - DNA, 25 bp, Homo sapien
tctggctgttggcttctagtttcac

SEQ ID NO: 4250560 - DNA, 25 bp, Homo sapien
aggcgtatagatatactgaacatcc

SEQ ID NO: 4250561 - DNA, 25 bp, Homo sapien
tcactggagattttggcccgaatca

SEQ ID NO: 4250562 - DNA, 25 bp, Homo sapien
ccggagcattttttcagtgtcagca

SEQ ID NO: 4250563 - DNA, 25 bp, Homo sapien
ggccggaactaccttctcactggag

SEQ ID NO: 4250564 - DNA, 25 bp, Homo sapien
agcagggtctgcactggccggaact

SEQ ID NO: 4250565 - DNA, 25 bp, Homo sapien
tgctgctgagggtgcgccggggcgc

SEQ ID NO: 4250566 - DNA, 25 bp, Homo sapien
tgtgctgctgagggtgcgccggggc

SEQ ID NO: 4250567 - DNA, 25 bp, Homo sapien
atgtgctgctgagggtgcgccgggg

SEQ ID NO: 4250568 - DNA, 25 bp, Homo sapien
gtgctgctgagggtgcgccggggcg

SEQ ID NO: 4250569 - DNA, 25 bp, Homo sapien
agcacccagcttggcgcgggccgag

SEQ ID NO: 4250570 - DNA, 25 bp, Homo sapien
gcaacagcacccagcttggcgcggg

SEQ ID NO: 4250571 - DNA, 25 bp, Homo sapien
agcaacagcacccagcttggcgcgg

SEQ ID NO: 4250572 - DNA, 25 bp, Homo sapien
aacagcacccagcttggcgcgggcc

SEQ ID NO: 4250573 - DNA, 25 bp, Homo sapien
agacagtgacagagaaggacggacc

SEQ ID NO: 4250574 - DNA, 25 bp, Homo sapien
cagatccgcgactgagcctgtgagg

SEQ ID NO: 4250575 - DNA, 25 bp, Homo sapien
ctcagtaagatgcagagggaagcct

SEQ ID NO: 4250576 - DNA, 25 bp, Homo sapien
cctgcctaagtcatgaagcgatctg

SEQ ID NO: 4250577 - DNA, 25 bp, Homo sapien
tctaggttatgggagggccccactc

SEQ ID NO: 4250578 - DNA, 25 bp, Homo sapien
gggactgcccccatgggatatttct

SEQ ID NO: 4250579 - DNA, 25 bp, Homo sapien
accttgagtgacctgcccctcagtg

SEQ ID NO: 4250580 - DNA, 25 bp, Homo sapien
gaagctgacattctgaccttgagtg

SEQ ID NO: 4250581 - DNA, 25 bp, Homo sapien
ccactggtgccgttgctgcgttctt

SEQ ID NO: 4250582 - DNA, 25 bp, Homo sapien
ttctctgtataacttgtgattccag

SEQ ID NO: 4250583 - DNA, 25 bp, Homo sapien
ttcctgttcgtgcttgtaatgctca

SEQ ID NO: 4250584 - DNA, 25 bp, Homo sapien
gtttttcctatgcagtgtcagctcc

SEQ ID NO: 4250585 - DNA, 25 bp, Homo sapien
tcccaaagcttgacctgtgtacaga

SEQ ID NO: 4250586 - DNA, 25 bp, Homo sapien
tccagggtccaaagattgaggagct

SEQ ID NO: 4250587 - DNA, 25 bp, Homo sapien
catgtgtgcgcttgtgtggacctga

SEQ ID NO: 4250588 - DNA, 25 bp, Homo sapien
cagcggtggctcttgaggaatcctc

SEQ ID NO: 4250589 - DNA, 25 bp, Homo sapien
gttcattaaaccaggcctcagcttc

SEQ ID NO: 4250590 - DNA, 25 bp, Homo sapien
agcagccgcctctaacaaacaccat

SEQ ID NO: 4250591 - DNA, 25 bp, Homo sapien
ctgggaacgggcaccaagcagccgc

SEQ ID NO: 4250592 - DNA, 25 bp, Homo sapien
gagcagatgctgaggcagttcatta

SEQ ID NO: 4250593 - DNA, 25 bp, Homo sapien
tgtaacaagagttacgtatccaggg

SEQ ID NO: 4250594 - DNA, 25 bp, Homo sapien
cctctatactgtcatgtcaccgttc

SEQ ID NO: 4250595 - DNA, 25 bp, Homo sapien
accgttctgaactcccagatctgag
